United States Patent Application Publication US 2002/0048763 A1 - sequence listing, part 6

SEQ ID NO: 17534 - DNA, 184 bp, Homo sapiens
  MAP TO AC004936.2; EXPRESSED IN HBL100, SIGNAL = 1.1; EXPRESSED IN HELA, SIGNAL = 1.9; EXPRESSED IN ADULT LIVER, SIGNAL = 2.5; EXPRESSED IN HEART, SIGNAL = 0.98; EXPRESSED IN PLACENTA, SIGNAL = 0.96; EXPRESSED IN FETAL LIVER, SIGNAL = 1.4; EXPRESSED IN LUNG, SIGNAL = 1.4; EXPRESSED IN BONE MARROW, SIGNAL = 0.81; EXPRESSED IN BT474, SIGNAL = 1.2; NT HIT: U82225.1, EVALUE 3.60e-01; SWISSPROT HIT: P34281, EVALUE 8.40e+00; EST_HUMAN HIT: H99646.1, EVALUE 1.00e-04
gttttggtctattgtgttctcatttttatcttcttttttagtttttggttttagttgtttctctttttttttaattttctttttgatttcttcatgacagtgattggtcaagaagatgttgtttactttccagatatttgcgaattttccaatctttcttctatgactgatttctaggtttatt

SEQ ID NO: 17535 - DNA, 441 bp, Homo sapiens
  MAP TO AC004967.2; EXPRESSED IN BT474, SIGNAL = 2.6; EXPRESSED IN BONE MARROW, SIGNAL = 1.2; EXPRESSED IN ADULT LIVER, SIGNAL = 2.2; EXPRESSED IN HEART, SIGNAL = 1.7; EXPRESSED IN PLACENTA, SIGNAL = 1.5; EXPRESSED IN LUNG, SIGNAL = 1.5; EXPRESSED IN HBL100, SIGNAL =   2; EXPRESSED IN FETAL LIVER, SIGNAL = 2.1; EXPRESSED IN HELA, SIGNAL = 1.5; EXPRESSED IN BRAIN, SIGNAL = 1.7; NT HIT: X87825.1, EVALUE 5.00e-12; SWISSPROT HIT: P35894, EVALUE 1.00e-26; EST_HUMAN HIT: BF345274.1, EVALUE 1.00e-123
agaattcctcctcctgggactctcagaggatccagaactgcagccggtcctcgctttgctctccctgtccctgtccatgtatctggtcatggtgctgaggaacctgctcagcatcctggctgtcagctctgtctctcccctccacacccccacctgtgctgggctgacatcggtttcaccttggccacggttcccaagatgattgtggacatgcagtcgcatagcagagtcatctctcatgcgggctgtctgacgcagatgtctttcttcatcctttttgcatgtatagaaggcatgctcctgactgtgatggcctatgactgctttgtagccatctgtcgccctctgcactacccagtcatcgtgaatcctcacctctgtgtcttcttcgttttggtgtcctttttccttagcctgttggattcccagctgcacagttga

SEQ ID NO: 17536 - DNA, 499 bp, Homo sapiens
  MAP TO AC004997.2; EXPRESSED IN HEART, SIGNAL = 3.4; EXPRESSED IN LUNG, SIGNAL = 4.2; EXPRESSED IN HELA, SIGNAL = 3.3; EXPRESSED IN ADULT LIVER, SIGNAL = 3.6; EXPRESSED IN BRAIN, SIGNAL = 3.5; EXPRESSED IN PLACENTA, SIGNAL =   4; EXPRESSED IN BT474, SIGNAL = 3.6; EXPRESSED IN BONE MARROW, SIGNAL = 3.7; EXPRESSED IN FETAL LIVER, SIGNAL = 2.9; EXPRESSED IN HBL100, SIGNAL = 3.6; SWISSPROT HIT: P47241, EVALUE 8.90e-02; EST_HUMAN HIT: BE738693.1, EVALUE 0.00e+00
ttacaagtaggtgtcctcactctcttgggacgtcaagctctcctgggagcggtggtgggctgagacctggggagccaaatcctgaggggctgagtccttgggggctgagtccttcgggggcacatgctgtgggggacatgcatctcctgcagcggccaccaccatggcttgatttggggctgggggcttctccagctgccctctccccttcatctgtttccgctgctccttctgggcctgcttgggtggcttgggcttggctttggagccagggaggggggcatctaggggcaggcggatggatggtgaaggttgtagggcaggccggggaccaggttctgcatccaagatagccttggcaccatgcagcctgggcggggagcggcactgcagctcaccccgggtctcctgccagcgccgcagctgaatgaggtgttcgcgctcaatctggcgctctgtcacgggcaactccaccacctgcaggggcagtgacacaggc

SEQ ID NO: 17537 - DNA, 258 bp, Homo sapiens
  MAP TO AC004997.2; EXPRESSED IN PLACENTA, SIGNAL = 2.8; EXPRESSED IN BT474, SIGNAL = 6.8; EXPRESSED IN BONE MARROW, SIGNAL = 2.1; EXPRESSED IN LUNG, SIGNAL = 3.2; EXPRESSED IN ADULT LIVER, SIGNAL = 2.9; EXPRESSED IN BRAIN, SIGNAL = 2.4; EXPRESSED IN HBL100, SIGNAL = 5.5; EXPRESSED IN FETAL LIVER, SIGNAL = 4.6; EXPRESSED IN HELA, SIGNAL =   3; EXPRESSED IN HEART, SIGNAL = 2.4; SWISSPROT HIT: Q15459, EVALUE 5.00e-45; EST_HUMAN HIT: AU125940.1, EVALUE 0.00e+00; NT HIT: gi11417964, EVALUE 0.00e+00
cttggtgtactgttccactagcttcgtgaagtagttgaagaggctgtgctgtgggcggagaaagtcaaactggtagttgcgctgctctttctgcatcagctgggtcagaaactggcgcccattcctggccacaaactgagccgtcagcttcaccacatccaagtcgaaggctgagatagagggaggatcagcaatgaactcaaactcaggaggaggctctttgggcacgatggtctcttggattacttgggcttggac

SEQ ID NO: 17538 - DNA, 186 bp, Homo sapiens
  MAP TO AC005006.2; EXPRESSED IN PLACENTA, SIGNAL = 1.4; EXPRESSED IN FETAL LIVER, SIGNAL = 3.4; EXPRESSED IN LUNG, SIGNAL = 1.3; EXPRESSED IN BT474, SIGNAL = 3.3; EXPRESSED IN HEART, SIGNAL = 1.3; EXPRESSED IN BRAIN, SIGNAL =   2; EXPRESSED IN ADULT LIVER, SIGNAL = 1.8; EXPRESSED IN HELA, SIGNAL = 2.8; EXPRESSED IN HBL100, SIGNAL = 4.6; EXPRESSED IN BONE MARROW, SIGNAL = 1.5; EST_HUMAN HIT: BE894946.1, EVALUE 1.00e-100; NT HIT: gi11417972, EVALUE 1.00e-100; SWISSPROT HIT: P53261, EVALUE 6.00e-07
ctgggtcctctccccgctgcagagccagcagcttcagcttctcaggtggaacgtaatctccttccttctcggtcacaaagggtgaaaggtgtgggggcagctgcaccccagagaagtactctgccacggggagaaggagcctggcgttcactgagtcaaacacccactggggctgcacgtagcacc

SEQ ID NO: 17539 - DNA, 173 bp, Homo sapiens
  MAP TO AC005006.2; EXPRESSED IN PLACENTA, SIGNAL = 1.2; EXPRESSED IN BT474, SIGNAL = 2.9; EXPRESSED IN BONE MARROW, SIGNAL = 1.4; EXPRESSED IN HBL100, SIGNAL =   4; EXPRESSED IN LUNG, SIGNAL = 1.2; EXPRESSED IN HELA, SIGNAL = 3.3; EXPRESSED IN ADULT LIVER, SIGNAL = 1.4; EXPRESSED IN FETAL LIVER, SIGNAL = 2.4; EXPRESSED IN HEART, SIGNAL = 1.3; EXPRESSED IN BRAIN, SIGNAL = 1.7; SWISSPROT HIT: P53261, EVALUE 2.00e-07; EST_HUMAN HIT: AU141038.1, EVALUE 8.00e-93; NT HIT: gi7657454, EVALUE 4.00e-93
cttgcgcagggcacgggcagcgataatgtagtgcatgaactccacagtgagccggcggcacagctgaatggtctgcacgtggcacttgccagtccgcgggaaggtggaaaacaggaagcacatggagagggcatcgtccaggtcccgcagggcatcgatgaacgtgggatacc

SEQ ID NO: 17540 - DNA, 141 bp, Homo sapiens
  MAP TO AC005037.2; EXPRESSED IN FETAL LIVER, SIGNAL = 1.2; EXPRESSED IN HELA, SIGNAL = 1.9; EXPRESSED IN ADULT LIVER, SIGNAL = 1.3; EXPRESSED IN PLACENTA, SIGNAL = 1.3; EXPRESSED IN BONE MARROW, SIGNAL = 0.96; EXPRESSED IN BT474, SIGNAL = 1.2; EXPRESSED IN HEART, SIGNAL = 1.3; EXPRESSED IN BRAIN, SIGNAL = 1.1; EXPRESSED IN LUNG, SIGNAL = 1.3; EXPRESSED IN HBL100, SIGNAL = 1.2; SWISSPROT HIT: Q13416, EVALUE 2.00e-20; NT HIT: U27459.1, EVALUE 2.00e-61; EST_HUMAN HIT: AU130158.1, EVALUE 3.00e-61
ctaaattgaagaaggagcgagcgcagcttttggtcaaccccaaaaaaataataaagaagccagaatatgatttggaggaagatgaccaggaggtcttaaaagatcagaactatgtggaaattatgggaagagatgttcaag

SEQ ID NO: 17541 - DNA, 229 bp, Homo sapiens
  MAP TO AC005037.2; EXPRESSED IN LUNG, SIGNAL = 4.3; EXPRESSED IN HEART, SIGNAL = 0.88; EXPRESSED IN PLACENTA, SIGNAL = 2.2; EXPRESSED IN BT474, SIGNAL =   2; EXPRESSED IN HBL100, SIGNAL = 1.8; EXPRESSED IN FETAL LIVER, SIGNAL = 3.4; EXPRESSED IN BRAIN, SIGNAL = 1.5; EXPRESSED IN BONE MARROW, SIGNAL = 6.2; EXPRESSED IN HELA, SIGNAL = 1.1; EXPRESSED IN ADULT LIVER, SIGNAL = 1.7; EST_HUMAN HIT: AU118544.1, EVALUE 1.00e-126; NT HIT: gi4758007, EVALUE 1.00e-126; SWISSPROT HIT: P49759, EVALUE 3.00e-23
ccattatttggaaagcaggtctataaatgagaaagattatcatagtcgacgctacattgatgagtacagaaatgactacactcaaggatgtgaacctggacatcgccaaagagaccatgaaagccggtatcagaaccatagtagcaagtcttctggtagaagtggaagaagtagttataaaagcaaacacaggattcaccacagtacttcacatcgtcgttcacatggg

SEQ ID NO: 17542 - DNA, 188 bp, Homo sapiens
  MAP TO AC005046.2; EXPRESSED IN LUNG, SIGNAL = 1.8; EXPRESSED IN HELA, SIGNAL = 1.5; EXPRESSED IN ADULT LIVER, SIGNAL = 5.9; EXPRESSED IN BRAIN, SIGNAL = 1.6; EXPRESSED IN HEART, SIGNAL = 1.5; EXPRESSED IN PLACENTA, SIGNAL = 1.1; EXPRESSED IN BT474, SIGNAL = 0.98; EXPRESSED IN BONE MARROW, SIGNAL = 1.1; EXPRESSED IN HBL100, SIGNAL = 0.81; EXPRESSED IN FETAL LIVER, SIGNAL = 1.2; EST_HUMAN HIT: AW604046.1, EVALUE 3.00e-39; SWISSPROT HIT: P40879, EVALUE 2.00e-12; NT HIT: gi4557534, EVALUE 1.00e-102
ctggatgattccagaaagcactgtgactgatgccgccgccgccaccctcaccctctcgtcatccagtagtgaagaattattcgagttgttaggcaatcccaaagtagttgcattgcgatctgggactgcttttgaaactgctcctgaaactgctagtcccaccatcatactcagaatcggaaacggac

SEQ ID NO: 17543 - DNA, 144 bp, Homo sapiens
  MAP TO AC005046.2; EXPRESSED IN PLACENTA, SIGNAL = 1.7; EXPRESSED IN BT474, SIGNAL = 2.9; EXPRESSED IN LUNG, SIGNAL = 1.1; EXPRESSED IN BRAIN, SIGNAL = 1.4; EXPRESSED IN BONE MARROW, SIGNAL = 1.4; EXPRESSED IN HBL100, SIGNAL = 1.9; EXPRESSED IN FETAL LIVER, SIGNAL = 2.8; EXPRESSED IN HELA, SIGNAL = 1.9; EXPRESSED IN ADULT LIVER, SIGNAL = 3.1; EXPRESSED IN HEART, SIGNAL = 4.1; NT HIT: gi5016092, EVALUE 7.00e-76; SWISSPROT HIT: P09622, EVALUE 5.00e-22; EST_HUMAN HIT: R55275.1, EVALUE 1.00e-75
gttgttcatgtcaatggatatggaaagataactggcaaaaatcaagtcactgctacgaaagctgatggcggcactcaggttattgatacaaagaacattcttatagccacgggttcagaagttactccttttcctggaatcacg

SEQ ID NO: 17544 - DNA, 265 bp, Homo sapiens
  MAP TO AC005046.2; EXPRESSED IN HBL100, SIGNAL = 2.6; EXPRESSED IN ADULT LIVER, SIGNAL = 0.8; EXPRESSED IN HEART, SIGNAL = 1.2; EXPRESSED IN BT474, SIGNAL =   1; EXPRESSED IN HELA, SIGNAL = 1.6; EXPRESSED IN PLACENTA, SIGNAL = 1.7; EXPRESSED IN FETAL LIVER, SIGNAL = 1.9; EXPRESSED IN LUNG, SIGNAL = 1.5; EST_HUMAN HIT: AU130889.1, EVALUE 1.00e-122; NT HIT: M61936.1, EVALUE 1.00e-126; SWISSPROT HIT: P07942, EVALUE 3.00e-47
agccagagatcactacattctccttactttcagcatctgcatacctttcacagttatgacccatggtgtagtcctggcagttcaagcactccccagtcactgggtcgcagtcatcggcgtggccattgcactggcagggctggcaacttggaaagccccagtgcccaggtaagcaccgatcacactgccgagcatacactccctggaaacagtggcactggccagtgacgggattgcagaaggcattgacagatccttgcagatg

SEQ ID NO: 17545 - DNA, 101 bp, Homo sapiens
  MAP TO AB023056.1; EXPRESSED IN HBL100, SIGNAL =  14; EXPRESSED IN BRAIN, SIGNAL = 5.4; EXPRESSED IN PLACENTA, SIGNAL = 7.9; EXPRESSED IN BT474, SIGNAL = 5.4; EXPRESSED IN BONE MARROW, SIGNAL = 6.8; EXPRESSED IN FETAL LIVER, SIGNAL = 9.3; EXPRESSED IN LUNG, SIGNAL = 5.6; EXPRESSED IN HELA, SIGNAL = 5.2; EXPRESSED IN ADULT LIVER, SIGNAL = 4.5; EXPRESSED IN HEART, SIGNAL = 4.9; EST_HUMAN HIT: BE218528.1, EVALUE 1.00e-05; NT HIT: AF055066.1, EVALUE 2.00e-50
caggcgatgaaagttggggtatttgggaggggaatgagagccacgttgccatctacatccctgtgagaaagaaactcacccattcaaacccaaagaataga

SEQ ID NO: 17546 - DNA, 320 bp, Homo sapiens
  MAP TO AB016897.1; EXPRESSED IN LUNG, SIGNAL = 1.8; EXPRESSED IN PLACENTA, SIGNAL = 1.6; EXPRESSED IN BT474, SIGNAL = 2.3; EXPRESSED IN BONE MARROW, SIGNAL = 1.9; EXPRESSED IN HBL100, SIGNAL = 1.6; EXPRESSED IN FETAL LIVER, SIGNAL = 1.7; EXPRESSED IN HELA, SIGNAL = 1.8; EXPRESSED IN BRAIN, SIGNAL = 2.1; EXPRESSED IN ADULT LIVER, SIGNAL = 1.4; EXPRESSED IN HEART, SIGNAL = 1.6; NT HIT: AB011399.1, EVALUE 0.00e+00; EST_HUMAN HIT: AL041823.1, EVALUE 0.00e+00; SWISSPROT HIT: P55196, EVALUE 2.00e-48
cattttgctcctcttgtcctctcaccctgtctgggcagatgatgtgctgcacacgctcacaggagccatgtccttgctacgacgctgcagagtcaatgccgccctgaccatccagctcttctctcagctcttccacttcatcaatatgtggctgttcaatagattggtgaccgacccagattcggggctgtgctcccattactggggtgcgattatccgtcagcagttgggccatattgaagcctgggctgagaagcaggggctggaactggctgcggactgtcatctgagcaggatcgtgcaggtgattgctggtgcca

SEQ ID NO: 17547 - DNA, 142 bp, Homo sapiens
  MAP TO AB016897.1; EXPRESSED IN HBL100, SIGNAL = 3.7; EXPRESSED IN FETAL LIVER, SIGNAL = 3.4; EXPRESSED IN BRAIN, SIGNAL = 4.5; EXPRESSED IN HEART, SIGNAL =   4; EXPRESSED IN ADULT LIVER, SIGNAL = 3.4; EXPRESSED IN PLACENTA, SIGNAL = 3.1; EXPRESSED IN BT474, SIGNAL = 3.1; EXPRESSED IN BONE MARROW, SIGNAL = 4.4; EXPRESSED IN LUNG, SIGNAL = 3.9; EXPRESSED IN HELA, SIGNAL = 3.5; NT HIT: AL114480.1, EVALUE 2.70e-01; SWISSPROT HIT: Q9UJU5, EVALUE 7.70e-01; EST_HUMAN HIT: BE158243.1, EVALUE 7.40e+00
ggagaggtttcccaggaacaggtcctcgacgatgcttctcatcatcagcctcttcctccccatcatgacagcccttttggtccggtgggccatcctcttctcttacctcaccagcacggaagatttgttgagatgtatgcac

SEQ ID NO: 17548 - DNA, 110 bp, Homo sapiens
  MAP TO AB016897.1; EXPRESSED IN BRAIN, SIGNAL = 4.2; EXPRESSED IN HEART, SIGNAL = 3.2; EXPRESSED IN HBL100, SIGNAL = 2.7; EXPRESSED IN PLACENTA, SIGNAL = 4.7; EXPRESSED IN BT474, SIGNAL =   3; EXPRESSED IN BONE MARROW, SIGNAL = 4.9; EXPRESSED IN FETAL LIVER, SIGNAL = 3.8; EXPRESSED IN HELA, SIGNAL =   4; EXPRESSED IN ADULT LIVER, SIGNAL = 3.9; EXPRESSED IN LUNG, SIGNAL = 3.9; EST_HUMAN HIT: BF129796.1, EVALUE 3.50e-01; NT HIT: AB037727.1, EVALUE 9.40e-01
ctcgggccctgtccacccacgttcccacaaatatcaatgccagaattgggccacacaagcctcccgtgctggtgcctgcggctggcggagacagacacgcaccacagcag

SEQ ID NO: 17549 - DNA, 83 bp, Homo sapiens
  MAP TO Z99756.7; EXPRESSED IN BT474, SIGNAL = 6.6; EXPRESSED IN HBL100, SIGNAL = 6.8; EXPRESSED IN PLACENTA, SIGNAL = 7.3; EXPRESSED IN FETAL LIVER, SIGNAL = 8.9; EXPRESSED IN HELA, SIGNAL = 7.7; EXPRESSED IN ADULT LIVER, SIGNAL = 6.2; EXPRESSED IN HEART, SIGNAL = 5.7; EXPRESSED IN BONE MARROW, SIGNAL = 5.9; EXPRESSED IN BRAIN, SIGNAL = 7.1; EXPRESSED IN LUNG, SIGNAL =  10; NT HIT: AF003249.1, EVALUE 4.30e-02
gaatttccagctcatgcagccccaccagaccacaagcttctggagaccaaggactatgttgcaccataactatcacctcccag

SEQ ID NO: 17550 - DNA, 478 bp, Homo sapiens
  MAP TO AB023049.1; EXPRESSED IN BT474, SIGNAL = 4.6; EXPRESSED IN LUNG, SIGNAL =   3; EXPRESSED IN HELA, SIGNAL = 3.2; EXPRESSED IN ADULT LIVER, SIGNAL = 2.3; EXPRESSED IN PLACENTA, SIGNAL =   3; EXPRESSED IN BONE MARROW, SIGNAL = 2.8; EXPRESSED IN HBL100, SIGNAL = 3.4; EXPRESSED IN FETAL LIVER, SIGNAL = 3.3; EXPRESSED IN BRAIN, SIGNAL = 2.3; EXPRESSED IN HEART, SIGNAL =   3; SWISSPROT HIT: Q92599, EVALUE 1.30e+00; EST_HUMAN HIT: BE905563.1, EVALUE 1.00e-110; NT HIT: gi11419108, EVALUE 0.00e+00
tgatgaagaggggcattccccggtcctgggcggccttgggccgccttttgccttcaatttgaacagtgacacagatgtggaagaaggtcagcaaccagccacagaggaggcctcctcagctgccagaagaggtgccactgtagaggcaaagcagtctgaagctaaagttgtaactgaaatccagcttgaaaaggatcagcctttagtgaaggagagggacaatgatacaaaagtcaagaggggtgcagggaatggggtggttccagctggggtgattctggagaggagccaacctcctggagaggacagtgacacagatgtggatgatgacagcaggcctcctggaaggccagctgaggtccatttggaaagggctcagccttttggcttcatcgacagcgacactgatgcggaagaagagaggatcccagcaaccccagttgtcattcctatgaagaagaggaagatcttccatgga

SEQ ID NO: 17551 - DNA, 87 bp, Homo sapiens
  MAP TO Z98749.11; EXPRESSED IN PLACENTA, SIGNAL = 1.4; EXPRESSED IN BT474, SIGNAL = 1.8; EXPRESSED IN HEART, SIGNAL = 1.4; EXPRESSED IN BRAIN, SIGNAL = 1.1; EXPRESSED IN ADULT LIVER, SIGNAL = 1.1; EXPRESSED IN HELA, SIGNAL = 1.2; EXPRESSED IN LUNG, SIGNAL = 1.3; EXPRESSED IN FETAL LIVER, SIGNAL =   1; EXPRESSED IN HBL100, SIGNAL = 1.4; EXPRESSED IN BONE MARROW, SIGNAL = 1.5; EST_HUMAN HIT: AA495980.1, EVALUE 2.70e-01; NT HIT: AL163284.2, EVALUE 1.50e-01; SWISSPROT HIT: P98161, EVALUE 1.80e+00
acctggtggggaaatgatcattctcctggccaacccgtgcccctctctgtcctaaatgcttttcacactctgcccctgggaggctgg

SEQ ID NO: 17552 - DNA, 153 bp, Homo sapiens
  MAP TO Z83851.17; EXPRESSED IN PLACENTA, SIGNAL = 1.7; EXPRESSED IN BONE MARROW, SIGNAL = 2.9; EXPRESSED IN HBL100, SIGNAL = 1.9; EXPRESSED IN BRAIN, SIGNAL = 1.4; EXPRESSED IN HEART, SIGNAL = 1.1; EXPRESSED IN BT474, SIGNAL = 1.5; EXPRESSED IN HELA, SIGNAL = 1.4; EXPRESSED IN FETAL LIVER, SIGNAL = 1.2; EXPRESSED IN LUNG, SIGNAL = 1.5; EXPRESSED IN ADULT LIVER, SIGNAL = 1.1; NT HIT: S70609.1, EVALUE 8.80e-02; EST_HUMAN HIT: AV753920.1, EVALUE 8.10e+00; SWISSPROT HIT: Q10586, EVALUE 2.00e-01
ggagacagaggagagccagacagacaaggcgtgcaccttggggagacagacgtgaccacacaaccaccaccacagggtgagggggctatggtgggggctggactgggtaaggcacgtggcctggtccctccaaagaggaatccacctgcaagg

SEQ ID NO: 17553 - DNA, 211 bp, Homo sapiens
  MAP TO Z83845.14; EXPRESSED IN FETAL LIVER, SIGNAL = 1.3; EXPRESSED IN LUNG, SIGNAL = 0.77; EXPRESSED IN HELA, SIGNAL = 1.1; EXPRESSED IN HEART, SIGNAL = 1.8; EXPRESSED IN PLACENTA, SIGNAL =   3; EXPRESSED IN ADULT LIVER, SIGNAL = 0.73; EXPRESSED IN BRAIN, SIGNAL = 1.4; EXPRESSED IN BT474, SIGNAL = 1.3; EXPRESSED IN BONE MARROW, SIGNAL = 0.78; EXPRESSED IN HBL100, SIGNAL = 1.4; NT HIT: gi5174702, EVALUE 1.00e-115; SWISSPROT HIT: Q15750, EVALUE 5.00e-36; EST_HUMAN HIT: BE898567.1, EVALUE 1.00e-115
atgattgacactgagtttgccaagcagacctccctggacgcagtggcccaggccgtcgtggaccgggtgaagcgcatccacagcgacaccttcgccagtggtggggagcgtgccaggttctgcccccggcacgaggacatgaccctgctagtgaggaactttggctacccgctgggcgaaatgagccagcccacaccgagcccagccccag

SEQ ID NO: 17554 - DNA, 194 bp, Homo sapiens
  MAP TO Z83845.14; EXPRESSED IN BT474, SIGNAL =   8; EXPRESSED IN BONE MARROW, SIGNAL =  10; EXPRESSED IN HBL100, SIGNAL = 5.3; EXPRESSED IN HELA, SIGNAL = 4.7; EXPRESSED IN BRAIN, SIGNAL = 5.7; EXPRESSED IN PLACENTA, SIGNAL = 8.4; EXPRESSED IN HEART, SIGNAL = 4.4; EXPRESSED IN ADULT LIVER, SIGNAL = 4.1; EXPRESSED IN LUNG, SIGNAL =   6; EXPRESSED IN FETAL LIVER, SIGNAL = 8.9; NT HIT: gi11418147, EVALUE 3.00e-82; SWISSPROT HIT: Q15750, EVALUE 8.00e-24; EST_HUMAN HIT: AL118967.1, EVALUE 5.00e-82
gagtgagaacaactgcttcctgtatggggtcttcaacggctatgatggcaaccgagtgaccaacttcgtggcccagcggctgtccgcagagctcctgctgggccagctgaatgccgagcacgccgaggccgatgtgcggcgtgtgctgctgcaggtaatggtgccggggccaacagtgacccagccacatcatg

SEQ ID NO: 17555 - DNA, 239 bp, Homo sapiens
  MAP TO L29074.1; EXPRESSED IN FETAL LIVER, SIGNAL = 1.9e+02; EXPRESSED IN LUNG, SIGNAL = 1.3e+02; EXPRESSED IN HELA, SIGNAL = 3.5e+02; EXPRESSED IN ADULT LIVER, SIGNAL = 1e+02; EXPRESSED IN BRAIN, SIGNAL =  40; EXPRESSED IN HBL100, SIGNAL =  84; EXPRESSED IN HEART, SIGNAL =  50; EXPRESSED IN PLACENTA, SIGNAL =  15; EXPRESSED IN BT474, SIGNAL = 2e+02; EXPRESSED IN BONE MARROW, SIGNAL =  57; SWISSPROT HIT: P02794, EVALUE 6.00e-36; NT HIT: L20941.1, EVALUE 1.00e-115; EST_HUMAN HIT: BF684553.1, EVALUE 1.00e-115
gagctctacgcctcctacgtttacctgtccatgtcttactactttgaccacgatgatgtggctttgaagaactttgccaaatactttcttcaccaatctcatgaggagagggaacatgctgaggaactgatgaagctgcagaaccaatgaggtggccgaatcttccttcaggatatcaagaaaccagactgtgatgactgggagcgggctgaatgagatggagtgtgcattacatttgg

SEQ ID NO: 17556 - DNA, 145 bp, Homo sapiens
  MAP TO L29074.1; EXPRESSED IN PLACENTA, SIGNAL = 1.8; EXPRESSED IN BT474, SIGNAL = 2.2; EXPRESSED IN LUNG, SIGNAL = 1.9; EXPRESSED IN HELA, SIGNAL = 2.7; EXPRESSED IN FETAL LIVER, SIGNAL = 2.3; EXPRESSED IN BONE MARROW, SIGNAL =   2; EXPRESSED IN HBL100, SIGNAL = 2.7; EXPRESSED IN ADULT LIVER, SIGNAL =   2; EXPRESSED IN BRAIN, SIGNAL = 2.4; EXPRESSED IN HEART, SIGNAL =   2; NT HIT: AL161559.2, EVALUE 1.10e+00; SWISSPROT HIT: P02921, EVALUE 7.70e-01; EST_HUMAN HIT: BF571462.1, EVALUE 4.90e-01
agtttggagtattgcaagtttggagcaagtttggagcaaggaaatttgagaaagaagtatgtgaattgatctagaatgtatgtcttgcatatgaatatttatcaaaaggttctctttgtaggagagctgctaaatagtcagatgg

SEQ ID NO: 17557 - DNA, 212 bp, Homo sapiens
  MAP TO L29074.1; EXPRESSED IN HEART, SIGNAL = 0.79; EXPRESSED IN BRAIN, SIGNAL = 0.98; EXPRESSED IN PLACENTA, SIGNAL = 1.8; EXPRESSED IN BT474, SIGNAL = 0.87; EXPRESSED IN BONE MARROW, SIGNAL = 1.4; EXPRESSED IN FETAL LIVER, SIGNAL = 1.1; EXPRESSED IN HELA, SIGNAL = 1.1; EXPRESSED IN ADULT LIVER, SIGNAL = 1.3; EXPRESSED IN HBL100, SIGNAL = 2.4; EXPRESSED IN LUNG, SIGNAL =   1; EST_HUMAN HIT: AI867710.1, EVALUE 7.00e-66; NT HIT: gi11420701, EVALUE 5.00e-66; SWISSPROT HIT: Q06787, EVALUE 5.00e-07
gaactaattctgaagcatcaaatgcttctgaaacagaatctgaccacagagacgaactcagtgattggtcattagctccaacagaggaagagagggagagcttcctgcgcagaggagacggacggcggcgtggagggggaggaagaggacaaggaggaagaggacgtggaggaggcttcaaaggtatggagatcttcattaagaaatcaaag

SEQ ID NO: 17558 - DNA, 331 bp, Homo sapiens
  MAP TO AP000339.1; EXPRESSED IN BONE MARROW, SIGNAL = 8.6; EXPRESSED IN ADULT LIVER, SIGNAL = 7.7; EXPRESSED IN PLACENTA, SIGNAL = 6.2; EXPRESSED IN BT474, SIGNAL = 6.9; EXPRESSED IN LUNG, SIGNAL =  12; EXPRESSED IN HELA, SIGNAL =  10; EXPRESSED IN BRAIN, SIGNAL =  12; EXPRESSED IN HBL100, SIGNAL = 5.9; EXPRESSED IN FETAL LIVER, SIGNAL = 6.7; EXPRESSED IN HEART, SIGNAL =  11; EST_HUMAN HIT: AI684541.1, EVALUE 2.00e-48; SWISSPROT HIT: Q08050, EVALUE 3.00e-06; NT HIT: AL163246.2, EVALUE 9.00e-47
tctgtcgttgcctgctgccatccacataagatgtgacttgctccttcttgccttctgccatgattgtgaggcttccccagccacgtggaactgtgaattctccattaaacctctttcctttgtatgttgcccagtctcaggtatgtctttatcagaagtgtgaaaatggactaatacaaggacttggggaaagggtgggaagggagtgagggataaaatactataaatagggtgcagtgtatattgctcgggtgatgggtacaccaaaatctcgcaaatcaccaccaaagaacttattagtgtaaccaaacaccacctgtttcccaataac

SEQ ID NO: 17559 - DNA, 289 bp, Homo sapiens
  MAP TO AP000338.1; EXPRESSED IN LUNG, SIGNAL = 1.2; EXPRESSED IN BRAIN, SIGNAL = 1.2; EXPRESSED IN HEART, SIGNAL = 1.2; EXPRESSED IN HBL100, SIGNAL = 1.6; EXPRESSED IN FETAL LIVER, SIGNAL = 1.2; EXPRESSED IN PLACENTA, SIGNAL = 1.2; EXPRESSED IN BT474, SIGNAL = 1.5; EXPRESSED IN BONE MARROW, SIGNAL = 2.4; EXPRESSED IN HELA, SIGNAL = 0.95; EXPRESSED IN ADULT LIVER, SIGNAL = 1.1; EST_HUMAN HIT: BF346610.1, EVALUE 0.00e+00; SWISSPROT HIT: Q14689, EVALUE 1.00e-18; NT HIT: D80006.1, EVALUE 0.00e+00
tgccgtattcacctggaccaacctgctggtggtggtggtggagctggatgggctagagcaggatgccctggacctggtggccctggtgaccaacgtggtgctggaggagcactacctggtcgtgggagtggtggtcatcgtggacccaggggtgatccctatcaactctcggggtgagaagcagcgcatgcacctgcgggacggcttcctggctgaccagctggaccccatctatgtcgcctacaacatgtgagcgcagcacaccggcccaggtgccggagatgaatga

SEQ ID NO: 17560 - DNA, 145 bp, Homo sapiens
  MAP TO AP000338.1; EXPRESSED IN LUNG, SIGNAL = 3.2; EXPRESSED IN BRAIN, SIGNAL = 1.6; EXPRESSED IN HEART, SIGNAL = 2.4; EXPRESSED IN BT474, SIGNAL = 2.4; EXPRESSED IN BONE MARROW, SIGNAL = 3.2; EXPRESSED IN PLACENTA, SIGNAL = 1.9; EXPRESSED IN ADULT LIVER, SIGNAL = 2.6; EXPRESSED IN HELA, SIGNAL = 4.8; EXPRESSED IN FETAL LIVER, SIGNAL = 2.9; EXPRESSED IN HBL100, SIGNAL = 2.8; EST_HUMAN HIT: AU137559.1, EVALUE 1.00e-35; NT HIT: D80006.1, EVALUE 4.00e-59; SWISSPROT HIT: Q14689, EVALUE 2.00e-15
gatcgctgtgttctctgtgaccgtgctgcacgacgaccggattgtcctggtggctgagcagcggccggatgcctcggaggaggacagcttccagtggatgagccgtgtgctgcaggtgggcgccccggcacggcctatggttcgg

SEQ ID NO: 17561 - DNA, 181 bp, Homo sapiens
  MAP TO AP000315.1; EXPRESSED IN BRAIN, SIGNAL = 1.6; EXPRESSED IN HEART, SIGNAL = 2.7; EXPRESSED IN PLACENTA, SIGNAL = 5.6; EXPRESSED IN HBL100, SIGNAL =  48; EXPRESSED IN BT474, SIGNAL =  21; EXPRESSED IN BONE MARROW, SIGNAL =  29; EXPRESSED IN FETAL LIVER, SIGNAL =  23; EXPRESSED IN LUNG, SIGNAL = 6.6; EXPRESSED IN HELA, SIGNAL = 9.7; EXPRESSED IN ADULT LIVER, SIGNAL = 8.1; SWISSPROT HIT: Q24186, EVALUE 1.00e-17; NT HIT: gi4506728, EVALUE 4.00e-38; EST_HUMAN HIT: AA814196.1, EVALUE 3.00e-40
aggagcccttggtggcagtgatgagctcatctgccaggcactcagcaatggtcatgatctcccggagggcaccctcaagagtgcctgtgcacagcaaccaggtggtctgattcacatggtgcagtggggacacgtccacagcctgtcatctcacagtccctgctcacccaaagcctgtgga

SEQ ID NO: 17562 - DNA, 129 bp, Homo sapiens
  MAP TO AP000295.1; EXPRESSED IN BONE MARROW, SIGNAL = 1.7; EXPRESSED IN FETAL LIVER, SIGNAL = 1.6; EXPRESSED IN PLACENTA, SIGNAL = 2.4; EXPRESSED IN HEART, SIGNAL = 1.5; EXPRESSED IN BRAIN, SIGNAL = 0.92; EXPRESSED IN ADULT LIVER, SIGNAL =   2; EXPRESSED IN HELA, SIGNAL = 1.1; EXPRESSED IN LUNG, SIGNAL = 1.5; EXPRESSED IN HBL100, SIGNAL = 2.4; EXPRESSED IN BT474, SIGNAL = 1.7; EST_HUMAN HIT: AA489260.1, EVALUE 1.00e-66; SWISSPROT HIT: Q08334, EVALUE 5.00e-22; NT HIT: gi11526198, EVALUE 7.00e-67
gctgattctttacatatgcgtttcttagcccctaaaattgagaatgaatacgaaacttggactatgaagaatgtgtataactcatggacttataatgtgcaatactggaaaaacggtactgatgaaaag

SEQ ID NO: 17563 - DNA, 114 bp, Homo sapiens
  MAP TO AP000295.1; EXPRESSED IN BT474, SIGNAL = 1.2; EXPRESSED IN BONE MARROW, SIGNAL = 1.4; EXPRESSED IN ADULT LIVER, SIGNAL = 1.5; EXPRESSED IN HEART, SIGNAL = 1.6; EXPRESSED IN HBL100, SIGNAL = 1.7; EXPRESSED IN FETAL LIVER, SIGNAL = 1.8; EXPRESSED IN LUNG, SIGNAL = 1.6; EXPRESSED IN HELA, SIGNAL = 1.3; EXPRESSED IN BRAIN, SIGNAL = 0.88; EXPRESSED IN PLACENTA, SIGNAL = 1.9; NT HIT: Z17227.1, EVALUE 5.00e-58; EST_HUMAN HIT: AU134299.1, EVALUE 7.00e-58; SWISSPROT HIT: Q08334, EVALUE 1.00e-17
aatgtgatttctcaagtctttccaagtatggtgaccacaccttgagagtcagggctgaatttgcagatgagcattcagactgggtaaacatcaccttctgtcctgtggatgaca

SEQ ID NO: 17564 - DNA, 697 bp, Homo sapiens; identical to SEQ ID NO: 17069
  MAP TO AP000295.1; EXPRESSED IN BT474, SIGNAL =   2; EXPRESSED IN BONE MARROW, SIGNAL = 2.7; EXPRESSED IN HELA, SIGNAL = 2.7; EXPRESSED IN ADULT LIVER, SIGNAL = 1.9; EXPRESSED IN PLACENTA, SIGNAL = 2.7; EXPRESSED IN FETAL LIVER, SIGNAL = 2.9; EXPRESSED IN LUNG, SIGNAL = 2.8; EXPRESSED IN BRAIN, SIGNAL = 2.1; EXPRESSED IN HEART, SIGNAL = 2.6; EXPRESSED IN HBL100, SIGNAL = 2.9; SWISSPROT HIT: P48551, EVALUE 1.00e-123; NT HIT: X89772.1, EVALUE 0.00e+00; EST_HUMAN HIT: AA351431.1, EVALUE 0.00e+00

SEQ ID NO: 17565 - DNA, 162 bp, Homo sapiens
  MAP TO AP000289.1; EXPRESSED IN LUNG, SIGNAL = 2.2; EXPRESSED IN BRAIN, SIGNAL = 2.1; EXPRESSED IN HEART, SIGNAL = 1.7; EXPRESSED IN PLACENTA, SIGNAL = 3.6; EXPRESSED IN BONE MARROW, SIGNAL = 1.3; EXPRESSED IN HBL100, SIGNAL = 1.4; EXPRESSED IN FETAL LIVER, SIGNAL = 1.2; EXPRESSED IN ADULT LIVER, SIGNAL =   2; EXPRESSED IN BT474, SIGNAL = 1.4; EXPRESSED IN HELA, SIGNAL = 2.1; NT HIT: gi6753635, EVALUE 2.00e-02; EST_HUMAN HIT: AW296213.1, EVALUE 1.50e+00; SWISSPROT HIT: P08170, EVALUE 5.00e+00
tggtgatggtggtggtggtggtggtggtggtcgtggtgctggttttgttccatttgcttgcttccggtggcttcactcacatgcttcctctgcagtcctggttccccacagccatgggcagaaggtacagcctatatatgagtctctatcagtgcacaggtg

SEQ ID NO: 17566 - DNA, 152 bp, Homo sapiens
  MAP TO AP000279.1; EXPRESSED IN BT474, SIGNAL =   2; EXPRESSED IN HBL100, SIGNAL = 1.5; EXPRESSED IN HELA, SIGNAL = 1.4; EXPRESSED IN ADULT LIVER, SIGNAL = 0.93; EXPRESSED IN PLACENTA, SIGNAL = 1.3; EXPRESSED IN BONE MARROW, SIGNAL =   2; EXPRESSED IN FETAL LIVER, SIGNAL = 1.4; EXPRESSED IN LUNG, SIGNAL =   1; EXPRESSED IN BRAIN, SIGNAL = 1.4; EXPRESSED IN HEART, SIGNAL = 1.1; EST_HUMAN HIT: BF215569.1, EVALUE 8.00e-71; NT HIT: AF231920.1, EVALUE 1.00e-80; SWISSPROT HIT: Q04673, EVALUE 1.70e+00
ctcgcatttcttgcaaaaatttataccgttcaccaatacccccagaagacccttctaatctttcaatagccctggtagagtccactcggctttgcagatgtttctcatgctgctgtcgatttgttttgtgcaattctttcatggagtccaac

SEQ ID NO: 17567 - DNA, 248 bp, Homo sapiens
  MAP TO AP000275.1; EXPRESSED IN HELA, SIGNAL = 1.3; EXPRESSED IN BT474, SIGNAL = 1.2; EXPRESSED IN LUNG, SIGNAL = 1.5; EXPRESSED IN ADULT LIVER, SIGNAL = 1.3; EXPRESSED IN HEART, SIGNAL = 1.3; EXPRESSED IN PLACENTA, SIGNAL = 1.9; EXPRESSED IN FETAL LIVER, SIGNAL = 1.2; EXPRESSED IN BRAIN, SIGNAL = 2.2; EXPRESSED IN BONE MARROW, SIGNAL = 2.4; EXPRESSED IN HBL100, SIGNAL = 1.4; SWISSPROT HIT: O43426, EVALUE 1.00e-14; EST_HUMAN HIT: AI537253.1, EVALUE 1.00e-116; NT HIT: gi4507334, EVALUE 1.00e-116
tctgtgcactgggaggcccaggagttcttgacggtgctcggcttggtctgatgggaagggaaggtacaggaccctctgatattgtaggtgactggcagggactagttcggggtgaagagctgggggaagtaccaaggccggaacttgaagatggctggagatgctgaggaagaagttcctccacttcagcactatagtcatcaacatcacctaaggaaaagcaggcttgatcagagataactccattt

SEQ ID NO: 17568 - DNA, 298 bp, Homo sapiens
  MAP TO AP000275.1; EXPRESSED IN HBL100, SIGNAL = 3.1; EXPRESSED IN ADULT LIVER, SIGNAL = 2.3; EXPRESSED IN BRAIN, SIGNAL =   6; EXPRESSED IN BONE MARROW, SIGNAL = 3.4; EXPRESSED IN LUNG, SIGNAL = 4.5; EXPRESSED IN HELA, SIGNAL = 3.8; EXPRESSED IN HEART, SIGNAL = 2.4; EXPRESSED IN PLACENTA, SIGNAL = 3.3; EXPRESSED IN BT474, SIGNAL = 2.3; EXPRESSED IN FETAL LIVER, SIGNAL = 2.8; NT HIT: AB020717.1, EVALUE 0.00e+00; EST_HUMAN HIT: AU131904.1, EVALUE 9.00e-57; SWISSPROT HIT: O43426, EVALUE 4.00e-50
aaccatgaagttgcctctgattcttcagacttggctctaaatgggtttccaggagcagcagtcctgtcactgaaaggatttgtcctggtcaagccagtaataaatgggtttggagaacttcgcatattttcctgggattgactccgagctggaattggaggcattgttggcatgcaacttacagaactcaaaacattactttgcgttgcagaaggcaactgaatcaacctctttgggtctggggtgggaacaggtgacgtttgaacagatagctgagcctttgatacagcaagcagat

SEQ ID NO: 17569 - DNA, 102 bp, Homo sapiens
  MAP TO AP000248.1; EXPRESSED IN PLACENTA, SIGNAL = 1.7; EXPRESSED IN BONE MARROW, SIGNAL = 1.9; EXPRESSED IN HBL100, SIGNAL = 1.7; EXPRESSED IN FETAL LIVER, SIGNAL = 1.4; EXPRESSED IN LUNG, SIGNAL =   2; EXPRESSED IN ADULT LIVER, SIGNAL = 1.7; EXPRESSED IN BT474, SIGNAL = 1.7; EXPRESSED IN HELA, SIGNAL = 1.9; EXPRESSED IN BRAIN, SIGNAL =   2; EXPRESSED IN HEART, SIGNAL = 1.5; NT HIT: gi11526176, EVALUE 6.00e-51; EST_HUMAN HIT: AA248382.1, EVALUE 7.00e-51
atactaggtgagagactaggattcagagcattatgcccatggtaccaaccagcctcctcttcctcctcctgggcttcaggtctagaaaggtgggtctcagtc

SEQ ID NO: 17570 - DNA, 166 bp, Homo sapiens
  MAP TO AP000245.1; EXPRESSED IN LUNG, SIGNAL = 0.87; EXPRESSED IN HELA, SIGNAL = 1.2; EXPRESSED IN ADULT LIVER, SIGNAL = 0.97; EXPRESSED IN BRAIN, SIGNAL = 0.78; EXPRESSED IN HEART, SIGNAL = 0.79; EXPRESSED IN PLACENTA, SIGNAL = 0.64; EXPRESSED IN BT474, SIGNAL = 2.3; EXPRESSED IN BONE MARROW, SIGNAL = 0.93; EXPRESSED IN HBL100, SIGNAL = 1.5; EXPRESSED IN FETAL LIVER, SIGNAL =   1; SWISSPROT HIT: Q05086, EVALUE 2.00e-10; EST_HUMAN HIT: BE886203.1, EVALUE 5.00e-57; NT HIT: AF016705.1, EVALUE 3.00e-57
cagcagcagaacatgcagcttttgccttttcattttcattcttctcttcatcctttgcttgaagagacttcagttcttccttggtgtgttgtttagctttccagaagctctctaccaatgcctcagcactagaaaaaactcttccaataacacagttaagggggaa

SEQ ID NO: 17571 - DNA, 93 bp, Homo sapiens
  MAP TO AP000245.1; EXPRESSED IN HBL100, SIGNAL = 1.9; EXPRESSED IN FETAL LIVER, SIGNAL =   3; EXPRESSED IN HELA, SIGNAL = 2.2; EXPRESSED IN BRAIN, SIGNAL = 2.3; EXPRESSED IN BT474, SIGNAL = 2.1; EXPRESSED IN BONE MARROW, SIGNAL = 2.2; EXPRESSED IN HEART, SIGNAL =   2; EXPRESSED IN ADULT LIVER, SIGNAL = 2.2; EXPRESSED IN LUNG, SIGNAL = 2.7; EXPRESSED IN PLACENTA, SIGNAL = 3.2; NT HIT: X53330.1, EVALUE 1.70e-01; EST_HUMAN HIT: AI022312.1, EVALUE 1.10e+00
atgaacatggagacaatttaccgcttctatggacaggaaggaaaagcaggaaatgttggaagaaaacaagttgatagaggttaatatctcaaa

SEQ ID NO: 17572 - DNA, 737 bp, Homo sapiens
  MAP TO AP000215.1; EXPRESSED IN LUNG, SIGNAL =  10; EXPRESSED IN HELA, SIGNAL =  13; EXPRESSED IN ADULT LIVER, SIGNAL = 7.6; EXPRESSED IN BRAIN, SIGNAL = 9.9; EXPRESSED IN PLACENTA, SIGNAL =  13; EXPRESSED IN BT474, SIGNAL = 7.4; EXPRESSED IN BONE MARROW, SIGNAL =  11; EXPRESSED IN HEART, SIGNAL = 6.8; EXPRESSED IN HBL100, SIGNAL =  11; EXPRESSED IN FETAL LIVER, SIGNAL = 9.2; NT HIT: gi11423682, EVALUE 0.00e+00; EST_HUMAN HIT: AW816562.1, EVALUE 0.00e+00; SWISSPROT HIT: O95613, EVALUE 1.00e-107
gagctgcgggcgtctttggagacacagcgtgctcagagcagtcgactctgcgtggcactgaaacacgagcagacggccaaggacaacctgcagaaggagctgcgtatcgagcactcacgctgcgaggccttgctggctcaggagcggagccagctctctgagctccagaaggaccttgcggctgagaagagccgcaccctggagctgtcagaggccttgcggcacgagcggctcctgaccgagcagctgagccagaggacacaggaggcttgcgtgcaccaggacacacaggcccatcacgctctgctgcagaagctgaaggaggagaagtcccgggtggtggacttgcaagcgatgcttgaaaaggtgcagcagcaagccctgcattctcagcagcagcttgaggctgaggctcagaagcactgtgaggcgctcaggagagagaaggaggtaagtgccacactgaagtcgacggtggaagccctgcacacccaaaaacgagagctgagatgctctctggagagagagagggagaaaccagcgtggttgcaggcagaattagagcagtcacacccacggttgaaagagcaagaaggacgcaaggctgcgaggaggagcgcggaggccaggcagagcccagcggctgcggagcagtggaggaagtggcagagagacaaggagaagctggtgagagccgcctgccggcggacgtccacacctaaaaacgataagcaatt

SEQ ID NO: 17573 - DNA, 972 bp, Homo sapiens
  MAP TO AP000209.1; EXPRESSED IN BRAIN, SIGNAL =  12; EXPRESSED IN ADULT LIVER, SIGNAL = 8.3; EXPRESSED IN BT474, SIGNAL = 7.7; EXPRESSED IN BONE MARROW, SIGNAL = 9.9; EXPRESSED IN HBL100, SIGNAL = 8.4; EXPRESSED IN HELA, SIGNAL =  10; EXPRESSED IN HEART, SIGNAL = 7.1; EXPRESSED IN PLACENTA, SIGNAL =  11; EXPRESSED IN FETAL LIVER, SIGNAL = 8.3; EXPRESSED IN LUNG, SIGNAL = 8.7; EST_HUMAN HIT: R14902.1, EVALUE 3.00e-95; SWISSPROT HIT: Q13009, EVALUE 0.00e+00; NT HIT: gi11526176, EVALUE 0.00e+00
tggctaatttgtgggttggtggcaccttcagagagacagtgagatttcctacagggaagtgtgttataattactgtacggaggagtctcttcagcagcagctggtggcatcttatggtttgcaagattgggaatatcagacaccaaattccgacagtagcctgcaaatttgctccccggccccccgtttgctgtcactccagagtttttctgagcatacaagtcacccaaggaattggctctctgacaggtgctgagctgccgcggactcgcccgcgtttccatcccccgagcctcctcgcagtccttctcttcggcggaacccaagatttcttcgttgcttgttaaatgttcttggctcagatcagagagtgagaattccaggctgtcctcccgccagatgtctgcagatttggagcgtttcttcttaaagctcgccgtctccatgaaagtgggcccattggatgtataggaatgctgcctcctgcctccctcagccaaatatgtagcgtcatccccgtaaagcctgctctcctcagtgtctggcatgctctgcacagaggctgctgtgaggacgatgctgctgtctacgctgggagtgacagaagagtcagtgtaagacacaggtctcaagcccatgtccactcggtccacccagatggggctcccgaagtcttctagggtaccatcttgggagaagggctccaggccattttcagccagggactgggggatgctgggggtgctgctggatcgggtgctcacttcggagttcctgtggatcaccttccccgaggaagcgtgcctggtcctccgcgtcttgtgcgagaggcgcagggagcgggaagtgtgcttgcgccccaggctggcatgcttttctccataaaactcgtgctctacatgttgactttctgcgtttcccatggttttatggtctgcagcaaagcggggggaaaggggagaattgagtcac

SEQ ID NO: 17574 - DNA, 262 bp, Homo sapiens
  MAP TO AP000208.1; EXPRESSED IN PLACENTA, SIGNAL = 2.1; EXPRESSED IN BT474, SIGNAL = 1.6; EXPRESSED IN BONE MARROW, SIGNAL = 1.3; EXPRESSED IN HBL100, SIGNAL = 1.4; EXPRESSED IN HEART, SIGNAL = 1.1; EXPRESSED IN FETAL LIVER, SIGNAL = 1.2; EXPRESSED IN LUNG, SIGNAL = 1.5; EXPRESSED IN HELA, SIGNAL = 1.3; EXPRESSED IN ADULT LIVER, SIGNAL = 1.2; EXPRESSED IN BRAIN, SIGNAL = 1.6; EST_HUMAN HIT: AW197823.1, EVALUE 3.00e-58; NT HIT: gi11526176, EVALUE 1.00e-124; SWISSPROT HIT: Q13009, EVALUE 2.00e-28
atctaatattgttttctttttctttgagtcagtgactgaagacagctgcatttcacccattttcttcatcttttcatccatgtcaatcttctgttccagttttttgatctctgatttcaggagtcggagcgtgtcttccttgtggtggtgcctcgcgaccgcagtggcgcaggcagagtggatggcggtgatccagttttcaagctccgtctggctagtggtctgtaccaggaagaaggggcaggaagaaaaaggcacctct

SEQ ID NO: 17575 - DNA, 121 bp, Homo sapiens
  MAP TO AP000198.1; EXPRESSED IN PLACENTA, SIGNAL = 9.5; EXPRESSED IN BONE MARROW, SIGNAL = 9.2; EXPRESSED IN HEART, SIGNAL =  13; EXPRESSED IN BRAIN, SIGNAL =  16; EXPRESSED IN HELA, SIGNAL =  21; EXPRESSED IN LUNG, SIGNAL =  23; EXPRESSED IN HBL100, SIGNAL =  13; EXPRESSED IN BT474, SIGNAL =  14; EXPRESSED IN ADULT LIVER, SIGNAL =  13; EXPRESSED IN FETAL LIVER, SIGNAL =  20; EST_HUMAN HIT: BE974314.1, EVALUE 2.50e-02; NT HIT: AE001708.1, EVALUE 2.30e-01; SWISSPROT HIT: P02441, EVALUE 4.00e+00
ggagtctaggataaagtagcagttgtttgcaaaatggaagacagtacctagtggtggaaaaccgaaagttccatggagacaggcatgcagcatgcagtaggccaactgcaacgaagccagg

SEQ ID NO: 17576 - DNA, 108 bp, Homo sapiens
  MAP TO AP000194.1; EXPRESSED IN BT474, SIGNAL = 1.6; EXPRESSED IN BONE MARROW, SIGNAL =   2; EXPRESSED IN HBL100, SIGNAL = 5.8; EXPRESSED IN LUNG, SIGNAL =   3; EXPRESSED IN HELA, SIGNAL = 1.9; EXPRESSED IN ADULT LIVER, SIGNAL =   2; EXPRESSED IN BRAIN, SIGNAL = 2.2; EXPRESSED IN HEART, SIGNAL = 1.8; EXPRESSED IN PLACENTA, SIGNAL = 2.1; EXPRESSED IN FETAL LIVER, SIGNAL = 1.8; SWISSPROT HIT: P04196, EVALUE 8.00e-01; EST_HUMAN HIT: BF372107.1, EVALUE 1.40e+00; NT HIT: AF100956.1, EVALUE 2.30e-01
agtggccgtcatctgctacgtgattgccatgtgggtgctcagagctgcgattgctcaagtgggcgccgtccatgaaaggatggtgccctgccccgctgggcctggtcc

SEQ ID NO: 17577 - DNA, 120 bp, Homo sapiens; identical to SEQ ID NO: 17084
  MAP TO AP000189.1; EXPRESSED IN BT474, SIGNAL = 1.9; EXPRESSED IN BRAIN, SIGNAL = 1.6; EXPRESSED IN PLACENTA, SIGNAL = 6.5; EXPRESSED IN BONE MARROW, SIGNAL = 2.2; EXPRESSED IN HBL100, SIGNAL = 2.3; EXPRESSED IN FETAL LIVER, SIGNAL = 2.1; EXPRESSED IN LUNG, SIGNAL = 2.4; EXPRESSED IN HELA, SIGNAL = 1.5; EXPRESSED IN ADULT LIVER, SIGNAL = 1.9; EXPRESSED IN HEART, SIGNAL = 1.7; NT HIT: gi5031782, EVALUE 1.00e-58; SWISSPROT HIT: P38484, EVALUE 9.00e-17; EST_HUMAN HIT: AW163746.1, EVALUE 8.00e-61

SEQ ID NO: 17578 - DNA, 79 bp, Homo sapiens
  MAP TO AP000189.1; EXPRESSED IN BONE MARROW, SIGNAL =  11; EXPRESSED IN FETAL LIVER, SIGNAL =   1; EXPRESSED IN BRAIN, SIGNAL = 2.4; EXPRESSED IN ADULT LIVER, SIGNAL =  15; EXPRESSED IN HEART, SIGNAL = 0.93; EXPRESSED IN HELA, SIGNAL = 0.78; EXPRESSED IN LUNG, SIGNAL = 0.75; EXPRESSED IN BT474, SIGNAL = 0.64; EXPRESSED IN PLACENTA, SIGNAL = 0.98; NT HIT: AJ131016.1, EVALUE 3.00e-06; EST_HUMAN HIT: AA904701.1, EVALUE 3.00e-07; SWISSPROT HIT: P12775, EVALUE 9.40e+00
tataagaggaagtaggctgggcacagtggctcatgcctataataggaagtgcatcatgttttcagtaatcaaatctgcc

SEQ ID NO: 17579 - DNA, 197 bp, Homo sapiens
  MAP TO AP000188.1; EXPRESSED IN ADULT LIVER, SIGNAL = 1.1; EXPRESSED IN HEART, SIGNAL = 0.86; EXPRESSED IN BT474, SIGNAL =   2; EXPRESSED IN BONE MARROW, SIGNAL = 2.8; EXPRESSED IN HELA, SIGNAL = 1.1; EXPRESSED IN PLACENTA, SIGNAL =   1; EXPRESSED IN HBL100, SIGNAL = 1.9; EXPRESSED IN FETAL LIVER, SIGNAL = 1.4; EXPRESSED IN LUNG, SIGNAL = 1.4; EST_HUMAN HIT: AW937895.1, EVALUE 7.00e-34; NT HIT: X60459.1, EVALUE 1.00e-107; SWISSPROT HIT: P22415, EVALUE 4.00e-14
ccagactgagggcactggtgccatcagtggctatcctaccactcaattcatgacccaggtggtgatccagggtgatatcaccagttatgatgcagttaacacagaggggaaagctgctgagatacactatactttcccacccctgcagtgggagatggggcagggggtaccacatcagggagtacagctgctgttgt

SEQ ID NO: 17580 - DNA, 158 bp, Homo sapiens
  MAP TO AP000188.1; EXPRESSED IN LUNG, SIGNAL =   3; EXPRESSED IN HELA, SIGNAL = 2.5; EXPRESSED IN ADULT LIVER, SIGNAL = 3.2; EXPRESSED IN BRAIN, SIGNAL = 2.8; EXPRESSED IN HEART, SIGNAL = 2.2; EXPRESSED IN PLACENTA, SIGNAL = 1.9; EXPRESSED IN BT474, SIGNAL = 2.3; EXPRESSED IN BONE MARROW, SIGNAL =  15; EXPRESSED IN HBL100, SIGNAL = 2.4; EXPRESSED IN FETAL LIVER, SIGNAL = 2.2; NT HIT: U08988.1, EVALUE 8.00e-82; SWISSPROT HIT: Q08334, EVALUE 3.00e-16; EST_HUMAN HIT: AI904079.1, EVALUE 4.00e-54
atggtctgcctggcactcctcggctgcttcgccttgctgtggtgcgtttacaagaagacaaagtacgccttctcccctaggaattctcttccacagcacctgaaagaggtaggtaggatggagtgagatgtggatttgaaaaccttgatcggaaagag

SEQ ID NO: 17581 - DNA, 117 bp, Homo sapiens
  MAP TO AP000188.1; EXPRESSED IN HBL100, SIGNAL = 1.3; EXPRESSED IN FETAL LIVER, SIGNAL = 1.3; EXPRESSED IN HELA, SIGNAL = 1.6; EXPRESSED IN ADULT LIVER, SIGNAL = 1.4; EXPRESSED IN BRAIN, SIGNAL = 0.98; EXPRESSED IN PLACENTA, SIGNAL = 1.5; EXPRESSED IN BONE MARROW, SIGNAL = 1.2; EXPRESSED IN BT474, SIGNAL = 1.1; EXPRESSED IN HEART, SIGNAL = 1.2; EXPRESSED IN LUNG, SIGNAL = 1.4; NT HIT: Z17227.1, EVALUE 8.00e-60; EST_HUMAN HIT: AW950868.1, EVALUE 1.00e-59; SWISSPROT HIT: Q08334, EVALUE 6.00e-20
catatgcgtttcttagcccctaaaattgagaatgaatacgaaacttggactatgaagaatgtgtataactcatggacttataatgtgcaatactggaaaaacggtactgatgaaaag

SEQ ID NO: 17582 - DNA, 77 bp, Homo sapiens
  MAP TO AP000185.1; EXPRESSED IN LUNG, SIGNAL =  13; EXPRESSED IN HEART, SIGNAL =  11; EXPRESSED IN PLACENTA, SIGNAL =  21; EXPRESSED IN BT474, SIGNAL = 9.3; EXPRESSED IN BONE MARROW, SIGNAL =  16; EXPRESSED IN HBL100, SIGNAL =  13; EXPRESSED IN FETAL LIVER, SIGNAL =  19; EXPRESSED IN ADULT LIVER, SIGNAL =  14; EXPRESSED IN BRAIN, SIGNAL =  18; EXPRESSED IN HELA, SIGNAL =  11; NT HIT: L20770.1, EVALUE 5.20e-01
atggctgcctttggccaccagctgcctgtgtgcagtctctctcccgagaatctgtgtggccattcatcacaggcctc

SEQ ID NO: 17583 - DNA, 111 bp, Homo sapiens
  MAP TO AP000184.1; EXPRESSED IN PLACENTA, SIGNAL = 3.3; EXPRESSED IN BT474, SIGNAL = 2.8; EXPRESSED IN BONE MARROW, SIGNAL = 4.2; EXPRESSED IN LUNG, SIGNAL = 3.4; EXPRESSED IN ADULT LIVER, SIGNAL = 3.1; EXPRESSED IN BRAIN, SIGNAL = 2.9; EXPRESSED IN HBL100, SIGNAL = 2.8; EXPRESSED IN FETAL LIVER, SIGNAL = 3.8; EXPRESSED IN HELA, SIGNAL = 2.5; EXPRESSED IN HEART, SIGNAL = 2.8; NT HIT: AL163248.2, EVALUE 6.00e-08; SWISSPROT HIT: Q28113, EVALUE 1.80e+00
tggtgtgggggacagaccctgtggtggccccacggtccgcacctcctggtattcacacccttgtgtgctgccctccccttgagtgtgggcagaccctgtgacttgcttcat

SEQ ID NO: 17584 - DNA, 118 bp, Homo sapiens
  MAP TO AP000179.1; EXPRESSED IN HBL100, SIGNAL =   5; EXPRESSED IN BRAIN, SIGNAL = 6.4; EXPRESSED IN BT474, SIGNAL =   3; EXPRESSED IN BONE MARROW, SIGNAL = 6.7; EXPRESSED IN FETAL LIVER, SIGNAL = 5.1; EXPRESSED IN HELA, SIGNAL = 7.2; EXPRESSED IN ADULT LIVER, SIGNAL = 3.5; EXPRESSED IN PLACENTA, SIGNAL =   4; EXPRESSED IN LUNG, SIGNAL = 5.4; EXPRESSED IN HEART, SIGNAL = 5.2; EST_HUMAN HIT: N57483.1, EVALUE 3.00e-47; NT HIT: AL163246.2, EVALUE 1.00e-06; SWISSPROT HIT: O14994, EVALUE 2.30e+00
gacctacggcaggaggacccaggaaagggacatctgctcctccaaggcagagcggctcccccctttcggtatgtgcttttgtgtgtgtattagccagggttctctagagggacagaat

SEQ ID NO: 17585 - DNA, 178 bp, Homo sapiens
  MAP TO AP000179.1; EXPRESSED IN PLACENTA, SIGNAL = 4.9; EXPRESSED IN BT474, SIGNAL = 3.6; EXPRESSED IN BONE MARROW, SIGNAL = 4.7; EXPRESSED IN HEART, SIGNAL = 3.9; EXPRESSED IN ADULT LIVER, SIGNAL = 3.9; EXPRESSED IN HBL100, SIGNAL = 3.8; EXPRESSED IN FETAL LIVER, SIGNAL = 4.5; EXPRESSED IN LUNG, SIGNAL = 5.6; EXPRESSED IN HELA, SIGNAL = 5.5; EXPRESSED IN BRAIN, SIGNAL = 5.1; SWISSPROT HIT: Q14146, EVALUE 2.50e-01; EST_HUMAN HIT: BE868305.1, EVALUE 6.20e-01; NT HIT: AF231919.1, EVALUE 5.00e-68
aatccctcttggtcaccagggtgtacagggtctttttattcaaatcaaaatggctgcagacgtccctggcagcttccggaccctgggtcaccatggcggtcatcaggctcaggcaggcgcgagccaacctgcacagggaaccagaggaaatcggacacgtcaacaacagcagaagcac

SEQ ID NO: 17586 - DNA, 124 bp, Homo sapiens
  MAP TO AP000178.1; EXPRESSED IN BT474, SIGNAL = 3.8; EXPRESSED IN BONE MARROW, SIGNAL = 3.7; EXPRESSED IN FETAL LIVER, SIGNAL = 3.1; EXPRESSED IN HELA, SIGNAL = 2.4; EXPRESSED IN PLACENTA, SIGNAL = 4.2; EXPRESSED IN HEART, SIGNAL = 2.4; EXPRESSED IN BRAIN, SIGNAL = 2.9; EXPRESSED IN ADULT LIVER, SIGNAL = 2.7; EXPRESSED IN LUNG, SIGNAL = 2.8; EXPRESSED IN HBL100, SIGNAL = 3.2; NT HIT: AF231919.1, EVALUE 5.00e-64; EST_HUMAN HIT: BF334583.1, EVALUE 9.00e-64
ctgtgtacacgcctgattcctgccacacctctttattcaggcagtggtcaacagtttttaatgccctcttcaaaatgacagaaataagggataaggctgtgtgcctcactgaggtgctgtccaa

SEQ ID NO: 17587 - DNA, 149 bp, Homo sapiens
  MAP TO AP000175.1; EXPRESSED IN LUNG, SIGNAL = 1.8; EXPRESSED IN PLACENTA, SIGNAL = 1.2; EXPRESSED IN BT474, SIGNAL = 1.2; EXPRESSED IN BONE MARROW, SIGNAL = 1.8; EXPRESSED IN HBL100, SIGNAL = 1.2; EXPRESSED IN FETAL LIVER, SIGNAL = 1.2; EXPRESSED IN HELA, SIGNAL = 1.8; EXPRESSED IN ADULT LIVER, SIGNAL = 1.4; EXPRESSED IN BRAIN, SIGNAL =   2; EXPRESSED IN HEART, SIGNAL = 1.5; NT HIT: X54816.1, EVALUE 2.20e-02; SWISSPROT HIT: P25367, EVALUE 5.10e+00; EST_HUMAN HIT: BE762670.1, EVALUE 2.00e+00
ccagagcttacattccagtgacgggcaaggtcaggtaacaaaaaggaagcagaagttagtgatggtggaaaaggaggaggaagaggaggagatgacaaggtcacaagactggctttggagctctagcagggctggctccctcctacctc

SEQ ID NO: 17588 - DNA, 190 bp, Homo sapiens
  MAP TO AP000175.1; EXPRESSED IN ADULT LIVER, SIGNAL = 2.6; EXPRESSED IN BONE MARROW, SIGNAL = 1.9; EXPRESSED IN HBL100, SIGNAL = 1.7; EXPRESSED IN HELA, SIGNAL = 2.2; EXPRESSED IN BRAIN, SIGNAL = 2.7; EXPRESSED IN HEART, SIGNAL =   2; EXPRESSED IN PLACENTA, SIGNAL = 1.7; EXPRESSED IN BT474, SIGNAL = 1.4; EXPRESSED IN LUNG, SIGNAL = 2.1; EXPRESSED IN FETAL LIVER, SIGNAL = 1.6; SWISSPROT HIT: P30995, EVALUE 4.90e+00; EST_HUMAN HIT: AU123327.1, EVALUE 4.20e-02
aagtgtagagagatatttccctgagaagcttctcaacaacatgaatgaaaaaatagacgagctctcttggtttgcaaatgctcttaaagttgagggcaaaaatgtgaaaaagaagagtctttttttcctcctcacccacggtgaggtcagaggtggagttgctttaatagtaaacaccaaacacaggctt

SEQ ID NO: 17589 - DNA, 669 bp, Homo sapiens
  MAP TO AP000175.1; EXPRESSED IN PLACENTA, SIGNAL = 1.5; EXPRESSED IN ADULT LIVER, SIGNAL = 1.3; EXPRESSED IN HEART, SIGNAL = 1.3; EXPRESSED IN LUNG, SIGNAL = 1.2; EXPRESSED IN BT474, SIGNAL = 1.1; EXPRESSED IN BONE MARROW, SIGNAL = 1.4; EXPRESSED IN HBL100, SIGNAL = 0.86; EXPRESSED IN FETAL LIVER, SIGNAL =   1; EXPRESSED IN HELA, SIGNAL = 1.1; EXPRESSED IN BRAIN, SIGNAL = 0.87; EST_HUMAN HIT: AA983508.1, EVALUE 1.70e+00; NT HIT: AE000843.1, EVALUE 6.70e+00; SWISSPROT HIT: P04930, EVALUE 1.20e+00
tcacgtcaggctccatagacccagctggaatcccagaggctcatttcctccatccaggtctattccacccaggtctattccatccaggtccattccatcgagatccactccatccagatccactccatccaggtcctctccattcgggtccactccatccaggtccactgtatccaggtccactccatccaggtccactgtatccaggtccactccatccaagtgaattccatccaggtccactccatccaagtgaacttcatccaggtgcgctccatccaggtgcactccatccggattcactccatccagatccactctatctgggtccactccatccgagtccactccatccaggtccaatccatccagatccacttcatccaagtccactccatccagatccactccatccaggtccactccatccaggtgcactccattcaggcccactccatccaggtccactccatccgggtccactccatctgggtccgctccatctaggtccactgtatccaggtccactccatccaggtgaactccatccagagccacttcatccagatccactccatttgggtccactccatctgggtccactccatccgggtccactccatccaggtccactctatctgggtccactctatccaggtccactctatc

SEQ ID NO: 17590 - DNA, 656 bp, Homo sapiens; identical to SEQ ID NO: 17140
  MAP TO AP000175.1; EXPRESSED IN PLACENTA, SIGNAL = 1.7; EXPRESSED IN BT474, SIGNAL = 1.8; EXPRESSED IN FETAL LIVER, SIGNAL = 1.7; EXPRESSED IN HELA, SIGNAL = 1.6; EXPRESSED IN ADULT LIVER, SIGNAL = 1.6; EXPRESSED IN BONE MARROW, SIGNAL = 1.6; EXPRESSED IN HBL100, SIGNAL = 1.6; EXPRESSED IN LUNG, SIGNAL = 1.7; EXPRESSED IN BRAIN, SIGNAL =   2; EXPRESSED IN HEART, SIGNAL = 1.5; EST_HUMAN HIT: BF529471.1, EVALUE 0.00e+00; SWISSPROT HIT: P57058, EVALUE 1.00e-109; NT HIT: gi11526180, EVALUE 0.00e+00

SEQ ID NO: 17591 - DNA, 297 bp, Homo sapiens
  MAP TO AP000174.1; EXPRESSED IN BONE MARROW, SIGNAL = 2.6; EXPRESSED IN ADULT LIVER, SIGNAL = 2.2; EXPRESSED IN PLACENTA, SIGNAL = 2.5; EXPRESSED IN BT474, SIGNAL = 2.2; EXPRESSED IN HBL100, SIGNAL = 2.2; EXPRESSED IN LUNG, SIGNAL = 3.7; EXPRESSED IN HELA, SIGNAL = 2.7; EXPRESSED IN BRAIN, SIGNAL = 4.3; EXPRESSED IN FETAL LIVER, SIGNAL = 2.6; EXPRESSED IN HEART, SIGNAL = 4.4; NT HIT: gi11526180, EVALUE 0.00e+00; EST_HUMAN HIT: BF114883.1, EVALUE 0.00e+00; SWISSPROT HIT: P57058, EVALUE 2.00e-51
gtggccataaaagtcattgataagaagagagccaaaaaggacacctatgtcaccaaaaacctgcggcgagagggtcagatccagcagatgatccgccaccccaatatcactcagctccttgatattttagaaacggaaaacagctactacctggtcatggagctgtgccctgggggcaacctgatgcacaagatctatgagaagaagcggctggaggagtccgaagcccgcagatacatccgacagctcatctctgccgtagagcacctgcaccgggccggggtggtccacaggtaa

SEQ ID NO: 17592 - DNA, 123 bp, Homo sapiens
  MAP TO AP000169.1; EXPRESSED IN HBL100, SIGNAL = 4.7; EXPRESSED IN BRAIN, SIGNAL = 5.6; EXPRESSED IN PLACENTA, SIGNAL = 3.1; EXPRESSED IN BT474, SIGNAL = 2.9; EXPRESSED IN BONE MARROW, SIGNAL = 1.7; EXPRESSED IN FETAL LIVER, SIGNAL = 6.6; EXPRESSED IN HELA, SIGNAL =   2; EXPRESSED IN ADULT LIVER, SIGNAL = 8.2; EXPRESSED IN HEART, SIGNAL = 5.3; EXPRESSED IN LUNG, SIGNAL = 4.9; NT HIT: gi11526224, EVALUE 2.00e-63; EST_HUMAN HIT: U81189.1, EVALUE 2.00e-63; SWISSPROT HIT: P53805, EVALUE 4.00e-08
ttggcttaggtctcctcattctttccatttcctcttcttcctccttctcttgatcactctcacatacatggaccaccacgctgggagtggtgtcagtcgctgcgtgcaattcatacttttccc

SEQ ID NO: 17593 - DNA, 390 bp, Homo sapiens
  MAP TO AP000168.1; EXPRESSED IN HELA, SIGNAL = 2.6; EXPRESSED IN ADULT LIVER, SIGNAL = 3.6; EXPRESSED IN HEART, SIGNAL = 3.9; EXPRESSED IN BT474, SIGNAL = 2.4; EXPRESSED IN BONE MARROW, SIGNAL = 1.8; EXPRESSED IN HBL100, SIGNAL = 1.8; EXPRESSED IN BRAIN, SIGNAL = 2.8; EXPRESSED IN PLACENTA, SIGNAL = 1.8; EXPRESSED IN FETAL LIVER, SIGNAL = 2.3; EXPRESSED IN LUNG, SIGNAL = 3.2; EST_HUMAN HIT: AA770188.1, EVALUE 6.30e-02; SWISSPROT HIT: P15382, EVALUE 4.00e-61; NT HIT: gi11526222, EVALUE 0.00e+00
ccagatggttttcaacgacatagcacgacctgtagctctccaggacccgggcctggacataggccttgtccttctcttgccaggcatcggactcgatgtagacgttgaatgggtcgttcgagtgctccagcttcttggagcggatgtagctcagcatgatgcccagggtgaagaagccgaagaatcccagtaccatgaggacgtagagggcctccagcttgccgtcactgctgcggggggacctgcgggccaggcccgacatgttgccaccctgctgaactgtctcctgccacagcttggtcagaaagggcgtcaccgctgtggtgttagacaggatcatcctgggcattaaggttccactgctgcagctcaaacttcccaggcacacct

SEQ ID NO: 17594 - DNA, 102 bp, Homo sapiens
  MAP TO AP000165.1; EXPRESSED IN BT474, SIGNAL = 1.4; EXPRESSED IN BONE MARROW, SIGNAL = 2.1; EXPRESSED IN HELA, SIGNAL =   2; EXPRESSED IN ADULT LIVER, SIGNAL = 1.6; EXPRESSED IN PLACENTA, SIGNAL = 1.5; EXPRESSED IN HBL100, SIGNAL = 1.3; EXPRESSED IN FETAL LIVER, SIGNAL = 1.5; EXPRESSED IN LUNG, SIGNAL = 2.1; EXPRESSED IN BRAIN, SIGNAL = 2.3; EXPRESSED IN HEART, SIGNAL = 2.4; NT HIT: gi8922702, EVALUE 3.00e-03; EST_HUMAN HIT: AI720263.1, EVALUE 1.00e-03; SWISSPROT HIT: P32599, EVALUE 5.30e+00
ccaaagtgtggtctgtgggccagcagcacctgcgtcatctgggaacttgtaagaaatgggattcttagcagatcccagaccctgctgcatcagaacctgcat

SEQ ID NO: 17595 - DNA, 96 bp, Homo sapiens
  MAP TO AP000165.1; EXPRESSED IN LUNG, SIGNAL = 7.6; EXPRESSED IN BRAIN, SIGNAL = 3.1; EXPRESSED IN HEART, SIGNAL = 4.5; EXPRESSED IN PLACENTA, SIGNAL = 5.6; EXPRESSED IN BONE MARROW, SIGNAL =  34; EXPRESSED IN HBL100, SIGNAL =  48; EXPRESSED IN FETAL LIVER, SIGNAL =  23; EXPRESSED IN ADULT LIVER, SIGNAL =  11; EXPRESSED IN BT474, SIGNAL =  20; EXPRESSED IN HELA, SIGNAL =  14; SWISSPROT HIT: Q24186, EVALUE 3.00e-06; EST_HUMAN HIT: AI537306.1, EVALUE 2.00e-20; NT HIT: gi4506728, EVALUE 3.00e-18
gtggcagtgatgagctcatctgccaggcactcagcaatggtcatgatctcccggagggcaccctcaagagtgcctgtgcacagcaaccaggtggtc

SEQ ID NO: 17596 - DNA, 100 bp, Homo sapiens
  MAP TO AP000158.1; EXPRESSED IN HBL100, SIGNAL = 2.1; EXPRESSED IN HELA, SIGNAL = 2.7; EXPRESSED IN ADULT LIVER, SIGNAL = 2.4; EXPRESSED IN BRAIN, SIGNAL = 3.9; EXPRESSED IN HEART, SIGNAL = 2.5; EXPRESSED IN PLACENTA, SIGNAL = 1.9; EXPRESSED IN BT474, SIGNAL = 1.4; EXPRESSED IN BONE MARROW, SIGNAL =   2; EXPRESSED IN LUNG, SIGNAL = 2.9; EXPRESSED IN FETAL LIVER, SIGNAL = 1.7; NT HIT: gi7657294, EVALUE 3.30e+00
aaagcaaggctcagtcttcaagaatagcagagatgccgttgtcatctccagcatgattcagaatagtgaggcagcagggaagatgaagattgcaaggagt

SEQ ID NO: 17597 - DNA, 132 bp, Homo sapiens
  MAP TO AP000154.1; EXPRESSED IN PLACENTA, SIGNAL = 1.2; EXPRESSED IN BT474, SIGNAL = 1.1; EXPRESSED IN BONE MARROW, SIGNAL = 1.9; EXPRESSED IN HBL100, SIGNAL = 0.98; EXPRESSED IN LUNG, SIGNAL = 1.5; EXPRESSED IN HELA, SIGNAL = 1.3; EXPRESSED IN ADULT LIVER, SIGNAL = 1.3; EXPRESSED IN BRAIN, SIGNAL = 1.3; EXPRESSED IN FETAL LIVER, SIGNAL =   1; EXPRESSED IN HEART, SIGNAL = 1.3; NT HIT: U09964.1, EVALUE 2.50e-01
tccagttctccacgctgaccttgactttcgagatcacataccaagaccttcagctggatggtccctgtagctgctgtgaccactagaagcagggttaggggcgagactaatttaatatcaattaatgtagac

SEQ ID NO: 17598 - DNA, 261 bp, Homo sapiens
  MAP TO AP000154.1; EXPRESSED IN HEART, SIGNAL = 1.2; EXPRESSED IN FETAL LIVER, SIGNAL = 1.6; EXPRESSED IN LUNG, SIGNAL = 1.5; EXPRESSED IN HELA, SIGNAL = 1.4; EXPRESSED IN BRAIN, SIGNAL = 1.4; EXPRESSED IN PLACENTA, SIGNAL = 2.2; EXPRESSED IN BT474, SIGNAL = 1.7; EXPRESSED IN BONE MARROW, SIGNAL = 3.1; EXPRESSED IN HBL100, SIGNAL =   2; EXPRESSED IN ADULT LIVER, SIGNAL = 1.1; EST_HUMAN HIT: AI279144.1, EVALUE 0.00e+00; SWISSPROT HIT: Q63470, EVALUE 7.00e-28; NT HIT: D86550.1, EVALUE 0.00e+00
tggaaacaggaggacctggtgggcgacgtgctggggagtcaggtcatacggtcgctgactacttgaagttcaaagacctcattttaaggatgcttgattatgaccccaaaactcgaattcaaccttattatgctctgcagcacagtttcttcaagaaaacagctgatgaaggtacaaatacaagtaatagtgtatctacaagccccgccatggagcagtctcagtcttcgggcaccacctccagtacatcgtcaagctcag

SEQ ID NO: 17599 - DNA, 151 bp, Homo sapiens
  MAP TO AP000154.1; EXPRESSED IN FETAL LIVER, SIGNAL = 1.9; EXPRESSED IN BRAIN, SIGNAL =   2; EXPRESSED IN HEART, SIGNAL = 1.3; EXPRESSED IN PLACENTA, SIGNAL = 1.9; EXPRESSED IN BT474, SIGNAL = 2.1; EXPRESSED IN BONE MARROW, SIGNAL = 1.5; EXPRESSED IN ADULT LIVER, SIGNAL = 1.2; EXPRESSED IN HELA, SIGNAL = 1.5; EXPRESSED IN LUNG, SIGNAL = 1.9; EXPRESSED IN HBL100, SIGNAL = 1.8; SWISSPROT HIT: Q13627, EVALUE 1.00e-23; EST_HUMAN HIT: BE817813.1, EVALUE 9.00e-80; NT HIT: D86550.1, EVALUE 6.00e-80
gtcattttcattccatgctgctggccttcagatggctggacagatgccccattcacatcagtacagtgaccgtcgccagccaaacataagtgaccaacaggtttctgccttatcatattctgaccagattcagcaacctctaactaaccag

SEQ ID NO: 17600 - DNA, 287 bp, Homo sapiens
  MAP TO AP000149.1; EXPRESSED IN BT474, SIGNAL =   7; EXPRESSED IN LUNG, SIGNAL = 3.8; EXPRESSED IN HELA, SIGNAL = 2.9; EXPRESSED IN ADULT LIVER, SIGNAL = 3.4; EXPRESSED IN PLACENTA, SIGNAL = 6.8; EXPRESSED IN BONE MARROW, SIGNAL = 3.7; EXPRESSED IN HBL100, SIGNAL = 4.2; EXPRESSED IN FETAL LIVER, SIGNAL = 4.5; EXPRESSED IN BRAIN, SIGNAL = 4.1; EXPRESSED IN HEART, SIGNAL = 2.6; NT HIT: AF223391.1, EVALUE 7.00e-90; SWISSPROT HIT: P11260, EVALUE 7.00e-06; EST_HUMAN HIT: AI381459.1, EVALUE 3.00e-84
tcaggaggttagttattaagctaatcagggagcaccagagaaaggcgaaccagtgcaaggaaatccaaaaatcaatacaagaagtgaagggagaaatattcaaggaaatagatagcttaaagaaaagacaattaaaacttcaggaaatattggacacacttatagaaatgcaaaaagctctgggaagtctcagcaatagaattgaacaagtagaagaaagaaattcagagcttgaagacaaggtcttcgacttaacccaatccaacgaagacaaagaaaaaagaata

SEQ ID NO: 17601 - DNA, 183 bp, Homo sapiens
  MAP TO AP000144.1; EXPRESSED IN BONE MARROW, SIGNAL =  11; EXPRESSED IN LUNG, SIGNAL =  10; EXPRESSED IN BT474, SIGNAL = 8.6; EXPRESSED IN HBL100, SIGNAL = 8.4; EXPRESSED IN FETAL LIVER, SIGNAL = 8.2; EXPRESSED IN HELA, SIGNAL = 6.4; EXPRESSED IN ADULT LIVER, SIGNAL =   7; EXPRESSED IN BRAIN, SIGNAL = 7.6; EXPRESSED IN PLACENTA, SIGNAL =  13; EXPRESSED IN HEART, SIGNAL = 5.9; NT HIT: AL163246.2, EVALUE 1.00e-35; EST_HUMAN HIT: AA434554.1, EVALUE 3.00e-46; SWISSPROT HIT: O83558, EVALUE 2.50e-01
gtgcagcctggggacttggtgccttgtgtcccagctgctccagccatggctgaaaggggccaacatagagctcggattgtggcttcagagggtgcaagctgtaagccttggcagcttccatgtggtgttgagcctgccagtgcacagaagtcaaaaattggggtttgggaacctctgcctaga

SEQ ID NO: 17602 - DNA, 143 bp, Homo sapiens
  MAP TO AP000139.1; EXPRESSED IN BONE MARROW, SIGNAL =  16; EXPRESSED IN LUNG, SIGNAL =  11; EXPRESSED IN HEART, SIGNAL =  10; EXPRESSED IN BRAIN, SIGNAL =  12; EXPRESSED IN PLACENTA, SIGNAL =  13; EXPRESSED IN BT474, SIGNAL =  14; EXPRESSED IN HBL100, SIGNAL =  34; EXPRESSED IN FETAL LIVER, SIGNAL =  13; EXPRESSED IN HELA, SIGNAL =  16; EXPRESSED IN ADULT LIVER, SIGNAL = 9.6; EST_HUMAN HIT: BF025721.1, EVALUE 1.00e-23; NT HIT: AL163249.2, EVALUE 6.00e-24
aacaaactccggacacgccgcctttaagaactgtaacaccgccagggtccacggcttcatgcttgaagttggtaagaccaagaacccaccaattccggacacgttttggcgaccacgaagggacttttgcctgtcgctgagcg

SEQ ID NO: 17603 - DNA, 338 bp, Homo sapiens
  MAP TO AP000139.1; EXPRESSED IN PLACENTA, SIGNAL = 2.8; EXPRESSED IN LUNG, SIGNAL = 1.5; EXPRESSED IN BRAIN, SIGNAL = 1.6; EXPRESSED IN HEART, SIGNAL = 1.1; EXPRESSED IN HBL100, SIGNAL = 1.7; EXPRESSED IN FETAL LIVER, SIGNAL = 2.8; EXPRESSED IN HELA, SIGNAL = 1.3; EXPRESSED IN BT474, SIGNAL =   2; EXPRESSED IN BONE MARROW, SIGNAL = 2.2; EXPRESSED IN ADULT LIVER, SIGNAL = 1.5; NT HIT: D13318.1, EVALUE 0.00e+00; SWISSPROT HIT: Q06546, EVALUE 5.00e-41; EST_HUMAN HIT: AU140126.1, EVALUE 1.00e-110
gaattgaaccaaagttaaacatccttgaaattgttaaacctgcggacactgttgaggttgttattgatccagatgcccaccatgctgaatcagaagcacatcttgttgaagaagctcaagtgataactcttgatggcacaaaacacatcacaaccatttcagatgaaacttcagaacaagtgacaagatgggctgctgcactggaaggctataggaaagaacaagaacgccttgggataccctatggtaataaaatgcataattctatattgggtagaataataggaattaagcttgacatagaagacactagggtaagttataatctattttacatg

SEQ ID NO: 17604 - DNA, 121 bp, Homo sapiens
  MAP TO AP000139.1; EXPRESSED IN PLACENTA, SIGNAL = 2.2; EXPRESSED IN FETAL LIVER, SIGNAL =   4; EXPRESSED IN LUNG, SIGNAL =   2; EXPRESSED IN HBL100, SIGNAL = 5.2; EXPRESSED IN HELA, SIGNAL = 3.3; EXPRESSED IN ADULT LIVER, SIGNAL = 3.3; EXPRESSED IN BT474, SIGNAL = 2.1; EXPRESSED IN BONE MARROW, SIGNAL = 2.3; EXPRESSED IN BRAIN, SIGNAL =   2; EXPRESSED IN HEART, SIGNAL = 3.5; NT HIT: M37104.1, EVALUE 5.00e-61; EST_HUMAN HIT: BF149305.1, EVALUE 5.00e-62; SWISSPROT HIT: P18859, EVALUE 1.00e-14
aggatcaagttccttattaaatgccactgctgtaacaccaatgttcctccgcaaatggactgagacggctgaccgaatgacagaggagaacctgaagagcctctgaagaatcatgctgatt

SEQ ID NO: 17605 - DNA, 182 bp, Homo sapiens; identical to SEQ ID NO: 17133
  MAP TO AP000135.1; EXPRESSED IN HBL100, SIGNAL = 3.3; EXPRESSED IN HELA, SIGNAL = 3.6; EXPRESSED IN ADULT LIVER, SIGNAL = 3.7; EXPRESSED IN BRAIN, SIGNAL = 4.1; EXPRESSED IN HEART, SIGNAL = 3.1; EXPRESSED IN BT474, SIGNAL = 3.4; EXPRESSED IN BONE MARROW, SIGNAL = 3.5; EXPRESSED IN FETAL LIVER, SIGNAL = 3.6; EXPRESSED IN PLACENTA, SIGNAL = 3.4; EXPRESSED IN LUNG, SIGNAL = 4.1; EST_HUMAN HIT: BE938382.1, EVALUE 6.00e-69; NT HIT: AB032998.1, EVALUE 5.00e-96; SWISSPROT HIT: O95104, EVALUE 1.00e-06

SEQ ID NO: 17606 - DNA, 384 bp, Homo sapiens
  MAP TO AP000129.1; EXPRESSED IN FETAL LIVER, SIGNAL =   2; EXPRESSED IN LUNG, SIGNAL = 2.9; EXPRESSED IN HELA, SIGNAL = 2.3; EXPRESSED IN BRAIN, SIGNAL = 2.1; EXPRESSED IN HEART, SIGNAL = 1.5; EXPRESSED IN BT474, SIGNAL = 1.8; EXPRESSED IN BONE MARROW, SIGNAL = 1.2; EXPRESSED IN PLACENTA, SIGNAL = 1.4; EXPRESSED IN ADULT LIVER, SIGNAL = 2.1; EXPRESSED IN HBL100, SIGNAL = 2.1; SWISSPROT HIT: Q13009, EVALUE 8.00e-61; NT HIT: gi11526176, EVALUE 0.00e+00; EST_HUMAN HIT: BE711811.1, EVALUE 0.00e+00
cattgatccccgacagggcagcttgcttcttgagctgtgccatgcgggacgcgtgactatccagggttttccggcctctttcccgctgactgatggaggtggcctgaagccgctcctgcaggtctctgtccactgaggcacccttcacggactcacagaactcatcatcgtcactgaggatgtctgtctccttgatgtcatcttgctcctcatactgagcaagatcaaactgctcctctacccatcggtcagtgtccccaccaccggggggctgctgggactctttctccgggctgcttgcggagacggcatcagaatcaatggtaaacctgtttcgagccagccgccgcctcctcctcccaagagacttgcttggggcagaca

SEQ ID NO: 17607 - DNA, 79 bp, Homo sapiens
  MAP TO AP000128.1; EXPRESSED IN LUNG, SIGNAL = 0.87; EXPRESSED IN HELA, SIGNAL = 0.8; EXPRESSED IN PLACENTA, SIGNAL = 1.5; EXPRESSED IN BT474, SIGNAL = 0.82; EXPRESSED IN BONE MARROW, SIGNAL =   1; EXPRESSED IN HBL100, SIGNAL = 0.83; EXPRESSED IN FETAL LIVER, SIGNAL = 0.78; EXPRESSED IN BRAIN, SIGNAL = 0.92; EXPRESSED IN ADULT LIVER, SIGNAL = 0.84; EXPRESSED IN HEART, SIGNAL = 1.1; NT HIT: X53330.1, EVALUE 1.30e-01; EST_HUMAN HIT: AW794890.1, EVALUE 9.40e-01
atgaacatggagacaatttaccgcttctatggacaggaaggaaaagcaggaaatgttggaagaaaacaagttgatagag

SEQ ID NO: 17608 - DNA, 130 bp, Homo sapiens
  MAP TO AP000124.1; EXPRESSED IN PLACENTA, SIGNAL = 5.3; EXPRESSED IN BONE MARROW, SIGNAL = 6.5; EXPRESSED IN FETAL LIVER, SIGNAL =   5; EXPRESSED IN LUNG, SIGNAL = 7.2; EXPRESSED IN HELA, SIGNAL = 5.6; EXPRESSED IN ADULT LIVER, SIGNAL = 4.7; EXPRESSED IN BT474, SIGNAL = 3.9; EXPRESSED IN HBL100, SIGNAL = 5.4; EXPRESSED IN BRAIN, SIGNAL = 7.3; EXPRESSED IN HEART, SIGNAL =   6; NT HIT: AB035520.1, EVALUE 3.00e-22; EST_HUMAN HIT: AW816405.1, EVALUE 2.00e-67; SWISSPROT HIT: Q9Y696, EVALUE 1.00e-13
tagccctctgcctgatgaaatagatgcctacagcaccgaggatgtcactgtttctggaaggaagtttctggatggggacgagctgacgctggctgactgcaacctcttacccaagctccatattattaag

SEQ ID NO: 17609 - DNA, 108 bp, Homo sapiens
  MAP TO AP000119.1; EXPRESSED IN BONE MARROW, SIGNAL = 6.3; EXPRESSED IN HBL100, SIGNAL =   7; EXPRESSED IN PLACENTA, SIGNAL = 4.7; EXPRESSED IN HEART, SIGNAL = 9.3; EXPRESSED IN BRAIN, SIGNAL = 7.1; EXPRESSED IN HELA, SIGNAL =  12; EXPRESSED IN FETAL LIVER, SIGNAL = 6.9; EXPRESSED IN BT474, SIGNAL = 5.5; EXPRESSED IN ADULT LIVER, SIGNAL = 9.6; EXPRESSED IN LUNG, SIGNAL =  13; EST_HUMAN HIT: AW103354.1, EVALUE 4.00e-06; SWISSPROT HIT: Q02385, EVALUE 9.10e+00; NT HIT: AJ011712.1, EVALUE 2.30e-01
ctcagactcctgagtagccaggaccacaggctcattaaaaaaagggtttttttgtgtgtgtgtaagtggggtctttctatgttgctgtattggtctgttcacatgctg

SEQ ID NO: 17610 - DNA, 165 bp, Homo sapiens
  MAP TO AP000119.1; EXPRESSED IN PLACENTA, SIGNAL = 1.5; EXPRESSED IN BRAIN, SIGNAL = 1.8; EXPRESSED IN BT474, SIGNAL = 1.2; EXPRESSED IN BONE MARROW, SIGNAL = 1.6; EXPRESSED IN HBL100, SIGNAL = 1.3; EXPRESSED IN FETAL LIVER, SIGNAL = 1.5; EXPRESSED IN LUNG, SIGNAL = 3.6; EXPRESSED IN HELA, SIGNAL = 1.4; EXPRESSED IN ADULT LIVER, SIGNAL = 1.2; EXPRESSED IN HEART, SIGNAL = 1.6; SWISSPROT HIT: P51457, EVALUE 3.00e+00; EST_HUMAN HIT: AA194514.1, EVALUE 9.00e-03; NT HIT: gi11430271, EVALUE 6.00e-03
atggagcgtctaggaactccctacccaaagtgtggtctgtgggccagcagcacctgcgtcatctgggaacttgtaagaaatgggattcttagcagatcccagaccctgctgcatcagaacctgcattttaatgagatcccaggtgatttgtgtacctgtgaaaat

SEQ ID NO: 17611 - DNA, 261 bp, Homo sapiens
  MAP TO AP000118.1; EXPRESSED IN PLACENTA, SIGNAL = 4.4; EXPRESSED IN HBL100, SIGNAL = 1.7; EXPRESSED IN LUNG, SIGNAL = 2.8; EXPRESSED IN BRAIN, SIGNAL = 3.3; EXPRESSED IN HEART, SIGNAL = 2.4; EXPRESSED IN BT474, SIGNAL = 2.1; EXPRESSED IN BONE MARROW, SIGNAL = 2.7; EXPRESSED IN FETAL LIVER, SIGNAL = 2.4; EXPRESSED IN HELA, SIGNAL = 2.2; EXPRESSED IN ADULT LIVER, SIGNAL = 2.5; SWISSPROT HIT: P34111, EVALUE 3.20e+00; EST_HUMAN HIT: BF576124.1, EVALUE 2.40e-01; NT HIT: AF282732.1, EVALUE 2.50e+00
acaaaagactcatggaaccaaacttcatccccaaagtattcaggtccgctgggctgctgaaggggagcagcactggtgtctgggtgtggcatctgaacctttgcttccagaacaccagcatcgtcacatttctcagagaaagcaatttgccttgagacagttccattgtgagtggaagagacaagggtgcattgttcaccagacaatgcctgaagtaaggattatgcaaaatggactcttgacctctctattccaaataag

SEQ ID NO: 17612 - DNA, 83 bp, Homo sapiens
  MAP TO AP000118.1; EXPRESSED IN PLACENTA, SIGNAL = 3.8; EXPRESSED IN LUNG, SIGNAL = 5.7; EXPRESSED IN ADULT LIVER, SIGNAL = 6.6; EXPRESSED IN BRAIN, SIGNAL = 1.7; EXPRESSED IN HEART, SIGNAL = 2.4; EXPRESSED IN BT474, SIGNAL =  15; EXPRESSED IN HELA, SIGNAL = 6.1; EXPRESSED IN FETAL LIVER, SIGNAL =  18; EXPRESSED IN HBL100, SIGNAL =  34; EXPRESSED IN BONE MARROW, SIGNAL =  25; EST_HUMAN HIT: AA814196.1, EVALUE 3.00e-18; SWISSPROT HIT: Q24186, EVALUE 1.00e-04; NT HIT: AB007149.1, EVALUE 1.00e-17
ggcagtgatgagctcatctgccaggcactcagcaatggtcatgatctcccggagggcaccctcaagagtgcctgtgcacagca

SEQ ID NO: 17613 - DNA, 553 bp, Homo sapiens
  MAP TO AP000118.1; EXPRESSED IN BT474, SIGNAL = 1.7; EXPRESSED IN BONE MARROW, SIGNAL = 1.8; EXPRESSED IN HELA, SIGNAL = 1.5; EXPRESSED IN ADULT LIVER, SIGNAL = 1.3; EXPRESSED IN FETAL LIVER, SIGNAL = 1.7; EXPRESSED IN LUNG, SIGNAL = 1.8; EXPRESSED IN BRAIN, SIGNAL = 1.3; EXPRESSED IN PLACENTA, SIGNAL = 2.1; EXPRESSED IN HBL100, SIGNAL = 1.4; EXPRESSED IN HEART, SIGNAL = 1.6; NT HIT: AF027153.1, EVALUE 0.00e+00; EST_HUMAN HIT: BF375312.1, EVALUE 8.10e+00; SWISSPROT HIT: P53794, EVALUE 3.00e-91
tcctggtcatgtgcattggtttttttgccatgtggaaatctaatagaagcaccgtgagtggatacttcctggcggggcgctctatgacctgggtaacaattggtgcctctctgtttgtgagcaatattgggagtgagcacttcattgggctggcaggatctggagctgcaagtggatttgcagtgggcgcatgggaattcaatgccttactgcttttacaacttctgggatgggttttcatcccaatttacatccggtcaggggtatataccatgcctgaatacttgtccaagcgatttggtggccataggattcaggtctattttgcagccttgtctctgattctctatattttcaccaagctctcggtggatctgtattcgggtgccctttttatccaggagtctttgggttggaatctttatgtgtctgtcatcctgctcattggcatgactgctttgctgactgtcaccggaggccttgttgcagtgatctacacagacactctgcaggctctgctcatgatcattggggcacttacacttatgattat

SEQ ID NO: 17614 - DNA, 140 bp, Homo sapiens
  MAP TO AP000114.1; EXPRESSED IN BT474, SIGNAL = 2.5; EXPRESSED IN FETAL LIVER, SIGNAL = 2.4; EXPRESSED IN LUNG, SIGNAL = 2.1; EXPRESSED IN HELA, SIGNAL = 3.4; EXPRESSED IN ADULT LIVER, SIGNAL = 2.1; EXPRESSED IN HEART, SIGNAL = 1.8; EXPRESSED IN PLACENTA, SIGNAL = 1.6; EXPRESSED IN BRAIN, SIGNAL = 1.4; EXPRESSED IN BONE MARROW, SIGNAL = 1.9; EXPRESSED IN HBL100, SIGNAL = 2.4; NT HIT: gi4507152, EVALUE 2.00e-73; EST_HUMAN HIT: BE895116.1, EVALUE 3.00e-73; SWISSPROT HIT: P18583, EVALUE 5.00e-22
aagaattccctgtatcatctggatctcaacatcggaaaaaagaagcggatagtgtttatggagaatgggttcctgtggagaaaaatggtgaagaaaacaaagatgatgataatgttttcagcagcaatttgccctcagag

SEQ ID NO: 17615 - DNA, 141 bp, Homo sapiens
  MAP TO AP000114.1; EXPRESSED IN PLACENTA, SIGNAL =  10; EXPRESSED IN BT474, SIGNAL =  11; EXPRESSED IN BONE MARROW, SIGNAL = 5.8; EXPRESSED IN FETAL LIVER, SIGNAL = 9.2; EXPRESSED IN LUNG, SIGNAL = 7.3; EXPRESSED IN ADULT LIVER, SIGNAL = 2.7; EXPRESSED IN BRAIN, SIGNAL = 5.2; EXPRESSED IN HEART, SIGNAL = 4.9; EXPRESSED IN HBL100, SIGNAL = 5.8; EXPRESSED IN HELA, SIGNAL = 4.6; NT HIT: AB028942.1, EVALUE 4.00e-74; EST_HUMAN HIT: AW997856.1, EVALUE 5.00e-74; SWISSPROT HIT: Q55119, EVALUE 2.30e+00
tctgtaacagtaggagtggatcccttgatggccccagaatcccatatattagcttctaacaccatggagacccatatattagcatccaacaccatggactcccaaatgctagcgtccaacaccatggactcccagatgcta

SEQ ID NO: 17616 - DNA, 187 bp, Homo sapiens
  MAP TO AP000114.1; EXPRESSED IN BT474, SIGNAL = 1.7; EXPRESSED IN HELA, SIGNAL = 2.6; EXPRESSED IN HEART, SIGNAL = 1.3; EXPRESSED IN PLACENTA, SIGNAL = 1.3; EXPRESSED IN FETAL LIVER, SIGNAL =   2; EXPRESSED IN LUNG, SIGNAL = 1.2; EXPRESSED IN ADULT LIVER, SIGNAL = 2.7; EXPRESSED IN BONE MARROW, SIGNAL = 2.9; EXPRESSED IN HBL100, SIGNAL = 3.9; EXPRESSED IN BRAIN, SIGNAL = 1.5; SWISSPROT HIT: P22102, EVALUE 3.00e-28; NT HIT: gi11526206, EVALUE 1.00e-101; EST_HUMAN HIT: BE746440.1, EVALUE 1.00e-101
ctataaattgctccctcaaactttatagcagctagtcctttcttggcttcctcaagggctgatatgagattttcccggatggctgtgactgcaagaactctacccccatgagttactactttgccatttttgagggcagtgcctgcatggaacacctccagtcctagagcttgagcctcaggaaacc

SEQ ID NO: 17617 - DNA, 1086 bp, Homo sapiens; identical to SEQ ID NO: 17120
  MAP TO AP000114.1; EXPRESSED IN FETAL LIVER, SIGNAL =   6; EXPRESSED IN ADULT LIVER, SIGNAL = 3.5; EXPRESSED IN PLACENTA, SIGNAL = 5.3; EXPRESSED IN BT474, SIGNAL = 6.8; EXPRESSED IN BONE MARROW, SIGNAL = 4.5; EXPRESSED IN HEART, SIGNAL = 3.4; EXPRESSED IN BRAIN, SIGNAL = 4.6; EXPRESSED IN HELA, SIGNAL = 6.1; EXPRESSED IN LUNG, SIGNAL = 5.4; EXPRESSED IN HBL100, SIGNAL = 4.4; EST_HUMAN HIT: AI801337.1, EVALUE 0.00e+00; NT HIT: gi11526208, EVALUE 0.00e+00; SWISSPROT HIT: P18583, EVALUE 1.00e-42

SEQ ID NO: 17618 - DNA, 277 bp, Homo sapiens; identical to SEQ ID NO: 17123
  MAP TO AP000114.1; EXPRESSED IN BT474, SIGNAL =  14; EXPRESSED IN FETAL LIVER, SIGNAL =  13; EXPRESSED IN PLACENTA, SIGNAL =  11; EXPRESSED IN BONE MARROW, SIGNAL =  11; EXPRESSED IN HBL100, SIGNAL =  12; EXPRESSED IN LUNG, SIGNAL =  10; EXPRESSED IN HELA, SIGNAL = 8.1; EXPRESSED IN ADULT LIVER, SIGNAL = 8.1; EXPRESSED IN BRAIN, SIGNAL = 9.6; EXPRESSED IN HEART, SIGNAL = 7.4; NT HIT: X63751.1, EVALUE 0.00e+00; EST_HUMAN HIT: AU118276.1, EVALUE 0.00e+00; SWISSPROT HIT: P18583, EVALUE 7.00e-14

SEQ ID NO: 17619 - DNA, 739 bp, Homo sapiens; identical to SEQ ID NO: 17119
  MAP TO AP000114.1; EXPRESSED IN PLACENTA, SIGNAL =   4; EXPRESSED IN BONE MARROW, SIGNAL = 4.5; EXPRESSED IN HBL100, SIGNAL = 4.5; EXPRESSED IN LUNG, SIGNAL = 4.2; EXPRESSED IN HELA, SIGNAL =   3; EXPRESSED IN BRAIN, SIGNAL = 4.3; EXPRESSED IN BT474, SIGNAL = 9.8; EXPRESSED IN FETAL LIVER, SIGNAL = 6.4; EXPRESSED IN HEART, SIGNAL =   3; EXPRESSED IN ADULT LIVER, SIGNAL = 2.3; NT HIT: gi11526208, EVALUE 0.00e+00; EST_HUMAN HIT: BE256886.1, EVALUE 0.00e+00; SWISSPROT HIT: P18583, EVALUE 9.00e-59

SEQ ID NO: 17620 - DNA, 511 bp, Homo sapiens
  MAP TO AP000114.1; EXPRESSED IN FETAL LIVER, SIGNAL =  16; EXPRESSED IN ADULT LIVER, SIGNAL = 6.3; EXPRESSED IN BRAIN, SIGNAL = 0.8; EXPRESSED IN HEART, SIGNAL =   2; EXPRESSED IN BONE MARROW, SIGNAL =  14; EXPRESSED IN HBL100, SIGNAL =  28; EXPRESSED IN LUNG, SIGNAL = 5.6; EXPRESSED IN PLACENTA, SIGNAL = 3.9; EXPRESSED IN BT474, SIGNAL =  12; EXPRESSED IN HELA, SIGNAL = 9.1; NT HIT: gi11426957, EVALUE 0.00e+00; EST_HUMAN HIT: BF341043.1, EVALUE 0.00e+00; SWISSPROT HIT: P46782, EVALUE 1.00e-74
ggtggcattgatgagctcatccgccaggcactcagcaatggtcttgatgttccagaaggcagcctcacgagtgcctgtgcacagcagccagacgacctgattcacacagtgcagtggggacatgtccacagcctgttgtctcacagtccctgctcgcccaatgcatgtggagtcctcccagggaccactgttgatgatggcgttcaccaggacctggagagggttctcgcctgtgagcaggtggatgaaatcgaaggcatgcttgatgatgcacatgatcatgagcttgttgctgttgttgcagccgtgcatcatcatggagttagtgaggggctccacaatggggcactgagctttgcggaagcatttggctgcataccacccagcactgtgaggcaggtacttggcatacttctccttcactgcagtgtaatcctgcagggaaatgccattgatctgcatatcatcagtgctccacttcccagagagcttgatgtcaaggggtctctgc

SEQ ID NO: 17621 - DNA, 100 bp, Homo sapiens
  MAP TO AP000109.1; EXPRESSED IN HBL100, SIGNAL = 8.2; EXPRESSED IN FETAL LIVER, SIGNAL = 8.7; EXPRESSED IN HELA, SIGNAL = 7.5; EXPRESSED IN ADULT LIVER, SIGNAL = 4.4; EXPRESSED IN BRAIN, SIGNAL = 3.4; EXPRESSED IN PLACENTA, SIGNAL = 3.1; EXPRESSED IN HEART, SIGNAL = 3.6; EXPRESSED IN LUNG, SIGNAL = 5.6; EXPRESSED IN BONE MARROW, SIGNAL = 4.3; EXPRESSED IN BT474, SIGNAL =   6; SWISSPROT HIT: P13390, EVALUE 9.20e+00
tccttgaggtggttcccacagttttccatatcccagccagggctctcttcacactgtccccacttccatggctggagccgtagttttttcctggtcataa

SEQ ID NO: 17622 - DNA, 259 bp, Homo sapiens
  MAP TO AP000105.1; EXPRESSED IN BRAIN, SIGNAL = 1.8; EXPRESSED IN FETAL LIVER, SIGNAL = 0.9; EXPRESSED IN HELA, SIGNAL = 0.8; EXPRESSED IN ADULT LIVER, SIGNAL = 0.88; EXPRESSED IN BT474, SIGNAL = 0.63; EXPRESSED IN LUNG, SIGNAL = 0.85; EXPRESSED IN HEART, SIGNAL = 6.9; EXPRESSED IN PLACENTA, SIGNAL = 1.1; EXPRESSED IN BONE MARROW, SIGNAL = 0.66; NT HIT: AB020717.1, EVALUE 1.00e-116; EST_HUMAN HIT: BF109166.1, EVALUE 1.00e-116; SWISSPROT HIT: O43426, EVALUE 2.00e-14
tctgtgcactgggaggcccaggagttcttgacggtgctcggcttggtctgatgggaagggaaggtacaggaccctctgatattgtaggtgactggcagggactagttcggggtgaagagctgggggaagtaccaaggccggaacttgaagatggctggagatgctgaggaagaagttcctccacttcagcactatagtcatcaacatcacctaaggaaaagcaggcttgatcagagataactccattttaacttgctca

SEQ ID NO: 17623 - DNA, 264 bp, Homo sapiens
  MAP TO AP000105.1; EXPRESSED IN BT474, SIGNAL = 3.2; EXPRESSED IN HELA, SIGNAL =   2; EXPRESSED IN ADULT LIVER, SIGNAL = 3.6; EXPRESSED IN PLACENTA, SIGNAL = 1.5; EXPRESSED IN BONE MARROW, SIGNAL = 1.6; EXPRESSED IN HBL100, SIGNAL = 3.3; EXPRESSED IN FETAL LIVER, SIGNAL = 2.7; EXPRESSED IN LUNG, SIGNAL = 2.3; EXPRESSED IN BRAIN, SIGNAL = 2.3; EXPRESSED IN HEART, SIGNAL = 2.1; NT HIT: X87825.1, EVALUE 1.00e-103; EST_HUMAN HIT: AA042813.1, EVALUE 1.00e-125; SWISSPROT HIT: Q95157, EVALUE 7.00e-21
gtgtgcctggtcacggtgctgtggaacctgctcagcatcctggccgtcagccctgactcccacctccacacccccatgcacttcttcctctgcaacctgtccttgcctgacatcggtttcacctccaccacggtccccaagatgatcgtggacatccaatctcacagcagagtcatctcctatgcaggctgcctgactcagatgtctctctctgccatttttggaggcatggaagagagacatgctcctgagtgtgatggccta

SEQ ID NO: 17624 - DNA, 398 bp, Homo sapiens
  MAP TO AP000105.1; EXPRESSED IN HBL100, SIGNAL = 1.1; EXPRESSED IN BRAIN, SIGNAL = 2.2; EXPRESSED IN HEART, SIGNAL = 1.2; EXPRESSED IN PLACENTA, SIGNAL = 1.5; EXPRESSED IN BT474, SIGNAL = 1.1; EXPRESSED IN BONE MARROW, SIGNAL = 1.2; EXPRESSED IN ADULT LIVER, SIGNAL = 1.1; EXPRESSED IN HELA, SIGNAL = 1.7; EXPRESSED IN LUNG, SIGNAL = 1.3; EXPRESSED IN FETAL LIVER, SIGNAL = 1.6; NT HIT: AB020717.1, EVALUE 0.00e+00; SWISSPROT HIT: O43426, EVALUE 2.00e-70; EST_HUMAN HIT: AU131904.1, EVALUE 1.00e-116
gtccttaaagccatcaagtgaagatgaagccctgcttttgttatgaccaagaggctgcagagaagggaaaggactgatagtaacgggctcttctttggagaaccatgaagttgcctctgattcttcagacttggctctaaatgggtttccaggagcagcagtcctgtcactgaaaggatttgtcctggtcaagccagtaataaatgggtttggagaacttcgcatattttcctgggattgactccgagctggaattggaggcattgttggcatgcaacttacagaactcaaaacattactttgcgttgcagaaggcaactgaatcaacctctttgggtctggggtgggaacaggtgacgtttgaacagatagctgagcctttgatacagcaagcagat

SEQ ID NO: 17625 - DNA, 248 bp, Homo sapiens
  MAP TO AP000104.1; EXPRESSED IN HBL100, SIGNAL = 1.8; EXPRESSED IN BRAIN, SIGNAL = 2.4; EXPRESSED IN BT474, SIGNAL = 1.7; EXPRESSED IN BONE MARROW, SIGNAL = 1.8; EXPRESSED IN FETAL LIVER, SIGNAL = 2.1; EXPRESSED IN LUNG, SIGNAL = 2.5; EXPRESSED IN HELA, SIGNAL = 2.3; EXPRESSED IN ADULT LIVER, SIGNAL = 1.5; EXPRESSED IN PLACENTA, SIGNAL = 1.8; EXPRESSED IN HEART, SIGNAL =   2; NT HIT: gi11433577, EVALUE 6.00e-04; EST_HUMAN HIT: AA533272.1, EVALUE 0.00e+00; SWISSPROT HIT: P14728, EVALUE 1.80e-01
cccacccggagagagctgccctgctgttcgtgtccagtgtctgcatcggcctggccctcacactgtgcgccctggtcatcagagagtcctgtgccaaggacttccgcgacttgcagctggggagggagcagctggtgccaggaagtgacaaggtcgaggaggacagcgaggatgaagaagaggaggaggacccctctgagtctgatttcccaggggaactgtcggggttctgtaggacttcatatcct

SEQ ID NO: 17626 - DNA, 458 bp, Homo sapiens
  MAP TO AP000104.1; EXPRESSED IN PLACENTA, SIGNAL = 8.4; EXPRESSED IN BT474, SIGNAL = 5.8; EXPRESSED IN FETAL LIVER, SIGNAL = 6.3; EXPRESSED IN LUNG, SIGNAL = 6.6; EXPRESSED IN HELA, SIGNAL = 8.9; EXPRESSED IN ADULT LIVER, SIGNAL =   6; EXPRESSED IN BONE MARROW, SIGNAL =  10; EXPRESSED IN HBL100, SIGNAL = 6.5; EXPRESSED IN BRAIN, SIGNAL = 9.4; EXPRESSED IN HEART, SIGNAL = 7.4; NT HIT: AF281132.1, EVALUE 1.00e-123; SWISSPROT HIT: Q26563, EVALUE 3.50e+00; EST_HUMAN HIT: BF677694.1, EVALUE 0.00e+00
aatggaggacggtagactggacacgggtcacactgaggttccagtaacttcaggcctcttcatcagagtgttgaataagaagcagaactttagcctccaaataaggtgtagttttggccggggaccgggaaagctgagacactgctgggctggggccgccatagccctgggaacggagtatattctagtgaaaggagaccaggtgactggcatagtgacagctaaatctggagatatattcagagttgatgttggagggagtgagccagtttctttgtcttacttggcatttgaaggtgcaactaaaagaaacagaccaaatgtgcaggttggagatctcatctatggccaatttgtggttgctaataaagacatggaaccagagatggtctgtattgacagctatggatgagccaatggaaggaatgtcattggacaggatggtctgctttttaaag

SEQ ID NO: 17627 - DNA, 149 bp, Homo sapiens
  MAP TO AP000099.1; EXPRESSED IN BRAIN, SIGNAL = 2.7; EXPRESSED IN HBL100, SIGNAL =  13; EXPRESSED IN ADULT LIVER, SIGNAL = 4.3; EXPRESSED IN HEART, SIGNAL = 3.5; EXPRESSED IN PLACENTA, SIGNAL = 3.1; EXPRESSED IN BT474, SIGNAL = 7.4; EXPRESSED IN BONE MARROW, SIGNAL = 7.4; EXPRESSED IN LUNG, SIGNAL = 5.1; EXPRESSED IN HELA, SIGNAL = 7.9; EXPRESSED IN FETAL LIVER, SIGNAL = 9.9; EST_HUMAN HIT: BE762670.1, EVALUE 2.00e+00; NT HIT: X54816.1, EVALUE 2.20e-02
accagagcttacattccagtgacgggcaaggtcaggtaacaaaaaggaagcagaagttagtgatggtggaaaaggaggaggaagaggaggagatgacaaggtcacaagactggctttggagctctagcagggctggctccctcctacct

SEQ ID NO: 17628 - DNA, 125 bp, Homo sapiens
  MAP TO AP000099.1; EXPRESSED IN HELA, SIGNAL = 5.5; EXPRESSED IN LUNG, SIGNAL = 2.4; EXPRESSED IN HEART, SIGNAL = 1.4; EXPRESSED IN BT474, SIGNAL = 4.1; EXPRESSED IN FETAL LIVER, SIGNAL = 4.7; EXPRESSED IN ADULT LIVER, SIGNAL = 2.4; EXPRESSED IN BRAIN, SIGNAL = 1.6; EXPRESSED IN PLACENTA, SIGNAL = 1.8; EXPRESSED IN BONE MARROW, SIGNAL = 3.4; EXPRESSED IN HBL100, SIGNAL = 6.8; EST_HUMAN HIT: AA430310.1, EVALUE 3.00e-13; NT HIT: gi11419745, EVALUE 5.00e-12; SWISSPROT HIT: Q58133, EVALUE 5.20e+00
ttcttgacttaataagaaaaagatcattgactgaggttgctaagacctatggtaaagatgaatcttctatccatgaaattgtgaagaaagaaaaagaagtgtgtgctagttttgctgtttcagct

SEQ ID NO: 17629 - DNA, 190 bp, Homo sapiens
  MAP TO AP000099.1; EXPRESSED IN BONE MARROW, SIGNAL = 2.6; EXPRESSED IN HBL100, SIGNAL = 1.9; EXPRESSED IN FETAL LIVER, SIGNAL = 2.2; EXPRESSED IN LUNG, SIGNAL = 2.4; EXPRESSED IN HELA, SIGNAL = 2.7; EXPRESSED IN PLACENTA, SIGNAL = 2.4; EXPRESSED IN BT474, SIGNAL = 1.8; EXPRESSED IN HEART, SIGNAL = 1.9; EXPRESSED IN ADULT LIVER, SIGNAL = 2.5; EXPRESSED IN BRAIN, SIGNAL = 2.3; EST_HUMAN HIT: AU123327.1, EVALUE 4.20e-02; SWISSPROT HIT: P30995, EVALUE 4.90e+00
aaagtgtagagagatatttccctgagaagcttctcaacaacatgaatgaaaaaatagacgagctctcttggtttgcaaatgctcttaaagttgagggcaaaaatgtgaaaaagaagagtctttttttcctcctcacccacggtgaggtcagaggtggagttgctttaatagtaaacaccaaacacaggct

SEQ ID NO: 17630 - DNA, 656 bp, Homo sapiens; identical to SEQ ID NO: 17140
  MAP TO AP000099.1; EXPRESSED IN HEART, SIGNAL = 1.3; EXPRESSED IN BT474, SIGNAL = 1.6; EXPRESSED IN HELA, SIGNAL = 1.4; EXPRESSED IN PLACENTA, SIGNAL = 1.4; EXPRESSED IN BONE MARROW, SIGNAL = 1.6; EXPRESSED IN HBL100, SIGNAL = 1.4; EXPRESSED IN FETAL LIVER, SIGNAL = 1.7; EXPRESSED IN LUNG, SIGNAL = 1.5; EXPRESSED IN ADULT LIVER, SIGNAL = 1.6; EXPRESSED IN BRAIN, SIGNAL = 1.9; EST_HUMAN HIT: BF529471.1, EVALUE 0.00e+00; NT HIT: gi11526180, EVALUE 0.00e+00; SWISSPROT HIT: P57058, EVALUE 1.00e-109

SEQ ID NO: 17631 - DNA, 297 bp, Homo sapiens; identical to SEQ ID NO: 17591
  MAP TO AP000098.1; EXPRESSED IN ADULT LIVER, SIGNAL = 2.6; EXPRESSED IN BRAIN, SIGNAL = 3.3; EXPRESSED IN BONE MARROW, SIGNAL =   2; EXPRESSED IN HBL100, SIGNAL = 2.3; EXPRESSED IN FETAL LIVER, SIGNAL =   2; EXPRESSED IN LUNG, SIGNAL = 3.3; EXPRESSED IN HEART, SIGNAL = 2.2; EXPRESSED IN PLACENTA, SIGNAL = 2.5; EXPRESSED IN BT474, SIGNAL = 1.9; EXPRESSED IN HELA, SIGNAL = 2.2; EST_HUMAN HIT: BF114883.1, EVALUE 0.00e+00; NT HIT: gi11526180, EVALUE 0.00e+00; SWISSPROT HIT: P57058, EVALUE 2.00e-51

SEQ ID NO: 17632 - DNA, 120 bp, Homo sapiens
  MAP TO AP000094.1; EXPRESSED IN PLACENTA, SIGNAL = 5.8; EXPRESSED IN BRAIN, SIGNAL = 7.2; EXPRESSED IN HEART, SIGNAL = 4.8; EXPRESSED IN BONE MARROW, SIGNAL = 6.9; EXPRESSED IN HELA, SIGNAL = 6.1; EXPRESSED IN LUNG, SIGNAL = 5.9; EXPRESSED IN BT474, SIGNAL = 4.5; EXPRESSED IN ADULT LIVER, SIGNAL = 4.5; EXPRESSED IN FETAL LIVER, SIGNAL = 4.5; EXPRESSED IN HBL100, SIGNAL = 4.2; EST_HUMAN HIT: BE974314.1, EVALUE 2.50e-02; NT HIT: AE001708.1, EVALUE 2.30e-01; SWISSPROT HIT: P02441, EVALUE 4.00e+00
gagtctaggataaagtagcagttgtttgcaaaatggaagacagtacctagtggtggaaaaccgaaagttccatggagacaggcatgcagcatgcagtaggccaactgcaacgaagccagg

SEQ ID NO: 17633 - DNA, 203 bp, Homo sapiens; identical to SEQ ID NO: 17096
  MAP TO AP000089.1; EXPRESSED IN PLACENTA, SIGNAL = 5.3; EXPRESSED IN BT474, SIGNAL = 8.7; EXPRESSED IN HBL100, SIGNAL = 8.9; EXPRESSED IN LUNG, SIGNAL = 5.2; EXPRESSED IN HELA, SIGNAL =   5; EXPRESSED IN BRAIN, SIGNAL =  11; EXPRESSED IN BONE MARROW, SIGNAL = 6.1; EXPRESSED IN FETAL LIVER, SIGNAL = 3.4; EXPRESSED IN ADULT LIVER, SIGNAL = 4.1; EXPRESSED IN HEART, SIGNAL = 3.2; NT HIT: D87675.1, EVALUE 3.00e-82; EST_HUMAN HIT: BE615368.1, EVALUE 5.00e-82

SEQ ID NO: 17634 - DNA, 134 bp, Homo sapiens
  MAP TO AP000089.1; EXPRESSED IN FETAL LIVER, SIGNAL =   2; EXPRESSED IN HELA, SIGNAL = 2.6; EXPRESSED IN ADULT LIVER, SIGNAL = 2.1; EXPRESSED IN BRAIN, SIGNAL = 1.8; EXPRESSED IN HEART, SIGNAL = 1.9; EXPRESSED IN PLACENTA, SIGNAL = 2.5; EXPRESSED IN LUNG, SIGNAL =   3; EXPRESSED IN HBL100, SIGNAL = 4.1; EXPRESSED IN BONE MARROW, SIGNAL = 2.4; EXPRESSED IN BT474, SIGNAL = 3.5; NT HIT: M16765.1, EVALUE 7.00e-70; SWISSPROT HIT: Q95241, EVALUE 2.00e-20; EST_HUMAN HIT: BE710294.1, EVALUE 1.00e-69
ctgggacattctctctcggtgcttggcctcaagcctctctttggctttctggaaatgggcatgttcattctcatccccaggtgtctcgagatacttgtcaacggcatcaggggtactggctgctgttgtaggaa

SEQ ID NO: 17635 - DNA, 174 bp, Homo sapiens
  MAP TO AP000089.1; EXPRESSED IN BONE MARROW, SIGNAL = 4.1; EXPRESSED IN LUNG, SIGNAL = 6.8; EXPRESSED IN HELA, SIGNAL =  10; EXPRESSED IN ADULT LIVER, SIGNAL = 6.3; EXPRESSED IN BRAIN, SIGNAL = 8.9; EXPRESSED IN PLACENTA, SIGNAL = 3.4; EXPRESSED IN BT474, SIGNAL = 7.5; EXPRESSED IN HEART, SIGNAL = 3.3; EXPRESSED IN HBL100, SIGNAL = 7.4; EXPRESSED IN FETAL LIVER, SIGNAL = 5.2; NT HIT: X13474.1, EVALUE 1.00e-93; SWISSPROT HIT: P08592, EVALUE 1.00e-24; EST_HUMAN HIT: AU124116.1, EVALUE 3.00e-86
acctacccgaggaggaacagcctgcagagcggtgatgtagttctccagggccaggcggcggcggtcattgagcatggcttccactctggccatgtgtgtctccaccagctgctgtctctcgttggctgcttcctgttccaaagattccactttctcctggaaatgctgccatca

SEQ ID NO: 17636 - DNA, 98 bp, Homo sapiens
  MAP TO AP000089.1; EXPRESSED IN BT474, SIGNAL = 8.3; EXPRESSED IN BONE MARROW, SIGNAL = 1.6; EXPRESSED IN LUNG, SIGNAL = 7.3; EXPRESSED IN ADULT LIVER, SIGNAL = 4.8; EXPRESSED IN HELA, SIGNAL =  12; EXPRESSED IN PLACENTA, SIGNAL = 4.7; EXPRESSED IN HEART, SIGNAL = 6.9; EXPRESSED IN BRAIN, SIGNAL =  17; EXPRESSED IN FETAL LIVER, SIGNAL = 5.3; EXPRESSED IN HBL100, SIGNAL = 4.4; SWISSPROT HIT: P05067, EVALUE 2.00e-13; NT HIT: M34873.1, EVALUE 1.00e-48; EST_HUMAN HIT: BF512835.1, EVALUE 2.00e-48
tccaccatgcgcacatgctcgaaatgctttagggtgtgctgtctgtccttctgttctgcgcggacatacttctttagcatattgaacacgtgacgagg

SEQ ID NO: 17637 - DNA, 180 bp, Homo sapiens
  MAP TO AP000088.1; EXPRESSED IN PLACENTA, SIGNAL = 7.2; EXPRESSED IN BT474, SIGNAL =  14; EXPRESSED IN HBL100, SIGNAL = 9.5; EXPRESSED IN LUNG, SIGNAL =  13; EXPRESSED IN BRAIN, SIGNAL =  30; EXPRESSED IN BONE MARROW, SIGNAL = 2.7; EXPRESSED IN FETAL LIVER, SIGNAL = 8.5; EXPRESSED IN HELA, SIGNAL =   8; EXPRESSED IN ADULT LIVER, SIGNAL = 7.6; EXPRESSED IN HEART, SIGNAL =  11; SWISSPROT HIT: Q95241, EVALUE 3.00e-29; EST_HUMAN HIT: BE081685.1, EVALUE 4.00e-97; NT HIT: X13477.1, EVALUE 4.00e-97
aatgccacggctggagatcgtccaggctgaactctccattcacgggaaggagctccacggtggttttcgtttcggtcaaagatggcatgagagcatcgtttccgtaactgatccttggttcactaatcatgttggccaagacgtcatctgaatagttttgctctttctgaagcagctcat

SEQ ID NO: 17638 - DNA, 92 bp, Homo sapiens
  MAP TO AP000088.1; EXPRESSED IN HBL100, SIGNAL = 2.3; EXPRESSED IN FETAL LIVER, SIGNAL = 1.4; EXPRESSED IN PLACENTA, SIGNAL = 1.5; EXPRESSED IN BT474, SIGNAL = 1.8; EXPRESSED IN BONE MARROW, SIGNAL =   2; EXPRESSED IN LUNG, SIGNAL = 1.9; EXPRESSED IN HELA, SIGNAL = 2.2; EXPRESSED IN ADULT LIVER, SIGNAL = 1.8; EXPRESSED IN BRAIN, SIGNAL = 2.2; EXPRESSED IN HEART, SIGNAL = 1.7; NT HIT: AF132449.2, EVALUE 2.60e+00; EST_HUMAN HIT: Z43785.1, EVALUE 7.80e-01
tgaactgcagtgtctccagccgcgccctgtgcaatgatttggttctgcattgcgccccctagaggtgagtggaagcaatgtccaagctgtgg

SEQ ID NO: 17639 - DNA, 103 bp, Homo sapiens; identical to SEQ ID NO: 17134
  MAP TO AP000085.1; EXPRESSED IN BRAIN, SIGNAL =   2; EXPRESSED IN HBL100, SIGNAL = 1.7; EXPRESSED IN FETAL LIVER, SIGNAL = 1.8; EXPRESSED IN ADULT LIVER, SIGNAL = 1.8; EXPRESSED IN HEART, SIGNAL = 1.8; EXPRESSED IN BT474, SIGNAL = 1.8; EXPRESSED IN BONE MARROW, SIGNAL = 1.9; EXPRESSED IN HELA, SIGNAL = 1.9; EXPRESSED IN PLACENTA, SIGNAL = 1.7; EXPRESSED IN LUNG, SIGNAL =   2; NT HIT: AF107723.1, EVALUE 8.70e-01; EST_HUMAN HIT: R46482.1, EVALUE 4.00e-03

SEQ ID NO: 17640 - DNA, 151 bp, Homo sapiens
  MAP TO AP000085.1; EXPRESSED IN LUNG, SIGNAL = 0.87; EXPRESSED IN HELA, SIGNAL = 1.5; EXPRESSED IN HEART, SIGNAL = 2.2; EXPRESSED IN PLACENTA, SIGNAL = 1.2; EXPRESSED IN FETAL LIVER, SIGNAL = 1.9; EXPRESSED IN ADULT LIVER, SIGNAL = 1.8; EXPRESSED IN BRAIN, SIGNAL = 1.3; EXPRESSED IN BT474, SIGNAL = 1.1; EXPRESSED IN BONE MARROW, SIGNAL = 0.95; EXPRESSED IN HBL100, SIGNAL = 1.8; NT HIT: gi11429784, EVALUE 1.40e+00; EST_HUMAN HIT: BE768257.1, EVALUE 2.00e+00
tattcttgccaactaacttggggaagagggagtaggcacggtaccactcaaaaaaataataataataataaaatttaaaaaaaaaacactcctactgttctctttgaagttctagcagtttttttaagaataagtgtttctcaatttgttg

SEQ ID NO: 17641 - DNA, 97 bp, Homo sapiens
  MAP TO AP000085.1; EXPRESSED IN PLACENTA, SIGNAL = 4.9; EXPRESSED IN BT474, SIGNAL =  11; EXPRESSED IN BONE MARROW, SIGNAL = 3.1; EXPRESSED IN HEART, SIGNAL = 7.7; EXPRESSED IN BRAIN, SIGNAL = 5.4; EXPRESSED IN HBL100, SIGNAL = 5.8; EXPRESSED IN FETAL LIVER, SIGNAL = 5.6; EXPRESSED IN LUNG, SIGNAL = 8.3; EXPRESSED IN HELA, SIGNAL = 7.4; EXPRESSED IN ADULT LIVER, SIGNAL = 5.1; EST_HUMAN HIT: T74242.1, EVALUE 1.90e-02; NT HIT: AF011920.1, EVALUE 3.00e-03
tccctgtactttgaattgttctcgctgctgctgctgctgctgcatctcttctgcctccagttggagaaagctctctgctttgaaggctttatgtaat

SEQ ID NO: 17642 - DNA, 162 bp, Homo sapiens
  MAP TO AP000055.1; EXPRESSED IN BRAIN, SIGNAL = 1.3; EXPRESSED IN BT474, SIGNAL = 1.6; EXPRESSED IN BONE MARROW, SIGNAL = 1.6; EXPRESSED IN PLACENTA, SIGNAL = 1.6; EXPRESSED IN HEART, SIGNAL = 1.3; EXPRESSED IN ADULT LIVER, SIGNAL = 1.7; EXPRESSED IN HELA, SIGNAL = 2.4; EXPRESSED IN LUNG, SIGNAL = 1.7; EXPRESSED IN FETAL LIVER, SIGNAL = 1.7; EXPRESSED IN HBL100, SIGNAL = 2.1; NT HIT: Z80345.1, EVALUE 4.00e-04; EST_HUMAN HIT: AA456538.1, EVALUE 2.40e-02; SWISSPROT HIT: P28797, EVALUE 8.60e+00
tggaaactaaaacatgtgcccagacattgccagatgatccatggagggcaaaatcaccccttgttgaaagccacttctcaaacccatgaccacagatctgtttcatcaggtcaacatccttcaccataaatttcagggatctggaggagtggagggtggaga

SEQ ID NO: 17643 - DNA, 230 bp, Homo sapiens
  MAP TO AP000049.1; EXPRESSED IN HELA, SIGNAL = 0.9; EXPRESSED IN BT474, SIGNAL = 1.3; EXPRESSED IN FETAL LIVER, SIGNAL = 2.2; EXPRESSED IN LUNG, SIGNAL = 0.96; EXPRESSED IN PLACENTA, SIGNAL = 1.2; EXPRESSED IN BONE MARROW, SIGNAL = 0.98; EXPRESSED IN HBL100, SIGNAL = 1.4; EXPRESSED IN ADULT LIVER, SIGNAL = 1.5; EXPRESSED IN BRAIN, SIGNAL =   2; EXPRESSED IN HEART, SIGNAL = 1.3; SWISSPROT HIT: Q15811, EVALUE 1.00e-24; EST_HUMAN HIT: AW950164.1, EVALUE 1.00e-127; NT HIT: gi4504796, EVALUE 1.00e-127
acgagctcaggaaagggacaagcagtggctggagcatgtgcagcaggaggacgagcatcagagaccaagaaaactccacgaagaggaaaaactgaaaagggaggagagtgtcaaaaagaaggatggcgaggaaaaaggcaaacaggaagcacaagacaagctgggtcggcttttccatcaacaccaagaaccagctaagccagctgtccaggcaccctggtccactgcag

SEQ ID NO: 17644 - DNA, 263 bp, Homo sapiens
  MAP TO AP000049.1; EXPRESSED IN BONE MARROW, SIGNAL = 3.3; EXPRESSED IN ADULT LIVER, SIGNAL = 3.2; EXPRESSED IN BRAIN, SIGNAL =   4; EXPRESSED IN PLACENTA, SIGNAL = 3.3; EXPRESSED IN BT474, SIGNAL =   3; EXPRESSED IN HBL100, SIGNAL = 2.9; EXPRESSED IN LUNG, SIGNAL = 3.2; EXPRESSED IN HELA, SIGNAL = 3.5; EXPRESSED IN FETAL LIVER, SIGNAL = 5.3; EXPRESSED IN HEART, SIGNAL = 2.9; EST_HUMAN HIT: BE542917.1, EVALUE 3.00e-62; SWISSPROT HIT: O35601, EVALUE 2.80e-01; NT HIT: AF114487.1, EVALUE 1.00e-122
taacgtttgaagataagaagcgggagaactttgaacgtggcaacctggaactggagaaacgaaggcaagctctcctggaacagcagcgcaaggagcaggagcgcctggcccagctggagcgggcggagcaggagaggaaggagcgtgagcgccaggagcaagagcgcaaaagacaactggaactggagaagcaactggaaaagcagcgggagctagaacggcagagagaggaggagaggaggaaagaaattgagaggcgagag

SEQ ID NO: 17645 - DNA, 130 bp, Homo sapiens
  MAP TO AP000049.1; EXPRESSED IN FETAL LIVER, SIGNAL =   1; EXPRESSED IN ADULT LIVER, SIGNAL = 1.6; EXPRESSED IN BRAIN, SIGNAL = 1.8; EXPRESSED IN HEART, SIGNAL = 1.7; EXPRESSED IN BT474, SIGNAL =  26; EXPRESSED IN PLACENTA, SIGNAL = 1.2; EXPRESSED IN HELA, SIGNAL = 1.7; EXPRESSED IN LUNG, SIGNAL = 1.7; EXPRESSED IN HBL100, SIGNAL = 1.4; EXPRESSED IN BONE MARROW, SIGNAL = 1.6; NT HIT: AJ276597.1, EVALUE 2.50e-01; EST_HUMAN HIT: AA225989.1, EVALUE 1.00e-40; SWISSPROT HIT: P30731, EVALUE 4.00e+00
gaatgggtgtcagggcaaacagccatatagtcatagtttgtactttcttaagacactcctgagtatgtgtcagaagggccttcagccccaacaagatcaatttgctaaactcatacaaaaaaaaaaaaaa

SEQ ID NO: 17646 - DNA, 112 bp, Homo sapiens
  MAP TO AP000045.1; EXPRESSED IN BT474, SIGNAL = 7.8; EXPRESSED IN HBL100, SIGNAL =   7; EXPRESSED IN FETAL LIVER, SIGNAL = 8.6; EXPRESSED IN BRAIN, SIGNAL = 6.4; EXPRESSED IN PLACENTA, SIGNAL = 7.5; EXPRESSED IN BONE MARROW, SIGNAL = 9.7; EXPRESSED IN LUNG, SIGNAL = 8.7; EXPRESSED IN HELA, SIGNAL = 4.8; EXPRESSED IN ADULT LIVER, SIGNAL = 5.8; EXPRESSED IN HEART, SIGNAL = 5.8; NT HIT: gi5031782, EVALUE 2.00e-54; SWISSPROT HIT: P78574, EVALUE 3.10e+00; EST_HUMAN HIT: BE891918.1, EVALUE 1.00e-56
tttggcaaatgagccggagccccttgggcaggtcacacaacctgtcccagcgagggacaccgagtggcccttcatgtacatccatggtgtgctggcttaaaatgtaattaat

SEQ ID NO: 17647 - DNA, 79 bp, Homo sapiens
  MAP TO AP000045.1; EXPRESSED IN PLACENTA, SIGNAL = 1.7; EXPRESSED IN BONE MARROW, SIGNAL = 2.7; EXPRESSED IN HBL100, SIGNAL = 1.9; EXPRESSED IN FETAL LIVER, SIGNAL = 2.3; EXPRESSED IN LUNG, SIGNAL = 2.8; EXPRESSED IN HELA, SIGNAL = 1.7; EXPRESSED IN ADULT LIVER, SIGNAL = 2.5; EXPRESSED IN BRAIN, SIGNAL = 1.8; EXPRESSED IN BT474, SIGNAL = 1.7; EXPRESSED IN HEART, SIGNAL = 1.9; NT HIT: gi5031782, EVALUE 2.00e-34; SWISSPROT HIT: P38484, EVALUE 1.00e-07; EST_HUMAN HIT: AW163768.1, EVALUE 1.00e-36
agagcaggtcctgagttgggagccagtggccctgagcaatagcacgaggcctgttgtctaccaagtgcagtttaaatag

SEQ ID NO: 17648 - DNA, 197 bp, Homo sapiens
  MAP TO AP000044.1; EXPRESSED IN FETAL LIVER, SIGNAL = 2.3; EXPRESSED IN HELA, SIGNAL = 1.9; EXPRESSED IN ADULT LIVER, SIGNAL = 1.4; EXPRESSED IN PLACENTA, SIGNAL = 1.4; EXPRESSED IN HEART, SIGNAL = 1.2; EXPRESSED IN BRAIN, SIGNAL = 1.5; EXPRESSED IN HBL100, SIGNAL = 1.3; EXPRESSED IN LUNG, SIGNAL = 1.9; EXPRESSED IN BONE MARROW, SIGNAL = 1.3; EXPRESSED IN BT474, SIGNAL = 2.7; NT HIT: X60459.1, EVALUE 1.00e-107; EST_HUMAN HIT: AW937895.1, EVALUE 2.00e-43; SWISSPROT HIT: P22415, EVALUE 4.00e-20
ggtgtgtgaggggcagctggatgtccagactgagggcactggtgccatcagtggctatcctaccactcaattcatgacccaggtggtgatccagggtgatatcaccagttatgatgcagttaacacagaggggaaagctgctgagatacactatactttcccacccctgcagtgggagatggggcagggggtaccac

SEQ ID NO: 17649 - DNA, 158 bp, Homo sapiens
  MAP TO AP000044.1; EXPRESSED IN BT474, SIGNAL = 1.2; EXPRESSED IN HBL100, SIGNAL = 1.9; EXPRESSED IN FETAL LIVER, SIGNAL = 1.5; EXPRESSED IN BRAIN, SIGNAL = 0.84; EXPRESSED IN BONE MARROW, SIGNAL = 1.4; EXPRESSED IN ADULT LIVER, SIGNAL = 1.7; EXPRESSED IN HEART, SIGNAL = 1.1; EXPRESSED IN PLACENTA, SIGNAL = 1.8; EXPRESSED IN LUNG, SIGNAL = 1.5; EXPRESSED IN HELA, SIGNAL = 0.74; NT HIT: U08988.1, EVALUE 8.00e-82; EST_HUMAN HIT: AI904079.1, EVALUE 2.00e-68; SWISSPROT HIT: Q08334, EVALUE 3.00e-20
gtcatcctcatggcctcggtcttcatggtctgcctggcactcctcggctgcttcgccttgctgtggtgcgtttacaagaagacaaagtacgccttctcccctaggaattctcttccacagcacctgaaagaggtaggtaggatggagtgagatgtgga

SEQ ID NO: 17650 - DNA, 75 bp, Homo sapiens
  MAP TO AP000039.1; EXPRESSED IN HEART, SIGNAL = 4.4; EXPRESSED IN PLACENTA, SIGNAL = 5.5; EXPRESSED IN BT474, SIGNAL =   4; EXPRESSED IN BONE MARROW, SIGNAL = 4.9; EXPRESSED IN HBL100, SIGNAL = 4.8; EXPRESSED IN FETAL LIVER, SIGNAL = 4.3; EXPRESSED IN LUNG, SIGNAL = 4.8; EXPRESSED IN HELA, SIGNAL = 4.8; EXPRESSED IN ADULT LIVER, SIGNAL =   5; EXPRESSED IN BRAIN, SIGNAL = 5.6; EST_HUMAN HIT: AA468646.1, EVALUE 2.00e-08; NT HIT: AJ007973.1, EVALUE 1.00e-13
ggcttgggacttccaccctctgaagccacagcccatgctgttacattggcccctttcagccgcggctggagtggc

SEQ ID NO: 17651 - DNA, 276 bp, Homo sapiens
  MAP TO AP000034.1; EXPRESSED IN HEART, SIGNAL =  17; EXPRESSED IN BT474, SIGNAL =   7; EXPRESSED IN FETAL LIVER, SIGNAL = 9.9; EXPRESSED IN HELA, SIGNAL =  12; EXPRESSED IN PLACENTA, SIGNAL = 9.7; EXPRESSED IN BONE MARROW, SIGNAL =  10; EXPRESSED IN HBL100, SIGNAL = 8.5; EXPRESSED IN LUNG, SIGNAL =  13; EXPRESSED IN ADULT LIVER, SIGNAL =  11; EXPRESSED IN BRAIN, SIGNAL =  16
atgtcttcttctttttcctcctcctctccccttcctcctcctcctcttccttcttcttcttcttttcttctccttctttcttctctcttcctctcccctccctccctgcctgcctgcctgccttcattcattctttccttccttccttctttccttactctttcttttcctcctcctcttctctcttcctcctcctcctcctcctcctcctcctcctcctcctcctccttcttcttcttcttcttcttcttcttcttcttcttctcctcctcttcc

SEQ ID NO: 17652 - DNA, 90 bp, Homo sapiens
  MAP TO AP000034.1; EXPRESSED IN HELA, SIGNAL = 7.6; EXPRESSED IN BRAIN, SIGNAL = 6.2; EXPRESSED IN HEART, SIGNAL =   6; EXPRESSED IN BT474, SIGNAL = 4.3; EXPRESSED IN BONE MARROW, SIGNAL = 7.1; EXPRESSED IN HBL100, SIGNAL = 4.6; EXPRESSED IN LUNG, SIGNAL = 7.3; EXPRESSED IN ADULT LIVER, SIGNAL =   8; EXPRESSED IN PLACENTA, SIGNAL = 5.3; EXPRESSED IN FETAL LIVER, SIGNAL = 5.8; EST_HUMAN HIT: AI222985.1, EVALUE 8.00e-44; NT HIT: AF060557.1, EVALUE 7.40e-01
gggaggcggaccaggacatgtagagcaagatgaggaagagcagcaccacgaaggcagccaggctcacccagaatgcgatcacgatggaat

SEQ ID NO: 17653 - DNA, 364 bp, Homo sapiens
  MAP TO AP000025.1; EXPRESSED IN PLACENTA, SIGNAL = 0.98; EXPRESSED IN BT474, SIGNAL = 0.99; EXPRESSED IN BONE MARROW, SIGNAL = 0.86; EXPRESSED IN ADULT LIVER, SIGNAL = 0.99; EXPRESSED IN HELA, SIGNAL = 1.8; EXPRESSED IN LUNG, SIGNAL = 1.1; EXPRESSED IN FETAL LIVER, SIGNAL = 0.95; EXPRESSED IN HBL100, SIGNAL = 1.3; EXPRESSED IN HEART, SIGNAL = 0.87; EXPRESSED IN BRAIN, SIGNAL = 0.91; SWISSPROT HIT: Q9ZKF7, EVALUE 9.50e+00; EST_HUMAN HIT: BE968588.1, EVALUE 2.00e-27; NT HIT: AL163203.2, EVALUE 0.00e+00
attatccagggatgtcttcattataggaattacactgcattcaattgcacacatggtgatccttgtgtccaggcatgagaggcaatctcagcaccttcacagcatcagcatctctccacaagccttcccagagaaaagggctgctcagaccatcccgctgttagtgagctactgtctggtcatgtgctgggtggacctcatcatctcatcttcttcaaccctgctgtggacgtgtaacccagtcttcctgagtatgcagaaccttgtgggcgatgtctacgccactgttgttccactggaacaaatcagctctgataaaaatatagttgacattctccaaaatatgcaaagtgctataaagctt

SEQ ID NO: 17654 - DNA, 96 bp, Homo sapiens
  MAP TO AP000025.1; EXPRESSED IN LUNG, SIGNAL = 2.4; EXPRESSED IN HELA, SIGNAL = 1.9; EXPRESSED IN PLACENTA, SIGNAL = 1.7; EXPRESSED IN BT474, SIGNAL = 2.6; EXPRESSED IN BONE MARROW, SIGNAL = 1.6; EXPRESSED IN HBL100, SIGNAL = 1.2; EXPRESSED IN FETAL LIVER, SIGNAL = 1.3; EXPRESSED IN BRAIN, SIGNAL =   1; EXPRESSED IN ADULT LIVER, SIGNAL = 0.95; EXPRESSED IN HEART, SIGNAL = 1.1; NT HIT: AL163203.2, EVALUE 5.00e-45; EST_HUMAN HIT: AI810090.1, EVALUE 3.00e-19
tacaacatctacactcatctgattcacctgggttgtagactttattttacgcatctctgcaaccttttcttcttcttcaacacctgtaaaaaatat

SEQ ID NO: 17655 - DNA, 233 bp, Homo sapiens
  MAP TO AL109760.1; EXPRESSED IN HBL100, SIGNAL = 2.1; EXPRESSED IN LUNG, SIGNAL = 2.3; EXPRESSED IN PLACENTA, SIGNAL = 5.7; EXPRESSED IN BT474, SIGNAL = 3.3; EXPRESSED IN BONE MARROW, SIGNAL = 1.8; EXPRESSED IN FETAL LIVER, SIGNAL = 3.2; EXPRESSED IN HELA, SIGNAL = 1.8; EXPRESSED IN ADULT LIVER, SIGNAL = 1.4; EXPRESSED IN BRAIN, SIGNAL = 2.1; EXPRESSED IN HEART, SIGNAL = 1.7; NT HIT: Y07848.1, EVALUE 8.70e+00; EST_HUMAN HIT: AL134797.1, EVALUE 8.30e-01; SWISSPROT HIT: P12107, EVALUE 6.20e-01
atcacgtgccacccagcatctccacagaagaacgggtcacttgggccctggccctgggtgcccatcacagagaaggaagcagggcagctattggtgggcaagtgtcccccggtagatggagccatcctgcccccaccatcctggaatggaagggtcatcagacttgggtttgaggaagaccatgccgccagtgccgcatatgtcagaggggccaaagtgagggtgagacttag

SEQ ID NO: 17656 - DNA, 79 bp, Homo sapiens
  MAP TO AL096794.3; EXPRESSED IN BONE MARROW, SIGNAL = 1.8; EXPRESSED IN ADULT LIVER, SIGNAL = 1.4; EXPRESSED IN PLACENTA, SIGNAL = 1.3; EXPRESSED IN BT474, SIGNAL = 1.3; EXPRESSED IN HBL100, SIGNAL = 1.5; EXPRESSED IN FETAL LIVER, SIGNAL = 1.4; EXPRESSED IN LUNG, SIGNAL = 1.6; EXPRESSED IN HELA, SIGNAL = 1.8; EXPRESSED IN BRAIN, SIGNAL = 1.8; EXPRESSED IN HEART, SIGNAL = 1.8; NT HIT: U32791.1, EVALUE 1.60e-01; EST_HUMAN HIT: BF350616.1, EVALUE 9.40e-01
acccttacaaatgaaggtaagtttgaagggaaaaacagtgggaaggaccttctatggtggcttctccctttctctgttt

SEQ ID NO: 17657 - DNA, 264 bp, Homo sapiens
  MAP TO AL096755.1; EXPRESSED IN PLACENTA, SIGNAL = 0.99; EXPRESSED IN HBL100, SIGNAL = 1.6; EXPRESSED IN BRAIN, SIGNAL = 1.1; EXPRESSED IN BT474, SIGNAL = 1.4; EXPRESSED IN BONE MARROW, SIGNAL = 0.9; EXPRESSED IN FETAL LIVER, SIGNAL = 1.6; EXPRESSED IN LUNG, SIGNAL = 1.1; EXPRESSED IN HELA, SIGNAL = 1.1; EXPRESSED IN ADULT LIVER, SIGNAL = 1.7; EXPRESSED IN HEART, SIGNAL = 1.1; SWISSPROT HIT: P30290, EVALUE 1.90e+00; NT HIT: U09506.1, EVALUE 3.50e-02
cttgagatctacatgtctggataccgctgccttctggcctctctctggatggagggtggagggtggaggtggaagccacttcctcgcaggcttcgcgggaatttgctctcctctcttacagtgtccagcattgcttctgagagattcgctgccatgtgactctaggcctgtgtttgcaccttttcgttccttccccaacacctctgccctgagtgtggtggtgacatgtcttttcctcatcttgctggagcagtctgtgggacc

SEQ ID NO: 17658 - DNA, 269 bp, Homo sapiens
  MAP TO AL080239.11; EXPRESSED IN BT474, SIGNAL = 0.73; EXPRESSED IN BONE MARROW, SIGNAL = 0.83; EXPRESSED IN FETAL LIVER, SIGNAL = 0.69; EXPRESSED IN LUNG, SIGNAL = 1.4; EXPRESSED IN HELA, SIGNAL = 0.71; EXPRESSED IN PLACENTA, SIGNAL = 1.5; EXPRESSED IN HEART, SIGNAL = 0.83; EXPRESSED IN BRAIN, SIGNAL = 1.4; EXPRESSED IN ADULT LIVER, SIGNAL = 0.67; EXPRESSED IN HBL100, SIGNAL = 1.5; NT HIT: AL096805.1, EVALUE 5.50e-01; EST_HUMAN HIT: AW003645.1, EVALUE 4.20e-02; SWISSPROT HIT: O15534, EVALUE 3.80e-01
agccgtctgcaccattcacaagccctgcacctgccattacattcaccactcctttgggtcccattcgaagtcctcctggtgggccagtgcctctgtctattttaatcttaagtatcttagtggtcctcattttaacggtgtttgttgctttttgccttcttgtttttgtcctgcgacgcaacaagaaacccacagtgaagcacgaaggcctggggaatcctgactgtggctccatgcagctgcagctaaggaagcatgaccacaaaacc

SEQ ID NO: 17659 - DNA, 149 bp, Homo sapiens
  MAP TO AL080239.11; EXPRESSED IN HELA, SIGNAL = 8.1; EXPRESSED IN ADULT LIVER, SIGNAL = 8.7; EXPRESSED IN BRAIN, SIGNAL = 5.8; EXPRESSED IN PLACENTA, SIGNAL = 7.8; EXPRESSED IN BT474, SIGNAL = 7.8; EXPRESSED IN LUNG, SIGNAL = 8.2; EXPRESSED IN HEART, SIGNAL =   4; EXPRESSED IN BONE MARROW, SIGNAL = 9.8; EXPRESSED IN HBL100, SIGNAL =  19; EXPRESSED IN FETAL LIVER, SIGNAL = 9.8; EST_HUMAN HIT: BE409203.1, EVALUE 2.00e-39; NT HIT: AJ001235.1, EVALUE 7.00e-36; SWISSPROT HIT: P02834, EVALUE 6.70e+00
accaggagggatgaacaactccggacgggaggaacgaacaattccagacgtgctgcctttaagagctgtaacactcgccaccaacgtctgcagcttcactcctgaagtcagcgagaccacgaacccaccagaaggaagaaactccagac

SEQ ID NO: 17660 - DNA, 1728 bp, Homo sapiens
  MAP TO AL080239.11; EXPRESSED IN PLACENTA, SIGNAL = 1.9; EXPRESSED IN BT474, SIGNAL = 1.5; EXPRESSED IN BONE MARROW, SIGNAL = 1.7; EXPRESSED IN HBL100, SIGNAL = 1.4; EXPRESSED IN FETAL LIVER, SIGNAL = 1.8; EXPRESSED IN HEART, SIGNAL = 1.9; EXPRESSED IN LUNG, SIGNAL = 2.1; EXPRESSED IN HELA, SIGNAL = 1.7; EXPRESSED IN ADULT LIVER, SIGNAL = 1.9; EXPRESSED IN BRAIN, SIGNAL = 2.6; EST_HUMAN HIT: BE089592.1, EVALUE 0.00e+00; SWISSPROT HIT: Q27972, EVALUE 2.00e-15
attatttctctttattcagaagcatacagttgtttgctgattgcaagaagatgtttctgtggctgtttctgattttgtcagccctgatttcttcgacaaatgcagattctgacatatcggtggaaatttgcaatgtgtgttcctgcgtgtcagttgagaatgtgctctatgtcaactgtgagaaggtttcagtctacagaccaaatcagctgaaaccaccttggtctaatttttatcacctcaatttccaaaataattttttaaatattctgtatccaaatacattcttgaatttttcacatgcagtctccctgcatctggggaataataaactgcagaacattgagggaggagcctttcttgggctcagtgcattaaagcagttgcacttgaacaacaatgaattaaagattctccgagctgacactttccttggcatagagaacttggagtatctccaggctgactacaatttaatcaagtatattgaacgaggagccttcaataagctccacaaactgaaagttctcattcttaatgacaatctgatttcattccttcctgataatattttccgattcgcatctttgacccatctggatatacgagggaacagaatccagaagctcccttatatcggggttctggaacacattggccgtgtcgttgaattgcaactggaagataacccttggaactgtagctgtgatttattgcccttaaaagcttggctggagaacatgccatataacatttacataggagaagctatctgtgaaactcccagtgacttatatggaaggcttttaaaagaaaccaacaaacaagagctatgtcccatgggcaccggcagtgattttgacgtgcgcatcctgcctccatctcagctggaaaatggctacaccactcccaatggtcacactacccaaacatctttacacagattagtaactaaaccaccaaaaacaacaaatccttccaagatctctggaatcgttgcaggcaaagccctctccaaccgcaatctcagtcagattgtgtcttaccaaacaagggtgcctcctctaacaccttgcccggcaccttgcttctgcaaaacacacccttcagatttgggactaagtgtgaactgccaagagaaaaatatacagtctatgtctgaactgataccgaaacctttaaatgcgaagaagctgcacgtcaatggcaatagcatcaaggatgtggacgtatcagacttcactgactttgaaggactggatttgcttcatttaggcagcaatcaaattacagtgattaagggagacgtatttcacaatctcactaatttacgcaggctatatctcaatggcaatcaaattgagagactctatcctgaaatattttcaggtcttcataacctgcagtatctgtatttggaatacaatttgattaaggaaatctcagcaggcacctttgactccatgccaaatttgcagttactgtacttaaacaataatctcctaaagagcctgcctgtttacatcttttccggagcacccttagctagactgaacctgaggaacaacaaattcatgtacctgcctgtcagtggggtccttgatcagttgcaatctcttacacagattgacttggagggcaacccatgggactgtacttgtgacttggtggcattaaagctgtgggtggagaagttgagcgacgggattgttgtgaaagaactgaaat

SEQ ID NO: 17661 - DNA, 236 bp, Homo sapiens
  MAP TO AL079305.2; EXPRESSED IN BT474, SIGNAL = 9.9; EXPRESSED IN HELA, SIGNAL =   5; EXPRESSED IN ADULT LIVER, SIGNAL = 4.8; EXPRESSED IN BONE MARROW, SIGNAL = 9.3; EXPRESSED IN HBL100, SIGNAL = 5.7; EXPRESSED IN FETAL LIVER, SIGNAL = 9.1; EXPRESSED IN LUNG, SIGNAL = 9.9; EXPRESSED IN BRAIN, SIGNAL =   5; EXPRESSED IN PLACENTA, SIGNAL = 9.1; EXPRESSED IN HEART, SIGNAL =   4; NT HIT: U08988.1, EVALUE 7.00e-34; SWISSPROT HIT: P39684, EVALUE 9.60e+00; EST_HUMAN HIT: BF035327.1, EVALUE 1.00e-49
gtaacatgaaagtgcaaagtgaagcagcaagtaccgatgtagaaactgcagcaagttatccagaagatctagctaaaatcactgatgaaggtggctatgataaacaacagattttcagtgaagacaaaacagtattctattggaagaagatgtcaactaggactttcatagctaacgaggagaagtcaatgcctgacttcaaaacttcgaaggacagactgactcttgttaggggc

SEQ ID NO: 17662 - DNA, 154 bp, Homo sapiens
  MAP TO AL079295.1; EXPRESSED IN FETAL LIVER, SIGNAL = 1.8; EXPRESSED IN LUNG, SIGNAL = 0.87; EXPRESSED IN HELA, SIGNAL = 2.3; EXPRESSED IN BRAIN, SIGNAL = 1.1; EXPRESSED IN HEART, SIGNAL = 2.3; EXPRESSED IN PLACENTA, SIGNAL = 0.74; EXPRESSED IN BT474, SIGNAL = 2.4; EXPRESSED IN BONE MARROW, SIGNAL = 0.7; EXPRESSED IN ADULT LIVER, SIGNAL = 1.9; EXPRESSED IN HBL100, SIGNAL = 2.2; NT HIT: AF050641.1, EVALUE 8.00e-70; SWISSPROT HIT: Q16795, EVALUE 7.00e-23; EST_HUMAN HIT: AI422197.1, EVALUE 6.00e-80
agcaattgcttggggaatcttcacaaaaacatcctcaaaatcaaagtttttggtttcccagtctcgtccaacaagatttatgaccacattgctgtgttccactactcgtcagatagaatctttatctctcgcgtcccattccagaaacagaagc

SEQ ID NO: 17663 - DNA, 185 bp, Homo sapiens
  MAP TO AL079295.1; EXPRESSED IN BT474, SIGNAL = 6.1; EXPRESSED IN BONE MARROW, SIGNAL = 1.4; EXPRESSED IN HBL100, SIGNAL = 6.7; EXPRESSED IN FETAL LIVER, SIGNAL = 5.6; EXPRESSED IN HELA, SIGNAL = 3.5; EXPRESSED IN BRAIN, SIGNAL = 3.5; EXPRESSED IN PLACENTA, SIGNAL = 2.3; EXPRESSED IN ADULT LIVER, SIGNAL = 3.7; EXPRESSED IN HEART, SIGNAL =   8; EXPRESSED IN LUNG, SIGNAL = 2.4; SWISSPROT HIT: Q16795, EVALUE 2.00e-26; NT HIT: gi11525735, EVALUE 1.00e-69; EST_HUMAN HIT: AA225394.1, EVALUE 1.00e-97
ttgctgtgagccacagcaaagatgtacttcaccaggtcaaagaggagatatcgatttggcccaacgaaagcaaaggttttcccattggcatcaggatccttaactgcattaacaattcctttggatacatctacgacgtatactggttgtttaactgccttccagcccaaggaaacaaggggtat

SEQ ID NO: 17664 - DNA, 171 bp, Homo sapiens
  MAP TO AL078644.10; EXPRESSED IN HBL100, SIGNAL = 2.1; EXPRESSED IN FETAL LIVER, SIGNAL = 2.3; EXPRESSED IN LUNG, SIGNAL = 2.5; EXPRESSED IN HELA, SIGNAL = 2.9; EXPRESSED IN PLACENTA, SIGNAL = 2.8; EXPRESSED IN BT474, SIGNAL = 2.6; EXPRESSED IN BONE MARROW, SIGNAL = 3.1; EXPRESSED IN ADULT LIVER, SIGNAL = 2.7; EXPRESSED IN BRAIN, SIGNAL = 3.4; EXPRESSED IN HEART, SIGNAL = 2.7; NT HIT: AJ271192.1, EVALUE 1.30e+00
tgctagcagcctgtacgctctgggcaacactgccagattcctgagtaaaggtaccaacctcacaagctatcaactacaaatgacagaacccatgatgtatgtcaggacttcagtgcccagagggaccagtaggctgcatacccagttacagagggccaggactattaacag

SEQ ID NO: 17665 - DNA, 155 bp, Homo sapiens
  MAP TO AL078644.10; EXPRESSED IN ADULT LIVER, SIGNAL = 1.5; EXPRESSED IN BONE MARROW, SIGNAL = 1.2; EXPRESSED IN HELA, SIGNAL = 2.1; EXPRESSED IN BRAIN, SIGNAL = 1.5; EXPRESSED IN HEART, SIGNAL = 4.9; EXPRESSED IN PLACENTA, SIGNAL = 1.5; EXPRESSED IN BT474, SIGNAL = 0.93; EXPRESSED IN FETAL LIVER, SIGNAL = 1.5; EXPRESSED IN LUNG, SIGNAL = 1.5; EXPRESSED IN HBL100, SIGNAL = 1.3; NT HIT: U80885.1, EVALUE 2.00e-11; SWISSPROT HIT: O41515, EVALUE 2.00e-10; EST_HUMAN HIT: AA723823.1, EVALUE 3.00e-72
cagcatggaaatactcaccaagctgtctctgctcaccactaggaagagggcttgattactatcgagctttaagggccttctaattatcttgacgagtttactcatgttgacctgatcaggtacaaaattacttggtttttccaggacaggaagct

SEQ ID NO: 17666 - DNA, 225 bp, Homo sapiens
  MAP TO AL078644.10; EXPRESSED IN ADULT LIVER, SIGNAL = 1.8; EXPRESSED IN BT474, SIGNAL = 3.6; EXPRESSED IN BONE MARROW, SIGNAL = 4.3; EXPRESSED IN LUNG, SIGNAL = 3.6; EXPRESSED IN HELA, SIGNAL = 1.8; EXPRESSED IN PLACENTA, SIGNAL = 2.7; EXPRESSED IN HBL100, SIGNAL =   3; EXPRESSED IN FETAL LIVER, SIGNAL = 5.1; EXPRESSED IN BRAIN, SIGNAL = 1.9; EXPRESSED IN HEART, SIGNAL = 1.8; NT HIT: AB020657.1, EVALUE 1.00e-124; EST_HUMAN HIT: AA308190.1, EVALUE 1.00e-124
ctgcagctatgagtttgccattcatctctgctgttcccagaccagatcgtgcgtactgcataggagacatgggcttttcgattagctcatcttgttgcatctcaaagcttaaactcttacttagttttggagtacttgttggtgagctctgtgggctgtttctcccatgaagaaaaatgacacagaatataccatccagcacagccaggcacaagtaagtgttat

SEQ ID NO: 17667 - DNA, 141 bp, Homo sapiens
  MAP TO AL078598.4; EXPRESSED IN PLACENTA, SIGNAL = 1.9; EXPRESSED IN BT474, SIGNAL = 2.5; EXPRESSED IN HBL100, SIGNAL = 2.2; EXPRESSED IN HELA, SIGNAL = 2.7; EXPRESSED IN BRAIN, SIGNAL = 7.3; EXPRESSED IN HEART, SIGNAL = 2.6; EXPRESSED IN BONE MARROW, SIGNAL = 2.1; EXPRESSED IN FETAL LIVER, SIGNAL = 1.4; EXPRESSED IN LUNG, SIGNAL = 2.5; EXPRESSED IN ADULT LIVER, SIGNAL = 1.9; EST_HUMAN HIT: AW020986.1, EVALUE 5.00e-74; SWISSPROT HIT: P25384, EVALUE 3.00e+00; NT HIT: AL163227.2, EVALUE 3.20e-01
ggtttaaaatatatttatagtaggaactaccaaacattatctcaagctgagctataagaaagcccatcaaagttaacttccaaggcattctgatagttatgccttgattctggatcttgattttcccacacttctgttttc

SEQ ID NO: 17668 - DNA, 116 bp, Homo sapiens
  MAP TO AL078584.17; EXPRESSED IN PLACENTA, SIGNAL = 1.3; EXPRESSED IN LUNG, SIGNAL = 1.3; EXPRESSED IN HEART, SIGNAL = 1.3; EXPRESSED IN BONE MARROW, SIGNAL = 0.8; EXPRESSED IN BRAIN, SIGNAL = 1.9; EXPRESSED IN BT474, SIGNAL = 1.2; EXPRESSED IN ADULT LIVER, SIGNAL = 1.4; EXPRESSED IN HELA, SIGNAL = 1.5; EXPRESSED IN FETAL LIVER, SIGNAL = 0.77; EXPRESSED IN HBL100, SIGNAL = 1.2; NT HIT: gi11345489, EVALUE 6.40e-02; EST_HUMAN HIT: BE394869.1, EVALUE 1.70e-02; SWISSPROT HIT: P15435, EVALUE 4.00e+00
ttggatgttaaatgaagaaacaatgactccattctcttcaagcttgtctccttctgaccttggcttccaggagagctcttggaaggaaggcaagggcaggaaagtggggagagtac

SEQ ID NO: 17669 - DNA, 358 bp, Homo sapiens
  MAP TO AL078584.17; EXPRESSED IN BONE MARROW, SIGNAL =   4; EXPRESSED IN HBL100, SIGNAL = 6.4; EXPRESSED IN PLACENTA, SIGNAL =   5; EXPRESSED IN FETAL LIVER, SIGNAL = 5.4; EXPRESSED IN HELA, SIGNAL =  11; EXPRESSED IN ADULT LIVER, SIGNAL =   8; EXPRESSED IN BRAIN, SIGNAL =  11; EXPRESSED IN HEART, SIGNAL = 4.5; EXPRESSED IN BT474, SIGNAL = 8.8; EXPRESSED IN LUNG, SIGNAL = 7.6; EST_HUMAN HIT: AF075680.1, EVALUE 3.00e-04; NT HIT: M86524.1, EVALUE 2.00e-04
ggtggtaatggtgatgatgattatgatgatactgatgatgatggtggtggtggcggtagtggttggactggtggtagtgatgatagtggtggtagcgattatagagataataataattgtggtggtggtaaggtgatgatgataataatcatgatgatgatagtggtggtagtggtattggttatgatggtgatggtagtgatggttgtagtggtggttatggtgatgatgattatgatgataatgttgatgatggtggtggtgataatggtggtgatagttatagttgtggtggtggtggtgatggtagtggtggtgaggtgatgatgatgatattcacgatgatggtgatggtggt

SEQ ID NO: 17670 - DNA, 295 bp, Homo sapiens
  MAP TO AL078475.2; EXPRESSED IN PLACENTA, SIGNAL = 2.7; EXPRESSED IN BRAIN, SIGNAL = 6.5; EXPRESSED IN BT474, SIGNAL = 3.6; EXPRESSED IN HBL100, SIGNAL = 2.2; EXPRESSED IN FETAL LIVER, SIGNAL = 2.9; EXPRESSED IN LUNG, SIGNAL = 2.8; EXPRESSED IN HELA, SIGNAL = 2.9; EXPRESSED IN ADULT LIVER, SIGNAL = 3.7; EXPRESSED IN BONE MARROW, SIGNAL = 1.7; EXPRESSED IN HEART, SIGNAL = 3.9; SWISSPROT HIT: Q92543, EVALUE 1.00e-46; EST_HUMAN HIT: AU135644.1, EVALUE 0.00e+00; NT HIT: AL163203.2, EVALUE 0.00e+00
ctgcttctcttgctactaacagaacagtggaaatggctgtgtattgaaaacatgcagaagtttcttcgtcttatctttggtaccctagttcaaaggtggctagaggtgcaggtagctaatttaacaagtccacagtgctgggtgcagtacctctggcttcttcaggagtccatctggcctggtggagttttgcctaagtttccacggcctgtaaggacccaggagcagaaactggctgctgagaaacaggctttgcagagcctaatgggagtcttcccagatctcatagtagaaa

SEQ ID NO: 17671 - DNA, 208 bp, Homo sapiens
  MAP TO AL050339.4; EXPRESSED IN FETAL LIVER, SIGNAL = 1.1; EXPRESSED IN LUNG, SIGNAL = 1.6; EXPRESSED IN HELA, SIGNAL = 2.1; EXPRESSED IN HEART, SIGNAL = 1.2; EXPRESSED IN PLACENTA, SIGNAL = 1.3; EXPRESSED IN ADULT LIVER, SIGNAL = 1.8; EXPRESSED IN BRAIN, SIGNAL = 1.3; EXPRESSED IN BT474, SIGNAL = 1.5; EXPRESSED IN BONE MARROW, SIGNAL = 0.99; EXPRESSED IN HBL100, SIGNAL = 1.2; EST_HUMAN HIT: T87947.1, EVALUE 1.00e-35; SWISSPROT HIT: P31792, EVALUE 3.00e-08; NT HIT: AB030652.1, EVALUE 1.90e+00
cacaaggctcttccattatcaatgcctccctaacaaaggccctccttaaggttgctttcctgccagccaaggctggagtcattcattataaagggcaccagaaacctactgatcttattgcaaaaggaaatgcctatgccaacaggacggcaaaagaaatagctgatgcctccacatccactaatattccagccctcactccagaggt

SEQ ID NO: 17672 - DNA, 82 bp, Homo sapiens
  MAP TO AL050338.11; EXPRESSED IN BT474, SIGNAL = 2.6; EXPRESSED IN BONE MARROW, SIGNAL =   4; EXPRESSED IN HBL100, SIGNAL = 2.7; EXPRESSED IN ADULT LIVER, SIGNAL = 3.3; EXPRESSED IN HEART, SIGNAL = 2.6; EXPRESSED IN PLACENTA, SIGNAL = 3.2; EXPRESSED IN FETAL LIVER, SIGNAL = 2.7; EXPRESSED IN LUNG, SIGNAL = 3.3; EXPRESSED IN HELA, SIGNAL =   4; EXPRESSED IN BRAIN, SIGNAL = 3.6; NT HIT: D78638.1, EVALUE 1.40e-01; SWISSPROT HIT: Q10064, EVALUE 5.40e+00; EST_HUMAN HIT: BE733080.1, EVALUE 9.80e-01
agttcgaagaagaatttgtcaaaatgatctttatgtaagggacagggagctccataatgtcccccatagcaattttacaagc

SEQ ID NO: 17673 - DNA, 117 bp, Homo sapiens
  MAP TO AL050309.4; EXPRESSED IN HEART, SIGNAL = 3.4; EXPRESSED IN PLACENTA, SIGNAL = 2.8; EXPRESSED IN BONE MARROW, SIGNAL = 3.6; EXPRESSED IN LUNG, SIGNAL = 4.1; EXPRESSED IN HELA, SIGNAL = 4.1; EXPRESSED IN ADULT LIVER, SIGNAL = 3.9; EXPRESSED IN BT474, SIGNAL = 3.3; EXPRESSED IN HBL100, SIGNAL =   3; EXPRESSED IN FETAL LIVER, SIGNAL = 3.2; EXPRESSED IN BRAIN, SIGNAL = 4.6; SWISSPROT HIT: P49189, EVALUE 9.00e+00; NT HIT: M17440.1, EVALUE 1.00e+00; EST_HUMAN HIT: AA329464.1, EVALUE 6.00e-03
cctcttcatcatcccgcttctcctcctcctgaaagccagctgacaaactaccagggtggagcccagtctgagggctggagggaagggaggaggaaaagcctcagtaagaggactcca

SEQ ID NO: 17674 - DNA, 135 bp, Homo sapiens
  MAP TO AL050308.9; EXPRESSED IN PLACENTA, SIGNAL =  12; EXPRESSED IN FETAL LIVER, SIGNAL =  15; EXPRESSED IN HELA, SIGNAL =  14; EXPRESSED IN BRAIN, SIGNAL =  14; EXPRESSED IN HEART, SIGNAL =  17; EXPRESSED IN BT474, SIGNAL =  11; EXPRESSED IN BONE MARROW, SIGNAL =  14; EXPRESSED IN LUNG, SIGNAL =  18; EXPRESSED IN ADULT LIVER, SIGNAL =  41; EXPRESSED IN HBL100, SIGNAL = 8.2; NT HIT: AL163248.2, EVALUE 1.00e-18; EST_HUMAN HIT: AI525119.1, EVALUE 2.00e-39
cctgataaaattatcagatctcatgagacttattcactaacacgagaacagtatgggggaaactacccccataattcaaatgagctcccagtgggtccctcccacaatatgtgggaattatgggagtacaattca

SEQ ID NO: 17675 - DNA, 275 bp, Homo sapiens
  MAP TO AL050308.9; EXPRESSED IN PLACENTA, SIGNAL = 8.4; EXPRESSED IN BT474, SIGNAL = 4.1; EXPRESSED IN BONE MARROW, SIGNAL = 2.7; EXPRESSED IN HBL100, SIGNAL = 2.9; EXPRESSED IN FETAL LIVER, SIGNAL = 3.7; EXPRESSED IN HELA, SIGNAL = 3.3; EXPRESSED IN ADULT LIVER, SIGNAL = 2.8; EXPRESSED IN LUNG, SIGNAL =   3; EXPRESSED IN HEART, SIGNAL = 2.8; EXPRESSED IN BRAIN, SIGNAL = 3.5; EST_HUMAN HIT: AV708482.1, EVALUE 4.00e-06; NT HIT: AL163280.2, EVALUE 3.00e-06; SWISSPROT HIT: Q05049, EVALUE 7.00e-05
gtccgtccaccaccgccgaaggccgtccgtccaccaccgccgaaggccgtccgtccaccaacgccgaaggccgtccgtccaccaccgccgaaggccgtccgtccaccaccgccgaaggccgtccgtccaccaccgctcaacaccctccgtccaccaccgctgaacgccgccctcgcagacccgccattgacttccactcctccagatccagcagggtgtcctctgcccttctgatcagtgaggcgcccaaaggggctcgccattgttcctgtgca

SEQ ID NO: 17676 - DNA, 103 bp, Homo sapiens
  MAP TO AL049859.7; EXPRESSED IN PLACENTA, SIGNAL = 2.2; EXPRESSED IN BONE MARROW, SIGNAL = 1.8; EXPRESSED IN ADULT LIVER, SIGNAL = 1.4; EXPRESSED IN BRAIN, SIGNAL = 3.6; EXPRESSED IN BT474, SIGNAL = 1.2; EXPRESSED IN HBL100, SIGNAL = 1.7; EXPRESSED IN FETAL LIVER, SIGNAL = 1.9; EXPRESSED IN LUNG, SIGNAL = 1.6; EXPRESSED IN HELA, SIGNAL = 1.8; EXPRESSED IN HEART, SIGNAL = 1.7; EST_HUMAN HIT: N36113.1, EVALUE 3.00e-10; NT HIT: AL163300.2, EVALUE 2.00e-07; SWISSPROT HIT: P08547, EVALUE 1.80e+00
caacaatttcttagttatagcccccaaaagcacaggcaacaaaaggaaaatagataaattggatttcatcaaatttaaaacttttgtcatcaaaggaaactat

SEQ ID NO: 17677 - DNA, 230 bp, Homo sapiens
  MAP TO AL049844.6; EXPRESSED IN BONE MARROW, SIGNAL = 2.5; EXPRESSED IN HBL100, SIGNAL = 1.5; EXPRESSED IN FETAL LIVER, SIGNAL = 1.4; EXPRESSED IN HELA, SIGNAL = 1.1; EXPRESSED IN ADULT LIVER, SIGNAL = 0.84; EXPRESSED IN BRAIN, SIGNAL = 1.4; EXPRESSED IN PLACENTA, SIGNAL = 4.8; EXPRESSED IN LUNG, SIGNAL = 1.7; EXPRESSED IN HEART, SIGNAL = 1.3; SWISSPROT HIT: O62651, EVALUE 8.00e-10; NT HIT: gi11418478, EVALUE 1.00e-127; EST_HUMAN HIT: AW606619.1, EVALUE 1.00e-127
agtgggtcttcttggtatgccgggtgaggtgatccttgcgcccaaatctctgggcacagaactggcacaggaagtccttgcatcctgtgtggaccaccaggtggcgtcgcacatccttccgggtgtagaagcatctttcacagtggtcgcactggtgcttcttttccttggttccgctagggggcttctcttccgcatgggctttgaggtggtccagtagcacctcggtg

SEQ ID NO: 17678 - DNA, 143 bp, Homo sapiens
  MAP TO AL049844.6; EXPRESSED IN FETAL LIVER, SIGNAL = 1.7; EXPRESSED IN LUNG, SIGNAL = 2.1; EXPRESSED IN HEART, SIGNAL = 1.3; EXPRESSED IN HELA, SIGNAL = 3.4; EXPRESSED IN ADULT LIVER, SIGNAL = 1.6; EXPRESSED IN BRAIN, SIGNAL = 1.7; EXPRESSED IN PLACENTA, SIGNAL = 2.3; EXPRESSED IN BT474, SIGNAL = 2.4; EXPRESSED IN BONE MARROW, SIGNAL = 1.4; EXPRESSED IN HBL100, SIGNAL = 1.8; SWISSPROT HIT: P77173, EVALUE 1.50e+00; NT HIT: AL163246.2, EVALUE 8.00e-39; EST_HUMAN HIT: AA601143.1, EVALUE 4.00e-50
gacacctcaagtaccattggatctgctgggtcatatggcccaattgacagagcagcttgcacagcagcctggacctgttgtagagccttctcctgttctggaccccactcaaaactggcagcttcaggtcacttgataaatgg

SEQ ID NO: 17679 - DNA, 438 bp, Homo sapiens
  MAP TO AL049839.2; EXPRESSED IN HEART, SIGNAL = 7.4; EXPRESSED IN BRAIN, SIGNAL =   5; EXPRESSED IN PLACENTA, SIGNAL = 9.1; EXPRESSED IN BT474, SIGNAL =  29; EXPRESSED IN BONE MARROW, SIGNAL =  64; EXPRESSED IN FETAL LIVER, SIGNAL =  32; EXPRESSED IN LUNG, SIGNAL =  13; EXPRESSED IN HELA, SIGNAL =  39; EXPRESSED IN ADULT LIVER, SIGNAL =  20; EXPRESSED IN HBL100, SIGNAL =  93; EST_HUMAN HIT: BE877762.1, EVALUE 0.00e+00; SWISSPROT HIT: P38983, EVALUE 5.00e-69; NT HIT: gi11427320, EVALUE 0.00e+00
gcaccaatcttgacttccagatggaacagtacatctataaaaggaaaagtgatggcatctatatcataaatctgaagaggacctgggagaagcttctgctggcagctcgtgctattattgctattgaaaaccctgctgatgtcagtgttatatcctccaggaatactggccagagggctgtgctgaagtttgctgctgccactgaagccactccaattgctggtcacttcactcctggaaccttcactaaccagatccaggcagacttctgggagccaaggcttcttgtggttactgaccccagggctgaccaccagcctctcacggaggcatcttatgttaacctacctaccattgctctgtgtaacacagattctcctctgcgctatgtggacattgccattccatgcaacaaccagggagctcgctcagtgggtt

SEQ ID NO: 17680 - DNA, 237 bp, Homo sapiens
  MAP TO AL049839.2; EXPRESSED IN HBL100, SIGNAL = 1.4; EXPRESSED IN PLACENTA, SIGNAL = 1.5; EXPRESSED IN HEART, SIGNAL =   2; EXPRESSED IN BRAIN, SIGNAL = 1.4; EXPRESSED IN ADULT LIVER, SIGNAL = 8.2e+02; EXPRESSED IN LUNG, SIGNAL = 4.3; EXPRESSED IN FETAL LIVER, SIGNAL = 2.9e+02; EXPRESSED IN BONE MARROW, SIGNAL = 0.8; EXPRESSED IN BT474, SIGNAL = 0.97; NT HIT: X68735.1, EVALUE 1.00e-126; EST_HUMAN HIT: AF114076.1, EVALUE 2.00e-84; SWISSPROT HIT: P01011, EVALUE 6.00e-25
ttccgggacgaggagctgtcctgcaccgtggtggagctgaagtacacaggcaatgccagcgcactcttcatcctccctgatcaagacaagatggaggaagtggaagccatgctgctcccagagaccctgaagcggtggagagactctctggagttcaggtgattcttcctggcccccaaagaccccacatctctccacgtcaaggtctcaccaatgtccagggacaagggcatggtg

SEQ ID NO: 17681 - DNA, 183 bp, Homo sapiens
  MAP TO AL049839.2; EXPRESSED IN LUNG, SIGNAL = 1.4; EXPRESSED IN ADULT LIVER, SIGNAL = 3.3; EXPRESSED IN BT474, SIGNAL = 0.63; EXPRESSED IN FETAL LIVER, SIGNAL = 9.6; EXPRESSED IN HELA, SIGNAL = 0.59; EXPRESSED IN HEART, SIGNAL = 0.86; SWISSPROT HIT: P05154, EVALUE 3.00e-28; NT HIT: gi11437395, EVALUE 6.00e-99; EST_HUMAN HIT: AL046058.2, EVALUE 9.00e-99
atggtgcacaaagctgtggtggaggtggacgagtcgggaaccagagcagcggcagccacggggacaatattcactttcaggtcggcccgcctgaactctcagaggctagtgttcaacaggccctttctgatgttcattgtggataacaacatcctcttccttggcaaagtgaaccgcccctga

SEQ ID NO: 17682 - DNA, 541 bp, Homo sapiens
  MAP TO AL049839.2; EXPRESSED IN FETAL LIVER, SIGNAL = 2.7e+02; EXPRESSED IN HELA, SIGNAL = 0.76; EXPRESSED IN ADULT LIVER, SIGNAL = 7.3e+02; EXPRESSED IN PLACENTA, SIGNAL = 1.4; EXPRESSED IN BONE MARROW, SIGNAL = 0.71; EXPRESSED IN BT474, SIGNAL =   1; EXPRESSED IN HEART, SIGNAL = 1.5; EXPRESSED IN BRAIN, SIGNAL = 1.2; EXPRESSED IN LUNG, SIGNAL = 3.4; EXPRESSED IN HBL100, SIGNAL = 1.5; SWISSPROT HIT: P01011, EVALUE 2.00e-96; NT HIT: gi11437393, EVALUE 0.00e+00; EST_HUMAN HIT: AI064967.1, EVALUE 0.00e+00
acgaggagaatctgacccaggagaaccaagaccgagggacacacgtggacctcggattagcctccgccaacgtggacttcgctttcagcctgtacaagcagttagtcctgaaggcccctgataagaatgtcatcttctccccactgagcatctccaccgccttggccttcctgtctctgggggcccataataccaccctgacagagattctcaaaggcctcaagttcaacctcacggagacttctgaggcagaaattcaccagagcttccagcacctcctgcgcaccctcaatcagtccagcgatgagctgcagctgagtatgggaaatgccatgtttgtcaaagagcaactcagtctgctggacaggttcacggaggatgccaagaggctgtatggctccgaggcctttgccactgactttcaggactcagctgcagctaagaagctcatcaacgactacgtgaagaatggaactagggggaaaatcacagatctgatcaaggaccttgactcgcagacaatgatggtcctggtgaatta

SEQ ID NO: 17683 - DNA, 514 bp, Homo sapiens
  MAP TO AL049839.2; EXPRESSED IN BT474, SIGNAL = 0.75; EXPRESSED IN FETAL LIVER, SIGNAL =  17; EXPRESSED IN PLACENTA, SIGNAL = 0.69; EXPRESSED IN ADULT LIVER, SIGNAL = 6.7; EXPRESSED IN HEART, SIGNAL = 0.99; EST_HUMAN HIT: AL045585.1, EVALUE 0.00e+00; SWISSPROT HIT: P05154, EVALUE 2.00e-77; NT HIT: gi11437395, EVALUE 0.00e+00
atgcagctcttcctcctcttgtgcctggtgcttctcagccctcagggggcctcccttcaccgccaccacccccgggagatgaagaagagagtcgaggacctccatgtaggtgccacggtggcccccagcagcagaagggactttacctttgacctctacagggccttggcttccgctgcccccagccagagcatcttcttctcccctgtgagcatctccatgagcctggccatgctctccctgggggctgggtccagcacaaagatgcagatcctggagggcctgggcctcaacctccagaaaagctcagagaaggagctgcacagaggctttcagcagctccttcaggaactcaaccagcccagagatggcttccagctgagcctcggcaatgcccttttcaccgacctggtggtagacctgcaggacaccttcgtaagtgccatgaagacgctgtacctggcagacactttccctaccaactttagggactctgcaggggccatgaagcaga

SEQ ID NO: 17684 - DNA, 703 bp, Homo sapiens
  MAP TO AL049839.2; EXPRESSED IN ADULT LIVER, SIGNAL = 8.7; EXPRESSED IN PLACENTA, SIGNAL = 1.6; EXPRESSED IN BONE MARROW, SIGNAL = 2.4; EXPRESSED IN HBL100, SIGNAL = 1.4; EXPRESSED IN FETAL LIVER, SIGNAL =  13; EXPRESSED IN LUNG, SIGNAL = 2.3; EXPRESSED IN HELA, SIGNAL = 1.9; EXPRESSED IN BRAIN, SIGNAL = 1.8; EXPRESSED IN BT474, SIGNAL = 1.7; EXPRESSED IN HEART, SIGNAL = 2.1; EST_HUMAN HIT: N78158.1, EVALUE 0.00e+00; NT HIT: L28101.1, EVALUE 0.00e+00; SWISSPROT HIT: P29622, EVALUE 1.00e-109
atgcatcttatcgactacctgctcctcctgctggttggactactggccctttctcatggccagctgcacgttgagcatgatggtgagagttgcagtaacagctcccaccagcagattctggagacaggtgagggctcccccagcctcaagatagcccctgccaatgctgactttgccttccgcttctactacctgatcgcttcggagaccccggggaagaacatctttttctccccgctgagcatctcggcggcctacgccatgctttccctgggggcctgctcacacagccgcagccagatccttgagggcctgggcttcaacctcaccgagctgtctgagtccgatgtccataggggcttccagcacctcctgcacactctcaacctccccggccatgggctggaaacacgcgtgggcagtgctctgttcctgagccacaacctgaagttccttgcaaaattcctgaatgacaccatggccgtctatgaggctaaactcttccacaccaacttctacgacactgtgggcacaatccagcttatcaacgaccacgtcaagaaggaaactcgagggaagattgtggatttggtcagtgagctcaagaaggacgtcttgatggtgctggtgaattacatttacttcaaaggtgagagtcagatcattggtatatgctaaatccacaccaccgcctccaacccac

SEQ ID NO: 17685 - DNA, 129 bp, Homo sapiens
  MAP TO AL049834.2; EXPRESSED IN BT474, SIGNAL = 0.69; EXPRESSED IN HBL100, SIGNAL = 0.79; EXPRESSED IN HELA, SIGNAL = 0.75; EXPRESSED IN ADULT LIVER, SIGNAL =   1; EXPRESSED IN BRAIN, SIGNAL = 0.7; EXPRESSED IN PLACENTA, SIGNAL = 1.3; EXPRESSED IN FETAL LIVER, SIGNAL = 0.82; EXPRESSED IN LUNG, SIGNAL = 1.4; EXPRESSED IN HEART, SIGNAL = 1.6; SWISSPROT HIT: Q62136, EVALUE 2.30e-02; NT HIT: gi5902031, EVALUE 5.00e-21; EST_HUMAN HIT: AW950022.1, EVALUE 6.00e-21
atcattctctgttgcctcagcatgtccagcactctcgggatgtccagcacctaggttgagagaaacggtaatgaagataatgtgttcccctggggagacagaaaggatgggaggacacgagtgtcctgg

SEQ ID NO: 17686 - DNA, 186 bp, Homo sapiens
  MAP TO AL049829.2; EXPRESSED IN HELA, SIGNAL =   1; EXPRESSED IN BT474, SIGNAL = 0.74; EXPRESSED IN LUNG, SIGNAL = 1.2; EXPRESSED IN ADULT LIVER, SIGNAL = 0.92; EXPRESSED IN HEART, SIGNAL = 3.4; EXPRESSED IN PLACENTA, SIGNAL = 0.85; EXPRESSED IN FETAL LIVER, SIGNAL = 0.88; EXPRESSED IN BRAIN, SIGNAL = 1.2; EXPRESSED IN BONE MARROW, SIGNAL = 1.2; NT HIT: M25162.1, EVALUE 1.00e-100; SWISSPROT HIT: P13533, EVALUE 4.00e-30
cttcccattctcggtttcagcaatgaccttgcctccctcccgggacaaaatcttggctttgacaaactcttccttgtcatcgggcacgaagcactcagtgcgaatgtcaaagggccgggtctgggcctctagacgctccttctctgacttgcggaggtactgggccgctgccccaaagtcagccat

SEQ ID NO: 17687 - DNA, 311 bp, Homo sapiens
  MAP TO AL049829.2; EXPRESSED IN PLACENTA, SIGNAL = 0.71; EXPRESSED IN BT474, SIGNAL = 4.6; EXPRESSED IN BONE MARROW, SIGNAL = 0.64; EXPRESSED IN LUNG, SIGNAL = 0.96; EXPRESSED IN ADULT LIVER, SIGNAL = 0.71; EXPRESSED IN BRAIN, SIGNAL = 1.1; EXPRESSED IN HEART, SIGNAL = 1.1e+02; NT HIT: Z20656.1, EVALUE 0.00e+00; SWISSPROT HIT: P13533, EVALUE 4.00e-56; EST_HUMAN HIT: N85169.1, EVALUE 8.00e-81
cagtatcggcagttgcgtaggaggagaagagagtggccatgagcttgagggaggacttctggtacagggccacaacagtctcgttgagaggatccttgtttttttccagccagcccaggatgttgtagtccacagtgccggcgtagtggatcagggagaagtgggcttcctgcttccccttgatgttgcgtggcttctggaaattgttggacttgcccaggtggttgtcgtacagcttggccttgaaggtcatgtcagtggccttggggaacatgcactcctcctccaggatggacatgatgcccatgggc

SEQ ID NO: 17688 - DNA, 353 bp, Homo sapiens
  MAP TO AL049829.2; EXPRESSED IN HEART, SIGNAL = 1.7e+02; EXPRESSED IN LUNG, SIGNAL = 1.4; EXPRESSED IN BONE MARROW, SIGNAL = 0.63; SWISSPROT HIT: P13533, EVALUE 2.00e-38; NT HIT: Z20656.1, EVALUE 0.00e+00; EST_HUMAN HIT: C05089.1, EVALUE 0.00e+00
ctggtaggtgagctccttgatgcgccgctcgctcttcctcatgcccttcaccgactctgcgttgcgcttctgctcggcctccagctcaccctccagctcccgcacccgcgcttccagcttctgcagctgcttcttgcctcccttgagggcgatctgctcggcctcgtccagccggtgctgcaggtccttaatggtctgctccatgttcttcttcatgcgctccaggtgggcgctggtgtcctgctccttcttcagctcctctgccatcatggcggcctgtgtgcaggagagaggtggcaaggaacatgggccaggggccggggccttttgccccccaaggatctcctttctcc

SEQ ID NO: 17689 - DNA, 203 bp, Homo sapiens
  MAP TO AL049829.2; EXPRESSED IN PLACENTA, SIGNAL = 2.5; EXPRESSED IN BT474, SIGNAL = 2.2; EXPRESSED IN LUNG, SIGNAL = 3.1; EXPRESSED IN HELA, SIGNAL = 3.3; EXPRESSED IN FETAL LIVER, SIGNAL = 2.3; EXPRESSED IN ADULT LIVER, SIGNAL = 2.7; EXPRESSED IN BRAIN, SIGNAL = 3.8; EXPRESSED IN BONE MARROW, SIGNAL = 3.6; EXPRESSED IN HBL100, SIGNAL = 2.3; EXPRESSED IN HEART, SIGNAL =  74; NT HIT: M25142.1, EVALUE 1.00e-111; EST_HUMAN HIT: Z33564.1, EVALUE 7.00e-71; SWISSPROT HIT: Q02566, EVALUE 5.00e-19
cttggcaccaatgtcacggctcttggctcgaagcttgttgacctgggactcagcgatgtccgcccgctcctctgcctcatccagctcatgctgcaccttgcggaacttggacaggttggtgttggcttgctcctcctgtggtgggacagtggggatgggtgaatgagctggagatgggctatgggattctcagcctctcaacc

SEQ ID NO: 17690 - DNA, 150 bp, Homo sapiens
  MAP TO AL049829.2; EXPRESSED IN ADULT LIVER, SIGNAL = 1.5; EXPRESSED IN PLACENTA, SIGNAL = 1.1; EXPRESSED IN BT474, SIGNAL = 2.1; EXPRESSED IN BONE MARROW, SIGNAL = 1.4; EXPRESSED IN HBL100, SIGNAL = 1.5; EXPRESSED IN LUNG, SIGNAL = 0.9; EXPRESSED IN HELA, SIGNAL =   1; EXPRESSED IN BRAIN, SIGNAL = 2.3; EXPRESSED IN FETAL LIVER, SIGNAL = 0.94; EXPRESSED IN HEART, SIGNAL = 1.1; NT HIT: D87461.1, EVALUE 2.00e-79; EST_HUMAN HIT: AL157542.1, EVALUE 8.00e-70; SWISSPROT HIT: P70345, EVALUE 3.00e-11
gcggagttcacagctctatacggggacggggccctggaggaggcgcggcgtctgcgggaggggaactgggcatcagtgaggacagtgctgacgggggccgtggcactgggggccctggtaactgtaggggccttttttgctagcaagtga

SEQ ID NO: 17691 - DNA, 317 bp, Homo sapiens
  MAP TO AL049828.2; EXPRESSED IN BONE MARROW, SIGNAL = 1.7; EXPRESSED IN HELA, SIGNAL = 1.2; EXPRESSED IN ADULT LIVER, SIGNAL = 2.1; EXPRESSED IN HEART, SIGNAL = 1.8; EXPRESSED IN LUNG, SIGNAL = 1.8; EXPRESSED IN PLACENTA, SIGNAL = 3.4; EXPRESSED IN BT474, SIGNAL = 3.9; EXPRESSED IN HBL100, SIGNAL = 1.8; EXPRESSED IN FETAL LIVER, SIGNAL = 2.3; EXPRESSED IN BRAIN, SIGNAL = 2.1; SWISSPROT HIT: P11260, EVALUE 6.00e-04; NT HIT: AJ229041.1, EVALUE 1.00e-57; EST_HUMAN HIT: AI872137.1, EVALUE 7.00e-63
aaaagaattcaggaggttagttattaagctaatcagggaggcaccagaggaaggcaaagcccaatgcaaggaagtccaaaaactgatacaaaaagtgcaaggagaaattatcgacgaaatagataccataaataagaaacaaccaaaacttcaggaaacaatggacacacttacaaaaatgcaaaatgctcaggaaagtctcagcaatagaattgaacaagtagaagaaaaaaattaagagctcgaagacaatgtcttcaaattaacccaatccaagaaaaattaaaaaaatttactaagaaaatatgaccaaagcc

SEQ ID NO: 17692 - DNA, 211 bp, Homo sapiens
  MAP TO AL049828.2; EXPRESSED IN BT474, SIGNAL = 2.2; EXPRESSED IN BONE MARROW, SIGNAL = 3.5; EXPRESSED IN LUNG, SIGNAL =   3; EXPRESSED IN HBL100, SIGNAL = 3.2; EXPRESSED IN FETAL LIVER, SIGNAL = 2.2; EXPRESSED IN HELA, SIGNAL = 3.1; EXPRESSED IN ADULT LIVER, SIGNAL = 3.1; EXPRESSED IN HEART, SIGNAL = 2.4; EXPRESSED IN PLACENTA, SIGNAL = 2.2; EXPRESSED IN BRAIN, SIGNAL = 3.5; NT HIT: AF111167.2, EVALUE 2.00e-15; EST_HUMAN HIT: BE088634.1, EVALUE 3.00e-18; SWISSPROT HIT: P08547, EVALUE 5.00e-08
ctctacaggtttctgtgtagacataagttgtccactcctttacgtagataccaaggaaaatgattgttggatagtatggcatgagaatgtttagtcttgtaagaaccataaactgtccttcaaagtagctgtaccactttgcattctcatcagcagtgaatgagagttcctgttgcttcacatccttgccaacatttgttgtagtggtgtt

SEQ ID NO: 17693 - DNA, 199 bp, Homo sapiens
  MAP TO AL049814.6; EXPRESSED IN BONE MARROW, SIGNAL = 1.8; EXPRESSED IN LUNG, SIGNAL = 2.2; EXPRESSED IN HELA, SIGNAL = 2.6; EXPRESSED IN ADULT LIVER, SIGNAL =   2; EXPRESSED IN BRAIN, SIGNAL = 1.8; EXPRESSED IN HEART, SIGNAL = 1.7; EXPRESSED IN PLACENTA, SIGNAL = 1.6; EXPRESSED IN BT474, SIGNAL = 1.8; EXPRESSED IN FETAL LIVER, SIGNAL = 1.5; EXPRESSED IN HBL100, SIGNAL = 1.7; EST_HUMAN HIT: BE163587.1, EVALUE 8.00e-16; NT HIT: AL163246.2, EVALUE 4.00e-32; SWISSPROT HIT: P70213, EVALUE 8.00e-05
tgatggcagcctgggtgggggagaggatgttgccaccactgggggtagagggtagagaagctatttcctctggcaaataaggctcatcacagtttacaagctcagtgtctccatcttcatcagggtcctcccacatgcccccatttcaagttgcaggatcttattcttttccaatcaatgccttcactttaacaataga

SEQ ID NO: 17694 - DNA, 144 bp, Homo sapiens
  MAP TO AL049814.6; EXPRESSED IN HBL100, SIGNAL = 1.7; EXPRESSED IN FETAL LIVER, SIGNAL = 2.5; EXPRESSED IN BRAIN, SIGNAL = 2.6; EXPRESSED IN HEART, SIGNAL = 1.8; EXPRESSED IN PLACENTA, SIGNAL = 2.2; EXPRESSED IN BT474, SIGNAL = 2.3; EXPRESSED IN BONE MARROW, SIGNAL = 1.5; EXPRESSED IN ADULT LIVER, SIGNAL = 2.3; EXPRESSED IN HELA, SIGNAL = 3.1; EXPRESSED IN LUNG, SIGNAL = 2.6; NT HIT: AL163246.2, EVALUE 7.00e-30; EST_HUMAN HIT: AA984295.1, EVALUE 3.00e-29; SWISSPROT HIT: P40682, EVALUE 3.00e+00
ggctttatgaacagaatggagagaaaggcatttgccaaatcaatggctgcataccaggtaccaggagatgtgttaattttttcaagcaatgaaaccacatctggtacagcagctgtaactggaatcatcacttggttaagctta

SEQ ID NO: 17695 - DNA, 121 bp, Homo sapiens
  MAP TO AL049814.6; EXPRESSED IN PLACENTA, SIGNAL =   6; EXPRESSED IN BT474, SIGNAL = 4.8; EXPRESSED IN BONE MARROW, SIGNAL =   6; EXPRESSED IN HBL100, SIGNAL =   4; EXPRESSED IN LUNG, SIGNAL = 5.5; EXPRESSED IN ADULT LIVER, SIGNAL = 4.6; EXPRESSED IN BRAIN, SIGNAL = 5.2; EXPRESSED IN FETAL LIVER, SIGNAL = 5.2; EXPRESSED IN HELA, SIGNAL = 6.5; EXPRESSED IN HEART, SIGNAL = 4.4; NT HIT: D90110.1, EVALUE 5.80e-02; EST_HUMAN HIT: AA747696.1, EVALUE 1.10e+00
gggaaactattgcagggtaatgacgtttctcgtccctcctcgggtccacctggctggcctgggtgtggcaagaatacttccgactcattcaaagaagcctcacactagagtgagcaacctt

SEQ ID NO: 17696 - DNA, 106 bp, Homo sapiens
  MAP TO AL049798.7; EXPRESSED IN BRAIN, SIGNAL = 4.2; EXPRESSED IN HBL100, SIGNAL = 3.4; EXPRESSED IN FETAL LIVER, SIGNAL = 3.4; EXPRESSED IN ADULT LIVER, SIGNAL = 3.5; EXPRESSED IN HEART, SIGNAL = 3.4; EXPRESSED IN PLACENTA, SIGNAL = 3.6; EXPRESSED IN BT474, SIGNAL =   3; EXPRESSED IN BONE MARROW, SIGNAL = 4.2; EXPRESSED IN LUNG, SIGNAL = 3.4; EXPRESSED IN HELA, SIGNAL = 4.6; NT HIT: AE004266.1, EVALUE 9.00e-01; EST_HUMAN HIT: BE311893.1, EVALUE 2.30e-01
tgctcaggcagtctctgctgctggcataagtcttcttcatcttctacctgtcctaatgccttctgtttctccagctcatagtgatcctttgctctctgcaatagca

SEQ ID NO: 17697 - DNA, 187 bp, Homo sapiens
  MAP TO AL049759.10; EXPRESSED IN BT474, SIGNAL = 0.95; EXPRESSED IN FETAL LIVER, SIGNAL = 0.71; EXPRESSED IN HEART, SIGNAL = 0.85; EXPRESSED IN PLACENTA, SIGNAL = 0.61; EXPRESSED IN HBL100, SIGNAL = 0.87; EXPRESSED IN LUNG, SIGNAL = 0.79; EXPRESSED IN HELA, SIGNAL = 0.75; EXPRESSED IN BRAIN, SIGNAL = 1.8; EST_HUMAN HIT: AW580418.1, EVALUE 3.00e-21; NT HIT: AB007857.2, EVALUE 2.00e-21; SWISSPROT HIT: P09379, EVALUE 3.30e-01
ccagagctgctggatctgtacacggtgaacctgcaccgcatcgagaaggatgtgcagaggtgcgaccgcaactactggtacttcacgcccgccaacttggagaagctgcgtaacatcatgtgcaggtggctggggacagcgaggggatctaggggatggggatggtgggtgggtgggatgggggatg

SEQ ID NO: 17698 - DNA, 163 bp, Homo sapiens
  MAP TO AL049759.10; EXPRESSED IN HBL100, SIGNAL = 0.67; EXPRESSED IN FETAL LIVER, SIGNAL = 1.1; EXPRESSED IN HELA, SIGNAL = 0.61; EXPRESSED IN ADULT LIVER, SIGNAL = 1.8; EXPRESSED IN BRAIN, SIGNAL = 0.79; EXPRESSED IN PLACENTA, SIGNAL = 0.65; EXPRESSED IN HEART, SIGNAL = 1.3; EXPRESSED IN LUNG, SIGNAL = 0.75; NT HIT: gi9628932, EVALUE 9.50e-02; SWISSPROT HIT: Q00650, EVALUE 3.00e+00
ggctggcttcctacgcagcaataagattgcagccctctttatgaaagtgggcaagaacttcccgccggctgaggatctgagccgcaaggtgcaagacctggagcagctgatcgagagcgcgtgagtgcaaagcatggggcacaggtgggagcagctcccccaa

SEQ ID NO: 17699 - DNA, 561 bp, Homo sapiens
  MAP TO AL049759.10; EXPRESSED IN BONE MARROW, SIGNAL = 0.83; EXPRESSED IN ADULT LIVER, SIGNAL = 0.96; EXPRESSED IN BRAIN, SIGNAL = 2.3; EXPRESSED IN PLACENTA, SIGNAL =   1; EXPRESSED IN BT474, SIGNAL = 0.94; EXPRESSED IN HBL100, SIGNAL = 0.75; EXPRESSED IN FETAL LIVER, SIGNAL = 1.1; EXPRESSED IN LUNG, SIGNAL = 1.2; EXPRESSED IN HELA, SIGNAL = 1.3; EXPRESSED IN HEART, SIGNAL = 1.3; NT HIT: L06863.1, EVALUE 5.00e-03; EST_HUMAN HIT: AA860801.1, EVALUE 7.00e-86; SWISSPROT HIT: P39955, EVALUE 5.00e-03
gcagattggaggagaaacagcccaagatccccaatgggaacctagtgaacggcacttgttccccagactcgggtcatccttcctcccataacttctcctcgggcctctcagagcactcagagcccagtctgagcacagaagacagtgtcttggacgcccagcggaacacccccacggtgctgcgacctagggatggcagcgtggatgacaggcagagcagcgaggccaccacatctcaggatgaggctccccgggaggagctggccgtgcaggacagcctggagagtgacctcctggccaacgagagcatggacgagttcatgtccatcacgggcagcctggacatggccctgcctgaaaaggacgatgttgtgatggagggctggaggagcagcgagacagagaaacatggccaggcggacagtgaggacaacctctcggaggagcctgagatggaaagtctcttccctgccctggcttctctggctgtgactacttctgccaacgaggtgtcccctgtgtcttccagcggcgtcacctactctgtaagtcaccaggacc

SEQ ID NO: 17700 - DNA, 177 bp, Homo sapiens
  MAP TO AL049744.7; EXPRESSED IN FETAL LIVER, SIGNAL = 8.1; EXPRESSED IN ADULT LIVER, SIGNAL =  13; EXPRESSED IN HEART, SIGNAL = 0.86; EXPRESSED IN LUNG, SIGNAL = 1.2; SWISSPROT HIT: P08603, EVALUE 2.00e-32; NT HIT: gi4504374, EVALUE 2.00e-95; EST_HUMAN HIT: N91433.1, EVALUE 3.00e-95
tgacacggatgcatctgggagtaggagaccagccattctccatacatgtaactgtggtctgcgcttttggaagagcgtagccaggatggcaggcaacgtctatagatttaccctgtacaaactttcttccatgattttgattatatccattttccaaataaggaaaataacattttc

SEQ ID NO: 17701 - DNA, 177 bp, Homo sapiens
  MAP TO AL049744.7; EXPRESSED IN ADULT LIVER, SIGNAL = 5.5; EXPRESSED IN HEART, SIGNAL = 0.86; EXPRESSED IN FETAL LIVER, SIGNAL = 2.6; EST_HUMAN HIT: AU133483.1, EVALUE 3.00e-95; NT HIT: gi11423384, EVALUE 2.00e-95; SWISSPROT HIT: P08603, EVALUE 4.00e-31
ctttacatattgggaggtcaggagacaatccaaagtggtagcactgaacggaattaggtccaactattgtaaatcctggtttgcaggagaatttcaacacctctccaactttatactggtctttcttgcgatcaggaactaagtgtacatctattttaggaagttcgcattctcttt

SEQ ID NO: 17702 - DNA, 156 bp, Homo sapiens
  MAP TO AL049744.7; EXPRESSED IN HBL100, SIGNAL = 0.84; EXPRESSED IN FETAL LIVER, SIGNAL =  10; EXPRESSED IN BRAIN, SIGNAL = 1.1; EXPRESSED IN HEART, SIGNAL = 1.7; EXPRESSED IN BT474, SIGNAL = 0.77; EXPRESSED IN BONE MARROW, SIGNAL = 0.98; EXPRESSED IN LUNG, SIGNAL = 1.5; EXPRESSED IN ADULT LIVER, SIGNAL =  16; EXPRESSED IN HELA, SIGNAL = 5.5; EXPRESSED IN PLACENTA, SIGNAL = 1.2; NT HIT: M17517.1, EVALUE 9.00e-76; EST_HUMAN HIT: H29698.1, EVALUE 9.00e-76; SWISSPROT HIT: P08603, EVALUE 3.00e-14
atgtaatttcttctccttcctgaattagataattttcttggcaaagaacagatactttttctccatcccgataattcagtgtggttgtcatattgtgagaattgggaatctgaggtggaggtgggcataattgtatttgtgccactaaaaaatatt

SEQ ID NO: 17703 - DNA, 184 bp, Homo sapiens
  MAP TO AL049694.9; EXPRESSED IN PLACENTA, SIGNAL = 2.1; EXPRESSED IN LUNG, SIGNAL = 1.5; EXPRESSED IN HELA, SIGNAL = 1.7; EXPRESSED IN BT474, SIGNAL = 3.7; EXPRESSED IN BONE MARROW, SIGNAL = 2.4; EXPRESSED IN HBL100, SIGNAL = 3.8; EXPRESSED IN FETAL LIVER, SIGNAL = 6.7; EXPRESSED IN ADULT LIVER, SIGNAL = 1.6; EXPRESSED IN BRAIN, SIGNAL = 1.6; EXPRESSED IN HEART, SIGNAL = 1.3; SWISSPROT HIT: P40617, EVALUE 3.00e-16; NT HIT: gi11420167, EVALUE 1.00e-90; EST_HUMAN HIT: BE004436.1, EVALUE 4.00e-97
tttacaaattcattgaactgcagcctgtataagacagttgtctttccagcacagtccaaacccagaataacaatgtggaaggactgaatgaaggcaggttggacaggatagaagtctggtctgatagcccattccccatttccaggtgcaaataaatgtcccaaattgaaatgcttttctcttc

SEQ ID NO: 17704 - DNA, 160 bp, Homo sapiens
  MAP TO AL049589.15; EXPRESSED IN HBL100, SIGNAL = 7.9; EXPRESSED IN FETAL LIVER, SIGNAL = 8.9; EXPRESSED IN ADULT LIVER, SIGNAL = 8.5; EXPRESSED IN BRAIN, SIGNAL =  12; EXPRESSED IN PLACENTA, SIGNAL =  12; EXPRESSED IN BT474, SIGNAL = 8.8; EXPRESSED IN HEART, SIGNAL = 8.2; EXPRESSED IN HELA, SIGNAL =  12; EXPRESSED IN LUNG, SIGNAL =  13; EXPRESSED IN BONE MARROW, SIGNAL = 8.8; SWISSPROT HIT: Q02843, EVALUE 6.60e+00; NT HIT: AL163246.2, EVALUE 3.00e-51; EST_HUMAN HIT: N47359.1, EVALUE 7.00e-53
acgatcacaaggtcccacaataggccatctgcaagctgaggagcaaggaagccagtctgagtcccaaagctgaagaacttggagtctgatgttcgagggcaggaagcatccagcatgggagaaagatgtagtctgggaggctaagccagtctaacttttt

SEQ ID NO: 17705 - DNA, 162 bp, Homo sapiens
  MAP TO AL049589.15; EXPRESSED IN HELA, SIGNAL = 2.4; EXPRESSED IN PLACENTA, SIGNAL = 1.4; EXPRESSED IN BT474, SIGNAL = 3.3; EXPRESSED IN FETAL LIVER, SIGNAL = 2.2; EXPRESSED IN LUNG, SIGNAL = 1.5; EXPRESSED IN BONE MARROW, SIGNAL = 1.6; EXPRESSED IN HBL100, SIGNAL = 6.1; EXPRESSED IN ADULT LIVER, SIGNAL = 1.4; EXPRESSED IN BRAIN, SIGNAL = 2.4; EXPRESSED IN HEART, SIGNAL = 1.9; NT HIT: AF220509.1, EVALUE 1.00e-71; SWISSPROT HIT: Q62880, EVALUE 3.00e-20; EST_HUMAN HIT: BF664913.1, EVALUE 2.00e-71
atctcttgggggaggagaggtaaaagattggtcagcacgacactggattgccagtctcacatcatctgcatcaacattaggtttcttagcatggctcgaataaatttttgcatcatccagaattgtagtcacataacctataagaacaaaacaatcttttct

SEQ ID NO: 17706 - DNA, 207 bp, Homo sapiens
  MAP TO AL049589.15; EXPRESSED IN BONE MARROW, SIGNAL = 5.8; EXPRESSED IN ADULT LIVER, SIGNAL =   5; EXPRESSED IN BRAIN, SIGNAL =   8; EXPRESSED IN PLACENTA, SIGNAL = 2.9; EXPRESSED IN BT474, SIGNAL =  40; EXPRESSED IN HBL100, SIGNAL = 7.7; EXPRESSED IN LUNG, SIGNAL = 3.5; EXPRESSED IN HELA, SIGNAL =  17; EXPRESSED IN FETAL LIVER, SIGNAL = 6.3; EXPRESSED IN HEART, SIGNAL = 6.3; SWISSPROT HIT: P00558, EVALUE 7.00e-29; NT HIT: M11965.1, EVALUE 1.00e-113; EST_HUMAN HIT: AW405689.1, EVALUE 2.00e-97
attggcacttctctgtttgatgaagagggagccaagattgtcaaagacctaatgtccaaagctgagaagaatggtgtgaagattaccttgcctgttgactttgtcactgctgacaagtttgatgagaatgccaagactggccaagccactgtggcttctggcatacctgctggctggatggtgagtcacttgagtgggttggtagtg

SEQ ID NO: 17707 - DNA, 82 bp, Homo sapiens
  MAP TO AL049589.15; EXPRESSED IN BT474, SIGNAL =   2; EXPRESSED IN HBL100, SIGNAL =   2; EXPRESSED IN FETAL LIVER, SIGNAL = 2.6; EXPRESSED IN HELA, SIGNAL = 3.4; EXPRESSED IN BRAIN, SIGNAL = 3.7; EXPRESSED IN PLACENTA, SIGNAL = 2.3; EXPRESSED IN BONE MARROW, SIGNAL = 3.1; EXPRESSED IN LUNG, SIGNAL =   3; EXPRESSED IN ADULT LIVER, SIGNAL = 2.8; EXPRESSED IN HEART, SIGNAL = 3.1; NT HIT: AL163278.2, EVALUE 9.00e-03; EST_HUMAN HIT: AA223260.1, EVALUE 2.00e-07
tctgcctcgacttatcaagaaaaggaatgtatattttacagtcatggaggcaaagaagtccaagattgacaagctacatctg

SEQ ID NO: 17708 - DNA, 75 bp, Homo sapiens
  MAP TO AL049588.11; EXPRESSED IN FETAL LIVER, SIGNAL = 6.7; EXPRESSED IN BRAIN, SIGNAL = 2.2; EXPRESSED IN HEART, SIGNAL = 3.4; EXPRESSED IN BT474, SIGNAL = 4.4; EXPRESSED IN ADULT LIVER, SIGNAL =   7; EXPRESSED IN PLACENTA, SIGNAL =   2; EXPRESSED IN HELA, SIGNAL =  13; EXPRESSED IN LUNG, SIGNAL = 5.5; EXPRESSED IN HBL100, SIGNAL =  12; EXPRESSED IN BONE MARROW, SIGNAL = 7.2; EST_HUMAN HIT: T63042.1, EVALUE 2.00e-07; SWISSPROT HIT: P11260, EVALUE 7.20e+00; NT HIT: AL163206.2, EVALUE 6.00e-04
agtcaaactcccaaatataagagataaaaataggatactaaaagcagcaagggaaaagaaacaaagagcatacaa

SEQ ID NO: 17709 - DNA, 148 bp, Homo sapiens
  MAP TO AL049588.11; EXPRESSED IN BT474, SIGNAL = 7.9; EXPRESSED IN BONE MARROW, SIGNAL = 7.9; EXPRESSED IN BRAIN, SIGNAL =  10; EXPRESSED IN ADULT LIVER, SIGNAL = 9.1; EXPRESSED IN HELA, SIGNAL =  11; EXPRESSED IN LUNG, SIGNAL =  12; EXPRESSED IN HBL100, SIGNAL = 7.8; EXPRESSED IN PLACENTA, SIGNAL =  10; EXPRESSED IN HEART, SIGNAL = 8.9; EXPRESSED IN FETAL LIVER, SIGNAL = 9.9; NT HIT: U60822.1, EVALUE 1.00e-25; EST_HUMAN HIT: AA720574.1, EVALUE 4.00e-41; SWISSPROT HIT: P52746, EVALUE 2.30e+00
aatgattctgaccaaaatgcttgtagtgatatggacaatgaagtccaggctgaggtggtctcaaatggagatgaggaacttgttaagaactgcagtaaaggtcattcttgctatgcaaagagactggtggcattttgcccctgcccta

SEQ ID NO: 17710 - DNA, 156 bp, Homo sapiens
  MAP TO AL049569.13; EXPRESSED IN PLACENTA, SIGNAL = 1.2; EXPRESSED IN HBL100, SIGNAL = 1.9; EXPRESSED IN FETAL LIVER, SIGNAL =  10; EXPRESSED IN LUNG, SIGNAL = 1.4; EXPRESSED IN HELA, SIGNAL = 2.2; EXPRESSED IN BRAIN, SIGNAL =   2; EXPRESSED IN BT474, SIGNAL = 1.5; EXPRESSED IN BONE MARROW, SIGNAL = 1.4; EXPRESSED IN ADULT LIVER, SIGNAL = 7.5; EXPRESSED IN HEART, SIGNAL = 4.1; NT HIT: U17883.1, EVALUE 5.00e-83; EST_HUMAN HIT: BE294379.1, EVALUE 5.00e-35; SWISSPROT HIT: P21912, EVALUE 7.00e-08
tatttgaagaagaaggatgaatctcaggaaggcaagcagcagtatctgcagtccatagaagagcgtgagaaactggtcattagtccctatttattgtttcaatctgaagaatttattgcaaagatgattgccaggagtgtggcttggcagggaaca

SEQ ID NO: 17711 - DNA, 128 bp, Homo sapiens
  MAP TO AL049569.13; EXPRESSED IN LUNG, SIGNAL = 1.8; EXPRESSED IN BRAIN, SIGNAL = 2.7; EXPRESSED IN HEART, SIGNAL = 1.6; EXPRESSED IN PLACENTA, SIGNAL = 1.8; EXPRESSED IN HBL100, SIGNAL = 1.8; EXPRESSED IN FETAL LIVER, SIGNAL = 1.6; EXPRESSED IN BT474, SIGNAL = 1.5; EXPRESSED IN BONE MARROW, SIGNAL = 2.5; EXPRESSED IN HELA, SIGNAL = 2.1; EXPRESSED IN ADULT LIVER, SIGNAL = 1.8; NT HIT: AB023211.1, EVALUE 3.00e-41; EST_HUMAN HIT: AA947697.1, EVALUE 1.80e-02; SWISSPROT HIT: Q9Y2J8, EVALUE 4.00e-09
gcttgggtgggatgagcagcaagcgaatcaccatcaacaagattctgtccaacgagagccttgtgcaggagaacctgtacttccaggtgagggcagggcaggggtgcagggccagagggcccctggga

SEQ ID NO: 17712 - DNA, 77 bp, Homo sapiens
  MAP TO AL049554.2; EXPRESSED IN BT474, SIGNAL = 5.9; EXPRESSED IN FETAL LIVER, SIGNAL = 4.2; EXPRESSED IN LUNG, SIGNAL = 5.4; EXPRESSED IN HELA, SIGNAL = 3.8; EXPRESSED IN BRAIN, SIGNAL = 5.5; EXPRESSED IN HEART, SIGNAL = 4.6; EXPRESSED IN PLACENTA, SIGNAL = 7.9; EXPRESSED IN HBL100, SIGNAL = 5.2; EXPRESSED IN BONE MARROW, SIGNAL =   7; EXPRESSED IN ADULT LIVER, SIGNAL = 5.5; NT HIT: AL163218.2, EVALUE 2.00e-19; EST_HUMAN HIT: W23062.1, EVALUE 1.00e-21
tgcctggacatccaggcatttccatacatcatctgaaatctaggtggaggttcacaaatctcaatttttgacttctg

SEQ ID NO: 17713 - DNA, 186 bp, Homo sapiens
  MAP TO AL049548.6; EXPRESSED IN PLACENTA, SIGNAL = 1.6; EXPRESSED IN LUNG, SIGNAL = 2.1; EXPRESSED IN ADULT LIVER, SIGNAL = 1.2; EXPRESSED IN BONE MARROW, SIGNAL = 4.7; EXPRESSED IN HBL100, SIGNAL = 1.1; EXPRESSED IN FETAL LIVER, SIGNAL = 1.3; EXPRESSED IN HELA, SIGNAL = 0.85; EXPRESSED IN BRAIN, SIGNAL = 1.9; EXPRESSED IN BT474, SIGNAL = 1.2; EXPRESSED IN HEART, SIGNAL = 2.1; NT HIT: gi9506510, EVALUE 3.00e-14; EST_HUMAN HIT: BE708914.1, EVALUE 3.00e-03; SWISSPROT HIT: Q00111, EVALUE 6.40e+00
caaaagacaaagcggatctcagcaaagaagagagatgtgcagcagcagatcgcgcaggcgcagcagggagaaggggggctgcctgaccgaggccacgaggagctgcggaagctggagagcacactggatggcctggagcgcagccgggagaggcaggaacgccgcatccaggtaggagccggaagt

SEQ ID NO: 17714 - DNA, 357 bp, Homo sapiens
  MAP TO AL049538.8; EXPRESSED IN PLACENTA, SIGNAL = 0.93; EXPRESSED IN BONE MARROW, SIGNAL = 0.68; EXPRESSED IN HBL100, SIGNAL = 1.2; EXPRESSED IN HEART, SIGNAL =  36; EXPRESSED IN BT474, SIGNAL = 1.3; EXPRESSED IN FETAL LIVER, SIGNAL = 0.9; EXPRESSED IN LUNG, SIGNAL = 2.8; EXPRESSED IN HELA, SIGNAL = 1.4; EXPRESSED IN ADULT LIVER, SIGNAL = 0.91; EXPRESSED IN BRAIN, SIGNAL = 1.2; NT HIT: M37190.1, EVALUE 0.00e+00; SWISSPROT HIT: P97680, EVALUE 2.00e-09; EST_HUMAN HIT: R83499.1, EVALUE 0.00e+00
ctaggaggtggtgaggtcttcttccccgttctggaaaatgatgccataaggatcgttcttgatgcgtttgtagacaaagtggaagatgtggggctgtggtcggctgtgcagctccgccttgattttttgagggtaagtgtcctctgccagctgctgccatgtctcgtcaacgaagagaaagaggctgtactcctcagggtcccccaccttgaacttctcagcgcagatctgacacacatcctcagtggtgatgtaaggtctcacaaggagggtctttcctgtgcaaccactgttgacctcctgaaatgcaactcggaggtaattctgcaggtggaagaggaatgttgagacagtcag

SEQ ID NO: 17715 - DNA, 911 bp, Homo sapiens
  MAP TO AL049538.8; EXPRESSED IN FETAL LIVER, SIGNAL = 8.4; EXPRESSED IN LUNG, SIGNAL = 9.7; EXPRESSED IN PLACENTA, SIGNAL = 9.1; EXPRESSED IN BONE MARROW, SIGNAL = 8.7; EXPRESSED IN HBL100, SIGNAL =   7; EXPRESSED IN ADULT LIVER, SIGNAL = 6.2; EXPRESSED IN BRAIN, SIGNAL =  10; EXPRESSED IN HEART, SIGNAL =  13; EXPRESSED IN BT474, SIGNAL = 6.7; EXPRESSED IN HELA, SIGNAL = 8.4; SWISSPROT HIT: P97680, EVALUE 2.00e-03; NT HIT: M37190.1, EVALUE 0.00e+00
ctatttggtcttcagggatcagcgactcgatgggggggtccagctccgagctctgagacaaatagttcttgacctgggtcatgaactgccggatggtctgcagcatgtcggtgctggacacgtggcactccttgttctcctgcaggaagctcacgtagtcctgcactaagcacccgaagtaggtgcatttgtcccgggaaagctcggcgatcctgcggaccatccgcttctccggggtcatgaaggagctgaacaccccgctcaccttctgcagctgggacttgacgagcttgggcagcacgaaggagctgctccttttctttttggacttgatggggggcgccatggtctcttggtcactttccccctcgtagtcctccaggctgctgttggtgtccgcctcgtagccaaacagaggcatgctccggtcgaactccagcgagtcggaggaggaagtagaaatgctcatgtcgctcagccgctgccggcctccatggcacgggggccgtgattcagagctgggcggcggggcccttgtgcaatcccccggggcggcctcaggcggggccccacctgggctgccagctgtgcccagctccagctccgggcctgcgcccggccggccgccgctcaaggtctttgcaccgccctctgcttccagaaaagaagcctgcttcttcagccggggtggagggatgggagttggtttcgttccaggcagagctacgttcccatgtttgttatggttgactgtttctggcatgctcgtctgggtttcagtcctggccagccgagggcttgtgtggagactattaatagcgggtggcgggggcctgggtgggggggaccgagtccgctccgtgccattcgcgttgggagtccttgtgctcggccgtttcaggcctccactg

SEQ ID NO: 17716 - DNA, 454 bp, Homo sapiens
  MAP TO AL049538.8; EXPRESSED IN HEART, SIGNAL =  54; EXPRESSED IN PLACENTA, SIGNAL = 0.79; EXPRESSED IN BT474, SIGNAL = 0.79; EXPRESSED IN LUNG, SIGNAL = 1.5; EXPRESSED IN HELA, SIGNAL = 0.63; EXPRESSED IN BONE MARROW, SIGNAL = 0.72; EXPRESSED IN HBL100, SIGNAL = 0.78; EXPRESSED IN FETAL LIVER, SIGNAL = 0.6; EXPRESSED IN BRAIN, SIGNAL = 0.9; EST_HUMAN HIT: AA425176.1, EVALUE 0.00e+00; SWISSPROT HIT: Q13671, EVALUE 2.00e-12; NT HIT: M37190.1, EVALUE 0.00e+00
ctgagttgttctccatgaccgtgtaaatgagcttgcagacccgcagcagcagcatgaccttcttttccggcgaatacatcttctgcatggtcatgaacttgactttgattttctccacatccacaaaatcaggggtcggggcgaagacccccagctcctgcggattcctctgccgcacaagctgcaggttctccttgagttgcttccatgagccatcggccatgtgaaagtccttcagcatggcctccacgtgccccttgaggggcttcaagatgcacttgtgcatggctttttccagcaccacatctgccaaagaaagtgtagctactatgactattgtctgaagaaagaagaaatgcaacatctgctttcttacaatggacatctgcaactctatgcattggttgcaggcacacaaattgtacaccttaacatccaaccaacagacaacacc

SEQ ID NO: 17717 - DNA, 333 bp, Homo sapiens
  MAP TO AL035659.21; EXPRESSED IN LUNG, SIGNAL = 2.3; EXPRESSED IN BRAIN, SIGNAL = 2.2; EXPRESSED IN HEART, SIGNAL = 1.9; EXPRESSED IN BONE MARROW, SIGNAL = 0.83; EXPRESSED IN PLACENTA, SIGNAL = 1.2; EXPRESSED IN BT474, SIGNAL =   2; EXPRESSED IN ADULT LIVER, SIGNAL = 9.1; EXPRESSED IN HELA, SIGNAL = 1.7; EXPRESSED IN FETAL LIVER, SIGNAL = 1.3; EXPRESSED IN HBL100, SIGNAL = 1.5; SWISSPROT HIT: Q10587, EVALUE 2.00e-33; NT HIT: gi11418181, EVALUE 0.00e+00; EST_HUMAN HIT: BE783259.1, EVALUE 0.00e+00
attttgtttctgcagataaggaaaaggggaaggaaaagctggaggaggacgaggccgcagccgccagcaccatggctgtctcagcctccctcatgccacccatctgggacaagaccatcccatatgatggcgaatctttccacctggagtacatggacctggatgagttcctgctggagaatggcatccccgccagccccacccacctggcccacaacctgctgctgcctgtagcagagctagaagggaaggagtctgccagctcttccacagcatccccaccatcctcctccactgccatctttcagccctctgaaaccgtgtccagcacag

SEQ ID NO: 17718 - DNA, 238 bp, Homo sapiens
  MAP TO AL035659.21; EXPRESSED IN ADULT LIVER, SIGNAL = 2.3; EXPRESSED IN PLACENTA, SIGNAL = 1.7; EXPRESSED IN BT474, SIGNAL = 2.5; EXPRESSED IN BONE MARROW, SIGNAL = 1.7; EXPRESSED IN FETAL LIVER, SIGNAL = 1.6; EXPRESSED IN LUNG, SIGNAL = 1.5; EXPRESSED IN HELA, SIGNAL = 1.5; EXPRESSED IN HBL100, SIGNAL = 2.9; EXPRESSED IN BRAIN, SIGNAL = 2.7; EXPRESSED IN HEART, SIGNAL = 1.5; EST_HUMAN HIT: BF516530.1, EVALUE 1.00e-108; NT HIT: AF188530.1, EVALUE 1.00e-106; SWISSPROT HIT: O95801, EVALUE 8.00e-04
gcctttctgctcaagctggtgcagaatctgtttgctgagggcaatgatctgttccgggagaaggactataagcaggctctggtgcagtacatggaagggctgaacgtggccgactacgctgcctctgaccaggtggccctgccccgggagctgctgtgcaagctgcatgtcaatagggccgcctgctacttcaccatggtgagcctggcaccctcttttctctcctcctctgctgccc

SEQ ID NO: 17719 - DNA, 197 bp, Homo sapiens
  MAP TO AL035604.15; EXPRESSED IN LUNG, SIGNAL =  17; EXPRESSED IN ADULT LIVER, SIGNAL =  47; EXPRESSED IN BRAIN, SIGNAL =  58; EXPRESSED IN PLACENTA, SIGNAL =  15; EXPRESSED IN BT474, SIGNAL = 2.2e+02; EXPRESSED IN BONE MARROW, SIGNAL =  30; EXPRESSED IN FETAL LIVER, SIGNAL =  70; EXPRESSED IN HELA, SIGNAL = 1e+02; EXPRESSED IN HEART, SIGNAL =  42; EXPRESSED IN HBL100, SIGNAL = 1.4e+02; SWISSPROT HIT: P04406, EVALUE 6.00e-24; EST_HUMAN HIT: AA381019.1, EVALUE 2.00e-50; NT HIT: AF261085.1, EVALUE 1.00e-53
agcagttggtggtacaggaggcattgctgatgatcttaaggctgttgtcatacttctcataattcactttcatcatgaacatgatggcttcagtagagggggcaaagatcatgacccttttggctcccctctgcaaatgagccccaaccttctccatggcggtgaagatgctggtggactccacaacgtactcagtg

SEQ ID NO: 17720 - DNA, 96 bp, Homo sapiens
  MAP TO AL035604.15; EXPRESSED IN BONE MARROW, SIGNAL = 1.5; EXPRESSED IN FETAL LIVER, SIGNAL = 1.3; EXPRESSED IN LUNG, SIGNAL = 1.3; EXPRESSED IN ADULT LIVER, SIGNAL = 1.4; EXPRESSED IN PLACENTA, SIGNAL = 1.9; EXPRESSED IN HEART, SIGNAL =   1; EXPRESSED IN BRAIN, SIGNAL = 1.1; EXPRESSED IN HELA, SIGNAL = 0.92; EXPRESSED IN HBL100, SIGNAL = 2.1; EXPRESSED IN BT474, SIGNAL = 1.8; NT HIT: AF017784.1, EVALUE 6.80e-01; EST_HUMAN HIT: C16237.1, EVALUE 4.70e+00
tctgtgtttctaatgcttcaggccaaggaggaaaacactgtatttaatgcgcttgcagtatttctattcttgcaaaatacttactgttccaagcaa

SEQ ID NO: 17721 - DNA, 282 bp, Homo sapiens
  MAP TO AL035604.15; EXPRESSED IN PLACENTA, SIGNAL =  29; EXPRESSED IN LUNG, SIGNAL =  32; EXPRESSED IN BT474, SIGNAL = 4e+02; EXPRESSED IN HBL100, SIGNAL = 2.6e+02; EXPRESSED IN FETAL LIVER, SIGNAL = 1.7e+02; EXPRESSED IN HELA, SIGNAL = 1.6e+02; EXPRESSED IN ADULT LIVER, SIGNAL = 1.1e+02; EXPRESSED IN BRAIN, SIGNAL = 1.8e+02; EXPRESSED IN BONE MARROW, SIGNAL =  59; EXPRESSED IN HEART, SIGNAL = 1.3e+02; NT HIT: AF261085.1, EVALUE 3.00e-74; EST_HUMAN HIT: BF343388.1, EVALUE 4.00e-74; SWISSPROT HIT: P04406, EVALUE 2.00e-31
gttttccagatggcaggtcgggtccacgaccaacaccttggcagtggggacatgggaggccatgccagtgagcttcttgttcagctcagggatgaccttgaccattgccttggcagtgctagtagatgcaggtatgatgttctggagagccctgtggccatcaggccgcagtttcctgcaagggccatccacagttttctgggtggtagtgatgacatggactgtaatcatgagtctttcaacaataccagagttgtcatggatgaccttggccaggggcgc

SEQ ID NO: 17722 - DNA, 419 bp, Homo sapiens; identical to SEQ ID NO: 943
  MAP TO AL035494.8; EXPRESSED IN HEART, SIGNAL = 1.2; EXPRESSED IN FETAL LIVER, SIGNAL = 0.99; EXPRESSED IN BRAIN, SIGNAL = 1.6; EXPRESSED IN PLACENTA, SIGNAL = 1.3; EXPRESSED IN BONE MARROW, SIGNAL = 1.1; EXPRESSED IN HBL100, SIGNAL = 0.98; EXPRESSED IN LUNG, SIGNAL = 1.2; EXPRESSED IN ADULT LIVER, SIGNAL = 1.2; EXPRESSED IN BT474, SIGNAL = 0.93; EXPRESSED IN HELA, SIGNAL =   1; SWISSPROT HIT: P11369, EVALUE 2.00e-12; EST_HUMAN HIT: AI469679.1, EVALUE 3.00e-22; NT HIT: AJ400877.1, EVALUE 5.00e-21

SEQ ID NO: 17723 - DNA, 124 bp, Homo sapiens
  MAP TO AL035469.7; EXPRESSED IN BT474, SIGNAL = 1.3; EXPRESSED IN FETAL LIVER, SIGNAL = 1.6; EXPRESSED IN LUNG, SIGNAL = 1.8; EXPRESSED IN HELA, SIGNAL = 1.6; EXPRESSED IN ADULT LIVER, SIGNAL = 1.3; EXPRESSED IN BRAIN, SIGNAL =   2; EXPRESSED IN HEART, SIGNAL = 1.6; EXPRESSED IN HBL100, SIGNAL =   1; EXPRESSED IN PLACENTA, SIGNAL = 1.4; EXPRESSED IN BONE MARROW, SIGNAL = 1.5; NT HIT: AJ271735.1, EVALUE 6.00e-08; EST_HUMAN HIT: AI150502.1, EVALUE 2.00e-11
aggaagtttccaatcatggtggaagacaaagagggagcaggcatgtcacatggcaagaacaggagcgagaaagagagagagagagagagagaggagagggagggaagtactacacttttttaaa

SEQ ID NO: 17724 - DNA, 366 bp, Homo sapiens
  MAP TO AL035459.6; EXPRESSED IN PLACENTA, SIGNAL = 1.8; EXPRESSED IN BT474, SIGNAL = 1.5; EXPRESSED IN BONE MARROW, SIGNAL = 1.9; EXPRESSED IN HBL100, SIGNAL =   2; EXPRESSED IN ADULT LIVER, SIGNAL = 1.6; EXPRESSED IN HEART, SIGNAL = 1.9; EXPRESSED IN FETAL LIVER, SIGNAL = 8.6; EXPRESSED IN LUNG, SIGNAL = 1.8; EXPRESSED IN HELA, SIGNAL = 1.9; EXPRESSED IN BRAIN, SIGNAL = 2.2; EST_HUMAN HIT: R72283.1, EVALUE 3.40e-01; SWISSPROT HIT: P35616, EVALUE 1.70e-01
tcatttcctttctgtttcctcttcctcatctccatggctctctctcaatcctatcatctccaaggcctctccctcctcccccactcccagactgttccctgtccccaaacacctcgcctccagtccttcacttccatagcccccaactccagtatcttcagccccttccttctgcccaggctcctccactataactaaatctttgcccaggactttctgatctttcaggtagccagtatcatgtttcttctctgttttacaaaaaaaaaaaaaaaaaaaaaaaggtgaaaggtgatcctactcatggtccccaggcaggctggctacctcttcaaccttcatccctacaacctgtacaagttactt

SEQ ID NO: 17725 - DNA, 160 bp, Homo sapiens
  MAP TO AL034555.2; EXPRESSED IN BT474, SIGNAL = 0.86; EXPRESSED IN BONE MARROW, SIGNAL = 0.87; EXPRESSED IN HEART, SIGNAL = 0.87; EXPRESSED IN PLACENTA, SIGNAL = 0.62; EXPRESSED IN HBL100, SIGNAL = 0.72; EXPRESSED IN FETAL LIVER, SIGNAL = 3.1; EXPRESSED IN LUNG, SIGNAL =   1; EXPRESSED IN HELA, SIGNAL = 0.64; EXPRESSED IN ADULT LIVER, SIGNAL = 3.7; SWISSPROT HIT: P12627, EVALUE 1.30e+00; NT HIT: gi11427711, EVALUE 3.00e-85
tttggaaaagtaacttcagtgcagatacatggaacttcagaagagaggtatggtctggtattctttcggcagcaagaggaccaagaaaaagccttgactgcatcaaaaggaaaacttttctttggcatgcagattgaagtaacagcatggataggtccag

SEQ ID NO: 17726 - DNA, 7997 bp, Homo sapiens
  MAP TO AL034555.2; EXPRESSED IN BONE MARROW, SIGNAL =  10; EXPRESSED IN FETAL LIVER, SIGNAL = 8.9; EXPRESSED IN ADULT LIVER, SIGNAL = 4.8; EXPRESSED IN PLACENTA, SIGNAL =  14; EXPRESSED IN HEART, SIGNAL = 7.2; EXPRESSED IN BRAIN, SIGNAL = 9.5; EXPRESSED IN HELA, SIGNAL = 7.1; EXPRESSED IN LUNG, SIGNAL = 9.3; EXPRESSED IN HBL100, SIGNAL = 7.7; EXPRESSED IN BT474, SIGNAL =  12; EST_HUMAN HIT: AU117052.1, EVALUE 0.00e+00; SWISSPROT HIT: P08640, EVALUE 4.00e-10; NT HIT: gi11427711, EVALUE 0.00e+00
agaggaacgaagggcatcctacgactataaccaagatcgtacatattatgagagtgttcgaactccaggcacttatcctgaggattccaggcgggactatccagctcgagggagagagttttattcagaatgggaaacttaccaaggagactactatgaatcacgatactacgatgatcctcgggaatacagggattacaggaatgatccttatgaacaagatattagggaatatagttacaggcaaagggaacgagaaagagaacgtgaaagatttgagtctgaccgggacagagaccatgagaggaggccgattgaacgaagtcaaagtcctgttcacttgcgacgtccacagagtcctggagcgtctccctctcaggcagagaggttgccgagtgattctgagaggaggctttacagccgatcctcagaccggagtggaagctgtagctcactctcccctccaagatatgagaaactggacaagtctcgtttggagcgctatacaaaaaatgaaaagacagataaagaacgaacttttgatccggagagagtggagagagagagacgcttaatacggaaggaaaaagtggaaaaggacaaaactgacaagcagaaacgcaaaggaaaggttcactcccctagttctcagtcttcagaaacggaccaagaaaatgagcgagagcaaagccctgaaaagcccaggagttgtaataaactgagcagagagaaagctgacaaagagggaatagcgaaaaaccgcctggaactcatgccttgcgtggttttgactcgagtgaaagagaaagagggaaaggtcattgaccacactcctgtggaaaagttgaaagccaagcttgataatgacactgtcaaatcttctgccctggaccagaaacttcaggtctctcagacggagcctgcaaaatctgacttgtctaaactggaatcagttagaatgaaagtaccaaaggaaaaggggctttcaagccatgttgaagtggtggagaaggaaggcaggcttaaagccaggaagcacctcaagcctgagcagcctgcagatggggtaagtgctgtggatctggagaagctggaagccaggaaaaggcgctttgcagattccaatttaaaagcagaaaagcaaaaaccagaggtcaagaaaagcagtccagagatggaggatgctcgcgtgctttcaaaaaagcagcctgacgtgtcctctagagaggtcattctgctgagggaaggagaggctgaaagaaagcctgtgaggaaagaaattcttaaaagagaatctaaaaaaatcaaactggacagacttaatactgttgccagccccaaagactgtcaggagcttgccagtatttctgttgggtctggctcaaggcccagctcagacctacaagcaagactgggagaactagcaggtgaatctgtggaaaatcaagaagtccaatcaaaaaagcccattccctcaaaaccacagctcaaacagctgcaggtattagatgatcaaggaccagagagagaagacgttaggaaaaactattgcagtcttcgtgatgaaacacctgaacgtaaatcaggccaagagaaatcacattcagtaaatactgaagaaaaaattggcattgacatcgatcacacgcagagttaccgaaaacaaatggaacagagtcgtaggaaacagcagatggaaatggaaatagccaagtctgagaagtttggcagtcctaaaaaagatgtagatgaatatgaaagacgtagcctcgttcacgaggtaggcaaaccccctcaagatgtcactgatgactctcctcctagcaaaaagaaaaggatggatcatgtcgattttgatatctgcaccaagcgagaacggaattacagaagttcacgccaaatcagcgaagattctgaaaggactggtggttctcccagtgtccgacatggttccttccatgaagatgaggatcccataggctcccctaggctactgtcagtaaaagggtctcctaaagtagatgaaaaagtcctcccctattctaacataacagtcagggaagagtctttaaaatttaatccttatgattctagcaggagagaacagatggcagatatggccaaaataaaactatctgtcttgaattctgaagatgaactaaatcgttgggactctcagatgaaacaggatgctggcagatttgatgtgagtttcccaaacagcataattaagagagatagccttcgaaaaaggtctgtacgagatctggaacctggtgaggtgccttctgattctgacgaagatggtgaacacaaatcccactcacccagagcctctgcattatatgaaagttctcgattgtcttttttattgagggacagagaagacaagctacgtgagcgagatgaaagactctctagttctttagaaaggaacaaattttactcttttgcattggataagacaatcacaccagacactaaagctttgcttgaaagagctaaatccctctcttcatctcgtgaagaaaattggtcttttcttgattgggactcccgatttgcaaattttcgaaacaacaaagataaagaaaaggttgactctgctccaagacctattccatcctggtacatgaaaaagaagaaaattaggactgattcagaagggaaaatggatgataagaaagaggaccataaagaagaagagcaagagaggcaggaattgtttgcttctcgttttttacacagctcaatctttgaacaagattccaagcgattgcagcatctagagagaaaagaggaagattctgacttcatttctggtaggatctatgggaagcagacatctgagggagcaaacagcacaactgattccattcaagaaccagtagttctgttccatagcagatttatggagctcacacggatgcaacagaaagaaaaagaaaaagaccagaaacccaaagaggttgagaaacaggaagatacagagaatcatcccaagaccccagaatctgctcctgagaataaagattcagaactgaaaactccaccttccgttgggcctccaagtgtcacagtcgtaactctagaatcagccccatcagcactagagaagaccactggtgacaaaacggtagaggcgcctttggtaacagaagagaagactgtggagccagctaccgtctcagaagaagcaaagcctgcatctgaacctgctcctgcccctgtggaacagctggaacaagtagacctgcccccaggagcagaccccgataaagaagctgccatgatgcctgcgggtgttgaggaaggttcatcaggtgaccagccgccttatctggatgccaagcctccaactcccggggcctcgttttcccaggcagagagcaacgtagatccagagcctgacagtacccagccactttcaaaaccagctcagaagtctgaggaagccaatgagccaaaggccgaaaagccagacgccactgcagatgctgagcctgatgcaaaccagaaagccgaagctgctcctgagtctcagcccccagcttctgaagatttagaggttgatcctccagttgctgcaaaggataaaaagccaaacaaaagcaagcgttcaaagacccctgttcaggcagctgcagtgagtatcgtggagaagcccgtcacaaggaagagtgagaggatagaccgggaaaaactcaagcggtccaattctcctcggggagaagcacagaagcttttggaattgaagatggaggcagagaagattacaaggactgcttctaaaaactctgctgcagaccttgaacatcccgaaccaagtttgcctctcagccgaacaaggcgccggaatgtaaggagcgtctatgcaaccatgggtgaccatgaaaaccgctctcctgtcaaagagcccgttgagcaaccaagagtgaccagaaagagattggagcgagagcttcaggaggctgcagcggttcccaccacccctcggaggggaaggcctccaaagacacgccggcgagccgatgaagaggaggagaacgaggccaaggaacctgcagaaacactcaagccacctgagggatggcggtcgccaaggtcccagaaaactgcagctggtggtggaccccaagggaaaaagggaaaaaatgaaccgaaggtggatgctacacgtcctgaggccaccactgaggtgggcccccaaataggcgtgaaagagagctccatggaacccaaggctgctgaggaggaggcagggagtgaacagaaacgtgacagaaaagatgctggcacagacaaaaacccccctgaaaccgcccctgttgaagttgtagagaaaaaaccggcccctgaaaaaaactccaaatcaaagagaggaagatctcgaaactccaggttagcagtggacaaatctgcaagtctgaaaaatgtggatgctgctgtcagtcccaggggggctgcagcacaggcaggggagagggaatctggggtggtggcagtctcccctgagaaaagtgagagtccccaaaaggaggatggtttatcatcccagttgaaaagtgatccagttgatccagacaaggaaccagagaaagaagacgtgtctgcctctgggccgtccccagaagccacccagttagccaagcagatggagctggagcaggccgtggaacacatcgcaaagctcgctgaggcctctgcctctgctgcctataaggcagatgcaccagagggccttgccccagaggacagggacaagcctgcacaccaagcaagtgaaacagagctggctgcggccatcggctccatcatcaatgacatttctggggagccagaaaacttcccagcacctccaccttatcctggagaatcccagacagatctgcaaccccccgcaggtgcacaggcgctgcagccttctgaggaaggaatggagacagatgaggctgtatctggcatcctggaaactgaggctgctacagaatcttctaggcctccagtcaatgctcctgacccctcagccggcccaacagataccaaggaagccagaggaaatagcagtgaaacctcacactcagtgccagaagccaaagggtctaaagaagtggaagtcactcttgttcggaaagacaaagggcgccagaaaacaacccgatcacgccgcaagcgaaacacaaacaagaaagtggtggctcctgtagagagccatgtccctgaatccaaccaagctcaaggtgagagtcctgctgcaaatgaggggacaacagtacagcaccccgaagccccacaggaagaaaagcagagtgagaaaccccattccactcctcctcagtcatgtacttctgacctaagcaagattccctccacagagaattcgtcccaagaaatcagtgttgaggaaaggactccaaccaaagcatctgtgcccccagaccttcccccacctccccagccagcaccggtggatgaggagcctcaagccaggttcagggtgcattccatcattgaaagtgacccggtgaccccacccagcgatccaagcatccccatacccacactgccttctgtaactgcagcaaagctctcacctcctgtcgcctctggggggatcccacaccagagcccccctactaaggtgacagagtggatcacaaggcaggaggagccacgggctcagtctactccatctccagctcttcccccagacacaaaggcctctgatgttgacaccagctccagcaccctgaggaagattctcatggaccccaagtatgtgtctgccacaagtgtcacttccacaagtgtcaccacagccattgcagagcctgtcagtgctgccccttgcctacatgaggccccgcccccgccagttgactctaaaaagcctttagaagaaaaaacagcacctccagtgacaaacaactctgagatacaagcctcggaggtgctggtagctgctgacaaggaaaaggtggctccagtcattgctcccaaaattacctctgttattagccggatgcctgtcagcattgacctggaaaattcacagaagataaccttggcaaaaccagctcctcaaaccctcactggtctggtgagcgcactcactggcctggtgaacgtctccctggtcccggtgaatgccctgaaaggccccgtgaagggctcagtgaccacactgaaaagtttggtgagcacccctgctgggcccgtgaacgtcctgaaagggcctgtgaatgttcttacggggccagtgaatgttctcaccactccagtgaacgccacggtgggcacagtgaatgccgccccaggcacagtcaatgccgctgcgagtgcagtgaatgccacagcaagtgcagtgaccgtcacagcgggtgcggttactgctgcatctggtggtgtaacggccacaacaggcacggtgacaatggcaggggcagtgattgcgccgtcaacaaagtgcaaacagagagcgagtgctaatgaaaacagtcggttccacccagggtccatgcctgtgatcgacgatcgtccggcagacgcgggctcaggggcggggctgcgtgtgaacacttctgaaggggttgtgctcctgagttactcagggcagaagaccgaaggcccacagcggatcagcgccaagatcagccagatccccccggccagtgcaatggacattgaatttcagcagtcagtgtccaagtcccaggtcaaacctgattctgtcacagcatcgcagcctccatccaaaggccctcaagctcctgcaggctatgcgaacgtggccacccattccacgttggtactgaccgcccagacatataatgcctctcctgtgatttcgtctgtgaaggccgataggccatccttggagaagcccgagcccattcacctctcggtgtccacgcctgtcacccagggaggcacagtgaaggttctcacccaggggatcaacacaccccctgtgctggttcacaaccagctggtcctcaccccaagcattgtcaccacaaacaagaagcttgctgaccccgtcacccttaaaatcgagaccaaggtccttcagccggccaacctggggtccacgctcacgccccaccaccctcctgctctgcccagcaaactgcctacagaagtcaaccatgtcccctcggggcccagcatcccagcagatcgaactgtctcccatttggcagctgcaaagctagatgctcattctcctcgaccaagtggacccgggccatcctcattcccaagggcaagccaccccagcagtactgcatctacggcgctctccaccaacgccacagtcatgctggctgcaggcatcccagtgccccagttcatctccagcatccacccagagcagtctgtcatcatgccaccccacagcatcacccagactgtgtccctgagccacctctcccagggcgaggtgagaatgaacactcccacgctgcccagtatcacctacagcatccggccagaagcgcttcactctcctcgggctccgctgcagccccagcaaatagaggtcagggccccacagcgtgccagcaccccgcagccagccccagctggtgtgcctgcactggcctcccagcaccctcccgaggaggaagtgcattatcaccttcctgtcgctcgagccacagcccctgtgcagtcagaggtactagtcatgcagtctgagtaccgactgcacccctatactgtgccacgggatgtgaggatcatggtgcatccacatgtgacggcagtcagcgagcagcccagggccgcggatggggtggtgaaggtgccaccagccagcaaggcccctcagcagccagggaaggaagctgccaagacaccagatgccaaagctgcccccacccccacccctgcccccgtccctgtccctgtcccccttcctgcccctgctcctgcccctcatggtgaggcccgtatcctcacagttacccccagtaaccaactccaggggctgcctc

SEQ ID NO: 17727 - DNA, 118 bp, Homo sapiens
  MAP TO AL034545.1; EXPRESSED IN BT474, SIGNAL = 2.4; EXPRESSED IN BONE MARROW, SIGNAL = 2.8; EXPRESSED IN HELA, SIGNAL = 2.4; EXPRESSED IN ADULT LIVER, SIGNAL = 1.8; EXPRESSED IN PLACENTA, SIGNAL = 2.7; EXPRESSED IN FETAL LIVER, SIGNAL =   2; EXPRESSED IN LUNG, SIGNAL = 2.2; EXPRESSED IN BRAIN, SIGNAL = 2.5; EXPRESSED IN HBL100, SIGNAL = 2.3; EXPRESSED IN HEART, SIGNAL = 2.3; NT HIT: AF223391.1, EVALUE 7.00e-08; EST_HUMAN HIT: AV748274.1, EVALUE 4.00e-07
catattccatagcaccagctgggtcgtggcagccctactcgtggctagatccagaagaacaataacaatcagacagaatgtcatcaaagaaacaatggacttaaactacactctagaa

SEQ ID NO: 17728 - DNA, 163 bp, Homo sapiens
  MAP TO AL034449.1; EXPRESSED IN PLACENTA, SIGNAL = 1.4; EXPRESSED IN BT474, SIGNAL = 0.86; EXPRESSED IN BONE MARROW, SIGNAL = 0.98; EXPRESSED IN FETAL LIVER, SIGNAL = 0.85; EXPRESSED IN LUNG, SIGNAL = 1.5; EXPRESSED IN HELA, SIGNAL =   1; EXPRESSED IN HBL100, SIGNAL = 1.1; EXPRESSED IN ADULT LIVER, SIGNAL = 1.1; EXPRESSED IN BRAIN, SIGNAL = 1.5; EXPRESSED IN HEART, SIGNAL = 1.3; SWISSPROT HIT: P29025, EVALUE 2.90e+00; EST_HUMAN HIT: BF348448.1, EVALUE 5.60e-01; NT HIT: AL163210.2, EVALUE 4.00e-87
aacaacaaaaaagatttcatcttcaggaccattcgtactccagagtgcttcacacaagaatacaggagtgaccctggggttgggcaatgcaacagtgctctgatggttatagagttattccacatatactataaaaacttcactcgtaaactcatctcttatc

SEQ ID NO: 17729 - DNA, 159 bp, Homo sapiens
  MAP TO AL034449.1; EXPRESSED IN BT474, SIGNAL =   2; EXPRESSED IN BONE MARROW, SIGNAL = 1.9; EXPRESSED IN FETAL LIVER, SIGNAL = 4.5; EXPRESSED IN LUNG, SIGNAL = 1.3; EXPRESSED IN ADULT LIVER, SIGNAL = 1.1; EXPRESSED IN PLACENTA, SIGNAL = 1.9; EXPRESSED IN HELA, SIGNAL = 1.5; EXPRESSED IN HEART, SIGNAL = 1.2; EXPRESSED IN BRAIN, SIGNAL = 1.1; EXPRESSED IN HBL100, SIGNAL = 2.8; NT HIT: AL163209.2, EVALUE 9.00e-85; EST_HUMAN HIT: AW407696.1, EVALUE 9.40e-02; SWISSPROT HIT: P09439, EVALUE 4.40e-01
gcatcttttctagttgagccagataagaactatgggcatctttataaggttcacatcattcctgttgggaagaccaacctcagaacctattacttgtttggtagtgtcagtatgttcaagctgaattacacatctgggcatatccctgggcaccagcct

SEQ ID NO: 17730 - DNA, 96 bp, Homo sapiens
  MAP TO AL034449.1; EXPRESSED IN PLACENTA, SIGNAL = 2.4; EXPRESSED IN BONE MARROW, SIGNAL = 2.2; EXPRESSED IN LUNG, SIGNAL = 2.1; EXPRESSED IN ADULT LIVER, SIGNAL = 1.9; EXPRESSED IN BRAIN, SIGNAL = 2.7; EXPRESSED IN BT474, SIGNAL = 2.4; EXPRESSED IN HBL100, SIGNAL = 2.7; EXPRESSED IN FETAL LIVER, SIGNAL = 2.1; EXPRESSED IN HELA, SIGNAL = 2.7; EXPRESSED IN HEART, SIGNAL = 2.2; NT HIT: AL163209.2, EVALUE 2.00e-47; EST_HUMAN HIT: AA078318.1, EVALUE 1.00e-30
tgctgcttcttgttcactggatccaatcagcataatgtcatcaatgtaatggaccagtgtgatatctcgggaaagcaaaaagcgatcaagttctct

SEQ ID NO: 17731 - DNA, 196 bp, Homo sapiens
  MAP TO AL034424.9; EXPRESSED IN HBL100, SIGNAL = 8.1; EXPRESSED IN BT474, SIGNAL =  11; EXPRESSED IN BONE MARROW, SIGNAL =  13; EXPRESSED IN FETAL LIVER, SIGNAL = 8.1; EXPRESSED IN HELA, SIGNAL =  12; EXPRESSED IN ADULT LIVER, SIGNAL =  10; EXPRESSED IN BRAIN, SIGNAL =  12; EXPRESSED IN PLACENTA, SIGNAL = 9.7; EXPRESSED IN LUNG, SIGNAL =  16; EXPRESSED IN HEART, SIGNAL =  11; EST_HUMAN HIT: BE895402.1, EVALUE 1.00e-106; SWISSPROT HIT: Q13183, EVALUE 1.00e-19; NT HIT: AF154121.1, EVALUE 1.00e-107
cgattcgccggtgcaggttccactcctcaatggcgctggccatgatcagcccactgaggaagaggaagttggtgtcgaggaagtactgggggcagaccttgttggagggcaagatgcccatgaaggggaagaggacgatgggcagcagcgccgtcactgagagcggcagggcctccgtgcaccagtacaccgccat

SEQ ID NO: 17732 - DNA, 330 bp, Homo sapiens
  MAP TO AL034395.6; EXPRESSED IN PLACENTA, SIGNAL = 6.3; EXPRESSED IN FETAL LIVER, SIGNAL =  10; EXPRESSED IN LUNG, SIGNAL =  15; EXPRESSED IN BT474, SIGNAL =  13; EXPRESSED IN HEART, SIGNAL =  16; EXPRESSED IN BRAIN, SIGNAL =  11; EXPRESSED IN ADULT LIVER, SIGNAL =  67; EXPRESSED IN HELA, SIGNAL =  11; EXPRESSED IN HBL100, SIGNAL =  16; EXPRESSED IN BONE MARROW, SIGNAL =  13; NT HIT: U69674.1, EVALUE 6.90e-01; SWISSPROT HIT: P05308, EVALUE 4.80e+00
atcaaatttctaactctcctaccttgccaccatcaagaaacggtgagcgtattcttgccaatttcaaatggcaggagtggggattaaaaaaaagagatgacattaatcccactgtgttccaggttgcacttgccaaattaaagcaaatacgccatgttcaatggtttaaatacaccatgtttaagtcaatcaaggaaaatgaacgaattcatttgttgccgctgaccagaagtctgagacctggctgcgaagatgatacaacgggtgagcttactttaaaagatgcaggtatgcctgtcctgaaattcacatctttttttttaactctct

SEQ ID NO: 17733 - DNA, 99 bp, Homo sapiens
  MAP TO AL033525.10; EXPRESSED IN PLACENTA, SIGNAL = 1.9; EXPRESSED IN BONE MARROW, SIGNAL = 1.6; EXPRESSED IN BT474, SIGNAL = 1.4; EXPRESSED IN ADULT LIVER, SIGNAL = 1.7; EXPRESSED IN HELA, SIGNAL = 1.7; EXPRESSED IN LUNG, SIGNAL = 1.7; EXPRESSED IN FETAL LIVER, SIGNAL = 1.4; EXPRESSED IN HBL100, SIGNAL = 1.5; EXPRESSED IN HEART, SIGNAL = 1.7; EXPRESSED IN BRAIN, SIGNAL = 2.1; EST_HUMAN HIT: AA569289.1, EVALUE 2.10e-01; NT HIT: Z73063.1, EVALUE 3.30e+00
gggtcagaacacacaggagttacacacgttaaggaggtagaatacacccttgaaggcattgacagtccattggaagagctgagccaggatgggaggggt

SEQ ID NO: 17734 - DNA, 260 bp, Homo sapiens
  MAP TO AL033525.10; EXPRESSED IN LUNG, SIGNAL = 0.98; EXPRESSED IN HELA, SIGNAL = 1.3; EXPRESSED IN PLACENTA, SIGNAL =   1; EXPRESSED IN BT474, SIGNAL = 1.5; EXPRESSED IN BONE MARROW, SIGNAL =   1; EXPRESSED IN HBL100, SIGNAL = 2.4; EXPRESSED IN FETAL LIVER, SIGNAL = 1.4; EXPRESSED IN ADULT LIVER, SIGNAL = 1.4; EXPRESSED IN BRAIN, SIGNAL = 1.2; EXPRESSED IN HEART, SIGNAL = 1.2; NT HIT: D14547.1, EVALUE 8.00e-16; EST_HUMAN HIT: AI870557.1, EVALUE 7.00e-14; SWISSPROT HIT: P29964, EVALUE 7.00e+00
tgcacaggtccagttacatgtgagattttttttttacagtaaatatattggaaaatttcttggagttttttttcaacttgtagacaattaaaaaaaaactcacggacaaaccactacctttgagacagaaaaaccaatccctccccttcctgctcttcttcagccaattcaacatgaagacaatgaggataaagacctttatgatgattcacttccacttaataaagagtcaatctatttcctcttccttatgcttccct

SEQ ID NO: 17735 - DNA, 111 bp, Homo sapiens
  MAP TO AL033379.2; EXPRESSED IN BRAIN, SIGNAL = 0.77; EXPRESSED IN HEART, SIGNAL = 0.9; EXPRESSED IN PLACENTA, SIGNAL = 0.72; EXPRESSED IN HBL100, SIGNAL = 1.8; EXPRESSED IN FETAL LIVER, SIGNAL = 1.3; EXPRESSED IN LUNG, SIGNAL = 0.93; EXPRESSED IN HELA, SIGNAL =   2; EXPRESSED IN BT474, SIGNAL = 0.97; EXPRESSED IN BONE MARROW, SIGNAL = 1.1; EXPRESSED IN ADULT LIVER, SIGNAL = 1.2; NT HIT: AL161504.2, EVALUE 2.10e-01; EST_HUMAN HIT: BF132314.1, EVALUE 5.60e+00
tccctctgtctttgttactcagccattcccacatcgtgatggacatgatagtgttaaatgcagatatctctgagattcaggaaggctttcttgaactgcacctttgcaacc

SEQ ID NO: 17736 - DNA, 605 bp, Homo sapiens
  MAP TO AL033379.2; EXPRESSED IN FETAL LIVER, SIGNAL = 2.4; EXPRESSED IN BRAIN, SIGNAL = 3.2; EXPRESSED IN HEART, SIGNAL = 2.5; EXPRESSED IN BONE MARROW, SIGNAL =   2; EXPRESSED IN LUNG, SIGNAL = 3.4; EXPRESSED IN PLACENTA, SIGNAL = 1.8; EXPRESSED IN BT474, SIGNAL = 1.4; EXPRESSED IN ADULT LIVER, SIGNAL = 2.5; EXPRESSED IN HELA, SIGNAL =   3; EXPRESSED IN HBL100, SIGNAL = 1.9; NT HIT: AB030566.1, EVALUE 0.00e+00; EST_HUMAN HIT: AV758497.1, EVALUE 5.70e-01; SWISSPROT HIT: Q91081, EVALUE 7.00e-17
gcctggattggttgtgtacccaaacacacactggggagctcgggaaggtatctgcaggtcggggtttcctacggctaaaggaaaagctacacaaaaggaagttgcccaagaaactgcaatcagaaccttagctctatatgggtttagcttatcctgcctctggactataataaggaacctatctatgctaatgatgagcaggatggctactccttctatcacaaataaccagaaaaacatagcagataccctacagaagaatttcccaaaaatccatcgggtagtaagaatagttaccagggcaaagggcatgttcagcactgcaagcaacatgtctgcaaaagctaggctggcaaggaggatgttaattgcagacctcatggcagctttttggtaaaccatgaggcaaacaaccaagttcccaagaaaagacacaaacagaatgaatatcattatagcagaaagggtgatctgaagaggcaagtttaggctcttaaatgctgctggtgttgtgggcacagctgtactattcacggtcaaggaactcaaaccagtgggagccatggtttcaaaactatatctaagcaatggactgaggtcaggat

SEQ ID NO: 17737 - DNA, 172 bp, Homo sapiens
  MAP TO AL031984.13; EXPRESSED IN BONE MARROW, SIGNAL = 9.1; EXPRESSED IN ADULT LIVER, SIGNAL = 5.3; EXPRESSED IN BRAIN, SIGNAL = 7.6; EXPRESSED IN PLACENTA, SIGNAL = 8.2; EXPRESSED IN BT474, SIGNAL = 5.3; EXPRESSED IN HBL100, SIGNAL = 5.8; EXPRESSED IN FETAL LIVER, SIGNAL = 7.6; EXPRESSED IN LUNG, SIGNAL =   6; EXPRESSED IN HELA, SIGNAL =   5; EXPRESSED IN HEART, SIGNAL = 4.5; SWISSPROT HIT: Q62059, EVALUE 5.70e-01; NT HIT: D26315.1, EVALUE 6.20e+00
acacgaggaggagagctcccatccaaactgttcccaggcaaacgtgtccttgctcttgatccgtgtggaattccaagtccccctggcagagagcggcttctgggactctgggagggaagaatcttctttaaccccagtggaagtgcaagcaaaggcggttggcagttgggcg

SEQ ID NO: 17738 - DNA, 180 bp, Homo sapiens
  MAP TO AL031965.7; EXPRESSED IN BONE MARROW, SIGNAL = 4.7; EXPRESSED IN LUNG, SIGNAL = 3.5; EXPRESSED IN HELA, SIGNAL = 9.6; EXPRESSED IN ADULT LIVER, SIGNAL = 3.6; EXPRESSED IN BRAIN, SIGNAL = 3.6; EXPRESSED IN HEART, SIGNAL =   2; EXPRESSED IN PLACENTA, SIGNAL = 3.3; EXPRESSED IN BT474, SIGNAL = 5.4; EXPRESSED IN HBL100, SIGNAL =  12; EXPRESSED IN FETAL LIVER, SIGNAL = 5.8; SWISSPROT HIT: P75913, EVALUE 2.20e+00; EST_HUMAN HIT: AI281909.1, EVALUE 4.30e-01; NT HIT: AF243376.1, EVALUE 7.00e-03
gtctgcagagagaccgggtcatttctgggtttagaaccaggaccacagtcagcaagcctaccatccaagcattgatctgcactctcaaaatagctctccttaattttagaatccaccatgtttttgcaaccttctacataaatcccaaaaagtccccagcaaggtacttttgtttgggga

SEQ ID NO: 17739 - DNA, 222 bp, Homo sapiens
  MAP TO AL031885.3; EXPRESSED IN FETAL LIVER, SIGNAL = 4.4; EXPRESSED IN BT474, SIGNAL = 3.1; EXPRESSED IN BONE MARROW, SIGNAL =   2; EXPRESSED IN HBL100, SIGNAL = 5.6; EXPRESSED IN HELA, SIGNAL = 3.7; EXPRESSED IN ADULT LIVER, SIGNAL =   3; EXPRESSED IN BRAIN, SIGNAL = 3.9; EXPRESSED IN PLACENTA, SIGNAL = 1.2; EXPRESSED IN LUNG, SIGNAL = 1.5; EXPRESSED IN HEART, SIGNAL = 2.7; SWISSPROT HIT: P54105, EVALUE 2.00e-11; EST_HUMAN HIT: BE741516.1, EVALUE 5.00e-79; NT HIT: AF116664.1, EVALUE 4.00e-79
atcctgaggatgaggatgaggatgactacgatggagaagaatatgatgtggaagcacatgaacgaggaaaaggggacatccctaaatcttacacctatgaaggattatcccattaacagcagaaggccaagccacattggagagattagaagaaatgctttctcatctgtgagcagccagtataatatggctggggtcaggacagaagactcaataagatta

SEQ ID NO: 17740 - DNA, 172 bp, Homo sapiens
  MAP TO AL031779.5; EXPRESSED IN LUNG, SIGNAL = 2.1; EXPRESSED IN HEART, SIGNAL = 1.7; EXPRESSED IN BONE MARROW, SIGNAL = 2.1; EXPRESSED IN FETAL LIVER, SIGNAL = 1.7; EXPRESSED IN HELA, SIGNAL = 2.2; EXPRESSED IN ADULT LIVER, SIGNAL = 1.6; EXPRESSED IN BRAIN, SIGNAL = 2.7; EXPRESSED IN PLACENTA, SIGNAL = 1.7; EXPRESSED IN BT474, SIGNAL = 1.4; EXPRESSED IN HBL100, SIGNAL = 1.3; EST_HUMAN HIT: H91871.1, EVALUE 2.30e+00; NT HIT: Y18000.1, EVALUE 6.00e-03; SWISSPROT HIT: P23890, EVALUE 2.20e+00
gggtttctcggtctgggcactattgacattttgggccatatatatctttgtcatggcggctgtcctgtgcattttggaatgcttggtggcattcttggattttaaccacctgataccagtaacatctgcaccttcagttgtgacgccaaaaatgtcttcagacaatgtcaaa

SEQ ID NO: 17741 - DNA, 160 bp, Homo sapiens
  MAP TO AL031734.9; EXPRESSED IN HBL100, SIGNAL = 4.4; EXPRESSED IN FETAL LIVER, SIGNAL =  13; EXPRESSED IN LUNG, SIGNAL = 4.8; EXPRESSED IN ADULT LIVER, SIGNAL = 5.8; EXPRESSED IN BRAIN, SIGNAL = 1.8; EXPRESSED IN HEART, SIGNAL = 1.4; EXPRESSED IN PLACENTA, SIGNAL =   3; EXPRESSED IN BT474, SIGNAL = 3.5; EXPRESSED IN HELA, SIGNAL =  25; EXPRESSED IN BONE MARROW, SIGNAL = 1.3; NT HIT: U48296.1, EVALUE 1.00e-56; EST_HUMAN HIT: Z43070.1, EVALUE 2.00e-56; SWISSPROT HIT: P41239, EVALUE 2.90e+00
atacttctccaaatacaaaagttgcttgcttttaaaagctccactccgcttttgtcctatgaattgtactgcatcttcatgtttcattccaccttcaactgatgctagggcaacaagtactggagctttcccaaggcctacaatgcaattaacagcaata

SEQ ID NO: 17742 - DNA, 191 bp, Homo sapiens
  MAP TO AL031734.9; EXPRESSED IN HBL100, SIGNAL = 0.87; EXPRESSED IN PLACENTA, SIGNAL =  74; EXPRESSED IN BT474, SIGNAL = 0.84; EXPRESSED IN BONE MARROW, SIGNAL =   1; EXPRESSED IN FETAL LIVER, SIGNAL = 0.82; EXPRESSED IN LUNG, SIGNAL = 0.9; EXPRESSED IN HELA, SIGNAL = 0.89; EXPRESSED IN ADULT LIVER, SIGNAL = 0.8; EXPRESSED IN BRAIN, SIGNAL = 0.79; EXPRESSED IN HEART, SIGNAL =   1; SWISSPROT HIT: P49340, EVALUE 9.60e-01; NT HIT: AJ278348.1, EVALUE 1.00e-103; EST_HUMAN HIT: BF366974.1, EVALUE 4.00e-24
tggagagggctcctaccgagaagcagagacctttaactcccaagtaggactgcccatcttatacttctctgggaggcgggagcggctgctgctgcgtccagaagtgctggctgagattccccgggaggcgttcacagtggaagcctgggttaaaccggagggaggacagaacaacccagccatcatcgcag

SEQ ID NO: 17743 - DNA, 292 bp, Homo sapiens
  MAP TO AL031734.9; EXPRESSED IN LUNG, SIGNAL = 0.97; EXPRESSED IN HELA, SIGNAL = 0.88; EXPRESSED IN BRAIN, SIGNAL = 0.94; EXPRESSED IN HEART, SIGNAL = 0.85; EXPRESSED IN PLACENTA, SIGNAL = 1.8; EXPRESSED IN ADULT LIVER, SIGNAL = 0.8; EXPRESSED IN FETAL LIVER, SIGNAL = 0.78; EXPRESSED IN HBL100, SIGNAL = 0.75; EXPRESSED IN BONE MARROW, SIGNAL = 0.89; EXPRESSED IN BT474, SIGNAL = 0.65; EST_HUMAN HIT: AI912212.1, EVALUE 1.80e-01; SWISSPROT HIT: P22438, EVALUE 4.40e-01
cacttcaccacagcccacagtacacattccagggccacaagcacgtggttccctgagctctttgctcactctaacgtgtgaaatgtgtattgtgggctgaaatgtgtactgctggccattggttcccattccatgttgatactccttacatgcctctgcagaggaagctgccaacaacttggtagggatttttatggggtcgaggaagggactttgccttccaaaatactgtccagaaaacatgatggaatttctgtaacaggaaacaaaatgttcagttaagtctccaaat

SEQ ID NO: 17744 - DNA, 1075 bp, Homo sapiens
  MAP TO AL031734.9; EXPRESSED IN BT474, SIGNAL = 1.6; EXPRESSED IN HELA, SIGNAL = 1.3; EXPRESSED IN PLACENTA, SIGNAL =  44; EXPRESSED IN FETAL LIVER, SIGNAL = 1.6; EXPRESSED IN LUNG, SIGNAL = 1.8; EXPRESSED IN ADULT LIVER, SIGNAL = 1.4; EXPRESSED IN BONE MARROW, SIGNAL = 1.9; EXPRESSED IN HBL100, SIGNAL = 1.1; EXPRESSED IN BRAIN, SIGNAL = 1.1; EXPRESSED IN HEART, SIGNAL = 4.6; EST_HUMAN HIT: BF366974.1, EVALUE 0.00e+00; NT HIT: AJ278348.1, EVALUE 0.00e+00; SWISSPROT HIT: P07207, EVALUE 6.00e-04
gtgtgtttgataactgctcccacactgtcagtgacaaaggctgggccctggggatccgctcagggaaggacaagggaaagcgggatgctcgcttcttcttctccctctgcaccgaccgcgtgaagaaagccaccatcttgattagccacagtcgctaccaaccaggcacatggacccatgtggcagccacttacgatggacggcacatggccctgtatgtggatggcactcaggtggctagcagtctagaccagtctggtcccctgaacagccccttcatggcatcttgccgctctttgctcctggggggagacagctctgaggatgggcactatttccgtggacacctgggcacactggttttctggtcgaccgccctgccacaaagccattttcagcacagttctcagcattcaagtggggaggaggaagcgactgacttggtcctgacagcgagctttgagcctgtgaacacagagtgggttccctttagagatgagaagtacccacgacttgaggttctccagggctttgagccagagcctgagattctgtcgcctttgcagcccccactctgtgggcaaacagtctgtgacaatgtggaattgatctcccagtacaatggatactggccccttcggggagagaaggtgatacgctaccaggtggtgaacatctgtgatgatgagggcctaaaccccattgtgagtgaggagcagattcgtctgcagcacgaggcactgaatgaggccttcagccgctacaacatcagctggcagctgagcgtccaccaggtccacaattccaccctgcgacaccgggttgtgcttgtgaactgtgagcccagcaagattggcaatgaccattgtgaccccgagtgtgagcacccactcacaggctatgatgggggtgactgccgcctgcagggccgctgctactcctggaaccgcagggatgggctctgtcacgtggagtgtaacaacatgctgaacgactttgacgacggagactgctgcgacccccaggtggctgatgtgcgcaagacctgctttgaccctgactcacccaagaggta

SEQ ID NO: 17745 - DNA, 276 bp, Homo sapiens
  MAP TO AL031729.16; EXPRESSED IN FETAL LIVER, SIGNAL = 2.5; EXPRESSED IN HELA, SIGNAL =   3; EXPRESSED IN HEART, SIGNAL = 1.3; EXPRESSED IN BT474, SIGNAL = 1.5; EXPRESSED IN BONE MARROW, SIGNAL = 3.6; EXPRESSED IN BRAIN, SIGNAL = 1.7; EXPRESSED IN ADULT LIVER, SIGNAL = 1.8; EXPRESSED IN LUNG, SIGNAL = 3.1; EXPRESSED IN HBL100, SIGNAL = 1.6; EXPRESSED IN PLACENTA, SIGNAL =   2; NT HIT: X52207.1, EVALUE 0.00e+00; EST_HUMAN HIT: BE561757.1, EVALUE 0.00e+00; SWISSPROT HIT: P09769, EVALUE 9.00e-41
ggaacctggaatgggctgtgtgttctgcaagaaattggagccggtggccacggccaaggaggatgctggcctggaaggggacttcagaagctacggggcagcagaccactatgggcctgaccccactaaggcccggcctgcatcctcatttgcccacatccccaactacagcaacttctcctctcaggccatcaaccctggcttccttgatagtggcaccatcaggggtgtgtcaggtgagtccaaggggtcggaggcaggagctgcctggatcct

SEQ ID NO: 17746 - DNA, 323 bp, Homo sapiens
  MAP TO AL031729.16; EXPRESSED IN BT474, SIGNAL =  17; EXPRESSED IN HBL100, SIGNAL =  34; EXPRESSED IN HELA, SIGNAL = 8.5; EXPRESSED IN BRAIN, SIGNAL =  14; EXPRESSED IN PLACENTA, SIGNAL = 6.1; EXPRESSED IN BONE MARROW, SIGNAL = 7.2; EXPRESSED IN FETAL LIVER, SIGNAL =  25; EXPRESSED IN LUNG, SIGNAL =  12; EXPRESSED IN ADULT LIVER, SIGNAL =  12; EXPRESSED IN HEART, SIGNAL =  13; EST_HUMAN HIT: BF681218.1, EVALUE 1.00e-101; NT HIT: gi11450328, EVALUE 1.00e-100
ttaattccacctgtggccaagggccccttccccgcggccttcgcttttagctcctcgagtttcttctgctcctctttttgtttctgcttgaaagccttgtcttcctcgtccatctccttggcctgcttcttgggctgtttcggtggcttcttcttgccaccttcgtggccggacatggcacctgccgccccttccgcagaccctgccaccagaaacctaaacatgttatttttcaattcaaccagcaaatactgagagatgccatctctgggccaggccctcaagagtccagtgggaaaggcagatctggaaacatatattta

SEQ ID NO: 17747 - DNA, 105 bp, Homo sapiens
  MAP TO AL031655.7; EXPRESSED IN HBL100, SIGNAL = 0.96; EXPRESSED IN FETAL LIVER, SIGNAL = 1.9; EXPRESSED IN HELA, SIGNAL = 1.4; EXPRESSED IN ADULT LIVER, SIGNAL = 3.8; EXPRESSED IN HEART, SIGNAL = 1.6; EXPRESSED IN BONE MARROW, SIGNAL = 1.2; EXPRESSED IN BRAIN, SIGNAL = 1.7; EXPRESSED IN PLACENTA, SIGNAL = 1.7; EXPRESSED IN BT474, SIGNAL = 1.3; EXPRESSED IN LUNG, SIGNAL = 1.4; NT HIT: gi7305180, EVALUE 1.90e-01; EST_HUMAN HIT: BE147951.1, EVALUE 2.30e-01
tgttgtaaatttttattgccttgtattccagatctgcaatttctctgatgtccattaaatcctgcttttctaccatgattttgatctttgtttactgttggttgt

SEQ ID NO: 17748 - DNA, 108 bp, Homo sapiens
  MAP TO AL031655.7; EXPRESSED IN PLACENTA, SIGNAL =  11; EXPRESSED IN BT474, SIGNAL = 1.5; EXPRESSED IN LUNG, SIGNAL = 1.4; EXPRESSED IN HELA, SIGNAL = 1.1; EXPRESSED IN HBL100, SIGNAL = 1.3; EXPRESSED IN FETAL LIVER, SIGNAL = 1.8; EXPRESSED IN ADULT LIVER, SIGNAL = 1.7; EXPRESSED IN BRAIN, SIGNAL = 1.3; EXPRESSED IN BONE MARROW, SIGNAL = 1.6; EXPRESSED IN HEART, SIGNAL = 1.6; NT HIT: U72742.1, EVALUE 5.00e-02; EST_HUMAN HIT: AW900390.1, EVALUE 9.40e-01; SWISSPROT HIT: Q41350, EVALUE 5.30e+00
ccagatgcatccatcaatcaaaacctgttggtggataactacctctgctcccttgcccctcatgtgggataacagtaagatctgtgttataacctctcatccccaata

SEQ ID NO: 17749 - DNA, 134 bp, Homo sapiens
  MAP TO AL031654.6; EXPRESSED IN PLACENTA, SIGNAL = 1.3; EXPRESSED IN FETAL LIVER, SIGNAL = 2.6; EXPRESSED IN LUNG, SIGNAL =   2; EXPRESSED IN HEART, SIGNAL = 1.8; EXPRESSED IN BT474, SIGNAL =   2; EXPRESSED IN BONE MARROW, SIGNAL = 1.9; EXPRESSED IN HBL100, SIGNAL = 3.1; EXPRESSED IN HELA, SIGNAL = 2.9; EXPRESSED IN ADULT LIVER, SIGNAL = 1.4; EXPRESSED IN BRAIN, SIGNAL = 1.3; NT HIT: M86715.1, EVALUE 7.60e-02; EST_HUMAN HIT: BF092236.1, EVALUE 4.50e-01
ttctcataatgaccaccatcaatatcatgatcatcaccataatcaccactacttctatcatcatcaccagtagcattgttgtaatcatcatcactactaccacagtaactattgctggcactcccaccacttac

SEQ ID NO: 17750 - DNA, 124 bp, Homo sapiens
  MAP TO AL031654.6; EXPRESSED IN LUNG, SIGNAL = 1.4; EXPRESSED IN HEART, SIGNAL = 1.3; EXPRESSED IN PLACENTA, SIGNAL = 1.4; EXPRESSED IN BT474, SIGNAL = 1.2; EXPRESSED IN BONE MARROW, SIGNAL =   2; EXPRESSED IN HBL100, SIGNAL = 2.2; EXPRESSED IN FETAL LIVER, SIGNAL = 1.1; EXPRESSED IN HELA, SIGNAL = 1.9; EXPRESSED IN ADULT LIVER, SIGNAL = 1.2; EXPRESSED IN BRAIN, SIGNAL = 1.8; NT HIT: D87675.1, EVALUE 3.00e-10; EST_HUMAN HIT: AA722932.1, EVALUE 2.00e-17; SWISSPROT HIT: O88269, EVALUE 5.20e+00
ataaactaaatcctttgttgcaatttcaacaatgttcacaacatctccaccaggagtagattcccttgcaaaagaaaaaaaaaaagcaatttttttcttacctatacaagcaactccgcatttg

SEQ ID NO: 17751 - DNA, 243 bp, Homo sapiens
  MAP TO AL023804.1; EXPRESSED IN PLACENTA, SIGNAL =  13; EXPRESSED IN HBL100, SIGNAL =  52; EXPRESSED IN FETAL LIVER, SIGNAL =  36; EXPRESSED IN LUNG, SIGNAL =  18; EXPRESSED IN HELA, SIGNAL =  62; EXPRESSED IN BRAIN, SIGNAL =  36; EXPRESSED IN HEART, SIGNAL =  45; EXPRESSED IN BT474, SIGNAL =  83; EXPRESSED IN BONE MARROW, SIGNAL =  20; EXPRESSED IN ADULT LIVER, SIGNAL =  24; NT HIT: gi11994090, EVALUE 9.10e+00; SWISSPROT HIT: Q28309, EVALUE 9.00e-01; EST_HUMAN HIT: T79652.1, EVALUE 1.40e-02
ctgtcattgaaagtccttgaaattttgggcttcttattccaacaaataaccatgttatgactgaggcctgatatgtgatagagcaaagttgctaaatataagatcaatatacaagttaattgcattactacccaccaggaataaagaataagaaaatgtagcttaaaaagtgtcatatactgctggacttccactctgggccaaaatggggtaacaaggactggatttacaccctccctaacc

SEQ ID NO: 17752 - DNA, 459 bp, Homo sapiens; identical to SEQ ID NO: 974
  MAP TO AL023804.1; EXPRESSED IN HBL100, SIGNAL =  27; EXPRESSED IN FETAL LIVER, SIGNAL =  23; EXPRESSED IN BRAIN, SIGNAL =  24; EXPRESSED IN BT474, SIGNAL =  32; EXPRESSED IN BONE MARROW, SIGNAL =  17; EXPRESSED IN LUNG, SIGNAL = 7.8; EXPRESSED IN HELA, SIGNAL =  35; EXPRESSED IN ADULT LIVER, SIGNAL =  20; EXPRESSED IN PLACENTA, SIGNAL = 7.8; EXPRESSED IN HEART, SIGNAL =  37; NT HIT: AF037349.1, EVALUE 1.00e-03; EST_HUMAN HIT: AI860001.1, EVALUE 3.00e-08; SWISSPROT HIT: Q61116, EVALUE 7.20e-01

SEQ ID NO: 17753 - DNA, 334 bp, Homo sapiens
  MAP TO AL022725.8; EXPRESSED IN HBL100, SIGNAL = 5.3; EXPRESSED IN BRAIN, SIGNAL = 4.9; EXPRESSED IN PLACENTA, SIGNAL =   4; EXPRESSED IN BT474, SIGNAL = 4.3; EXPRESSED IN BONE MARROW, SIGNAL = 4.8; EXPRESSED IN LUNG, SIGNAL = 5.5; EXPRESSED IN HELA, SIGNAL = 6.1; EXPRESSED IN ADULT LIVER, SIGNAL = 2.9; EXPRESSED IN FETAL LIVER, SIGNAL = 3.7; EXPRESSED IN HEART, SIGNAL = 4.6; NT HIT: AB017602.1, EVALUE 8.20e-01; SWISSPROT HIT: P19137, EVALUE 3.70e-02; EST_HUMAN HIT: AW854156.1, EVALUE 3.10e-01
cacgtgtgcaaagtacacacacttcaaggggactcaccacgagcaggagctcacctctgcacagagaatcaggacaacaccttcacagaagcccatctgtgctgaatttcgggaaaacaaaattttacaaagtgggaggaggatcccaagaagcaagaaacaaggtgtgcgaaggcacgggagcacacgaggccagctaagaggtgcctgccatgctgttctgcacacgcaggtgtgctgtggcatggcaggagaagctggggcaggtgtggggacaggtgtgaggagccagtgtgccacacaaacggtgatgggctctatcctgtacgcaaag

SEQ ID NO: 17754 - DNA, 534 bp, Homo sapiens
  MAP TO AL022725.8; EXPRESSED IN HELA, SIGNAL = 2.4; EXPRESSED IN BRAIN, SIGNAL =   2; EXPRESSED IN HEART, SIGNAL = 1.3; EXPRESSED IN PLACENTA, SIGNAL =   4; EXPRESSED IN ADULT LIVER, SIGNAL = 1.4; EXPRESSED IN LUNG, SIGNAL = 1.7; EXPRESSED IN FETAL LIVER, SIGNAL = 2.1; EXPRESSED IN HBL100, SIGNAL = 2.9; EXPRESSED IN BONE MARROW, SIGNAL = 2.3; EXPRESSED IN BT474, SIGNAL = 5.6; SWISSPROT HIT: P45973, EVALUE 4.00e-10; NT HIT: gi11417491, EVALUE 0.00e+00; EST_HUMAN HIT: BE782401.1, EVALUE 0.00e+00
tctcgctctgaaagccgtccactgcggtcctgctcttaacggggcttttaggcacgaggatcttgatacctgacttcgctaggtccatgttcttccggctggagagagatggagctgtgttcttcctgaacttctggctggcagcaaacagctggctgtttttggattcgtggtctttcccaatcacgagtgccttaggagaggtcttagaaaagttgctgttggtggatctggagatttgtttcctagcattgttgggagaggtcctgtttgttctggtcaatgtgctctccttctgcttctccgtgtggcgtctgttgaagtcgtggatgtattcctcacagttcacgaggtgctgttccggctcccaagtgtcgtcctcgctgtcatagcctttccaccgaaccaaatactctgtcttcccttttttatttttccttttgtcaacaatcctttcaacctgttcataaaaggaaaaaaatagttttaaaaaaatcaaaatttggggggaaaagtgcaagtttcattaggaaa

SEQ ID NO: 17755 - DNA, 158 bp, Homo sapiens
  MAP TO AL022399.2; EXPRESSED IN BONE MARROW, SIGNAL = 6.5; EXPRESSED IN PLACENTA, SIGNAL = 7.5; EXPRESSED IN BRAIN, SIGNAL = 8.6; EXPRESSED IN ADULT LIVER, SIGNAL =   6; EXPRESSED IN HELA, SIGNAL = 8.4; EXPRESSED IN LUNG, SIGNAL = 9.5; EXPRESSED IN HBL100, SIGNAL =   5; EXPRESSED IN BT474, SIGNAL = 7.4; EXPRESSED IN HEART, SIGNAL = 6.1; EXPRESSED IN FETAL LIVER, SIGNAL = 6.3; NT HIT: AJ271736.1, EVALUE 6.00e-15; EST_HUMAN HIT: AW861271.1, EVALUE 3.00e-14; SWISSPROT HIT: Q26974, EVALUE 3.80e+00
ctctggagtctggagaacagctgccctttttccacagctccactaggagtgtcccagtggggactctgtgtggggcctccatcctcacattttccctctgcactgctctagtagaggttttctgtgaggccttaatccctgcagcaatcttcttccta

SEQ ID NO: 17756 - DNA, 183 bp, Homo sapiens
  MAP TO AL008629.9; EXPRESSED IN PLACENTA, SIGNAL = 9.1; EXPRESSED IN BT474, SIGNAL = 8.3; EXPRESSED IN BONE MARROW, SIGNAL =  11; EXPRESSED IN LUNG, SIGNAL = 9.5; EXPRESSED IN HELA, SIGNAL = 7.2; EXPRESSED IN ADULT LIVER, SIGNAL = 6.8; EXPRESSED IN BRAIN, SIGNAL = 8.2; EXPRESSED IN HBL100, SIGNAL = 8.3; EXPRESSED IN FETAL LIVER, SIGNAL = 8.4; EXPRESSED IN HEART, SIGNAL = 7.2; SWISSPROT HIT: P46895, EVALUE 9.70e-01; NT HIT: U88970.1, EVALUE 4.30e-01; EST_HUMAN HIT: AI279671.1, EVALUE 9.90e+00
cttagatataaccttttagaaaaggcaaagagcactaaaaattagttcagattattttccctacatggaatatcttgaatgaaggttgcattgtgcttcagagcatgcataggaggaatacacatgaaatcccacaccccatttatattatagttctttgtatagttggcctagaaagtggtg

SEQ ID NO: 17757 - DNA, 107 bp, Homo sapiens
  MAP TO AL008629.9; EXPRESSED IN HBL100, SIGNAL = 1.2; EXPRESSED IN FETAL LIVER, SIGNAL = 1.2; EXPRESSED IN BRAIN, SIGNAL = 1.3; EXPRESSED IN BT474, SIGNAL = 1.6; EXPRESSED IN BONE MARROW, SIGNAL = 1.6; EXPRESSED IN HELA, SIGNAL = 1.3; EXPRESSED IN ADULT LIVER, SIGNAL = 1.1; EXPRESSED IN PLACENTA, SIGNAL =   5; EXPRESSED IN LUNG, SIGNAL = 1.5; EXPRESSED IN HEART, SIGNAL = 1.4; NT HIT: AB026898.1, EVALUE 1.00e-27; EST_HUMAN HIT: AA368311.1, EVALUE 5.00e-18; SWISSPROT HIT: O35083, EVALUE 2.40e+00
ccatcccattcaagttaaactacaggattctgcctcctttccctaccaaaggcagtactcccttagacccgaggccgatcaaggactccaaaagattgttaaggacc

SEQ ID NO: 17758 - DNA, 278 bp, Homo sapiens
  MAP TO AL008629.9; EXPRESSED IN BT474, SIGNAL = 3.3; EXPRESSED IN BONE MARROW, SIGNAL = 6.4; EXPRESSED IN HBL100, SIGNAL = 3.8; EXPRESSED IN ADULT LIVER, SIGNAL = 3.5; EXPRESSED IN BRAIN, SIGNAL = 4.9; EXPRESSED IN HEART, SIGNAL = 4.5; EXPRESSED IN PLACENTA, SIGNAL = 4.1; EXPRESSED IN FETAL LIVER, SIGNAL = 3.5; EXPRESSED IN LUNG, SIGNAL = 4.9; EXPRESSED IN HELA, SIGNAL = 4.7; NT HIT: AF009668.1, EVALUE 4.00e-79; EST_HUMAN HIT: AA368311.1, EVALUE 3.00e-83; SWISSPROT HIT: P31792, EVALUE 1.60e-02
attatgcctgaaagacccactcctttgttgcagagagattctagccaaagcaggggccattatacacctgaacataagagaaggaacacaagtttgttgtcctctgcttgaggaaggaattaatcctgaagtctgggcaacagaaggacaatatggacgagcgaagaatgcccatcccattcaagttaaactacaggattctgcctcctttccctaccaaaggcagtactcccttagacccgaggccgatcaaggactccaaaagattgttaaggacc

SEQ ID NO: 17759 - DNA, 227 bp, Homo sapiens
  MAP TO AJ010598.1; EXPRESSED IN FETAL LIVER, SIGNAL = 2.2; EXPRESSED IN PLACENTA, SIGNAL = 1.5; EXPRESSED IN BT474, SIGNAL = 1.5; EXPRESSED IN BONE MARROW, SIGNAL = 1.2; EXPRESSED IN HBL100, SIGNAL = 1.6; EXPRESSED IN LUNG, SIGNAL = 1.2; EXPRESSED IN HELA, SIGNAL =   1; EXPRESSED IN ADULT LIVER, SIGNAL = 1.1; EXPRESSED IN BRAIN, SIGNAL = 1.2; EXPRESSED IN HEART, SIGNAL = 1.5; EST_HUMAN HIT: AW953911.1, EVALUE 1.00e-125; NT HIT: AL163210.2, EVALUE 1.00e-125; SWISSPROT HIT: Q9UHP3, EVALUE 8.00e-26
cacaacagaacaacagggagccctatcttcagaactgccaagcacatcaccttcatcagttgctgccatttcatcgagatcagtaatacacaaaccatttactcagtcccggatacctccagatttgcccatgcatccggcaccaaggcacataacggaggaagaactttctgtgctggaaagttgtttacatcgctggaggacagaaatagaaaatgacaccagag

SEQ ID NO: 17760 - DNA, 142 bp, Homo sapiens
  MAP TO AJ006995.1; EXPRESSED IN PLACENTA, SIGNAL = 2.3; EXPRESSED IN BONE MARROW, SIGNAL = 2.2; EXPRESSED IN FETAL LIVER, SIGNAL = 2.1; EXPRESSED IN LUNG, SIGNAL = 1.9; EXPRESSED IN ADULT LIVER, SIGNAL = 1.5; EXPRESSED IN BRAIN, SIGNAL = 2.3; EXPRESSED IN HBL100, SIGNAL =   2; EXPRESSED IN HEART, SIGNAL = 2.2; EXPRESSED IN BT474, SIGNAL = 2.4; EXPRESSED IN HELA, SIGNAL = 1.7; NT HIT: AL163246.2, EVALUE 1.00e-74; EST_HUMAN HIT: AA714192.1, EVALUE 4.00e-07; SWISSPROT HIT: O14813, EVALUE 4.50e-01
tcagatccttcagctactgcaatgcaggcagcaccaggtgctggcatcggtgccagctctctgcaaggctgcagctggacaggtaccccacaagcagctggcactggggaatgtggtggcacccagaagctctgagatgcca

SEQ ID NO: 17761 - DNA, 86 bp, Homo sapiens
  MAP TO AF165142.1; EXPRESSED IN FETAL LIVER, SIGNAL = 1.1; EXPRESSED IN PLACENTA, SIGNAL = 1.1; EXPRESSED IN BONE MARROW, SIGNAL = 0.97; EXPRESSED IN HBL100, SIGNAL =   1; EXPRESSED IN LUNG, SIGNAL = 1.2; EXPRESSED IN HELA, SIGNAL = 2.5; EXPRESSED IN ADULT LIVER, SIGNAL = 0.95; EXPRESSED IN BRAIN, SIGNAL = 1.4; EXPRESSED IN BT474, SIGNAL = 2.2; EXPRESSED IN HEART, SIGNAL = 1.3; SWISSPROT HIT: P55182, EVALUE 5.40e+00
cagctgcagcatcaggaccaagcctggggtgaaatcagcaattccattgaatttgccttttggtgtgtcaggcactttccagccag

SEQ ID NO: 17762 - DNA, 205 bp, Homo sapiens
  MAP TO AF157623.1; EXPRESSED IN HEART, SIGNAL = 2.8; EXPRESSED IN BONE MARROW, SIGNAL = 1.2; EXPRESSED IN ADULT LIVER, SIGNAL =  11; EXPRESSED IN BT474, SIGNAL = 1.2; EXPRESSED IN LUNG, SIGNAL = 2.8; EXPRESSED IN HELA, SIGNAL =   4; EXPRESSED IN BRAIN, SIGNAL = 8.8; EXPRESSED IN PLACENTA, SIGNAL =  33; EXPRESSED IN HBL100, SIGNAL = 1.8; EXPRESSED IN FETAL LIVER, SIGNAL = 3.9; SWISSPROT HIT: Q44597, EVALUE 3.00e-10; NT HIT: AF097709.1, EVALUE 1.00e-112; EST_HUMAN HIT: BF344992.1, EVALUE 1.00e-112
gcttccgttttctaaacgagaggtgccggtggctagtgggtctgggtttattgtgtcggaagatggactgatcgtgacaaatgcccacgtggtgaccaacaagcaccgggtcaaagttgagctgaagaacggtgccacttacgaagccaaaatcaaggatgtggatgagaaagcagacatcgcactcatcaaaattgaccaccag

SEQ ID NO: 17763 - DNA, 143 bp, Homo sapiens
  MAP TO AF157623.1; EXPRESSED IN ADULT LIVER, SIGNAL = 3.2; EXPRESSED IN PLACENTA, SIGNAL = 3.6; EXPRESSED IN BONE MARROW, SIGNAL = 4.4; EXPRESSED IN FETAL LIVER, SIGNAL = 2.8; EXPRESSED IN LUNG, SIGNAL = 3.8; EXPRESSED IN HELA, SIGNAL = 3.4; EXPRESSED IN BT474, SIGNAL = 3.3; EXPRESSED IN HBL100, SIGNAL = 2.3; EXPRESSED IN BRAIN, SIGNAL = 3.7; EXPRESSED IN HEART, SIGNAL = 2.9; NT HIT: AF157623.1, EVALUE 3.00e-75; EST_HUMAN HIT: AI167912.1, EVALUE 5.00e-34; SWISSPROT HIT: P54088, EVALUE 1.70e+00
acgtcatcaccaattggatgcatcttctgctctgtgcagctggtgaaatctttctcaacccttgagatgcagcccaatcttctcctaacatctggattcctctctgtcactgcattccctcctgtcatcctgcctttgttttc

SEQ ID NO: 17764 - DNA, 443 bp, Homo sapiens
  MAP TO AF146191.1; EXPRESSED IN HELA, SIGNAL = 2.4; EXPRESSED IN ADULT LIVER, SIGNAL = 1.1; EXPRESSED IN HEART, SIGNAL = 1.1; EXPRESSED IN PLACENTA, SIGNAL = 1.1; EXPRESSED IN BRAIN, SIGNAL = 1.7; EXPRESSED IN LUNG, SIGNAL = 1.2; EXPRESSED IN FETAL LIVER, SIGNAL = 1.7; EXPRESSED IN HBL100, SIGNAL = 3.1; EXPRESSED IN BONE MARROW, SIGNAL = 1.2; EXPRESSED IN BT474, SIGNAL = 1.6; EST_HUMAN HIT: BF305170.1, EVALUE 2.00e-52; NT HIT: U83668.1, EVALUE 0.00e+00; SWISSPROT HIT: P04691, EVALUE 8.00e-27
accttggagcgttcctggatttcgagctgccctggctaaggagccgcaccccagtcctcgcccgcagctcacgggaaatgaagttgtctggcctgaagacctgcccgaagggccccgagcgcacagagtccatggtgcccggctccagatccacgagcacagcgcgggacacgtacctgccacctgcgtggggcgggagggcatgagcgaggggagggccgcgttcccaggagggcggtgggggaaggacgggggtcgcaccgctggcctcgtggtggtgcacgttgatgcgctccagctgcaggtggctgtccccgtggtaggtgccagcggagtcgatggcatgttcatcagagatcacctcccagaactgcggagacgggaggggccagacaggccggggctgagtcacggaggcgccccagccgctctcccacccccat

SEQ ID NO: 17765 - DNA, 598 bp, Homo sapiens
  MAP TO AF146191.1; EXPRESSED IN LUNG, SIGNAL = 8.9; EXPRESSED IN ADULT LIVER, SIGNAL =  14; EXPRESSED IN PLACENTA, SIGNAL = 5.8; EXPRESSED IN BT474, SIGNAL =  37; EXPRESSED IN FETAL LIVER, SIGNAL =  32; EXPRESSED IN HELA, SIGNAL =  38; EXPRESSED IN BRAIN, SIGNAL =  51; EXPRESSED IN HEART, SIGNAL = 7.5; EXPRESSED IN BONE MARROW, SIGNAL =  13; EXPRESSED IN HBL100, SIGNAL =  59; NT HIT: gi9910593, EVALUE 0.00e+00; EST_HUMAN HIT: BF690030.1, EVALUE 0.00e+00; SWISSPROT HIT: P11833, EVALUE 1.00e-101
atattcagacaccaagtcgttcatgttgctctcggcctcagtgaattccatctcatccatgccctcgcccgtgtaccagtggaggaaggccttgcgcctgaacgttgctgtaaactgctctgagacccgcttgagttcctggacggctgtgttgttcccagtgaaggtgactgacatttttagcccccagggtgggatgtcacagacggctgtttttacgttgttggggaaccagtcagcaaagtagctgctgttcttatcttgaatgttgaacatctgttcatccacctccctcatgggcatgcgaccctggaaaatggcagccgccgttaggtagcggccgtgacgggggtcacgggcagccatcatgttcttagcatcaaacatctgctgggtgagctcagccacagtcaaggcccggtactgctggctgccccggctggtcagtggggcaaagccgggcatgaagaaatgcagccggggaaacgggaccatgttcatggccagcttccgcaggtcagcattcagctggtcggggaagcacaggcacgtggtgaccccactcatggtagcagacaccaggtggttcaggtcacca

SEQ ID NO: 17766 - DNA, 108 bp, Homo sapiens
  MAP TO AF130343.1; EXPRESSED IN HEART, SIGNAL = 1.3; EXPRESSED IN FETAL LIVER, SIGNAL = 1.9; EXPRESSED IN LUNG, SIGNAL = 2.6; EXPRESSED IN ADULT LIVER, SIGNAL = 1.5; EXPRESSED IN BRAIN, SIGNAL = 1.6; EXPRESSED IN PLACENTA, SIGNAL = 1.6; EXPRESSED IN BT474, SIGNAL = 2.5; EXPRESSED IN BONE MARROW, SIGNAL = 1.4; EXPRESSED IN HBL100, SIGNAL =   2; EXPRESSED IN HELA, SIGNAL = 3.2; EST_HUMAN HIT: BE463763.1, EVALUE 1.00e-36; NT HIT: AF003528.1, EVALUE 5.00e-39
atgtatataccacctccatttgatgatggaatgctgctgtgcatgacccactttatggctacatgggtcagaaagcacgcagtttatgataggcagttcaggtcgcat

SEQ ID NO: 17767 - DNA, 80 bp, Homo sapiens
  MAP TO AF130342.1; EXPRESSED IN BT474, SIGNAL =   1; EXPRESSED IN BONE MARROW, SIGNAL = 1.4; EXPRESSED IN HELA, SIGNAL =   1; EXPRESSED IN ADULT LIVER, SIGNAL = 1.3; EXPRESSED IN FETAL LIVER, SIGNAL = 2.3; EXPRESSED IN LUNG, SIGNAL = 1.2; EXPRESSED IN BRAIN, SIGNAL = 1.4; EXPRESSED IN HEART, SIGNAL = 1.5; EXPRESSED IN PLACENTA, SIGNAL = 2.4; EXPRESSED IN HBL100, SIGNAL = 1.1; NT HIT: AF253417.1, EVALUE 3.50e-02; EST_HUMAN HIT: AV716537.1, EVALUE 6.10e-02
gctctccatagcagggaagaaaggaccaaagccaagaacagccatcaatatatttttcagtgatgctgaatcaggaattg

SEQ ID NO: 17768 - DNA, 351 bp, Homo sapiens
  MAP TO AF130342.1; EXPRESSED IN BT474, SIGNAL = 4.6; EXPRESSED IN FETAL LIVER, SIGNAL = 5.7; EXPRESSED IN LUNG, SIGNAL = 4.9; EXPRESSED IN HELA, SIGNAL =  13; EXPRESSED IN ADULT LIVER, SIGNAL =   5; EXPRESSED IN HEART, SIGNAL =   2; EXPRESSED IN PLACENTA, SIGNAL =   4; EXPRESSED IN BRAIN, SIGNAL = 5.5; EXPRESSED IN BONE MARROW, SIGNAL = 2.6; EXPRESSED IN HBL100, SIGNAL = 5.9; NT HIT: AF198490.1, EVALUE 0.00e+00; EST_HUMAN HIT: AA054010.1, EVALUE 1.00e-122; SWISSPROT HIT: P14077, EVALUE 1.00e-04
tcaaggtgtacaataatagaaaaaagttgcaattccttgcctccactgtgagacaaaccccagccacatctccagcacacaagaacttccaaatgcctgaaccgcagcggccaggcgttcctctagaacctcctcctccaggagcttgctacaagtgccagaaatctgaccaccaaggcaaggaacgcctgcagcccaggattcctcttaagccgtatcccatctgtgcgggaccccactggaaatcggactgttcaactcacctggcagccactcccagagcccctggaactctggcccaaggctctctgactgactccttctcggcttagcggctgaagactgacactg

SEQ ID NO: 17769 - DNA, 109 bp, Homo sapiens
  MAP TO AF130342.1; EXPRESSED IN HBL100, SIGNAL = 0.66; EXPRESSED IN PLACENTA, SIGNAL = 1.8; EXPRESSED IN BT474, SIGNAL = 0.63; EXPRESSED IN BONE MARROW, SIGNAL = 0.72; EXPRESSED IN LUNG, SIGNAL = 0.91; EXPRESSED IN HELA, SIGNAL = 0.76; EXPRESSED IN ADULT LIVER, SIGNAL = 0.79; EXPRESSED IN BRAIN, SIGNAL = 1.1; EXPRESSED IN FETAL LIVER, SIGNAL = 0.72; EXPRESSED IN HEART, SIGNAL =   1; EST_HUMAN HIT: AW847534.1, EVALUE 9.50e-01; SWISSPROT HIT: P04274, EVALUE 3.60e-01
ctgttttgatccaggaggttgggaacacattttccctgaggattcttcctgacccttctgtagaccctctgcatccttaatttgggtcatgacccaaggaagggagcca

SEQ ID NO: 17770 - DNA, 244 bp, Homo sapiens
  MAP TO AF124731.2; EXPRESSED IN ADULT LIVER, SIGNAL = 6.1; EXPRESSED IN HELA, SIGNAL = 6.2; EXPRESSED IN PLACENTA, SIGNAL = 6.2; EXPRESSED IN BT474, SIGNAL = 4.6; EXPRESSED IN BONE MARROW, SIGNAL = 5.6; EXPRESSED IN HBL100, SIGNAL = 5.4; EXPRESSED IN LUNG, SIGNAL = 6.3; EXPRESSED IN BRAIN, SIGNAL = 5.4; EXPRESSED IN HEART, SIGNAL = 3.8; EXPRESSED IN FETAL LIVER, SIGNAL = 5.1; NT HIT: AL163249.2, EVALUE 1.00e-123; EST_HUMAN HIT: AW070642.1, EVALUE 9.00e-68; SWISSPROT HIT: P27434, EVALUE 1.70e+00
gtccattttcacactgctgataaaggcatacctgagactaggaagaaaaaaaggtttaattggacttacagttccacatggctggggaagcctcaaaatcatggtgggaggcaaaagccacttcttacctggtggtggcaagagaaaaatgaggaagatgcaaaagtggagactcctgataaaaccatcagctctcatgagacttattcactaccacaagaacagtatgggggaaccacaccca

SEQ ID NO: 17771 - DNA, 774 bp, Homo sapiens
  MAP TO AF111170.3; EXPRESSED IN LUNG, SIGNAL = 1.7; EXPRESSED IN ADULT LIVER, SIGNAL = 1.1; EXPRESSED IN BRAIN, SIGNAL = 1.2; EXPRESSED IN HEART, SIGNAL = 0.84; EXPRESSED IN PLACENTA, SIGNAL = 0.96; EXPRESSED IN BT474, SIGNAL = 2.1; EXPRESSED IN BONE MARROW, SIGNAL = 1.3; EXPRESSED IN HBL100, SIGNAL = 1.1; EXPRESSED IN FETAL LIVER, SIGNAL = 1.6; EXPRESSED IN HELA, SIGNAL = 2.2; NT HIT: AF111170.3, EVALUE 0.00e+00; SWISSPROT HIT: P04280, EVALUE 7.00e-11
gctaggttgttgctcctgagggtgccacggggctgccaggctgtcccccgcccccagctgggcgactacgcggacagtggtgtggcctctctctcctgagatgctaggttgttgctcctgagggtgccacggggctgccaggctgtcccccgcccccagctgggcgactacgcggacagtggtgtggcctctctctcctgagatgctaggttgttgctcctgagggtgccacggggctgccaggctgtcccccgcccccagctgggcgactacgcggacagtggtgtggcctctctctcctgagatgctaggttgttgctcctgagggtgccacggggctgccaggctgtcccccgcccccagctgggcgactacgcggacagtggtgtggcctctctctcctgagatgctaggttgttgctcctgagggtgccacggggctgccaggctgtcccccgcccccagctgggcgactacgcggacagtggtgtggcctctctctcctgagatgctaggttgttgctcctgagggtgccacggggctgccaggctgtcccccgcccccagctgggcgactacgcggacagtggtgtggcctctctctcctgagatgctaggttgttgctcctgagggtgccacggggctgccaggctgtcccccgcccccagctgggcgactacgcggacagtggtgtggcctctctctcctgagatgctaggttgttgctcctgagggtgccacggggctgccaggctgtcccccgcccccagctg

SEQ ID NO: 17772 - DNA, 1096 bp, Homo sapiens
  MAP TO AF111170.3; EXPRESSED IN FETAL LIVER, SIGNAL = 2.7; EXPRESSED IN LUNG, SIGNAL = 2.2; EXPRESSED IN ADULT LIVER, SIGNAL =   2; EXPRESSED IN BRAIN, SIGNAL = 3.8; EXPRESSED IN HEART, SIGNAL = 2.2; EXPRESSED IN PLACENTA, SIGNAL = 1.2; EXPRESSED IN BT474, SIGNAL = 4.9; EXPRESSED IN BONE MARROW, SIGNAL = 1.6; EXPRESSED IN HELA, SIGNAL = 2.6; EXPRESSED IN HBL100, SIGNAL =   6; NT HIT: AF111170.3, EVALUE 0.00e+00; EST_HUMAN HIT: BF364900.1, EVALUE 0.00e+00; SWISSPROT HIT: O14682, EVALUE 1.00e-03
tcaggcatagaaaatgagctcagggatctgcccaccctggaccccagtcccgttggtgctgtccgaggagcactggaactggaaggccacctttccacactgcacttccgtcatcccctcctgcccaaagtagctgagttcgctgccgtccaggacggcactggccgtgtagaaggtgtcttgttcaacctggaccgggtgttcaaaccagaccgggaaggtgttactggatccgtctgacatgaacttggtcaagttctgagccagaaccaccccgagccgcttgagctcaatcttcacgctgtactcagccttcccagagctggagccatacaggcccagccctgcaataaatacccttctgtccactgcaaactggatgctgtcgcagcgcccgcggtaccgccactggttgctgcggtaggcagaagactggaatcggtggcacctctgcggggcgaggcccttcctcttggtcaggggaaagtccaggcggggcttgttggtggccgtgtaccacaggaagatgctgtgggtctcctccagagtcaggatgtctgactgggcagcgccgttggcaaactcctctagggtcatggttggaattcggaccagatagagggctcgccccagaacatgcctcttgtttcgtggggtgattggcagcccctgcctcttgcactccgcctcggcccagttcaggacggcctcgaagaccaccgcctctttggtgttgagggcctcccgagtgacaatgatctccagcgtctgccggtctatctcacagaagccttcggaccgtagggccatctcggcctgtgcgtcaatgacctcccagcagcgctgcgtcagctcgggctcctcaaacagccggctctgggacagcaggacgcaggcgttcttggcttccaaacttgtctccagaaagttgacacaggcttttgccaatgctgggacgatgtacttcttagcagcatacagagtggccagcaccgtgtcggcttccagatcgatctcatcactgtacatgtacctaggcgaggcagggcccgcgtcaggggctggctcccaagcacccatcgcggggctgggcctg

SEQ ID NO: 17773 - DNA, 119 bp, Homo sapiens
  MAP TO AC009315.1; EXPRESSED IN BT474, SIGNAL =   2; EXPRESSED IN BONE MARROW, SIGNAL =   2; EXPRESSED IN FETAL LIVER, SIGNAL = 1.6; EXPRESSED IN LUNG, SIGNAL = 1.5; EXPRESSED IN HELA, SIGNAL = 1.3; EXPRESSED IN ADULT LIVER, SIGNAL = 1.8; EXPRESSED IN PLACENTA, SIGNAL = 2.4; EXPRESSED IN HEART, SIGNAL = 1.7; EXPRESSED IN BRAIN, SIGNAL = 1.8; EXPRESSED IN HBL100, SIGNAL = 1.8; EST_HUMAN HIT: AI971577.1, EVALUE 1.00e-16; SWISSPROT HIT: P43811, EVALUE 5.20e+00
aaaatctctttcgtgatttctttgactggctctgtcataaatcgtttgaagtcatacacaacatctcgacacagatttttccagcagaaattcattgtttcaggcttgatgaatatcac

SEQ ID NO: 17774 - DNA, 279 bp, Homo sapiens
  MAP TO AC009309.1; EXPRESSED IN BT474, SIGNAL = 2.5; EXPRESSED IN BONE MARROW, SIGNAL = 4.3; EXPRESSED IN HELA, SIGNAL = 2.3; EXPRESSED IN ADULT LIVER, SIGNAL = 2.5; EXPRESSED IN BRAIN, SIGNAL = 3.2; EXPRESSED IN PLACENTA, SIGNAL = 4.6; EXPRESSED IN FETAL LIVER, SIGNAL = 3.2; EXPRESSED IN LUNG, SIGNAL = 2.9; EXPRESSED IN HEART, SIGNAL = 2.4; EXPRESSED IN HBL100, SIGNAL = 2.5; EST_HUMAN HIT: BE002832.1, EVALUE 2.00e-84; NT HIT: gi11430045, EVALUE 1.00e-100; SWISSPROT HIT: O35134, EVALUE 2.00e-31
gtgatcatcagggaaggggagctgctctgcggagtgctggacaaggcgcactatgggagctccgcctacggcctggtccactgctgctatgagatctatggaggcgagaccagcggcaaggttctaacctgcctggcccgcctcttcaccgcctacctgcagctctacagaggcttcaccttgggtaagtgccgggctcgctgccctggggcagtgacccgtcagcgcagccgcctggccatctcccaggcccaggacagagagagccgtccacactga

SEQ ID NO: 17775 - DNA, 279 bp, Homo sapiens
  MAP TO AC009309.1; EXPRESSED IN HEART, SIGNAL = 2.3; EXPRESSED IN FETAL LIVER, SIGNAL = 1.7; EXPRESSED IN LUNG, SIGNAL = 2.5; EXPRESSED IN BRAIN, SIGNAL = 3.1; EXPRESSED IN PLACENTA, SIGNAL = 2.1; EXPRESSED IN BONE MARROW, SIGNAL = 2.4; EXPRESSED IN HBL100, SIGNAL = 2.6; EXPRESSED IN ADULT LIVER, SIGNAL = 2.1; EXPRESSED IN BT474, SIGNAL = 2.4; EXPRESSED IN HELA, SIGNAL = 3.3; NT HIT: gi7661685, EVALUE 0.00e+00; EST_HUMAN HIT: BE221115.1, EVALUE 1.00e-79; SWISSPROT HIT: O35134, EVALUE 7.00e-47
gtgtgccggcatgtgaagaatggggacattctgctactgaaccgacagcccacactgcacagaccctccatccaggcccaccgtgcccgcatcctgcctgaagagaaagtgctgcggctccactatgccaactgcaaggcctataatgccgactttgatggagacgagatgaatgcccatttcccccagagtgagctgggccgggccgaggcctacgtcctggcctgcactgatcagcagtaccttgttcccaaggtaggtctggccttgaggctgttc

SEQ ID NO: 17776 - DNA, 135 bp, Homo sapiens
  MAP TO AC009309.1; EXPRESSED IN BT474, SIGNAL = 1.8; EXPRESSED IN LUNG, SIGNAL = 1.7; EXPRESSED IN HELA, SIGNAL = 2.8; EXPRESSED IN ADULT LIVER, SIGNAL = 1.7; EXPRESSED IN BRAIN, SIGNAL = 1.6; EXPRESSED IN PLACENTA, SIGNAL = 1.4; EXPRESSED IN BONE MARROW, SIGNAL = 1.2; EXPRESSED IN HBL100, SIGNAL = 2.3; EXPRESSED IN FETAL LIVER, SIGNAL = 1.9; EXPRESSED IN HEART, SIGNAL = 1.7; NT HIT: gi11430043, EVALUE 2.00e-70; EST_HUMAN HIT: AW369826.1, EVALUE 2.00e-70
tcactcattactctctgggtgaggccctcacaaataggtaagctgaaggcacttgccagctctactacttcaatggcctgggaagggctgttagacacttttgcactgtccataagctcattcagcaactcactt

SEQ ID NO: 17777 - DNA, 248 bp, Homo sapiens
  MAP TO AC009309.1; EXPRESSED IN BT474, SIGNAL = 5.6; EXPRESSED IN BONE MARROW, SIGNAL = 2.2; EXPRESSED IN HBL100, SIGNAL = 6.5; EXPRESSED IN HELA, SIGNAL = 3.7; EXPRESSED IN ADULT LIVER, SIGNAL =   3; EXPRESSED IN BRAIN, SIGNAL = 2.5; EXPRESSED IN PLACENTA, SIGNAL = 3.4; EXPRESSED IN HEART, SIGNAL = 5.1; EXPRESSED IN LUNG, SIGNAL = 2.4; EXPRESSED IN FETAL LIVER, SIGNAL = 5.5; EST_HUMAN HIT: AL135453.1, EVALUE 1.00e-123; SWISSPROT HIT: Q10411, EVALUE 3.00e-03; NT HIT: D21092.1, EVALUE 1.00e-123
ctgacaagctctctactgatgatctgaactccctcattgctcatgcacatcgtcgtattgatcagctgaacagagagctggcagaacagaaggccaccgaaaagcagcacatcacgttagccttggagaaacaaaagctggaagaaaagcgggcatttgactctgcagtagcaaaagcattagaacatcacagaagtgaaatacaggctgaacaggacagaaaggtaagagaaatgagaattgttgcc

SEQ ID NO: 17778 - DNA, 166 bp, Homo sapiens
  MAP TO AC009309.1; EXPRESSED IN HELA, SIGNAL = 1.8; EXPRESSED IN ADULT LIVER, SIGNAL = 0.83; EXPRESSED IN PLACENTA, SIGNAL = 1.4; EXPRESSED IN BONE MARROW, SIGNAL = 1.2; EXPRESSED IN HBL100, SIGNAL = 2.1; EXPRESSED IN LUNG, SIGNAL = 0.99; EXPRESSED IN BRAIN, SIGNAL = 0.73; EXPRESSED IN HEART, SIGNAL = 1.1; EXPRESSED IN BT474, SIGNAL = 1.2; EXPRESSED IN FETAL LIVER, SIGNAL = 1.4; NT HIT: D21094.1, EVALUE 7.00e-89; EST_HUMAN HIT: AW411336.1, EVALUE 1.00e-88; SWISSPROT HIT: O66141, EVALUE 9.90e-01
ataagctgcaggaccaagaaccatctcgaagagtttgtctgagtaaggtatggttttctctacactttcccggaaatgggaatcccatttggcatataggatagtgccaccaatacctccaccaacaaacaaaaggccagctccagcaattttgccagtagtcaac

SEQ ID NO: 17779 - DNA, 602 bp, Homo sapiens
  MAP TO AC009309.1; EXPRESSED IN PLACENTA, SIGNAL = 1.3; EXPRESSED IN BONE MARROW, SIGNAL = 1.2; EXPRESSED IN HBL100, SIGNAL = 4.8; EXPRESSED IN BRAIN, SIGNAL = 2.5; EXPRESSED IN BT474, SIGNAL = 3.6; EXPRESSED IN FETAL LIVER, SIGNAL = 3.7; EXPRESSED IN LUNG, SIGNAL = 1.7; EXPRESSED IN HELA, SIGNAL = 4.1; EXPRESSED IN ADULT LIVER, SIGNAL = 2.4; EXPRESSED IN HEART, SIGNAL = 2.7; EST_HUMAN HIT: BE793643.1, EVALUE 0.00e+00; NT HIT: gi11430041, EVALUE 0.00e+00; SWISSPROT HIT: P36112, EVALUE 2.60e-01
gccatgcagttgctgaagaggaagccagaaaagcccaccaactctggctttcagtggaggcattaaagtacagcatgaagacctcatctgcagaaacacctactatcccgctgggtagtgcagttgaggccatcaaagccaactgttctgataatgaattcacccaagctttaaccgcagctatccctccagagtccctgacccgtggggtgtacagtgaagagacccttagagcccgtttctatgctgttcaaaaactggcccgaagggtagcaatgattgatgaaaccagaaatagcttgtaccagtacttcctctcctacctacagtccctgctcctattcccacctcagcaactgaagccgcccccagagctctgccctgaggatataaacacatttaaattactgtcatatgcttcctattgcattgagcatggtgatctggagctagcagcaaagtttgtcaatcagctgaagggggaatccagacgagtggcacaggactggctgaaggaagcccgaatgaccctagaaacgaaacagatagtggaaatcctgacagcatatgccagcgccgtaggaataggaaccactcaggtg

SEQ ID NO: 17780 - DNA, 97 bp, Homo sapiens
  MAP TO AC009305.1; EXPRESSED IN BT474, SIGNAL = 2.5; EXPRESSED IN HELA, SIGNAL = 0.66; EXPRESSED IN PLACENTA, SIGNAL = 0.77; EXPRESSED IN HEART, SIGNAL = 1.3; EST_HUMAN HIT: AW837684.1, EVALUE 5.30e-02; NT HIT: L19295.1, EVALUE 4.40e-02
tgataaagtcccacaggagaaacaaaatgtcacatttctttgcctttgactggaatgatatcaactcagcattaccggtccccatgctaatcagaaa

SEQ ID NO: 17781 - DNA, 372 bp, Homo sapiens
  MAP TO AC009304.1; EXPRESSED IN FETAL LIVER, SIGNAL = 2.7; EXPRESSED IN LUNG, SIGNAL =   2; EXPRESSED IN BRAIN, SIGNAL = 1.4; EXPRESSED IN HEART, SIGNAL = 1.9; EXPRESSED IN BONE MARROW, SIGNAL = 1.6; EXPRESSED IN PLACENTA, SIGNAL = 1.4; EXPRESSED IN BT474, SIGNAL = 4.4; EXPRESSED IN ADULT LIVER, SIGNAL = 3.1; EXPRESSED IN HELA, SIGNAL = 4.9; EXPRESSED IN HBL100, SIGNAL = 4.4; EST_HUMAN HIT: AA458680.1, EVALUE 0.00e+00; SWISSPROT HIT: P52915, EVALUE 2.00e-41; NT HIT: L38810.1, EVALUE 6.00e-79
aaggtgcatctcaaggacaagtttgtcatagatgtggacaaaaatatcagcatcagtgatgtgacacccagttccttggtggttctaagaaatgacagctacactttgcacaagatcctacccaacaaggtggactcattggtgtcactgatgatggtgaagaaagtaccagattcagcttatgaaatgattggtagactggataggcagatcaagaagatcaaagaagtgatcgacctgcctgctaagcatcccgagctcttcaaagcactgggcattgcacagcccaagggaatgctgcttggaagagactgttggcctgggctctggctcatcatagggactgtgtacctttattcatgtctctggctc

SEQ ID NO: 17782 - DNA, 77 bp, Homo sapiens
  MAP TO AC009304.1; EXPRESSED IN BT474, SIGNAL = 1.6; EXPRESSED IN HBL100, SIGNAL = 1.5; EXPRESSED IN LUNG, SIGNAL = 1.6; EXPRESSED IN HELA, SIGNAL = 1.4; EXPRESSED IN BRAIN, SIGNAL = 1.3; EXPRESSED IN PLACENTA, SIGNAL = 2.1; EXPRESSED IN FETAL LIVER, SIGNAL = 1.4; EXPRESSED IN HEART, SIGNAL = 1.6; EXPRESSED IN BONE MARROW, SIGNAL = 1.8; EXPRESSED IN ADULT LIVER, SIGNAL = 1.2; NT HIT: AL117078.1, EVALUE 1.30e-01; EST_HUMAN HIT: AI373222.1, EVALUE 1.60e-01; SWISSPROT HIT: P97803, EVALUE 9.40e+00
ctgtatttttcctgccaattggtgtattcaccagtctcaggtttaggatcagtccctttttgtttgtggttggtttc

SEQ ID NO: 17783 - DNA, 132 bp, Homo sapiens
  MAP TO AC009299.1; EXPRESSED IN PLACENTA, SIGNAL = 0.99; EXPRESSED IN LUNG, SIGNAL = 0.84; EXPRESSED IN BRAIN, SIGNAL = 1.4; EXPRESSED IN BT474, SIGNAL = 1.7; EXPRESSED IN HBL100, SIGNAL = 2.6; EXPRESSED IN FETAL LIVER, SIGNAL = 1.4; EXPRESSED IN HELA, SIGNAL = 3.3; EXPRESSED IN ADULT LIVER, SIGNAL = 1.6; EXPRESSED IN BONE MARROW, SIGNAL = 0.76; EXPRESSED IN HEART, SIGNAL = 1.6; NT HIT: gi11429973, EVALUE 1.00e-68; SWISSPROT HIT: P41878, EVALUE 1.00e-18; EST_HUMAN HIT: BE879386.1, EVALUE 2.00e-68
atgggatccacaaccactgccacagctctctccgacaaggcttcaaagctctgctgagtgttgatatccacaccagaaagccaacaaccaaagccagggtgactgtgataccaaccaacaaccatctccggc

SEQ ID NO: 17784 - DNA, 852 bp, Homo sapiens
  MAP TO AC009299.1; EXPRESSED IN BRAIN, SIGNAL = 1.9; EXPRESSED IN HELA, SIGNAL = 0.95; EXPRESSED IN ADULT LIVER, SIGNAL = 1.8; EXPRESSED IN BT474, SIGNAL = 7.4; EXPRESSED IN BONE MARROW, SIGNAL = 0.76; EXPRESSED IN HBL100, SIGNAL = 0.8; EXPRESSED IN HEART, SIGNAL =   1; EXPRESSED IN PLACENTA, SIGNAL = 2.4; EXPRESSED IN FETAL LIVER, SIGNAL = 0.94; EXPRESSED IN LUNG, SIGNAL = 1.6; NT HIT: gi7705745, EVALUE 1.00e-90; EST_HUMAN HIT: N43182.1, EVALUE 0.00e+00; SWISSPROT HIT: P16356, EVALUE 6.00e-04
agctcccatttccctgtcctctccgtgatgggcaatcaatgaagccattgggctctcccgtgtcctcctctgaggattcttcagagtcaccacgttcatcaataatataccacatgttcctactgccatcacccagcagctcacccccagctctcggggagtctcctgtgtctcccagctactctccaaacaaccccagatttcagctggagtcagccctccacacccaggaatcacctacaaactcacgagcctcacggtgctcctcccctatgtctttcaactcttcacccccaggcctcagggactctcctgtgtctcccagcttctctccagccttccccagatttctgccacagtcagccccaggcacacaggggaaccctggacactcacaggcctcacgagactatctccctatgacctgtatctatacagggatggctcccacgcatccctcagtgaccccaaacccatctccacttacactcagacactcccagggcctgacagctactccccgttattgtccttcagttcgaagccctggccaatctaccagccaacatgatgcagctacctggccatttctccacatttctggtgagggccccacacccagccgcagaaaagcccctcctgcattccatcctcacacacaggcctgtccatccacttgctactgtcacactcttgccagcagaagaggcccctgtaatggccgatatcaccgcccagtctatcctcaccccacagctatgcagcgggaccctcctgctggcccacgtggctgccagagcccatgctggcactacactccagcatgtcggcgtctgcgggccacactaccgg

SEQ ID NO: 17785 - DNA, 557 bp, Homo sapiens
  MAP TO AC009299.1; EXPRESSED IN PLACENTA, SIGNAL = 0.97; EXPRESSED IN BT474, SIGNAL = 1.3; EXPRESSED IN BONE MARROW, SIGNAL = 1.2; EXPRESSED IN HBL100, SIGNAL = 1.1; EXPRESSED IN HELA, SIGNAL = 2.1; EXPRESSED IN FETAL LIVER, SIGNAL = 2.1; EXPRESSED IN HEART, SIGNAL = 0.97; EXPRESSED IN LUNG, SIGNAL = 1.4; EXPRESSED IN ADULT LIVER, SIGNAL = 1.7; NT HIT: gi11429976, EVALUE 0.00e+00; SWISSPROT HIT: P43351, EVALUE 1.60e+00; EST_HUMAN HIT: AV717224.1, EVALUE 0.00e+00
tcccggggaatcgagtgagggaaaaggtgcatcagatgggtccagaagtgggaagctatttacatataatgcattatggtctccaggtggcaaacacgcagctctatccagagttgtcctgatacaagtgtttacgagatttgagggctttgttttgtcagttgttttaaggttttgtatagctgaagctatggggtcaattccctgaatttcaaataaagtttcttctgttttaacaaagttccctgggttgtctctgaactccatattaaatttctcttggcacactgcctcagacgtggcaggactaaggatgccgggtctctctggagtgctatgtaagaaagttgagtcattgtccataggtggaaacttgacattgaatttagaaagtgattcaaaagaggtgtcttcctcatctctgcacagtcctcttggtgtgacagatgtgatggatggtgcacctctatttatatcatctttagcctgaggcttaaacagcgcttcttgtttatctgttttatccgtacactgtataggcacagagcactgtgttt

SEQ ID NO: 17786 - DNA, 145 bp, Homo sapiens
  MAP TO AC009298.1; EXPRESSED IN PLACENTA, SIGNAL = 1.7; EXPRESSED IN LUNG, SIGNAL =   1; EXPRESSED IN BONE MARROW, SIGNAL = 1.4; EXPRESSED IN HBL100, SIGNAL = 1.2; EXPRESSED IN FETAL LIVER, SIGNAL = 1.6; EXPRESSED IN HELA, SIGNAL = 0.71; EXPRESSED IN BRAIN, SIGNAL =   1; EXPRESSED IN BT474, SIGNAL = 1.9; EXPRESSED IN HEART, SIGNAL =   1; SWISSPROT HIT: P27925, EVALUE 2.00e-21; EST_HUMAN HIT: AU138559.1, EVALUE 3.00e-76; NT HIT: X55545.1, EVALUE 2.00e-76
aatggtaccgatggggtacagggcctgcaaacattaaccatgaccaatgcagcagccactcagccgggtactaccattctacagtatgcacagaccactgatggacagcagatcttagtgcccagcaaccaagttgttgttcaag

SEQ ID NO: 17787 - DNA, 147 bp, Homo sapiens
  MAP TO AC009289.1; EXPRESSED IN BT474, SIGNAL = 3.5; EXPRESSED IN FETAL LIVER, SIGNAL = 3.8; EXPRESSED IN LUNG, SIGNAL = 4.3; EXPRESSED IN HELA, SIGNAL = 3.9; EXPRESSED IN ADULT LIVER, SIGNAL = 3.8; EXPRESSED IN BRAIN, SIGNAL = 4.2; EXPRESSED IN HBL100, SIGNAL = 3.1; EXPRESSED IN HEART, SIGNAL = 3.6; EXPRESSED IN PLACENTA, SIGNAL = 3.9; EXPRESSED IN BONE MARROW, SIGNAL = 4.7; NT HIT: AF000573.1, EVALUE 2.00e-39; EST_HUMAN HIT: AI335425.1, EVALUE 1.30e+00
gggaaggttggggtgaagagaaggagaagaaaagaggaggataagaaagacagtaaggaagaggaggggaagagagagagtaagtacttccccttctctcagaggggagatgatgacaagggggaggtgagagttgtgttagtccat

SEQ ID NO: 17788 - DNA, 100 bp, Homo sapiens
  MAP TO AC009289.1; EXPRESSED IN FETAL LIVER, SIGNAL = 6.6; EXPRESSED IN ADULT LIVER, SIGNAL =  15; EXPRESSED IN BT474, SIGNAL = 1.7; EXPRESSED IN HEART, SIGNAL = 1.2; EST_HUMAN HIT: AA961593.1, EVALUE 3.10e-01; NT HIT: AF000573.1, EVALUE 8.00e-50
gggccacagcctcccagagctgcccaagatcctgcttcttataggctatggtctgggtcatggtcagaagagaatgaacttcctgccagctagcaccaag

SEQ ID NO: 17789 - DNA, 298 bp, Homo sapiens
  MAP TO AC009269.1; EXPRESSED IN FETAL LIVER, SIGNAL =   3; EXPRESSED IN BRAIN, SIGNAL = 3.5; EXPRESSED IN HEART, SIGNAL = 4.4; EXPRESSED IN PLACENTA, SIGNAL = 3.3; EXPRESSED IN BONE MARROW, SIGNAL = 3.2; EXPRESSED IN BT474, SIGNAL = 2.4; EXPRESSED IN ADULT LIVER, SIGNAL = 3.4; EXPRESSED IN HELA, SIGNAL = 5.3; EXPRESSED IN LUNG, SIGNAL = 4.7; EXPRESSED IN HBL100, SIGNAL = 5.6; NT HIT: gi8922933, EVALUE 0.00e+00; EST_HUMAN HIT: T09251.1, EVALUE 0.00e+00; SWISSPROT HIT: O48334, EVALUE 3.00e+00
actgaagctcctcgactctcttgttcagggacttgttcaggtggatgctcgcagtgggctcctcgtcatgatttttgtctttggcaggtttctttttgggtggcttcataccaatcaggacagctttcatgttctctttgccctgagattctgtgatcatgaactcatgggctttgatggctgcttccacctcctcgaactccacgatggcgcactcctgggtccccacttggctgtagcggctgctgatcctccggatgtcagggggcagctctctcccaggtttgaggatccgcac

SEQ ID NO: 17790 - DNA, 78 bp, Homo sapiens
  MAP TO AC009269.1; EXPRESSED IN PLACENTA, SIGNAL =  10; EXPRESSED IN FETAL LIVER, SIGNAL =  76; EXPRESSED IN LUNG, SIGNAL =  26; EXPRESSED IN HELA, SIGNAL =  49; EXPRESSED IN BT474, SIGNAL =  48; EXPRESSED IN BONE MARROW, SIGNAL =  18; EXPRESSED IN HBL100, SIGNAL =  85; EXPRESSED IN ADULT LIVER, SIGNAL =  26; EXPRESSED IN BRAIN, SIGNAL =  17; EXPRESSED IN HEART, SIGNAL =  30; NT HIT: gi4506628, EVALUE 6.00e-32; EST_HUMAN HIT: BE886521.1, EVALUE 9.00e-32
gaagatgcaggccaacagtgccaaggccatgagtgcacgtgccaaggctatcaaggccctcgtaaagcccaaggaggt

SEQ ID NO: 17791 - DNA, 154 bp, Homo sapiens
  MAP TO AC009238.1; EXPRESSED IN LUNG, SIGNAL = 1.5; EXPRESSED IN FETAL LIVER, SIGNAL = 1.1; EXPRESSED IN ADULT LIVER, SIGNAL = 1.4; EXPRESSED IN BRAIN, SIGNAL = 2.1; EXPRESSED IN HEART, SIGNAL = 1.4; EXPRESSED IN PLACENTA, SIGNAL = 2.1; EXPRESSED IN BT474, SIGNAL = 0.89; EXPRESSED IN BONE MARROW, SIGNAL =   1; EXPRESSED IN HBL100, SIGNAL = 1.2; EXPRESSED IN HELA, SIGNAL = 1.7; EST_HUMAN HIT: AI523747.1, EVALUE 2.00e-79; SWISSPROT HIT: Q12948, EVALUE 5.80e-01; NT HIT: U87928.1, EVALUE 1.40e+00
ggttctcagacctgccagccggcaggcttggggcagcatcctcctggcagggcacagccgccccagctgctctctgccactcaagtccagctggactcgcagctgcctcagaagggtggcctggtggaatgtgcagatcagattgggggttcga

SEQ ID NO: 17792 - DNA, 169 bp, Homo sapiens
  MAP TO AC009238.1; EXPRESSED IN PLACENTA, SIGNAL = 6.8; EXPRESSED IN LUNG, SIGNAL = 1.8; EXPRESSED IN HELA, SIGNAL = 1.4; EXPRESSED IN BT474, SIGNAL = 1.3; EXPRESSED IN HBL100, SIGNAL = 1.3; EXPRESSED IN FETAL LIVER, SIGNAL = 1.9; EXPRESSED IN BRAIN, SIGNAL = 3.3; EXPRESSED IN BONE MARROW, SIGNAL =  62; EXPRESSED IN ADULT LIVER, SIGNAL = 1.9; EXPRESSED IN HEART, SIGNAL = 1.4; EST_HUMAN HIT: AI002818.1, EVALUE 6.00e-74; SWISSPROT HIT: P05066, EVALUE 2.60e-01; NT HIT: AF199599.1, EVALUE 3.00e-88
agccctgtggggctgtgctggacaggatccacttgaccaggcagcatctcatcaaagcctggcggctgagcctcggcctctgccacttgataccctccttcttgctaagtggtgtgtgcccgaggtcccccaggaggctgccgtccgacgcctttgtcacttcctgcag

SEQ ID NO: 17793 - DNA, 139 bp, Homo sapiens
  MAP TO AC009238.1; EXPRESSED IN HEART, SIGNAL =   1; EXPRESSED IN BONE MARROW, SIGNAL = 0.93; EXPRESSED IN LUNG, SIGNAL = 0.93; EXPRESSED IN HELA, SIGNAL = 1.6; EXPRESSED IN ADULT LIVER, SIGNAL =   2; EXPRESSED IN BRAIN, SIGNAL = 2.3; EXPRESSED IN PLACENTA, SIGNAL = 0.73; EXPRESSED IN BT474, SIGNAL = 1.6; EXPRESSED IN HBL100, SIGNAL = 3.3; EXPRESSED IN FETAL LIVER, SIGNAL = 1.6; EST_HUMAN HIT: AW071755.1, EVALUE 8.00e-73; SWISSPROT HIT: Q59050, EVALUE 2.00e-06; NT HIT: gi11431154, EVALUE 8.00e-73
aggcagggcccagagggcagaaggtgtcgaaggtttttcccagcagccattgtttcccattacgtctcatttgccagtcacgagcactcacgtcatgagccacagtgaagccggccacgtgggccatagcatctgtggc

SEQ ID NO: 17794 - DNA, 201 bp, Homo sapiens
  MAP TO AC009229.1; EXPRESSED IN BT474, SIGNAL = 0.93; EXPRESSED IN BONE MARROW, SIGNAL = 0.71; EXPRESSED IN PLACENTA, SIGNAL = 1.5; EXPRESSED IN HEART, SIGNAL = 1.3; EXPRESSED IN BRAIN, SIGNAL = 0.82; EXPRESSED IN HELA, SIGNAL = 1.1; EXPRESSED IN LUNG, SIGNAL = 1.1; EXPRESSED IN FETAL LIVER, SIGNAL = 0.82; EXPRESSED IN HBL100, SIGNAL = 0.81; EXPRESSED IN ADULT LIVER, SIGNAL = 0.97; NT HIT: gi8404656, EVALUE 4.00e-01; SWISSPROT HIT: O62653, EVALUE 7.30e-01
ctcataccacctcatcacatttcagcttttactggtgcttcctcctccctttatgttcgttttccacaacaccatcctcattcctccagagctactagacacagagaaaatcaagagcctggtgctgctgcagggagcaggtgccaggtcccgggctgctacaatccgtgcctcagtaaaatgccaaattaccaccaagca

SEQ ID NO: 17795 - DNA, 577 bp, Homo sapiens
  MAP TO AC009229.1; EXPRESSED IN ADULT LIVER, SIGNAL = 4.3; EXPRESSED IN BRAIN, SIGNAL = 3.5; EXPRESSED IN PLACENTA, SIGNAL =   2; EXPRESSED IN BT474, SIGNAL = 2.9; EXPRESSED IN BONE MARROW, SIGNAL = 3.4; EXPRESSED IN HBL100, SIGNAL = 2.8; EXPRESSED IN FETAL LIVER, SIGNAL = 3.3; EXPRESSED IN LUNG, SIGNAL = 4.4; EXPRESSED IN HELA, SIGNAL = 5.5; EXPRESSED IN HEART, SIGNAL = 3.6; SWISSPROT HIT: Q16678, EVALUE 1.00e-111; NT HIT: gi11430100, EVALUE 0.00e+00; EST_HUMAN HIT: AU120297.1, EVALUE 0.00e+00
gtatcctgatgtgcagactcgagtgcaggcagaattggatcaggtcgtggggagggaccgtctgccttgtatgggtgaccagcccaacctgccctatgtcctggccttcctttatgaagccatgcgcttctccagctttgtgcctgtcactattcctcatgccaccactgccaacacctctgtcttgggctaccacattcccaaggacactgtggtttttgtcaaccagtggtctgtgaatcatgacccagtgaagtggcctaacccggagaactttgatccagctcgattcttggacaaggatggcctcatcaacaaggacctgaccagcagagtgatgattttttcagtgggcaaaaggcggtgcattggcgaagaactttctaagatgcagctttttctcttcatctccatcctggctcaccagtgcgatttcagggccaacccaaatgagcctgcgaaaatgaatttcagttatggtctaaccattaaacccaagtcatttaaagtcaatgtcactctcagagagtccatggagctccttgatagtgctgtccaaaatttacaagccaaggaa

SEQ ID NO: 17796 - DNA, 160 bp, Homo sapiens
  MAP TO AC009228.2; EXPRESSED IN HELA, SIGNAL = 2.4; EXPRESSED IN BRAIN, SIGNAL = 2.3; EXPRESSED IN HEART, SIGNAL = 1.9; EXPRESSED IN BT474, SIGNAL =   3; EXPRESSED IN BONE MARROW, SIGNAL = 2.5; EXPRESSED IN HBL100, SIGNAL =   2; EXPRESSED IN LUNG, SIGNAL = 2.3; EXPRESSED IN ADULT LIVER, SIGNAL = 2.1; EXPRESSED IN PLACENTA, SIGNAL = 2.3; EXPRESSED IN FETAL LIVER, SIGNAL = 2.1; NT HIT: AB033082.1, EVALUE 3.00e-85; SWISSPROT HIT: P33485, EVALUE 4.40e-01; EST_HUMAN HIT: AW890290.1, EVALUE 3.70e-01
gtcttcatctgtcttctgctgtaacagagctgctccattaagctggcagctgcagaacctgatgtaagcctgcatgtgggacagctcagcggccaggatgtccccaatcatctgcaccggcatcttctcgcccccggtcttcttccgcacccgcaaagcc

SEQ ID NO: 17797 - DNA, 240 bp, Homo sapiens
  MAP TO AC009228.2; EXPRESSED IN BONE MARROW, SIGNAL = 1.6; EXPRESSED IN HELA, SIGNAL = 5.5; EXPRESSED IN HBL100, SIGNAL = 2.2; EXPRESSED IN LUNG, SIGNAL = 3.5; EXPRESSED IN ADULT LIVER, SIGNAL =   2; EXPRESSED IN BRAIN, SIGNAL = 2.5; EXPRESSED IN PLACENTA, SIGNAL = 2.7; EXPRESSED IN BT474, SIGNAL = 2.4; EXPRESSED IN HEART, SIGNAL = 1.7; EXPRESSED IN FETAL LIVER, SIGNAL = 2.6; NT HIT: AF182198.1, EVALUE 1.00e-118; EST_HUMAN HIT: BE785424.1, EVALUE 5.50e-02; SWISSPROT HIT: Q9Y2G5, EVALUE 1.50e+00
cgttttatacattttgaattgagcattggacttcgagctgaaaagtttctcagagccagaggaaacagcaaactgcttgaccatgtaggtaagaagcaggaagtcattgaagaggaatccgtgcagttccttgttgctcttggtcttgtataatttcccactgtgtaagagcttccggggccccaggcagttggtgagagagttgaaaataagttgcttaaagagaaagaaaatttcact

SEQ ID NO: 17798 - DNA, 88 bp, Homo sapiens
  MAP TO AC009228.2; EXPRESSED IN BT474, SIGNAL = 0.99; EXPRESSED IN HELA, SIGNAL = 1.8; EXPRESSED IN PLACENTA, SIGNAL = 2.2; EXPRESSED IN BONE MARROW, SIGNAL = 0.76; EXPRESSED IN FETAL LIVER, SIGNAL = 0.84; EXPRESSED IN LUNG, SIGNAL = 3.8; EXPRESSED IN ADULT LIVER, SIGNAL = 1.1; EXPRESSED IN BRAIN, SIGNAL = 1.1; EXPRESSED IN HEART, SIGNAL = 0.96; EXPRESSED IN HBL100, SIGNAL = 1.1; NT HIT: U20193.1, EVALUE 6.10e-01; EST_HUMAN HIT: AW206421.1, EVALUE 2.00e-42
gttacagtcccaccatttgttgatcctctgtttcaaagacagcaagaggtggatgaagagaggagaactggtcttcagtgtgagacag

SEQ ID NO: 17799 - DNA, 125 bp, Homo sapiens
  MAP TO AC009228.2; EXPRESSED IN HEART, SIGNAL = 2.9; EXPRESSED IN BONE MARROW, SIGNAL = 3.6; EXPRESSED IN HBL100, SIGNAL = 2.2; EXPRESSED IN FETAL LIVER, SIGNAL = 2.9; EXPRESSED IN LUNG, SIGNAL = 2.9; EXPRESSED IN ADULT LIVER, SIGNAL = 1.7; EXPRESSED IN BRAIN, SIGNAL = 3.5; EXPRESSED IN PLACENTA, SIGNAL = 2.4; EXPRESSED IN BT474, SIGNAL = 2.8; EXPRESSED IN HELA, SIGNAL = 3.8; NT HIT: AJ271735.1, EVALUE 1.50e-02; EST_HUMAN HIT: T06573.1, EVALUE 5.00e-12
ctggtatccgagatgcaggacaaagtcctctttattcttcactctcctccctttaagcagaaggaaggtgtcacctttggagttgctgcaagctgcactgcctggggttgggagagggatggtgc

SEQ ID NO: 17800 - DNA, 146 bp, Homo sapiens
  MAP TO AC009228.2; EXPRESSED IN LUNG, SIGNAL = 1.3; EXPRESSED IN HELA, SIGNAL =   2; EXPRESSED IN BRAIN, SIGNAL = 1.9; EXPRESSED IN HEART, SIGNAL = 1.2; EXPRESSED IN PLACENTA, SIGNAL = 1.1; EXPRESSED IN BT474, SIGNAL = 1.2; EXPRESSED IN BONE MARROW, SIGNAL = 1.9; EXPRESSED IN HBL100, SIGNAL = 1.6; EXPRESSED IN FETAL LIVER, SIGNAL = 1.7; EXPRESSED IN ADULT LIVER, SIGNAL = 1.2; NT HIT: AF182199.1, EVALUE 1.00e-62; SWISSPROT HIT: P54891, EVALUE 3.00e+00; EST_HUMAN HIT: N94713.1, EVALUE 7.00e-61
ctcgacgacgagctgaaggtcagccatgtaccgctcttcggtctgaatcagctcatgaatatagccctgtcttttcctctcaattggctgcattgtgtccagggtttgcagatcagcacaccctgtggaaaaaacagggtagttta

SEQ ID NO: 17801 - DNA, 81 bp, Homo sapiens
  MAP TO AC009225.1; EXPRESSED IN PLACENTA, SIGNAL =   3; EXPRESSED IN HBL100, SIGNAL = 2.6; EXPRESSED IN FETAL LIVER, SIGNAL = 2.9; EXPRESSED IN LUNG, SIGNAL = 2.8; EXPRESSED IN ADULT LIVER, SIGNAL = 2.1; EXPRESSED IN BRAIN, SIGNAL = 2.2; EXPRESSED IN BONE MARROW, SIGNAL = 3.9; EXPRESSED IN HEART, SIGNAL = 2.1; EXPRESSED IN BT474, SIGNAL = 2.6; EXPRESSED IN HELA, SIGNAL = 2.1
gtagaagagaaggaggaggaggaggaaaaggagaaagaggaggaagaggaaaaatgaagaaaaggaagaagttaagaagct

SEQ ID NO: 17802 - DNA, 156 bp, Homo sapiens
  MAP TO AC009224.1; EXPRESSED IN HBL100, SIGNAL = 9.1; EXPRESSED IN FETAL LIVER, SIGNAL =  13; EXPRESSED IN HELA, SIGNAL =  17; EXPRESSED IN BRAIN, SIGNAL = 6.2; EXPRESSED IN HEART, SIGNAL = 7.9; EXPRESSED IN BT474, SIGNAL =  14; EXPRESSED IN BONE MARROW, SIGNAL = 2.7; EXPRESSED IN ADULT LIVER, SIGNAL = 9.2; EXPRESSED IN LUNG, SIGNAL = 4.7; EXPRESSED IN PLACENTA, SIGNAL = 3.5; SWISSPROT HIT: O35501, EVALUE 2.00e-20; NT HIT: gi11417339, EVALUE 8.00e-64; EST_HUMAN HIT: AU158830.1, EVALUE 1.00e-63
aaagataaaggcacaggacatgagcagcagattgtaatccagtcttctggtgggttaagcaaagatgatgttgaaaatatggttaaaaatgcagagaaatatgctaaggaagaccagcgaaggaaggaatgagttgaagcagttaatatggctgaa

SEQ ID NO: 17803 - DNA, 1449 bp, Homo sapiens
  MAP TO AC009224.1; EXPRESSED IN LUNG, SIGNAL = 2.3; EXPRESSED IN HEART, SIGNAL = 2.2; EXPRESSED IN BONE MARROW, SIGNAL = 2.4; EXPRESSED IN FETAL LIVER, SIGNAL = 5.5; EXPRESSED IN HELA, SIGNAL = 9.7; EXPRESSED IN ADULT LIVER, SIGNAL = 7.9; EXPRESSED IN BRAIN, SIGNAL = 2.5; EXPRESSED IN PLACENTA, SIGNAL = 1.5; EXPRESSED IN BT474, SIGNAL =  10; EXPRESSED IN HBL100, SIGNAL =  10; NT HIT: gi11417339, EVALUE 0.00e+00; EST_HUMAN HIT: AU132907.1, EVALUE 0.00e+00; SWISSPROT HIT: P38646, EVALUE 0.00e+00
atggctggaatggccttagtcatgaggcttttagaattgtttcaaggcaggattatgcgtcagaagcaatcaatggagcagctggtggtgtttatttgggtactaccaactcctgtgtggcagttatggaaggtaaacaagcaaaggtgctggagaatgccgaaggtgccagaactaccccttcagttgtggcctttacagcagatggtgagcgacttgttggcatgccagtcaagcaacaggctgtcaccaacccaaacaatgcattctatgctaccaaatgtctcattgtccagctatcctgaagtacagaaagacattaaaaatattccctttaaaattgtctgtgcctccaatggtgatgcctgggttgaggctcatgggaaactgtattctccaagtcagatcggagcgtttgtgtcgatgaagatgaaagagactgcagaaaattacttggggcacacagcaaaaaatgctgtgatcgcagtcccagcttatttcaatgacttgcagaggcaggccactaaagatgctggccagatatctggactgaatgtgcttcgggtgattaatgaacccacagctgctgctcttgcctatggtctagacaaatcaaaagacaaagtcattgctgtatatgatttaggtggtggaacttttgatatttctatcctggaatttcagaaaggagtattcgaggtgaaatccacaaatggggacactttcttaggtggggaagactttgaccaggccttgctacagcacattgtgaaggagttcaagagagagacgggggttgatttgaccaaagacaacgtggcatttcagagggtgtgggaagctgctgaaaaggctaaatgtgaactctcctcatctgtgcagactgacatcaatttgccctatcttacaatggattcttctggacccaagcatttgaatacaaagttgacccatgctcaatttgaagggattgtcactgatctaatcaggaggactatcgctccatgccaaaaagctatgcaagatgcagaagtcagcaagagtgatataggagaagtgattcttgtgggtggcatgactaggatgcccaagttcaacagactgtgcaggactttttttggcagagccccaagtaaagctgtcaatcctgatgaggctgtggcattggagctgccattcagggagatgtgttggccggcgatgtcacagatgtgctgctccttgatgtcattcccctgtctctgggtattgaaactctgcgaggtgtctttaccaaacttattaataggaataccactattccaaccaagaagagccaggtattctcaactgctgctgatgggcagacacaagtggaaattaaagtgtgtcagggtgagagagagatggctggagacaacaaactccttggacagtttactttgattggaattccaccagcccctcgtg

SEQ ID NO: 17804 - DNA, 271 bp, Homo sapiens
  MAP TO AC008279.1; EXPRESSED IN PLACENTA, SIGNAL = 1.6; EXPRESSED IN BT474, SIGNAL = 2.5; EXPRESSED IN LUNG, SIGNAL = 1.4; EXPRESSED IN HELA, SIGNAL =   1; EXPRESSED IN ADULT LIVER, SIGNAL = 1.2; EXPRESSED IN BONE MARROW, SIGNAL = 1.3; EXPRESSED IN HBL100, SIGNAL = 1.3; EXPRESSED IN FETAL LIVER, SIGNAL = 1.4; EXPRESSED IN BRAIN, SIGNAL = 1.2; EXPRESSED IN HEART, SIGNAL = 1.5; NT HIT: gi8924119, EVALUE 5.00e-11; EST_HUMAN HIT: AA658825.1, EVALUE 3.00e-13; SWISSPROT HIT: P07384, EVALUE 1.80e+00
ggaactggaaaaagaccacaggaagaaggaaatttccagctgaacttcgtaacaatttcaaccaaagtttcctggacggaacctggagaagggggcgaatcaggggtgcagacaagcacagaagctgtggcaggtggggaagctcaaaacctgaaagccctgcttactttcacagccgggaggctggttgttggagcaagttctcagctctgcctacccactgcctggaaacaaactcagtaccgttgtgggggcacagtgggagtgagac

SEQ ID NO: 17805 - DNA, 91 bp, Homo sapiens
  MAP TO AC008278.1; EXPRESSED IN PLACENTA, SIGNAL = 1.4; EXPRESSED IN HBL100, SIGNAL = 2.6; EXPRESSED IN FETAL LIVER, SIGNAL = 2.1; EXPRESSED IN LUNG, SIGNAL = 4.8; EXPRESSED IN HELA, SIGNAL = 2.9; EXPRESSED IN ADULT LIVER, SIGNAL =   2; EXPRESSED IN BRAIN, SIGNAL = 2.6; EXPRESSED IN HEART, SIGNAL = 2.8; EXPRESSED IN BT474, SIGNAL =   3; EXPRESSED IN BONE MARROW, SIGNAL =   1; EST_HUMAN HIT: BE781097.1, EVALUE 3.00e-44; SWISSPROT HIT: Q92499, EVALUE 6.00e-12; NT HIT: gi11430378, EVALUE 2.00e-44
ggtgaagaggaatttaagtttccaccaaaagatggctttgttgctctttccaaggcaccggatggttacattgtcaaatcacagcactcag

SEQ ID NO: 17806 - DNA, 91 bp, Homo sapiens
  MAP TO AC008275.1; EXPRESSED IN BONE MARROW, SIGNAL = 0.77; EXPRESSED IN HBL100, SIGNAL = 0.8; EXPRESSED IN BRAIN, SIGNAL = 0.72; EXPRESSED IN HEART, SIGNAL = 0.88; EXPRESSED IN BT474, SIGNAL = 0.77; EXPRESSED IN HELA, SIGNAL = 0.66; EXPRESSED IN PLACENTA, SIGNAL =   1; EXPRESSED IN FETAL LIVER, SIGNAL = 0.79; EXPRESSED IN LUNG, SIGNAL = 1.6; EXPRESSED IN ADULT LIVER, SIGNAL = 0.81; NT HIT: AL163218.2, EVALUE 7.50e-01; EST_HUMAN HIT: BE795469.1, EVALUE 8.00e-08
ccaagaaccctctctgggaatctggatcgagatccctttttccaataacatagggaagatactcattctataatataaagttttttaaaag

SEQ ID NO: 17807 - DNA, 220 bp, Homo sapiens
  MAP TO AC008269.1; EXPRESSED IN FETAL LIVER, SIGNAL = 3.2; EXPRESSED IN HELA, SIGNAL = 4.4; EXPRESSED IN HEART, SIGNAL = 3.8; EXPRESSED IN BT474, SIGNAL = 3.2; EXPRESSED IN BONE MARROW, SIGNAL = 2.4; EXPRESSED IN PLACENTA, SIGNAL = 2.6; EXPRESSED IN BRAIN, SIGNAL = 2.9; EXPRESSED IN ADULT LIVER, SIGNAL = 2.5; EXPRESSED IN LUNG, SIGNAL = 2.6; EXPRESSED IN HBL100, SIGNAL = 3.1; EST_HUMAN HIT: BE896608.1, EVALUE 5.00e-02; SWISSPROT HIT: Q9Z5I9, EVALUE 7.20e-01; NT HIT: M30933.1, EVALUE 8.20e+00
cctcatgatgtttctctgcacataagcctcgagtcctgctaccatctgctactgctgctgctgcaaaagacagtgtctgatgggagtggtttgttcactatcattaaccttgctaggcagagccctgtgccaggccacctcgctaactgcaggccagcctgcattctggccaccctggtgtctctcctggtccaacacctgggccagagcaacaggatag

SEQ ID NO: 17808 - DNA, 412 bp, Homo sapiens
  MAP TO AC008269.1; EXPRESSED IN BRAIN, SIGNAL = 1.6; EXPRESSED IN HBL100, SIGNAL = 1.9; EXPRESSED IN FETAL LIVER, SIGNAL = 1.6; EXPRESSED IN HELA, SIGNAL = 1.9; EXPRESSED IN ADULT LIVER, SIGNAL = 1.6; EXPRESSED IN HEART, SIGNAL = 1.6; EXPRESSED IN PLACENTA, SIGNAL = 1.4; EXPRESSED IN BT474, SIGNAL = 2.3; EXPRESSED IN BONE MARROW, SIGNAL = 0.78; EXPRESSED IN LUNG, SIGNAL = 1.3; EST_HUMAN HIT: AI221878.1, EVALUE 1.00e-101; SWISSPROT HIT: P14152, EVALUE 2.00e-06; NT HIT: gi5729757, EVALUE 2.60e-01
cagttttctggccagtatgcgtttcgcttcaccttccacccccagcgccacagcaataatgttgtgtgcaatgcgtggggcatatctcatgagtaaaactgtcttcaggtttacaaaggttctccctcccacgatgactctgacagactcatgagcatttttctctatcaggtacccatagagcctgcagagaggcaccctgcttcggaggcagtcctccagagtgaacacctccttgttggtgctgtcatccagcaccacaatgacgtgggcctggcggaaggcctcctccaccttcgtgcagatggagacactgcgcaggacgggagatgccaggtcttgggtctccaccacaaggcttttgagatgttcttccgcctgcttgttgtcaaatagagttatgctaatttct

SEQ ID NO: 17809 - DNA, 97 bp, Homo sapiens
  MAP TO AC008268.1; EXPRESSED IN PLACENTA, SIGNAL = 1.6; EXPRESSED IN BT474, SIGNAL = 1.7; EXPRESSED IN LUNG, SIGNAL = 1.5; EXPRESSED IN HELA, SIGNAL = 1.1; EXPRESSED IN BRAIN, SIGNAL = 1.3; EXPRESSED IN HBL100, SIGNAL = 1.5; EXPRESSED IN FETAL LIVER, SIGNAL = 1.6; EXPRESSED IN ADULT LIVER, SIGNAL = 1.4; EXPRESSED IN BONE MARROW, SIGNAL = 1.9; EXPRESSED IN HEART, SIGNAL = 1.6; EST_HUMAN HIT: AW391248.1, EVALUE 5.30e-02; SWISSPROT HIT: P42335, EVALUE 6.20e-01
ggaagttggcagaggccactgttccagacagcagagcctcaatcagcctgaatccctgagcgacctgcatggagcagattccctcgccagcccccat

SEQ ID NO: 17810 - DNA, 129 bp, Homo sapiens
  MAP TO AC008268.1; EXPRESSED IN BRAIN, SIGNAL =   2; EXPRESSED IN ADULT LIVER, SIGNAL = 1.8; EXPRESSED IN BT474, SIGNAL = 1.4; EXPRESSED IN BONE MARROW, SIGNAL = 1.6; EXPRESSED IN HBL100, SIGNAL = 1.2; EXPRESSED IN FETAL LIVER, SIGNAL = 1.5; EXPRESSED IN HELA, SIGNAL = 1.5; EXPRESSED IN HEART, SIGNAL = 1.5; EXPRESSED IN PLACENTA, SIGNAL = 1.6; EXPRESSED IN LUNG, SIGNAL = 1.9; EST_HUMAN HIT: BF697308.1, EVALUE 1.10e-01; SWISSPROT HIT: Q9XD33, EVALUE 4.00e+00
gtgctagtggctggaggagacacaaacatgaacaagacctggtggtctctgctcttcagggactcacagtccagttgggagggggaagagggggtgccagaggtggtgggggtgccagacaaggattct

SEQ ID NO: 17811 - DNA, 213 bp, Homo sapiens
  MAP TO AC008268.1; EXPRESSED IN FETAL LIVER, SIGNAL = 1.4; EXPRESSED IN HEART, SIGNAL = 2.3; EXPRESSED IN PLACENTA, SIGNAL = 1.1; EXPRESSED IN BT474, SIGNAL = 1.6; EXPRESSED IN BONE MARROW, SIGNAL = 1.5; EXPRESSED IN HBL100, SIGNAL = 1.4; EXPRESSED IN LUNG, SIGNAL = 0.8; EXPRESSED IN HELA, SIGNAL = 1.1; EXPRESSED IN ADULT LIVER, SIGNAL = 1.1; EXPRESSED IN BRAIN, SIGNAL = 1.4; SWISSPROT HIT: Q22949, EVALUE 7.00e-05
cggaaccaggtcataggtgacggccactggtaccagcagagcatctgggacgatgcccacctggactgcctgcaccacaaaccccacccaagcctggcccagggctgacagccgtggccccagagccccaggaggttcctccaggaagatgagcaggggctgcccactaaccagcagctgctctatgacctggaataggaggggtcagagggg

SEQ ID NO: 17812 - DNA, 133 bp, Homo sapiens
  MAP TO AC008268.1; EXPRESSED IN HBL100, SIGNAL = 3.2; EXPRESSED IN FETAL LIVER, SIGNAL = 1.7; EXPRESSED IN HELA, SIGNAL =   2; EXPRESSED IN BRAIN, SIGNAL = 3.6; EXPRESSED IN BT474, SIGNAL = 6.2; EXPRESSED IN BONE MARROW, SIGNAL = 2.7; EXPRESSED IN LUNG, SIGNAL = 1.7; EXPRESSED IN ADULT LIVER, SIGNAL = 0.89; EXPRESSED IN PLACENTA, SIGNAL = 0.81; EXPRESSED IN HEART, SIGNAL = 1.5; EST_HUMAN HIT: AV721898.1, EVALUE 6.00e-65; NT HIT: AJ243213.1, EVALUE 9.00e-32; SWISSPROT HIT: P14787, EVALUE 1.80e+00
gccactccctggacagagcctccaggggcaactgaaagcctctctgccactgcttctgcagtggaactgtccttgctaccctcagactgatgaaggagctaacacccttatctacaccttcaacaagctttaa

SEQ ID NO: 17813 - DNA, 129 bp, Homo sapiens
  MAP TO AC008179.1; EXPRESSED IN HELA, SIGNAL = 2.7; EXPRESSED IN LUNG, SIGNAL = 3.4; EXPRESSED IN HEART, SIGNAL = 2.9; EXPRESSED IN PLACENTA, SIGNAL = 2.4; EXPRESSED IN BT474, SIGNAL = 3.6; EXPRESSED IN BONE MARROW, SIGNAL = 2.4; EXPRESSED IN FETAL LIVER, SIGNAL = 2.2; EXPRESSED IN ADULT LIVER, SIGNAL = 2.6; EXPRESSED IN BRAIN, SIGNAL = 4.2; EXPRESSED IN HBL100, SIGNAL = 1.8; EST_HUMAN HIT: AA380630.1, EVALUE 5.00e-07; NT HIT: AF107464.1, EVALUE 1.60e-02
gctatgaacgttgtggaaatgataaaagatatcaaatattacataaacttcattgataaagcagcagcagcaggaatggatagtatggacttcaattttaaataaagttctactgaatgtaaaaggcta

SEQ ID NO: 17814 - DNA, 330 bp, Homo sapiens
  MAP TO AC008174.1; EXPRESSED IN HEART, SIGNAL = 1.6; EXPRESSED IN FETAL LIVER, SIGNAL = 0.67; EXPRESSED IN HELA, SIGNAL = 0.82; EXPRESSED IN ADULT LIVER, SIGNAL = 0.82; EXPRESSED IN BRAIN, SIGNAL = 1.9; EXPRESSED IN PLACENTA, SIGNAL = 0.89; EXPRESSED IN HBL100, SIGNAL = 1.3; EXPRESSED IN LUNG, SIGNAL =   1; SWISSPROT HIT: P53104, EVALUE 4.80e+00; EST_HUMAN HIT: AL039060.1, EVALUE 1.20e+00
tttctcgttggttttgaggatcatctggtttactgggttcacttttaatctcctctcttactttctctttttctctctcttcctcttctttttctttggcagagatatttttgttagttgaggaggatactttttttgttgtaacagactgtgccgaatccctgctaatctcttgaattacatttaatacattatcacctggggggctttggtcataactgagtttcgaataatatgctggttctggagaagaagatagttctaaaacatcttcaaaaatattttcaatgacattttgaacatgttcataatctgagtggtgttcctcat

SEQ ID NO: 17815 - DNA, 165 bp, Homo sapiens
  MAP TO AC008174.1; EXPRESSED IN BT474, SIGNAL = 1.2; EXPRESSED IN HELA, SIGNAL = 0.87; EXPRESSED IN BRAIN, SIGNAL = 0.86; EXPRESSED IN PLACENTA, SIGNAL = 1.2; EXPRESSED IN BONE MARROW, SIGNAL = 1.9; EXPRESSED IN HBL100, SIGNAL =   1; EXPRESSED IN FETAL LIVER, SIGNAL = 1.5; EXPRESSED IN LUNG, SIGNAL = 1.5; EXPRESSED IN ADULT LIVER, SIGNAL = 1.7; EXPRESSED IN HEART, SIGNAL = 1.4; NT HIT: U32818.1, EVALUE 3.20e-01; EST_HUMAN HIT: AW273851.1, EVALUE 3.00e-05; SWISSPROT HIT: P49587, EVALUE 9.90e-01
agatgaagaggctgtttcaggcatcgtctttggtgtggccatgtcaagctcagcaacagctcttttaacatgtgtctccttggattctattacctgatttgagattgcttcagtactttcaatatttgcactggctgtggtctgacaacatttacttagtgacaa

SEQ ID NO: 17816 - DNA, 129 bp, Homo sapiens
  MAP TO AC008169.1; EXPRESSED IN HBL100, SIGNAL = 0.73; EXPRESSED IN BRAIN, SIGNAL = 1.2; EXPRESSED IN HEART, SIGNAL = 1.9; EXPRESSED IN BT474, SIGNAL = 0.83; EXPRESSED IN PLACENTA, SIGNAL = 1.7; EXPRESSED IN ADULT LIVER, SIGNAL = 1.2; EXPRESSED IN HELA, SIGNAL = 0.95; EXPRESSED IN LUNG, SIGNAL = 1.1; EXPRESSED IN FETAL LIVER, SIGNAL =   1; SWISSPROT HIT: P54676, EVALUE 5.40e+00
gggctctccgttataaataatgctctcattaaaattctgcttcggaagaaaggcaagtccattagtctgggagctaatttttactggctccttggatgtatgcatattaaaaattcagcttttataatt

SEQ ID NO: 17817 - DNA, 195 bp, Homo sapiens
  MAP TO AC008165.2; EXPRESSED IN HBL100, SIGNAL =  91; EXPRESSED IN HELA, SIGNAL =  38; EXPRESSED IN PLACENTA, SIGNAL =  16; EXPRESSED IN BT474, SIGNAL =  63; EXPRESSED IN BONE MARROW, SIGNAL =  54; EXPRESSED IN FETAL LIVER, SIGNAL =  39; EXPRESSED IN LUNG, SIGNAL =  21; EXPRESSED IN ADULT LIVER, SIGNAL =  19; EXPRESSED IN BRAIN, SIGNAL =  19; EXPRESSED IN HEART, SIGNAL =  14; SWISSPROT HIT: P29316, EVALUE 1.00e-14; EST_HUMAN HIT: AA725848.1, EVALUE 3.00e-82; NT HIT: gi4506614, EVALUE 3.00e-54
aaagccaacaagcaccagatcagacaggctgtgaagaaggtctatgacagtgatgtggccaaggtcaccaccctgatttttcctgataaagagaacaaggcatatatgttcgactggctcctgattatgaagctttggatgttgcaacaaaattgggatcatctaaactgagtccagctggctaactctaaatac

SEQ ID NO: 17818 - DNA, 906 bp, Homo sapiens
  MAP TO AC008165.2; EXPRESSED IN PLACENTA, SIGNAL = 1.5; EXPRESSED IN BONE MARROW, SIGNAL = 1.9; EXPRESSED IN FETAL LIVER, SIGNAL =   2; EXPRESSED IN LUNG, SIGNAL = 0.97; EXPRESSED IN ADULT LIVER, SIGNAL =   1; EXPRESSED IN BRAIN, SIGNAL = 2.2; EXPRESSED IN HEART, SIGNAL = 1.7; EXPRESSED IN BT474, SIGNAL = 2.3; EXPRESSED IN HBL100, SIGNAL = 2.5; EXPRESSED IN HELA, SIGNAL = 1.7; NT HIT: gi11427123, EVALUE 3.00e-09; EST_HUMAN HIT: AI539590.1, EVALUE 4.00e-79; SWISSPROT HIT: P52742, EVALUE 1.00e-112
tctcatgttgtctaaggttaaaaaatttactaaaggctttcccacatagaggacatacatatggtttctctccagtgtgaactcttctatgaagtctaaagttgtaacttctattgaaggctttaccacatatattgcattcatatggtttctctccagtgtgagttctctcatgtcgtctaaggacagaagagtgattgaaggcttttccgcatagatggcattcatatggtttttctccagtgtgagttctctcatgtcgtctgaggtcagaagattcagtgaaggctttcccacatacatggcactcatatggtttctctccagtgtgaattctctcatgtcgtttaagcacagaagattcagtgaatgctttcccacatagatgacatccatgtggtttctctccattgtgacttcgctcatgttgtctaaggtgagaacaatgagagaaggcttttccacatagatgacattcatatggtttctctccattgtgagttctttcatgttgtctaaggtaagaacatttactgaaagccttcccacataggagacatccatatggtttatctcctaagtgagttctctcatgttttctaaggtcagagcaatgagtgaaggctttcccacatagatggcatatctgtgctttttctctagtgtgaatcatctcatgtcgtctaaggttagaacttttactgaaggctttcccacatagatgacatccatatggcttctctccagtgtgagttctctcatgttttcgaagatcagagcaatgagtaaaggctttcccacatagatgacatccgtgtggtttctctccagtgtgaatcatctcatgtcgcctaagattagaatttttgctaaaggttttcccacacacacgacattccaatgtta

SEQ ID NO: 17819 - DNA, 317 bp, Homo sapiens
  MAP TO AC008164.2; EXPRESSED IN BT474, SIGNAL = 3.4; EXPRESSED IN BONE MARROW, SIGNAL = 1.9; EXPRESSED IN LUNG, SIGNAL = 2.7; EXPRESSED IN HELA, SIGNAL = 2.3; EXPRESSED IN ADULT LIVER, SIGNAL =   3; EXPRESSED IN BRAIN, SIGNAL = 2.2; EXPRESSED IN PLACENTA, SIGNAL = 4.4; EXPRESSED IN HBL100, SIGNAL = 3.2; EXPRESSED IN FETAL LIVER, SIGNAL = 1.9; EXPRESSED IN HEART, SIGNAL = 1.6; NT HIT: AL163284.2, EVALUE 4.00e-86; EST_HUMAN HIT: AW340174.1, EVALUE 8.00e-78; SWISSPROT HIT: P19028, EVALUE 2.00e-07
ctcctttgtggtgtagtagactgatttcatcttgatagttcaggttaatcaccccagccaacactgtaactcccttcttagcctgttgacttaaagattggaggagcccaaagtgtccaggtggcaatcttaacttccagtttaatggaattgttgttgtgtctcctggtggcagtgttcctccctctggaactaatacctctaggccagcagaatgcaatgtcacaggaacaggaaggaaaaattttgctagtggattgctaggggtgagggtgaggggtgctacttccacttccacttcttgattcctggaaatc

SEQ ID NO: 17820 - DNA, 271 bp, Homo sapiens
  MAP TO AC008159.1; EXPRESSED IN PLACENTA, SIGNAL = 1.5; EXPRESSED IN BONE MARROW, SIGNAL = 2.1; EXPRESSED IN HBL100, SIGNAL =   3; EXPRESSED IN LUNG, SIGNAL =   2; EXPRESSED IN HELA, SIGNAL = 2.8; EXPRESSED IN BT474, SIGNAL = 2.4; EXPRESSED IN FETAL LIVER, SIGNAL = 2.1; EXPRESSED IN BRAIN, SIGNAL = 1.9; EXPRESSED IN HEART, SIGNAL = 1.9; EXPRESSED IN ADULT LIVER, SIGNAL = 1.7; EST_HUMAN HIT: AU128864.1, EVALUE 0.00e+00; SWISSPROT HIT: P55285, EVALUE 4.00e-45; NT HIT: gi4826672, EVALUE 0.00e+00
  unsure 265
cgacatcagacatttcagggacagtggctgtgtaaacctccttggtgaatattggttcattgtcattgatgtcatggatcttgatgatgaattcagactcgggctccacgggtctccctgtccttctgtttatagcttgagctcgaaggatgtaaacgggtttttcttccctgtccagcctcttggtggcctgtatgtcgcctgtgttttcattaataatgaagagatctcctgctccatctcctgaaaggatatatttaagtgnatccat

SEQ ID NO: 17821 - DNA, 87 bp, Homo sapiens
  MAP TO AC008159.1; EXPRESSED IN HBL100, SIGNAL = 4.3; EXPRESSED IN BRAIN, SIGNAL = 3.5; EXPRESSED IN PLACENTA, SIGNAL = 1.8; EXPRESSED IN BT474, SIGNAL = 2.5; EXPRESSED IN BONE MARROW, SIGNAL =   2; EXPRESSED IN FETAL LIVER, SIGNAL = 2.4; EXPRESSED IN LUNG, SIGNAL = 1.4; EXPRESSED IN HELA, SIGNAL = 2.9; EXPRESSED IN ADULT LIVER, SIGNAL = 1.1; EXPRESSED IN HEART, SIGNAL = 2.7; EST_HUMAN HIT: AW237908.1, EVALUE 5.00e-42; NT HIT: gi7106396, EVALUE 5.00e-42
ctgacccatcatatccgctaccaccaatgcctaatgcatttggacaagttgataggatatactttccaagatcgttgtctgttgcag

SEQ ID NO: 17822 - DNA, 91 bp, Homo sapiens
  MAP TO AC008109.1; EXPRESSED IN BONE MARROW, SIGNAL = 2.1; EXPRESSED IN ADULT LIVER, SIGNAL = 1.1; EXPRESSED IN BT474, SIGNAL = 2.5; EXPRESSED IN FETAL LIVER, SIGNAL = 1.9; EXPRESSED IN LUNG, SIGNAL = 1.7; EXPRESSED IN HELA, SIGNAL = 1.3; EXPRESSED IN BRAIN, SIGNAL = 1.9; EXPRESSED IN HEART, SIGNAL = 1.3; EXPRESSED IN PLACENTA, SIGNAL = 2.3; EXPRESSED IN HBL100, SIGNAL = 1.6; EST_HUMAN HIT: BE071811.1, EVALUE 5.00e-12; SWISSPROT HIT: P11369, EVALUE 3.00e-03; NT HIT: AL163213.2, EVALUE 3.00e-12
caaagccagagaaagacacatcaaaaacagaaaactacaggcaggccaatatctctgatgaatattgatgcaaaaattctcaacaaaatgc

SEQ ID NO: 17823 - DNA, 139 bp, Homo sapiens
  MAP TO AC008085.1; EXPRESSED IN PLACENTA, SIGNAL = 1.3; EXPRESSED IN BT474, SIGNAL = 5.9; EXPRESSED IN FETAL LIVER, SIGNAL = 5.9; EXPRESSED IN LUNG, SIGNAL = 1.4; EXPRESSED IN ADULT LIVER, SIGNAL = 4.5; EXPRESSED IN BRAIN, SIGNAL = 2.4; EXPRESSED IN BONE MARROW, SIGNAL = 5.9; EXPRESSED IN HBL100, SIGNAL = 9.8; EXPRESSED IN HELA, SIGNAL = 3.1; EXPRESSED IN HEART, SIGNAL = 5.4; SWISSPROT HIT: Q9Y6M9, EVALUE 4.00e-21; EST_HUMAN HIT: BE205781.1, EVALUE 2.00e-58; NT HIT: gi6274549, EVALUE 1.00e-58
cttcctttccggcaggtggcgtttcctcctgcagctgcttaacctctcttttccagctttccctccgcagtttcttccactgttttctcttggcaaagtaatcaggatacattgccttctcagaaggatgccagtcatc

SEQ ID NO: 17824 - DNA, 270 bp, Homo sapiens
  MAP TO AC008079.7; EXPRESSED IN HEART, SIGNAL = 2.5; EXPRESSED IN BT474, SIGNAL = 2.8; EXPRESSED IN BRAIN, SIGNAL = 3.6; EXPRESSED IN PLACENTA, SIGNAL = 2.7; EXPRESSED IN BONE MARROW, SIGNAL = 3.2; EXPRESSED IN HBL100, SIGNAL = 3.9; EXPRESSED IN FETAL LIVER, SIGNAL = 3.3; EXPRESSED IN LUNG, SIGNAL = 3.2; EXPRESSED IN HELA, SIGNAL = 7.5; EXPRESSED IN ADULT LIVER, SIGNAL = 2.6; SWISSPROT HIT: Q10449, EVALUE 7.30e+00; NT HIT: gi11526301, EVALUE 0.00e+00; EST_HUMAN HIT: BF510907.1, EVALUE 2.00e-36
ggcttctgggcctcctcagagcctgagtgttcctgtttctgctgctgcctcgctgtgtgaatggcctgaagtacatccagtcgccgctcctcaccaaaggctgcagagcccaccactagctcctcagcctccgataagcagcccagaggcagcagcacccgctgcacgtgaaattctgccaaggctccatattctggaaggttttgattggctgggtcttggagccaggcacccaccacatccagcacagctccaggctcttgcattttg

SEQ ID NO: 17825 - DNA, 689 bp, Homo sapiens
  MAP TO AC008079.7; EXPRESSED IN PLACENTA, SIGNAL =  14; EXPRESSED IN BT474, SIGNAL =  58; EXPRESSED IN BONE MARROW, SIGNAL =  28; EXPRESSED IN HBL100, SIGNAL = 1.3e+02; EXPRESSED IN FETAL LIVER, SIGNAL =  72; EXPRESSED IN LUNG, SIGNAL =  20; EXPRESSED IN HELA, SIGNAL =  69; EXPRESSED IN ADULT LIVER, SIGNAL =  13; EXPRESSED IN BRAIN, SIGNAL = 1.2e+02; EXPRESSED IN HEART, SIGNAL =  38; NT HIT: gi9507214, EVALUE 0.00e+00; EST_HUMAN HIT: F01302.1, EVALUE 0.00e+00; SWISSPROT HIT: P09643, EVALUE 1.00e-120
acagatgcttgctctggcctgcagggcttcctgattttccacagttttggtgggggcactggctccggcttcacttctctgctgatggaacgcctctccctggattatggcaagaaatccaagctggagtttgccatctacccagccccccaggtctctactgcagtggtggagccctacaactccatcctgaccacccacaccacactggaacattcagattgtgctttcatggtggacaacgaagccatctatgacatctgccgcaggaaccttgacattgagcgccctacctataccaacctcaaccgcctcatcagtcagattgtgtcctcaatcactgcttctctccgctttgacggggccctcaatgtggacctcactgagttccagaccaacctggtgccctacccccgcatccacttcccgctggtcacctacgcgcccatcatctctgccgagaaagcctatcacgaacagctctctgtggccgagataaccagctcctgctttgagcccaacagccagatggtgaagtgcgacccgagacatggcaagtacatggcctgctgcatgctctaccggggcgacgtggtgcccaaggatgtgaatgtcgctattgctgccatcaagaccaagaggaccatccagtttgtagactggtgtcccacaggcttcaaggtgagagc

SEQ ID NO: 17826 - DNA, 208 bp, Homo sapiens
  MAP TO AC008074.1; EXPRESSED IN PLACENTA, SIGNAL = 2.5; EXPRESSED IN HBL100, SIGNAL = 3.1; EXPRESSED IN BRAIN, SIGNAL = 1.7; EXPRESSED IN HEART, SIGNAL = 1.3; EXPRESSED IN ADULT LIVER, SIGNAL = 1.5; EXPRESSED IN BT474, SIGNAL = 4.7; EXPRESSED IN BONE MARROW, SIGNAL = 1.8; EXPRESSED IN FETAL LIVER, SIGNAL = 2.9; EXPRESSED IN LUNG, SIGNAL = 2.2; EXPRESSED IN HELA, SIGNAL = 1.4; NT HIT: gi11430509, EVALUE 1.00e-114; EST_HUMAN HIT: AI680487.1, EVALUE 1.00e-114; SWISSPROT HIT: Q01778, EVALUE 3.70e+00
aaacagacttctgataatttatcagaagaatgtcaattggcaagaaaatctagtggaacaggcactgaacctgttgcaaaacttaaaaatgggcaagaaggtgagattggacattttgattctgtgccaaatattcaggatgactgcaatggttttcaagactctgatgattttgcagacttcagttcagctggtcctagccaagttg

SEQ ID NO: 17827 - DNA, 397 bp, Homo sapiens
  MAP TO AC008074.1; EXPRESSED IN PLACENTA, SIGNAL = 0.92; EXPRESSED IN HBL100, SIGNAL =   1; EXPRESSED IN LUNG, SIGNAL = 0.99; EXPRESSED IN BRAIN, SIGNAL = 1.2; EXPRESSED IN BT474, SIGNAL = 2.4; EXPRESSED IN BONE MARROW, SIGNAL = 0.82; EXPRESSED IN FETAL LIVER, SIGNAL = 1.1; EXPRESSED IN HELA, SIGNAL = 0.78; EXPRESSED IN ADULT LIVER, SIGNAL = 0.9; EXPRESSED IN HEART, SIGNAL = 0.93; SWISSPROT HIT: P40476, EVALUE 2.60e+00; NT HIT: gi11430509, EVALUE 0.00e+00; EST_HUMAN HIT: AB040367.1, EVALUE 0.00e+00
tactcttcatccccaccaccattagacaatggagcagaggatgatgatgatgatgaatttggggaatttggtgggttttcagaagttagcccttctggtgtagggtttgttgatttcgatacaccagattatactcgtcccaaggaagagtttgtaccttcaaaccattttatgccaattcatgaattctcagaaaatgtagatagccttacaagctttaagtccattaaaaatggtaatgataaggacatcactgctgaactttctgctcctgtgaaaggacagtctgatgttttactttctaccaccagcaaagaaataatttcatctgaaatgttagctacttccattgatggcatggaaagaccaggaaatttaaataaagtagtggagcaga

SEQ ID NO: 17828 - DNA, 159 bp, Homo sapiens
  MAP TO AC008044.3; EXPRESSED IN BT474, SIGNAL = 7.7; EXPRESSED IN HELA, SIGNAL =   3; EXPRESSED IN ADULT LIVER, SIGNAL = 1.8; EXPRESSED IN BRAIN, SIGNAL = 2.4; EXPRESSED IN BONE MARROW, SIGNAL = 2.2; EXPRESSED IN HBL100, SIGNAL =  11; EXPRESSED IN FETAL LIVER, SIGNAL = 6.3; EXPRESSED IN LUNG, SIGNAL = 3.1; EXPRESSED IN PLACENTA, SIGNAL = 2.9; EXPRESSED IN HEART, SIGNAL = 2.3; EST_HUMAN HIT: AV689564.1, EVALUE 2.00e-84; NT HIT: U51432.1, EVALUE 9.00e-85; SWISSPROT HIT: Q13573, EVALUE 8.00e-26
ttggggcggctgctatctgagggtcttttagagccaccatgctgtttggcttcttccaaaaacttgtccaaaccaaaaggatcttcctcaaactgaactggtccttctcggcctctctgtctacggtctgaaccagaaaactccttgtcgggaacaaat

SEQ ID NO: 17829 - DNA, 390 bp, Homo sapiens
  MAP TO AC008044.3; EXPRESSED IN PLACENTA, SIGNAL = 2.8; EXPRESSED IN BONE MARROW, SIGNAL = 3.9; EXPRESSED IN HBL100, SIGNAL = 4.3; EXPRESSED IN LUNG, SIGNAL = 3.1; EXPRESSED IN ADULT LIVER, SIGNAL = 2.6; EXPRESSED IN BRAIN, SIGNAL = 3.5; EXPRESSED IN HEART, SIGNAL = 3.3; EXPRESSED IN BT474, SIGNAL = 4.4; EXPRESSED IN HELA, SIGNAL = 3.3; EXPRESSED IN FETAL LIVER, SIGNAL = 4.2; NT HIT: gi11434913, EVALUE 0.00e+00; EST_HUMAN HIT: AA760913.1, EVALUE 0.00e+00; SWISSPROT HIT: Q9SA98, EVALUE 2.00e-08
ttctggtcatccagatggcagaaaccttctgtactgatgtctcttttttcatcctcgatgggttctagagggaaattctggtctgtggccaggacctgtcggacagtcatgttaacacgagcggtcttcaagtagctggcacacacctgccagtcctccatagaacaaggctctaccattgaatctctcgggaggacagcagggagaggtgcctctaggcagtgaggcaggccttccccttctggatttggaaggacacgagggactgcgtggttcaagaggcggctgaaacccgacattatcatgatgtcaccactgtgcataaacatggccgtgggggcctcatccctttgaagaccacccaggagaaagatggcggactgtccaaag

SEQ ID NO: 17830 - DNA, 188 bp, Homo sapiens
  MAP TO AC008039.1; EXPRESSED IN PLACENTA, SIGNAL = 2.9; EXPRESSED IN HBL100, SIGNAL = 1.9; EXPRESSED IN LUNG, SIGNAL = 2.9; EXPRESSED IN HELA, SIGNAL = 2.4; EXPRESSED IN BT474, SIGNAL =   2; EXPRESSED IN BONE MARROW, SIGNAL = 2.6; EXPRESSED IN FETAL LIVER, SIGNAL = 2.6; EXPRESSED IN ADULT LIVER, SIGNAL = 2.2; EXPRESSED IN BRAIN, SIGNAL = 3.3; EXPRESSED IN HEART, SIGNAL = 2.4; NT HIT: M86524.1, EVALUE 9.40e-02; EST_HUMAN HIT: AA250860.1, EVALUE 1.70e-01; SWISSPROT HIT: P11369, EVALUE 1.00e-04
cccgtgggttggaagatgctatcataaaggtgtcagctcttctcaatttaatctataactttaatacaacacaaatgaaaatttctgtagaattttttgtggaacttggcaagctgattctaatattaatgtggaacaacaaaatgaaaagaagtgctaatataattgtgaagtgtgtgggaagggga

SEQ ID NO: 17831 - DNA, 82 bp, Homo sapiens
  MAP TO AC008038.1; EXPRESSED IN HEART, SIGNAL = 1.6; EXPRESSED IN BONE MARROW, SIGNAL = 1.8; EXPRESSED IN ADULT LIVER, SIGNAL = 2.2; EXPRESSED IN BT474, SIGNAL = 6.6; EXPRESSED IN LUNG, SIGNAL = 2.8; EXPRESSED IN HELA, SIGNAL = 2.7; EXPRESSED IN BRAIN, SIGNAL = 2.4; EXPRESSED IN PLACENTA, SIGNAL = 2.5; EXPRESSED IN HBL100, SIGNAL = 6.7; EXPRESSED IN FETAL LIVER, SIGNAL = 6.8; NT HIT: gi8923389, EVALUE 8.00e-31; EST_HUMAN HIT: BE276001.1, EVALUE 1.00e-30
attctttcttggcttgctccaatgccagctcctcagctactcttcttttcaattcttcatcagaaactagaatcgataaaga

SEQ ID NO: 17832 - DNA, 150 bp, Homo sapiens
  MAP TO AC008009.4; EXPRESSED IN PLACENTA, SIGNAL = 1.4; EXPRESSED IN BT474, SIGNAL =   2; EXPRESSED IN BONE MARROW, SIGNAL = 1.5; EXPRESSED IN HBL100, SIGNAL = 6.9; EXPRESSED IN FETAL LIVER, SIGNAL = 1.5; EXPRESSED IN LUNG, SIGNAL = 1.4; EXPRESSED IN HELA, SIGNAL = 1.3; EXPRESSED IN ADULT LIVER, SIGNAL = 0.96; EXPRESSED IN BRAIN, SIGNAL = 1.4; EXPRESSED IN HEART, SIGNAL = 1.9; SWISSPROT HIT: P51114, EVALUE 3.00e-24; NT HIT: gi11434704, EVALUE 5.00e-65; EST_HUMAN HIT: AU139197.1, EVALUE 7.00e-65
ttttatgtcattgaatatgctgcttgtgacgctacttacaatgaaatagtcacatttgaacgacttcggcctgtcaatcaaaataaaactgtcaaaaaaaataccttctttaaatgcacagtggatgttcctgaggatttgagagaggcg

SEQ ID NO: 17833 - DNA, 101 bp, Homo sapiens
  MAP TO AC008008.2; EXPRESSED IN HELA, SIGNAL = 5.2; EXPRESSED IN ADULT LIVER, SIGNAL = 5.3; EXPRESSED IN BT474, SIGNAL = 5.3; EXPRESSED IN LUNG, SIGNAL = 5.7; EXPRESSED IN HEART, SIGNAL = 4.6; EXPRESSED IN PLACENTA, SIGNAL = 6.2; EXPRESSED IN BONE MARROW, SIGNAL = 6.7; EXPRESSED IN FETAL LIVER, SIGNAL = 4.8; EXPRESSED IN BRAIN, SIGNAL = 5.6; EXPRESSED IN HBL100, SIGNAL = 5.6; EST_HUMAN HIT: AU128564.1, EVALUE 4.00e-50; NT HIT: AF041208.1, EVALUE 3.00e-50
tgcattgagcggtcagcatcactcatctcccaagcggaacactctctgaaggagaatgatcatgcgcgtttcctacagactgctaagaatatcaccgagag

SEQ ID NO: 17834 - DNA, 119 bp, Homo sapiens
  MAP TO AC007969.2; EXPRESSED IN HBL100, SIGNAL = 2.2; EXPRESSED IN ADULT LIVER, SIGNAL = 1.9; EXPRESSED IN BRAIN, SIGNAL = 2.6; EXPRESSED IN HEART, SIGNAL = 1.9; EXPRESSED IN BT474, SIGNAL = 2.1; EXPRESSED IN PLACENTA, SIGNAL = 2.5; EXPRESSED IN HELA, SIGNAL = 2.8; EXPRESSED IN LUNG, SIGNAL = 2.9; EXPRESSED IN FETAL LIVER, SIGNAL = 2.1; EXPRESSED IN BONE MARROW, SIGNAL = 2.5; EST_HUMAN HIT: AU131202.1, EVALUE 2.00e-37; NT HIT: AE001358.1, EVALUE 8.80e-01; SWISSPROT HIT: P26685, EVALUE 6.90e+00
aatatggaaaactcctttctgtttcttcttattaggtgtgacgatgtagtgccaaggatggcctccaatctgaaaagcattctccagggatgacacctcaaagagcagtggtggcatgt

SEQ ID NO: 17835 - DNA, 159 bp, Homo sapiens
  MAP TO AC007969.2; EXPRESSED IN HELA, SIGNAL = 1.1; EXPRESSED IN BRAIN, SIGNAL = 0.77; EXPRESSED IN HEART, SIGNAL = 1.2; EXPRESSED IN BONE MARROW, SIGNAL = 1.5; EXPRESSED IN HBL100, SIGNAL = 1.8; EXPRESSED IN LUNG, SIGNAL = 2.4; EXPRESSED IN FETAL LIVER, SIGNAL = 1.5; SWISSPROT HIT: Q91577, EVALUE 6.90e-02; NT HIT: X72379.1, EVALUE 7.80e-02; EST_HUMAN HIT: R06965.1, EVALUE 1.00e-54
ggacctggaaatgcagcaagctcctgatgaaatccatccatgcagggttaaatgcagttgctgccattcttgcaattatctctgtggtggccgtgtttgagaaccacaatgttaacaatatagccaatatgtacagtctgcacagctgggttggactga

SEQ ID NO: 17836 - DNA, 393 bp, Homo sapiens
  MAP TO AC007969.2; EXPRESSED IN PLACENTA, SIGNAL =   2; EXPRESSED IN BONE MARROW, SIGNAL = 1.9; EXPRESSED IN HELA, SIGNAL =  10; EXPRESSED IN HBL100, SIGNAL = 3.2; EXPRESSED IN ADULT LIVER, SIGNAL = 3.5; EXPRESSED IN BRAIN, SIGNAL = 2.3; EXPRESSED IN BT474, SIGNAL = 4.6; EXPRESSED IN HEART, SIGNAL = 3.6; EXPRESSED IN LUNG, SIGNAL = 2.9; EXPRESSED IN FETAL LIVER, SIGNAL = 4.9; NT HIT: gi4758117, EVALUE 0.00e+00; EST_HUMAN HIT: BE881201.1, EVALUE 0.00e+00; SWISSPROT HIT: P51398, EVALUE 3.00e-64
atactgaatacgactttcaaattcctttgggttatagttggaaaccaggatgggaataaagggatccagggcatcaaatccttcctttaccagcaactcctggagcagataggctttccggggcttaaagagagacccagtctggttcaaagtcaacacaatggcacctccatgccaatcatttttcatcattttcctcaggttgtgaacaagtgctaattcctctggggcaatcgggcatttatcttctcttttcagagcagtccttccccaaagagcattgattccatccacggccaccagcaggtgaaaaacacccaaagaactttgcctctttagctctttcagcacaattccagctgcatctgtggtgttcctcacccgtgttatgcc

SEQ ID NO: 17837 - DNA, 148 bp, Homo sapiens
  MAP TO AC007964.2; EXPRESSED IN BONE MARROW, SIGNAL = 3.9; EXPRESSED IN FETAL LIVER, SIGNAL = 3.1; EXPRESSED IN ADULT LIVER, SIGNAL = 2.5; EXPRESSED IN BRAIN, SIGNAL = 3.7; EXPRESSED IN HEART, SIGNAL = 2.5; EXPRESSED IN PLACENTA, SIGNAL = 3.3; EXPRESSED IN BT474, SIGNAL = 2.6; EXPRESSED IN HBL100, SIGNAL = 2.5; EXPRESSED IN LUNG, SIGNAL = 3.1; EXPRESSED IN HELA, SIGNAL = 3.1; NT HIT: gi6680539, EVALUE 5.20e+00; SWISSPROT HIT: P49327, EVALUE 1.30e+00
attaaatattttccagaggcaggctattgtggcatacttttattatgtaaaggagcagcctgtctggtgtggtctgcagcctctgggctctgctgtcctccatgacacagctttgggagcgttggcgaaggtgcaggaacagattgta

SEQ ID NO: 17838 - DNA, 128 bp, Homo sapiens
  MAP TO AC007964.2; EXPRESSED IN LUNG, SIGNAL = 2.4; EXPRESSED IN HEART, SIGNAL = 2.3; EXPRESSED IN PLACENTA, SIGNAL = 2.5; EXPRESSED IN BT474, SIGNAL = 1.8; EXPRESSED IN BONE MARROW, SIGNAL =   3; EXPRESSED IN HBL100, SIGNAL = 2.5; EXPRESSED IN FETAL LIVER, SIGNAL = 2.4; EXPRESSED IN HELA, SIGNAL = 2.4; EXPRESSED IN BRAIN, SIGNAL = 3.1; EXPRESSED IN ADULT LIVER, SIGNAL = 2.5; SWISSPROT HIT: Q9RDE9, EVALUE 9.20e+00; EST_HUMAN HIT: F08688.1, EVALUE 2.00e-30; NT HIT: AF260225.1, EVALUE 6.00e-30
gtttagtgtagccaccttcatcaatgatcttagctggatgtcctggaaaacttgctgcagcttctacaccagcacttgctgtttcacctttcacttttgtgttatagaggtagtttctctccttaaac

SEQ ID NO: 17839 - DNA, 212 bp, Homo sapiens
  MAP TO AC007949.1; EXPRESSED IN HBL100, SIGNAL = 1.5; EXPRESSED IN FETAL LIVER, SIGNAL = 1.5; EXPRESSED IN LUNG, SIGNAL = 1.6; EXPRESSED IN BRAIN, SIGNAL = 1.3; EXPRESSED IN HEART, SIGNAL = 1.3; EXPRESSED IN PLACENTA, SIGNAL = 1.6; EXPRESSED IN BT474, SIGNAL = 1.4; EXPRESSED IN BONE MARROW, SIGNAL = 1.5; EXPRESSED IN ADULT LIVER, SIGNAL = 1.5; EXPRESSED IN HELA, SIGNAL = 1.6; NT HIT: AL161560.2, EVALUE 1.10e-01; SWISSPROT HIT: O99828, EVALUE 2.60e+00; EST_HUMAN HIT: H89305.1, EVALUE 7.50e-01
  unsure 157
ggcaagttacattgtcagaaataagatcttcactcctatattagacatttttgttcatttcttctatgatatctccatacctgactttgaagtttctgcttccaatataccatatgctcatgtgtttttcaatttctaccagtctgcaacagtttcnattttggttggaattaggcaggtggtacctgaagcccttctacatacatttgttc

SEQ ID NO: 17840 - DNA, 168 bp, Homo sapiens
  MAP TO AC007949.1; EXPRESSED IN BONE MARROW, SIGNAL = 4.7; EXPRESSED IN ADULT LIVER, SIGNAL = 3.1; EXPRESSED IN HEART, SIGNAL = 2.9; EXPRESSED IN LUNG, SIGNAL = 3.9; EXPRESSED IN PLACENTA, SIGNAL = 4.4; EXPRESSED IN BT474, SIGNAL = 3.9; EXPRESSED IN HBL100, SIGNAL = 3.3; EXPRESSED IN FETAL LIVER, SIGNAL = 4.3; EXPRESSED IN HELA, SIGNAL = 2.6; EXPRESSED IN BRAIN, SIGNAL = 3.3; NT HIT: gi11433265, EVALUE 5.00e-90; SWISSPROT HIT: P54797, EVALUE 9.90e-01; EST_HUMAN HIT: AI280412.1, EVALUE 6.00e-74
ttgctcctttggtagaagacaagatgatttgattagttctagtgttccaagcaccacatcaacaccaacagttacctctgcagctgggcttcagaaaagcctgctttccagcacaagcactactacaaagattacaacgggttcttcctcagcaggcacacaaagcag

SEQ ID NO: 17841 - DNA, 160 bp, Homo sapiens
  MAP TO AC007944.1; EXPRESSED IN BONE MARROW, SIGNAL =   1; EXPRESSED IN HEART, SIGNAL = 0.97; EXPRESSED IN PLACENTA, SIGNAL = 0.98; EXPRESSED IN BT474, SIGNAL = 1.2; EXPRESSED IN HBL100, SIGNAL =   1; EXPRESSED IN LUNG, SIGNAL = 1.6; EXPRESSED IN HELA, SIGNAL = 0.86; EXPRESSED IN ADULT LIVER, SIGNAL = 1.4e+02; EXPRESSED IN BRAIN, SIGNAL = 1.6; EXPRESSED IN FETAL LIVER, SIGNAL = 1.3; SWISSPROT HIT: Q9QYC0, EVALUE 2.70e-01; NT HIT: AB025194.1, EVALUE 3.70e-01
  unsure 156
tcaaccgggaccccatctggaggagccgggaagagccctaccattatgggaacaagatggagcagaaccagacccagagccctctgcagctcctcagccagtgcaacatcagaacttcctacagtccaggagggcaaggggctggggcccagcccngaaa

SEQ ID NO: 17842 - DNA, 166 bp, Homo sapiens
  MAP TO AC007944.1; EXPRESSED IN ADULT LIVER, SIGNAL = 0.86; EXPRESSED IN LUNG, SIGNAL = 1.7; EXPRESSED IN HELA, SIGNAL = 2.1; EXPRESSED IN HEART, SIGNAL = 0.94; EXPRESSED IN PLACENTA, SIGNAL = 1.1; EXPRESSED IN BT474, SIGNAL = 1.2; EXPRESSED IN BONE MARROW, SIGNAL = 0.95; EXPRESSED IN FETAL LIVER, SIGNAL = 1.3; EXPRESSED IN BRAIN, SIGNAL = 1.6; EXPRESSED IN HBL100, SIGNAL = 1.3; EST_HUMAN HIT: AA609940.1, EVALUE 2.00e-64; SWISSPROT HIT: Q14031, EVALUE 3.40e-01; NT HIT: X87128.1, EVALUE 9.70e-02
aagaggaggagcaggtggaacaccaatcatactcggcgaagtagggtccccagcggtccccaaaggcattctgcaaagccaggtccgacacagtcctagggcactggccgtacaggtccctccgggaccacatgccccatgctctcctggaagctccgctggcgca

SEQ ID NO: 17843 - DNA, 179 bp, Homo sapiens
  MAP TO AC007939.1; EXPRESSED IN HBL100, SIGNAL = 5.1; EXPRESSED IN BRAIN, SIGNAL = 5.5; EXPRESSED IN HEART, SIGNAL = 4.5; EXPRESSED IN BT474, SIGNAL = 4.7; EXPRESSED IN BONE MARROW, SIGNAL = 6.2; EXPRESSED IN PLACENTA, SIGNAL = 5.6; EXPRESSED IN ADULT LIVER, SIGNAL = 4.7; EXPRESSED IN HELA, SIGNAL = 6.4; EXPRESSED IN LUNG, SIGNAL = 7.7; EXPRESSED IN FETAL LIVER, SIGNAL = 5.6; SWISSPROT HIT: Q9Z7Y5, EVALUE 3.00e+00; EST_HUMAN HIT: BE350127.1, EVALUE 3.00e-33; NT HIT: U93163.1, EVALUE 4.00e-26
gtattccagaagaaggcattgttatcataggagatgacaactccatgtatgttattgcccctgaagactttccagtggaacaagatgtgaaggtggaagacagtaatactaatgatctgaccttctgtaggcctagactgatacgtgtttttgtatcttcatttttgacaaaaaagttt

SEQ ID NO: 17844 - DNA, 99 bp, Homo sapiens
  MAP TO AC007939.1; EXPRESSED IN HBL100, SIGNAL = 1.2; EXPRESSED IN BRAIN, SIGNAL = 1.6; EXPRESSED IN BT474, SIGNAL = 1.2; EXPRESSED IN BONE MARROW, SIGNAL =   1; EXPRESSED IN FETAL LIVER, SIGNAL = 1.3; EXPRESSED IN HELA, SIGNAL = 3.1; EXPRESSED IN ADULT LIVER, SIGNAL = 1.5; EXPRESSED IN HEART, SIGNAL = 1.2; EXPRESSED IN PLACENTA, SIGNAL = 2.1; EXPRESSED IN LUNG, SIGNAL = 1.3; EST_HUMAN HIT: BE735245.1, EVALUE 4.80e+00; NT HIT: M64423.1, EVALUE 8.30e-01
aagtgaaaactcctcccatagagataacaaatgtacttctgcctagtggattcagccattacttgggatctgacgtcactttaactcctgaagttgaag

SEQ ID NO: 17845 - DNA, 163 bp, Homo sapiens
  MAP TO AC007939.1; EXPRESSED IN HEART, SIGNAL = 0.81; EXPRESSED IN BONE MARROW, SIGNAL = 0.99; EXPRESSED IN FETAL LIVER, SIGNAL = 0.87; EXPRESSED IN LUNG, SIGNAL = 0.89; EXPRESSED IN PLACENTA, SIGNAL = 1.5; EXPRESSED IN HELA, SIGNAL = 2.3; EXPRESSED IN ADULT LIVER, SIGNAL = 2.1; EXPRESSED IN BRAIN, SIGNAL = 0.98; EST_HUMAN HIT: T52629.1, EVALUE 1.40e-01; SWISSPROT HIT: P54359, EVALUE 4.40e-01
atttgtagaaaaatgctacatcgccacatgcttatatttcgactgcctaacttacagatgttagatggaagtcctgtgaattcagatgatagggcaaaagctgaatttcacctcgctgaactacaagcaaagaaaaattcggtaataattatattatttacaa

SEQ ID NO: 17846 - DNA, 87 bp, Homo sapiens
  MAP TO AC007939.1; EXPRESSED IN PLACENTA, SIGNAL = 1.4; EXPRESSED IN ADULT LIVER, SIGNAL = 2.4; EXPRESSED IN BRAIN, SIGNAL =   1; EXPRESSED IN HEART, SIGNAL = 0.88; EXPRESSED IN BT474, SIGNAL = 0.64; EXPRESSED IN FETAL LIVER, SIGNAL = 0.84; EXPRESSED IN LUNG, SIGNAL = 0.85; EXPRESSED IN HELA, SIGNAL = 0.79; EXPRESSED IN BONE MARROW, SIGNAL =   1; EST_HUMAN HIT: N53485.1, EVALUE 2.70e-01; NT HIT: AJ009735.1, EVALUE 1.50e-01; SWISSPROT HIT: P27920, EVALUE 7.10e+00
gaccaatttagaaatgtgtgtaatgtgaatctacagaacaatcatcttacctcattcagtggattaatctatctacctaatgtgaag

SEQ ID NO: 17847 - DNA, 222 bp, Homo sapiens
  MAP TO AC007939.1; EXPRESSED IN HBL100, SIGNAL =   2; EXPRESSED IN FETAL LIVER, SIGNAL = 2.2; EXPRESSED IN ADULT LIVER, SIGNAL = 2.3; EXPRESSED IN BRAIN, SIGNAL = 2.6; EXPRESSED IN HEART, SIGNAL = 2.3; EXPRESSED IN BT474, SIGNAL = 1.8; EXPRESSED IN LUNG, SIGNAL = 2.3; EXPRESSED IN PLACENTA, SIGNAL =   2; EXPRESSED IN HELA, SIGNAL = 2.5; EXPRESSED IN BONE MARROW, SIGNAL = 2.4; SWISSPROT HIT: P71311, EVALUE 8.10e+00; EST_HUMAN HIT: AA401570.1, EVALUE 1.00e-38; NT HIT: AF003528.1, EVALUE 2.00e-03
  unsure 25
  unsure 205
tgggtgagaggggtctgggcagtantggcttgctgctcggcaggatattgataagatgctcccatgatgaggtggttctggcccttgttgtggtgggatgtcatcatagtattccttggaactttgcccagcaagatatgatagggatatttcttaggttgggcctttttccgccttgtggtcaggtggttaggcagcatgtttnctcactgcccgaacccc

SEQ ID NO: 17848 - DNA, 175 bp, Homo sapiens
  MAP TO AC007939.1; EXPRESSED IN BONE MARROW, SIGNAL =   2; EXPRESSED IN PLACENTA, SIGNAL = 2.1; EXPRESSED IN BT474, SIGNAL = 1.4; EXPRESSED IN BRAIN, SIGNAL = 1.8; EXPRESSED IN ADULT LIVER, SIGNAL = 1.7; EXPRESSED IN HELA, SIGNAL = 1.4; EXPRESSED IN LUNG, SIGNAL = 1.7; EXPRESSED IN FETAL LIVER, SIGNAL = 1.6; EXPRESSED IN HBL100, SIGNAL = 1.5; EXPRESSED IN HEART, SIGNAL = 1.9; NT HIT: AB019327.1, EVALUE 1.40e+00; EST_HUMAN HIT: AI905481.1, EVALUE 4.10e-01; SWISSPROT HIT: P40456, EVALUE 1.30e+00
tcaagggctcgggcaaagggcacagtgatggatccaataacagtaaagtaactgatcctgaaacactgaagagttgtgaaactgtcactgaagaaccaagtcttcaacagaagatattggccaaactaaatgccttgaatgaaagggtaacattctggaacaaaaaactagatga

SEQ ID NO: 17849 - DNA, 134 bp, Homo sapiens
  MAP TO AC007939.1; EXPRESSED IN HEART, SIGNAL = 2.1; EXPRESSED IN BT474, SIGNAL = 3.4; EXPRESSED IN BONE MARROW, SIGNAL = 3.4; EXPRESSED IN HELA, SIGNAL = 2.7; EXPRESSED IN PLACENTA, SIGNAL = 2.6; EXPRESSED IN HBL100, SIGNAL = 3.3; EXPRESSED IN FETAL LIVER, SIGNAL = 2.2; EXPRESSED IN LUNG, SIGNAL = 2.5; EXPRESSED IN ADULT LIVER, SIGNAL =   2; EXPRESSED IN BRAIN, SIGNAL = 3.8; EST_HUMAN HIT: AI865788.1, EVALUE 1.00e-03; SWISSPROT HIT: Q24314, EVALUE 5.20e+00
tgtattataatatgcgtataaaaactcttcagaggcatcttaaagaagaccttgaaaaactgaatgatcaaaaatgcaaattacaaaagttgccagaagaacgagtaaaattattcagctttgtgaagaaaact

SEQ ID NO: 17850 - DNA, 537 bp, Homo sapiens
  MAP TO AC007939.1; EXPRESSED IN ADULT LIVER, SIGNAL = 2.3; EXPRESSED IN BRAIN, SIGNAL = 2.2; EXPRESSED IN HEART, SIGNAL = 3.6; EXPRESSED IN BONE MARROW, SIGNAL = 2.6; EXPRESSED IN HBL100, SIGNAL = 5.8; EXPRESSED IN FETAL LIVER, SIGNAL = 2.9; EXPRESSED IN LUNG, SIGNAL =   2; EXPRESSED IN PLACENTA, SIGNAL = 1.9; EXPRESSED IN BT474, SIGNAL = 2.7; EXPRESSED IN HELA, SIGNAL = 2.5; EST_HUMAN HIT: BE005208.1, EVALUE 0.00e+00; SWISSPROT HIT: P08432, EVALUE 7.80e-02; NT HIT: AB023476.1, EVALUE 7.30e-02
  unsure 46
  unsure 490
aattgcaggaaacatcctgtcatactgcagaagctcgcagagttgnatgaagtttttgaagatgcttttgagcaagaatacacaagagtatgttcccttaatgaacactttggaaatgtcttgacaccctgtactgttttgcctgtgaaattgtattctgatgccaggaatgttctatcaggcataattgattctcatgaaaacttaaaagaatttaaaggtgacctcattaaagtacttgtgtggatacttgttcaatactgctccaaaaggcctggcatgaaagagaatgttcacaacactgaaaataaagggaaagcacctctaatgttgcctgctttgaacactttgccacctcccaaatccccagaagacatagacagtttaaattcagaaacttttaatgactggtctgatgataatatttttgatgatgagccaactatcaaaaaagtaatagaagaaaaacatcagttgaaagatttgccanggtacaaatttgtttattccaggatcagtagaatcacagagggttgg

SEQ ID NO: 17851 - DNA, 280 bp, Homo sapiens
  MAP TO AC007935.1; EXPRESSED IN HBL100, SIGNAL = 1.8; EXPRESSED IN ADULT LIVER, SIGNAL = 1.8; EXPRESSED IN BRAIN, SIGNAL = 2.7; EXPRESSED IN BT474, SIGNAL = 2.3; EXPRESSED IN HEART, SIGNAL = 1.9; EXPRESSED IN FETAL LIVER, SIGNAL = 2.3; EXPRESSED IN PLACENTA, SIGNAL = 2.7; EXPRESSED IN HELA, SIGNAL = 2.3; EXPRESSED IN LUNG, SIGNAL = 3.1; EXPRESSED IN BONE MARROW, SIGNAL = 2.6; EST_HUMAN HIT: BE939111.1, EVALUE 1.00e+00; NT HIT: AF129756.1, EVALUE 6.80e-01; SWISSPROT HIT: Q92620, EVALUE 6.90e-01
agtgaggaaagggatcacccctttctcccccggtctcctcacagccagggtttgcagttgtcctttcttgattgtcactatcctcgtgaggttctccgtccctgctcttgtaggaacgctgctccttgccattgcctaccctgatgcctcacattcatatgccttggaaacaggcttggggatcacatacactgtgctcatgtctctgtctctctgtcaagtgactctgtctccaggacacgtcagagacccaggccctcaggaggcatcagtctttgag

SEQ ID NO: 17852 - DNA, 110 bp, Homo sapiens
  MAP TO AC007935.1; EXPRESSED IN BONE MARROW, SIGNAL = 1.2; EXPRESSED IN HBL100, SIGNAL =   1; EXPRESSED IN BRAIN, SIGNAL = 1.3; EXPRESSED IN HEART, SIGNAL = 1.3; EXPRESSED IN BT474, SIGNAL = 1.3; EXPRESSED IN HELA, SIGNAL = 1.1; EXPRESSED IN PLACENTA, SIGNAL = 2.4; EXPRESSED IN FETAL LIVER, SIGNAL = 1.1; EXPRESSED IN LUNG, SIGNAL = 2.8; EXPRESSED IN ADULT LIVER, SIGNAL =   1; EST_HUMAN HIT: AU119344.1, EVALUE 4.00e-41; NT HIT: gi11419075, EVALUE 2.40e-01; SWISSPROT HIT: P48826, EVALUE 4.00e+00
aagtacagacacgtggaaattgagtcctaagtctttaagatgcattaataccttaaaaaagctttctggatctttatcatgctccctggaaataaacacacaaaatataa

SEQ ID NO: 17853 - DNA, 124 bp, Homo sapiens
  MAP TO AC007935.1; EXPRESSED IN BONE MARROW, SIGNAL = 1.9; EXPRESSED IN HBL100, SIGNAL = 2.3; EXPRESSED IN ADULT LIVER, SIGNAL = 2.8; EXPRESSED IN BRAIN, SIGNAL = 2.2; EXPRESSED IN PLACENTA, SIGNAL = 8.4; EXPRESSED IN BT474, SIGNAL = 1.3; EXPRESSED IN FETAL LIVER, SIGNAL = 2.4; EXPRESSED IN LUNG, SIGNAL = 2.7; EXPRESSED IN HELA, SIGNAL = 4.2; EXPRESSED IN HEART, SIGNAL = 1.9; SWISSPROT HIT: Q08999, EVALUE 6.80e+00; NT HIT: L27669.1, EVALUE 2.80e-01; EST_HUMAN HIT: AU119344.1, EVALUE 9.00e-61
  unsure 1
nggcattgggatcttctgtcttacactggggctacttacccagcaaagatgactatttccaagtactgtgcatggctgatgttgtcatctcaacagctaagcatgaattctttggagtggcaat

SEQ ID NO: 17854 - DNA, 141 bp, Homo sapiens
  MAP TO AC007914.1; EXPRESSED IN HEART, SIGNAL =   4; EXPRESSED IN BT474, SIGNAL = 3.4; EXPRESSED IN BONE MARROW, SIGNAL = 6.2; EXPRESSED IN HBL100, SIGNAL = 4.3; EXPRESSED IN FETAL LIVER, SIGNAL = 4.4; EXPRESSED IN LUNG, SIGNAL = 5.2; EXPRESSED IN HELA, SIGNAL = 6.5; EXPRESSED IN BRAIN, SIGNAL = 6.1; EXPRESSED IN PLACENTA, SIGNAL =  13; EXPRESSED IN ADULT LIVER, SIGNAL = 4.7; SWISSPROT HIT: P98082, EVALUE 5.00e-21; NT HIT: AF188298.1, EVALUE 1.00e-71; EST_HUMAN HIT: BE818858.1, EVALUE 2.00e-71
tgggacaggagcacttgttttgaagagatccagagggttgggctgcagggctgtaggttgtcctgtgggtgacgcctggcctgaaggttctgagacgggaggagcaaagatgtctgatgcaagcaagtcattggctgaaga

SEQ ID NO: 17855 - DNA, 96 bp, Homo sapiens
  MAP TO AC007914.1; EXPRESSED IN BT474, SIGNAL = 1.1; EXPRESSED IN BONE MARROW, SIGNAL = 1.3; EXPRESSED IN HBL100, SIGNAL = 1.1; EXPRESSED IN LUNG, SIGNAL =   1; EXPRESSED IN HELA, SIGNAL = 1.6; EXPRESSED IN ADULT LIVER, SIGNAL =  12; EXPRESSED IN HEART, SIGNAL = 1.1; EXPRESSED IN PLACENTA, SIGNAL = 1.7; EXPRESSED IN FETAL LIVER, SIGNAL = 2.1; EXPRESSED IN BRAIN, SIGNAL = 1.2; NT HIT: AJ251818.1, EVALUE 1.00e-42; EST_HUMAN HIT: AV661851.1, EVALUE 2.00e-27; SWISSPROT HIT: P02748, EVALUE 2.00e-03
  unsure 72
ggatgcttatttctaaaatgcagattgcaactgcaaagctccggcaggctgacatgctgctcttgctgggtnggctgcgagtggggtggcagggca

SEQ ID NO: 17856 - DNA, 181 bp, Homo sapiens
  MAP TO AC007914.1; EXPRESSED IN LUNG, SIGNAL = 0.89; EXPRESSED IN HELA, SIGNAL = 1.6; EXPRESSED IN ADULT LIVER, SIGNAL = 0.97; EXPRESSED IN BRAIN, SIGNAL =   2; EXPRESSED IN HEART, SIGNAL = 1.2; EXPRESSED IN PLACENTA, SIGNAL = 0.76; EXPRESSED IN BT474, SIGNAL = 0.99; EXPRESSED IN BONE MARROW, SIGNAL = 1.5; EXPRESSED IN HBL100, SIGNAL = 1.4; EXPRESSED IN FETAL LIVER, SIGNAL = 1.2; SWISSPROT HIT: Q14684, EVALUE 1.90e-01; EST_HUMAN HIT: AA321662.1, EVALUE 4.00e-02; NT HIT: AL163282.2, EVALUE 1.00e-07
aagcaaacacctataatagacacagaaaacataaaagcaaagaattaaagcatatcagtacagaaaattatctaatcacaaaggaagatagcaagagagaaagaaatagccagaaagaacatacaaaacaaccagaaaacaatgaaaaaaatggcagtggtaagtccttacctaccgataa

SEQ ID NO: 17857 - DNA, 126 bp, Homo sapiens
  MAP TO AC007914.1; EXPRESSED IN BT474, SIGNAL = 1.2; EXPRESSED IN HBL100, SIGNAL = 2.1; EXPRESSED IN FETAL LIVER, SIGNAL = 1.5; EXPRESSED IN LUNG, SIGNAL = 1.3; EXPRESSED IN HELA, SIGNAL = 0.85; EXPRESSED IN BRAIN, SIGNAL = 1.1; EXPRESSED IN PLACENTA, SIGNAL = 1.5; EXPRESSED IN BONE MARROW, SIGNAL = 1.3; EXPRESSED IN ADULT LIVER, SIGNAL =   1; EXPRESSED IN HEART, SIGNAL = 2.4; EST_HUMAN HIT: AV705243.1, EVALUE 4.10e-01; NT HIT: gi6671685, EVALUE 9.40e-01
ctatcatcatcatcatcatcatcatcatcatcatcatcatcatcatcatcatcatcacgtcatcaccatcattggatgaggaaacaaacccaaagcttaagtgacttatggaaaacaagtagtaag

SEQ ID NO: 17858 - DNA, 90 bp, Homo sapiens
  MAP TO AC007914.1; EXPRESSED IN FETAL LIVER, SIGNAL =  10; EXPRESSED IN ADULT LIVER, SIGNAL =   6; EXPRESSED IN PLACENTA, SIGNAL = 5.6; EXPRESSED IN BT474, SIGNAL = 7.6; EXPRESSED IN BONE MARROW, SIGNAL = 9.8; EXPRESSED IN HBL100, SIGNAL =  12; EXPRESSED IN LUNG, SIGNAL = 7.9; EXPRESSED IN HELA, SIGNAL =  13; EXPRESSED IN BRAIN, SIGNAL =  13; EXPRESSED IN HEART, SIGNAL = 9.3; EST_HUMAN HIT: AA358813.1, EVALUE 1.90e-01; NT HIT: gi11419012, EVALUE 7.40e-01
  unsure 27
attggacaagggggctgcgatagctcntctgctgcttagccagtttttatccttggccaaattgcttgacctgagtttcaatgttgtcat

SEQ ID NO: 17859 - DNA, 143 bp, Homo sapiens
  MAP TO AC007899.2; EXPRESSED IN PLACENTA, SIGNAL = 2.5; EXPRESSED IN BT474, SIGNAL =   2; EXPRESSED IN LUNG, SIGNAL = 1.5; EXPRESSED IN HELA, SIGNAL = 1.7; EXPRESSED IN HBL100, SIGNAL = 2.1; EXPRESSED IN FETAL LIVER, SIGNAL = 1.6; EXPRESSED IN ADULT LIVER, SIGNAL = 1.3; EXPRESSED IN BRAIN, SIGNAL = 1.8; EXPRESSED IN BONE MARROW, SIGNAL = 1.3; EXPRESSED IN HEART, SIGNAL = 1.7; NT HIT: AF167460.1, EVALUE 2.00e-67; EST_HUMAN HIT: AI368949.1, EVALUE 3.00e-48; SWISSPROT HIT: Q13489, EVALUE 5.10e+00
aaagtccaacaaagcaacgaaaaatgataacactggaagtgaaatttgaatcaaacataaatggatttgtagaagaagtcactgatcatgggaatgttcttcctgctgtgcattcataggagcttagtgaaggcaaacttatc

SEQ ID NO: 17860 - DNA, 164 bp, Homo sapiens
  MAP TO AC007899.2; EXPRESSED IN BT474, SIGNAL =   6; EXPRESSED IN BONE MARROW, SIGNAL = 6.5; EXPRESSED IN HBL100, SIGNAL = 6.3; EXPRESSED IN FETAL LIVER, SIGNAL = 8.8; EXPRESSED IN HELA, SIGNAL = 7.2; EXPRESSED IN ADULT LIVER, SIGNAL = 6.7; EXPRESSED IN BRAIN, SIGNAL =  10; EXPRESSED IN HEART, SIGNAL = 7.4; EXPRESSED IN PLACENTA, SIGNAL = 8.5; EXPRESSED IN LUNG, SIGNAL = 8.8; SWISSPROT HIT: P19525, EVALUE 2.00e-26; EST_HUMAN HIT: BE549745.1, EVALUE 2.00e-84; NT HIT: AF167465.1, EVALUE 9.00e-88
cttgaactatttttgctgttctcaggatcataatcactgctctcaagagaatcatcactggtctcaggatcataatcaaatccatcccaacagccattgtagtgaacaatatttacatgatcaagttttgccaatgcttttacttcacgctccgccttcctagt

SEQ ID NO: 17861 - DNA, 145 bp, Homo sapiens
  MAP TO AC007899.2; EXPRESSED IN BONE MARROW, SIGNAL = 1.9; EXPRESSED IN LUNG, SIGNAL = 1.3; EXPRESSED IN HEART, SIGNAL = 1.3; EXPRESSED IN PLACENTA, SIGNAL = 1.1; EXPRESSED IN BT474, SIGNAL = 1.1; EXPRESSED IN HBL100, SIGNAL = 1.1; EXPRESSED IN FETAL LIVER, SIGNAL = 1.3; EXPRESSED IN HELA, SIGNAL = 1.4; EXPRESSED IN ADULT LIVER, SIGNAL = 2.7; EXPRESSED IN BRAIN, SIGNAL = 1.6; EST_HUMAN HIT: AV714334.1, EVALUE 7.00e-62; NT HIT: AB010711.1, EVALUE 7.10e-02; SWISSPROT HIT: Q03410, EVALUE 7.70e-01
ggaaaagtggcattggtcatgaggcatcattaaaacggaaagcagaggaaaaattggaaagctacagaaaaaagattcacatgaaaaaccaagctgaagaaaaagctgcagaacagtttcggtaaaactatttttgagctggttt

SEQ ID NO: 17862 - DNA, 226 bp, Homo sapiens
  MAP TO AC007899.2; EXPRESSED IN BRAIN, SIGNAL = 2.2; EXPRESSED IN ADULT LIVER, SIGNAL = 2.2; EXPRESSED IN HEART, SIGNAL = 1.9; EXPRESSED IN PLACENTA, SIGNAL = 1.7; EXPRESSED IN BT474, SIGNAL = 2.9; EXPRESSED IN HBL100, SIGNAL = 1.6; EXPRESSED IN FETAL LIVER, SIGNAL = 2.1; EXPRESSED IN HELA, SIGNAL = 2.1; EXPRESSED IN BONE MARROW, SIGNAL = 2.4; EXPRESSED IN LUNG, SIGNAL = 1.9; SWISSPROT HIT: Q46941, EVALUE 1.70e+00; NT HIT: AF061282.1, EVALUE 2.10e+00
tagcttggcagatttctttggcagctgcaatctgggctttttcacctagcaaactgcccacagtagctcttaggataaaggaaacacatcgtctggagtacacagcctccacatgtgtttgtgttgcccgaggatgggaaaccagatcaagtacatgggacaggaacgtggcaaagctgcgctccaaccactgaccacccaatgttgtcacaaaaacaacatacgc

SEQ ID NO: 17863 - DNA, 116 bp, Homo sapiens
  MAP TO AC007899.2; EXPRESSED IN PLACENTA, SIGNAL = 1.4; EXPRESSED IN HBL100, SIGNAL = 1.7; EXPRESSED IN FETAL LIVER, SIGNAL = 2.3; EXPRESSED IN HELA, SIGNAL = 5.1; EXPRESSED IN BRAIN, SIGNAL =   2; EXPRESSED IN HEART, SIGNAL = 2.5; EXPRESSED IN BT474, SIGNAL = 2.3; EXPRESSED IN BONE MARROW, SIGNAL = 1.1; EXPRESSED IN LUNG, SIGNAL = 1.6; EXPRESSED IN ADULT LIVER, SIGNAL = 1.5; EST_HUMAN HIT: AU149590.1, EVALUE 2.00e-09; NT HIT: gi11430542, EVALUE 1.00e-09
ctgaacgtgatgactggctacacaacagagatgcaaaaagtatcatcaagaaaaagaaacattttaaaaagaagaggattaaaaccactcaaaaaactaaaaaacaaaggaaatga

SEQ ID NO: 17864 - DNA, 169 bp, Homo sapiens
  MAP TO AC007879.2; EXPRESSED IN LUNG, SIGNAL = 3.7; EXPRESSED IN PLACENTA, SIGNAL = 2.2; EXPRESSED IN BT474, SIGNAL =   5; EXPRESSED IN BONE MARROW, SIGNAL = 2.2; EXPRESSED IN HBL100, SIGNAL =   3; EXPRESSED IN FETAL LIVER, SIGNAL =   3; EXPRESSED IN HELA, SIGNAL = 1.5; EXPRESSED IN ADULT LIVER, SIGNAL = 1.8; EXPRESSED IN BRAIN, SIGNAL = 2.5; EXPRESSED IN HEART, SIGNAL = 2.4; NT HIT: gi11428894, EVALUE 1.00e-90; EST_HUMAN HIT: BE350177.1, EVALUE 4.00e-01; SWISSPROT HIT: O75840, EVALUE 7.00e-16
gctcaacgcagtgacctcattaacgcccccatcgtcccctgagctcagccgccatctggtcaaaacctcacaaactctctctgccgtggatggcacggtgacgttgaaactggtggccaagaaggctgctctcagctccgtaaaggtgggaggggtcgcaacagctgca

SEQ ID NO: 17865 - DNA, 108 bp, Homo sapiens
  MAP TO AC007875.2; EXPRESSED IN PLACENTA, SIGNAL = 2.5; EXPRESSED IN FETAL LIVER, SIGNAL = 2.9; EXPRESSED IN HBL100, SIGNAL = 3.1; EXPRESSED IN HELA, SIGNAL = 3.8; EXPRESSED IN ADULT LIVER, SIGNAL = 2.2; EXPRESSED IN BT474, SIGNAL =   3; EXPRESSED IN BONE MARROW, SIGNAL = 3.9; EXPRESSED IN LUNG, SIGNAL = 2.7; EXPRESSED IN BRAIN, SIGNAL = 3.4; EXPRESSED IN HEART, SIGNAL =   2; SWISSPROT HIT: Q20765, EVALUE 9.40e+00; EST_HUMAN HIT: AA516335.1, EVALUE 2.00e-20; NT HIT: AF135446.1, EVALUE 6.00e-17
gtcacagccaccccaaccttcagcaaccaccaccctaatcagtcagcagccatcaacatcagcaagaccttcctccaggataaagattatgactcgctgaaggttcag

SEQ ID NO: 17866 - DNA, 151 bp, Homo sapiens
  MAP TO AC007875.2; EXPRESSED IN HBL100, SIGNAL = 1.2; EXPRESSED IN FETAL LIVER, SIGNAL = 0.91; EXPRESSED IN ADULT LIVER, SIGNAL =   1; EXPRESSED IN BRAIN, SIGNAL = 1.1; EXPRESSED IN HEART, SIGNAL = 1.4; EXPRESSED IN BT474, SIGNAL = 0.99; EXPRESSED IN PLACENTA, SIGNAL = 1.5; EXPRESSED IN HELA, SIGNAL = 1.6; EXPRESSED IN LUNG, SIGNAL = 1.3; EXPRESSED IN BONE MARROW, SIGNAL =   1; NT HIT: AJ010457.1, EVALUE 5.00e-03; SWISSPROT HIT: Q60654, EVALUE 5.90e-01
cactctcttccatctcctgccttctcttctcctctccaactcccacatgattcccttgatctccccaggtcttccctccacagtaccatcctaaattctgactcatttgctcccttgccaattcctccagcaacacctttcctttccccat

SEQ ID NO: 17867 - DNA, 85 bp, Homo sapiens
  MAP TO AC007875.2; EXPRESSED IN PLACENTA, SIGNAL = 1.8; EXPRESSED IN BT474, SIGNAL = 1.5; EXPRESSED IN FETAL LIVER, SIGNAL = 1.6; EXPRESSED IN LUNG, SIGNAL = 1.5; EXPRESSED IN HELA, SIGNAL = 1.4; EXPRESSED IN ADULT LIVER, SIGNAL = 1.5; EXPRESSED IN BONE MARROW, SIGNAL = 1.6; EXPRESSED IN HBL100, SIGNAL = 2.7; EXPRESSED IN BRAIN, SIGNAL = 1.4; EXPRESSED IN HEART, SIGNAL = 1.8; NT HIT: L36125.1, EVALUE 1.50e-01; EST_HUMAN HIT: BE086857.1, EVALUE 7.00e-01
ggttcaaagctgagagaaagcttcaagccagagttgttcatgcttactctcagcagccaaagggtcagcatgcccaggaatggtg

SEQ ID NO: 17868 - DNA, 156 bp, Homo sapiens
  MAP TO AC007869.1; EXPRESSED IN HBL100, SIGNAL = 3.1; EXPRESSED IN BRAIN, SIGNAL = 4.7; EXPRESSED IN PLACENTA, SIGNAL = 3.8; EXPRESSED IN BT474, SIGNAL = 3.4; EXPRESSED IN BONE MARROW, SIGNAL = 4.2; EXPRESSED IN FETAL LIVER, SIGNAL =   4; EXPRESSED IN LUNG, SIGNAL = 4.8; EXPRESSED IN HELA, SIGNAL = 3.9; EXPRESSED IN ADULT LIVER, SIGNAL = 3.6; EXPRESSED IN HEART, SIGNAL = 3.9; NT HIT: AB023185.1, EVALUE 3.60e-01; EST_HUMAN HIT: AW013847.1, EVALUE 1.00e-04; SWISSPROT HIT: Q90718, EVALUE 6.60e+00
acgcccagcatccccagcttctccatcaccggaatccctggctttccccagacgatctctaaagcccccttggtctgcgggatgaacgtggcttcccagtcaggcccagttccaaactcgatgtggttgcttgtgccctgtgtgaccttgggcaag

SEQ ID NO: 17869 - DNA, 108 bp, Homo sapiens
  MAP TO AC007869.1; EXPRESSED IN ADULT LIVER, SIGNAL = 1.8; EXPRESSED IN BRAIN, SIGNAL = 1.8; EXPRESSED IN PLACENTA, SIGNAL = 1.5; EXPRESSED IN BONE MARROW, SIGNAL = 1.7; EXPRESSED IN HEART, SIGNAL = 1.4; EXPRESSED IN BT474, SIGNAL = 2.4; EXPRESSED IN HBL100, SIGNAL = 1.2; EXPRESSED IN FETAL LIVER, SIGNAL = 1.3; EXPRESSED IN LUNG, SIGNAL = 1.4; EXPRESSED IN HELA, SIGNAL = 1.5; EST_HUMAN HIT: AI653149.1, EVALUE 1.00e-03; NT HIT: AF058795.1, EVALUE 1.50e-02; SWISSPROT HIT: P34692, EVALUE 9.10e+00
atggagaccacatcaagcttgaggagagatttgggttcaagtcctaagctccacttcatgaccttgggcaagtcaccagatctctcagagcctcatcagcataaccag

SEQ ID NO: 17870 - DNA, 129 bp, Homo sapiens
  MAP TO AC007869.1; EXPRESSED IN FETAL LIVER, SIGNAL = 3.2; EXPRESSED IN LUNG, SIGNAL = 4.3; EXPRESSED IN HEART, SIGNAL = 2.6; EXPRESSED IN BONE MARROW, SIGNAL = 4.4; EXPRESSED IN PLACENTA, SIGNAL = 3.5; EXPRESSED IN BRAIN, SIGNAL = 3.5; EXPRESSED IN ADULT LIVER, SIGNAL = 2.9; EXPRESSED IN HELA, SIGNAL = 3.3; EXPRESSED IN HBL100, SIGNAL = 2.6; EXPRESSED IN BT474, SIGNAL = 2.8; SWISSPROT HIT: P33719, EVALUE 6.80e+00; EST_HUMAN HIT: AV731712.1, EVALUE 7.00e-03; NT HIT: AJ297357.1, EVALUE 9.70e-01
cggccagatgacaaggaccccgttgctggcaataggtgggctattgctagtaatggtagaactaggggagtggttctcaaagcgtggtccccatgcccacagcagcatctcttaggaacttgttacaaa

SEQ ID NO: 17871 - DNA, 318 bp, Homo sapiens
  MAP TO AC007869.1; EXPRESSED IN HELA, SIGNAL = 2.1; EXPRESSED IN BT474, SIGNAL = 5.6; EXPRESSED IN FETAL LIVER, SIGNAL = 5.8; EXPRESSED IN LUNG, SIGNAL = 2.8; EXPRESSED IN PLACENTA, SIGNAL = 1.9; EXPRESSED IN BONE MARROW, SIGNAL = 1.9; EXPRESSED IN HBL100, SIGNAL = 3.8; EXPRESSED IN ADULT LIVER, SIGNAL = 1.6; EXPRESSED IN BRAIN, SIGNAL = 2.8; EXPRESSED IN HEART, SIGNAL =   2; NT HIT: M10976.1, EVALUE 1.00e-102; EST_HUMAN HIT: BE086814.1, EVALUE 1.00e-42; SWISSPROT HIT: P21414, EVALUE 3.00e-27
tcactggtgtcctctgcaatgcataactgccaccttgtggggcttccataccacttctaataattgcaagatttcttgttgaaattttatgtcttttcccccagagttcaatcggcccttttctttatataatgctccatgcacttgaaggaaggcatactgagaatcagtgtaagtgtttacagtcttaccttcactgagttctaaggctggaattaaagcaatgagttcagatttctgggctgaagtgccctggggcaacgatctggcttcgacaacagtgtccagggttgtaactgcataccctgcacatctctc

SEQ ID NO: 17872 - DNA, 119 bp, Homo sapiens
  MAP TO AC007869.1; EXPRESSED IN BONE MARROW, SIGNAL = 5.4; EXPRESSED IN ADULT LIVER, SIGNAL = 3.2; EXPRESSED IN BRAIN, SIGNAL = 4.4; EXPRESSED IN PLACENTA, SIGNAL = 3.8; EXPRESSED IN BT474, SIGNAL = 3.4; EXPRESSED IN HBL100, SIGNAL = 3.5; EXPRESSED IN FETAL LIVER, SIGNAL = 4.2; EXPRESSED IN LUNG, SIGNAL = 4.4; EXPRESSED IN HELA, SIGNAL = 3.6; EXPRESSED IN HEART, SIGNAL = 3.6; NT HIT: gi11425354, EVALUE 1.70e-02; EST_HUMAN HIT: N56943.1, EVALUE 9.80e-02; SWISSPROT HIT: P22736, EVALUE 4.00e+00
gccactggcagggagagacatccatggggcctccagagggcctgagagccacagagcaagtggaggaggaggcaggtccaagacagctcatctccaagttcatgttcagtcctcattaa

SEQ ID NO: 17873 - DNA, 766 bp, Homo sapiens
  MAP TO AC007869.1; EXPRESSED IN PLACENTA, SIGNAL = 3.8; EXPRESSED IN FETAL LIVER, SIGNAL = 4.2; EXPRESSED IN ADULT LIVER, SIGNAL = 4.2; EXPRESSED IN BRAIN, SIGNAL =   6; EXPRESSED IN BT474, SIGNAL = 5.2; EXPRESSED IN HEART, SIGNAL = 3.8; EXPRESSED IN HELA, SIGNAL = 4.3; EXPRESSED IN LUNG, SIGNAL = 5.1; EXPRESSED IN HBL100, SIGNAL = 4.3; EXPRESSED IN BONE MARROW, SIGNAL = 5.5; SWISSPROT HIT: P34410, EVALUE 2.00e-11; NT HIT: gi11426906, EVALUE 0.00e+00; EST_HUMAN HIT: BE378534.1, EVALUE 7.00e-38
ggcgatgggaagaggctgttttttaatgtgcttggtgagatctcctcgatcttgtaagagatggagtggaagtagtggggggcaagcttggcgctgaaggagttctgcggtgccaccgagcggccgccatagtcctgcgagcggtagcaggtgcaggagcacacagactgcaggtccgggacgtccgccttgtacctgggccggctgggccgcggctcctcagggatgtgaatgaccatgctgttgcggtttccggcgagggatgccctctcttcagcatcccgccgctcatcctcactgttcatggtcaagaacctgaggacgaccaggttgaggaaggccccgatgaccgtcagccccaccaggatatacataaagctaaaggccacgtagagcggcttcttctgcagggcacccttggtctgcagggccacgtagtccccgaacccaatggtagtcaacgtgatgaagcagtagtagtaggcgtggaagaagctccactcctcacactgggagaaggcggccgccccgatgcacagcgtccccatgcaggagaagaagcccacagtcaccatgttctccatagacacgtcagtgttgcgcatgccacagcacttcttaatgcgcttcagcaggtagcgcacgaaggtgttcatgcgctcgcccaggctctggaacatgaccagtgtcagcgggatgcccagcacggcgtagaacatgcagaaggccttgcccgcatcggtgccaggtgcagcgtgcccataac

SEQ ID NO: 17874 - DNA, 178 bp, Homo sapiens
  MAP TO AC007859.1; EXPRESSED IN HBL100, SIGNAL = 3.4; EXPRESSED IN HELA, SIGNAL = 4.7; EXPRESSED IN ADULT LIVER, SIGNAL = 2.6; EXPRESSED IN BRAIN, SIGNAL = 2.8; EXPRESSED IN PLACENTA, SIGNAL = 2.8; EXPRESSED IN BT474, SIGNAL =   3; EXPRESSED IN BONE MARROW, SIGNAL = 3.1; EXPRESSED IN LUNG, SIGNAL = 3.6; EXPRESSED IN FETAL LIVER, SIGNAL = 3.8; EXPRESSED IN HEART, SIGNAL = 2.8; NT HIT: AF142647.1, EVALUE 6.40e+00; SWISSPROT HIT: Q12697, EVALUE 1.50e-01; EST_HUMAN HIT: BF516149.1, EVALUE 3.90e-02
  unsure 137
  unsure 161
agtgattcaaagagacaccaaaggaatccaaactgccagtctgaacctgggaagttgaagatgaagaacactccaggatttaggggaagcataagagtggaatgtgaatcatttgcttgaggggcttgccttgtccncttctcgtaagactttgtgtcttngcttgtagttacttttc

SEQ ID NO: 17875 - DNA, 111 bp, Homo sapiens
  MAP TO AC007859.1; EXPRESSED IN BT474, SIGNAL =  10; EXPRESSED IN HELA, SIGNAL = 9.3; EXPRESSED IN BRAIN, SIGNAL = 6.4; EXPRESSED IN PLACENTA, SIGNAL = 5.4; EXPRESSED IN HBL100, SIGNAL =  15; EXPRESSED IN FETAL LIVER, SIGNAL =  12; EXPRESSED IN LUNG, SIGNAL = 5.2; EXPRESSED IN ADULT LIVER, SIGNAL = 7.2; EXPRESSED IN BONE MARROW, SIGNAL = 9.8; EXPRESSED IN HEART, SIGNAL = 9.5; NT HIT: AE002156.1, EVALUE 9.60e-01; EST_HUMAN HIT: T89837.1, EVALUE 2.50e-01
atggagggtgcagttgaaagccagccatcattttttaaaacttctcaggacattgtaacatgcacttgggttgagaactgctactcgagctcctccaggaggcccttggag

SEQ ID NO: 17876 - DNA, 189 bp, Homo sapiens
  MAP TO AC007785.1; EXPRESSED IN ADULT LIVER, SIGNAL = 4.2; EXPRESSED IN BRAIN, SIGNAL = 2.4; EXPRESSED IN HEART, SIGNAL = 2.6; EXPRESSED IN PLACENTA, SIGNAL = 3.7; EXPRESSED IN BT474, SIGNAL = 3.5; EXPRESSED IN BONE MARROW, SIGNAL = 5.2; EXPRESSED IN FETAL LIVER, SIGNAL = 4.6; EXPRESSED IN HELA, SIGNAL = 4.8; EXPRESSED IN HBL100, SIGNAL =   4; EXPRESSED IN LUNG, SIGNAL = 3.9; SWISSPROT HIT: Q07929, EVALUE 8.40e+00; NT HIT: AF109907.1, EVALUE 6.00e-74; EST_HUMAN HIT: AW812488.1, EVALUE 1.00e-56
cttgactatgcctttagctccagccacctctttgagaggaaattgttgggcaggtggcggagggctagttgcggtacaaaactgtaagccagaccaggtgtgaggaggggaggtgatagaaggattatagggtgggggagtggaggccgaggaagaattgggacctggctcagcctggcgaggagcagc

SEQ ID NO: 17877 - DNA, 112 bp, Homo sapiens
  MAP TO AC007784.7; EXPRESSED IN HBL100, SIGNAL = 2.2; EXPRESSED IN ADULT LIVER, SIGNAL = 2.6; EXPRESSED IN HEART, SIGNAL = 2.2; EXPRESSED IN BONE MARROW, SIGNAL = 2.4; EXPRESSED IN LUNG, SIGNAL = 2.9; EXPRESSED IN HELA, SIGNAL = 3.4; EXPRESSED IN BRAIN, SIGNAL = 2.8; EXPRESSED IN PLACENTA, SIGNAL = 2.4; EXPRESSED IN BT474, SIGNAL = 2.2; EXPRESSED IN FETAL LIVER, SIGNAL = 2.4; NT HIT: AE002314.2, EVALUE 2.10e-01; SWISSPROT HIT: P48351, EVALUE 5.30e+00
aataaaagcacgaagagggcacaggtgacgcacaagaaaagaaatgccaaattctgtgaaggtgggagtcaggaaagtgtgcacagaagaaacgccatgaattctcctataa

SEQ ID NO: 17878 - DNA, 109 bp, Homo sapiens
  MAP TO AC007784.7; EXPRESSED IN HBL100, SIGNAL = 2.9; EXPRESSED IN FETAL LIVER, SIGNAL = 3.2; EXPRESSED IN BRAIN, SIGNAL = 2.5; EXPRESSED IN HEART, SIGNAL = 2.6; EXPRESSED IN BT474, SIGNAL = 2.7; EXPRESSED IN BONE MARROW, SIGNAL = 2.9; EXPRESSED IN LUNG, SIGNAL = 3.4; EXPRESSED IN PLACENTA, SIGNAL = 2.8; EXPRESSED IN ADULT LIVER, SIGNAL = 2.6; EXPRESSED IN HELA, SIGNAL = 3.5; SWISSPROT HIT: P54269, EVALUE 3.10e+00; NT HIT: S76619.1, EVALUE 2.40e-01; EST_HUMAN HIT: AW749939.1, EVALUE 2.40e-01
acttatggtgatgatggggatagtgacaatagctatcttcacttttcagagagagaatttgagatgcagtttcccatactgcacaatcgttatgagtatcaaattaagg

SEQ ID NO: 17879 - DNA, 76 bp, Homo sapiens
  MAP TO AC007745.2; EXPRESSED IN HBL100, SIGNAL =  14; EXPRESSED IN FETAL LIVER, SIGNAL =  19; EXPRESSED IN BRAIN, SIGNAL =   7; EXPRESSED IN BT474, SIGNAL =  15; EXPRESSED IN BONE MARROW, SIGNAL =  10; EXPRESSED IN HELA, SIGNAL =  26; EXPRESSED IN ADULT LIVER, SIGNAL = 8.7; EXPRESSED IN HEART, SIGNAL =  13; EXPRESSED IN PLACENTA, SIGNAL = 6.3; EXPRESSED IN LUNG, SIGNAL =  11; EST_HUMAN HIT: BE615120.1, EVALUE 3.50e+00; NT HIT: AF096275.1, EVALUE 3.20e-02; SWISSPROT HIT: Q99500, EVALUE 9.40e+00
aagtttgtgcacttcgcaggggaaaggagccgggctcttcctcttcttgggtggaacccggcattcaatctgccag

SEQ ID NO: 17880 - DNA, 259 bp, Homo sapiens
  MAP TO AC007745.2; EXPRESSED IN PLACENTA, SIGNAL =   2; EXPRESSED IN BONE MARROW, SIGNAL = 2.9; EXPRESSED IN FETAL LIVER, SIGNAL =   2; EXPRESSED IN LUNG, SIGNAL = 2.3; EXPRESSED IN HELA, SIGNAL = 2.1; EXPRESSED IN BT474, SIGNAL = 2.2; EXPRESSED IN HBL100, SIGNAL = 2.7; EXPRESSED IN ADULT LIVER, SIGNAL = 2.3; EXPRESSED IN BRAIN, SIGNAL = 2.6; EXPRESSED IN HEART, SIGNAL = 2.2; NT HIT: AL115265.1, EVALUE 1.30e-01; SWISSPROT HIT: Q9WYH0, EVALUE 7.90e-01
agagggagttagaatcacaggtttgaatgtattagctcatacctgcagagaagttggtgtaggctatgactatgcagggcttaacaccatatactgtgtttgtggcttcaagatcagttatagttctaattcccacagaattttaggtagtggagatggcagacaagcacatttagcatctccttcataccgctccatcccacctttccatggaacctcaccttggggatccttggaactcactagcaaaaagcagtat

SEQ ID NO: 17881 - DNA, 1245 bp, Homo sapiens
  MAP TO AC007744.1; EXPRESSED IN BONE MARROW, SIGNAL = 0.87; EXPRESSED IN PLACENTA, SIGNAL = 2.3; EXPRESSED IN HEART, SIGNAL = 3.3; EXPRESSED IN BRAIN, SIGNAL = 2.2; EXPRESSED IN HELA, SIGNAL = 1.6; EXPRESSED IN FETAL LIVER, SIGNAL = 1.8; EXPRESSED IN HBL100, SIGNAL = 1.9; EXPRESSED IN BT474, SIGNAL = 1.7; EXPRESSED IN ADULT LIVER, SIGNAL = 2.6; EXPRESSED IN LUNG, SIGNAL = 2.8; NT HIT: AL163207.2, EVALUE 4.00e-33; EST_HUMAN HIT: AI866714.1, EVALUE 3.00e-28
ctactgtaatactacagccccattgtgatagaaaagttcagataataagaaagtggatgattgaggttgagattttcatttaatggggattttcatttttaatagtgtttttgtttaagcatttggccaatataacaatttcaaggctcaaattctctttcatttgaatgttaaattgctctgtactttgtttaaatattactgttactactactacctccaccacacacaccctcccacacaccccccccacacacctgctgtttaccacattgatattcttatgctgtttacatactatctcatttatccttataataaactcttgaggttgatatagtattattattaccattttgcagaggaaattgaggtatagaattatttagaaacttagaattacgcagctaataagagtatgcatctatgtgtgaagtcaggattcctgggtctaagttcagttttcttcccactatactgttactcccctgtttgaaatccattaaatgttttcctttgtataaagagcaaaatcaacctcctcatgaaggcttcacaaattctgtatcatctggcttctgacttcatcttgtatcactttctccctggctcaccaaatttcagtcagctccctgtcatttaaaagaacagtctacataagtattttctttagcttctgctttatatgaacatgggtccttcttacccataaggaggacatcatctcctttgagaagagatacctgaatgcaccagctaatgcagatccctcctttggaattccagcactatttgttactttcatagaattaggtgtgactataacttgcttactggttcaattacttatatacggcatttttcaatcctcaaaatttcgatgcggtagatgttaatatgattctcaatttgtagatgaggagaaaaggtggaggagcttaagaacttcgtcaataatacatagtaagtaacagaaatcaaatctgaatgctgatctttttcattatagagctgagaatctttgccgttgtgttgctgtcacagcttgccaactttggagcatttctttttgaaaaatttttgtgagtgcatagtaggcatatatatttatggggtatatgaaatgttttgatataggcatacaatgcataataatcacatcagggtaaatggggtatagatcaccgcaagcatttatcatttctttgtgttacaaaccatttagttatatttttattttaaaat

SEQ ID NO: 17882 - DNA, 163 bp, Homo sapiens
  MAP TO AC007739.1; EXPRESSED IN BT474, SIGNAL =  24; EXPRESSED IN BONE MARROW, SIGNAL =  32; EXPRESSED IN HELA, SIGNAL =  17; EXPRESSED IN ADULT LIVER, SIGNAL =  13; EXPRESSED IN BRAIN, SIGNAL =  20; EXPRESSED IN HBL100, SIGNAL =  19; EXPRESSED IN FETAL LIVER, SIGNAL =  22; EXPRESSED IN LUNG, SIGNAL =  25; EXPRESSED IN PLACENTA, SIGNAL =  24; EXPRESSED IN HEART, SIGNAL =  16; NT HIT: Z74918.1, EVALUE 5.80e+00; SWISSPROT HIT: P42584, EVALUE 6.60e+00; EST_HUMAN HIT: T07106.1, EVALUE 2.20e+00
tctgtacagatgatgttttttattctctaggagattttgatggttagccaggcttgagaaccactgagttatgactaagagaaaaatatcatggagaataccatggatagtgagctcgtttacagttgtaaaaaacagagtcagattattaaatttgagtagg

SEQ ID NO: 17883 - DNA, 89 bp, Homo sapiens
  MAP TO AC007739.1; EXPRESSED IN FETAL LIVER, SIGNAL = 1.4; EXPRESSED IN PLACENTA, SIGNAL = 1.6; EXPRESSED IN BONE MARROW, SIGNAL = 1.4; EXPRESSED IN HBL100, SIGNAL = 1.3; EXPRESSED IN LUNG, SIGNAL = 1.4; EXPRESSED IN ADULT LIVER, SIGNAL = 1.1; EXPRESSED IN BRAIN, SIGNAL = 1.8; EXPRESSED IN HEART, SIGNAL = 1.2; EXPRESSED IN BT474, SIGNAL = 1.4; EXPRESSED IN HELA, SIGNAL = 1.3; NT HIT: AJ277099.1, EVALUE 2.40e+00; EST_HUMAN HIT: AI598146.1, EVALUE 7.40e-01
ggaactgcactatgaaccaagatgagatgagcaagaaaagtagctcccgttccttgcctttatcctcaaccccagacattaaaggatag

SEQ ID NO: 17884 - DNA, 123 bp, Homo sapiens
  MAP TO AC007735.2; EXPRESSED IN BT474, SIGNAL = 1.4; EXPRESSED IN FETAL LIVER, SIGNAL = 1.5; EXPRESSED IN LUNG, SIGNAL = 1.3; EXPRESSED IN ADULT LIVER, SIGNAL = 1.3; EXPRESSED IN BRAIN, SIGNAL =   1; EXPRESSED IN HEART, SIGNAL = 1.3; EXPRESSED IN BONE MARROW, SIGNAL = 0.82; EXPRESSED IN HELA, SIGNAL = 2.9; EXPRESSED IN HBL100, SIGNAL = 1.6; NT HIT: gi11417118, EVALUE 2.70e-01; EST_HUMAN HIT: BF037898.1, EVALUE 3.00e-05
agagctctttgactcccaccaccagcagctcagcaagcaggagctttacagctcttttgcttctgcagttcagtgagttccgggttcttggcccacgtccaagaggaatagggtatgcggaca

SEQ ID NO: 17885 - DNA, 240 bp, Homo sapiens
  MAP TO AC007685.1; EXPRESSED IN HBL100, SIGNAL = 1.7; EXPRESSED IN FETAL LIVER, SIGNAL = 1.3; EXPRESSED IN BRAIN, SIGNAL = 0.9; EXPRESSED IN PLACENTA, SIGNAL = 0.82; EXPRESSED IN BT474, SIGNAL = 2.4; EXPRESSED IN BONE MARROW, SIGNAL = 0.96; EXPRESSED IN LUNG, SIGNAL = 1.3; EXPRESSED IN HELA, SIGNAL = 1.1; EXPRESSED IN ADULT LIVER, SIGNAL = 0.86; EXPRESSED IN HEART, SIGNAL = 1.1; SWISSPROT HIT: P51817, EVALUE 2.00e-41; NT HIT: gi11418370, EVALUE 0.00e+00; EST_HUMAN HIT: AI935203.1, EVALUE 0.00e+00
cttcctctacatgctcatggagtacgtgccgggcggcgagctcttcagctacctgcgcaaccgggggcgcttctccagcaccacggggctcttctactctgcagagatcatctgtgccatcgagtacctgcactccaaagagatcgtctacagggacttgaagccagagaacatcctgctggatagggatggccacattaagctcacggactttgggttcgccaagaagctggtagacag

SEQ ID NO: 17886 - DNA, 358 bp, Homo sapiens
  MAP TO AC007685.1; EXPRESSED IN BONE MARROW, SIGNAL =  34; EXPRESSED IN FETAL LIVER, SIGNAL =  23; EXPRESSED IN HELA, SIGNAL =  18; EXPRESSED IN ADULT LIVER, SIGNAL =  12; EXPRESSED IN BRAIN, SIGNAL = 4.3; EXPRESSED IN HEART, SIGNAL = 5.7; EXPRESSED IN PLACENTA, SIGNAL = 9.3; EXPRESSED IN BT474, SIGNAL =  20; EXPRESSED IN HBL100, SIGNAL =  47; EXPRESSED IN LUNG, SIGNAL = 9.7; SWISSPROT HIT: P23398, EVALUE 3.00e-32; NT HIT: gi11428757, EVALUE 0.00e+00; EST_HUMAN HIT: AV757510.1, EVALUE 0.00e+00
tataacatttcaggacatccagcttcaccttctttctcttgtgcttattcttcttgggagtggggtaagacttcttccttttcttagcaacaccacaaagtctcagcaaaagatgaagagtaggctccttttgaatgttgcagtcagacaaagtacgtccatcttccagttgcttgccagcaaagatcagtctttgctgatcaggaggaattccttccttatcctggatcttggcctttacattttctatcgcatctgagggttcaacctcaagggtgatggtcttcccccttagggttttcacgaaaatctgcagtttggtggcagcttcaccgcagatggcagtgaaagggaagct

SEQ ID NO: 17887 - DNA, 139 bp, Homo sapiens
  MAP TO AC007679.2; EXPRESSED IN BT474, SIGNAL = 1.9; EXPRESSED IN BONE MARROW, SIGNAL = 1.3; EXPRESSED IN HELA, SIGNAL = 0.74; EXPRESSED IN ADULT LIVER, SIGNAL = 0.94; EXPRESSED IN FETAL LIVER, SIGNAL = 1.4; EXPRESSED IN LUNG, SIGNAL = 1.2; EXPRESSED IN BRAIN, SIGNAL = 0.89; EXPRESSED IN HEART, SIGNAL = 0.78; EXPRESSED IN PLACENTA, SIGNAL = 1.6; EXPRESSED IN HBL100, SIGNAL = 0.98; NT HIT: gi8923290, EVALUE 7.00e-73; EST_HUMAN HIT: AW504943.1, EVALUE 8.00e-73; SWISSPROT HIT: P27113, EVALUE 2.30e+00
gcagttctctgccccagccaacgttggccttacttctgccactctgatcagccagagtgcacttggggagagagccttcccaggacagtttcatggacttcatgacggcagccatgcctcccagaggccacatcctgcc

SEQ ID NO: 17888 - DNA, 562 bp, Homo sapiens
  MAP TO AC007679.2; EXPRESSED IN BT474, SIGNAL = 1.6; EXPRESSED IN HBL100, SIGNAL = 2.2; EXPRESSED IN HELA, SIGNAL = 0.74; EXPRESSED IN ADULT LIVER, SIGNAL =   1; EXPRESSED IN PLACENTA, SIGNAL = 1.2; EXPRESSED IN BONE MARROW, SIGNAL = 2.3; EXPRESSED IN FETAL LIVER, SIGNAL = 1.2; EXPRESSED IN LUNG, SIGNAL =   1; EXPRESSED IN BRAIN, SIGNAL = 0.96; EXPRESSED IN HEART, SIGNAL = 0.86; SWISSPROT HIT: P57155, EVALUE 1.20e+00; EST_HUMAN HIT: BF308518.1, EVALUE 0.00e+00; NT HIT: gi8923290, EVALUE 0.00e+00
agacaactgccgtgcttgtgctatagtgtgtgtggtgggtgccactccctgcattggtaggctggtgttctgaggttgaggtgacttgcagactgaaccctgcggtggcgctggaggttttaaagaagtagataaaggtgacaggtgggagtgctgctgcggaggctgctgctgtgaaggtgcaggagggggactaaagtgctcttgtcgaacttttaaaatctctgtctctctctggcgctgccgattctgggccaacttgctctgcaacttctttctcacagttgcccctttctttaggtcatcatcttcctcattgaaagcaaatgggtcttccaattcggtttccaggtagtggagagggacccttgccccaggtggagagagggacattccatccagtccgttgggcatcttcaaggccaacgtgggcactgtcaggctaaaggccatggtatccatctggtgcctgaccttcacctcatctataggatcattctttttcttcctctcttttttcgggataaagccaagtacctgcaagtggctgttgcagtacctt

SEQ ID NO: 17889 - DNA, 432 bp, Homo sapiens
  MAP TO AC007679.2; EXPRESSED IN HEART, SIGNAL = 3.2; EXPRESSED IN BRAIN, SIGNAL = 1.5; EXPRESSED IN PLACENTA, SIGNAL = 4.6; EXPRESSED IN BT474, SIGNAL = 8.3; EXPRESSED IN BONE MARROW, SIGNAL =  13; EXPRESSED IN HBL100, SIGNAL =  34; EXPRESSED IN FETAL LIVER, SIGNAL =  10; EXPRESSED IN LUNG, SIGNAL = 5.8; EXPRESSED IN ADULT LIVER, SIGNAL = 6.3; EXPRESSED IN HELA, SIGNAL =  10; NT HIT: L05094.1, EVALUE 7.00e-85; SWISSPROT HIT: P08526, EVALUE 4.00e-52; EST_HUMAN HIT: BF128745.1, EVALUE 1.00e-84
aaactgtagcttctggaagaactgcttgttcttgcccgttttgtatctctctttgagcttgaccttggcctcccattgggacttgtgtttaagagcaggatctctgaagacatccttgtggatgacagttttgtgtaagaggatatccacagagtgcactgtaggcgtaagatgattgtagttataaaccttcacaaaagactcgatctttgacctcctggtaatcttctttttgcccatggcagctgtcactttgcagggatagcgatcaattccaaccacgagagcttggatgtaggggcagtctgaggtgccatcattaatgttctttacgatgacagctttgtgttcagccagaatactgctggccaggaccagcaccactttcccaggtttcatgcacttgcccattttgacagcaaccaccgaggg

SEQ ID NO: 17890 - DNA, 304 bp, Homo sapiens
  MAP TO AC007664.7; EXPRESSED IN BT474, SIGNAL =  16; EXPRESSED IN HELA, SIGNAL = 8.7; EXPRESSED IN PLACENTA, SIGNAL =   4; EXPRESSED IN BONE MARROW, SIGNAL = 8.1; EXPRESSED IN HBL100, SIGNAL =  37; EXPRESSED IN FETAL LIVER, SIGNAL =  16; EXPRESSED IN LUNG, SIGNAL =   4; EXPRESSED IN ADULT LIVER, SIGNAL =   3; EXPRESSED IN BRAIN, SIGNAL =  24; EXPRESSED IN HEART, SIGNAL =  10; SWISSPROT HIT: P05214, EVALUE 4.00e-30; NT HIT: AB002059.1, EVALUE 0.00e+00; EST_HUMAN HIT: AI000062.1, EVALUE 9.00e-50
cagtcagaatgttccagggtcgtgtaggtggtcaggatggagttgcagggctccatcacagccatggagacatggggggctgggcaaatggcaaactccagcttggacttcttcccgtagtccaccgagagccgctccatgagcagagacatgaacccagagacggtgccgcccccaaagctgtggaagatggggaagccctgcagtcccatgcacagatcagcctgagagaaatcagacaatgtgagccaatgcccgtggaagccacaccaccaacctccaccaagccggggccacttctctt

SEQ ID NO: 17891 - DNA, 246 bp, Homo sapiens
  MAP TO AC007664.7; EXPRESSED IN HBL100, SIGNAL = 2.7; EXPRESSED IN LUNG, SIGNAL = 2.2; EXPRESSED IN PLACENTA, SIGNAL = 2.3; EXPRESSED IN BT474, SIGNAL = 1.8; EXPRESSED IN BONE MARROW, SIGNAL = 2.8; EXPRESSED IN FETAL LIVER, SIGNAL = 2.7; EXPRESSED IN HELA, SIGNAL = 2.7; EXPRESSED IN ADULT LIVER, SIGNAL =   2; EXPRESSED IN BRAIN, SIGNAL = 3.6; EXPRESSED IN HEART, SIGNAL = 2.7; SWISSPROT HIT: P09645, EVALUE 3.00e-23; NT HIT: L11645.1, EVALUE 5.00e-72; EST_HUMAN HIT: AI205604.1, EVALUE 6.00e-69
ccttctccagagctgccaggtccttgcgagcctcagaggactccccctcctccatgccttcccccatgtaccattgcacaaaggcctgcttggcatacatgagatcaaacttatggtccaggcaggcccaggccttggtgatggctgtgatgttgcttagcatccacatggcccattgcaacttggtcaggtttcccccagggaccaccgtcaggggctggtagttaatgcccacctgccagagaa

SEQ ID NO: 17892 - DNA, 330 bp, Homo sapiens
  MAP TO AC007664.7; EXPRESSED IN HBL100, SIGNAL =  82; EXPRESSED IN BT474, SIGNAL =  52; EXPRESSED IN BONE MARROW, SIGNAL =  21; EXPRESSED IN LUNG, SIGNAL =  11; EXPRESSED IN HELA, SIGNAL =  28; EXPRESSED IN ADULT LIVER, SIGNAL = 7.5; EXPRESSED IN BRAIN, SIGNAL =  44; EXPRESSED IN PLACENTA, SIGNAL =  20; EXPRESSED IN FETAL LIVER, SIGNAL =  37; EXPRESSED IN HEART, SIGNAL =  12; EST_HUMAN HIT: AL134889.1, EVALUE 1.00e-107; SWISSPROT HIT: P05214, EVALUE 9.00e-33; NT HIT: AB002059.1, EVALUE 0.00e+00
tctgcccagacgactgaggttggtgtacgtgggacactcgatgtccaggttgtgctgacatgtcataggtggctttgctgtcgactatgaaggcacagtcagaatgttccagggtcgtgtaggtggtcaggatggagttgtagggctccgtcatggccatggagacctggggggctgggcaaatggcaaactccagcttggacttcttcccgtagtccaccgagagccgcttcatgagcagagacacgaacccagagccagtgccgcccccaaagctgtggaagatgaggaagccctgcagtcccatgcacagatctgcctgagagaaac

SEQ ID NO: 17893 - DNA, 454 bp, Homo sapiens
  MAP TO AC007664.7; EXPRESSED IN FETAL LIVER, SIGNAL = 6.3; EXPRESSED IN LUNG, SIGNAL = 3.4; EXPRESSED IN PLACENTA, SIGNAL = 4.5; EXPRESSED IN BT474, SIGNAL = 5.5; EXPRESSED IN BONE MARROW, SIGNAL = 5.2; EXPRESSED IN HBL100, SIGNAL = 4.8; EXPRESSED IN HELA, SIGNAL = 3.8; EXPRESSED IN ADULT LIVER, SIGNAL = 3.4; EXPRESSED IN BRAIN, SIGNAL = 5.5; EXPRESSED IN HEART, SIGNAL =   2; NT HIT: gi11417834, EVALUE 0.00e+00; EST_HUMAN HIT: AL042278.1, EVALUE 0.00e+00; SWISSPROT HIT: P52591, EVALUE 5.00e-07
aactgagggtcagctggcagtgggatgaggctggccccctcctccgctttagccccggcaagcctcccgtggagctgtaggagctggagatggcatttcggttggtgcaggagctcgtccaggaggtctgggatgtctggttatatctgatttctgacctctgggcatggaggtctgtctgcagaggcccgggcccgggcacaaagggagagaggcctctattgtcccgcaggggccgaaatgcagacggtgcatccccggtgacctcggggacccttctctgatcaccaggattctcttggactctagggtccttgtcctgctcaggcatccctgccccgctctccttgagggccctcaacactatcttccctggacacaagtctggggacagccggctgttgtggaccccaaaggggtgactcccggctcctgggccccacagagagtccat

SEQ ID NO: 17894 - DNA, 166 bp, Homo sapiens
  MAP TO AC007655.1; EXPRESSED IN ADULT LIVER, SIGNAL = 1.1; EXPRESSED IN HEART, SIGNAL = 0.9; EXPRESSED IN BONE MARROW, SIGNAL =  20; EXPRESSED IN FETAL LIVER, SIGNAL =   3; EXPRESSED IN LUNG, SIGNAL = 2.8; EXPRESSED IN HELA, SIGNAL = 0.7; EXPRESSED IN PLACENTA, SIGNAL = 1.1; EXPRESSED IN BT474, SIGNAL = 1.3; SWISSPROT HIT: P52566, EVALUE 6.00e-14; NT HIT: gi11433317, EVALUE 6.00e-77; EST_HUMAN HIT: AV759898.1, EVALUE 9.00e-77
agactctcatcatctttgtccatttcctgcagctctttcagggacttctgtggtggaggcttataattgagcttgctgtccagctcatcatcatcatcctcctccacatgtggctctggggctttttcagtcattctgatctatttctgggagacagaatgacagc

SEQ ID NO: 17895 - DNA, 92 bp, Homo sapiens
  MAP TO AC007655.1; EXPRESSED IN BONE MARROW, SIGNAL =  11; EXPRESSED IN HBL100, SIGNAL =  13; EXPRESSED IN FETAL LIVER, SIGNAL =  12; EXPRESSED IN LUNG, SIGNAL = 8.8; EXPRESSED IN ADULT LIVER, SIGNAL = 7.6; EXPRESSED IN PLACENTA, SIGNAL = 6.3; EXPRESSED IN BT474, SIGNAL = 8.3; EXPRESSED IN HELA, SIGNAL =  12; EXPRESSED IN BRAIN, SIGNAL = 9.6; EXPRESSED IN HEART, SIGNAL =   9; NT HIT: X95826.1, EVALUE 4.00e-45; EST_HUMAN HIT: N70349.1, EVALUE 3.00e-44; SWISSPROT HIT: Q93070, EVALUE 2.00e-09
ttatactctgcttttggaaaagatgatgacactggtcaaaaaggagagagatgcaatagctataggatcagggatgcatttcttgctggaag

SEQ ID NO: 17896 - DNA, 265 bp, Homo sapiens
  MAP TO AC007655.1; EXPRESSED IN HELA, SIGNAL = 1.8; EXPRESSED IN ADULT LIVER, SIGNAL = 1.2; EXPRESSED IN BRAIN, SIGNAL = 1.1; EXPRESSED IN HEART, SIGNAL = 0.95; EXPRESSED IN BT474, SIGNAL = 2.7; EXPRESSED IN BONE MARROW, SIGNAL = 1.8; EXPRESSED IN HBL100, SIGNAL = 4.4; EXPRESSED IN FETAL LIVER, SIGNAL = 2.2; EXPRESSED IN PLACENTA, SIGNAL = 1.4; EXPRESSED IN LUNG, SIGNAL = 1.3; NT HIT: gi7706500, EVALUE 0.00e+00; EST_HUMAN HIT: BF037874.1, EVALUE 0.00e+00
ggtggcccaggaggccgtaatggtggagcaggtggtggtccaagaggtggtggtcctggcatgggaggtgcttgtatctgagaaggaggaacagactgcggcggagcctgctgctgtgaagaagcagtggatgtgccatcagaatgggattcctctttatgctgcttttgtgattgcttttctgcttcagagtcatcagaatcatcttcatcatcgtcctctgaaaattcctctacttcccgtccctcctcagggatttcttgac

SEQ ID NO: 17897 - DNA, 762 bp, Homo sapiens
  MAP TO AC007655.1; EXPRESSED IN BONE MARROW, SIGNAL = 1.3; EXPRESSED IN HBL100, SIGNAL = 1.2; EXPRESSED IN ADULT LIVER, SIGNAL = 1.5; EXPRESSED IN PLACENTA, SIGNAL = 1.2; EXPRESSED IN HEART, SIGNAL =   1; EXPRESSED IN BRAIN, SIGNAL = 0.92; EXPRESSED IN HELA, SIGNAL = 0.79; EXPRESSED IN LUNG, SIGNAL = 0.71; EXPRESSED IN FETAL LIVER, SIGNAL = 2.2; EXPRESSED IN BT474, SIGNAL = 1.4; EST_HUMAN HIT: BE890693.1, EVALUE 0.00e+00; NT HIT: AF068758.1, EVALUE 4.10e-01; SWISSPROT HIT: Q62209, EVALUE 4.30e-01
cagtgttggaacttatttgttggagaaatgtcttcagagtcagaaaaggataaagagagactgattcaagctgccaaaatgttcttctttcatgtacaagatcttgcttctgtcataaacacactgactgaattgtttagccgcagtatgaatactcaaatccttttgatggctgtgaaaaacaatagttacattaaggatttttttgagcaaatgctcaaaatttttaaggagatgcaatctgtagtggatgcaagacatgacaaaattcaaaaggagtctttatgttccaaggttgcaatggccatgtgctctgtggttcagaagagtaccaatgtagaggagttgcatcagtcagctaaagaagtattcaaaagtgcccatacgccagtcatcatctctgtgctaaacagcagtaacatccttgggagtctggaatcttctctttcacacttgatgaaattccccatcatgaatcttcaattaagtgacttctatacagaagacaccaaagagcaatcagatgtcaccacatctgagagaaccagaagtcctccaggttcttccaaaaccactatgatagacaccttgaaaaaactgcaggatgtactaaaaactgaggattccaaaaatcccacaaagtcagcagcagatttgttggaacaaattgtcaaggctatgggaccaatcttagagatcctccaaaaagcgataaagactatggaaatgaatatttctgtgtttaagaaagccagtgacaag

SEQ ID NO: 17898 - DNA, 118 bp, Homo sapiens
  MAP TO AC007639.5; EXPRESSED IN BRAIN, SIGNAL =  22; EXPRESSED IN HEART, SIGNAL =  15; EXPRESSED IN PLACENTA, SIGNAL =  12; EXPRESSED IN BT474, SIGNAL =  12; EXPRESSED IN BONE MARROW, SIGNAL =  18; EXPRESSED IN HBL100, SIGNAL =  12; EXPRESSED IN LUNG, SIGNAL =  14; EXPRESSED IN ADULT LIVER, SIGNAL =  15; EXPRESSED IN FETAL LIVER, SIGNAL =  11; EXPRESSED IN HELA, SIGNAL =  17; EST_HUMAN HIT: AI280214.1, EVALUE 5.00e-18; SWISSPROT HIT: P39188, EVALUE 9.00e-06; NT HIT: U63834.1, EVALUE 3.00e-13
tgatctcagctcactgcagcctcgacttcctgggctcaagaaatcctcctgtctctgccttccgagtagctgtgatcacagttgtatgccatcatgcccaggtaattttttttatttt

SEQ ID NO: 17899 - DNA, 258 bp, Homo sapiens
  MAP TO AC007629.3; EXPRESSED IN BT474, SIGNAL = 1.6; EXPRESSED IN HELA, SIGNAL = 1.1; EXPRESSED IN ADULT LIVER, SIGNAL = 1.3; EXPRESSED IN BONE MARROW, SIGNAL = 1.7; EXPRESSED IN FETAL LIVER, SIGNAL = 1.6; EXPRESSED IN LUNG, SIGNAL = 1.6; EXPRESSED IN PLACENTA, SIGNAL = 1.6; EXPRESSED IN HBL100, SIGNAL = 3.1; EXPRESSED IN BRAIN, SIGNAL = 1.6; EXPRESSED IN HEART, SIGNAL = 1.4; EST_HUMAN HIT: BF307519.1, EVALUE 3.00e-99; NT HIT: AB020710.1, EVALUE 0.00e+00; SWISSPROT HIT: Q9Z714, EVALUE 7.90e-01
tgaatgatctgcatgatttaaagtggttctatcagcatctggatcagactccgtctgcctcagggaagcatgttttttcttagcaaggtctagatctctactatatgagtatccaagtttagaagtaggagataaacttgtttttttgataggagattctggatctgatctgcattctaaggatctggaattctctaatttttctttctccaagttactaccgatgtctagagtttgaagcttttgttcatctgtctc

SEQ ID NO: 17900 - DNA, 144 bp, Homo sapiens
  MAP TO AC007629.3; EXPRESSED IN PLACENTA, SIGNAL = 3.9; EXPRESSED IN BONE MARROW, SIGNAL = 4.2; EXPRESSED IN HBL100, SIGNAL = 6.9; EXPRESSED IN LUNG, SIGNAL = 5.2; EXPRESSED IN ADULT LIVER, SIGNAL = 3.8; EXPRESSED IN BRAIN, SIGNAL = 3.5; EXPRESSED IN BT474, SIGNAL =   4; EXPRESSED IN FETAL LIVER, SIGNAL = 6.2; EXPRESSED IN HELA, SIGNAL = 5.2; EXPRESSED IN HEART, SIGNAL = 3.6; NT HIT: AB020710.1, EVALUE 1.00e-55; SWISSPROT HIT: O78419, EVALUE 3.90e+00; EST_HUMAN HIT: D53891.1, EVALUE 4.00e-50
cgggagtatcaaggtcattttctaagttagtaagttcatctccacctcctacaacaaagccttcagggatctcctcgttagtatctatctcaatattatcattttcatctgtaggaacatgtagcaataatgttagtatattat

SEQ ID NO: 17901 - DNA, 109 bp, Homo sapiens
  MAP TO AC007625.2; EXPRESSED IN BT474, SIGNAL =  24; EXPRESSED IN BONE MARROW, SIGNAL =  27; EXPRESSED IN HELA, SIGNAL =  25; EXPRESSED IN ADULT LIVER, SIGNAL =  21; EXPRESSED IN BRAIN, SIGNAL =  29; EXPRESSED IN PLACENTA, SIGNAL =  34; EXPRESSED IN HBL100, SIGNAL =  24; EXPRESSED IN HEART, SIGNAL =  33; EXPRESSED IN LUNG, SIGNAL =  29; EXPRESSED IN FETAL LIVER, SIGNAL =  26; EST_HUMAN HIT: AA099777.1, EVALUE 4.00e-03
aataccttttagagactctgcttttagttctttggagtatttattacgaagaattgctgaattagatggcagtttcatattttttattttttttttgaggagctgccgt

SEQ ID NO: 17902 - DNA, 195 bp, Homo sapiens
  MAP TO AC007564.9; EXPRESSED IN BT474, SIGNAL = 2.9; EXPRESSED IN LUNG, SIGNAL = 2.9; EXPRESSED IN HELA, SIGNAL = 1.6; EXPRESSED IN ADULT LIVER, SIGNAL = 1.7; EXPRESSED IN BRAIN, SIGNAL = 2.1; EXPRESSED IN PLACENTA, SIGNAL = 4.6; EXPRESSED IN BONE MARROW, SIGNAL = 4.5; EXPRESSED IN HBL100, SIGNAL = 3.3; EXPRESSED IN FETAL LIVER, SIGNAL = 3.4; EXPRESSED IN HEART, SIGNAL = 1.7; NT HIT: U93163.1, EVALUE 9.00e-27; SWISSPROT HIT: P10071, EVALUE 4.90e+00; EST_HUMAN HIT: AW090434.1, EVALUE 2.00e-28
gcacttcaggaggtattccagaagaaagtgttattatcataggagataacagctcaatgcatgttattgcccctgaagatctttcaggagaacaagaggaggagttggaagacagtgatattgatgatcctgaccctgtgtaggcctagaataatgtatatgtttgtgccttagttttaaacaaaagagtttaaa

SEQ ID NO: 17903 - DNA, 149 bp, Homo sapiens
  MAP TO AC007564.9; EXPRESSED IN FETAL LIVER, SIGNAL = 2e+02; EXPRESSED IN PLACENTA, SIGNAL =  74; EXPRESSED IN BT474, SIGNAL = 2e+02; EXPRESSED IN BONE MARROW, SIGNAL =  68; EXPRESSED IN HBL100, SIGNAL = 2.1e+02; EXPRESSED IN LUNG, SIGNAL = 1.4e+02; EXPRESSED IN HELA, SIGNAL = 1.3e+02; EXPRESSED IN ADULT LIVER, SIGNAL =  63; EXPRESSED IN BRAIN, SIGNAL =  63; EXPRESSED IN HEART, SIGNAL =  47; NT HIT: J04617.1, EVALUE 4.00e-16; EST_HUMAN HIT: AI907467.1, EVALUE 2.00e-18; SWISSPROT HIT: Q90835, EVALUE 3.00e-10
agaatgggcagaccgatgatcatggtgctcttgcttatacactgggtatgaagcaaccaattgttggtgtttacaaaatgaattccactgagccaccctatggccagaagaggaaattgcaaaaaacgatagcacttatattaagcaaa

SEQ ID NO: 17904 - DNA, 227 bp, Homo sapiens
  MAP TO AC007555.1; EXPRESSED IN BONE MARROW, SIGNAL = 2.2; EXPRESSED IN HBL100, SIGNAL = 1.8; EXPRESSED IN ADULT LIVER, SIGNAL = 1.2; EXPRESSED IN BT474, SIGNAL = 1.2; EXPRESSED IN LUNG, SIGNAL = 1.5; EXPRESSED IN HELA, SIGNAL =   2; EXPRESSED IN BRAIN, SIGNAL = 1.8; EXPRESSED IN PLACENTA, SIGNAL = 1.7; EXPRESSED IN FETAL LIVER, SIGNAL = 1.9; EXPRESSED IN HEART, SIGNAL = 1.6; SWISSPROT HIT: Q02638, EVALUE 3.90e-02; NT HIT: gi11421981, EVALUE 1.00e-125; EST_HUMAN HIT: AU133383.1, EVALUE 1.00e-121
aagagcttcagggggaccaggcgatgcaggaagacagagcgccctctagtggcaacagcactaggagcgacagcagtgcttgtgtggatgacacactgggacaagttggggctgtgaaggtcaaggaggaaccagtggacagtgatgaagatgctcagatccaggaaatggaatctggggagcaggctgcttttatgcaacaggtaataggcaaagatttagctcca

SEQ ID NO: 17905 - DNA, 158 bp, Homo sapiens
  MAP TO AC007554.1; EXPRESSED IN HEART, SIGNAL = 0.89; EXPRESSED IN PLACENTA, SIGNAL = 1.5; EXPRESSED IN FETAL LIVER, SIGNAL = 0.86; EXPRESSED IN LUNG, SIGNAL = 1.1; EXPRESSED IN BONE MARROW, SIGNAL = 5.9; EST_HUMAN HIT: AU118173.1, EVALUE 6.00e-84; SWISSPROT HIT: P13611, EVALUE 1.00e-27; NT HIT: U16306.1, EVALUE 4.00e-84
agcccatcttccatttcctaagcaccggatagttggaaggtgacgttgaatgaaaccatctttgcagtggtatctaatcagggagttgatttcataacgaggtttcatctttccaaaggtcttggcattttctacaacagggggctggccgcaagcaa

SEQ ID NO: 17906 - DNA, 241 bp, Homo sapiens
  MAP TO AC007554.1; EXPRESSED IN LUNG, SIGNAL = 1.3; EXPRESSED IN PLACENTA, SIGNAL = 0.96; EXPRESSED IN BONE MARROW, SIGNAL = 2.2; EXPRESSED IN FETAL LIVER, SIGNAL =   1; EXPRESSED IN HEART, SIGNAL = 1.5; EST_HUMAN HIT: AU120468.1, EVALUE 1.00e-128; NT HIT: U16306.1, EVALUE 1.00e-128; SWISSPROT HIT: P13611, EVALUE 1.00e-33
  unsure 211
aaataaaccctgaaactcaagcagctttaatcagagggcaggattccacgatagcagcatcagaacagcaagtggcagcgagaattcttgattccaatgatcaggcaacagtaaaccctgtggaatttaatactgaggttgcaacaccaccattttcccttctggagacttctaatgaaacagatttcctgattggcattaatgaagagtncagtggaaggcacggcaatctatttaccag

SEQ ID NO: 17907 - DNA, 157 bp, Homo sapiens
  MAP TO AC007554.1; EXPRESSED IN PLACENTA, SIGNAL = 6.3; EXPRESSED IN HBL100, SIGNAL =  11; EXPRESSED IN FETAL LIVER, SIGNAL = 7.8; EXPRESSED IN LUNG, SIGNAL = 8.4; EXPRESSED IN BRAIN, SIGNAL = 6.6; EXPRESSED IN BT474, SIGNAL = 7.4; EXPRESSED IN BONE MARROW, SIGNAL = 5.6; EXPRESSED IN HELA, SIGNAL =  14; EXPRESSED IN ADULT LIVER, SIGNAL = 4.4; EXPRESSED IN HEART, SIGNAL = 6.1; SWISSPROT HIT: P13611, EVALUE 2.00e-22; EST_HUMAN HIT: W58043.1, EVALUE 1.00e-10; NT HIT: U16306.1, EVALUE 3.00e-72
ccaacaagaccacccactgtggaagacaaagaggcctttggacctcaggcgctttctacgccacagcccccagcaagcacaaaatttcaccctgacattaatgtttatattattgaggtcagagaaaataagacaggtaagtctttgctttctagac

SEQ ID NO: 17908 - DNA, 267 bp, Homo sapiens
  MAP TO AC007539.8; EXPRESSED IN BRAIN, SIGNAL = 1.4; EXPRESSED IN HBL100, SIGNAL =   1; EXPRESSED IN HELA, SIGNAL = 2.8; EXPRESSED IN ADULT LIVER, SIGNAL = 1.5; EXPRESSED IN HEART, SIGNAL = 1.1; EXPRESSED IN BT474, SIGNAL = 0.9; EXPRESSED IN BONE MARROW, SIGNAL = 0.89; EXPRESSED IN FETAL LIVER, SIGNAL =   1; EXPRESSED IN PLACENTA, SIGNAL = 1.3; EXPRESSED IN LUNG, SIGNAL = 1.2; NT HIT: gi9966844, EVALUE 0.00e+00; EST_HUMAN HIT: W23234.1, EVALUE 9.00e-28; SWISSPROT HIT: P14501, EVALUE 8.20e-01
aacctcgtgatgttcctgagcgtcctcgtggactggatgattccagacatccccacggacatcagcgaccagatcaagaaagagaagagcttattagtggatttcttcctgaaagaggagcatgagaagctcaagctgatggatgagccggctctgaggagcccaggaggtggggatcgaagcaggagccgggcagccagctcagcaccttcaggccaaagccagctgggcagcatgatgtcgtcaggctctcagcacaccaatgtg

SEQ ID NO: 17909 - DNA, 137 bp, Homo sapiens
  MAP TO AC007539.8; EXPRESSED IN BT474, SIGNAL = 0.68; EXPRESSED IN FETAL LIVER, SIGNAL = 1.1; EXPRESSED IN HELA, SIGNAL = 2.5; EXPRESSED IN ADULT LIVER, SIGNAL = 0.83; EXPRESSED IN PLACENTA, SIGNAL = 1.1; EXPRESSED IN BRAIN, SIGNAL = 1.6; EXPRESSED IN HEART, SIGNAL = 0.82; EXPRESSED IN LUNG, SIGNAL = 0.64; EXPRESSED IN BONE MARROW, SIGNAL = 1.5; SWISSPROT HIT: O94069, EVALUE 1.40e+00; EST_HUMAN HIT: AU129076.1, EVALUE 5.00e-38; NT HIT: gi11435947, EVALUE 3.00e-38
atggagctctgcattcagctcagcatcatcatgttggggaagcagttgatccagaacaacatctttgagattggagtcccgtatgtaatgaactcctctaacctctctccttgctgccaggggttagcccagaagtg

SEQ ID NO: 17910 - DNA, 196 bp, Homo sapiens
  MAP TO AC007539.8; EXPRESSED IN PLACENTA, SIGNAL = 1.6; EXPRESSED IN LUNG, SIGNAL = 1.7; EXPRESSED IN BONE MARROW, SIGNAL = 1.9; EXPRESSED IN HBL100, SIGNAL = 2.4; EXPRESSED IN FETAL LIVER, SIGNAL = 2.6; EXPRESSED IN HELA, SIGNAL = 6.7; EXPRESSED IN ADULT LIVER, SIGNAL = 1.7; EXPRESSED IN BRAIN, SIGNAL = 1.4; EXPRESSED IN BT474, SIGNAL = 2.4; EXPRESSED IN HEART, SIGNAL = 1.7; NT HIT: gi9966844, EVALUE 5.00e-75; EST_HUMAN HIT: AA382811.1, EVALUE 5.00e-87
tgcagccgctctgtctctcaataaggctacacgctccaatgtccgggtgacagtgacagcaacagcagtcatcatcaacctcgtggtcatcctcatcctggacgagatctacggcgctgtggccaagtggctcaccaaaattggtactgtgtcaccgagacttctggctgtcctaggccctctttaagtcaatgcg

SEQ ID NO: 17911 - DNA, 148 bp, Homo sapiens
  MAP TO AC007529.5; EXPRESSED IN HELA, SIGNAL = 1.3; EXPRESSED IN PLACENTA, SIGNAL = 1.4; EXPRESSED IN BT474, SIGNAL = 1.4; EXPRESSED IN FETAL LIVER, SIGNAL = 1.5; EXPRESSED IN LUNG, SIGNAL = 1.5; EXPRESSED IN BONE MARROW, SIGNAL = 1.9; EXPRESSED IN HBL100, SIGNAL = 1.4; EXPRESSED IN ADULT LIVER, SIGNAL = 1.1; EXPRESSED IN BRAIN, SIGNAL = 1.3; EXPRESSED IN HEART, SIGNAL = 1.3; SWISSPROT HIT: P50817, EVALUE 1.70e+00; NT HIT: X17664.1, EVALUE 1.80e-02; EST_HUMAN HIT: BE149281.1, EVALUE 8.60e-02
cattcttaaacaacataccatttaattttgcattagtattctcaagtgaatgctgaattcttttatcgctatgctcatatttaagaccattataataatagttttctgtgattttatttttctgattcaaaaattgaaaatgctctat

SEQ ID NO: 17912 - DNA, 151 bp, Homo sapiens
  MAP TO AC007465.2; EXPRESSED IN BT474, SIGNAL = 6.2; EXPRESSED IN HBL100, SIGNAL = 6.1; EXPRESSED IN FETAL LIVER, SIGNAL = 4.9; EXPRESSED IN HELA, SIGNAL = 3.7; EXPRESSED IN BRAIN, SIGNAL = 5.6; EXPRESSED IN PLACENTA, SIGNAL = 7.6; EXPRESSED IN BONE MARROW, SIGNAL = 7.4; EXPRESSED IN LUNG, SIGNAL = 5.7; EXPRESSED IN ADULT LIVER, SIGNAL = 3.2; EXPRESSED IN HEART, SIGNAL = 5.5; NT HIT: D14066.1, EVALUE 5.40e+00
catgaaaatggactctataaacctcagtgttatgtggctctgcaagatgatccaacatgttggaacagccacgtttaaaacatatatctcttgcctcttggtgccaaagctcttcctactacagctcatggcacttcagtgcaacacacag

SEQ ID NO: 17913 - DNA, 163 bp, Homo sapiens
  MAP TO AC007464.2; EXPRESSED IN FETAL LIVER, SIGNAL =  28; EXPRESSED IN HELA, SIGNAL =  18; EXPRESSED IN ADULT LIVER, SIGNAL =  16; EXPRESSED IN PLACENTA, SIGNAL =  23; EXPRESSED IN BT474, SIGNAL =  11; EXPRESSED IN BONE MARROW, SIGNAL =  11; EXPRESSED IN LUNG, SIGNAL =  25; EXPRESSED IN HBL100, SIGNAL =  10; EXPRESSED IN BRAIN, SIGNAL =  28; EXPRESSED IN HEART, SIGNAL =  19; NT HIT: AF047013.1, EVALUE 3.20e-01; SWISSPROT HIT: P41996, EVALUE 2.90e+00
gaagcaaaaggaaaagcaagacgtcccccagcatctgttttctgccccttatccagaggaatatgcccatttgtactgtgacgccaagtgcagttcgtttcctgctttgaaacctaccagggagaaaacggccttcatgaccttcaacgagtgtcattcctgg

SEQ ID NO: 17914 - DNA, 175 bp, Homo sapiens
  MAP TO AC007464.2; EXPRESSED IN BONE MARROW, SIGNAL = 1.2; EXPRESSED IN LUNG, SIGNAL = 1.2; EXPRESSED IN HEART, SIGNAL = 1.3; EXPRESSED IN PLACENTA, SIGNAL = 1.5; EXPRESSED IN BT474, SIGNAL = 0.92; EXPRESSED IN HBL100, SIGNAL = 0.93; EXPRESSED IN FETAL LIVER, SIGNAL = 0.76; EXPRESSED IN HELA, SIGNAL = 1.2; EXPRESSED IN ADULT LIVER, SIGNAL = 0.95; EXPRESSED IN BRAIN, SIGNAL = 1.4; NT HIT: AL163247.2, EVALUE 8.70e-02; EST_HUMAN HIT: AI459161.1, EVALUE 1.00e-01; SWISSPROT HIT: Q26768, EVALUE 2.00e-07
atggaagaaggcaaagggaaggcaggcatgtcctacccgctggagcaggaggaagagagaggaagagagaacgggggaggtgaggaagagagagcagggggaggtgaggaagagagagcagggggaggtgaggaagagagagcagggggaggtgaggaagagagagcagggggag

SEQ ID NO: 17915 - DNA, 276 bp, Homo sapiens
  MAP TO AC007464.2; EXPRESSED IN ADULT LIVER, SIGNAL = 7.9; EXPRESSED IN BRAIN, SIGNAL = 8.3; EXPRESSED IN HEART, SIGNAL = 7.7; EXPRESSED IN PLACENTA, SIGNAL = 7.6; EXPRESSED IN BT474, SIGNAL = 6.8; EXPRESSED IN HBL100, SIGNAL =  11; EXPRESSED IN FETAL LIVER, SIGNAL =  10; EXPRESSED IN HELA, SIGNAL =  11; EXPRESSED IN BONE MARROW, SIGNAL = 7.9; EXPRESSED IN LUNG, SIGNAL = 9.2; SWISSPROT HIT: Q9WV30, EVALUE 5.20e-01; NT HIT: Z74904.1, EVALUE 2.60e+00
gagaaaaatttgggtgattgggttggtgggtctttggaatccaggaaatgagggctgaggattctggaattctgtgggatccatgtgggcctttcctgagagtcggggagaaatgtgatcttgcttgacagggccagacgtagggtctctgttggacactgactttggctgcagattctccacaagtgatgctgaaagaaggctgggatgtctgtaggacatgcttagactagttgacctgagaggtgctctggtataattaaggaaaaagaccat

SEQ ID NO: 17916 - DNA, 258 bp, Homo sapiens
  MAP TO AC007429.11; EXPRESSED IN BT474, SIGNAL = 7.6; EXPRESSED IN BONE MARROW, SIGNAL =  12; EXPRESSED IN FETAL LIVER, SIGNAL = 9.6; EXPRESSED IN LUNG, SIGNAL =  12; EXPRESSED IN HELA, SIGNAL =  11; EXPRESSED IN PLACENTA, SIGNAL = 9.2; EXPRESSED IN HBL100, SIGNAL =  10; EXPRESSED IN ADULT LIVER, SIGNAL = 9.6; EXPRESSED IN BRAIN, SIGNAL =  16; EXPRESSED IN HEART, SIGNAL =  10; NT HIT: AB015355.1, EVALUE 1.00e-26; EST_HUMAN HIT: AI924227.1, EVALUE 5.00e-24; SWISSPROT HIT: P39188, EVALUE 2.00e-14
gactatggctcactgcagcattcgcgtccccctcttccaggctcaagtgaccctcccacctcagtctcccaagtagctgggactgcaggtgcatgccaccatgcccagctaatttttctatgttttgtagagatgggatctcacaatgttcctcaggctggtgtggaactcctgggctcagcgattcttctgcctcagccacccaaagtgctggaattacaggagcgaggaaacattttctaccaggaatctttatga

SEQ ID NO: 17917 - DNA, 129 bp, Homo sapiens
  MAP TO AC007429.11; EXPRESSED IN ADULT LIVER, SIGNAL = 1.9; EXPRESSED IN PLACENTA, SIGNAL = 0.85; EXPRESSED IN HEART, SIGNAL = 1.4; EXPRESSED IN BT474, SIGNAL = 1.3; EXPRESSED IN BONE MARROW, SIGNAL = 1.5; EXPRESSED IN HBL100, SIGNAL = 4.1; EXPRESSED IN FETAL LIVER, SIGNAL = 1.7; EXPRESSED IN LUNG, SIGNAL = 1.4; EXPRESSED IN HELA, SIGNAL = 3.1; EST_HUMAN HIT: BF219213.1, EVALUE 2.00e-03; NT HIT: AL163208.2, EVALUE 6.20e-02; SWISSPROT HIT: P34262, EVALUE 8.90e+00
tacccaatccaggattccacattacatttagctgtcttgtttcccaagtctcctctggtgtgtgaaagcaatcttttcttgtttttgatggtcatgatgtttttgcagaggatattctgcataatgcct

SEQ ID NO: 17918 - DNA, 77 bp, Homo sapiens
  MAP TO AC007405.2; EXPRESSED IN ADULT LIVER, SIGNAL =  10; EXPRESSED IN PLACENTA, SIGNAL =  12; EXPRESSED IN BT474, SIGNAL = 9.4; EXPRESSED IN BONE MARROW, SIGNAL =  14; EXPRESSED IN HBL100, SIGNAL =  14; EXPRESSED IN FETAL LIVER, SIGNAL =  18; EXPRESSED IN LUNG, SIGNAL =  18; EXPRESSED IN HELA, SIGNAL =  15; EXPRESSED IN BRAIN, SIGNAL =  18; EXPRESSED IN HEART, SIGNAL =  13; NT HIT: AB035867.1, EVALUE 3.30e-02
cttcttgatgataattataataatggctgcattaatacccttgtccacgaattctatcatttgtatcaaatctaggt

SEQ ID NO: 17919 - DNA, 267 bp, Homo sapiens
  MAP TO AC007405.2; EXPRESSED IN BT474, SIGNAL = 3.5; EXPRESSED IN HELA, SIGNAL = 2.3; EXPRESSED IN PLACENTA, SIGNAL = 2.2; EXPRESSED IN HBL100, SIGNAL = 5.5; EXPRESSED IN FETAL LIVER, SIGNAL = 3.1; EXPRESSED IN LUNG, SIGNAL = 1.6; EXPRESSED IN ADULT LIVER, SIGNAL = 1.2; EXPRESSED IN BRAIN, SIGNAL = 6.8; EXPRESSED IN BONE MARROW, SIGNAL = 8.3; EXPRESSED IN HEART, SIGNAL = 2.3; SWISSPROT HIT: P18088, EVALUE 2.00e-42; NT HIT: gi11428863, EVALUE 0.00e+00; EST_HUMAN HIT: AA890623.1, EVALUE 0.00e+00
atctgcttccggctaagaacggtgaggagcaaaccgtgcaattcctcctggaagtggtggacatactcctcaactatgtccgcaagacatttgatcgctccaccaaggtgctggactttcatcacccacaccagttgctggaaggcatggagggcttcaacttggagctctctgaccaccccgagtccctggagcagatcctggttgactgcagagacaccttgaagtatggggttcgcacaggtaaggaggagagttgggtagaca

SEQ ID NO: 17920 - DNA, 102 bp, Homo sapiens
  MAP TO AC007405.2; EXPRESSED IN LUNG, SIGNAL = 1.9; EXPRESSED IN HEART, SIGNAL = 1.6; EXPRESSED IN PLACENTA, SIGNAL = 1.8; EXPRESSED IN BT474, SIGNAL = 1.4; EXPRESSED IN BONE MARROW, SIGNAL = 1.9; EXPRESSED IN HBL100, SIGNAL = 1.4; EXPRESSED IN FETAL LIVER, SIGNAL = 1.7; EXPRESSED IN HELA, SIGNAL = 1.7; EXPRESSED IN BRAIN, SIGNAL = 2.4; EXPRESSED IN ADULT LIVER, SIGNAL = 1.7; NT HIT: AB026493.1, EVALUE 5.50e-02; EST_HUMAN HIT: AW794740.1, EVALUE 4.00e-03; SWISSPROT HIT: Q11131, EVALUE 1.10e+00
gtcaagcagcctgtggagaggcccaagtcgagaggcaaggagaccctgcacatctaccagctgttcttcccagccatggtgtgagctgggaagtgggtcctc

SEQ ID NO: 17921 - DNA, 329 bp, Homo sapiens
  MAP TO AC007404.2; EXPRESSED IN PLACENTA, SIGNAL = 1.1; EXPRESSED IN BT474, SIGNAL = 1.6; EXPRESSED IN HBL100, SIGNAL = 0.98; EXPRESSED IN FETAL LIVER, SIGNAL = 1.8; EXPRESSED IN HELA, SIGNAL = 0.8; EXPRESSED IN BRAIN, SIGNAL = 1.9; EXPRESSED IN BONE MARROW, SIGNAL = 1.1; EXPRESSED IN ADULT LIVER, SIGNAL = 1.1; EXPRESSED IN HEART, SIGNAL = 1.6; EXPRESSED IN LUNG, SIGNAL = 1.4; NT HIT: AB037835.1, EVALUE 0.00e+00; EST_HUMAN HIT: N46697.1, EVALUE 0.00e+00; SWISSPROT HIT: Q9ZDS7, EVALUE 4.80e+00
ttaaaaaaaacttgtttttagcttaattgttggtgcagaatgtatggcgggggctggttgtctggcagccgctttagctttgctcgcttggcttgctcgaacggcagtttctagacgcactttcaactcaggagcagcccccattactgtcttgaaagcatgtggatacagaggtccaatatgcattaaattctggagtgcaaactcatgaagatctttggaagctgaacttgctgaggcaaaagaattttcatccagcaggtaagatatcaaagtgggaactaaaagagcaagtagctggactcctgtaaataataaagtatgaaaaa

SEQ ID NO: 17922 - DNA, 163 bp, Homo sapiens
  MAP TO AC007404.2; EXPRESSED IN BONE MARROW, SIGNAL =  15; EXPRESSED IN HEART, SIGNAL =  11; EXPRESSED IN PLACENTA, SIGNAL = 7.9; EXPRESSED IN BT474, SIGNAL =  18; EXPRESSED IN HBL100, SIGNAL =  18; EXPRESSED IN LUNG, SIGNAL =  16; EXPRESSED IN HELA, SIGNAL =  18; EXPRESSED IN ADULT LIVER, SIGNAL =  11; EXPRESSED IN BRAIN, SIGNAL =  14; EXPRESSED IN FETAL LIVER, SIGNAL =  12; SWISSPROT HIT: P40126, EVALUE 2.20e+00; NT HIT: AB037835.1, EVALUE 4.00e-87; EST_HUMAN HIT: BF696591.1, EVALUE 8.70e+00
ctagcaataaaagttgcttctccaaccacctgagccattcttccaagagcttcccccgctgcacaacgtaagatggggtttgggttgtccagaggacccataaccagtgtcagggcagatttacgaacttcctcaggtcctaaagtacttttgttttcagcta

SEQ ID NO: 17923 - DNA, 259 bp, Homo sapiens
  MAP TO AC007395.2; EXPRESSED IN PLACENTA, SIGNAL = 6.5; EXPRESSED IN ADULT LIVER, SIGNAL = 4.6; EXPRESSED IN HEART, SIGNAL = 3.6; EXPRESSED IN BONE MARROW, SIGNAL =  46; EXPRESSED IN BRAIN, SIGNAL = 2.7; EXPRESSED IN BT474, SIGNAL =  24; EXPRESSED IN HELA, SIGNAL = 8.4; EXPRESSED IN LUNG, SIGNAL = 8.4; EXPRESSED IN FETAL LIVER, SIGNAL =  16; EXPRESSED IN HBL100, SIGNAL =  71; SWISSPROT HIT: P02314, EVALUE 6.00e-09; EST_HUMAN HIT: BE785137.1, EVALUE 2.00e-88; NT HIT: gi5031748, EVALUE 2.00e-90
tcacttggcctctccatcaccttcagcttccctggcctggtctgttatggcatctcctttttctgcagggtaattcccctccttgccagcatcagcttttccctttttccctttaggtaccttctctcccttctttgcaggggcctttttaggcttgggctctggctttggaggagcaggtttagcagacaaccttgtggatcttctctgaggtgtgtccaccttggctttatctcctttaacatccccttcggtcttc

SEQ ID NO: 17924 - DNA, 93 bp, Homo sapiens
  MAP TO AC007395.2; EXPRESSED IN BONE MARROW, SIGNAL = 1.9; EXPRESSED IN PLACENTA, SIGNAL = 1.7; EXPRESSED IN HBL100, SIGNAL = 1.8; EXPRESSED IN FETAL LIVER, SIGNAL = 1.5; EXPRESSED IN HELA, SIGNAL = 1.9; EXPRESSED IN ADULT LIVER, SIGNAL = 1.6; EXPRESSED IN BRAIN, SIGNAL = 1.8; EXPRESSED IN HEART, SIGNAL = 1.7; EXPRESSED IN BT474, SIGNAL = 1.4; EXPRESSED IN LUNG, SIGNAL =   2; NT HIT: gi7657290, EVALUE 1.00e-45; EST_HUMAN HIT: AI345984.1, EVALUE 1.30e-02
ctctggtcccggggaaaacacccacagtccgtgctgcattaatctgcctgacgctggtcctggtcgcctccgtcctgctgcaggccgtccttt

SEQ ID NO: 17925 - DNA, 231 bp, Homo sapiens
  MAP TO AC007394.2; EXPRESSED IN HELA, SIGNAL = 1.4; EXPRESSED IN ADULT LIVER, SIGNAL = 0.96; EXPRESSED IN BRAIN, SIGNAL = 1.1; EXPRESSED IN BT474, SIGNAL =   1; EXPRESSED IN BONE MARROW, SIGNAL = 0.9; EXPRESSED IN LUNG, SIGNAL = 1.1; EXPRESSED IN HEART, SIGNAL =   1; EXPRESSED IN PLACENTA, SIGNAL = 1.6; EXPRESSED IN HBL100, SIGNAL = 1.2; EXPRESSED IN FETAL LIVER, SIGNAL = 0.92; NT HIT: AF020092.1, EVALUE 2.00e-74; EST_HUMAN HIT: BE004109.1, EVALUE 7.00e-16; SWISSPROT HIT: P10265, EVALUE 7.00e-23
acaggaggctttggtaatactaatccagcatgaagggccgtgcactgggttaatcaagtatctgacaaaagacctatttgcacagtaactattcagggaaaagattttgaaggagtagaagatactggagctgatgtctctattattgctgtaaatcaatggccctggcactggcctaagcaaaaggcatccattggtattgttggagtaggagctgccttcagagttctt

SEQ ID NO: 17926 - DNA, 156 bp, Homo sapiens; identical to SEQ ID NO: 16958
  MAP TO AC007389.2; EXPRESSED IN PLACENTA, SIGNAL =  48; EXPRESSED IN FETAL LIVER, SIGNAL =  34; EXPRESSED IN LUNG, SIGNAL =  11; EXPRESSED IN ADULT LIVER, SIGNAL =  40; EXPRESSED IN BONE MARROW, SIGNAL = 3.3; EXPRESSED IN HBL100, SIGNAL =  36; EXPRESSED IN BRAIN, SIGNAL = 3.7; EXPRESSED IN HEART, SIGNAL = 4.2; EXPRESSED IN BT474, SIGNAL = 1.9e+02; EXPRESSED IN HELA, SIGNAL =  34; NT HIT: X12883.1, EVALUE 1.00e-50; SWISSPROT HIT: P05783, EVALUE 4.00e-14; EST_HUMAN HIT: AA196273.1, EVALUE 4.00e-51

SEQ ID NO: 17927 - DNA, 230 bp, Homo sapiens
  MAP TO AC007389.2; EXPRESSED IN BONE MARROW, SIGNAL = 1.9; EXPRESSED IN HBL100, SIGNAL = 5.2; EXPRESSED IN ADULT LIVER, SIGNAL = 2.4; EXPRESSED IN BRAIN, SIGNAL = 3.6; EXPRESSED IN PLACENTA, SIGNAL = 0.89; EXPRESSED IN BT474, SIGNAL = 1.7; EXPRESSED IN FETAL LIVER, SIGNAL = 3.5; EXPRESSED IN LUNG, SIGNAL = 1.6; EXPRESSED IN HELA, SIGNAL = 3.1; EXPRESSED IN HEART, SIGNAL = 3.3; EST_HUMAN HIT: BF664427.1, EVALUE 2.00e-23; SWISSPROT HIT: P16053, EVALUE 2.70e-01; NT HIT: gi11450328, EVALUE 7.00e-25
tttttgaggaacttccatactgttttccacggtgggtgtactaatttttttgccagatttcttaactccacctgtatccagggccccttcagcctctgtttgtttctgcttgaaagccacatcttccttgtccatctccttggcctgttccttgtgctgtttcaggggctgcttcttgccacctttgtgtccagacatggcacctgctgcctctttaaaaacatatggca

SEQ ID NO: 17928 - DNA, 499 bp, Homo sapiens
  MAP TO AC007389.2; EXPRESSED IN LUNG, SIGNAL = 5.5; EXPRESSED IN HELA, SIGNAL =  35; EXPRESSED IN ADULT LIVER, SIGNAL =  14; EXPRESSED IN BRAIN, SIGNAL = 0.75; EXPRESSED IN HEART, SIGNAL =   1; EXPRESSED IN PLACENTA, SIGNAL = 8.6; EXPRESSED IN BT474, SIGNAL =  52; EXPRESSED IN BONE MARROW, SIGNAL = 1.2; EXPRESSED IN HBL100, SIGNAL =  15; EXPRESSED IN FETAL LIVER, SIGNAL = 8.6; NT HIT: gi11434787, EVALUE 0.00e+00; EST_HUMAN HIT: BE378641.1, EVALUE 0.00e+00; SWISSPROT HIT: P05783, EVALUE 9.00e-78
actgcctggcctcctacctggacagagtgaggagactggataccaagaatcggaagctggagagcaaaatccgggagcacctggagaagaagggaccccaagtcagagactggagccattacttcaagaccgtggaggacctgagggctcagatcttcgcaaatactgtggacaatgcccgcatcgttctgcaagtcgacaatgcccatcttgctgatgactttagagtcaagtatgtgacagagctggccatgcgccagtctatggagagcgacatccatgggctccgcaaggtcattgatgacaccaatgtcactcggctgcagctggaaacagagatcgaggctctcaaggaggagctgctcttcatgaagaagaacgaagaaggggaaataaaaggcctacaagcccagattgccagctctgggttgactgtggaggtagatatccccaaatctcaggaccttgccaagctcatggcagacatctgggcccaata

SEQ ID NO: 17929 - DNA, 103 bp, Homo sapiens
  MAP TO AC007385.2; EXPRESSED IN FETAL LIVER, SIGNAL = 3.9; EXPRESSED IN LUNG, SIGNAL = 4.6; EXPRESSED IN HELA, SIGNAL = 4.9; EXPRESSED IN HEART, SIGNAL =   4; EXPRESSED IN BT474, SIGNAL = 4.3; EXPRESSED IN BONE MARROW, SIGNAL = 2.5; EXPRESSED IN PLACENTA, SIGNAL = 2.8; EXPRESSED IN BRAIN, SIGNAL = 3.9; EXPRESSED IN ADULT LIVER, SIGNAL = 3.4; EXPRESSED IN HBL100, SIGNAL = 3.6; EST_HUMAN HIT: AI286021.1, EVALUE 2.00e-04; NT HIT: U73107.1, EVALUE 1.90e-01; SWISSPROT HIT: P30388, EVALUE 3.20e+00
tgaatagcaacgttccaaacagcaagagggcaaggaacaagagcatcagtcacacgctgggccccccaagaaacagatgctgagatggagattctcaagccaa

SEQ ID NO: 17930 - DNA, 217 bp, Homo sapiens
  MAP TO AC007319.2; EXPRESSED IN PLACENTA, SIGNAL = 0.89; EXPRESSED IN BONE MARROW, SIGNAL =   1; EXPRESSED IN ADULT LIVER, SIGNAL = 0.98; EXPRESSED IN HEART, SIGNAL = 1.1; EXPRESSED IN HELA, SIGNAL = 0.6; EXPRESSED IN BT474, SIGNAL =   1; EXPRESSED IN HBL100, SIGNAL = 0.8; EXPRESSED IN FETAL LIVER, SIGNAL = 0.97; EXPRESSED IN LUNG, SIGNAL = 3.4; EXPRESSED IN BRAIN, SIGNAL = 0.8; EST_HUMAN HIT: AA298652.1, EVALUE 1.00e-110; SWISSPROT HIT: Q16602, EVALUE 8.00e-36; NT HIT: gi11430603, EVALUE 1.00e-110
gaagtgcataaggatgtgcatgatgtagtcatatacctcctctgcaatctttccttcaggtcgccatggaatcagcacaaattcaatgccaagcaatggcaccaagataagagtagctctcacagctttcatgtacagattggattccgcttggtgtgtaacttttaacttggtgatgagaacgcgtacaatatttaacaagaaaaaaagattcacc

SEQ ID NO: 17931 - DNA, 150 bp, Homo sapiens
  MAP TO AC007314.3; EXPRESSED IN BONE MARROW, SIGNAL =   9; EXPRESSED IN FETAL LIVER, SIGNAL =  17; EXPRESSED IN ADULT LIVER, SIGNAL = 8.2; EXPRESSED IN BRAIN, SIGNAL = 7.9; EXPRESSED IN PLACENTA, SIGNAL =  11; EXPRESSED IN BT474, SIGNAL =  13; EXPRESSED IN HBL100, SIGNAL =  15; EXPRESSED IN LUNG, SIGNAL =  16; EXPRESSED IN HELA, SIGNAL =  21; EXPRESSED IN HEART, SIGNAL = 7.5; NT HIT: AB023310.1, EVALUE 2.90e-01; SWISSPROT HIT: P48234, EVALUE 8.00e-05; EST_HUMAN HIT: AU142750.1, EVALUE 7.00e-28
ggagttcttattccacatcttgacaattcgagagtcagcagacaaaatcagatctaatgaatcctggaaatgaacggacttaatgggcagcccatactggtgatctttaactagcaatggcttatcagatcgaaggtcatataataaaac

SEQ ID NO: 17932 - DNA, 173 bp, Homo sapiens
  MAP TO AC007285.2; EXPRESSED IN PLACENTA, SIGNAL = 2.1; EXPRESSED IN HBL100, SIGNAL = 1.2; EXPRESSED IN FETAL LIVER, SIGNAL = 1.5; EXPRESSED IN HELA, SIGNAL =   2; EXPRESSED IN BRAIN, SIGNAL = 1.5; EXPRESSED IN HEART, SIGNAL = 2.1; EXPRESSED IN BT474, SIGNAL = 1.6; EXPRESSED IN BONE MARROW, SIGNAL = 1.6; EXPRESSED IN LUNG, SIGNAL = 2.2; EXPRESSED IN ADULT LIVER, SIGNAL = 1.4; SWISSPROT HIT: O60046, EVALUE 3.80e-02; NT HIT: gi11419374, EVALUE 5.00e-93; EST_HUMAN HIT: AI750643.1, EVALUE 8.00e-93
ttttctaagtagccttcatagtggaccaacatcaaatcccctcctttggtcttgcgatggcagatgaatggcttctggagaacttcaattttcacttctggttcagggatcaaagccccaatcaaagaagtgacgaacagagtcaagaccgcgttccacaagaaaagcctcat

SEQ ID NO: 17933 - DNA, 135 bp, Homo sapiens
  MAP TO AC007285.2; EXPRESSED IN PLACENTA, SIGNAL = 2.2; EXPRESSED IN LUNG, SIGNAL = 2.1; EXPRESSED IN HELA, SIGNAL = 0.59; EXPRESSED IN BT474, SIGNAL = 4.3; EXPRESSED IN BONE MARROW, SIGNAL = 1.7; EXPRESSED IN HBL100, SIGNAL = 1.5; EXPRESSED IN FETAL LIVER, SIGNAL = 1.3; EXPRESSED IN ADULT LIVER, SIGNAL = 2.3; EXPRESSED IN BRAIN, SIGNAL = 3.1; EXPRESSED IN HEART, SIGNAL = 1.9; NT HIT: gi11419376, EVALUE 2.00e-70; EST_HUMAN HIT: AW204962.1, EVALUE 3.00e-70
atcagcagccgagaaatacacaacctcttgcacttcatctctgggccgggctgaatttttcccaaataccaccagaccatccttagcacgtggagggaaggcaacaaaacagtaacttggaggagctgcagccat

SEQ ID NO: 17934 - DNA, 118 bp, Homo sapiens
  MAP TO AC007275.3; EXPRESSED IN HBL100, SIGNAL = 3.8; EXPRESSED IN FETAL LIVER, SIGNAL =   5; EXPRESSED IN ADULT LIVER, SIGNAL = 4.3; EXPRESSED IN BRAIN, SIGNAL =   4; EXPRESSED IN HEART, SIGNAL = 3.6; EXPRESSED IN BT474, SIGNAL = 3.7; EXPRESSED IN LUNG, SIGNAL = 5.2; EXPRESSED IN PLACENTA, SIGNAL =  21; EXPRESSED IN HELA, SIGNAL = 5.2; EXPRESSED IN BONE MARROW, SIGNAL = 4.5; NT HIT: AF074981.1, EVALUE 1.00e+00; EST_HUMAN HIT: R17571.1, EVALUE 3.00e-11; SWISSPROT HIT: Q42699, EVALUE 5.30e+00
gtgcataaagagaaattatggcatattgcatattgctgggcccagcacccttatgatgtgactcttctgcccatgacagagccaccgaatatacatcgacatatctttggcccattat

SEQ ID NO: 17935 - DNA, 101 bp, Homo sapiens
  MAP TO AC007275.3; EXPRESSED IN HBL100, SIGNAL = 2.1; EXPRESSED IN HEART, SIGNAL =   2; EXPRESSED IN PLACENTA, SIGNAL = 2.5; EXPRESSED IN BT474, SIGNAL = 4.8; EXPRESSED IN FETAL LIVER, SIGNAL = 1.9; EXPRESSED IN LUNG, SIGNAL = 2.5; EXPRESSED IN HELA, SIGNAL = 2.3; EXPRESSED IN ADULT LIVER, SIGNAL = 1.5; EXPRESSED IN BRAIN, SIGNAL = 2.2; EXPRESSED IN BONE MARROW, SIGNAL = 2.5; NT HIT: AL163203.2, EVALUE 2.00e-04; EST_HUMAN HIT: BE738102.1, EVALUE 3.00e-04
gagtccatgagacagacgcagcaggtggtgtcctgtgtgaggaatgctgcaacaaatcatgatgaaaccctcaaaaatgaaggtgaaaagactgtgcagtg

SEQ ID NO: 17936 - DNA, 527 bp, Homo sapiens
  MAP TO AC007275.3; EXPRESSED IN FETAL LIVER, SIGNAL = 0.85; EXPRESSED IN BRAIN, SIGNAL = 0.76; EXPRESSED IN PLACENTA, SIGNAL = 0.63; EXPRESSED IN BT474, SIGNAL = 1.4; EXPRESSED IN BONE MARROW, SIGNAL = 0.65; EXPRESSED IN LUNG, SIGNAL = 0.67; EXPRESSED IN HELA, SIGNAL = 2.1; EXPRESSED IN ADULT LIVER, SIGNAL = 0.82; EXPRESSED IN HEART, SIGNAL = 0.86; NT HIT: M32788.1, EVALUE 3.00e-35; EST_HUMAN HIT: BE072409.1, EVALUE 6.00e-52; SWISSPROT HIT: P10272, EVALUE 9.00e-32
tgtcccacctaaatgggtggtataatgtagatgactgactaaagtttctccaagagcttggggtatgaagattctagagtcaggaagaatccaccaacctttctgatttttatttgctctaagatgtgaagccaatttttcttcttctgctgagtatgcagggttgtcaggcagatctggctgtggaaaagaaactgctggcagcaggtttatgggccaaactgaagaccgtgccacttcctgaggtgctgaatcagctttttggttaccgcaggcaatggccgtgttttctttgtgatgtcctttacaatggattacagccacctgctgagggaaccacatggcttcaagcagggctagaatttcctctttgttcttgataatttttccggctgaagtgagtaacccccgttcttggtagatggctccaggtacatgcacagtagcaacagcatgcctgctgtcagtgtaaatgttaatacgtttattcttaccccatcggagagcctgagtaagggtgattaatt

SEQ ID NO: 17937 - DNA, 113 bp, Homo sapiens
  MAP TO AC007254.2; EXPRESSED IN BT474, SIGNAL = 1.3; EXPRESSED IN BONE MARROW, SIGNAL = 1.4; EXPRESSED IN FETAL LIVER, SIGNAL = 1.1; EXPRESSED IN HELA, SIGNAL = 0.8; EXPRESSED IN ADULT LIVER, SIGNAL = 1.1; EXPRESSED IN BRAIN, SIGNAL = 1.6; EXPRESSED IN PLACENTA, SIGNAL = 1.9; EXPRESSED IN HBL100, SIGNAL = 1.1; EXPRESSED IN HEART, SIGNAL = 1.2; EXPRESSED IN LUNG, SIGNAL = 1.2; NT HIT: AF157623.1, EVALUE 8.30e-01; EST_HUMAN HIT: T11909.1, EVALUE 2.00e-35; SWISSPROT HIT: O06812, EVALUE 4.00e+00
aaatgtcaatgttgagaggagaaagctcatggtcagtgaaactgcaggaaacagaagcacatttggatatgtccacctcactagaattcctaccatagggaaaaatgaagata

SEQ ID NO: 17938 - DNA, 151 bp, Homo sapiens
  MAP TO AC007254.2; EXPRESSED IN PLACENTA, SIGNAL = 1.5; EXPRESSED IN FETAL LIVER, SIGNAL = 1.2; EXPRESSED IN LUNG, SIGNAL = 1.3; EXPRESSED IN BT474, SIGNAL = 0.97; EXPRESSED IN HEART, SIGNAL = 4.8; EXPRESSED IN BRAIN, SIGNAL = 2.4; EXPRESSED IN ADULT LIVER, SIGNAL = 0.88; EXPRESSED IN HELA, SIGNAL = 5.6; EXPRESSED IN HBL100, SIGNAL = 1.2; EXPRESSED IN BONE MARROW, SIGNAL = 0.96; EST_HUMAN HIT: T19755.1, EVALUE 5.00e-65; SWISSPROT HIT: Q01728, EVALUE 1.00e-14
atggcagcgatggaccaggccacaccgattcccaggaagacattcaccgcgttgctgcccgtgacgttacctatggaggcgtctgcatactggtcctgggtggctgccactttgctggcaaatgtgtctgcagaggaagaagagaaagtca

SEQ ID NO: 17939 - DNA, 198 bp, Homo sapiens
  MAP TO AC007245.3; EXPRESSED IN BONE MARROW, SIGNAL = 2.9; EXPRESSED IN HBL100, SIGNAL = 1.9; EXPRESSED IN ADULT LIVER, SIGNAL = 2.3; EXPRESSED IN BRAIN, SIGNAL = 3.2; EXPRESSED IN PLACENTA, SIGNAL = 3.3; EXPRESSED IN BT474, SIGNAL = 1.7; EXPRESSED IN FETAL LIVER, SIGNAL = 2.2; EXPRESSED IN LUNG, SIGNAL = 2.7; EXPRESSED IN HELA, SIGNAL = 2.6; EXPRESSED IN HEART, SIGNAL = 2.2; NT HIT: AJ289880.1, EVALUE 2.00e-06; EST_HUMAN HIT: N58977.1, EVALUE 2.00e-86; SWISSPROT HIT: O42280, EVALUE 4.30e-01
tgtgttacagttgcctgcagcactcagtacagtaacatgctgcacagctttgtaacctagaaacaacaggctacacctatagcctctgtgtagtaggctgtgccatctgggtttgtgttctacaacgttgcattctacaatgttcacacaaggatgaaatcgcctaaggacacatttctcagaatgcttcctcattgt

SEQ ID NO: 17940 - DNA, 256 bp, Homo sapiens
  MAP TO AC007239.2; EXPRESSED IN BONE MARROW, SIGNAL =   3; EXPRESSED IN HBL100, SIGNAL =   6; EXPRESSED IN ADULT LIVER, SIGNAL = 2.3; EXPRESSED IN BT474, SIGNAL = 3.6; EXPRESSED IN FETAL LIVER, SIGNAL = 2.9; EXPRESSED IN LUNG, SIGNAL = 2.2; EXPRESSED IN HELA, SIGNAL = 2.7; EXPRESSED IN BRAIN, SIGNAL = 1.8; EXPRESSED IN PLACENTA, SIGNAL =   3; EXPRESSED IN HEART, SIGNAL = 2.8; NT HIT: AF267242.1, EVALUE 9.60e+00
ttctgagactgggcacagttcgcatttcaacctcaacttgactgtcattgaaataactcctttctttcaggagtttctctctgcacttcctggtttcatcaacagaggtcactgtggcactactactactaacagcctatccagccagcaaaacaataaagaaaaattcattcattcagtcaataaccatttactgaatgttatcagacactactgccaggcattggggataagaaagtgtataaaggaggcagtc

SEQ ID NO: 17941 - DNA, 199 bp, Homo sapiens
  MAP TO AC007224.2; EXPRESSED IN BT474, SIGNAL = 3.1; EXPRESSED IN BONE MARROW, SIGNAL = 1.8; EXPRESSED IN HBL100, SIGNAL = 2.4; EXPRESSED IN FETAL LIVER, SIGNAL = 2.4; EXPRESSED IN HELA, SIGNAL = 1.8; EXPRESSED IN ADULT LIVER, SIGNAL = 6.8; EXPRESSED IN BRAIN, SIGNAL = 3.1; EXPRESSED IN PLACENTA, SIGNAL = 6.2; EXPRESSED IN LUNG, SIGNAL = 2.9; EXPRESSED IN HEART, SIGNAL = 1.5; NT HIT: gi11430997, EVALUE 6.00e-90; EST_HUMAN HIT: AI815143.1, EVALUE 2.00e-46; SWISSPROT HIT: P50554, EVALUE 3.00e-30
catggctgcgccttcttggtggacgaggtccagaccggaggaggctgcacgggcaagttctgggcccatgagcactggggcctggatgacccagcagacgtgatgaccttcagcaagaagatgatgactgggggcttcttccacaaggaggagttcaggcctaatgctgtgagttggagccaaccttctctctacatcc

SEQ ID NO: 17942 - DNA, 114 bp, Homo sapiens
  MAP TO AC007224.2; EXPRESSED IN PLACENTA, SIGNAL = 2.9; EXPRESSED IN LUNG, SIGNAL = 3.4; EXPRESSED IN ADULT LIVER, SIGNAL = 2.3; EXPRESSED IN BONE MARROW, SIGNAL = 3.8; EXPRESSED IN HBL100, SIGNAL = 3.6; EXPRESSED IN FETAL LIVER, SIGNAL = 3.6; EXPRESSED IN HELA, SIGNAL =   3; EXPRESSED IN BRAIN, SIGNAL =   3; EXPRESSED IN BT474, SIGNAL = 3.3; EXPRESSED IN HEART, SIGNAL = 4.5; EST_HUMAN HIT: AW797948.1, EVALUE 5.00e-58; SWISSPROT HIT: P40389, EVALUE 2.70e-01; NT HIT: AE005070.1, EVALUE 2.50e-01
acatcctgttccgacaggacctcttccgaggatgtacagcgctggagctcggggccggcacggggctcgctagcatcatcgcagccaccatggcacggaccgtttattgtacag

SEQ ID NO: 17943 - DNA, 77 bp, Homo sapiens
  MAP TO AC007219.1; EXPRESSED IN HELA, SIGNAL = 1.8; EXPRESSED IN ADULT LIVER, SIGNAL = 1.1; EXPRESSED IN BRAIN, SIGNAL = 1.4; EXPRESSED IN PLACENTA, SIGNAL = 1.3; EXPRESSED IN BT474, SIGNAL = 1.3; EXPRESSED IN HBL100, SIGNAL = 2.4; EXPRESSED IN LUNG, SIGNAL = 1.4; EXPRESSED IN HEART, SIGNAL = 1.2; EXPRESSED IN BONE MARROW, SIGNAL = 1.4; EXPRESSED IN FETAL LIVER, SIGNAL = 1.3; NT HIT: U87630.1, EVALUE 9.50e+00; EST_HUMAN HIT: BF206115.1, EVALUE 3.60e+00
atctgtcccagggttagagagccaatatcacagtcagtatcgcagtcgacagacacaaccctgccaatgatgactgt

SEQ ID NO: 17944 - DNA, 165 bp, Homo sapiens
  MAP TO AC007179.3; EXPRESSED IN HBL100, SIGNAL = 1.3; EXPRESSED IN LUNG, SIGNAL = 1.5; EXPRESSED IN BRAIN, SIGNAL = 1.9; EXPRESSED IN PLACENTA, SIGNAL =   2; EXPRESSED IN BT474, SIGNAL = 1.5; EXPRESSED IN BONE MARROW, SIGNAL = 1.8; EXPRESSED IN FETAL LIVER, SIGNAL =   1; EXPRESSED IN HELA, SIGNAL = 1.6; EXPRESSED IN ADULT LIVER, SIGNAL = 1.5; EXPRESSED IN HEART, SIGNAL = 1.5; NT HIT: U78027.1, EVALUE 1.00e-28; EST_HUMAN HIT: AA485766.1, EVALUE 1.00e-42; SWISSPROT HIT: P08547, EVALUE 6.00e-15
aatggaatggtacctcacatctcagtactattgttgaatataaatggcataaatgctccacttaaaagatacagaattgcagaatggataagaattcaccaaccaactatctgctgccttcaagagactcaccaaacacataaggactcacacaaatttaaggta

SEQ ID NO: 17945 - DNA, 114 bp, Homo sapiens
  MAP TO AC007179.3; EXPRESSED IN BT474, SIGNAL = 1.1; EXPRESSED IN HELA, SIGNAL = 1.3; EXPRESSED IN HEART, SIGNAL = 1.2; EXPRESSED IN PLACENTA, SIGNAL = 1.4; EXPRESSED IN FETAL LIVER, SIGNAL = 0.85; EXPRESSED IN LUNG, SIGNAL =   1; EXPRESSED IN ADULT LIVER, SIGNAL = 1.2; EXPRESSED IN BRAIN, SIGNAL = 1.1; EXPRESSED IN BONE MARROW, SIGNAL = 0.88; EXPRESSED IN HBL100, SIGNAL = 1.2; SWISSPROT HIT: P21573, EVALUE 5.30e+00; NT HIT: AL163278.2, EVALUE 3.90e+00
cctccttaatgaggagggggagaaggagcaggaatatcgtggaaggcctcagggagccgacagccttaaatcaaatcctaatgtgcgccttgctggccaggtccttcagagcaa

SEQ ID NO: 17946 - DNA, 157 bp, Homo sapiens
  MAP TO AC007179.3; EXPRESSED IN PLACENTA, SIGNAL = 0.91; EXPRESSED IN BT474, SIGNAL = 1.3; EXPRESSED IN LUNG, SIGNAL = 1.2; EXPRESSED IN FETAL LIVER, SIGNAL = 0.79; EXPRESSED IN ADULT LIVER, SIGNAL =   1; EXPRESSED IN BRAIN, SIGNAL = 1.2; EXPRESSED IN BONE MARROW, SIGNAL = 0.79; EXPRESSED IN HBL100, SIGNAL = 1.3; EXPRESSED IN HELA, SIGNAL = 1.7; EXPRESSED IN HEART, SIGNAL = 1.6; EST_HUMAN HIT: BE568456.1, EVALUE 3.40e-02; NT HIT: gi8922391, EVALUE 2.00e-02; SWISSPROT HIT: P33634, EVALUE 8.70e+00
ttcattcctgccgcagagagtccagcacattttcctatctgcacgctcctcagttggggagttttcttggattggtagttccacagaatgcaacagaagcaaaactttcaagggtctgattgttggcctagcagctccaccagttgctgacattgga

SEQ ID NO: 17947 - DNA, 184 bp, Homo sapiens
  MAP TO AC007129.2; EXPRESSED IN HBL100, SIGNAL = 4.2; EXPRESSED IN LUNG, SIGNAL =   3; EXPRESSED IN BT474, SIGNAL = 5.3; EXPRESSED IN BONE MARROW, SIGNAL = 3.3; EXPRESSED IN FETAL LIVER, SIGNAL =   3; EXPRESSED IN HELA, SIGNAL = 3.2; EXPRESSED IN ADULT LIVER, SIGNAL = 3.6; EXPRESSED IN BRAIN, SIGNAL = 2.8; EXPRESSED IN PLACENTA, SIGNAL = 2.6; EXPRESSED IN HEART, SIGNAL =   3; NT HIT: X77395.1, EVALUE 4.30e-01; SWISSPROT HIT: Q12446, EVALUE 3.30e-01
atgatgccaaatagggtttttaagaatggggcgaaaggtgaaggtgtcaagtgcagcgaggattcctgcagctctttccttgtgtgggggtatgtcagcgtcagtgcaggctgcggtgtctggctctgtccttctgacatctgcggtggctgtggtccacctggagaggtggttatgtaggact

SEQ ID NO: 17948 - DNA, 274 bp, Homo sapiens
  MAP TO AC007129.2; EXPRESSED IN PLACENTA, SIGNAL = 1.5; EXPRESSED IN FETAL LIVER, SIGNAL = 2.3; EXPRESSED IN LUNG, SIGNAL = 1.2; EXPRESSED IN HELA, SIGNAL = 2.6; EXPRESSED IN ADULT LIVER, SIGNAL = 2.2; EXPRESSED IN BT474, SIGNAL = 3.9; EXPRESSED IN HEART, SIGNAL = 4.1; EXPRESSED IN BRAIN, SIGNAL = 2.7; EXPRESSED IN HBL100, SIGNAL = 3.9; EXPRESSED IN BONE MARROW, SIGNAL =   2; SWISSPROT HIT: O62855, EVALUE 1.00e-01; NT HIT: D83201.1, EVALUE 6.60e-01; EST_HUMAN HIT: BE730716.1, EVALUE 2.50e-01
atctgtgacccagccctttctcctgatagaccgtggaactgcaggcagaagatgcacggcgtctcatctcagatacacagtggtggtgccgggatggtatgtgctctccattctccctggagggctcttggtccatcttgcttcagtgactagcatgagaggagtggtgatagcagcaggtgccgtggccactgggcaggcggggtatggagaacgcagccacacggccgccactcctgctatggaggcaccaggtcccgcaacactggtacca

SEQ ID NO: 17949 - DNA, 392 bp, Homo sapiens
  MAP TO AC007068.17; EXPRESSED IN BONE MARROW, SIGNAL =  24; EXPRESSED IN HBL100, SIGNAL =  94; EXPRESSED IN ADULT LIVER, SIGNAL = 8.6; EXPRESSED IN BRAIN, SIGNAL =  11; EXPRESSED IN PLACENTA, SIGNAL = 8.5; EXPRESSED IN BT474, SIGNAL =  38; EXPRESSED IN LUNG, SIGNAL =  10; EXPRESSED IN HELA, SIGNAL =  42; EXPRESSED IN FETAL LIVER, SIGNAL =  24; EXPRESSED IN HEART, SIGNAL = 9.6; EST_HUMAN HIT: BF033536.1, EVALUE 1.00e-109; NT HIT: gi10835062, EVALUE 1.00e-109; SWISSPROT HIT: P06748, EVALUE 4.00e-35
acttgcttgcatttttgctttaatgtcttctacagaactagatccttttggtgttttaggagatttttcctgttttttgaaggattcttgtccttttgatcttggtgttgatgatggttttgagtcttttccattctgatttgacttttgtgcatttttggctggagtatctcgtatagatttcttcactggcgctttttcttcagcttcctcgtcatcatcatcatcatcatcttcatcatcatcatcatcagcagcagcagcaagttttacttttttctgcccacctccaggggcagactgctttccagatatacttaagagtttcacatcctcctcttcttcatcttctgactctgcaccttccttcacagctactaagtgctgtccac

SEQ ID NO: 17950 - DNA, 108 bp, Homo sapiens
  MAP TO AC007068.17; EXPRESSED IN LUNG, SIGNAL = 2.8; EXPRESSED IN HELA, SIGNAL =  11; EXPRESSED IN BRAIN, SIGNAL = 6.5; EXPRESSED IN HEART, SIGNAL = 7.1; EXPRESSED IN BONE MARROW, SIGNAL =   4; EXPRESSED IN PLACENTA, SIGNAL = 2.8; EXPRESSED IN BT474, SIGNAL =  15; EXPRESSED IN ADULT LIVER, SIGNAL = 7.5; EXPRESSED IN FETAL LIVER, SIGNAL = 6.6; EXPRESSED IN HBL100, SIGNAL =  12; NT HIT: Z99104.1, EVALUE 5.00e-02
ctctgactctgatgatgaatgctactcctatgaggagaagaaagctaagatattctaaataagcagtgacgatgagagtctggagtgttgttatgtgcagcccaccat

SEQ ID NO: 17951 - DNA, 152 bp, Homo sapiens
  MAP TO AC007055.3; EXPRESSED IN ADULT LIVER, SIGNAL = 1.2; EXPRESSED IN BONE MARROW, SIGNAL = 1.4; EXPRESSED IN HBL100, SIGNAL = 1.7; EXPRESSED IN LUNG, SIGNAL = 1.1; EXPRESSED IN HELA, SIGNAL = 1.7; EXPRESSED IN PLACENTA, SIGNAL = 1.7; EXPRESSED IN BT474, SIGNAL = 1.9; EXPRESSED IN FETAL LIVER, SIGNAL = 1.3; EXPRESSED IN BRAIN, SIGNAL = 1.3; EXPRESSED IN HEART, SIGNAL = 1.8; SWISSPROT HIT: P29138, EVALUE 6.60e+00
aaagtacaagaattacccaaccagtgagtgggtcaatcgggttctccctggggagtatgacactccccgacgagcaagggaagtacactcactccccaggacggctccgcagacgcagaccgaagcttatggtgggagggtgcattctagga

SEQ ID NO: 17952 - DNA, 223 bp, Homo sapiens
  MAP TO AC007055.3; EXPRESSED IN BT474, SIGNAL = 8.4; EXPRESSED IN HBL100, SIGNAL = 9.3; EXPRESSED IN BRAIN, SIGNAL = 7.1; EXPRESSED IN PLACENTA, SIGNAL = 5.4; EXPRESSED IN BONE MARROW, SIGNAL = 6.5; EXPRESSED IN FETAL LIVER, SIGNAL = 6.5; EXPRESSED IN LUNG, SIGNAL = 5.3; EXPRESSED IN HELA, SIGNAL = 8.4; EXPRESSED IN ADULT LIVER, SIGNAL =   6; EXPRESSED IN HEART, SIGNAL =  10; EST_HUMAN HIT: AI522170.1, EVALUE 5.10e-02; NT HIT: gi11345459, EVALUE 3.40e-02; SWISSPROT HIT: P53950, EVALUE 2.10e+00
gaaatggacagatggtgccagagaagagggcaccaaaggagaagggaaaggaataatgattgagcctcgactcagtgccaggcactattctagagttttttatacatttaatcttcacaacaacacattgggcactgtaaacaaaattccaaggattcaagccaccatggaccaaaggaatcagaatcttgaggatggggccagcattattgtcctcattcta

SEQ ID NO: 17953 - DNA, 91 bp, Homo sapiens
  MAP TO AC007055.3; EXPRESSED IN BONE MARROW, SIGNAL = 2.5; EXPRESSED IN HBL100, SIGNAL = 4.9; EXPRESSED IN FETAL LIVER, SIGNAL =   3; EXPRESSED IN LUNG, SIGNAL = 2.7; EXPRESSED IN ADULT LIVER, SIGNAL = 4.6; EXPRESSED IN BRAIN, SIGNAL = 3.4; EXPRESSED IN PLACENTA, SIGNAL = 3.6; EXPRESSED IN BT474, SIGNAL = 5.9; EXPRESSED IN HELA, SIGNAL = 5.8; EXPRESSED IN HEART, SIGNAL = 4.6; EST_HUMAN HIT: BF679194.1, EVALUE 3.00e-44; NT HIT: gi11434941, EVALUE 2.00e-44; SWISSPROT HIT: P49755, EVALUE 1.00e-11
caaacatgtcataatcttcagtggtaaaggcaaatttccccttggttgcatcctctttggagtagagaatatggccagcagaatctgtgat

SEQ ID NO: 17954 - DNA, 175 bp, Homo sapiens
  MAP TO AC007055.3; EXPRESSED IN HELA, SIGNAL = 1.6; EXPRESSED IN ADULT LIVER, SIGNAL = 1.3; EXPRESSED IN BRAIN, SIGNAL = 0.77; EXPRESSED IN HEART, SIGNAL = 0.9; EXPRESSED IN BT474, SIGNAL =   2; EXPRESSED IN BONE MARROW, SIGNAL = 1.1; EXPRESSED IN HBL100, SIGNAL = 1.6; EXPRESSED IN PLACENTA, SIGNAL = 3.2; EXPRESSED IN FETAL LIVER, SIGNAL = 1.2; EXPRESSED IN LUNG, SIGNAL = 2.7; SWISSPROT HIT: P80360, EVALUE 1.70e+00; EST_HUMAN HIT: BE885106.1, EVALUE 1.00e-82; NT HIT: AF120093.1, EVALUE 1.40e+00
aaagtgggtattccctgcacagacctgccgggcactacagccactcttgataacatccagtttctggggggtggattttccaccaccccaaacatagacttcactggttcgtgatgttactacagcaatgggtgcttcagtcacagtgcttgacctgccaacaacccccagaaca

SEQ ID NO: 17955 - DNA, 405 bp, Homo sapiens
  MAP TO AC007055.3; EXPRESSED IN PLACENTA, SIGNAL = 1.3; EXPRESSED IN FETAL LIVER, SIGNAL = 0.85; EXPRESSED IN LUNG, SIGNAL = 1.1; EXPRESSED IN HEART, SIGNAL = 1.1; EXPRESSED IN BT474, SIGNAL = 1.7; EXPRESSED IN BONE MARROW, SIGNAL = 1.2; EXPRESSED IN HBL100, SIGNAL = 1.3; EXPRESSED IN HELA, SIGNAL = 1.3; EXPRESSED IN ADULT LIVER, SIGNAL = 1.1; EXPRESSED IN BRAIN, SIGNAL = 1.5; EST_HUMAN HIT: AW896052.1, EVALUE 1.00e-125; NT HIT: AF195658.1, EVALUE 0.00e+00; SWISSPROT HIT: P18756, EVALUE 4.00e+00
cctactatcattggaaacgtgtctataccaggggaaagagggggatgtatcagataatatgcaatctgtttgtgattttttgctaccttcctgaaaagcagaaaacattgtataagttgctgtaggttcattctctagcccataacttatattcgttctgcaattttttttgttgggcaattgaccagattctttacttaaagtgctggctaaatctttgatgtctggagtttcaactgaatgacgtgttctatttccaaatgtttcttgggcacgtgtgggaccaggtctaacataatttttaaatgaatgttctgtttcagttgatttagttttttcattttgtactacatgagttataaagccagtggaacataatttaactcgcccataactaaaaacatt

SEQ ID NO: 17956 - DNA, 135 bp, Homo sapiens
  MAP TO AC007024.4; EXPRESSED IN PLACENTA, SIGNAL = 1.5; EXPRESSED IN BT474, SIGNAL = 1.4; EXPRESSED IN BONE MARROW, SIGNAL = 1.7; EXPRESSED IN HBL100, SIGNAL = 1.6; EXPRESSED IN LUNG, SIGNAL = 1.5; EXPRESSED IN ADULT LIVER, SIGNAL = 1.3; EXPRESSED IN BRAIN, SIGNAL = 1.8; EXPRESSED IN FETAL LIVER, SIGNAL = 1.4; EXPRESSED IN HELA, SIGNAL = 1.3; EXPRESSED IN HEART, SIGNAL = 1.4; NT HIT: AF071080.3, EVALUE 1.20e+00; EST_HUMAN HIT: BE503136.1, EVALUE 1.10e-01
ccagtactgtgcttcttcagagtgggatggagaagaggaggtggaaagagtggggagagaaaaggtgttgagggcttctgctgggagatgcactatcatgaggaaacacactggaggccttggtgtgtcctggtg

SEQ ID NO: 17957 - DNA, 270 bp, Homo sapiens
  MAP TO AC006999.2; EXPRESSED IN HBL100, SIGNAL = 1.8; EXPRESSED IN BRAIN, SIGNAL = 0.85; EXPRESSED IN BT474, SIGNAL = 2.9; EXPRESSED IN BONE MARROW, SIGNAL = 0.82; EXPRESSED IN FETAL LIVER, SIGNAL = 1.1; EXPRESSED IN LUNG, SIGNAL = 3.2; EXPRESSED IN HELA, SIGNAL = 1.5; EXPRESSED IN ADULT LIVER, SIGNAL = 1.5; EXPRESSED IN PLACENTA, SIGNAL =   6; EXPRESSED IN HEART, SIGNAL = 1.1; NT HIT: gi8393912, EVALUE 5.50e-01; SWISSPROT HIT: P98092, EVALUE 1.40e+00
ttttgtgctaaaatctgctacagagatgagcgagggatgctggccacccatggagaaaaatgagacctgtgttccaggctgtcagcagactcctggaggttttgcccatggctgtagttcaacctgtgttccacaaacatttgcaattgtctgcactgctttggagacatgggccaaatgggtttccctcctgaataaccagctttcatctatttatatactagacatccacagcatttcacttgcaaagggttctactgctaaaaatag

SEQ ID NO: 17958 - DNA, 181 bp, Homo sapiens
  MAP TO AC006999.2; EXPRESSED IN HEART, SIGNAL = 1.4; EXPRESSED IN PLACENTA, SIGNAL = 5.3; EXPRESSED IN BT474, SIGNAL = 3.9; EXPRESSED IN FETAL LIVER, SIGNAL =   2; EXPRESSED IN LUNG, SIGNAL = 3.1; EXPRESSED IN HELA, SIGNAL = 1.8; EXPRESSED IN ADULT LIVER, SIGNAL = 2.1; EXPRESSED IN BRAIN, SIGNAL = 0.82; EXPRESSED IN BONE MARROW, SIGNAL = 3.4; EXPRESSED IN HBL100, SIGNAL = 3.2; NT HIT: X57147.1, EVALUE 4.00e-38; EST_HUMAN HIT: BE168410.1, EVALUE 2.00e-61; SWISSPROT HIT: P26808, EVALUE 8.00e-11
gatcttgggccagtgcctgaccaaacaggtgaagcctatccctaaacccttggggcaagactgtccacgtaatttgggacatgtggtctgtgggatcctcaaaggcaaagagaaattgggagtcagagtgcaggggaataaagaagaagttattcttgaggtccagaaccatgaaccattc

SEQ ID NO: 17959 - DNA, 292 bp, Homo sapiens
  MAP TO AC006989.3; EXPRESSED IN PLACENTA, SIGNAL = 3.5; EXPRESSED IN BT474, SIGNAL = 3.6; EXPRESSED IN FETAL LIVER, SIGNAL = 3.5; EXPRESSED IN LUNG, SIGNAL = 3.5; EXPRESSED IN ADULT LIVER, SIGNAL = 2.6; EXPRESSED IN BONE MARROW, SIGNAL = 3.8; EXPRESSED IN HBL100, SIGNAL = 3.2; EXPRESSED IN HELA, SIGNAL = 2.8; EXPRESSED IN BRAIN, SIGNAL = 4.6; EXPRESSED IN HEART, SIGNAL = 2.8; NT HIT: AF223391.1, EVALUE 3.00e-43; EST_HUMAN HIT: AF126045.1, EVALUE 5.00e-08; SWISSPROT HIT: P25596, EVALUE 1.30e+00
ttaactttccaagcccacttatgcatccaacacaacctgttaccaggcctgcccctaaggaacctaatatcccatcagtgtaattacagcctacaacttcaagccacaattgatactgtaatttattctcacccaaacagctccattcagagagtttgtctgcttctcagggcccccagaaatcatcacctcctccctgcttatgaagagtctgagttttgtaatggcaaacatactccctccaagaccattcacccctggacaccctgcaacagcgcccctaccgcaagtg

SEQ ID NO: 17960 - DNA, 168 bp, Homo sapiens
  MAP TO AC006989.3; EXPRESSED IN HBL100, SIGNAL = 2.4; EXPRESSED IN BRAIN, SIGNAL = 2.7; EXPRESSED IN PLACENTA, SIGNAL =   3; EXPRESSED IN BT474, SIGNAL = 2.3; EXPRESSED IN BONE MARROW, SIGNAL = 3.3; EXPRESSED IN LUNG, SIGNAL = 2.7; EXPRESSED IN HELA, SIGNAL = 2.5; EXPRESSED IN ADULT LIVER, SIGNAL = 1.7; EXPRESSED IN FETAL LIVER, SIGNAL =   2; EXPRESSED IN HEART, SIGNAL = 2.1; NT HIT: X89211.1, EVALUE 4.00e-19; SWISSPROT HIT: P03410, EVALUE 3.80e+00; EST_HUMAN HIT: BE064410.1, EVALUE 2.00e-21
tgccataaagtgaatgccttggtcagaggccatgctgtgtggaatgccgtgatagaagataaagcattcattgagtccatggatggtagtcttagcagaagcattgtgggccaacatatacctggggtgagtgtctatttcagtgaggacaaacttctgccctttcta

SEQ ID NO: 17961 - DNA, 148 bp, Homo sapiens
  MAP TO AC006985.2; EXPRESSED IN BT474, SIGNAL = 2.5; EXPRESSED IN HBL100, SIGNAL = 1.7; EXPRESSED IN LUNG, SIGNAL = 1.7; EXPRESSED IN HELA, SIGNAL = 1.5; EXPRESSED IN ADULT LIVER, SIGNAL = 1.3; EXPRESSED IN PLACENTA, SIGNAL = 1.7; EXPRESSED IN BONE MARROW, SIGNAL = 1.5; EXPRESSED IN FETAL LIVER, SIGNAL = 1.4; EXPRESSED IN BRAIN, SIGNAL = 1.1; EXPRESSED IN HEART, SIGNAL = 1.1; SWISSPROT HIT: Q04538, EVALUE 7.70e-01; EST_HUMAN HIT: AV712467.1, EVALUE 1.30e-01
cttgcctgctcttgccagccacgctgacatccacatcctggccatggagctggtgttctgccaggtttgtgaggctgatacagataggagtcaaagcttccacgtagtctgtctccatgatgtagcacagcagcctcacccaaaactc

SEQ ID NO: 17962 - DNA, 75 bp, Homo sapiens
  MAP TO AC006984.2; EXPRESSED IN BT474, SIGNAL =   1; EXPRESSED IN BRAIN, SIGNAL = 0.82; EXPRESSED IN PLACENTA, SIGNAL = 2.4; EXPRESSED IN HBL100, SIGNAL = 0.7; EXPRESSED IN FETAL LIVER, SIGNAL = 0.79; EXPRESSED IN LUNG, SIGNAL = 1.7; EXPRESSED IN HELA, SIGNAL = 0.77; EXPRESSED IN ADULT LIVER, SIGNAL = 0.68; EXPRESSED IN HEART, SIGNAL = 1.4; NT HIT: AL163208.2, EVALUE 5.90e-01; EST_HUMAN HIT: AW195516.1, EVALUE 1.50e-01
ctggtctgctccatgtgttttctccatcatggaatccagcctgaaggtgaagctcctgtctcccacattgctgat

SEQ ID NO: 17963 - DNA, 110 bp, Homo sapiens
  MAP TO AC006984.2; EXPRESSED IN BONE MARROW, SIGNAL = 4.7; EXPRESSED IN HBL100, SIGNAL = 2.9; EXPRESSED IN FETAL LIVER, SIGNAL =   3; EXPRESSED IN ADULT LIVER, SIGNAL = 1.9; EXPRESSED IN BRAIN, SIGNAL = 3.3; EXPRESSED IN PLACENTA, SIGNAL = 2.9; EXPRESSED IN BT474, SIGNAL = 2.3; EXPRESSED IN LUNG, SIGNAL =   4; EXPRESSED IN HELA, SIGNAL = 2.7; EXPRESSED IN HEART, SIGNAL = 2.6; EST_HUMAN HIT: AI758921.1, EVALUE 4.00e-07; NT HIT: AL163279.2, EVALUE 1.00e-11
gcagcaaatgatccagaagatctagctaagatcatcaaagaaagtgcctacagtgaagaacagattttcaatgcagaaaaacagccttctgttggaagaagatagcatct

SEQ ID NO: 17964 - DNA, 98 bp, Homo sapiens
  MAP TO AC006975.2; EXPRESSED IN FETAL LIVER, SIGNAL = 0.78; EXPRESSED IN LUNG, SIGNAL = 1.4; EXPRESSED IN HELA, SIGNAL = 0.95; EXPRESSED IN ADULT LIVER, SIGNAL = 0.8; EXPRESSED IN BRAIN, SIGNAL = 1.1; EXPRESSED IN HEART, SIGNAL = 0.85; EXPRESSED IN PLACENTA, SIGNAL = 1.5; EXPRESSED IN BT474, SIGNAL = 0.94; EXPRESSED IN BONE MARROW, SIGNAL = 0.78; EXPRESSED IN HBL100, SIGNAL = 0.81; SWISSPROT HIT: Q16348, EVALUE 4.10e+00; EST_HUMAN HIT: AV732572.1, EVALUE 3.10e-01; NT HIT: AF005730.1, EVALUE 4.50e-02
acctttgcatacccagaatattttagtaaaattcatgtacagcttggttattcagatattcacaaacatattaaaatatacaataaggctctgcctat

SEQ ID NO: 17965 - DNA, 222 bp, Homo sapiens
  MAP TO AC006548.19; EXPRESSED IN PLACENTA, SIGNAL = 5.2; EXPRESSED IN BT474, SIGNAL = 5.8; EXPRESSED IN BONE MARROW, SIGNAL =  17; EXPRESSED IN ADULT LIVER, SIGNAL = 5.7; EXPRESSED IN HELA, SIGNAL = 4.5; EXPRESSED IN LUNG, SIGNAL =  12; EXPRESSED IN FETAL LIVER, SIGNAL = 4.6; EXPRESSED IN HEART, SIGNAL = 3.4; EXPRESSED IN BRAIN, SIGNAL = 4.3; EXPRESSED IN HBL100, SIGNAL =   4; EST_HUMAN HIT: AW405187.1, EVALUE 3.00e-58; SWISSPROT HIT: P01614, EVALUE 1.00e-29; NT HIT: M20707.1, EVALUE 1.00e-122
gatccagtggggacattgtgatgacccagactccactctccctgcctgtcactcctggagagccagcctccatctcctgcagatctagtgagagcctcttggatactgatgatgaatacacctatttgaattggtacctgcagaagccaggccagtctccacagctcctgatctatgaggtttccaaccgggcctctggagttccagacaggttcagtggca

SEQ ID NO: 17966 - DNA, 187 bp, Homo sapiens
  MAP TO AC006548.19; EXPRESSED IN PLACENTA, SIGNAL = 4.4; EXPRESSED IN BT474, SIGNAL = 4.1; EXPRESSED IN BONE MARROW, SIGNAL = 2.9; EXPRESSED IN LUNG, SIGNAL = 3.7; EXPRESSED IN HELA, SIGNAL = 3.3; EXPRESSED IN BRAIN, SIGNAL = 3.4; EXPRESSED IN HBL100, SIGNAL = 3.6; EXPRESSED IN FETAL LIVER, SIGNAL = 3.5; EXPRESSED IN ADULT LIVER, SIGNAL = 1.7; EXPRESSED IN HEART, SIGNAL = 4.1; NT HIT: AL163246.2, EVALUE 3.00e-33; EST_HUMAN HIT: AW612347.1, EVALUE 1.00e-35; SWISSPROT HIT: O41033, EVALUE 2.00e-04
gataagaatggagttacagtgttggctgcggtgattgacccagactatcaagatgaagtcagtccactactccacaatggaagtgaggaagagtatgcgtggaatacaggagatccattagggcgtctcttgggattatcatgcactctgattaaggtcaatgggaaactacaacagcccaacccag

SEQ ID NO: 17967 - DNA, 311 bp, Homo sapiens
  MAP TO AC006548.19; EXPRESSED IN FETAL LIVER, SIGNAL =   2; EXPRESSED IN BT474, SIGNAL = 1.8; EXPRESSED IN BONE MARROW, SIGNAL = 1.8; EXPRESSED IN HBL100, SIGNAL = 1.7; EXPRESSED IN HELA, SIGNAL = 1.7; EXPRESSED IN ADULT LIVER, SIGNAL = 1.7; EXPRESSED IN BRAIN, SIGNAL =   2; EXPRESSED IN HEART, SIGNAL = 1.9; EXPRESSED IN PLACENTA, SIGNAL =   2; EXPRESSED IN LUNG, SIGNAL = 3.3; EST_HUMAN HIT: AU140898.1, EVALUE 7.00e-36; SWISSPROT HIT: P13238, EVALUE 2.20e-01; NT HIT: gi11436955, EVALUE 8.00e-38
gagtgccagcttctcccagggttctgaggccccattcatcatgaggagaaacacagccatgcaaaatcttgcccagcacagtggatacagtgttgatggggtcagcggtcacatccatggcttccatagcctttccaagcccagccagcacaatgcagaattcagaggcagcacccacagaatcccctggagcctggcctcccatggccacaccagaggcagcctcacaggctctgaggcggataatgagggtgtgtaccccttcaaggcacccagaagcaccctgttccaggagtttgggggccacctgg

SEQ ID NO: 17968 - DNA, 132 bp, Homo sapiens
  MAP TO AC006499.11; EXPRESSED IN BT474, SIGNAL = 2.1; EXPRESSED IN PLACENTA, SIGNAL = 2.4; EXPRESSED IN HBL100, SIGNAL = 1.6; EXPRESSED IN FETAL LIVER, SIGNAL =   2; EXPRESSED IN HELA, SIGNAL = 2.2; EXPRESSED IN ADULT LIVER, SIGNAL = 1.8; EXPRESSED IN BRAIN, SIGNAL = 2.5; EXPRESSED IN HEART, SIGNAL = 1.9; EXPRESSED IN BONE MARROW, SIGNAL = 2.2; EXPRESSED IN LUNG, SIGNAL = 2.6; EST_HUMAN HIT: AW300400.1, EVALUE 3.00e-01; SWISSPROT HIT: O24691, EVALUE 4.60e-01; NT HIT: U53930.1, EVALUE 4.60e+00
ttaaacttcaggagagctggcacacccaaaggtttcaaaaccttgggtgaaagcagagataaacattttattgacaaataaaaaggtggagcgttcaaggtcattgtggcctaggaaaaacaggagacattg

SEQ ID NO: 17969 - DNA, 261 bp, Homo sapiens
  MAP TO AC006499.11; EXPRESSED IN HBL100, SIGNAL = 2.1; EXPRESSED IN LUNG, SIGNAL = 1.8; EXPRESSED IN ADULT LIVER, SIGNAL = 2.4; EXPRESSED IN BRAIN, SIGNAL = 1.7; EXPRESSED IN HEART, SIGNAL = 1.4; EXPRESSED IN BT474, SIGNAL = 2.7; EXPRESSED IN PLACENTA, SIGNAL = 1.6; EXPRESSED IN HELA, SIGNAL = 1.8; EXPRESSED IN FETAL LIVER, SIGNAL = 2.1; EXPRESSED IN BONE MARROW, SIGNAL = 1.2; NT HIT: AB014607.1, EVALUE 4.00e-14; SWISSPROT HIT: P10266, EVALUE 3.00e-15; EST_HUMAN HIT: AV723599.1, EVALUE 2.00e-35
agtctagacatggctgcagtccttgggttcctcccaaagtctcttcctcagcatctggctcataaggtttcaggtgtctcgatggtatccaaatcagctgctgattctggcctggagaaacacaggtataacctctaccccaagttattttacatatttcccaactttgtgttatcggacctctccaccaaaccagttctgcttctgtctttgccactggtttctgtagatgctgttcagctgctgatagcatctggcctt

SEQ ID NO: 17970 - DNA, 438 bp, Homo sapiens
  MAP TO AC006474.3; EXPRESSED IN FETAL LIVER, SIGNAL = 2.1; EXPRESSED IN LUNG, SIGNAL = 1.8; EXPRESSED IN ADULT LIVER, SIGNAL = 0.98; EXPRESSED IN HEART, SIGNAL = 1.1; EXPRESSED IN BT474, SIGNAL = 3.2; EXPRESSED IN BONE MARROW, SIGNAL = 1.2; EXPRESSED IN PLACENTA, SIGNAL = 2.9; EXPRESSED IN BRAIN, SIGNAL = 1.5; EXPRESSED IN HELA, SIGNAL = 1.4; EXPRESSED IN HBL100, SIGNAL = 0.89; SWISSPROT HIT: Q9UK32, EVALUE 3.40e+00; NT HIT: gi10864040, EVALUE 0.00e+00; EST_HUMAN HIT: AI479224.1, EVALUE 0.00e+00
catttttgcatatggatccattggagatggtggtcgtgagttagaggacccaggtgaaaacacttgcggtgagggtggctgagaagtctgagcctgagaaagactatcctggatgggaatccgggatggggctggaggaggaggtggagcttgtggctttacaaacacatcatctgaagatgtagacgtaggggtactgggtggctgttttgtaaacagttctttatggaatgactgtgcaggagacatatttccattgccaggctgaggtgtcaagggactctgtatcccactacttggtgtatctgaaccagactgcaccagaagatgctgagaaccaaattgctgttgttgctgctgctgctgctcatttttcacctgttcaagtttctgtgtggcttcaattttagcttgctgcttacttttctgacgcatttg

SEQ ID NO: 17971 - DNA, 851 bp, Homo sapiens
  MAP TO AC006474.3; EXPRESSED IN BT474, SIGNAL = 5.2; EXPRESSED IN BONE MARROW, SIGNAL = 1.6; EXPRESSED IN FETAL LIVER, SIGNAL = 2.5; EXPRESSED IN HELA, SIGNAL =   1; EXPRESSED IN PLACENTA, SIGNAL = 3.3; EXPRESSED IN HBL100, SIGNAL = 1.6; EXPRESSED IN LUNG, SIGNAL = 2.2; EXPRESSED IN ADULT LIVER, SIGNAL = 1.4; EXPRESSED IN BRAIN, SIGNAL = 1.8; EXPRESSED IN HEART, SIGNAL = 1.3; SWISSPROT HIT: P08640, EVALUE 2.00e-06; NT HIT: gi11420105, EVALUE 0.00e+00; EST_HUMAN HIT: BE255205.1, EVALUE 0.00e+00
ctgtctcaatttctctgtatctgcttgggccatatttacagtattctgtgtatcagttactcctgaagttggcacaggtccaggaagttgggagacaccagagaactgctggccttgggagtgcattggagagtttgaagatgcacagaagctcccctctgatccaggccttggctgatcagcaacatcatgggcagtttgacttgttccaaaagagtcagactgagatcttggagtcattggagactgatcatagggatcacgggcagcagatggggaaacacggctaaatgtgtctgaaagaccaggtccagggggcctaggtgtctgggaacatgtatcaggtggccttaccaacgggccaggtaaagctggtcctcggttttgtgctgcttgcaggaaaggatcctgatttggcatgaggactggtcttgtcattgaggacctagtaaaaccctctgaaatccttggccttggtgttgctggtggctgagagtaagggacagaaattccaggtcttggtgttccaggaggatgagcatatggatcagaatgcctctgatttgttacaggtgtaacaaacaagtcagtttgtgtagatggtcttggggtttggggctgctgactatatgggtcaacagtagtaggccggggagttccaggaggttgagagtaagggtctgtattggacctagctgttcctgaagattgggaataagaatctacaacaggtcgtggagttcctgggggttgggagtatgggtcctgagatgttggccttgatatggttccaggctgggaaaaagcccttgaaggatgggcaaaagattcattcactgctggatgtgggg

SEQ ID NO: 17972 - DNA, 98 bp, Homo sapiens
  MAP TO AC006459.2; EXPRESSED IN PLACENTA, SIGNAL = 0.95; EXPRESSED IN BT474, SIGNAL = 1.6; EXPRESSED IN LUNG, SIGNAL = 1.1; EXPRESSED IN HELA, SIGNAL = 2.7; EXPRESSED IN ADULT LIVER, SIGNAL = 0.86; EXPRESSED IN HEART, SIGNAL =   1; EXPRESSED IN BONE MARROW, SIGNAL = 1.1; EXPRESSED IN HBL100, SIGNAL = 2.6; EXPRESSED IN FETAL LIVER, SIGNAL = 1.3; EXPRESSED IN BRAIN, SIGNAL = 0.99; SWISSPROT HIT: P54676, EVALUE 3.10e+00
caattggcatagttgttcatacaaagggtaatgtctaatagtacagccaccaagactaatttgatcttcttggcataaaaaacattgccacttgtttg

SEQ ID NO: 17973 - DNA, 217 bp, Homo sapiens
  MAP TO AC006459.2; EXPRESSED IN HEART, SIGNAL = 2.5; EXPRESSED IN ADULT LIVER, SIGNAL = 3.1; EXPRESSED IN BRAIN, SIGNAL =   2; EXPRESSED IN PLACENTA, SIGNAL = 4.5; EXPRESSED IN BT474, SIGNAL = 6.9; EXPRESSED IN BONE MARROW, SIGNAL = 5.6; EXPRESSED IN HBL100, SIGNAL =  17; EXPRESSED IN FETAL LIVER, SIGNAL = 6.3; EXPRESSED IN HELA, SIGNAL =  11; EXPRESSED IN LUNG, SIGNAL = 4.5; EST_HUMAN HIT: AV730761.1, EVALUE 2.00e-66; NT HIT: AL163206.2, EVALUE 2.00e-71; SWISSPROT HIT: P08547, EVALUE 1.00e-19
gtttaaatccattgtttctttgttgacttttggttttgatgacctgtctattgctgtcactggagtattgaagttccccactattactatgttgctgtctatctcatttcttaggtctattagtaattgttttataaatttgggagcttcagtgttagatgcgtatgtgtttaggattgtgatattttcctgtgggacaaggccttttaccattata

SEQ ID NO: 17974 - DNA, 243 bp, Homo sapiens
  MAP TO AC006459.2; EXPRESSED IN LUNG, SIGNAL = 2.7; EXPRESSED IN ADULT LIVER, SIGNAL = 1.7; EXPRESSED IN BONE MARROW, SIGNAL = 2.8; EXPRESSED IN HELA, SIGNAL = 2.7; EXPRESSED IN BRAIN, SIGNAL = 2.4; EXPRESSED IN HEART, SIGNAL = 1.5; EXPRESSED IN PLACENTA, SIGNAL = 2.7; EXPRESSED IN BT474, SIGNAL = 2.8; EXPRESSED IN HBL100, SIGNAL = 2.9; EXPRESSED IN FETAL LIVER, SIGNAL = 2.3; SWISSPROT HIT: P21817, EVALUE 4.00e-01; NT HIT: AL163246.2, EVALUE 5.00e-54; EST_HUMAN HIT: AW340174.1, EVALUE 7.00e-53
gattcaggggtccaggaatcaaggggtggaagtagaagtggcaccactcaccatcatccctagtgatccattggcaaaacttttgcttcctgttcctgtgacattacattctgctgctccagaggtcttagtttcagaaggaggagtgctgccaccaggagacacaacaacaataaaattaaactggaagttaagtttgccacctggacactttgggctcctcctacctctaagtcaacaggt

SEQ ID NO: 17975 - DNA, 123 bp, Homo sapiens
  MAP TO AC006455.2; EXPRESSED IN ADULT LIVER, SIGNAL = 4.5; EXPRESSED IN LUNG, SIGNAL = 7.4; EXPRESSED IN HELA, SIGNAL = 7.9; EXPRESSED IN HEART, SIGNAL = 5.2; EXPRESSED IN PLACENTA, SIGNAL = 4.3; EXPRESSED IN BT474, SIGNAL =   5; EXPRESSED IN BONE MARROW, SIGNAL = 6.7; EXPRESSED IN FETAL LIVER, SIGNAL = 5.8; EXPRESSED IN BRAIN, SIGNAL = 7.7; EXPRESSED IN HBL100, SIGNAL = 5.7; NT HIT: gi4502694, EVALUE 1.00e-46; SWISSPROT HIT: Q16181, EVALUE 2.00e-16; EST_HUMAN HIT: BF095252.1, EVALUE 2.00e-46
gtcagctgccctttattcttgttgttatcaactccattgtaagtcacagctgccagttttctgcttccatagttctcgcagtggacattgttagtaacatctttcaagtcctgcatgtgtgtt

SEQ ID NO: 17976 - DNA, 393 bp, Homo sapiens
  MAP TO AC006455.2; EXPRESSED IN FETAL LIVER, SIGNAL =  31; EXPRESSED IN HEART, SIGNAL =  20; EXPRESSED IN PLACENTA, SIGNAL =  37; EXPRESSED IN BT474, SIGNAL =  73; EXPRESSED IN HBL100, SIGNAL =  17; EXPRESSED IN LUNG, SIGNAL =  22; EXPRESSED IN HELA, SIGNAL = 8.9; EXPRESSED IN ADULT LIVER, SIGNAL = 6.2; EXPRESSED IN BRAIN, SIGNAL =  32; EXPRESSED IN BONE MARROW, SIGNAL =  13; SWISSPROT HIT: Q05481, EVALUE 6.00e-56; NT HIT: gi11427233, EVALUE 1.00e-58; EST_HUMAN HIT: BE396253.1, EVALUE 6.00e-76
gttgcataagggttgaggagcaattaaaggctttgccacattcttcacatgtgtagggtctctctccagtgtgaattctcttgtggtcagtgagggttgaggataagctaaaggctttgccacattcttcacatttgtagggtctctctccagtatgaattctcttgtggtcagtgagggttgaggataagctaaagactttgccacactcttcacatttgtagggtctctctccagtatgaattctcttgtggatagtaagtgctgaggagcgcctaaagtcttggccacattcttcatatgtgtagggtttctctccagtatgaattctcttatgtctagtaaggttcgaggataagctaaaggcttggccacattcttcacaggcatagg

SEQ ID NO: 17977 - DNA, 83 bp, Homo sapiens
  MAP TO AC006454.3; EXPRESSED IN ADULT LIVER, SIGNAL =  12; EXPRESSED IN HEART, SIGNAL =  10; EXPRESSED IN PLACENTA, SIGNAL =  16; EXPRESSED IN BT474, SIGNAL = 8.3; EXPRESSED IN BONE MARROW, SIGNAL =  15; EXPRESSED IN FETAL LIVER, SIGNAL =  21; EXPRESSED IN LUNG, SIGNAL =  11; EXPRESSED IN HELA, SIGNAL =  12; EXPRESSED IN HBL100, SIGNAL =  12; EXPRESSED IN BRAIN, SIGNAL =  15; NT HIT: gi4755145, EVALUE 9.00e-40; EST_HUMAN HIT: BE243977.1, EVALUE 1.00e-39
gcgcatgtccttgtagctgtggtgccggaaatccaggtcatcggtggccaccacctcattctgtgcgtagtagctgtagacag

SEQ ID NO: 17978 - DNA, 146 bp, Homo sapiens
  MAP TO AC006454.3; EXPRESSED IN HEART, SIGNAL = 1.8; EXPRESSED IN BT474, SIGNAL = 1.6; EXPRESSED IN BONE MARROW, SIGNAL = 2.3; EXPRESSED IN HELA, SIGNAL = 1.8; EXPRESSED IN ADULT LIVER, SIGNAL = 1.8; EXPRESSED IN PLACENTA, SIGNAL = 2.9; EXPRESSED IN HBL100, SIGNAL = 1.5; EXPRESSED IN FETAL LIVER, SIGNAL = 1.7; EXPRESSED IN LUNG, SIGNAL =   2; EXPRESSED IN BRAIN, SIGNAL = 2.1; NT HIT: AF041015.1, EVALUE 5.00e-77; EST_HUMAN HIT: BE799829.1, EVALUE 6.00e-53
cccctccccagcccgactgctcccatccccctccctgtgcaggtagagcagatcctggcagagttccagctgcaggaggaggacctgaagaaggtgatgagacggatgcagaaggagatggaccgcggcctgaggctggagaccca

SEQ ID NO: 17979 - DNA, 211 bp, Homo sapiens
  MAP TO AC006449.13; EXPRESSED IN BT474, SIGNAL = 9.8; EXPRESSED IN HELA, SIGNAL = 8.2; EXPRESSED IN ADULT LIVER, SIGNAL = 5.9; EXPRESSED IN BRAIN, SIGNAL = 7.6; EXPRESSED IN HEART, SIGNAL = 6.4; EXPRESSED IN PLACENTA, SIGNAL = 7.2; EXPRESSED IN BONE MARROW, SIGNAL = 8.9; EXPRESSED IN HBL100, SIGNAL = 8.2; EXPRESSED IN FETAL LIVER, SIGNAL = 6.4; EXPRESSED IN LUNG, SIGNAL = 8.6; EST_HUMAN HIT: AW964532.1, EVALUE 2.00e-93; SWISSPROT HIT: P53854, EVALUE 4.90e-02; NT HIT: gi11424297, EVALUE 2.00e-93
ttgacggccccaacatcctccgcatagcgctgcatctcttcccgggctctctcttctcgcagctcccgctgaagctcctcaatcttcttccgctcagcctcatgcttctgctcggccttccacactttctccacattcctgagggtctgcgggtgccagctcttcttcagattctgtggtaaataaaaagaaggtgatgataattcggggg

SEQ ID NO: 17980 - DNA, 247 bp, Homo sapiens
  MAP TO AC006449.13; EXPRESSED IN PLACENTA, SIGNAL = 3.8; EXPRESSED IN ADULT LIVER, SIGNAL = 4.3; EXPRESSED IN BRAIN, SIGNAL = 5.6; EXPRESSED IN HEART, SIGNAL = 3.4; EXPRESSED IN BT474, SIGNAL =  12; EXPRESSED IN BONE MARROW, SIGNAL = 5.2; EXPRESSED IN HBL100, SIGNAL = 4.2; EXPRESSED IN FETAL LIVER, SIGNAL = 4.2; EXPRESSED IN LUNG, SIGNAL = 4.8; EXPRESSED IN HELA, SIGNAL = 4.9; NT HIT: gi4505818, EVALUE 1.00e-123; EST_HUMAN HIT: AA864649.1, EVALUE 1.00e-122; SWISSPROT HIT: P53807, EVALUE 1.00e-10
tcgaattccccaggaccaaagaaccgaggaaagctgaggaggttgccagggctgtccggaggtgtgccataggagcagagtaggttgccacccaccccatcattctcacactcctcgtcctctgcccgctcctccacctccatctcctcctgctctgcccggtccacgtcgtggatgcccaccagcaggctgtagtccatgatcttcagctgtgccaagaactaggaagggcaaggatggaaagatg

SEQ ID NO: 17981 - DNA, 158 bp, Homo sapiens
  MAP TO AC006449.13; EXPRESSED IN FETAL LIVER, SIGNAL =  11; EXPRESSED IN LUNG, SIGNAL =  14; EXPRESSED IN HELA, SIGNAL =  12; EXPRESSED IN ADULT LIVER, SIGNAL = 8.6; EXPRESSED IN BRAIN, SIGNAL =  12; EXPRESSED IN HEART, SIGNAL =   9; EXPRESSED IN PLACENTA, SIGNAL =  12; EXPRESSED IN BT474, SIGNAL =  10; EXPRESSED IN BONE MARROW, SIGNAL =  16; EXPRESSED IN HBL100, SIGNAL =  10; NT HIT: gi11424314, EVALUE 3.00e-63; EST_HUMAN HIT: H92156.1, EVALUE 9.30e-02; SWISSPROT HIT: P09976, EVALUE 1.30e+00
cataagtcttccagcaacaaaagcagttcagcttccaaagtccgctctggggaccagaggctggagggctgcagtgggcatgtgacctgcacaaagctgtaccctcttcctgttcgggctctctccattcccatgacaacagctccatcaaccaagat

SEQ ID NO: 17982 - DNA, 270 bp, Homo sapiens
  MAP TO AC006448.4; EXPRESSED IN LUNG, SIGNAL =  13; EXPRESSED IN HELA, SIGNAL =  13; EXPRESSED IN ADULT LIVER, SIGNAL =  11; EXPRESSED IN HEART, SIGNAL = 3.5; EXPRESSED IN PLACENTA, SIGNAL = 7.3; EXPRESSED IN BONE MARROW, SIGNAL =  16; EXPRESSED IN FETAL LIVER, SIGNAL =  15; EXPRESSED IN BRAIN, SIGNAL = 6.9; EXPRESSED IN BT474, SIGNAL =  27; EXPRESSED IN HBL100, SIGNAL =  21; SWISSPROT HIT: Q64119, EVALUE 1.00e-39; NT HIT: M22920.1, EVALUE 1.00e-97; EST_HUMAN HIT: AW274792.1, EVALUE 2.00e-99
cgatacaaccattgctgccctcgttccctgccaccaacacctctacttcttcctctgttatcttctcacccagtgtgacaagaacgtgccagaattcaacacccatgatggtgccatttccttccttgtcaaacacctgaagtccttctacgtaatcttcataggtgccttggtccttgttcttggccaccatctgcagcatgggcagaaagtgctcaaagtccagcaacttcacattcatctcattactcttggggttcctcagaacct

SEQ ID NO: 17983 - DNA, 154 bp, Homo sapiens
  MAP TO AC006365.3; EXPRESSED IN PLACENTA, SIGNAL = 8.8; EXPRESSED IN FETAL LIVER, SIGNAL =  11; EXPRESSED IN LUNG, SIGNAL =  11; EXPRESSED IN ADULT LIVER, SIGNAL = 8.8; EXPRESSED IN BRAIN, SIGNAL =  12; EXPRESSED IN BT474, SIGNAL = 9.3; EXPRESSED IN HEART, SIGNAL = 9.3; EXPRESSED IN HELA, SIGNAL =  11; EXPRESSED IN HBL100, SIGNAL = 9.5; EXPRESSED IN BONE MARROW, SIGNAL =  10; EST_HUMAN HIT: AW511148.1, EVALUE 6.00e-03
tctccttcaaacttgaggaacctgagtcctttaatcagaaagacaccaacactgtagtagttttggtgaataaagaccacagagaaagacctggatcctctaagacttagaaaaaggtagaacaggaagagtgaagatgaatccgtttccataa

SEQ ID NO: 17984 - DNA, 231 bp, Homo sapiens
  MAP TO AC006365.3; EXPRESSED IN FETAL LIVER, SIGNAL = 9.5; EXPRESSED IN HEART, SIGNAL = 8.4; EXPRESSED IN PLACENTA, SIGNAL = 5.8; EXPRESSED IN BT474, SIGNAL =  10; EXPRESSED IN BONE MARROW, SIGNAL =   6; EXPRESSED IN BRAIN, SIGNAL = 9.1; EXPRESSED IN ADULT LIVER, SIGNAL = 7.3; EXPRESSED IN HELA, SIGNAL =  19; EXPRESSED IN LUNG, SIGNAL = 9.5; EXPRESSED IN HBL100, SIGNAL = 7.3; NT HIT: AF095703.1, EVALUE 2.00e-68; SWISSPROT HIT: Q50638, EVALUE 5.40e+00; EST_HUMAN HIT: AI261584.1, EVALUE 4.00e-79
ctttctcagcattccacaagttacttcctccttgctttgttctcctctgcctttgccccttttaaaaagttctaagttgctagccaatcgggacaaatacagaatgtgaggtcctgtgccagccattggaaactggacacagcaatagagtggacgtgtcaggttataaatgaccttgtctcctttgttcggcgtactctcgtggcaaaactgctggtgagtgtacccttt

SEQ ID NO: 17985 - DNA, 191 bp, Homo sapiens
  MAP TO AC006344.2; EXPRESSED IN BT474, SIGNAL = 6.9; EXPRESSED IN BRAIN, SIGNAL =  10; EXPRESSED IN PLACENTA, SIGNAL = 7.1; EXPRESSED IN BONE MARROW, SIGNAL =  17; EXPRESSED IN HBL100, SIGNAL = 8.8; EXPRESSED IN FETAL LIVER, SIGNAL =  11; EXPRESSED IN LUNG, SIGNAL =  12; EXPRESSED IN HELA, SIGNAL = 7.5; EXPRESSED IN ADULT LIVER, SIGNAL = 6.9; EXPRESSED IN HEART, SIGNAL = 7.3; EST_HUMAN HIT: BE877541.1, EVALUE 1.00e-103; SWISSPROT HIT: Q02981, EVALUE 1.70e+00
tgtccatgcagaccttcaccctggaaacatcctggttcagggtgccaacggcctgtcctcgagtcaggaggcgcagctgcagcaggcggacatctgtgacactctggtggtggccgtgccatcttccctctgcccgctgcgactggtgctgctggatgctggcattgtggcggagctgcaggcccctgacc

SEQ ID NO: 17986 - DNA, 186 bp, Homo sapiens
  MAP TO AC006328.3; EXPRESSED IN HELA, SIGNAL = 2.1; EXPRESSED IN ADULT LIVER, SIGNAL = 1.4; EXPRESSED IN BRAIN, SIGNAL = 1.4; EXPRESSED IN HEART, SIGNAL = 1.2; EXPRESSED IN PLACENTA, SIGNAL = 1.4; EXPRESSED IN HBL100, SIGNAL = 2.8; EXPRESSED IN FETAL LIVER, SIGNAL = 1.6; EXPRESSED IN LUNG, SIGNAL = 2.3; EXPRESSED IN BT474, SIGNAL =   3; EXPRESSED IN BONE MARROW, SIGNAL = 1.3; NT HIT: AF248953.1, EVALUE 4.00e-35; EST_HUMAN HIT: AI929065.1, EVALUE 3.00e-74; SWISSPROT HIT: Q08379, EVALUE 2.00e-12
gcatttttcaactccgctggagccagtgcccaggaggagcaaagcgtgtgctgccagcccctggctcacccagtggcctcatcccagaaaaagccagaggcagcggccccagccccagagactgggggtgaatctgtgtgtggggacacccactgggccctgcaggaggccatggagaagctgcag

SEQ ID NO: 17987 - DNA, 203 bp, Homo sapiens
  MAP TO AC006328.3; EXPRESSED IN PLACENTA, SIGNAL = 2.7; EXPRESSED IN BT474, SIGNAL = 9.6; EXPRESSED IN BONE MARROW, SIGNAL = 7.1; EXPRESSED IN HBL100, SIGNAL = 5.1; EXPRESSED IN LUNG, SIGNAL = 9.3; EXPRESSED IN FETAL LIVER, SIGNAL = 6.6; EXPRESSED IN HELA, SIGNAL =   9; EXPRESSED IN ADULT LIVER, SIGNAL = 4.8; EXPRESSED IN BRAIN, SIGNAL = 6.3; EXPRESSED IN HEART, SIGNAL = 3.6; SWISSPROT HIT: Q08379, EVALUE 4.00e-10; EST_HUMAN HIT: AW449749.1, EVALUE 5.00e-82; NT HIT: gi11095444, EVALUE 2.00e-12
aacccctggccccagagcccccagcagggccctctgaggtggagcagctacaagatgagaccaaccacctaaggaaggagctggagagtgtgggaagacagctccaggctgaggtggaaaacaatcagatgttgagtctcctgaacaggagacaggaggagaggctgcaggaacaggagaggctgctggacaaggggtaggag

SEQ ID NO: 17988 - DNA, 299 bp, Homo sapiens
  MAP TO AC006328.3; EXPRESSED IN PLACENTA, SIGNAL = 4.9; EXPRESSED IN LUNG, SIGNAL = 5.5; EXPRESSED IN HBL100, SIGNAL = 4.9; EXPRESSED IN FETAL LIVER, SIGNAL = 6.9; EXPRESSED IN HELA, SIGNAL = 5.4; EXPRESSED IN BRAIN, SIGNAL = 9.1; EXPRESSED IN BT474, SIGNAL = 8.4; EXPRESSED IN BONE MARROW, SIGNAL = 6.2; EXPRESSED IN ADULT LIVER, SIGNAL = 4.5; EXPRESSED IN HEART, SIGNAL = 3.6; NT HIT: AF109718.1, EVALUE 0.00e+00; EST_HUMAN HIT: AW576858.1, EVALUE 6.00e-54; SWISSPROT HIT: P06831, EVALUE 4.60e-01
agagtcacatgaggctgagagtaggggcaggggcagcagtggtgccagttggggggtggtccagtgggaggagcctcagccttgtgggctgctccatgggactgatgactgcatgatcttctgggcacctcatggatcttcaactgcaggtgaaacagatgctggtggtggctgcagggccgctgggagctgctgcatgggtcccagaggctggactggggcaggtgccaactgaagctgctggggcagcaagggcaggatgttctgcacacaaaccttggaaaagaaggtgtgtgcat

SEQ ID NO: 17989 - DNA, 607 bp, Homo sapiens
  MAP TO AC006328.3; EXPRESSED IN HELA, SIGNAL = 1.6; EXPRESSED IN ADULT LIVER, SIGNAL =   1; EXPRESSED IN BRAIN, SIGNAL = 1.7; EXPRESSED IN BT474, SIGNAL = 1.1; EXPRESSED IN HBL100, SIGNAL = 2.5; EXPRESSED IN HEART, SIGNAL = 1.3; EXPRESSED IN PLACENTA, SIGNAL = 1.7; EXPRESSED IN BONE MARROW, SIGNAL = 0.98; EXPRESSED IN FETAL LIVER, SIGNAL = 1.3; EXPRESSED IN LUNG, SIGNAL = 1.7; NT HIT: gi4503098, EVALUE 0.00e+00; SWISSPROT HIT: Q00657, EVALUE 2.00e-60; EST_HUMAN HIT: BF530254.1, EVALUE 0.00e+00
ctgaaggtggtggccatccagccggccatacagatccactgcagcacagggctgcatctggcccaggactctgccatgcccatcttgcctaccaacctgtcggtggagaccagcaccgtggggcaggatgtgactgtgttgttctgtgtcaccagaggcctgcagttcagggaggtgcagaagcagggggctggtggggtggagggtgctgagtggtgggccacacagtcattccaccagcaggatgtggagcagggccacatgaggtacctgagcactaacccacagcactatgccgaggacaccgtgaagaacctggatctgcaggtgcaggtgagctgggaaatcctgagcaatctgtccttcctagtgaccatccagagagccactgtgtggatgctgcagctgcggccactgcacactcaacacccagcagaggccctcaccacagcccacctggaggccaccctggaagaggcaggcccaagccccccaaccttccactctgaggtggttcaggctcccaggaaaggcaaccttcaactacagggcacgacactgtcagatggtcagggcttcacccaggatgatgtacaggctggagagg

SEQ ID NO: 17990 - DNA, 181 bp, Homo sapiens
  MAP TO AC006269.8; EXPRESSED IN PLACENTA, SIGNAL = 2.1; EXPRESSED IN BT474, SIGNAL =   2; EXPRESSED IN BONE MARROW, SIGNAL = 1.3; EXPRESSED IN LUNG, SIGNAL = 1.4; EXPRESSED IN ADULT LIVER, SIGNAL = 2.3; EXPRESSED IN BRAIN, SIGNAL =   2; EXPRESSED IN HBL100, SIGNAL = 2.2; EXPRESSED IN FETAL LIVER, SIGNAL = 1.7; EXPRESSED IN HELA, SIGNAL = 3.3; EXPRESSED IN HEART, SIGNAL = 1.2; SWISSPROT HIT: P21414, EVALUE 8.00e-11; NT HIT: gi9635487, EVALUE 1.00e-25; EST_HUMAN HIT: BE093072.1, EVALUE 1.00e-13
gtaagaggggctgcaaagaagaagatcatcaaaatattgaataagatgggaggcagacaggcgaaaagaaagcagatcatgagaaagggcctggccaaagtagtgtggcctgtccctgaagccttggggcagaacagtccaggtgagttgttgggattggtgggtgtcagggtcagtccaa

SEQ ID NO: 17991 - DNA, 222 bp, Homo sapiens
  MAP TO AC006269.8; EXPRESSED IN HBL100, SIGNAL = 1.8; EXPRESSED IN BRAIN, SIGNAL =   3; EXPRESSED IN BT474, SIGNAL = 1.3; EXPRESSED IN BONE MARROW, SIGNAL =   2; EXPRESSED IN FETAL LIVER, SIGNAL = 1.9; EXPRESSED IN HELA, SIGNAL = 3.8; EXPRESSED IN ADULT LIVER, SIGNAL =   2; EXPRESSED IN PLACENTA, SIGNAL = 1.9; EXPRESSED IN LUNG, SIGNAL = 1.9; EXPRESSED IN HEART, SIGNAL = 1.7; SWISSPROT HIT: Q63003, EVALUE 7.10e-01; NT HIT: AF289996.1, EVALUE 1.30e-01
atggaattctacttggagatcgaccctgttaccttgaacctgatcatcctagttgcgagctacgtcatcttgctcctggtcttcctcatctcctgcgtgctatacgactgccgaggcaaggatcccagtaaggagtacgcgcccgaggccactctcgaggcccagccctccatccggttggtggtgatgcacccaagtgtcgctgggccccactggccaaag

SEQ ID NO: 17992 - DNA, 150 bp, Homo sapiens
  MAP TO AC006255.9; EXPRESSED IN ADULT LIVER, SIGNAL =   3; EXPRESSED IN HELA, SIGNAL = 2.2; EXPRESSED IN BRAIN, SIGNAL = 1.4; EXPRESSED IN PLACENTA, SIGNAL = 1.8; EXPRESSED IN BT474, SIGNAL = 1.3; EXPRESSED IN BONE MARROW, SIGNAL = 1.5; EXPRESSED IN HBL100, SIGNAL = 1.5; EXPRESSED IN LUNG, SIGNAL = 1.7; EXPRESSED IN HEART, SIGNAL = 1.3; EXPRESSED IN FETAL LIVER, SIGNAL = 2.3; EST_HUMAN HIT: BE409910.1, EVALUE 1.00e-47; SWISSPROT HIT: Q03154, EVALUE 4.00e-14; NT HIT: D16307.1, EVALUE 1.00e-47
tggatgctgacgcacttcatgtcctgggcacccctggcatagatgtagccctcagaatccttgaaggcctcaaaggggtcgtgactccaatgttcctgggggcagggatgggaagaggggcccaaaccccaaatttagccattaatccac

SEQ ID NO: 17993 - DNA, 173 bp, Homo sapiens
  MAP TO AC006235.11; EXPRESSED IN HELA, SIGNAL = 5.5; EXPRESSED IN BRAIN, SIGNAL =   7; EXPRESSED IN HEART, SIGNAL = 7.1; EXPRESSED IN PLACENTA, SIGNAL = 7.7; EXPRESSED IN BONE MARROW, SIGNAL = 6.2; EXPRESSED IN BT474, SIGNAL = 5.6; EXPRESSED IN ADULT LIVER, SIGNAL =   5; EXPRESSED IN LUNG, SIGNAL = 7.3; EXPRESSED IN FETAL LIVER, SIGNAL = 6.5; EXPRESSED IN HBL100, SIGNAL = 6.2; NT HIT: AF024591.2, EVALUE 1.00e-01
  unsure 84
  unsure 97
tctggagacagagaagtcacatgtacaaagcagtgcacacccagggcctggcacggagagggtactcagatacccccgagagcnctggctctgccangcgggaacacgaggacgcagcagcaaggccccagagctgggcagcgccagtgagaagcctggcccttcctcttcct

SEQ ID NO: 17994 - DNA, 283 bp, Homo sapiens
  MAP TO AC006235.11; EXPRESSED IN BT474, SIGNAL =  11; EXPRESSED IN HBL100, SIGNAL =  14; EXPRESSED IN PLACENTA, SIGNAL =  10; EXPRESSED IN HEART, SIGNAL = 9.4; EXPRESSED IN BRAIN, SIGNAL =  14; EXPRESSED IN ADULT LIVER, SIGNAL = 9.9; EXPRESSED IN HELA, SIGNAL =  11; EXPRESSED IN LUNG, SIGNAL =  12; EXPRESSED IN FETAL LIVER, SIGNAL =  11; EXPRESSED IN BONE MARROW, SIGNAL =  11; NT HIT: Z46724.1, EVALUE 2.30e+00
  unsure 87
  unsure 95
acagagcctgacaaggagttaagacatgatggtgattatagtgaggctggctgtgatggtggtggtggtgatggtgctgatagtggntcatggtnggtgatgatgatgatggtggtgatggtcctggtgatggtggtgatgtcgatgatggtggtggtggtgatgatgctgttgatggcggtggtgatagtgatgatggtgatggaggtgatggtaatggtggtgttggtgatgatgatgatgatgatgatgacaatgatgtacctcatagcaagggactgga

SEQ ID NO: 17995 - DNA, 109 bp, Homo sapiens
  MAP TO AC006229.14; EXPRESSED IN BONE MARROW, SIGNAL = 1.4; EXPRESSED IN HBL100, SIGNAL = 1.3; EXPRESSED IN ADULT LIVER, SIGNAL = 1.4; EXPRESSED IN BRAIN, SIGNAL = 1.8; EXPRESSED IN PLACENTA, SIGNAL = 1.2; EXPRESSED IN BT474, SIGNAL = 1.2; EXPRESSED IN FETAL LIVER, SIGNAL = 1.4; EXPRESSED IN LUNG, SIGNAL = 1.3; EXPRESSED IN HELA, SIGNAL = 1.6; EXPRESSED IN HEART, SIGNAL = 1.4; NT HIT: U40631.1, EVALUE 2.40e-01
cttcttcgtaaagtccataggctcaggttgggtagagacagttgagacatgattctcacaggaactatttgggataagatgcatttcatcaatattggcaagactggct

SEQ ID NO: 17996 - DNA, 106 bp, Homo sapiens
  MAP TO AC006149.3; EXPRESSED IN PLACENTA, SIGNAL = 1.9; EXPRESSED IN BT474, SIGNAL = 1.6; EXPRESSED IN BRAIN, SIGNAL = 1.6; EXPRESSED IN HEART, SIGNAL = 1.7; EXPRESSED IN ADULT LIVER, SIGNAL = 1.3; EXPRESSED IN BONE MARROW, SIGNAL = 2.1; EXPRESSED IN HBL100, SIGNAL = 1.4; EXPRESSED IN FETAL LIVER, SIGNAL = 1.5; EXPRESSED IN LUNG, SIGNAL = 1.7; EXPRESSED IN HELA, SIGNAL = 1.4; NT HIT: U93163.1, EVALUE 2.00e-20; EST_HUMAN HIT: AA557657.1, EVALUE 1.00e-21
ctgtcttctacctctatgtcttgtcccactggaggatcttcagggacaacaacaggcatggagctgtcatctcttatgataataacgtctttttctggaatacctc

SEQ ID NO: 17997 - DNA, 117 bp, Homo sapiens
  MAP TO AC006029.2; EXPRESSED IN BONE MARROW, SIGNAL = 1.7; EXPRESSED IN HBL100, SIGNAL = 1.4; EXPRESSED IN FETAL LIVER, SIGNAL = 1.3; EXPRESSED IN PLACENTA, SIGNAL = 2.1; EXPRESSED IN BT474, SIGNAL = 2.7; EXPRESSED IN LUNG, SIGNAL = 1.1; EXPRESSED IN HELA, SIGNAL = 0.9; EXPRESSED IN ADULT LIVER, SIGNAL = 1.3; EXPRESSED IN BRAIN, SIGNAL = 1.2; EXPRESSED IN HEART, SIGNAL = 1.3; NT HIT: U32800.1, EVALUE 1.40e-02; EST_HUMAN HIT: AI732359.1, EVALUE 6.60e-02; SWISSPROT HIT: Q60302, EVALUE 5.30e+00
atatttaagaaactccttgttggtcacatagatgttgtttctaggattttctattacaaacatagtagcagtgaatgcaattgcatctataactttcttcattcaagtagactttac

SEQ ID NO: 17998 - DNA, 208 bp, Homo sapiens
  MAP TO AC006028.2; EXPRESSED IN FETAL LIVER, SIGNAL =   6; EXPRESSED IN HELA, SIGNAL = 5.8; EXPRESSED IN HEART, SIGNAL = 5.2; EXPRESSED IN BT474, SIGNAL = 4.9; EXPRESSED IN LUNG, SIGNAL = 6.5; EXPRESSED IN ADULT LIVER, SIGNAL = 5.5; EXPRESSED IN BRAIN, SIGNAL =   8; EXPRESSED IN PLACENTA, SIGNAL = 4.7; EXPRESSED IN BONE MARROW, SIGNAL = 5.8; EXPRESSED IN HBL100, SIGNAL =  14; NT HIT: U19026.1, EVALUE 8.00e-06; EST_HUMAN HIT: BE048291.1, EVALUE 2.00e-09; SWISSPROT HIT: Q13065, EVALUE 2.80e+00
cgataagcgtgcctgtgaaaagccactgagctccagcctgggccacatagtgagactccatctcaacaacaataacaacaacaaaacaaaacaaaacaacacacagaaagaaagaaagaaaaagaacaaacaaaaacaaagcaacatggatgcttcactgggcagcagagctaatgggatcctgtgcttgttgctttgtgtttccacg

SEQ ID NO: 17999 - DNA, 221 bp, Homo sapiens
  MAP TO AC006009.2; EXPRESSED IN BONE MARROW, SIGNAL = 2.8; EXPRESSED IN HBL100, SIGNAL = 2.1; EXPRESSED IN ADULT LIVER, SIGNAL = 1.3; EXPRESSED IN BRAIN, SIGNAL = 2.5; EXPRESSED IN PLACENTA, SIGNAL =   3; EXPRESSED IN BT474, SIGNAL = 2.4; EXPRESSED IN LUNG, SIGNAL = 2.6; EXPRESSED IN HELA, SIGNAL = 2.7; EXPRESSED IN FETAL LIVER, SIGNAL = 1.6; EXPRESSED IN HEART, SIGNAL = 1.6; EST_HUMAN HIT: T53275.1, EVALUE 2.00e-01; SWISSPROT HIT: P25805, EVALUE 4.70e+00
ctataaaacacaatgtagatgaaggcattagtggtggtggtggtggtggtggtggtggtggtggtggtggtggtggtggtaagcagaacagaaaatatttcaacttaacttgtttgaaggactctttggggtgtgaggatggtaataaacttttcagctttgtcccatttaaggaaaaaagctttccaagaatggggcaagaatgtaagtatatctttttc

SEQ ID NO: 18000 - DNA, 238 bp, Homo sapiens
  MAP TO AC006008.2; EXPRESSED IN FETAL LIVER, SIGNAL = 1.8; EXPRESSED IN LUNG, SIGNAL = 1.9; EXPRESSED IN HELA, SIGNAL = 1.9; EXPRESSED IN BRAIN, SIGNAL = 2.1; EXPRESSED IN HEART, SIGNAL = 2.1; EXPRESSED IN BONE MARROW, SIGNAL = 2.3; EXPRESSED IN PLACENTA, SIGNAL = 1.9; EXPRESSED IN BT474, SIGNAL = 2.3; EXPRESSED IN ADULT LIVER, SIGNAL = 2.2; EXPRESSED IN HBL100, SIGNAL = 1.6; SWISSPROT HIT: P71752, EVALUE 7.60e+00; NT HIT: gi11424815, EVALUE 3.60e-02; EST_HUMAN HIT: AW176028.1, EVALUE 5.40e-02
gggtatgaaaaagttcttcaggaagtccttgaaccagagctggctaccagcaaggtcccacacctgccagggcgaggcctgcgctagtatccctgccatactcccgttattggctaggagtaggaaggtgtgattgcacgcaaatgctgccgtggattccaaagcacagcagcagaggccttcattgttcctctctaggtacttggagttcttccagggcgttaccgtgaccacccta

SEQ ID NO: 18001 - DNA, 142 bp, Homo sapiens
  MAP TO AC005949.8; EXPRESSED IN HEART, SIGNAL = 1.5; EXPRESSED IN ADULT LIVER, SIGNAL = 1.4; EXPRESSED IN BT474, SIGNAL =   2; EXPRESSED IN BONE MARROW, SIGNAL = 2.2; EXPRESSED IN HBL100, SIGNAL = 1.6; EXPRESSED IN LUNG, SIGNAL = 1.8; EXPRESSED IN HELA, SIGNAL = 1.4; EXPRESSED IN PLACENTA, SIGNAL =   2; EXPRESSED IN FETAL LIVER, SIGNAL = 1.7; EXPRESSED IN BRAIN, SIGNAL = 2.1; NT HIT: AB004906.1, EVALUE 2.70e-01; SWISSPROT HIT: P13611, EVALUE 1.30e+00
gaggtatctgataagggggctaggcaggtgaccagagagaacacaagctctgcaacttcaatctcatcatcttggccaatatatacaggctgttcctttccccagccagcatccaggaccagaggcattacctggttttata

SEQ ID NO: 18002 - DNA, 125 bp, Homo sapiens
  MAP TO AC005949.8; EXPRESSED IN BONE MARROW, SIGNAL = 1.2; EXPRESSED IN HBL100, SIGNAL = 0.88; EXPRESSED IN FETAL LIVER, SIGNAL =   1; EXPRESSED IN LUNG, SIGNAL = 1.4; EXPRESSED IN ADULT LIVER, SIGNAL = 1.1; EXPRESSED IN BRAIN, SIGNAL = 1.5; EXPRESSED IN PLACENTA, SIGNAL = 1.6; EXPRESSED IN BT474, SIGNAL = 1.2; EXPRESSED IN HELA, SIGNAL = 1.2; EXPRESSED IN HEART, SIGNAL = 1.4; EST_HUMAN HIT: D60428.1, EVALUE 1.60e+00; NT HIT: M55976.1, EVALUE 7.00e-02; SWISSPROT HIT: P87073, EVALUE 8.90e+00
gctcattggtcttctcttgtcttccttctatctccaattctaggatctgaaaaacaacctcacatctctgggggctctccatgatatccatcagaccccttagccagtggtggtggggacagttc

SEQ ID NO: 18003 - DNA, 164 bp, Homo sapiens
  MAP TO AC005769.9; EXPRESSED IN PLACENTA, SIGNAL = 6.6; EXPRESSED IN BT474, SIGNAL = 6.2; EXPRESSED IN LUNG, SIGNAL = 7.7; EXPRESSED IN BRAIN, SIGNAL =  10; EXPRESSED IN HBL100, SIGNAL = 7.2; EXPRESSED IN FETAL LIVER, SIGNAL = 8.2; EXPRESSED IN HELA, SIGNAL = 6.2; EXPRESSED IN ADULT LIVER, SIGNAL = 5.9; EXPRESSED IN BONE MARROW, SIGNAL = 8.3; EXPRESSED IN HEART, SIGNAL = 7.4; SWISSPROT HIT: P42858, EVALUE 9.90e-01; NT HIT: L29393.1, EVALUE 3.80e-01; EST_HUMAN HIT: W27106.1, EVALUE 2.20e+00
acttagttccatttttccagagggcagctctgtttggctcagcccctggttggtgatgatggtcccttgtgtactcagcagagctgggcagggcaatgatggaagtgtcaattgttgttgttttgtgaagagccatcttctgtttctccagagccttgggatca

SEQ ID NO: 18004 - DNA, 166 bp, Homo sapiens
  MAP TO AC005769.9; EXPRESSED IN BT474, SIGNAL = 1.5; EXPRESSED IN BONE MARROW, SIGNAL = 1.9; EXPRESSED IN HBL100, SIGNAL = 1.5; EXPRESSED IN FETAL LIVER, SIGNAL = 1.3; EXPRESSED IN HELA, SIGNAL = 1.9; EXPRESSED IN ADULT LIVER, SIGNAL = 1.5; EXPRESSED IN BRAIN, SIGNAL = 2.1; EXPRESSED IN PLACENTA, SIGNAL = 1.7; EXPRESSED IN LUNG, SIGNAL = 1.9; EXPRESSED IN HEART, SIGNAL =   2; EST_HUMAN HIT: BE781889.1, EVALUE 9.00e-03; NT HIT: gi6681050, EVALUE 8.20e-02; SWISSPROT HIT: P54802, EVALUE 7.60e-01
attcaataaaccagccttctgcctcagggccaccttcatcaaacaccctgtcaaagtgccccggtttaagacaagtagtcacagtggcctgcggggcaggggcgaggaagagagtggtcagatgctgaccattcataaccacagcctgcgaagggagaacagacat

SEQ ID NO: 18005 - DNA, 198 bp, Homo sapiens
  MAP TO AC005694.3; EXPRESSED IN BRAIN, SIGNAL = 1.9; EXPRESSED IN HELA, SIGNAL = 3.8; EXPRESSED IN ADULT LIVER, SIGNAL = 3.1; EXPRESSED IN BT474, SIGNAL = 6.1; EXPRESSED IN BONE MARROW, SIGNAL = 4.9; EXPRESSED IN HBL100, SIGNAL = 5.8; EXPRESSED IN HEART, SIGNAL = 1.6; EXPRESSED IN PLACENTA, SIGNAL = 2.4; EXPRESSED IN FETAL LIVER, SIGNAL = 4.7; EXPRESSED IN LUNG, SIGNAL = 5.1; EST_HUMAN HIT: AW949816.1, EVALUE 1.00e-39; NT HIT: Y18000.1, EVALUE 1.00e-108; SWISSPROT HIT: P35240, EVALUE 3.00e-10
gtaaagaagcagattttagatgaaaagatctactgccctcctgaggcttctgtgctcctggcttcttacgccgtccaggccaaggtaggctcaaagaagaaaaatgtatttttcctgggcgttaatttgggtcatgggatcactcctatcttctctttctttgggttttctgtacttcagagagacttgccccagaaa

SEQ ID NO: 18006 - DNA, 356 bp, Homo sapiens
  MAP TO AC005694.3; EXPRESSED IN LUNG, SIGNAL = 1.7; EXPRESSED IN HELA, SIGNAL =   3; EXPRESSED IN ADULT LIVER, SIGNAL = 1.7; EXPRESSED IN BRAIN, SIGNAL = 2.3; EXPRESSED IN PLACENTA, SIGNAL = 1.4; EXPRESSED IN BT474, SIGNAL = 2.7; EXPRESSED IN BONE MARROW, SIGNAL =   2; EXPRESSED IN HBL100, SIGNAL = 2.7; EXPRESSED IN FETAL LIVER, SIGNAL = 2.3; EXPRESSED IN HEART, SIGNAL = 1.5; NT HIT: Y18000.1, EVALUE 0.00e+00; SWISSPROT HIT: P46969, EVALUE 6.00e-29; EST_HUMAN HIT: AV752944.1, EVALUE 0.00e+00
atgaacatgcatgtgatggtgtccaagccagaacagtgggtaaagccaatggctataagaggagccaatcagtacatctttcatctcgaggaaactgagaacccaggggctttgattaaagacattcaggagaatgggatgaaggttggccttgccataaaaccaggaacctcagttcagtatttggcaccatgggctaatcaactaggtatgaccttggttatgacagtggaaccagggtttggagggcataaattcatggaagatatgatgttaaaggttcactggttgaggatccagttcccatctttggctatagaggtcgctggtggaatagatcctgacactgtccatag

SEQ ID NO: 18007 - DNA, 153 bp, Homo sapiens
  MAP TO AC005694.3; EXPRESSED IN FETAL LIVER, SIGNAL = 9.8; EXPRESSED IN HELA, SIGNAL =  12; EXPRESSED IN HEART, SIGNAL = 9.4; EXPRESSED IN PLACENTA, SIGNAL = 9.1; EXPRESSED IN BT474, SIGNAL =  10; EXPRESSED IN BONE MARROW, SIGNAL =  10; EXPRESSED IN HBL100, SIGNAL =  12; EXPRESSED IN LUNG, SIGNAL =  11; EXPRESSED IN ADULT LIVER, SIGNAL = 8.6; EXPRESSED IN BRAIN, SIGNAL =  12; NT HIT: Y18000.1, EVALUE 3.00e-81; EST_HUMAN HIT: AI683611.1, EVALUE 9.00e-36; SWISSPROT HIT: P06471, EVALUE 2.00e-01
acataaaggttctccaagtccccaccagactcaggagcccagctggcttcacccagtggattctgcaccgtggccgcagatggggctgcctgccagtcccccgccatgcgcctgcactcctcagccgtcggacggtcgatgggactgggcgcc

SEQ ID NO: 18008 - DNA, 209 bp, Homo sapiens
  MAP TO AC005674.9; EXPRESSED IN HBL100, SIGNAL = 1.8; EXPRESSED IN HELA, SIGNAL = 1.3; EXPRESSED IN HEART, SIGNAL = 1.4; EXPRESSED IN BRAIN, SIGNAL = 1.7; EXPRESSED IN ADULT LIVER, SIGNAL = 2.1; EXPRESSED IN LUNG, SIGNAL = 2.4; EXPRESSED IN FETAL LIVER, SIGNAL = 3.1; EXPRESSED IN BONE MARROW, SIGNAL = 2.3; EXPRESSED IN BT474, SIGNAL = 1.7; EXPRESSED IN PLACENTA, SIGNAL = 2.1; NT HIT: gi11437146, EVALUE 1.00e-102; EST_HUMAN HIT: BF035577.1, EVALUE 3.00e-99; SWISSPROT HIT: P43427, EVALUE 9.00e-08
ccttccaaacgttcttgggtaaagcagacatttcccaagaggtagaggaggtcctggctgagagccgcgtgcagaggagcatccgcctggtgtccgtgctggagctgctgagagctccctacgtccgctggcaggtggtcaccgtgattgtcaccatggcctgctaccagctctgtggcctcaatgcagtgagtcctggggcccggtgg

SEQ ID NO: 18009 - DNA, 80 bp, Homo sapiens
  MAP TO AC005674.9; EXPRESSED IN PLACENTA, SIGNAL = 1.2; EXPRESSED IN BT474, SIGNAL = 1.1; EXPRESSED IN BONE MARROW, SIGNAL = 1.1; EXPRESSED IN FETAL LIVER, SIGNAL = 1.5; EXPRESSED IN LUNG, SIGNAL = 1.2; EXPRESSED IN ADULT LIVER, SIGNAL = 1.5; EXPRESSED IN BRAIN, SIGNAL = 1.5; EXPRESSED IN HBL100, SIGNAL = 1.3; EXPRESSED IN HELA, SIGNAL = 1.9; EXPRESSED IN HEART, SIGNAL = 1.3; NT HIT: X04298.1, EVALUE 4.10e-02; EST_HUMAN HIT: AA070364.1, EVALUE 1.10e-02
tcttgttgagttcttccacatagcaggtgcagagagactgtgggatctgagtgttgacactgggcaggggtcaggagttc

SEQ ID NO: 18010 - DNA, 75 bp, Homo sapiens
  MAP TO AC005534.2; EXPRESSED IN BRAIN, SIGNAL =   8; EXPRESSED IN BT474, SIGNAL =  14; EXPRESSED IN HBL100, SIGNAL = 6.4; EXPRESSED IN LUNG, SIGNAL = 6.8; EXPRESSED IN HELA, SIGNAL = 5.9; EXPRESSED IN ADULT LIVER, SIGNAL = 5.7; EXPRESSED IN PLACENTA, SIGNAL = 8.9; EXPRESSED IN BONE MARROW, SIGNAL = 7.1; EXPRESSED IN FETAL LIVER, SIGNAL = 8.8; EXPRESSED IN HEART, SIGNAL = 4.7; EST_HUMAN HIT: AV759611.1, EVALUE 1.00e-12; NT HIT: AF239710.1, EVALUE 2.00e-13
cctggtgggagatgactggatcatgggagaggatttcctccatgctgtttttgtgatggtgagtgagttgtcaca

SEQ ID NO: 18011 - DNA, 223 bp, Homo sapiens
  MAP TO AC005534.2; EXPRESSED IN BT474, SIGNAL = 2.3; EXPRESSED IN FETAL LIVER, SIGNAL = 2.6; EXPRESSED IN PLACENTA, SIGNAL = 2.2; EXPRESSED IN BONE MARROW, SIGNAL =   3; EXPRESSED IN HBL100, SIGNAL = 2.4; EXPRESSED IN LUNG, SIGNAL = 2.4; EXPRESSED IN HELA, SIGNAL = 3.6; EXPRESSED IN ADULT LIVER, SIGNAL = 2.3; EXPRESSED IN BRAIN, SIGNAL = 3.4; EXPRESSED IN HEART, SIGNAL = 2.2; EST_HUMAN HIT: BF125563.1, EVALUE 3.10e+00; SWISSPROT HIT: P52444, EVALUE 4.70e+00
gcaagtcgtcctaacacgtcagataggaaatcgtgatggtggctttgtgcctgtgtctctgctagaccttgaatttcctaagggaagggattttttttcctattcatctcttcatactctggagccaaaagtagtacctgaaacctattgggaacttcaaagtagtctttctcttcttagccagcgacaaaagaagaaagttctggctgccgtgctgggcctc

SEQ ID NO: 18012 - DNA, 172 bp, Homo sapiens
  MAP TO AC005534.2; EXPRESSED IN BRAIN, SIGNAL = 2.6; EXPRESSED IN BT474, SIGNAL = 2.9; EXPRESSED IN HELA, SIGNAL = 1.9; EXPRESSED IN HEART, SIGNAL = 1.9; EXPRESSED IN PLACENTA, SIGNAL = 2.2; EXPRESSED IN BONE MARROW, SIGNAL =   2; EXPRESSED IN HBL100, SIGNAL = 1.8; EXPRESSED IN FETAL LIVER, SIGNAL = 1.9; EXPRESSED IN LUNG, SIGNAL = 2.5; EXPRESSED IN ADULT LIVER, SIGNAL = 2.1; SWISSPROT HIT: O42469, EVALUE 3.80e+00; NT HIT: M94255.1, EVALUE 4.00e-01; EST_HUMAN HIT: AA196389.1, EVALUE 1.50e-01
gcttcgtgaaaagtattttctcaacatctgccctgtggaagtgctgctgtgtggccataggccacatgatgatcatttggtcaataacagaccacttgcctatgtgacagtggccacagcagatgatcatggagctgaaccgtttctgccagcagtggcgtggcggctgttg

SEQ ID NO: 18013 - DNA, 129 bp, Homo sapiens
  MAP TO AC005519.2; EXPRESSED IN PLACENTA, SIGNAL = 1.1; EXPRESSED IN LUNG, SIGNAL = 1.1; EXPRESSED IN HELA, SIGNAL = 0.98; EXPRESSED IN HEART, SIGNAL = 0.93; EXPRESSED IN BT474, SIGNAL = 0.99; EXPRESSED IN BONE MARROW, SIGNAL = 2.1; EXPRESSED IN HBL100, SIGNAL = 1.3; EXPRESSED IN FETAL LIVER, SIGNAL = 1.2; EXPRESSED IN BRAIN, SIGNAL = 1.3; EXPRESSED IN ADULT LIVER, SIGNAL =   1; NT HIT: Y14320.1, EVALUE 6.00e-67; EST_HUMAN HIT: BE257593.1, EVALUE 3.00e-66; SWISSPROT HIT: O14678, EVALUE 3.00e-19
cacaggctggctcgggcctgtgagcatcttcgggtatttcatcctggggaccgtggtgaacaaaactttgatgggccccattgtgatgaagctggtgcatcaggagaagctggagggagattttaggtg

SEQ ID NO: 18014 - DNA, 669 bp, Homo sapiens
  MAP TO AC005519.2; EXPRESSED IN ADULT LIVER, SIGNAL =  60; EXPRESSED IN HEART, SIGNAL =  46; EXPRESSED IN PLACENTA, SIGNAL =  30; EXPRESSED IN BT474, SIGNAL = 1.9e+02; EXPRESSED IN BONE MARROW, SIGNAL =  46; EXPRESSED IN HBL100, SIGNAL = 2.8e+02; EXPRESSED IN FETAL LIVER, SIGNAL = 1.6e+02; EXPRESSED IN LUNG, SIGNAL =  62; EXPRESSED IN HELA, SIGNAL =  97; EXPRESSED IN BRAIN, SIGNAL =  24; NT HIT: gi4506718, EVALUE 0.00e+00; EST_HUMAN HIT: BE378916.1, EVALUE 0.00e+00; SWISSPROT HIT: P15880, EVALUE 1.00e-113
atgaagatcaagtccctgaaggagatctatatcttctccctgcccattaaggaatctgagatcattgacctttccctgggggcctctctcaaggacgaggttttgaagattatgccggtccagaagcagacccgtgccggccagcgcaccaggttcaaggcgtttgttgccatcggggactacaatggccacgtcggtctgggtattaagtgctccaaggaggtggccactgccatctgcggggccatcatcctggccaagctctccattgtccccataagcagaggctgctgggagaacaagactggcaagccccacaccgtcccttgcaagatgacagaccgctgcggctctgtgccggtgcacctcatccctgcacccaggggcactggcattgtctcagcgcctgtgcccaagaagctgctcatgatggctggtatcaatgactgctacacctcagcccagggctgcactgccaccctgggcaacttcgccaaggccacctttgatgccatctctaaaacctacagctacctgacccccgacctctggaaggagactgtattcactaagtctctctatcaggaattcactgaccacctcgtcaagacccacactagagtctcggtgcagtggacccaggctccagctgtggctacaacatagggt

SEQ ID NO: 18015 - DNA, 294 bp, Homo sapiens
  MAP TO AC005399.14; EXPRESSED IN HBL100, SIGNAL = 2.8; EXPRESSED IN LUNG, SIGNAL = 4.4; EXPRESSED IN BRAIN, SIGNAL =   3; EXPRESSED IN HEART, SIGNAL = 2.8; EXPRESSED IN BT474, SIGNAL =   4; EXPRESSED IN BONE MARROW, SIGNAL = 3.6; EXPRESSED IN PLACENTA, SIGNAL = 3.2; EXPRESSED IN ADULT LIVER, SIGNAL = 2.9; EXPRESSED IN HELA, SIGNAL = 3.7; EXPRESSED IN FETAL LIVER, SIGNAL = 3.1; SWISSPROT HIT: P40601, EVALUE 1.30e+00; NT HIT: D26535.1, EVALUE 1.50e-01
ttgcaacccaatgcaaggccccatcatccctcagctgctcacttcagcagcttctacttttgtcccctttccattaattttccactctgcagatctaaaaacacaaatttcagcatgcccctcatgttccttcctgctgaaaacctttcaaagtctacccactacacagtgagcaaaatgcaagctctttttcttggcctgctgggccagccttatctggcctggagaccatgtctccaccctctcccccagctcccgacctgctggccagccttcctgtggcctctcaagtga

SEQ ID NO: 18016 - DNA, 206 bp, Homo sapiens
  MAP TO AC005399.14; EXPRESSED IN HEART, SIGNAL = 1.3; EXPRESSED IN BONE MARROW, SIGNAL =   2; EXPRESSED IN PLACENTA, SIGNAL = 1.3; EXPRESSED IN BT474, SIGNAL = 1.1; EXPRESSED IN LUNG, SIGNAL = 3.3; EXPRESSED IN HELA, SIGNAL = 0.67; EXPRESSED IN BRAIN, SIGNAL = 1.1; EXPRESSED IN HBL100, SIGNAL = 1.1; EXPRESSED IN FETAL LIVER, SIGNAL = 1.4; NT HIT: gi8393092, EVALUE 9.00e-98; SWISSPROT HIT: P47382, EVALUE 9.50e-01; EST_HUMAN HIT: BE245230.1, EVALUE 4.00e-95
cttttggcatcatccttagaatattaaacacttgacttctctcaatgagatgcttggcctggaaaaagtgcatgctgggtgggaatatcagggtcctcatggcctccttcatctcagcgattttgagcgtcatgagcctctcattggccagctcctccttggtattcagcaccagccgcccccccagccgcatcatcttttctttc

SEQ ID NO: 18017 - DNA, 124 bp, Homo sapiens
  MAP TO AC005105.2; EXPRESSED IN HEART, SIGNAL = 1.1; EXPRESSED IN BT474, SIGNAL = 0.65; EXPRESSED IN BONE MARROW, SIGNAL = 1.1; EXPRESSED IN HELA, SIGNAL = 1.1; EXPRESSED IN ADULT LIVER, SIGNAL = 1.4; EXPRESSED IN PLACENTA, SIGNAL = 2.2; EXPRESSED IN FETAL LIVER, SIGNAL = 3.5; EXPRESSED IN LUNG, SIGNAL = 1.1; EXPRESSED IN BRAIN, SIGNAL = 1.6; EXPRESSED IN HBL100, SIGNAL = 0.98; EST_HUMAN HIT: BE313442.1, EVALUE 2.80e-01; SWISSPROT HIT: Q41062, EVALUE 5.20e+00
atgtttctctgtggaaacaggtcatacattgggacaaaagtgaggcaacaggtctcccctgatatgtcctcaatcttctggtagtattgaaggtcccagagctcatcaccagtaaatcgcaccc

SEQ ID NO: 18018 - DNA, 196 bp, Homo sapiens
  MAP TO AC005089.2; EXPRESSED IN LUNG, SIGNAL =   1; EXPRESSED IN ADULT LIVER, SIGNAL = 1.2; EXPRESSED IN BRAIN, SIGNAL = 0.73; EXPRESSED IN HEART, SIGNAL = 0.78; EXPRESSED IN PLACENTA, SIGNAL = 1.1; EXPRESSED IN BONE MARROW, SIGNAL = 1.8; EXPRESSED IN HBL100, SIGNAL = 2.2; EXPRESSED IN FETAL LIVER, SIGNAL = 1.3; EXPRESSED IN BT474, SIGNAL = 2.3; EXPRESSED IN HELA, SIGNAL = 1.3; SWISSPROT HIT: Q84133, EVALUE 5.80e-01; EST_HUMAN HIT: AA577412.1, EVALUE 1.00e-106; NT HIT: AB032253.1, EVALUE 1.00e-107
catcagtaacgtgccagcagacagcttgattcgtacagagcgcccaccaaataaggagatagttcgatactttatacggcataatgcattacgagctggtactggtgaaaatgcaccttgggtcgtagaagatgaattggtgaagaaatactctctgcccagcaagttcagtgactttttacttgatccatacaag

SEQ ID NO: 18019 - DNA, 208 bp, Homo sapiens
  MAP TO AC005089.2; EXPRESSED IN HBL100, SIGNAL = 1.4; EXPRESSED IN FETAL LIVER, SIGNAL = 1.3; EXPRESSED IN LUNG, SIGNAL = 1.1; EXPRESSED IN ADULT LIVER, SIGNAL = 0.9; EXPRESSED IN BRAIN, SIGNAL = 0.8; EXPRESSED IN BT474, SIGNAL = 2.5; EXPRESSED IN HEART, SIGNAL =   1; EXPRESSED IN PLACENTA, SIGNAL =   1; EXPRESSED IN HELA, SIGNAL = 2.4; EXPRESSED IN BONE MARROW, SIGNAL = 0.72; NT HIT: AB032253.1, EVALUE 1.00e-110; SWISSPROT HIT: P13816, EVALUE 1.90e-01; EST_HUMAN HIT: AA255960.1, EVALUE 1.00e-110
gttgggaaggagaaaatgctcaaggtgaagattgtgaagattcatcctttggagaaagtggatgaagaggccactgagaagaaatctgatggtgcctgtgattctccatcaagtgacaaagagaactccagtcagattgctcaggaccatcagaagaaggagacagttgtgaaagaggatgaaggaaggagagagagtattagtatgt

SEQ ID NO: 18020 - DNA, 171 bp, Homo sapiens
  MAP TO AC005089.2; EXPRESSED IN BT474, SIGNAL = 2.5; EXPRESSED IN BONE MARROW, SIGNAL = 1.1; EXPRESSED IN HELA, SIGNAL = 1.2; EXPRESSED IN PLACENTA, SIGNAL = 1.9; EXPRESSED IN FETAL LIVER, SIGNAL =   3; EXPRESSED IN LUNG, SIGNAL = 1.7; EXPRESSED IN ADULT LIVER, SIGNAL = 0.8; EXPRESSED IN BRAIN, SIGNAL =   2; EXPRESSED IN HEART, SIGNAL = 1.9; EXPRESSED IN HBL100, SIGNAL = 2.8; SWISSPROT HIT: Q9UGL9, EVALUE 5.90e-01; NT HIT: gi4502384, EVALUE 7.00e-92; EST_HUMAN HIT: BE622365.1, EVALUE 1.00e-91
acgaaaacagcaaccagagttccgtgtctgacgtctatcagcttaaggtggacagcagcaccaactcaagccccagcccccagcagagtgagtccctgagcccagcacacacctccgacttccgcacggatgactcccagcccccaacgctgggccaggagatcctggagg

SEQ ID NO: 18021 - DNA, 1721 bp, Homo sapiens
  MAP TO AC005089.2; EXPRESSED IN PLACENTA, SIGNAL =   3; EXPRESSED IN BT474, SIGNAL = 5.4; EXPRESSED IN BONE MARROW, SIGNAL =   4; EXPRESSED IN HBL100, SIGNAL = 5.6; EXPRESSED IN FETAL LIVER, SIGNAL = 3.3; EXPRESSED IN LUNG, SIGNAL = 3.1; EXPRESSED IN HELA, SIGNAL =   4; EXPRESSED IN ADULT LIVER, SIGNAL = 2.7; EXPRESSED IN BRAIN, SIGNAL = 3.1; EXPRESSED IN HEART, SIGNAL = 3.7; EST_HUMAN HIT: BF700490.1, EVALUE 0.00e+00; SWISSPROT HIT: Q28279, EVALUE 5.00e-03; NT HIT: AF084479.1, EVALUE 0.00e+00
tatatgactctcaacccttctactaagaggaagaatactggatccccagacaggaagccctcaaagaaatccaagacagacaactcttctcttagttcaccactaaatcctaagttatggtgtcacgtacacttgaagaagtcattgagtggctcgccactcaaagtgaagaactcaaagaattccaaatctcctgaagaacatctagaagaaatgatgaagatgatgtcgcccaataagctgcacactaactttcacattcctaaaaaaggcccacctgccaagaaaccagggaagcacagtgacaagcctttgaaggcaaagggcagaagcaaaggcatcctgaatggacagaaatccacagggaattccaaatctcccaaaaaaggactgaagactcctaaaaccaaaatgaagcagatgactttgttggatatggccaaaggcacgcagaagatgacacgagccccacggaattctgggggtacacctaggacctctagtaaacctcataaacatctgcctcctgcagccctacacctcattgcatactacaaagaaaacaaagacagggaggacaagaggagcgccctgtcctgtgttatctccaaaacagctcgtcttctctctagtgaagatagagctcgtctcccagaagaattgcgaagtcttgttcaaaaacgctatgaacttctagagcacaaaaagaggtgggcttctatgtctgaagaacaacggaaagaatatttgaaaaagaaacgggaggagctgaaaaagaagttgaaggaaaaagccaaagaacgaagagagaaagaaatgcttgagagattagaaaaacagaagcggtatgaggaccaagagttaactggcaaaaaccttccagcattcagattggtggatacccctgaagggctgcccaacacgctgtttggggatgtggccatggtggtggaattcttgagctgttattctgggctacttttaccagatgctcagtatcctattactgctgtgtcccttatggaagccttgagtgcagataagggtggctttttataccttaacagggtgttggtcatcctcttacagaccctcctacaagatgagatagcagaagactatggtgaattgggaatgaagctgtcggaaatccccttgactctgcattctgtttcagagctggtgcggctctgcttgcgcagatctgatgttcaggaggaaagcgagggctcagacacagatgacaataaagattcagctgcatttgaggataatgaggtacaagatgagttcctagaaaagctggagacctctgaattttttgagctgacgtcagaggagaagctacagatcttgacagcactgtgccaccggatcctcatgacatactcagtgcaagaccacatggagaccagacagcagatgtctgcagagttgtggaaggaacggcttgctgtgttgaaggaagaaaatgataagaagagagcagagaaacagaaacggaaagaaatggaagccaaaaataaagaaaatggaaaagttgagaatgggttaggcaaaactgataggaaaaaagaaattgtgaagtttgagccccaagtagatacagaagctgaagacatgattagtgctgtgaagagcagaaggttgcttgccattcaagctaagaaggaacgggaaatccaggaaagagaaatgaaaggtaaaatttcatgctgaga

SEQ ID NO: 18022 - DNA, 166 bp, Homo sapiens
  MAP TO AC005075.2; EXPRESSED IN HEART, SIGNAL =   1; EXPRESSED IN FETAL LIVER, SIGNAL = 1.4; EXPRESSED IN LUNG, SIGNAL = 1.7; EXPRESSED IN ADULT LIVER, SIGNAL = 2.2; EXPRESSED IN BRAIN, SIGNAL = 1.4; EXPRESSED IN PLACENTA, SIGNAL = 1.5; EXPRESSED IN BT474, SIGNAL = 1.6; EXPRESSED IN BONE MARROW, SIGNAL = 1.8; EXPRESSED IN HBL100, SIGNAL = 2.2; EXPRESSED IN HELA, SIGNAL = 1.7; NT HIT: Z50202.1, EVALUE 3.20e-01; SWISSPROT HIT: P14531, EVALUE 2.20e+00
tgccacagccatcattgcccagacggggaattacaagcccagtgtttctatcacctacatcacctgggcagtaatcacagaagtctgtggacatgttttctcccttaagaagcttgtattcactttgagagagacaaaatataacacacacaaaaccgagagcagt

SEQ ID NO: 18023 - DNA, 357 bp, Homo sapiens; identical to SEQ ID NO: 1262
  MAP TO AC005075.2; EXPRESSED IN HBL100, SIGNAL = 1.7; EXPRESSED IN BRAIN, SIGNAL = 2.9; EXPRESSED IN HEART, SIGNAL = 1.9; EXPRESSED IN PLACENTA, SIGNAL = 2.3; EXPRESSED IN BT474, SIGNAL = 1.6; EXPRESSED IN BONE MARROW, SIGNAL = 2.6; EXPRESSED IN ADULT LIVER, SIGNAL = 2.2; EXPRESSED IN HELA, SIGNAL =   2; EXPRESSED IN LUNG, SIGNAL = 2.5; EXPRESSED IN FETAL LIVER, SIGNAL = 1.9; NT HIT: AF155382.1, EVALUE 3.00e-28; EST_HUMAN HIT: AA566140.1, EVALUE 1.00e-27; SWISSPROT HIT: Q09991, EVALUE 2.40e+00

SEQ ID NO: 18024 - DNA, 180 bp, Homo sapiens
  MAP TO AC004985.2; EXPRESSED IN BT474, SIGNAL = 3.2; EXPRESSED IN PLACENTA, SIGNAL = 4.9; EXPRESSED IN HEART, SIGNAL = 2.5; EXPRESSED IN ADULT LIVER, SIGNAL =   2; EXPRESSED IN HELA, SIGNAL = 3.8; EXPRESSED IN FETAL LIVER, SIGNAL = 2.3; EXPRESSED IN HBL100, SIGNAL = 2.7; EXPRESSED IN BONE MARROW, SIGNAL = 2.3; EXPRESSED IN BRAIN, SIGNAL =   3; EXPRESSED IN LUNG, SIGNAL = 3.2; NT HIT: AL163207.2, EVALUE 3.00e-23; SWISSPROT HIT: Q86695, EVALUE 3.80e+00; EST_HUMAN HIT: AL042800.1, EVALUE 7.00e-37
aagatgggaaaaggctgttgatcactttggcttcttcctgctgaaaggggacatagtgggaatgagagtgaaccccaaggtgggaagagtggaactgctttgcaattgtctgagcatactcatgcaggcatggttgagcttccaaggcttgcaaggtaaaaacattagtattctcatcta

SEQ ID NO: 18025 - DNA, 313 bp, Homo sapiens
  MAP TO AC004985.2; EXPRESSED IN BONE MARROW, SIGNAL = 2.1; EXPRESSED IN LUNG, SIGNAL =   2; EXPRESSED IN HEART, SIGNAL = 1.9; EXPRESSED IN PLACENTA, SIGNAL = 1.4; EXPRESSED IN BT474, SIGNAL = 4.7; EXPRESSED IN HBL100, SIGNAL = 3.2; EXPRESSED IN FETAL LIVER, SIGNAL = 2.7; EXPRESSED IN HELA, SIGNAL = 1.5; EXPRESSED IN ADULT LIVER, SIGNAL = 3.4; EXPRESSED IN BRAIN, SIGNAL = 3.1; NT HIT: AB014607.1, EVALUE 5.00e-82; EST_HUMAN HIT: BE064386.1, EVALUE 1.00e-82; SWISSPROT HIT: O35430, EVALUE 8.60e-01
tgaatcaacagccaatttggatactatcaagacagctgaaaccttatcatgagccagatgctgaggaagagattccaagaggatcccgaggaccccccagttgcagccatgtcaagactgatgctaaggaggaccccaactgtcacaagcaacacccattgaacacagccaccaaccagaggacagatcaagaaactgtcacagatggtggaagaaaacctgaggaaagtgggacaaccagtcacaatgagtaatttaatggtagctatgatagcagtgatcaccattgccatgagtattgcttcaacaaggg

SEQ ID NO: 18026 - DNA, 268 bp, Homo sapiens
  MAP TO AC004985.2; EXPRESSED IN PLACENTA, SIGNAL = 0.8; EXPRESSED IN BONE MARROW, SIGNAL = 1.1; EXPRESSED IN FETAL LIVER, SIGNAL = 0.84; EXPRESSED IN BRAIN, SIGNAL = 1.3; EXPRESSED IN HBL100, SIGNAL = 1.1; EXPRESSED IN HELA, SIGNAL = 1.3; EXPRESSED IN ADULT LIVER, SIGNAL = 0.83; EXPRESSED IN BT474, SIGNAL = 1.7; EXPRESSED IN LUNG, SIGNAL = 2.3; EXPRESSED IN HEART, SIGNAL = 0.83; SWISSPROT HIT: P52279, EVALUE 1.40e+00; NT HIT: gi11419196, EVALUE 1.00e-82; EST_HUMAN HIT: AI768799.1, EVALUE 1.00e-82
ggcccagggcagctgatcccactcatcgaggagacaaccagcaccgagtgtcgccaggacgtggccacgaacctgctcaagctcttcctggggcaggggctggccaaggacttcctggacctgctcttccagctggagctgagtcgcaccagtgaggcctgggaaggagctgggcccagaacgctgggaggtgtttgggggtgggtgggctcctcctgtaggaggcagatggggtcagacaggagggaggcaaggaacagagccaagg

SEQ ID NO: 18027 - DNA, 2144 bp, Homo sapiens
  MAP TO AC004985.2; EXPRESSED IN HBL100, SIGNAL = 1.4; EXPRESSED IN LUNG, SIGNAL = 1.8; EXPRESSED IN ADULT LIVER, SIGNAL = 1.5; EXPRESSED IN BRAIN, SIGNAL = 2.1; EXPRESSED IN HEART, SIGNAL = 1.7; EXPRESSED IN BT474, SIGNAL = 2.8; EXPRESSED IN PLACENTA, SIGNAL = 1.6; EXPRESSED IN HELA, SIGNAL =   3; EXPRESSED IN FETAL LIVER, SIGNAL = 1.6; EXPRESSED IN BONE MARROW, SIGNAL = 1.1; NT HIT: AB040940.1, EVALUE 0.00e+00; SWISSPROT HIT: P02461, EVALUE 4.50e-02; EST_HUMAN HIT: BE904203.1, EVALUE 0.00e+00
actcggagaaccactaccatacatttctgctgtgggccatgcggggcattgtgaggacatggtggtcccagcccccaaggggcatggggagcttccgggaagacagcgtggtcttgtccagggcgcccgccttcgccttcgtgcgcatggacgtcagtagcaactccaagtcccagcttctcaacgccgtcctcagcccgggccacaggcagtgggactgcttctggcatcgggacctcaacttgggcaccaatgcccgggagatttcggatgggttggtagaaatttcctggttttttcccagcggaagggaggacttggacattttcccagaacctgtggcctttctgaacctgagaggtgacatcgggtctcactggctgcagtttaagctcttgacagaaatctcctccgctgtgtttatattgactgacaatatcagtaagaaggaatacaaattgctgtactccatgaaggagtcaaccacaaaatactacttcatcctgagtccctaccgtgggaagcgcaacacaaacctgagatttctgaataagttaattcctgtgctgaaaatagaccactcacatgtcctggtaaaggtcagcagcactgacagcgacagcttcgtgaagaggatccgggccatcgttgggaatgtgctgcgggcaccctgcaggcgggtatctgtggaggacatggcgcacgcagcccgcaaactgggcctaaaggtcgacgaggactgtgaggagtgtcagaaagcgaaagaccggatggagaggattaccaggaaaatcaaagactcggatgcctacagaagggacgagctgaggctgcagggggacccctggagaaaggcagcccaagtggagaaggagttctgccagctccagtgggccgtggacccccctgagaagcacagggctgagctgaggcggcggctgctagaacttcgaatgcagcagaacggccatgatccctcctcgggggtgcaggagttcatctcggggatcagcagcccctccttgagtgagaagcagtacttcctgaggtggatggagtggggcctggcacgggtggcccagccgcgactgagacagcctccggagacgcttctcaccctgagaccaaagcatgggggcaccacagacgtgggggagccgctctggcctgagcccctaggggtggaacacttcttgcgggagatgggacagttttatgaggctgagagctgtcttgtggaggcagggaggctgccggcaggccagaggcgttttgcccacttcccaggcttggcctcggagctgctgctgacagggctgcctctggagctaatcgatgggagcacgctgagcatgcccgtccgctgggtcacagggctcctgaaggagctgcacgtccgactggagagacggtcaaggctggtggttctgtcaaccgtcggggtgccaggcacgggcaagtccacactcctcaacaccatgtttgggctgcggtttgccacagggaagagctgcggtcctcgaggggccttcatgcagctcatcacagtggctgagggcttcagccaggacctgggctgtgaccacatcctggtgatagactccgggggcttgataggtggggccttgacgtcagctggggacagatttgagctggaggcttccttggccactctgctcatgggactgagcaatgtcaccgtgatcagtctagctgaaaccaaggacattccagcagctattctgcatgcatttctgaggttagaaaaaacggggcacatgcccaactaccagtttgtataccagaaccttcatgatgtatctgttcccggccctaggcccagagacaagagacagctcctggatccacctggtgacctgagcagggctgcagcccagatggagaaacagggcgacggcttccgggcactggcaggcctggccttctgcgaccctgagaagcagcacatctggcacatcccaggcctgtggcacggagcacctcccatggccgcagtgagcttggcctacagtgaagccatatttgaattgaagagatgcctactcgaaaacatcaggaacggcttgtcgaaccaaaacaaaaacatccagcagctcattgagctggtgagacggctgtgagtg

SEQ ID NO: 18028 - DNA, 98 bp, Homo sapiens
  MAP TO AC004909.2; EXPRESSED IN ADULT LIVER, SIGNAL = 7.9; EXPRESSED IN BRAIN, SIGNAL = 8.3; EXPRESSED IN HEART, SIGNAL = 5.3; EXPRESSED IN PLACENTA, SIGNAL = 6.9; EXPRESSED IN BONE MARROW, SIGNAL = 9.4; EXPRESSED IN HBL100, SIGNAL = 7.3; EXPRESSED IN BT474, SIGNAL = 5.9; EXPRESSED IN FETAL LIVER, SIGNAL =   7; EXPRESSED IN LUNG, SIGNAL = 8.2; EXPRESSED IN HELA, SIGNAL = 8.4; EST_HUMAN HIT: BF364796.1, EVALUE 3.10e-01
ctgaagtaatggtattctgcttcctgaatgcctttctgaaaatgctgcctgcctttattgactcaaatgttgtcaagcgtgttacatacacatttttc

SEQ ID NO: 18029 - DNA, 198 bp, Homo sapiens
  MAP TO AC004909.2; EXPRESSED IN FETAL LIVER, SIGNAL =  31; EXPRESSED IN LUNG, SIGNAL =  13; EXPRESSED IN ADULT LIVER, SIGNAL =  13; EXPRESSED IN BRAIN, SIGNAL =  10; EXPRESSED IN HEART, SIGNAL =  12; EXPRESSED IN BT474, SIGNAL =  39; EXPRESSED IN PLACENTA, SIGNAL = 7.9; EXPRESSED IN HELA, SIGNAL =  47; EXPRESSED IN HBL100, SIGNAL =  27; EXPRESSED IN BONE MARROW, SIGNAL = 8.4; EST_HUMAN HIT: BE208532.1, EVALUE 2.00e-58; SWISSPROT HIT: Q02878, EVALUE 4.00e-24; NT HIT: D17554.1, EVALUE 6.00e-56
ggtgcccagatagttaaacttcgcaaaatccctagatattattctactggagatgtgcctcgaaagctgttgagccacagccaaaaacccttcagtcagcacttgagaaaactacgagccacagtcacccccggggccattctgatcattctcactgagtgctacagaggcaagagggtggttttcctgaagcaggtg

SEQ ID NO: 18030 - DNA, 143 bp, Homo sapiens
  MAP TO AC004885.2; EXPRESSED IN BONE MARROW, SIGNAL = 2.7; EXPRESSED IN HBL100, SIGNAL = 0.92; EXPRESSED IN FETAL LIVER, SIGNAL =   1; EXPRESSED IN PLACENTA, SIGNAL = 1.2; EXPRESSED IN BT474, SIGNAL = 0.84; EXPRESSED IN LUNG, SIGNAL = 1.4; EXPRESSED IN HELA, SIGNAL = 0.99; EXPRESSED IN ADULT LIVER, SIGNAL = 0.91; EXPRESSED IN BRAIN, SIGNAL = 1.3; EXPRESSED IN HEART, SIGNAL =   1; EST_HUMAN HIT: BE003352.1, EVALUE 7.50e+00; NT HIT: L77569.1, EVALUE 1.30e+00; SWISSPROT HIT: P42218, EVALUE 1.30e+00
gccaaaacagagatcctgatttccatcttcctccaaaacttcctccagccagtcaccctcatcttagcgaatgccaaccaaatccttccagttgttcaggtcaaccactctggagtcatccttggtttctttctttctctcat

SEQ ID NO: 18031 - DNA, 86 bp, Homo sapiens
  MAP TO AC004885.2; EXPRESSED IN PLACENTA, SIGNAL = 1.5; EXPRESSED IN BT474, SIGNAL = 0.98; EXPRESSED IN HBL100, SIGNAL = 0.71; EXPRESSED IN FETAL LIVER, SIGNAL = 1.4; EXPRESSED IN LUNG, SIGNAL = 1.1; EXPRESSED IN HELA, SIGNAL = 1.1; EXPRESSED IN ADULT LIVER, SIGNAL = 0.83; EXPRESSED IN HEART, SIGNAL = 1.1; EXPRESSED IN BRAIN, SIGNAL = 0.99; NT HIT: gi9628113, EVALUE 1.80e-01; EST_HUMAN HIT: AI014255.1, EVALUE 4.60e-02
caatttggcaagagagtaagcatttctataacattgctgtcaacagccacataacaacattcgaccactttcatatcactaagaag

SEQ ID NO: 18032 - DNA, 206 bp, Homo sapiens
  MAP TO AC004859.2; EXPRESSED IN LUNG, SIGNAL = 2.5; EXPRESSED IN PLACENTA, SIGNAL = 2.6; EXPRESSED IN BT474, SIGNAL = 5.1; EXPRESSED IN BONE MARROW, SIGNAL = 3.1; EXPRESSED IN HBL100, SIGNAL = 2.8; EXPRESSED IN FETAL LIVER, SIGNAL = 3.9; EXPRESSED IN HELA, SIGNAL = 2.6; EXPRESSED IN BRAIN, SIGNAL = 3.2; EXPRESSED IN ADULT LIVER, SIGNAL = 2.6; EXPRESSED IN HEART, SIGNAL = 1.9; EST_HUMAN HIT: AA984379.1, EVALUE 1.00e-84; SWISSPROT HIT: P15269, EVALUE 1.60e+00
gttttggggaaccccatgggccctgcagggagtccctctggcagctccatgatgcctggtgtggcagggggcagctccgccttgacctccccacagtgcctgggacagcaggcgtttgctgaaggcggcgccaacaagggctacgtgcagcaaggcgtgtacagccgcgggggctaccctggggcccccggcttcaccaccgggta

SEQ ID NO: 18033 - DNA, 161 bp, Homo sapiens
  MAP TO AC004859.2; EXPRESSED IN PLACENTA, SIGNAL = 1.9; EXPRESSED IN BT474, SIGNAL = 4.6; EXPRESSED IN FETAL LIVER, SIGNAL = 2.3; EXPRESSED IN HELA, SIGNAL = 3.1; EXPRESSED IN ADULT LIVER, SIGNAL =   2; EXPRESSED IN BONE MARROW, SIGNAL = 3.3; EXPRESSED IN HBL100, SIGNAL = 2.3; EXPRESSED IN LUNG, SIGNAL =   2; EXPRESSED IN BRAIN, SIGNAL = 2.9; EXPRESSED IN HEART, SIGNAL = 9.3; NT HIT: D32064.1, EVALUE 7.00e-86; SWISSPROT HIT: Q02218, EVALUE 1.00e-25; EST_HUMAN HIT: BF530951.1, EVALUE 1.00e-85
cccacttccagcgggtgatcccagaagatggccctgcagctcagaacccagaaaatgtcaaaaggcttctcttctgcaccggcaaagtgtattatgacctcacccgggagcgcaaagcacgcgacatggtggggcaggtggccatcacaaggattgagcag

SEQ ID NO: 18034 - DNA, 158 bp, Homo sapiens
  MAP TO AC004859.2; EXPRESSED IN BRAIN, SIGNAL = 3.5; EXPRESSED IN HEART, SIGNAL = 4.2; EXPRESSED IN PLACENTA, SIGNAL =   3; EXPRESSED IN BT474, SIGNAL = 4.1; EXPRESSED IN BONE MARROW, SIGNAL = 4.1; EXPRESSED IN ADULT LIVER, SIGNAL = 3.4; EXPRESSED IN HELA, SIGNAL = 3.9; EXPRESSED IN LUNG, SIGNAL = 3.6; EXPRESSED IN FETAL LIVER, SIGNAL = 3.5; EXPRESSED IN HBL100, SIGNAL = 2.9; NT HIT: gi4505492, EVALUE 1.00e-83; EST_HUMAN HIT: BE838864.1, EVALUE 6.00e-84; SWISSPROT HIT: Q02218, EVALUE 1.00e-25
atggcctactgccagcatattggggtggagttcatgttcatcaatgacctggagcagtgccagtggatccggcagaagtttgagacccctgggatcatgcagttcacaaatgaggagaaacggaccctgctggccaggcttgtgcggtccaccaggta

SEQ ID NO: 18035 - DNA, 195 bp, Homo sapiens
  MAP TO AC004859.2; EXPRESSED IN HBL100, SIGNAL = 1.4; EXPRESSED IN ADULT LIVER, SIGNAL = 1.8; EXPRESSED IN BONE MARROW, SIGNAL = 2.1; EXPRESSED IN LUNG, SIGNAL = 1.7; EXPRESSED IN HELA, SIGNAL = 2.8; EXPRESSED IN BRAIN, SIGNAL = 1.5; EXPRESSED IN HEART, SIGNAL = 2.7; EXPRESSED IN PLACENTA, SIGNAL = 1.3; EXPRESSED IN BT474, SIGNAL = 2.9; EXPRESSED IN FETAL LIVER, SIGNAL = 1.9; NT HIT: gi11421250, EVALUE 1.00e-93; SWISSPROT HIT: Q02218, EVALUE 6.00e-32; EST_HUMAN HIT: BE019365.1, EVALUE 2.00e-93
tcatgggacattttttttcgcaacacgaatgccggagccccaccgggcactgcctaccagagtccccttcccctgagccgaggctccctggctgctgtggcccatgcacagtccctggtagaagcacagcccaacgtggacaagctcgtggaggaccacctggcagtgcagtcgctcatcagggcatatcaggta

SEQ ID NO: 18036 - DNA, 98 bp, Homo sapiens
  MAP TO AC004814.2; EXPRESSED IN FETAL LIVER, SIGNAL = 4.3; EXPRESSED IN HEART, SIGNAL = 3.3; EXPRESSED IN PLACENTA, SIGNAL =   4; EXPRESSED IN BT474, SIGNAL = 4.1; EXPRESSED IN BRAIN, SIGNAL = 3.8; EXPRESSED IN ADULT LIVER, SIGNAL = 2.9; EXPRESSED IN HELA, SIGNAL = 3.5; EXPRESSED IN LUNG, SIGNAL = 4.8; EXPRESSED IN HBL100, SIGNAL = 4.1; EXPRESSED IN BONE MARROW, SIGNAL = 5.1; EST_HUMAN HIT: AW800317.1, EVALUE 2.00e-48; SWISSPROT HIT: P70501, EVALUE 3.30e-02; NT HIT: AF042857.1, EVALUE 1.00e-48
cttcgttttccagtggccaggtttacagctaccatcttcccatcaatgctaaatggcggatcaaggttctgtaagatcttcaccacacgaagagcttc

SEQ ID NO: 18037 - DNA, 172 bp, Homo sapiens
  MAP TO AC004689.5; EXPRESSED IN BONE MARROW, SIGNAL =  19; EXPRESSED IN FETAL LIVER, SIGNAL =  14; EXPRESSED IN LUNG, SIGNAL =  16; EXPRESSED IN PLACENTA, SIGNAL =  14; EXPRESSED IN BT474, SIGNAL =  13; EXPRESSED IN HBL100, SIGNAL =  15; EXPRESSED IN HELA, SIGNAL =  12; EXPRESSED IN ADULT LIVER, SIGNAL =  12; EXPRESSED IN BRAIN, SIGNAL =  14; EXPRESSED IN HEART, SIGNAL =  11; SWISSPROT HIT: Q10156, EVALUE 2.90e+00
ttcgcacacactgtgtgtaatgctcctgtgtgagttccccggtgacccaggtcccactggggtggccggcgtgtaaccaggacaggaacatctccaaagccactccttgtttgctgcctggtggctcaagcagaacatctgtgcctgcagggggcccataagccttaatgcc

SEQ ID NO: 18038 - DNA, 115 bp, Homo sapiens
  MAP TO AC004689.5; EXPRESSED IN PLACENTA, SIGNAL = 2.5; EXPRESSED IN BRAIN, SIGNAL = 3.8; EXPRESSED IN BT474, SIGNAL = 2.7; EXPRESSED IN HBL100, SIGNAL = 2.4; EXPRESSED IN FETAL LIVER, SIGNAL = 3.4; EXPRESSED IN LUNG, SIGNAL = 3.5; EXPRESSED IN HELA, SIGNAL = 3.3; EXPRESSED IN ADULT LIVER, SIGNAL = 2.4; EXPRESSED IN BONE MARROW, SIGNAL = 3.4; EXPRESSED IN HEART, SIGNAL = 2.8; SWISSPROT HIT: P49743, EVALUE 1.00e+00; NT HIT: U67779.1, EVALUE 1.40e-02
ccggtgtccatcacttgcgggctgaagtgggacagcatcagcaccatgctgagggtctcaaactcctccaggtcccccccataggtcttcagccctgccagctccacctccagcc

SEQ ID NO: 18039 - DNA, 185 bp, Homo sapiens
  MAP TO AC004689.5; EXPRESSED IN PLACENTA, SIGNAL = 0.91; EXPRESSED IN HBL100, SIGNAL = 0.77; EXPRESSED IN LUNG, SIGNAL = 0.83; EXPRESSED IN BRAIN, SIGNAL =   3; EXPRESSED IN HEART, SIGNAL = 1.2; EXPRESSED IN BT474, SIGNAL = 1.6; EXPRESSED IN BONE MARROW, SIGNAL =   1; EXPRESSED IN FETAL LIVER, SIGNAL = 0.86; EXPRESSED IN HELA, SIGNAL = 0.77; EXPRESSED IN ADULT LIVER, SIGNAL = 0.9; NT HIT: AF096157.1, EVALUE 3.00e-85; SWISSPROT HIT: P97888, EVALUE 7.00e-23; EST_HUMAN HIT: AI932273.1, EVALUE 2.00e-75
ccaacatggaggaccttacggaggtgatcacagcatctgagttccatccgcaccactgcaacctcttcgtctacagcagcagcaagggctccctgcggctctgcgacatgcgggcagctgccctgtgtgacaagcattccaagcgtaagtgccggtgcctgggggtggggggctgtgcattgggc

SEQ ID NO: 18040 - DNA, 1785 bp, Homo sapiens
  MAP TO AC004689.5; EXPRESSED IN PLACENTA, SIGNAL = 3.3; EXPRESSED IN LUNG, SIGNAL = 4.2; EXPRESSED IN ADULT LIVER, SIGNAL = 2.8; EXPRESSED IN BRAIN, SIGNAL =   2; EXPRESSED IN HEART, SIGNAL = 6.4; EXPRESSED IN BT474, SIGNAL = 2.5; EXPRESSED IN HELA, SIGNAL = 2.5; EXPRESSED IN FETAL LIVER, SIGNAL = 2.4; EXPRESSED IN HBL100, SIGNAL = 2.4; EXPRESSED IN BONE MARROW, SIGNAL =   2; NT HIT: gi11435668, EVALUE 0.00e+00; EST_HUMAN HIT: AL044067.2, EVALUE 0.00e+00; SWISSPROT HIT: O76024, EVALUE 0.00e+00
attgacatggcctccagggcaggcatgcactggctgtccaccatcatccccacgcaccacatcaacgcgctcatcttcttcttcatcgtcagcaacctcaccatcgacttcttcgccttcttcatcccgctggtcatcttctacctgtccttcatctccatggtgatctgcaccctcaaggtgttccaggacagcaaggcctgggagaacttccgcaccctcaccgacctgctgctgcgcttcgagcccaacctggatgtggagcaggccgaggtcaacttcggctggaaccacctggagccctatgcccatttcctgctctctgtcttcttcgtcatcttctccttccccatcgccagcaaggactgcatcccctgctcggagctggctgtcatcaccggcttctttaccgtgaccagctacctgagcctgagcacccatgcagagccctacacgcgcagggccctggccaccgaggtcaccgccggcctgctatcgctgctgccctccatgcccttgaattggccctacctgaaggtccttggccagaccttcatcaccgtgcctgtcggccacctggtcgtcctcaacgtcagcgtcccgtgcctgctctatgtctacctgctctatctcttcttccgcatggcacagctgaggaatttcaagggcacctactgctaccttgtgccctacctggtgtgcttcatgtggtgtgagctctccgtggtcatcctgctggagtccaccggcctggggctgctccgcgcctccatcggctacttcctcttcctctttgccctccccatcctggtggccggcctggccctggtgggcgtgctgcagttcgcccggtggttcacgtctctggagctcaccaagatcgcagtcaccgtggcggtctgtagtgtgcccctgctgttgcgctggtggaccaaggccagcttctctgtggtggggatggtgaagtccctgacgcggagctccatggtcaagctcatcctggtgtggctcacggccatcgtgctgttctgctggttctatgtgtaccgctcagagggcatgaaggtctacaactccacactgacctggcagcagtatggtgcgctgtgcgggccacgcgcctggaaggagaccaacatggcgcgcacccagatcctctgcagccacctggagggccacagggtcacgtggaccggccgcttcaagtacgtccgcgtgactgacatcgacaacagcgccgagtctgccatcaacatgctcccgttcttcatcggcgactggatgcgctgcctctacggcgaggcctaccctgcctgcagccctggcaacacctccacggccgaggaggagctctgtcgccttaagctgctggccaagcacccctgccacatcaagaagttcgaccgctacaagtttgagattaccgtgggcatgccattcagcagcggcgctgacggctcgcgcagccgcgaggaggacgacgtcaccaaggacatcgtgctgcgggccagcagcgagttcaagagcgtgctgctcagcctgcgccagggcagcctcatcgagttcagcaccatcctggagggccgcctgggcagcaagtggcctgtcttcgagctcaaggccatcagctgcctcaactgcatggcccagctctcacccaccaggcggcacgtgaagatcgagcacgactggcgcagcaccgtgcatggcgccgtgaagttcgccttcgacttctttttcttcccattcctgtcggcggcctgaggatggtccgccacgaggagc

SEQ ID NO: 18041 - DNA, 439 bp, Homo sapiens
  MAP TO AC004689.5; EXPRESSED IN HELA, SIGNAL = 3.1; EXPRESSED IN ADULT LIVER, SIGNAL = 2.2; EXPRESSED IN BRAIN, SIGNAL = 3.8; EXPRESSED IN BT474, SIGNAL = 2.7; EXPRESSED IN BONE MARROW, SIGNAL = 3.5; EXPRESSED IN LUNG, SIGNAL = 3.1; EXPRESSED IN HEART, SIGNAL = 2.6; EXPRESSED IN PLACENTA, SIGNAL = 2.2; EXPRESSED IN HBL100, SIGNAL = 2.4; EXPRESSED IN FETAL LIVER, SIGNAL = 2.6; EST_HUMAN HIT: AW070378.1, EVALUE 1.00e-95; SWISSPROT HIT: P97888, EVALUE 7.00e-30; NT HIT: AF096156.1, EVALUE 0.00e+00
gtgccagtgctgaagcccatggatctgatggtggaggtgagccctcggaggatctttgccaatggccacacctaccacatcaactccatctccgtcaacagtgactgcgagacctacatgtcggcggatgacctgcgcatcaacctctggcacctggccatcaccgacaggagcttcagtatccttcactgtggcctggccagtgcctcccacgggcagagtagcttccgttgggtggtgggtttggtttgattggcagacagctggtttggggatggctgcattgtttaacttcttcagtgaggcacctctggctcctagtatgcgtgtgaggcccagatacaaaatcatgtcacgtctgtttctgaaaaccgcaaagtcgtggttgctgagcattgcacccatcgcctcctccagcatggccatgatcccctcatcc

SEQ ID NO: 18042 - DNA, 156 bp, Homo sapiens
  MAP TO AC004624.6; EXPRESSED IN PLACENTA, SIGNAL =  11; EXPRESSED IN BONE MARROW, SIGNAL = 7.2; EXPRESSED IN HELA, SIGNAL =  19; EXPRESSED IN HBL100, SIGNAL = 8.8; EXPRESSED IN LUNG, SIGNAL =  12; EXPRESSED IN ADULT LIVER, SIGNAL =  11; EXPRESSED IN BRAIN, SIGNAL =  11; EXPRESSED IN BT474, SIGNAL =  12; EXPRESSED IN HEART, SIGNAL =   8; EXPRESSED IN FETAL LIVER, SIGNAL =  10
gatgaggaggagggtggcaatggtgatggtgatagtgatgagggtggtaatggtgatgatggtgatggtggtcatggtgatggtgatgttggtgatgatggtgatggtgatgatgatgtggtggtgatggtgatggtgactgtgatggtgatggtg

SEQ ID NO: 18043 - DNA, 351 bp, Homo sapiens
  MAP TO AC004624.6; EXPRESSED IN BT474, SIGNAL = 1.1; EXPRESSED IN BONE MARROW, SIGNAL = 1.5; EXPRESSED IN FETAL LIVER, SIGNAL = 1.4; EXPRESSED IN HELA, SIGNAL = 0.88; EXPRESSED IN PLACENTA, SIGNAL = 1.5; EXPRESSED IN HBL100, SIGNAL =   1; EXPRESSED IN LUNG, SIGNAL = 1.3; EXPRESSED IN ADULT LIVER, SIGNAL = 1.1; EXPRESSED IN BRAIN, SIGNAL = 1.6; EXPRESSED IN HEART, SIGNAL = 1.3; EST_HUMAN HIT: AA284374.1, EVALUE 4.00e-03; SWISSPROT HIT: P36011, EVALUE 6.10e-01
agtgcacacctgttgtgtcctttgctcacagcctgtggatgaccatgatcagtgggttcggccccttcaactgataaggcaaatctgggaaacagtggcaaacctgtctctcctgcaaagaaaagcatttccttgctctcatgttcctgggagtcaggctcctcgggggcacccctgcaccccagaccggatgcttcttgatgcggcatctcatcctcttcctctagccctttgtcctccaggcttcctccttgcagaagcagagcatttccaagccacacttggttttcctccttgcccctagctgtcctcccagtggctctgactttccctgcgaggagctgactgtct

SEQ ID NO: 18044 - DNA, 126 bp, Homo sapiens
  MAP TO AC004624.6; EXPRESSED IN PLACENTA, SIGNAL =  17; EXPRESSED IN BT474, SIGNAL =  14; EXPRESSED IN HEART, SIGNAL =  17; EXPRESSED IN BRAIN, SIGNAL =  34; EXPRESSED IN ADULT LIVER, SIGNAL =  12; EXPRESSED IN HELA, SIGNAL =  12; EXPRESSED IN LUNG, SIGNAL =  18; EXPRESSED IN FETAL LIVER, SIGNAL =  21; EXPRESSED IN HBL100, SIGNAL =  14; EXPRESSED IN BONE MARROW, SIGNAL =  15; NT HIT: AF289204.1, EVALUE 2.80e-01; SWISSPROT HIT: P03193, EVALUE 8.90e+00
agcagctgggttccaggtcaccaagggagttcgtggagcagatgatgaaagacctttgtttgttctgaccaagtgcttatggaaaccaggaggcagatctgtgtgctgacagggacgggcacggag

SEQ ID NO: 18045 - DNA, 608 bp, Homo sapiens
  MAP TO AC004624.6; EXPRESSED IN BT474, SIGNAL = 1.4; EXPRESSED IN BONE MARROW, SIGNAL = 1.7; EXPRESSED IN HBL100, SIGNAL = 1.4; EXPRESSED IN FETAL LIVER, SIGNAL = 1.3; EXPRESSED IN LUNG, SIGNAL =   2; EXPRESSED IN BRAIN, SIGNAL = 1.7; EXPRESSED IN PLACENTA, SIGNAL = 1.5; EXPRESSED IN ADULT LIVER, SIGNAL = 1.1; EXPRESSED IN HEART, SIGNAL = 1.3; EXPRESSED IN HELA, SIGNAL = 2.1; SWISSPROT HIT: P18845, EVALUE 3.10e-02; EST_HUMAN HIT: BF338788.1, EVALUE 1.50e-01; NT HIT: AK024477.1, EVALUE 9.80e-02
gtctctgaagccccattctgatcctgcacgtcctctgcagctccagccccattctccaagctcaggttctgatggctttcctgacttagctggtacttgtcaccaaggtttttccccttcctgcccaaagtcccccttgccttcccctcttcagttctccccgcaaggcttcctcctccattgttccaagtgtctttcagatccttggggtgttttttcagaaatgggtgatttgaaatgtagggggcctcgtggaagagggaggcaccgcggcctcttgtctggtgacaatcccagcctgggtgtcctgtggctttgggaggaggcggggacctggtggccaactcttcttggattttttgtccatctgagggaacctcctggagcagcagtggtcgccaagaagcggagtccccagccggcccccagagagggagtgcggatgtctgcaccaggagaaaggcttctgcagctgggtcagctgctagattctctgaaatccaggccaggtccatgcggaggagtgactcgtccaagcactcctctggtgggcagccacagaccaggagaagaatctgttcatccaagctgggctctgccagagtaag

SEQ ID NO: 18046 - DNA, 169 bp, Homo sapiens
  MAP TO AC004599.4; EXPRESSED IN HEART, SIGNAL = 3.5; EXPRESSED IN PLACENTA, SIGNAL = 3.5; EXPRESSED IN BT474, SIGNAL = 2.9; EXPRESSED IN BONE MARROW, SIGNAL =   3; EXPRESSED IN HBL100, SIGNAL = 2.3; EXPRESSED IN FETAL LIVER, SIGNAL = 2.5; EXPRESSED IN LUNG, SIGNAL = 3.4; EXPRESSED IN HELA, SIGNAL = 3.4; EXPRESSED IN ADULT LIVER, SIGNAL = 3.1; EXPRESSED IN BRAIN, SIGNAL = 5.6; SWISSPROT HIT: P97888, EVALUE 2.00e-27; NT HIT: AF096154.1, EVALUE 1.00e-90; EST_HUMAN HIT: M78063.1, EVALUE 1.00e-84
agtaaaaatgcgccccacagccagggcgaatacgacgtgtacagcactttccagagccacgagccggagtttgactatctcaagagcctggagatagaggagaagatcaacaagatcaagtggctcccacagcagaacgccgcccactcactcctgtccaccaacggtg

SEQ ID NO: 18047 - DNA, 104 bp, Homo sapiens
  MAP TO AC004599.4; EXPRESSED IN HBL100, SIGNAL = 3.1; EXPRESSED IN FETAL LIVER, SIGNAL = 3.6; EXPRESSED IN BRAIN, SIGNAL = 3.8; EXPRESSED IN HEART, SIGNAL = 4.8; EXPRESSED IN PLACENTA, SIGNAL = 3.4; EXPRESSED IN BT474, SIGNAL =   3; EXPRESSED IN BONE MARROW, SIGNAL = 2.4; EXPRESSED IN ADULT LIVER, SIGNAL =   4; EXPRESSED IN HELA, SIGNAL = 3.1; EXPRESSED IN LUNG, SIGNAL = 3.6; EST_HUMAN HIT: BF568880.1, EVALUE 3.30e-01; NT HIT: M58557.1, EVALUE 3.50e+00
ggatgtgcttgcgctgctgttactccagccgtagctgaggcacgggagaaaacggagaccccaagaagttcagaggcttgtgcaggtcacgctgttcctacgag

SEQ ID NO: 18048 - DNA, 94 bp, Homo sapiens
  MAP TO AC004599.4; EXPRESSED IN PLACENTA, SIGNAL =   2; EXPRESSED IN FETAL LIVER, SIGNAL = 1.2; EXPRESSED IN HEART, SIGNAL = 1.3; EXPRESSED IN BONE MARROW, SIGNAL =   2; EXPRESSED IN ADULT LIVER, SIGNAL = 1.4; EXPRESSED IN BRAIN, SIGNAL = 1.6; EXPRESSED IN BT474, SIGNAL = 1.6; EXPRESSED IN HBL100, SIGNAL = 1.1; EXPRESSED IN LUNG, SIGNAL = 1.4; EXPRESSED IN HELA, SIGNAL = 1.4; EST_HUMAN HIT: AW384937.1, EVALUE 2.00e-01; SWISSPROT HIT: P14032, EVALUE 9.20e+00
gaggggtgctgtgatttgtgggtttgggagaagttggaagcataatgggtcaggcctgcagctcggtccacactgcctgtgccaggtggagcag

SEQ ID NO: 18049 - DNA, 324 bp, Homo sapiens
  MAP TO AC000105.17; EXPRESSED IN HEART, SIGNAL = 1.8; EXPRESSED IN BT474, SIGNAL = 1.3; EXPRESSED IN BONE MARROW, SIGNAL = 2.5; EXPRESSED IN HELA, SIGNAL = 2.2; EXPRESSED IN ADULT LIVER, SIGNAL = 1.6; EXPRESSED IN BRAIN, SIGNAL = 3.7; EXPRESSED IN PLACENTA, SIGNAL = 1.5; EXPRESSED IN HBL100, SIGNAL = 1.9; EXPRESSED IN FETAL LIVER, SIGNAL = 1.5; EXPRESSED IN LUNG, SIGNAL = 2.2; EST_HUMAN HIT: AW867740.1, EVALUE 9.00e-10; SWISSPROT HIT: P24798, EVALUE 2.40e-01; NT HIT: AJ229043.1, EVALUE 5.00e-08
ctccaggcctttgcacatgctgttccctctgcctggaactgtcttccactgtattagtttcctaatgctgctgtaacaaattaccacaaacttataaggcttaaaacaaaaccaatttatgaattgacagttccggaggtctgaaggcagccatgggtcagactgggctaaaatcgaggtgctggggctgtgctcctttccagagactctagaggagctcctgtcctcttgcctcttccagatcctggaggttactgcattccttagctcctggctttctccttccatcttcaaagccaagcagcgttgcctctctccagccat

SEQ ID NO: 18050 - DNA, 84 bp, Homo sapiens
  MAP TO AC000054.10; EXPRESSED IN HEART, SIGNAL = 2.2; EXPRESSED IN BRAIN, SIGNAL = 2.7; EXPRESSED IN PLACENTA, SIGNAL = 2.9; EXPRESSED IN BT474, SIGNAL =   2; EXPRESSED IN BONE MARROW, SIGNAL = 2.2; EXPRESSED IN FETAL LIVER, SIGNAL = 2.8; EXPRESSED IN LUNG, SIGNAL =   2; EXPRESSED IN HELA, SIGNAL = 2.4; EXPRESSED IN ADULT LIVER, SIGNAL = 2.3; EXPRESSED IN HBL100, SIGNAL = 1.7; SWISSPROT HIT: P48903, EVALUE 7.10e+00
tcagtgaatgatggatttcctttggttgcacagccactgggtctgtcttcctgttccatggaagcacgtaggcatttggacggc

SEQ ID NO: 18051 - DNA, 364 bp, Homo sapiens
  MAP TO AC000029.14; EXPRESSED IN LUNG, SIGNAL = 5.2; EXPRESSED IN HEART, SIGNAL = 2.8; EXPRESSED IN BT474, SIGNAL = 4.1; EXPRESSED IN BONE MARROW, SIGNAL = 5.5; EXPRESSED IN FETAL LIVER, SIGNAL = 4.4; EXPRESSED IN HELA, SIGNAL = 2.9; EXPRESSED IN ADULT LIVER, SIGNAL = 2.5; EXPRESSED IN PLACENTA, SIGNAL = 6.8; EXPRESSED IN BRAIN, SIGNAL = 4.1; EXPRESSED IN HBL100, SIGNAL = 4.1; NT HIT: AF133588.1, EVALUE 2.00e-44; SWISSPROT HIT: O95755, EVALUE 5.00e-11; EST_HUMAN HIT: AU148086.1, EVALUE 1.30e+00
cagtcttggccgacactgaccagtactcggcctgcatctccctggccaggtgcacagcgtctgcttcggcctgctcacatgcggcccctgactgggagaaatggcccttgttgacccagcgtcccggctctcctgcagggaggcccagggggataggcagctgcctgcttcccactgtgctgcctccctccctccccatggctcctccaatgagggctgtaaggggaggcattttcccaagggccacccagaccaccagtgccactctgctcaccagaaggtccttcttggttcccacgaggaagatgaagcaggagcctgcctcgttctccctcagagcatcctccaaccactgcctggagtg

SEQ ID NO: 18052 - DNA, 244 bp, Homo sapiens
  MAP TO AC000029.14; EXPRESSED IN PLACENTA, SIGNAL = 4.6; EXPRESSED IN FETAL LIVER, SIGNAL = 3.6; EXPRESSED IN LUNG, SIGNAL = 4.7; EXPRESSED IN HELA, SIGNAL = 4.2; EXPRESSED IN BT474, SIGNAL = 7.2; EXPRESSED IN BONE MARROW, SIGNAL =   5; EXPRESSED IN HBL100, SIGNAL = 3.8; EXPRESSED IN ADULT LIVER, SIGNAL = 3.1; EXPRESSED IN BRAIN, SIGNAL = 5.1; EXPRESSED IN HEART, SIGNAL = 3.5; NT HIT: gi7657529, EVALUE 1.00e-114; EST_HUMAN HIT: AW665217.1, EVALUE 1.00e-112; SWISSPROT HIT: P05143, EVALUE 3.50e+00
aggcttcggccacttgaggcttttcgtaagtctccacctccatggcacggaaagtgggcacgtgcgtctgcagggccttgcggccctcgggggcctctgccagcatggtaagggccttggtggcattcaggcgcgctatggtcatgggggagtgcagcagctccaggagcaggccgatggcttgtgcctccagggccgcatacttccctgcaggccaccaacacaaggcgttccaaacagccca

SEQ ID NO: 18053 - DNA, 154 bp, Homo sapiens
  MAP TO AC000029.14; EXPRESSED IN HELA, SIGNAL = 2.7; EXPRESSED IN BRAIN, SIGNAL = 3.8; EXPRESSED IN HEART, SIGNAL = 2.6; EXPRESSED IN PLACENTA, SIGNAL =   4; EXPRESSED IN ADULT LIVER, SIGNAL = 4.1; EXPRESSED IN LUNG, SIGNAL = 4.7; EXPRESSED IN FETAL LIVER, SIGNAL = 4.3; EXPRESSED IN HBL100, SIGNAL = 2.4; EXPRESSED IN BONE MARROW, SIGNAL = 2.7; EXPRESSED IN BT474, SIGNAL = 2.5; SWISSPROT HIT: Q61555, EVALUE 1.30e+00; EST_HUMAN HIT: T80255.1, EVALUE 3.60e-01
ggtgtggtgtcggggagggtggaggaattgggttacagagcctgtgcagggatttggaaccagagggctcctcagaacgggagaaggagatggtctgtaaggacctgttcgactccagtgagggtatgagggacagtgagggaggaaagcagtc

SEQ ID NO: 18054 - DNA, 272 bp, Homo sapiens
  MAP TO AB023055.1; EXPRESSED IN BT474, SIGNAL = 0.74; EXPRESSED IN FETAL LIVER, SIGNAL = 0.62; EXPRESSED IN PLACENTA, SIGNAL = 0.66; EXPRESSED IN ADULT LIVER, SIGNAL = 0.65; EXPRESSED IN HEART, SIGNAL = 2.6; SWISSPROT HIT: P77333, EVALUE 1.70e+00; NT HIT: gi11419092, EVALUE 1.00e-124; EST_HUMAN HIT: AW206410.1, EVALUE 1.00e-123
gaccaggtagaacatgagaagcaaaggatcctcacagaatttgaactcctgcatcaagtcctagaggaggagaagaatttcctgctatcacggatttactggctgggtcatgagggaacggaagcagggaaacactatgttgcctccactgagccacagttgaacgatctcaagaagctcattgattccctgaagaccaagcagaacatgccacccaggcagctgctggaggtgagtcccttgggggcagaattgcagagaggtagcagccc

SEQ ID NO: 18055 - DNA, 208 bp, Homo sapiens
  MAP TO AB023055.1; EXPRESSED IN ADULT LIVER, SIGNAL = 0.7; EXPRESSED IN PLACENTA, SIGNAL = 1.6; EXPRESSED IN BONE MARROW, SIGNAL = 0.98; EXPRESSED IN LUNG, SIGNAL = 0.87; EXPRESSED IN HELA, SIGNAL = 0.87; EXPRESSED IN BRAIN, SIGNAL = 1.1; EXPRESSED IN BT474, SIGNAL = 0.72; EXPRESSED IN FETAL LIVER, SIGNAL = 0.91; EXPRESSED IN HEART, SIGNAL =  15; NT HIT: Y07829.2, EVALUE 8.00e-55; EST_HUMAN HIT: AA248944.1, EVALUE 1.30e-01; SWISSPROT HIT: P43834, EVALUE 2.10e+00
atttgccatcagtagagagagtttggcaggagtttggactgttttctcctacactgtcacaccgggtggctcactgctgcccattattaccaccaataattacagcagcatctccatcagctggtcattcttccaaccaacatccctcccagggtcatatagattccacactgaaagaatgagaaagaaaacaggacacagaacagac

SEQ ID NO: 18056 - DNA, 429 bp, Homo sapiens
  MAP TO AB023055.1; EXPRESSED IN LUNG, SIGNAL = 1.1; EXPRESSED IN BRAIN, SIGNAL =   2; EXPRESSED IN HEART, SIGNAL = 1.7; EXPRESSED IN PLACENTA, SIGNAL = 1.9; EXPRESSED IN BT474, SIGNAL = 1.2; EXPRESSED IN HBL100, SIGNAL = 1.4; EXPRESSED IN FETAL LIVER, SIGNAL = 4.8; EXPRESSED IN HELA, SIGNAL = 1.5; EXPRESSED IN BONE MARROW, SIGNAL = 6.2; EXPRESSED IN ADULT LIVER, SIGNAL = 1.8; NT HIT: gi11419094, EVALUE 0.00e+00; EST_HUMAN HIT: AI248753.1, EVALUE 0.00e+00; SWISSPROT HIT: P19474, EVALUE 3.00e-26
atggcctctgctgcctctgtgaccagcctggcagatgaagtcaactgccccatctgtcagggtaccctgagggagccggtcactatcgactgcggccacaacttctgccgggcctgccttacccgctactgtgagataccaggcccagacctggaggagtcccctacttgcccactctgcaaagaacccttccgtcctgggagcttccggcccaactggcagctggctaacgtggtggagaacattgagcgcctccagctggtgtccacactgggtttgggagaggaggatgtctgccaagagcacggagagaagatctacttcttctgtgaggatgatgagatgcagttgtgcgtggtgtgccgggaggctggggagcacgctacccacaccatgcgcttcctggaggatgcagcggctccctatagg

SEQ ID NO: 18057 - DNA, 560 bp, Homo sapiens
  MAP TO AB023055.1; EXPRESSED IN BONE MARROW, SIGNAL = 0.81; EXPRESSED IN LUNG, SIGNAL = 1.5; EXPRESSED IN HELA, SIGNAL = 2.5; EXPRESSED IN ADULT LIVER, SIGNAL = 2.2; EXPRESSED IN BRAIN, SIGNAL = 0.89; EXPRESSED IN HEART, SIGNAL = 0.82; EXPRESSED IN PLACENTA, SIGNAL = 0.83; EXPRESSED IN BT474, SIGNAL = 3.3; EXPRESSED IN HBL100, SIGNAL = 2.3; EXPRESSED IN FETAL LIVER, SIGNAL = 1.2; NT HIT: gi11419096, EVALUE 0.00e+00; EST_HUMAN HIT: AI765855.1, EVALUE 0.00e+00; SWISSPROT HIT: P19474, EVALUE 8.00e-30
atggccacgtcagccccactacggagcctggaagaggaggtgacctgctccatctgtcttgattacctgcgggaccctgtgaccattgactgtggccacgtcttctgccgcagctgcaccacagacgtccgccccatctcagggagccgccccgtctgcccactctgcaagaagccttttaagaaggagaacatccgacccgtgtggcaactggccagcctggtggagaacattgagcggctgaaggtggacaagggcaggcagccgggagaggtgacccgggagcagcaggatgcaaagttgtgcgagcgacaccgagagaagctgcactactactgtgaggacgacgggaagctgctgtgcgtgatgtgccgggagtcccgggagcacaggccccacacggccgtcctcatggagaaggccgcccagccccacagggtaagccctcttcacccccgagggtgccttgccaccttctctggatgctccaccttgcagtcctcagaggactcagcctgagtctcccttcctgccccagcccagagcatccacctgttgcc

SEQ ID NO: 18058 - DNA, 208 bp, Homo sapiens; identical to SEQ ID NO: 18055
  MAP TO AB023054.1; EXPRESSED IN BT474, SIGNAL = 2.1; EXPRESSED IN HELA, SIGNAL = 2.1; EXPRESSED IN ADULT LIVER, SIGNAL = 3.2; EXPRESSED IN PLACENTA, SIGNAL = 2.8; EXPRESSED IN BONE MARROW, SIGNAL = 2.6; EXPRESSED IN HBL100, SIGNAL = 1.8; EXPRESSED IN FETAL LIVER, SIGNAL = 2.2; EXPRESSED IN LUNG, SIGNAL = 2.2; EXPRESSED IN BRAIN, SIGNAL = 2.6; EXPRESSED IN HEART, SIGNAL = 2.3; SWISSPROT HIT: P43834, EVALUE 2.10e+00; NT HIT: Y07829.2, EVALUE 8.00e-55; EST_HUMAN HIT: AA248944.1, EVALUE 1.30e-01

SEQ ID NO: 18059 - DNA, 429 bp, Homo sapiens; identical to SEQ ID NO: 18056
  MAP TO AB023054.1; EXPRESSED IN HEART, SIGNAL = 1.1; EXPRESSED IN FETAL LIVER, SIGNAL = 4.9; EXPRESSED IN LUNG, SIGNAL = 0.8; EXPRESSED IN BRAIN, SIGNAL = 1.1; EXPRESSED IN PLACENTA, SIGNAL = 1.6; EXPRESSED IN BT474, SIGNAL =   1; EXPRESSED IN BONE MARROW, SIGNAL = 6.6; EXPRESSED IN HBL100, SIGNAL = 0.67; EXPRESSED IN HELA, SIGNAL = 0.68; EXPRESSED IN ADULT LIVER, SIGNAL = 0.9; NT HIT: gi11419094, EVALUE 0.00e+00; EST_HUMAN HIT: AI248753.1, EVALUE 0.00e+00; SWISSPROT HIT: P19474, EVALUE 3.00e-26

SEQ ID NO: 18060 - DNA, 152 bp, Homo sapiens
  MAP TO AB023049.1; EXPRESSED IN FETAL LIVER, SIGNAL =  14; EXPRESSED IN LUNG, SIGNAL =  15; EXPRESSED IN PLACENTA, SIGNAL =  13; EXPRESSED IN BT474, SIGNAL =  12; EXPRESSED IN BONE MARROW, SIGNAL =  14; EXPRESSED IN HBL100, SIGNAL =  13; EXPRESSED IN ADULT LIVER, SIGNAL =  11; EXPRESSED IN BRAIN, SIGNAL =  15; EXPRESSED IN HEART, SIGNAL =  10; EXPRESSED IN HELA, SIGNAL =  13; NT HIT: AB011149.1, EVALUE 7.00e-61; EST_HUMAN HIT: W24140.1, EVALUE 1.00e-56; SWISSPROT HIT: O60231, EVALUE 3.00e-09
ggatccatgacctaatgcactttgatttcctggaccctccaccatatgagacactgctgctggctttggagcagctgtatgctctgggagccctcaaccaccttggggagctcaccacggtgagtcggggggcagcatgggtggaggcagga

SEQ ID NO: 18061 - DNA, 301 bp, Homo sapiens
  MAP TO AB023049.1; EXPRESSED IN PLACENTA, SIGNAL = 4.4; EXPRESSED IN BT474, SIGNAL = 4.1; EXPRESSED IN HBL100, SIGNAL = 4.2; EXPRESSED IN LUNG, SIGNAL = 4.8; EXPRESSED IN HELA, SIGNAL = 4.2; EXPRESSED IN ADULT LIVER, SIGNAL = 3.9; EXPRESSED IN BRAIN, SIGNAL = 4.7; EXPRESSED IN BONE MARROW, SIGNAL = 4.7; EXPRESSED IN FETAL LIVER, SIGNAL = 3.5; EXPRESSED IN HEART, SIGNAL = 4.1; NT HIT: AB011149.1, EVALUE 0.00e+00; SWISSPROT HIT: O60231, EVALUE 7.00e-28; EST_HUMAN HIT: AL134956.1, EVALUE 0.00e+00
gtccctgagctgcggaagaaatctcgccgagagtacctggctaagcgggagcgagagaagcttgaggacctggaggcggagctggctgatgaggagttcctttttggggacgtggagctgagccggcacgagcggcaggagctcaaatataagcggcgagtgcgggatctcgcccgggagtaccgggcagctggggagcaggagaagctggaggccaccaatcgctaccacatgcccaaggaaacccgaggacaggtgaggtgaagcggcgtctgcttcagccttggtccccaagacaagt

SEQ ID NO: 18062 - DNA, 1534 bp, Homo sapiens
  MAP TO AB023049.1; EXPRESSED IN BONE MARROW, SIGNAL = 5.7; EXPRESSED IN HBL100, SIGNAL = 9.3; EXPRESSED IN ADULT LIVER, SIGNAL = 2.9; EXPRESSED IN BRAIN, SIGNAL =   2; EXPRESSED IN PLACENTA, SIGNAL = 1.3; EXPRESSED IN BT474, SIGNAL = 7.2; EXPRESSED IN LUNG, SIGNAL = 1.5; EXPRESSED IN HELA, SIGNAL = 5.8; EXPRESSED IN FETAL LIVER, SIGNAL = 2.8; EXPRESSED IN HEART, SIGNAL = 1.1; SWISSPROT HIT: Q02817, EVALUE 3.00e-24; NT HIT: gi7661965, EVALUE 0.00e+00; EST_HUMAN HIT: AA487852.1, EVALUE 0.00e+00
ggcgatcaggaatctccagatgcttgtctgcctcctacagtacctgaagccccagccccaccccaaaagccccttaactctcagagccagaaacatcttgcacctccgccccttctttctccccttttaccttctatcaagccaaccgttcgtaagaccaggcaagatgggagtcaggaagctccagaggctcccttgtcctcagagctggagcctttccacccaaagcctaaaattagaactcggaagtcctccagaatgacaccctttccagctacctctgctgcccctgagccccacccttccacctccacagcccagccagtcactcccaagcccacatctcaggccactaggagcaggacaaataggtcctctgtcaagacccctgaaccagttgtccccacagcccctgagctccagccttccacctccacagaccagcctgtcacctctgagcccacatctcaggttactaggggaagaaaaagtagatcctctgtcaagacccctgaaacagttgtgcccacagcccttgagctccagccttccacctccaccgaccgacctgtcacctctgaacccacctctcaggctactaggggaagaaaaaatagatcctctgtcaagacccctgaaccagttgtccccacagcccctgagctccagccttccacctccacagaccagcctgtcacttctgagcccacatatcaggctactaggggaagaaaaaatagatcctctgtcaagacccctgaaccagttgtgcccacagcccctgagctccggccttccacctccacagaccgacctgtcacccccaagcccacatctcggaccactaggagcaggacaaatatgtcctctgtcaagacccctgaaacagttgtccccacagcccctgagctccagatttccacctccacagaccaacctgtcacccctaagcccacatctcggaccactaggagcaggacaaatatgtcctctgtgaagaaccctgaatcaactgtccctatagcccctgagctcccaccttccacctccacagagcagcctgtcacccctgagcccacatctcgggctactaggggaagaaaaaatagatcctctggcaagacccctgaaacacttgtccccacagcccctaagctcgagccttccacttccacagaccaacctgtcactcctgagcccacatctcaggccaccaggggcaggacaaataggtcctctgtgaagacccctgaaacagttgtccccacagcccctgagctccagccttccacctccacagaccagcctgttacccctgagcctacgtctcaggctactaggggaagaacagatagatcctctgtcaagactcctgaaacagttgtccccacagcccctgagctacaggcttccgcctccacagaccagcctgtcacctctgatcccacatctcggaccactaggggaagaaaaaatcggtcctctgtcaagacccctgaaacagttgtgcccgcagcccctgagctccagcctc

SEQ ID NO: 18063 - DNA, 718 bp, Homo sapiens
  MAP TO AB023049.1; EXPRESSED IN BRAIN, SIGNAL = 5.9; EXPRESSED IN HEART, SIGNAL = 4.6; EXPRESSED IN BT474, SIGNAL = 4.3; EXPRESSED IN HBL100, SIGNAL =  10; EXPRESSED IN FETAL LIVER, SIGNAL = 4.7; EXPRESSED IN LUNG, SIGNAL = 6.5; EXPRESSED IN HELA, SIGNAL = 5.2; EXPRESSED IN PLACENTA, SIGNAL =   5; EXPRESSED IN BONE MARROW, SIGNAL = 9.5; EXPRESSED IN ADULT LIVER, SIGNAL = 5.1; EST_HUMAN HIT: BE177118.1, EVALUE 0.00e+00; SWISSPROT HIT: P24711, EVALUE 8.00e-05; NT HIT: gi11419108, EVALUE 0.00e+00
gtaccctagatgaaccatgggaggtcctggctacacagccattctgtctgagagagtctgaggactctgagacccagccttttgacacgcaccttgaggcctatggaccttgcctgtctccacctagggcaataccaggagaccaacatccagagagcccagttcacacagagccaatggggattcaaggcagagggaggcagactgtggataaagtcatgggtataccaaaagaaacagcagagagggtgggccctgagagagggccattggagagagaaactgagaaactgctaccagaaagacagacagatgtgacaggagaggaagaattaaccaaggggaaacaggacagagaacaaaaacagttgttagctagagacacccagagacaagaatctgacaaaaatggggaaagtgcaagtcctgaaagagatagggagagtttgaaggtagaaattgagacatctgaggaaatacaagagaaacaagtacagaagcagacccttccaagcaaagcatttgagagagaagtagagagaccagtagcaaacagagagtgcgatccagccgagttagaagagaaggtgcccaaagtgatcctggagagagatacacagagaggggagccagagggagggagccaggaccagaaagggcaggcctccagcccaacaccagagcctggggtgggggcgggggaccttccgggacctac

SEQ ID NO: 18064 - DNA, 366 bp, Homo sapiens
  MAP TO Z98884.11; EXPRESSED IN LUNG, SIGNAL = 5.6; EXPRESSED IN HELA, SIGNAL = 4.9; EXPRESSED IN BRAIN, SIGNAL =   3; EXPRESSED IN HEART, SIGNAL = 4.1; EXPRESSED IN PLACENTA, SIGNAL = 3.8; EXPRESSED IN BT474, SIGNAL = 4.1; EXPRESSED IN BONE MARROW, SIGNAL = 5.1; EXPRESSED IN HBL100, SIGNAL = 3.7; EXPRESSED IN FETAL LIVER, SIGNAL = 4.1; EXPRESSED IN ADULT LIVER, SIGNAL = 3.9; NT HIT: gi8567387, EVALUE 0.00e+00; EST_HUMAN HIT: BE779299.1, EVALUE 1.00e-118; SWISSPROT HIT: Q02817, EVALUE 2.00e-10
cagtgtgttacaggcaacaatggcagtgagagcagtcctgctactaccggtgcactgtccacggggtcacctcccagggagaatccatcccatcctactgccagcgctctgtccacaggatcgcctcccatgaagaatccatcccatcctactgccagcgctctgtccacaggatcgcctcccatgaagaatccatcccatcctactgccagcacactgtccatgggattgcctcccagcaggactccatcccatcctactgccactgttctgtccacggggtcacctcccagcgaatccccatccagaactggttcagcagcatcaggtagtggatcaggacaactaatgtttcaaactccaatg

SEQ ID NO: 18065 - DNA, 172 bp, Homo sapiens
  MAP TO AC007374.3; EXPRESSED IN BONE MARROW, SIGNAL = 2.8; EXPRESSED IN HBL100, SIGNAL = 1.8; EXPRESSED IN FETAL LIVER, SIGNAL = 1.9; EXPRESSED IN LUNG, SIGNAL = 2.1; EXPRESSED IN ADULT LIVER, SIGNAL = 1.3; EXPRESSED IN BRAIN, SIGNAL = 1.7; EXPRESSED IN PLACENTA, SIGNAL = 2.4; EXPRESSED IN HEART, SIGNAL = 1.7; EXPRESSED IN HELA, SIGNAL = 1.6; EXPRESSED IN BT474, SIGNAL = 2.1; SWISSPROT HIT: P56490, EVALUE 3.00e+00; EST_HUMAN HIT: AU119241.1, EVALUE 9.20e+00; NT HIT: Y00554.1, EVALUE 3.40e-01
catccctgtggagtttcccagatccttcccagtagctttgagcacttgcccttttccacctccaccgggtcctaaacaggttcctattggaacactcaagacactattgcacacacagtggcccttcctatctatggcttctacatctgcagactctacatctgcagacaac

SEQ ID NO: 18066 - DNA, 115 bp, Homo sapiens
  MAP TO AC007374.3; EXPRESSED IN BT474, SIGNAL = 3.6; EXPRESSED IN BONE MARROW, SIGNAL =   2; EXPRESSED IN HBL100, SIGNAL =   1; EXPRESSED IN HELA, SIGNAL = 0.84; EXPRESSED IN ADULT LIVER, SIGNAL = 1.2; EXPRESSED IN BRAIN, SIGNAL = 1.6; EXPRESSED IN PLACENTA, SIGNAL = 1.1; EXPRESSED IN FETAL LIVER, SIGNAL = 1.2; EXPRESSED IN LUNG, SIGNAL = 1.4; EXPRESSED IN HEART, SIGNAL = 2.2; NT HIT: AF064043.1, EVALUE 2.10e-01; EST_HUMAN HIT: AV704898.1, EVALUE 2.00e-58; SWISSPROT HIT: P42966, EVALUE 6.10e-01
ttttctggctcactctggcccagcaggggtagaggaccagtgttgacctggcagaatctttcaaaagctggagcaagggacctgggcaggaccaccaggctggctggtcggagct

SEQ ID NO: 18067 - DNA, 261 bp, Homo sapiens
  MAP TO AC007374.3; EXPRESSED IN LUNG, SIGNAL = 1.2; EXPRESSED IN BRAIN, SIGNAL = 0.93; EXPRESSED IN HEART, SIGNAL = 1.8; EXPRESSED IN PLACENTA, SIGNAL = 1.1; EXPRESSED IN BT474, SIGNAL =   4; EXPRESSED IN BONE MARROW, SIGNAL = 2.3; EXPRESSED IN HBL100, SIGNAL = 1.2; EXPRESSED IN FETAL LIVER, SIGNAL = 1.2; EXPRESSED IN HELA, SIGNAL = 0.74; EXPRESSED IN ADULT LIVER, SIGNAL = 1.3; NT HIT: U44118.1, EVALUE 1.60e-01; EST_HUMAN HIT: R90819.1, EVALUE 4.00e-67; SWISSPROT HIT: P08738, EVALUE 4.70e-01
cttgctcaacagcatcttcaacaatcttctggtgcaagttccaggctctctggtcaacgattatggcgacctccttctccaaggcctgcaggaaggcaaccagagcaacagctcctggtgggccatctgtctcttctggaggctcatgattgaaatgtgtggggaacccagtggtgatgagcactgagcgggcatgggacagcgagagagaggccttcagcagctcatctttacagagcaggtgcccaatcccccggttcc

SEQ ID NO: 18068 - DNA, 171 bp, Homo sapiens
  MAP TO AC007374.3; EXPRESSED IN BRAIN, SIGNAL = 1.4; EXPRESSED IN HELA, SIGNAL = 1.2; EXPRESSED IN ADULT LIVER, SIGNAL = 1.3; EXPRESSED IN BT474, SIGNAL = 1.8; EXPRESSED IN HBL100, SIGNAL = 1.1; EXPRESSED IN FETAL LIVER, SIGNAL = 1.9; EXPRESSED IN HEART, SIGNAL = 1.6; EXPRESSED IN PLACENTA, SIGNAL = 0.96; EXPRESSED IN BONE MARROW, SIGNAL = 1.5; EXPRESSED IN LUNG, SIGNAL = 1.6; SWISSPROT HIT: P45793, EVALUE 1.70e+00; NT HIT: U75356.1, EVALUE 6.20e+00; EST_HUMAN HIT: BF091229.1, EVALUE 4.00e-88
tcgctcaccctgggtagccggccggactgggcggccatccgagtgctcaccagcaatgacggcaaagtcagcctccacgtcgcaggcgatgacatccccgtgccgtatgtgcctcctcacagcctccttgactttacccatcccaagctcgttgcctccatcaccgactcc

SEQ ID NO: 18069 - DNA, 171 bp, Homo sapiens
  MAP TO AC007365.2; EXPRESSED IN PLACENTA, SIGNAL =  12; EXPRESSED IN BONE MARROW, SIGNAL =  58; EXPRESSED IN FETAL LIVER, SIGNAL =  40; EXPRESSED IN LUNG, SIGNAL =  18; EXPRESSED IN HEART, SIGNAL =  11; EXPRESSED IN BRAIN, SIGNAL =  16; EXPRESSED IN BT474, SIGNAL =  52; EXPRESSED IN HBL100, SIGNAL = 1.5e+02; EXPRESSED IN HELA, SIGNAL =  56; EXPRESSED IN ADULT LIVER, SIGNAL =  21; NT HIT: gi11526400, EVALUE 1.00e-56; EST_HUMAN HIT: AA230279.1, EVALUE 3.00e-57; SWISSPROT HIT: P46783, EVALUE 1.00e-18
cttcatgacatgaaggttgggcaccttcttgtctgccagctctgggtgcttaggcatgtggacaaccttctttgccaccatgactcccttcttaaaaaggagttcataaacgggaatctggttcttcttaggcatcaacatctccatggctgtagggtctggggccagggc

SEQ ID NO: 18070 - DNA, 184 bp, Homo sapiens
  MAP TO AC007365.2; EXPRESSED IN HELA, SIGNAL = 3.9; EXPRESSED IN BRAIN, SIGNAL = 3.1; EXPRESSED IN BT474, SIGNAL = 3.4; EXPRESSED IN BONE MARROW, SIGNAL = 3.1; EXPRESSED IN PLACENTA, SIGNAL = 2.7; EXPRESSED IN HEART, SIGNAL =   3; EXPRESSED IN ADULT LIVER, SIGNAL = 2.9; EXPRESSED IN LUNG, SIGNAL = 4.5; EXPRESSED IN FETAL LIVER, SIGNAL =   4; EXPRESSED IN HBL100, SIGNAL = 3.3; EST_HUMAN HIT: BE563543.1, EVALUE 1.60e-01; NT HIT: U62918.1, EVALUE 1.00e-04
aactaaagtcacatggctacacagagctggggccaggactttggaacccaggctgctctctactcagttgaagctctctcagacctctagatcttcatcttcctccccagctccacctccttcagcctttcacagcccagcagcgtggagaaggcctggaagaggagggaaaagaagtccagtt

SEQ ID NO: 18071 - DNA, 142 bp, Homo sapiens
  MAP TO AC007364.2; EXPRESSED IN HBL100, SIGNAL = 1.3; EXPRESSED IN BRAIN, SIGNAL = 1.2; EXPRESSED IN HEART, SIGNAL = 1.3; EXPRESSED IN ADULT LIVER, SIGNAL = 1.1; EXPRESSED IN HELA, SIGNAL = 1.3; EXPRESSED IN LUNG, SIGNAL = 1.5; EXPRESSED IN FETAL LIVER, SIGNAL = 1.3; EXPRESSED IN BONE MARROW, SIGNAL = 1.7; EXPRESSED IN BT474, SIGNAL = 1.3; EXPRESSED IN PLACENTA, SIGNAL = 1.6; SWISSPROT HIT: Q13607, EVALUE 9.10e+00; EST_HUMAN HIT: BE734871.1, EVALUE 1.20e-01; NT HIT: AF074979.1, EVALUE 8.10e-02
ttttagtgagagatgcacttcgtgacctgacaatgtctctagctttggacctgcagggattcattcccagtccctcggtggcagcaaccatgtccaaatagctatcatcttttatgaagactacatttctatctgccatttt

SEQ ID NO: 18072 - DNA, 99 bp, Homo sapiens
  MAP TO AC007359.2; EXPRESSED IN ADULT LIVER, SIGNAL = 5.1; EXPRESSED IN BRAIN, SIGNAL = 4.6; EXPRESSED IN BONE MARROW, SIGNAL = 4.2; EXPRESSED IN HELA, SIGNAL = 4.4; EXPRESSED IN PLACENTA, SIGNAL = 3.2; EXPRESSED IN BT474, SIGNAL = 2.8; EXPRESSED IN HBL100, SIGNAL = 3.3; EXPRESSED IN FETAL LIVER, SIGNAL = 3.9; EXPRESSED IN LUNG, SIGNAL = 5.7; EXPRESSED IN HEART, SIGNAL = 5.2; EST_HUMAN HIT: AI334928.1, EVALUE 4.00e-06
gatgttatttggatgccagcacatgttggcatgcctcccagtccactgcaggctcatgattcacagaaaaataaagaacacagagcgatgcagcccaag

SEQ ID NO: 18073 - DNA, 75 bp, Homo sapiens
  MAP TO AC007359.2; EXPRESSED IN BT474, SIGNAL = 0.96; EXPRESSED IN BONE MARROW, SIGNAL = 1.2; EXPRESSED IN LUNG, SIGNAL = 0.93; EXPRESSED IN HELA, SIGNAL = 0.84; EXPRESSED IN ADULT LIVER, SIGNAL = 1.1; EXPRESSED IN PLACENTA, SIGNAL = 1.4; EXPRESSED IN FETAL LIVER, SIGNAL = 0.92; EXPRESSED IN HEART, SIGNAL = 1.4; EXPRESSED IN HBL100, SIGNAL = 1.1; EXPRESSED IN BRAIN, SIGNAL = 0.97; NT HIT: AF204927.1, EVALUE 2.00e+00
gggattggctccagaaacatctcaaataccaaaatgtatgtctgctcaagcttctgctttataatgatgcagtag

SEQ ID NO: 18074 - DNA, 196 bp, Homo sapiens
  MAP TO AC007344.2; EXPRESSED IN BT474, SIGNAL = 1.2; EXPRESSED IN HBL100, SIGNAL = 1.5; EXPRESSED IN FETAL LIVER, SIGNAL =   1; EXPRESSED IN HELA, SIGNAL = 1.4; EXPRESSED IN PLACENTA, SIGNAL = 1.4; EXPRESSED IN BONE MARROW, SIGNAL = 1.4; EXPRESSED IN LUNG, SIGNAL = 1.2; EXPRESSED IN ADULT LIVER, SIGNAL = 1.8; EXPRESSED IN BRAIN, SIGNAL = 1.1; EXPRESSED IN HEART, SIGNAL = 1.3; NT HIT: D14547.1, EVALUE 3.00e-11; EST_HUMAN HIT: BE888016.1, EVALUE 5.00e-11
agtggaagtagatcatcatgaaggtcttgatcttcatcatcttcacgttgagcaggttgaggaggaggaggaggaggaggaagtggagggttggtcttgctgtctcaggggtggcagaggcagaagaaatttcacttataagcagacctgtgcagttcaaacccatactgttcaaaggtcaactttatatccaaaa

SEQ ID NO: 18075 - DNA, 325 bp, Homo sapiens
  MAP TO AC007325.11; EXPRESSED IN PLACENTA, SIGNAL = 1.4; EXPRESSED IN BT474, SIGNAL = 2.1; EXPRESSED IN LUNG, SIGNAL = 1.2; EXPRESSED IN HELA, SIGNAL = 2.1; EXPRESSED IN HEART, SIGNAL = 1.4; EXPRESSED IN FETAL LIVER, SIGNAL =   1; EXPRESSED IN BONE MARROW, SIGNAL = 2.2; EXPRESSED IN HBL100, SIGNAL = 1.2; EXPRESSED IN ADULT LIVER, SIGNAL = 1.3; EXPRESSED IN BRAIN, SIGNAL = 1.8; NT HIT: M14123.1, EVALUE 0.00e+00; SWISSPROT HIT: P10267, EVALUE 2.00e-49; EST_HUMAN HIT: AU124350.1, EVALUE 0.00e+00
aacagaagagtgcaatgcaactcctgctacagcacccgtagctgtgactgcaattaatcccataatcactgcaattaaagtaaaaatgaatcttttggatctatttaaaacaccttttaatacttcagtcaaaatatggacggatggtgaggcctcccacggtcggtccatggacacaaggatccacacgccctctcttgctctcaccagcagaatacggtgttgccaattaaaagttgaatcaatgcaagtaagcaatctacagttttcacaggttatagtctgggagtctggtttaataactatatttcctacaactagcata

SEQ ID NO: 18076 - DNA, 168 bp, Homo sapiens
  MAP TO AC007325.11; EXPRESSED IN HELA, SIGNAL = 7.8; EXPRESSED IN ADULT LIVER, SIGNAL = 6.5; EXPRESSED IN BRAIN, SIGNAL = 5.3; EXPRESSED IN BT474, SIGNAL = 6.2; EXPRESSED IN BONE MARROW, SIGNAL =  15; EXPRESSED IN FETAL LIVER, SIGNAL = 8.5; EXPRESSED IN HEART, SIGNAL = 4.2; EXPRESSED IN PLACENTA, SIGNAL = 4.2; EXPRESSED IN HBL100, SIGNAL =  10; EXPRESSED IN LUNG, SIGNAL = 7.2; NT HIT: gi11417834, EVALUE 3.00e-85; EST_HUMAN HIT: AL045185.1, EVALUE 2.00e-80; SWISSPROT HIT: P52591, EVALUE 2.00e-05
tttgatgctgccacctcccgtagagctggggtaccgggtcactgttgaagaccttgaccgggagaaggaggcggcattccagcgcatcaacagtgcactgcaggttgaggacaaggccatctcggactgcagaccctcacggccttcccacactttgtcctcacttgc

SEQ ID NO: 18077 - DNA, 202 bp, Homo sapiens
  MAP TO AC007250.2; EXPRESSED IN BONE MARROW, SIGNAL = 1.2; EXPRESSED IN LUNG, SIGNAL = 1.2; EXPRESSED IN BRAIN, SIGNAL = 0.95; EXPRESSED IN ADULT LIVER, SIGNAL = 1.5; EXPRESSED IN BT474, SIGNAL =   1; EXPRESSED IN FETAL LIVER, SIGNAL = 1.5; EXPRESSED IN PLACENTA, SIGNAL = 1.2; EXPRESSED IN HELA, SIGNAL =   1; EXPRESSED IN HBL100, SIGNAL = 1.2; EXPRESSED IN HEART, SIGNAL = 0.96; EST_HUMAN HIT: AI187209.1, EVALUE 4.80e-01; NT HIT: AE001138.1, EVALUE 4.80e-01; SWISSPROT HIT: P41465, EVALUE 1.30e+00
taaacagaggggtcttgactacgaggctaatgattctctatatgcaggtgatagggactcattgaatatttttgagcaagggattgatatgattaaaaatgtatttaggaagattagacacagaaggcagaatggattggtgtacagagacgaagtaaagacacgcattaggaagattgtttctagtaatccagatatgaag

SEQ ID NO: 18078 - DNA, 137 bp, Homo sapiens
  MAP TO AC007308.13; EXPRESSED IN FETAL LIVER, SIGNAL =  10; EXPRESSED IN HELA, SIGNAL =  10; EXPRESSED IN PLACENTA, SIGNAL =  11; EXPRESSED IN HBL100, SIGNAL = 8.4; EXPRESSED IN HEART, SIGNAL =  11; EXPRESSED IN BONE MARROW, SIGNAL = 9.9; EXPRESSED IN LUNG, SIGNAL =  19; EXPRESSED IN BRAIN, SIGNAL =  12; EXPRESSED IN BT474, SIGNAL = 8.1; EXPRESSED IN ADULT LIVER, SIGNAL = 9.5; NT HIT: AF012872.1, EVALUE 1.00e-71; EST_HUMAN HIT: AW363993.1, EVALUE 1.00e-71; SWISSPROT HIT: Q00451, EVALUE 1.00e+00
gggggtgaccgtgtcattcttcatggctgagttatactggaggacggaccgcagtggctccttgctgggaaaggtgagcaagggggacttagtggctatttcacagaccccctcgtaccattcttctggccagagtc

SEQ ID NO: 18079 - DNA, 111 bp, Homo sapiens
  MAP TO AC007383.2; EXPRESSED IN PLACENTA, SIGNAL = 2.7; EXPRESSED IN HBL100, SIGNAL = 3.8; EXPRESSED IN HELA, SIGNAL = 4.6; EXPRESSED IN HEART, SIGNAL = 9.8; EXPRESSED IN LUNG, SIGNAL = 1.3; EXPRESSED IN BONE MARROW, SIGNAL = 1.7; EXPRESSED IN BRAIN, SIGNAL = 4.2; EXPRESSED IN ADULT LIVER, SIGNAL = 2.4; EXPRESSED IN BT474, SIGNAL = 4.1; EXPRESSED IN FETAL LIVER, SIGNAL = 2.1; EST_HUMAN HIT: AV705609.1, EVALUE 4.00e-56; SWISSPROT HIT: P15690, EVALUE 1.00e-15; NT HIT: gi11430585, EVALUE 3.00e-56
gaagtaattagccccttcaatatcatcatatcgaacaagattaggagagacttcttccaatctgttccttacttgatccagagtatcatatggaagagtcattccagcaat

SEQ ID NO: 18080 - DNA, 120 bp, Homo sapiens
  MAP TO AC007638.1; EXPRESSED IN BONE MARROW, SIGNAL = 1.9; EXPRESSED IN BRAIN, SIGNAL = 2.4; EXPRESSED IN BT474, SIGNAL = 2.1; EXPRESSED IN FETAL LIVER, SIGNAL = 2.1; EXPRESSED IN ADULT LIVER, SIGNAL = 1.7; EXPRESSED IN HELA, SIGNAL =  95; EXPRESSED IN PLACENTA, SIGNAL = 1.5; EXPRESSED IN HBL100, SIGNAL = 1.7; EXPRESSED IN HEART, SIGNAL = 1.9; EXPRESSED IN LUNG, SIGNAL = 2.1; NT HIT: AL163247.2, EVALUE 2.00e-08; SWISSPROT HIT: P36417, EVALUE 4.10e+00; EST_HUMAN HIT: AV732705.1, EVALUE 2.50e-02
ttagggtgctccaaacatgttctgctttctctagtggctgctaggatgctgattttcaccactaccatggttgtgaggctgctggttttcaaggctcttgtgatgctgaggagaggggga

SEQ ID NO: 18081 - DNA, 160 bp, Homo sapiens
  MAP TO AC007695.12; EXPRESSED IN HBL100, SIGNAL =  25; EXPRESSED IN HEART, SIGNAL =  10; EXPRESSED IN LUNG, SIGNAL = 6.4; EXPRESSED IN BRAIN, SIGNAL =  10; EXPRESSED IN ADULT LIVER, SIGNAL = 5.6; EXPRESSED IN PLACENTA, SIGNAL =  12; EXPRESSED IN HELA, SIGNAL =  18; EXPRESSED IN BONE MARROW, SIGNAL =  14; EXPRESSED IN BT474, SIGNAL =  33; EXPRESSED IN FETAL LIVER, SIGNAL =  10; NT HIT: gi11424931, EVALUE 2.00e-40; EST_HUMAN HIT: AA358600.1, EVALUE 2.00e-40; SWISSPROT HIT: P47833, EVALUE 3.00e-17
gggcctagtactctattttggatttcctcaaagctgggtagttgttagcgaggatgatcaatttcgttttgccttgtctgatcatcttcagggtcagcttgtaacccagcatgtactttccacttttcataaggagctggagtctacagttgattcagtc

SEQ ID NO: 18082 - DNA, 174 bp, Homo sapiens
  MAP TO AC007279.3; EXPRESSED IN FETAL LIVER, SIGNAL = 1.1; EXPRESSED IN BT474, SIGNAL = 1.2; EXPRESSED IN HBL100, SIGNAL = 1.1; EXPRESSED IN HEART, SIGNAL = 1.6; EXPRESSED IN BRAIN, SIGNAL = 1.5; NT HIT: AB046783.1, EVALUE 1.00e-93
tgtagtaacgagttctggattattgcttcctgtgctgctacctcggctctacccaccgctgtttatgctttatgctttggataatgatcgcgaggaagacatttactgggaatgtgtccttcgactaaataagcagccagatattgctctcctgggctttcttggggtgcagag

SEQ ID NO: 18083 - DNA, 171 bp, Homo sapiens
  MAP TO AC007375.4; EXPRESSED IN LUNG, SIGNAL = 2.7; EXPRESSED IN BONE MARROW, SIGNAL = 1.9; EXPRESSED IN BRAIN, SIGNAL = 2.4; EXPRESSED IN FETAL LIVER, SIGNAL = 1.9; EXPRESSED IN BT474, SIGNAL = 2.9; EXPRESSED IN ADULT LIVER, SIGNAL = 1.9; EXPRESSED IN HELA, SIGNAL = 1.9; EXPRESSED IN PLACENTA, SIGNAL = 2.1; EXPRESSED IN HBL100, SIGNAL = 1.9; EXPRESSED IN HEART, SIGNAL = 3.5; SWISSPROT HIT: P41047, EVALUE 3.90e-02; NT HIT: AF139987.1, EVALUE 1.60e+00
gaggggctgcttcccaagcatccccgagggcatgctgagaggcagggcaggagggagatgagggggaatctcatgagcaatgaggccagttggaggacactgggtacagacaaaagccacagtatttggaggaccaaatgcatggacagtaacaaggacagtcatcttcct

SEQ ID NO: 18084 - DNA, 182 bp, Homo sapiens
  MAP TO AC007378.2; EXPRESSED IN BT474, SIGNAL = 1.2; EXPRESSED IN PLACENTA, SIGNAL = 9.7; EXPRESSED IN HELA, SIGNAL = 2.3; EXPRESSED IN HBL100, SIGNAL =   3; EXPRESSED IN HEART, SIGNAL = 1.7; EXPRESSED IN LUNG, SIGNAL = 1.3; EXPRESSED IN BRAIN, SIGNAL = 0.99; EXPRESSED IN ADULT LIVER, SIGNAL = 1.5; NT HIT: gi11430555, EVALUE 1.00e-93; SWISSPROT HIT: O19890, EVALUE 2.20e+00; EST_HUMAN HIT: BE152274.1, EVALUE 6.30e-01
atgagaactggactgatgaccaactgcttggttttaaaccatgcaatgaaaaccttattgctggctgcaatataatcaatgggaaatgtgaatgtaacaccattcgaacctgcagcaatccctttgagtttccaagtcaggatatgtgcctttcagctttaaagagaattgaaggtaagcat

SEQ ID NO: 18085 - DNA, 225 bp, Homo sapiens
  MAP TO AC007536.9; EXPRESSED IN BONE MARROW, SIGNAL =  13; EXPRESSED IN BRAIN, SIGNAL =   5; EXPRESSED IN HBL100, SIGNAL = 4.5; EXPRESSED IN HELA, SIGNAL = 7.3; EXPRESSED IN HEART, SIGNAL = 5.5; EXPRESSED IN LUNG, SIGNAL = 9.4; EXPRESSED IN ADULT LIVER, SIGNAL = 4.1; EXPRESSED IN FETAL LIVER, SIGNAL = 6.1; EXPRESSED IN BT474, SIGNAL = 4.2; EXPRESSED IN PLACENTA, SIGNAL = 6.4; NT HIT: AF274892.1, EVALUE 1.00e-124; EST_HUMAN HIT: BF525344.1, EVALUE 1.00e-106; SWISSPROT HIT: P11169, EVALUE 8.00e-36
gataactataatgggatgagctttgtctgtattggggctatcttggtctttgtagccttctttgaaattggaccaggccccattccctggtttattgtggccgaactcttcagccagggcccccgcccagctgcgatggcagtggccggctgctccaactggacctccaacttcctagtcggattgctcttcccctccgctgctgtaagtaaactcaccttatct

SEQ ID NO: 18086 - DNA, 259 bp, Homo sapiens
  MAP TO AC007678.1; EXPRESSED IN PLACENTA, SIGNAL = 4.9; EXPRESSED IN BRAIN, SIGNAL = 2.9; EXPRESSED IN FETAL LIVER, SIGNAL = 9.8; EXPRESSED IN ADULT LIVER, SIGNAL = 2.4; EXPRESSED IN HEART, SIGNAL = 3.4; EXPRESSED IN HELA, SIGNAL = 3.7; EXPRESSED IN HBL100, SIGNAL = 3.5; EXPRESSED IN LUNG, SIGNAL = 4.7; EXPRESSED IN BONE MARROW, SIGNAL = 2.6; EXPRESSED IN BT474, SIGNAL = 3.1; EST_HUMAN HIT: C18242.1, EVALUE 2.00e-25; SWISSPROT HIT: O54898, EVALUE 3.00e+00; NT HIT: gi11421118, EVALUE 2.00e-25
tgattgcatgtgctcctttctcttccccatttactgttgcctctccattctttggtggattttgctgggaaagggcatctggtgtcatggttgccacctttgccatggctgctgcctctgcggctgctgcactggcttgttgctgagagagcttctctccgaacttctgctgctgcgtctgcaccacgtcaggagtcacggcgtctgtcagggacagggactctatgggtcggctgtcgaacaccaccatccaggggaa

SEQ ID NO: 18087 - DNA, 116 bp, Homo sapiens
  MAP TO AC007718.1; EXPRESSED IN ADULT LIVER, SIGNAL = 0.91; EXPRESSED IN BT474, SIGNAL =   2; EXPRESSED IN HBL100, SIGNAL = 1.1; EXPRESSED IN PLACENTA, SIGNAL = 0.98; EXPRESSED IN HELA, SIGNAL = 1.1; EXPRESSED IN HEART, SIGNAL = 1.1; EXPRESSED IN LUNG, SIGNAL = 1.4; EST_HUMAN HIT: AI735509.1, EVALUE 6.60e-02
ctctcagcagataataatcatcagttctcagtttcaaactcttgttccctggaaaaaaaacgcccattaaagaaaaatgaaaacgccttgaagcagaatagctcagagattcaagg

SEQ ID NO: 18088 - DNA, 164 bp, Homo sapiens
  MAP TO AC008123.9; EXPRESSED IN BT474, SIGNAL = 2.8; EXPRESSED IN HBL100, SIGNAL = 2.5; EXPRESSED IN BRAIN, SIGNAL = 2.8; EXPRESSED IN LUNG, SIGNAL = 3.7; EXPRESSED IN BONE MARROW, SIGNAL = 2.6; EXPRESSED IN ADULT LIVER, SIGNAL = 2.5; EXPRESSED IN FETAL LIVER, SIGNAL = 2.7; EXPRESSED IN PLACENTA, SIGNAL = 2.9; EXPRESSED IN HEART, SIGNAL =   2; EXPRESSED IN HELA, SIGNAL = 2.4; SWISSPROT HIT: P11098, EVALUE 2.30e+00; NT HIT: AB037820.1, EVALUE 9.00e-88; EST_HUMAN HIT: AW954545.1, EVALUE 1.00e-22
cacgtccatgaagccatacatcccgtagcagatctggaagagaaggtcttggcgctgccatcttgccgaggggctgaaagttgaccagatgagccaagaaatactggcgatgaggaagagggagcccaggatggcggctgcaacctgaaccttctcaatgaccg

SEQ ID NO: 18089 - DNA, 192 bp, Homo sapiens
  MAP TO AC009491.2; EXPRESSED IN BT474, SIGNAL = 1.1; EXPRESSED IN PLACENTA, SIGNAL = 1.9; EXPRESSED IN BONE MARROW, SIGNAL = 1.7; EXPRESSED IN ADULT LIVER, SIGNAL = 1.3; EXPRESSED IN FETAL LIVER, SIGNAL = 1.2; EXPRESSED IN HEART, SIGNAL = 1.2; EXPRESSED IN HELA, SIGNAL = 1.3; EXPRESSED IN HBL100, SIGNAL = 1.4; EXPRESSED IN BRAIN, SIGNAL = 1.3; NT HIT: AF255774.1, EVALUE 7.00e+00; EST_HUMAN HIT: AW860958.1, EVALUE 4.60e-01; SWISSPROT HIT: Q03671, EVALUE 4.90e+00
tattatcactatcatcatcatcatcatcatcatcattatcatcatcatcatcatcatcatcatttagaggtatactatgagaaaaatggtttggagccaaattgtaactgactctgaaataattgataaagaatttgccttctattctatacaataaggagcttttgtctgttttgagaagtgaagcaagaa

SEQ ID NO: 18090 - DNA, 123 bp, Homo sapiens
  MAP TO AC008281.2; EXPRESSED IN BRAIN, SIGNAL = 4.7; EXPRESSED IN BT474, SIGNAL =   5; EXPRESSED IN BONE MARROW, SIGNAL = 4.8; EXPRESSED IN LUNG, SIGNAL = 8.4; EXPRESSED IN ADULT LIVER, SIGNAL = 5.1; EXPRESSED IN FETAL LIVER, SIGNAL = 4.4; EXPRESSED IN PLACENTA, SIGNAL = 5.3; EXPRESSED IN HEART, SIGNAL = 6.6; EXPRESSED IN HELA, SIGNAL = 4.7; EXPRESSED IN HBL100, SIGNAL = 4.3; NT HIT: AY005150.1, EVALUE 3.00e-10; EST_HUMAN HIT: AA554958.1, EVALUE 3.00e-04; SWISSPROT HIT: O00165, EVALUE 5.20e+00
acgactatcctgatgaagcctcagatggaagtgaggaacaagttattggaaactggaggaaaggccacccttgttatgatggcagagaacttggctgaagtatgtccaaatcctaggactttt

SEQ ID NO: 18091 - DNA, 171 bp, Homo sapiens
  MAP TO AC009506.2; EXPRESSED IN HBL100, SIGNAL = 2.1; EXPRESSED IN HELA, SIGNAL = 1.5; EXPRESSED IN PLACENTA, SIGNAL = 1.7; EXPRESSED IN HEART, SIGNAL = 1.7; EXPRESSED IN BONE MARROW, SIGNAL = 1.7; EXPRESSED IN LUNG, SIGNAL = 1.5; EXPRESSED IN BRAIN, SIGNAL = 1.4; EXPRESSED IN BT474, SIGNAL = 2.6; EXPRESSED IN ADULT LIVER, SIGNAL = 1.2; EXPRESSED IN FETAL LIVER, SIGNAL = 1.8; NT HIT: AF224275.1, EVALUE 3.90e-01; SWISSPROT HIT: Q04835, EVALUE 2.20e+00; EST_HUMAN HIT: AV764617.1, EVALUE 2.00e-77
cacatgggttgattgtagagctaagtgaagcaactccagtggaaaggccaccttttgaaactactgaagccacagaaggtgtcgaagatgaagttggtgtagtagaggaggctgctgaggatggtaaccgttctccagactccatatctatgagaagggaaaatgttaatt

SEQ ID NO: 18092 - DNA, 185 bp, Homo sapiens
  MAP TO AC008119.6; EXPRESSED IN BRAIN, SIGNAL = 1.6; EXPRESSED IN ADULT LIVER, SIGNAL = 1.2; EXPRESSED IN PLACENTA, SIGNAL = 1.9; EXPRESSED IN LUNG, SIGNAL = 1.4; EXPRESSED IN BONE MARROW, SIGNAL = 1.2; EXPRESSED IN FETAL LIVER, SIGNAL = 1.8; EXPRESSED IN BT474, SIGNAL = 1.5; EXPRESSED IN HEART, SIGNAL = 1.6; EXPRESSED IN HELA, SIGNAL = 1.7; EXPRESSED IN HBL100, SIGNAL = 1.9; EST_HUMAN HIT: BE739868.1, EVALUE 9.00e-65; SWISSPROT HIT: P03204, EVALUE 2.90e+00; NT HIT: gi7661951, EVALUE 5.00e-65
cagtgcttcttcatagggtttatatttctccagctgctgtagtgctttgttatagttctgaattactgactctggtattgggtcttctgaccattcttcatactctgcaaatgtggcctccatatctattgaaagatggattcagccccgtgggtcttgccattgggctttatcaacccaaacac

SEQ ID NO: 18093 - DNA, 127 bp, Homo sapiens
  MAP TO AC009487.1; EXPRESSED IN BT474, SIGNAL = 2.9; EXPRESSED IN FETAL LIVER, SIGNAL = 1.5; EXPRESSED IN HELA, SIGNAL = 2.6; EXPRESSED IN PLACENTA, SIGNAL = 1.5; EXPRESSED IN HBL100, SIGNAL = 2.5; EXPRESSED IN HEART, SIGNAL = 2.5; EXPRESSED IN BONE MARROW, SIGNAL = 0.93; EXPRESSED IN BRAIN, SIGNAL = 1.9; EST_HUMAN HIT: BE708993.1, EVALUE 1.00e-65; NT HIT: gi11429973, EVALUE 1.00e-65; SWISSPROT HIT: P41883, EVALUE 5.00e-17
tcacagtcaccctggctttggttgttggctttctggtgtggatatcaacactcagcagagctttgaagccttgtcggagagagctgtggcagtggttgtggatcccattcagagtgtaaaaggaaag

SEQ ID NO: 18094 - DNA, 163 bp, Homo sapiens
  MAP TO AC009492.1; EXPRESSED IN HBL100, SIGNAL = 0.96; EXPRESSED IN HEART, SIGNAL = 5.5; EXPRESSED IN BONE MARROW, SIGNAL =   1; EXPRESSED IN LUNG, SIGNAL = 1.4; EXPRESSED IN BRAIN, SIGNAL = 1.2; EXPRESSED IN ADULT LIVER, SIGNAL = 1.1; EXPRESSED IN BT474, SIGNAL = 1.1; EXPRESSED IN FETAL LIVER, SIGNAL = 1.1; EXPRESSED IN PLACENTA, SIGNAL = 1.2; EXPRESSED IN HELA, SIGNAL = 0.98; NT HIT: AF120335.1, EVALUE 1.50e+00; EST_HUMAN HIT: AW875060.1, EVALUE 4.00e-82; SWISSPROT HIT: Q59757, EVALUE 5.00e+00
tttagaatcctgatcttctaactccaatatctgaattatttctgggtctgcctctattgtagaatgtacattgcttataaaagaaccacagatgctcccgacgagatgaacttctataccaagagtggtcccctttgttctgttaggcagaaagggaaagggt

SEQ ID NO: 18095 - DNA, 166 bp, Homo sapiens
  MAP TO AC009188.2; EXPRESSED IN PLACENTA, SIGNAL = 0.98; EXPRESSED IN HBL100, SIGNAL = 1.1; EXPRESSED IN HELA, SIGNAL = 0.94; EXPRESSED IN HEART, SIGNAL = 1.6; EXPRESSED IN BONE MARROW, SIGNAL = 0.99; EXPRESSED IN LUNG, SIGNAL = 1.5; EXPRESSED IN BRAIN, SIGNAL = 1.3; EXPRESSED IN ADULT LIVER, SIGNAL = 1.2; EXPRESSED IN BT474, SIGNAL = 1.5; EXPRESSED IN FETAL LIVER, SIGNAL = 1.1; SWISSPROT HIT: O42506, EVALUE 3.80e+00; NT HIT: U22549.1, EVALUE 1.50e+00
aatggttgttcatctattagatatttgtgtaccttttctagagctgactataagaaagactctccctaatgtagctgttgagatgatacatggtgagatgaaaaggatagtccgattagcacctgggtcaatgcatccacgtctaggtctaaagaagaccatggag

SEQ ID NO: 18096 - DNA, 203 bp, Homo sapiens
  MAP TO AC009890.1; EXPRESSED IN BT474, SIGNAL = 2.4; EXPRESSED IN HBL100, SIGNAL = 2.4; EXPRESSED IN HEART, SIGNAL = 2.7; EXPRESSED IN LUNG, SIGNAL = 3.4; EXPRESSED IN BRAIN, SIGNAL = 3.5; EXPRESSED IN FETAL LIVER, SIGNAL =   9; EXPRESSED IN ADULT LIVER, SIGNAL = 3.8; EXPRESSED IN PLACENTA, SIGNAL = 5.4; EXPRESSED IN HELA, SIGNAL = 2.8; EXPRESSED IN BONE MARROW, SIGNAL = 3.6; EST_HUMAN HIT: AV727059.1, EVALUE 4.60e-02; NT HIT: AE001492.1, EVALUE 1.00e-01; SWISSPROT HIT: P41206, EVALUE 4.80e+00
  unsure 51
gacactgagctacgatgttctcaagcatgttgcaatgtcaagttcaggcancttaagaatcattaaatccaaaatttctctcatctctgttgtttttggaattggggttgaaaatgggtttgagggcaaagtattctttctaagcagagacctagcaagcactggcttaaaatgctgaaatggttgttctgtctaaaaatcta

SEQ ID NO: 18097 - DNA, 146 bp, Homo sapiens
  MAP TO AC009944.2; EXPRESSED IN PLACENTA, SIGNAL = 3.5; EXPRESSED IN HBL100, SIGNAL = 2.8; EXPRESSED IN HEART, SIGNAL = 1.2; EXPRESSED IN BRAIN, SIGNAL = 1.8; EXPRESSED IN FETAL LIVER, SIGNAL = 1.5; EXPRESSED IN ADULT LIVER, SIGNAL = 1.2; EXPRESSED IN HELA, SIGNAL = 2.1; EXPRESSED IN LUNG, SIGNAL = 1.5; EXPRESSED IN BONE MARROW, SIGNAL = 1.4; EXPRESSED IN BT474, SIGNAL = 2.5; NT HIT: gi11433285, EVALUE 5.00e-77; SWISSPROT HIT: P53926, EVALUE 3.90e+00; EST_HUMAN HIT: AU132448.1, EVALUE 8.00e-77
cttatatttctaatactacagagtgagaatttattgttgttaagtttgtccccagatgttgctcttgcatacatgatgtaattgccattttctttttgacccaaattcttagattctcctggtgtgcactctgttccagaatcatg

SEQ ID NO: 18098 - DNA, 139 bp, Homo sapiens
  MAP TO AC010703.1; EXPRESSED IN BT474, SIGNAL =  30; EXPRESSED IN HBL100, SIGNAL =  43; EXPRESSED IN HEART, SIGNAL =  13; EXPRESSED IN LUNG, SIGNAL = 7.4; EXPRESSED IN BRAIN, SIGNAL =  14; EXPRESSED IN ADULT LIVER, SIGNAL = 6.5; EXPRESSED IN FETAL LIVER, SIGNAL =  11; EXPRESSED IN PLACENTA, SIGNAL =  20; EXPRESSED IN HELA, SIGNAL =  37; EXPRESSED IN BONE MARROW, SIGNAL =  17; EST_HUMAN HIT: BF357646.1, EVALUE 8.00e-03; NT HIT: gi11968077, EVALUE 9.00e-08; SWISSPROT HIT: P12947, EVALUE 4.00e-02
gtgtcaccacctcattgacagcaggagagcccttcttcttcccacccttctctgcaggggccattctgccaggccaaagttggaaagtaacctccatcttaactacccaagaaagaagaaaaacaaacagcatagcttt

SEQ ID NO: 18099 - DNA, 87 bp, Homo sapiens
  MAP TO AC010726.2; EXPRESSED IN BONE MARROW, SIGNAL = 1.9; EXPRESSED IN BRAIN, SIGNAL = 1.9; EXPRESSED IN HBL100, SIGNAL = 1.4; EXPRESSED IN HELA, SIGNAL = 1.7; EXPRESSED IN HEART, SIGNAL = 1.8; EXPRESSED IN LUNG, SIGNAL = 2.8; EXPRESSED IN ADULT LIVER, SIGNAL = 1.7; EXPRESSED IN FETAL LIVER, SIGNAL = 1.9; EXPRESSED IN BT474, SIGNAL = 1.8; EXPRESSED IN PLACENTA, SIGNAL = 1.8; NT HIT: AF217490.1, EVALUE 2.80e+00
ctctgtgttatgtatgtctccagtgcctttcagaatgtttaccatttctggcacctctctcataattgcactaggctcctgagtcat

SEQ ID NO: 18100 - DNA, 214 bp, Homo sapiens
  MAP TO AC009959.2; EXPRESSED IN PLACENTA, SIGNAL = 2.1; EXPRESSED IN BONE MARROW, SIGNAL = 1.9; EXPRESSED IN BRAIN, SIGNAL = 2.1; EXPRESSED IN FETAL LIVER, SIGNAL = 2.2; EXPRESSED IN HEART, SIGNAL = 1.9; EXPRESSED IN HELA, SIGNAL = 2.1; EXPRESSED IN HBL100, SIGNAL = 1.9; EXPRESSED IN LUNG, SIGNAL = 2.8; EXPRESSED IN ADULT LIVER, SIGNAL = 1.7; EXPRESSED IN BT474, SIGNAL = 2.1; SWISSPROT HIT: P49605, EVALUE 5.10e-01; EST_HUMAN HIT: AW070945.1, EVALUE 7.50e-01; NT HIT: M20783.1, EVALUE 2.00e-03
acattcatgctgtactgattctggggcttgctctcaccctcctccacccccttccctgcatccaaggcaaacccacccaaacccacacagccaacagcaccggatggactgtgcacacttgggttgtcatttacactctttctccagcccatggtgctgtccctactcttgctgcagcctggcccacatgaaggctggtgcctgcaatgctctg

SEQ ID NO: 18101 - DNA, 223 bp, Homo sapiens
  MAP TO AC010134.1; EXPRESSED IN BONE MARROW, SIGNAL = 1.2; EXPRESSED IN BRAIN, SIGNAL = 2.7; EXPRESSED IN BT474, SIGNAL =   1; EXPRESSED IN LUNG, SIGNAL = 1.2; EXPRESSED IN ADULT LIVER, SIGNAL = 1.3; EXPRESSED IN FETAL LIVER, SIGNAL = 1.3; EXPRESSED IN PLACENTA, SIGNAL =   1; EXPRESSED IN HEART, SIGNAL = 1.2; EXPRESSED IN HELA, SIGNAL =   1; NT HIT: AF221504.1, EVALUE 1.30e-01; EST_HUMAN HIT: BE141823.1, EVALUE 1.40e-01; SWISSPROT HIT: Q61060, EVALUE 7.00e-03
gatatctcatggagcagaccctcctgatctcaggcatcatgagctgtgatcagggccatcttaccttgcagaaacacagcacaagtacttctctcagccacaggccttgcaactgtcaacagagaagctggtgccgagttctgacatgggaactgagaactctgcccctgtcagggcagacatggcagaagaagaggctgggcaggcaaaaaaagacactggc

SEQ ID NO: 18102 - DNA, 108 bp, Homo sapiens
  MAP TO AC010149.1; EXPRESSED IN BT474, SIGNAL = 1.2; EXPRESSED IN BONE MARROW, SIGNAL = 1.5; EXPRESSED IN LUNG, SIGNAL = 1.6; EXPRESSED IN BRAIN, SIGNAL = 0.96; EXPRESSED IN ADULT LIVER, SIGNAL = 1.2; EXPRESSED IN FETAL LIVER, SIGNAL = 1.6; EXPRESSED IN PLACENTA, SIGNAL = 1.5; EXPRESSED IN HEART, SIGNAL = 1.9; EXPRESSED IN HELA, SIGNAL = 1.1; EXPRESSED IN HBL100, SIGNAL = 2.1; EST_HUMAN HIT: BE675052.1, EVALUE 3.00e-54; NT HIT: gi11429927, EVALUE 2.00e-54; SWISSPROT HIT: P23497, EVALUE 7.00e-10
gtttcagcagtagtgacttttcagacctgagtaatggagaagagcttcaggaaacctgcagctcatccctaagaagagggtcaggtaaagaagattaggatgccaaga

SEQ ID NO: 18103 - DNA, 184 bp, Homo sapiens
  MAP TO AC010170.3; EXPRESSED IN HBL100, SIGNAL =   2; EXPRESSED IN HELA, SIGNAL = 1.4; EXPRESSED IN PLACENTA, SIGNAL = 1.4; EXPRESSED IN HEART, SIGNAL = 1.6; EXPRESSED IN BONE MARROW, SIGNAL = 1.3; EXPRESSED IN LUNG, SIGNAL = 1.3; EXPRESSED IN BRAIN, SIGNAL = 1.4; EXPRESSED IN BT474, SIGNAL = 1.9; EXPRESSED IN FETAL LIVER, SIGNAL = 1.4; EXPRESSED IN ADULT LIVER, SIGNAL = 1.1; EST_HUMAN HIT: AA661605.1, EVALUE 2.00e-03; SWISSPROT HIT: P35556, EVALUE 5.70e-01
gtactgcagcctggacctgctgcacggctctttcctgctcagggacccgctcaagctggctctgggcctgcccatcagtacctggttccaagcagtattcacaagtgtgtcatatgcagccttcgagtctgaagaagctgaccaggcattatacttccttcttagggagaggtacaagaagcca

SEQ ID NO: 18104 - DNA, 247 bp, Homo sapiens
  MAP TO AC009925.2; EXPRESSED IN BT474, SIGNAL = 1.6; EXPRESSED IN ADULT LIVER, SIGNAL = 1.8; EXPRESSED IN PLACENTA, SIGNAL = 2.5; EXPRESSED IN FETAL LIVER, SIGNAL = 1.3; EXPRESSED IN HEART, SIGNAL = 2.3; EXPRESSED IN HELA, SIGNAL =   2; EXPRESSED IN HBL100, SIGNAL = 1.9; EXPRESSED IN BRAIN, SIGNAL = 1.5; EXPRESSED IN LUNG, SIGNAL = 1.4; EXPRESSED IN BONE MARROW, SIGNAL = 1.9; EST_HUMAN HIT: BE064410.1, EVALUE 5.00e-66; SWISSPROT HIT: P25059, EVALUE 9.00e-03; NT HIT: AL163246.2, EVALUE 4.00e-48
  unsure 221
ggggaacatggtaagaacagtgaattccataagcatgagcccactgctgcacttctttagctgtaaagtgaatgccttggtaagaggcaatgctgtgttgaataccatgacaatggagaaggcattccatgagtccacagatagtagtattggcagaagcatcgcatgcaggatagagaagcccgtatctgaagtaagtgtctattccagtgaggacaaanccactatcctttccatgatggaagac

SEQ ID NO: 18105 - DNA, 175 bp, Homo sapiens
  MAP TO AC010683.1; EXPRESSED IN BT474, SIGNAL = 1.1; EXPRESSED IN HBL100, SIGNAL = 0.93; EXPRESSED IN HEART, SIGNAL =   1; EXPRESSED IN PLACENTA, SIGNAL = 0.99; EXPRESSED IN LUNG, SIGNAL =  19; EST_HUMAN HIT: AW850496.1, EVALUE 3.90e-02; NT HIT: AF058907.1, EVALUE 1.00e-01; SWISSPROT HIT: P06900, EVALUE 1.70e+00
agaaaaacaatacttttttaagtttagctggagcacacagcatggaaaaaggaataatgaaaccatgagaaataagggtgaaaaggttactcaaaaccaaattaaggagggtcttaacactgccacgcagagaactccaaataaagatggtaacaagaaaagaagacaagagaaa

SEQ ID NO: 18106 - DNA, 91 bp, Homo sapiens
  MAP TO AC009948.2; EXPRESSED IN BRAIN, SIGNAL = 1.3; EXPRESSED IN BT474, SIGNAL = 1.4; EXPRESSED IN LUNG, SIGNAL = 1.4; EXPRESSED IN BONE MARROW, SIGNAL = 1.1; EXPRESSED IN ADULT LIVER, SIGNAL = 1.3; EXPRESSED IN FETAL LIVER, SIGNAL = 1.4; EXPRESSED IN PLACENTA, SIGNAL = 1.5; EXPRESSED IN HEART, SIGNAL = 1.4; EXPRESSED IN HELA, SIGNAL = 1.3; EXPRESSED IN HBL100, SIGNAL = 1.6; NT HIT: AF286162.1, EVALUE 2.00e-44; SWISSPROT HIT: P16258, EVALUE 1.90e+00; EST_HUMAN HIT: BE550649.1, EVALUE 3.00e-44
tggaattaatcattcctggagagcagcatttctacatgaaggcagtgaatgcagctgaaagacagaggtggctggtcgctctggggagctc

SEQ ID NO: 18107 - DNA, 485 bp, Homo sapiens
  MAP TO AC010731.1; EXPRESSED IN ADULT LIVER, SIGNAL = 0.96; EXPRESSED IN HBL100, SIGNAL = 0.98; EXPRESSED IN HELA, SIGNAL =   1; EXPRESSED IN HEART, SIGNAL = 1.5; EXPRESSED IN BONE MARROW, SIGNAL = 0.9; EXPRESSED IN LUNG, SIGNAL = 1.8; EXPRESSED IN BRAIN, SIGNAL = 1.1; EST_HUMAN HIT: R39243.1, EVALUE 7.10e+00; SWISSPROT HIT: Q03164, EVALUE 1.50e-01; NT HIT: AF245116.1, EVALUE 6.60e-02
catccataagttttgacaatagttcttgcagttcctcttcctccagctcatcctttctctccttgatgttacctgcctctttcttttccacggctgccagagcaggactgctcatttcagcaggaaccattttggggatgtcctgcttcagtccctcctgataactgggtagggcactaatgactttctgtggcatcttttgtgtttggctttgtgccctggtgctgtgcaaagtggtctctggtgattctggatttcgcagagcatgctctgcatttgtgtgacttctgtgacttctgtcaacctcatcaagcttaggaagaggttcccctgttgaagcatcttcagtggcattcttgatctgcaaataatcccctccctttggaaccttttcagttgaagaatggtcaaccttgttccccacattttgaaaggaagaagatgaaggaccgggtggctgcaaccttgcctggggaaacaaaact

SEQ ID NO: 18108 - DNA, 105 bp, Homo sapiens
  MAP TO AC011403.1; EXPRESSED IN PLACENTA, SIGNAL = 2.4; EXPRESSED IN HBL100, SIGNAL = 3.2; EXPRESSED IN HELA, SIGNAL = 2.3; EXPRESSED IN HEART, SIGNAL = 2.3; EXPRESSED IN BONE MARROW, SIGNAL = 2.9; EXPRESSED IN LUNG, SIGNAL = 4.5; EXPRESSED IN BRAIN, SIGNAL = 1.8; EXPRESSED IN ADULT LIVER, SIGNAL = 1.7; EXPRESSED IN BT474, SIGNAL = 1.8; EXPRESSED IN FETAL LIVER, SIGNAL = 2.4; NT HIT: AF061282.1, EVALUE 1.90e-01; EST_HUMAN HIT: T61559.1, EVALUE 2.30e-01
gcaaatggtggtgtaaggtgtgcaggggccaacttgtgtgacagatctgctaaacaatccatcatcaccattgtccttgcctcagccttgcccaccctcattctt

SEQ ID NO: 18109 - DNA, 145 bp, Homo sapiens
  MAP TO AC011092.1; EXPRESSED IN BT474, SIGNAL =  12; EXPRESSED IN FETAL LIVER, SIGNAL =  12; EXPRESSED IN PLACENTA, SIGNAL =  19; EXPRESSED IN HBL100, SIGNAL = 9.6; EXPRESSED IN HELA, SIGNAL = 3.3; EXPRESSED IN HEART, SIGNAL = 8.3; EXPRESSED IN BONE MARROW, SIGNAL = 9.6; EXPRESSED IN LUNG, SIGNAL =  13; EXPRESSED IN BRAIN, SIGNAL =  38; EXPRESSED IN ADULT LIVER, SIGNAL = 6.3; NT HIT: X59834.1, EVALUE 2.00e-52; EST_HUMAN HIT: AW250678.1, EVALUE 2.00e-52; SWISSPROT HIT: P46410, EVALUE 3.00e-19
gctgccatgttttgggaccccttccacaaggacctccacaagctggtgttctgtgaagttttcaagtgcaatcgaaagcctgcagagaccaatttgaggcacacctgtaaacggataagggacatggtgagcaaccagcacccct

SEQ ID NO: 18110 - DNA, 181 bp, Homo sapiens
  MAP TO AF188031.1; EXPRESSED IN PLACENTA, SIGNAL = 0.93; EXPRESSED IN HEART, SIGNAL = 0.89; EXPRESSED IN LUNG, SIGNAL = 1.5; EXPRESSED IN BRAIN, SIGNAL = 0.92; EXPRESSED IN BT474, SIGNAL = 1.1; NT HIT: AB033768.1, EVALUE 8.00e-98; EST_HUMAN HIT: AV690090.1, EVALUE 9.80e+00; SWISSPROT HIT: Q9Z185, EVALUE 5.00e-15
cttgaagtcctttaattccttactggctgtgcccacagatacgaccatgtctgcatcagtgtctagcggccaacgggccttgcctatgggctctttcacacgtgtgcggttgtagaccatgaagacctccaccccggagcttccagagaccctgaagctgttggcacccttgggcacatca

SEQ ID NO: 18111 - DNA, 227 bp, Homo sapiens
  MAP TO AC011199.1; EXPRESSED IN HBL100, SIGNAL = 1.5; EXPRESSED IN HEART, SIGNAL = 1.3; EXPRESSED IN LUNG, SIGNAL = 1.4; EXPRESSED IN BRAIN, SIGNAL = 1.6; EXPRESSED IN ADULT LIVER, SIGNAL = 0.99; EXPRESSED IN PLACENTA, SIGNAL = 0.96; EXPRESSED IN HELA, SIGNAL = 1.4; EXPRESSED IN BONE MARROW, SIGNAL = 1.3; EXPRESSED IN BT474, SIGNAL = 1.6; EXPRESSED IN FETAL LIVER, SIGNAL = 1.4; EST_HUMAN HIT: BE735194.1, EVALUE 8.10e-01; SWISSPROT HIT: Q27474, EVALUE 8.80e-02
caggtgaggtgtgtgtgggtgcctcacttccaactggtctggttgaagaaatcccaaaacgcttcccccacctccctatcagtgcctcagactttgccactagcacgtctgtctgctcctctccagttacaaagtccattcctgagtcttgccctgtggtccctatggcagagtctgtagctgggcctgggatagcttctgaagctgccctgaggggagagtcagtg

SEQ ID NO: 18112 - DNA, 141 bp, Homo sapiens
  MAP TO AC011412.1; EXPRESSED IN LUNG, SIGNAL = 1.4; EXPRESSED IN BONE MARROW, SIGNAL = 2.8; EXPRESSED IN BRAIN, SIGNAL = 2.7; EXPRESSED IN BT474, SIGNAL = 1.5; EXPRESSED IN ADULT LIVER, SIGNAL =   2; EXPRESSED IN FETAL LIVER, SIGNAL = 1.6; EXPRESSED IN HELA, SIGNAL = 2.2; EXPRESSED IN PLACENTA, SIGNAL = 1.4; EXPRESSED IN HBL100, SIGNAL = 1.3; EXPRESSED IN HEART, SIGNAL = 2.2; NT HIT: M99149.1, EVALUE 3.00e-07; SWISSPROT HIT: P31370, EVALUE 3.90e+00; EST_HUMAN HIT: AV746822.1, EVALUE 2.00e-03
agaatggggctgggggaggcggaatggggagttgttgttcaatgggtctgcagtttcattcatgtaagatgaacaagttctacagatctgctgtacaaagaagtccatagagttaacaatgctgtaatgtgtacttaaaaa

SEQ ID NO: 18113 - DNA, 162 bp, Homo sapiens
  MAP TO AC011416.1; EXPRESSED IN PLACENTA, SIGNAL =  21; EXPRESSED IN HBL100, SIGNAL = 8.7; EXPRESSED IN HEART, SIGNAL =  13; EXPRESSED IN BRAIN, SIGNAL =  16; EXPRESSED IN FETAL LIVER, SIGNAL =  21; EXPRESSED IN ADULT LIVER, SIGNAL =  14; EXPRESSED IN HELA, SIGNAL =  14; EXPRESSED IN LUNG, SIGNAL = 9.9; EXPRESSED IN BONE MARROW, SIGNAL =  12; EXPRESSED IN BT474, SIGNAL = 5.4; NT HIT: AF284446.1, EVALUE 2.00e-03; SWISSPROT HIT: P37398, EVALUE 6.60e+00; EST_HUMAN HIT: BE004985.1, EVALUE 5.50e-01
ttcctcagcgtttgtgtctttcatgacattgatgcctgtgaagggtcctggccagcggctttgcaggatgtcctttaatgtgtgtttgtctgattgtttactcatgattagattgaggtgaaacattttggcagtactatcgcataggtgatgtttgtcctt

SEQ ID NO: 18114 - DNA, 162 bp, Homo sapiens
  MAP TO AC011085.1; EXPRESSED IN BT474, SIGNAL = 0.97; EXPRESSED IN PLACENTA, SIGNAL = 1.3; EXPRESSED IN HEART, SIGNAL = 1.1; NT HIT: AB037735.1, EVALUE 4.00e-84; EST_HUMAN HIT: AU123468.1, EVALUE 2.00e-74; SWISSPROT HIT: P35688, EVALUE 4.40e-01
gatgatgtgggccgcagtgtttgctaacagtaattcttcataatcagagtgtttgcttctactgaagaaaaggtttggtgccatcactgtagaaatgttccacagactcattcggttttttgattcattggcaatcactttattgaagaatgtcatgagggc

SEQ ID NO: 18115 - DNA, 487 bp, Homo sapiens
  MAP TO AC011484.1; EXPRESSED IN HELA, SIGNAL = 2.4; EXPRESSED IN PLACENTA, SIGNAL = 2.3; EXPRESSED IN HBL100, SIGNAL = 2.5; EXPRESSED IN HEART, SIGNAL = 2.8; EXPRESSED IN LUNG, SIGNAL = 3.9; EXPRESSED IN BONE MARROW, SIGNAL = 2.2; EXPRESSED IN BRAIN, SIGNAL = 3.2; EXPRESSED IN FETAL LIVER, SIGNAL = 2.3; EXPRESSED IN BT474, SIGNAL = 2.4; EXPRESSED IN ADULT LIVER, SIGNAL = 2.2; SWISSPROT HIT: Q03164, EVALUE 2.20e+00; EST_HUMAN HIT: AU149146.1, EVALUE 1.20e-01
tctgcagaaagaggttcagcttggtcaggaattcaatgtcctgcttccggggcatgtagaccactctccacacaccgcccttgcccttgatctccctggggaccacggcgtaattgatgtcctccgtcagctgaatgatggccgccttggatttatcttcttccagataggccttcccagccacttcgaacttgcctagaggtttgaggggcagccgaataatctcttcgaattcctcgtggttgcagtcctccgggatccccaggatcatcagggacttgtaactgtccacctccagggccttgcacccgtgctccaacagtgcaatgtccttcaccccgaacagcatcttgcccaactctttgaggcagcagtatgcccgctggtggacacctgagctgcctcgggaatccacgaaattatccaggatgccgcgattccttcccaaaggctacgagagagtgaggcctcaggagccggaggccgc

SEQ ID NO: 18116 - DNA, 197 bp, Homo sapiens
  MAP TO AL031658.10; EXPRESSED IN BT474, SIGNAL = 1.5; EXPRESSED IN HBL100, SIGNAL = 1.6; EXPRESSED IN HEART, SIGNAL = 2.1; EXPRESSED IN LUNG, SIGNAL = 3.1; EXPRESSED IN BRAIN, SIGNAL = 1.9; EXPRESSED IN ADULT LIVER, SIGNAL = 1.9; EXPRESSED IN FETAL LIVER, SIGNAL =   2; EXPRESSED IN PLACENTA, SIGNAL = 1.8; EXPRESSED IN HELA, SIGNAL = 1.5; EXPRESSED IN BONE MARROW, SIGNAL = 1.6; SWISSPROT HIT: P38584, EVALUE 9.60e-01; EST_HUMAN HIT: AW834362.1, EVALUE 4.70e-01
ggcgtccaaacacgggcccgaggcagtggagacactcttcagggacatcgacaacatctttgtcaaaagcctgcagagtgtgcagaaggtgatcatcagtgacaagcactgcttcgagctgtacggctatgacatcctcatcgaccaggacctcaagccgtaagtgggtgggtgggagagccaggaggtcatagttt

SEQ ID NO: 18117 - DNA, 166 bp, Homo sapiens
  MAP TO AL050325.20; EXPRESSED IN BONE MARROW, SIGNAL = 7.4; EXPRESSED IN BRAIN, SIGNAL = 7.2; EXPRESSED IN BT474, SIGNAL = 4.2; EXPRESSED IN HBL100, SIGNAL = 6.2; EXPRESSED IN LUNG, SIGNAL =  13; EXPRESSED IN ADULT LIVER, SIGNAL = 7.8; EXPRESSED IN FETAL LIVER, SIGNAL = 9.3; EXPRESSED IN PLACENTA, SIGNAL = 9.1; EXPRESSED IN HEART, SIGNAL = 7.8; EXPRESSED IN HELA, SIGNAL = 6.9; NT HIT: AF100956.1, EVALUE 3.80e-01; SWISSPROT HIT: P06723, EVALUE 1.30e+00
ctccagctccccctgctccttgagttccctgctgtcttccctggcctctgcctctgggcccaagaactcccagccctcagcatccatggcctccccctggcccacgaagtcctcagccacctccttcctggagggctcagccaaaatcagactgaggaagaagtgg

SEQ ID NO: 18118 - DNA, 307 bp, Homo sapiens
  MAP TO AL121603.1; EXPRESSED IN HBL100, SIGNAL =   8; EXPRESSED IN HELA, SIGNAL = 4.7; EXPRESSED IN PLACENTA, SIGNAL = 3.7; EXPRESSED IN HEART, SIGNAL = 2.6; EXPRESSED IN BONE MARROW, SIGNAL = 2.3; EXPRESSED IN LUNG, SIGNAL =   2; EXPRESSED IN BRAIN, SIGNAL =   3; EXPRESSED IN BT474, SIGNAL = 6.2; EXPRESSED IN FETAL LIVER, SIGNAL = 2.2; EXPRESSED IN ADULT LIVER, SIGNAL = 1.4; NT HIT: gi5902097, EVALUE 2.00e-38; SWISSPROT HIT: P55855, EVALUE 6.00e-14; EST_HUMAN HIT: BE712790.1, EVALUE 3.00e-38
tttaagaactgtacttggacgtgcacgcaccctgtccctcaaccaccgctgccgcctccttcttctgtcactcctggtgctgcactgtgttcgttcagtgagaagctggtacctcttttgtgaagcggcagctgagaagactctggcatttgccatggccgaggaaaagcccaaggcattgtcaatggggcagatcagattccgatttgacagtcagccaatcaatgaaacagacacacctgtacaggtggaaatggaggatatagatataattgatgtgttccaccagcagataggaggtgtctac

SEQ ID NO: 18119 - DNA, 213 bp, Homo sapiens
  MAP TO AL035684.25; EXPRESSED IN LUNG, SIGNAL = 1.1; EXPRESSED IN BRAIN, SIGNAL = 3.5; EXPRESSED IN BT474, SIGNAL = 4.4; EXPRESSED IN PLACENTA, SIGNAL = 0.99; EXPRESSED IN BONE MARROW, SIGNAL = 3.8; EXPRESSED IN ADULT LIVER, SIGNAL = 1.3; EXPRESSED IN FETAL LIVER, SIGNAL = 1.9; EXPRESSED IN HEART, SIGNAL = 1.3; EXPRESSED IN HELA, SIGNAL = 1.5; EXPRESSED IN HBL100, SIGNAL = 2.1; SWISSPROT HIT: O70228, EVALUE 9.00e-18; NT HIT: AB014511.1, EVALUE 5.00e-93; EST_HUMAN HIT: AW374292.1, EVALUE 6.00e-93
gcccgctacgtccaggccaagctgagtgtgcacgaccgctccctcaaagtggccacggtgatcgagagcctggagatggagatggaactgctgtgcctgacgggcgtggaggaccagctgcaggcagatgtgcggcccacgctggagaccctgaggaatgctggcatcaaggtagggcgggctgcccgcagggaagggcactccagggcaatg

SEQ ID NO: 18120 - DNA, 129 bp, Homo sapiens
  MAP TO AL121749.2; EXPRESSED IN LUNG, SIGNAL = 1.5; EXPRESSED IN BRAIN, SIGNAL = 2.9; EXPRESSED IN ADULT LIVER, SIGNAL = 1.2; EXPRESSED IN PLACENTA, SIGNAL = 2.7; EXPRESSED IN BONE MARROW, SIGNAL = 1.2; EXPRESSED IN BT474, SIGNAL = 2.3; EXPRESSED IN FETAL LIVER, SIGNAL = 1.8; EXPRESSED IN HEART, SIGNAL = 2.6; EXPRESSED IN HELA, SIGNAL = 1.8; EXPRESSED IN HBL100, SIGNAL = 2.2; NT HIT: AF187820.1, EVALUE 4.50e+00; EST_HUMAN HIT: AA383416.1, EVALUE 7.00e-67; SWISSPROT HIT: P34624, EVALUE 3.00e-17
atccacattccatacagcctggtcatcccacaccttggaggccagcaggatcgcccctaaaacaatccgcttccagttggccggacagatatctatctctgcgtatgttaaaagtctttcaaggtacac

SEQ ID NO: 18121 - DNA, 512 bp, Homo sapiens
  MAP TO AL031650.21; EXPRESSED IN LUNG, SIGNAL = 1.4; EXPRESSED IN BRAIN, SIGNAL = 4.4; EXPRESSED IN ADULT LIVER, SIGNAL =   2; EXPRESSED IN PLACENTA, SIGNAL = 3.4; EXPRESSED IN BONE MARROW, SIGNAL = 4.9; EXPRESSED IN BT474, SIGNAL = 2.7; EXPRESSED IN FETAL LIVER, SIGNAL = 3.3; EXPRESSED IN HEART, SIGNAL = 3.9; EXPRESSED IN HELA, SIGNAL = 3.4; EXPRESSED IN HBL100, SIGNAL = 3.6; EST_HUMAN HIT: AV735249.1, EVALUE 1.20e-01; NT HIT: U62293.1, EVALUE 4.30e+00
tgtgaaaagttcgaagcttcttcttcttcttctcctccttctcctccttcttcttctccttcttcttctccccctcctccttctcctgctcctccttctcctgctcctcctcctcctgctcctcctcctcctgctcctcctcatcctgctcctcctcctctccttcttctctccttcttctctccttcttcttctctccttcttctctctcttcttcttcttctctctcttcttcttctccttctctccttctctccttcttcttctccttctgctctccttctgctctccttcttctctccttcttctctccttcttctctccttcttctccttctctccttcttcctctccttcctgtccttcttctccttcttctctccttctccccctccccctgcccttcccctcttgctccttcttcttcttccttcttccttctccttctccttcttcttcctttccttagagagagggtctcctttcattgcccaagctggactggcacaattg

SEQ ID NO: 18122 - DNA, 127 bp, Homo sapiens
  MAP TO AL033380.10; EXPRESSED IN BONE MARROW, SIGNAL =   1; EXPRESSED IN LUNG, SIGNAL = 1.4; EXPRESSED IN BRAIN, SIGNAL =   1; EXPRESSED IN BT474, SIGNAL =   1; EXPRESSED IN FETAL LIVER, SIGNAL = 0.93; EXPRESSED IN ADULT LIVER, SIGNAL =   1; EXPRESSED IN PLACENTA, SIGNAL = 0.97; EXPRESSED IN HEART, SIGNAL =   1; NT HIT: AE004632.1, EVALUE 2.80e-01
cagggccaactggttggttggttccatgagggctaaagagcagaagcatgatcctctcagacaatcctgccggatttgggagaagggacagaaattacgaagggtgaagatgaacaggcaagccaag

SEQ ID NO: 18123 - DNA, 142 bp, Homo sapiens
  MAP TO AL096677.18; EXPRESSED IN PLACENTA, SIGNAL = 1.9; EXPRESSED IN HEART, SIGNAL = 0.92; EXPRESSED IN BONE MARROW, SIGNAL = 1.3; EXPRESSED IN LUNG, SIGNAL = 1.1; EXPRESSED IN BRAIN, SIGNAL = 1.3; EXPRESSED IN ADULT LIVER, SIGNAL = 1.3; EXPRESSED IN FETAL LIVER, SIGNAL = 1.7; EXPRESSED IN HELA, SIGNAL = 1.1; EST_HUMAN HIT: AV690964.1, EVALUE 3.00e-48; SWISSPROT HIT: Q12766, EVALUE 5.10e+00; NT HIT: gi11434874, EVALUE 2.00e-08
ttaatctcattcagaaacaccccacagacacactcagaataacaccaaatatctgggcaccctgtagcccactcaaggtgacacataaaatcagtcatcacagagagtattgccatcttaacaatactaagtctgacagtcg

SEQ ID NO: 18124 - DNA, 164 bp, Homo sapiens
  MAP TO AL035250.17; EXPRESSED IN ADULT LIVER, SIGNAL = 1.1; EXPRESSED IN FETAL LIVER, SIGNAL = 1.5; EXPRESSED IN PLACENTA, SIGNAL = 1.3; EXPRESSED IN HEART, SIGNAL = 1.9; EXPRESSED IN BONE MARROW, SIGNAL = 0.99; EXPRESSED IN LUNG, SIGNAL = 3.4; EXPRESSED IN BRAIN, SIGNAL = 1.2; NT HIT: AF204395.1, EVALUE 2.10e-02
atgacaaaaacaaggttccaaaagttaagcaacttatccaggttgacacggttcttaagaggcaagaaccatacctgacctaaagtgcacagacttgacaagtatgctacagttttctgcacagccttttttctttcaggaacactgttctcttgcttctttgc

SEQ ID NO: 18125 - DNA, 437 bp, Homo sapiens
  MAP TO AL050336.7; EXPRESSED IN PLACENTA, SIGNAL = 1.5; EXPRESSED IN HBL100, SIGNAL =   2; EXPRESSED IN HEART, SIGNAL = 0.88; EXPRESSED IN BONE MARROW, SIGNAL = 2.3; EXPRESSED IN BRAIN, SIGNAL = 3.4; EXPRESSED IN BT474, SIGNAL = 2.2; EXPRESSED IN FETAL LIVER, SIGNAL = 1.4; EXPRESSED IN ADULT LIVER, SIGNAL = 2.2; EXPRESSED IN HELA, SIGNAL =   2; NT HIT: AB015033.1, EVALUE 2.30e-01; EST_HUMAN HIT: AI939541.1, EVALUE 2.80e-01
ccactactatcaccatctccttcatcaacacaagaaacaccaacaccattactattatcagctaccgtcgacatcaacatcactaccaacaacatcgtcatccaccaccaccatcatcaacttcacgaacaccaccaccaccccaccatcagcatcattatcacctttatcaatgcaacctctaccacatcaccatcatcattcaccaccatcatcatcatcaagcccactaccaacaatgccagcgccattactttcaccaccaccactattactgtgttccgctaccattaccaccacctgtactactatctgtaccaccaccaagcctcatccaccatcattcccatcacctccaccaatgccatcaccatgatcagctattatcaccattattaacactatgagcaacaaatcaaatactaccaatcgcgttg

SEQ ID NO: 18126 - DNA, 282 bp, Homo sapiens
  MAP TO AL035706.10; EXPRESSED IN HEART, SIGNAL = 0.9; EXPRESSED IN LUNG, SIGNAL = 1.1; EXPRESSED IN BONE MARROW, SIGNAL = 0.96; EXPRESSED IN BRAIN, SIGNAL = 0.91; EXPRESSED IN ADULT LIVER, SIGNAL = 1.1; EXPRESSED IN FETAL LIVER, SIGNAL = 1.2; EST_HUMAN HIT: BE742010.1, EVALUE 1.00e+00; NT HIT: L14561.1, EVALUE 3.70e-02
atgcagtctgtgagtactctctgctctaatcaagaaggaaggggcttcagcttcaaatgtcaatgctgtaaacatgttaaatctggaaaatattttctaagcaagcaaccatgtgtaaaatttaccgaacttgtcatgaaagggctgcagctgcaaacctgcaaacttctcacttccatgaagactccagatgctgagacagggaagagaggtttcagcttggctccccagctgttgcaccttagagctttgcatgccgccatcttctcagcgtttcaccag

SEQ ID NO: 18127 - DNA, 281 bp, Homo sapiens
  MAP TO AJ239323.2; EXPRESSED IN BT474, SIGNAL = 1.8; EXPRESSED IN PLACENTA, SIGNAL = 2.6; EXPRESSED IN HBL100, SIGNAL =   2; EXPRESSED IN HEART, SIGNAL = 2.3; EXPRESSED IN BRAIN, SIGNAL = 2.4; EXPRESSED IN FETAL LIVER, SIGNAL = 2.2; EXPRESSED IN ADULT LIVER, SIGNAL = 1.7; EXPRESSED IN HELA, SIGNAL = 1.8; EXPRESSED IN LUNG, SIGNAL = 2.9; EXPRESSED IN BONE MARROW, SIGNAL = 2.3; SWISSPROT HIT: P10082, EVALUE 1.00e-12; NT HIT: D13902.1, EVALUE 4.00e-58; EST_HUMAN HIT: AI183955.1, EVALUE 6.00e-32
ctgtggcagtccagcccttgggggttccctcgccttccacctcctgctcatctgcttcactagctatccctatggtgtcggtgtgcaggccgtggcctgctgtggccatagcacttctggctctgctggtctgcctgggggcgctggtcgacacctgccccatcaaacccgaggctcctggcgaagacgagtccctggaggagctgagccactattatgcttccctgtgccactacctcaacgtggtcaccagacagtggtgggagggtgcagacatgtgg

SEQ ID NO: 18128 - DNA, 222 bp, Homo sapiens
  MAP TO AL121694.1; EXPRESSED IN BT474, SIGNAL =   5; EXPRESSED IN HBL100, SIGNAL = 5.1; EXPRESSED IN HEART, SIGNAL = 6.2; EXPRESSED IN LUNG, SIGNAL =  11; EXPRESSED IN BRAIN, SIGNAL = 5.4; EXPRESSED IN ADULT LIVER, SIGNAL = 5.6; EXPRESSED IN FETAL LIVER, SIGNAL = 7.4; EXPRESSED IN PLACENTA, SIGNAL = 6.7; EXPRESSED IN HELA, SIGNAL = 6.8; EXPRESSED IN BONE MARROW, SIGNAL =   6; SWISSPROT HIT: Q48624, EVALUE 3.20e-01; NT HIT: AJ239558.2, EVALUE 5.30e-01
gtaaactgctatgtcaatttaatggcaattctttttgctctaatctctagtgttataactcagtggaaaatggcttgcttgagaaaaaagcatgcacgttggacagccaagataaaagctgaaatacaagctattacagaaaaaattcagaatgcagaagttagacgaattgaattacttaacgaggtaagagaactgaaagaacttagaattagtccccta

SEQ ID NO: 18129 - DNA, 134 bp, Homo sapiens
  MAP TO AL035684.25; EXPRESSED IN HELA, SIGNAL = 3.1; EXPRESSED IN PLACENTA, SIGNAL = 3.4; EXPRESSED IN HBL100, SIGNAL = 2.5; EXPRESSED IN HEART, SIGNAL = 4.2; EXPRESSED IN LUNG, SIGNAL = 5.5; EXPRESSED IN BONE MARROW, SIGNAL = 3.5; EXPRESSED IN BRAIN, SIGNAL = 3.1; EXPRESSED IN FETAL LIVER, SIGNAL = 3.4; EXPRESSED IN BT474, SIGNAL = 3.1; EXPRESSED IN ADULT LIVER, SIGNAL = 3.6; NT HIT: AF007876.1, EVALUE 3.00e-01; EST_HUMAN HIT: AI683490.1, EVALUE 3.00e-01; SWISSPROT HIT: P49762, EVALUE 3.00e+00
gagtctaaagctgagaaaatatcacattggttgtgcaggaaagaatagacctcagggaaggaacaggagagaagaggaggcgaagaggccgaagagtcaccaggagagagatgttgatgggggtcctggcaagg

SEQ ID NO: 18130 - DNA, 204 bp, Homo sapiens
  MAP TO AP000553.1; EXPRESSED IN BONE MARROW, SIGNAL = 2.3; EXPRESSED IN BT474, SIGNAL = 1.8; EXPRESSED IN HBL100, SIGNAL = 1.7; EXPRESSED IN HEART, SIGNAL = 2.9; EXPRESSED IN LUNG, SIGNAL = 2.6; EXPRESSED IN BRAIN, SIGNAL = 1.9; EXPRESSED IN ADULT LIVER, SIGNAL = 2.1; EXPRESSED IN FETAL LIVER, SIGNAL = 2.2; EXPRESSED IN PLACENTA, SIGNAL = 2.3; EXPRESSED IN HELA, SIGNAL = 1.8; SWISSPROT HIT: P54198, EVALUE 5.70e-01; NT HIT: AL161504.2, EVALUE 1.00e-01
cctgtgtctggagcatggtggttctgcatcgagctgaaactgctgggattcctgtgcttgggacacagcccagcacatcacaggtgacagttccagagcatggaaccggtgtcatgtttccagtcgattcaagggagagcatctgtaggcccgatgtgtggatgtgggacattattatacgaaaaactcagactctaaactttg

SEQ ID NO: 18131 - DNA, 85 bp, Homo sapiens
  MAP TO AF170801.1; EXPRESSED IN BONE MARROW, SIGNAL = 1.7; EXPRESSED IN BRAIN, SIGNAL = 1.6; EXPRESSED IN BT474, SIGNAL = 1.5; EXPRESSED IN HBL100, SIGNAL = 1.4; EXPRESSED IN HEART, SIGNAL = 2.2; EXPRESSED IN LUNG, SIGNAL = 2.1; EXPRESSED IN ADULT LIVER, SIGNAL = 1.4; EXPRESSED IN FETAL LIVER, SIGNAL = 2.2; EXPRESSED IN PLACENTA, SIGNAL = 1.8; EXPRESSED IN HELA, SIGNAL = 1.4; SWISSPROT HIT: Q12038, EVALUE 4.10e+00; EST_HUMAN HIT: BE885087.1, EVALUE 2.60e-01; NT HIT: Z93780.1, EVALUE 2.70e+00
cctgtggccttatagtaaagccagtgttgacagcacagtgggcaaggcagtaagtgtactgcagtcctcgccaagtcaacacaaa

SEQ ID NO: 18132 - DNA, 154 bp, Homo sapiens
  MAP TO AP000427.1; EXPRESSED IN BONE MARROW, SIGNAL = 0.94; EXPRESSED IN BT474, SIGNAL = 1.7; EXPRESSED IN LUNG, SIGNAL = 1.2; EXPRESSED IN BRAIN, SIGNAL = 1.4; EXPRESSED IN ADULT LIVER, SIGNAL = 1.7; EXPRESSED IN FETAL LIVER, SIGNAL = 1.5; EXPRESSED IN PLACENTA, SIGNAL = 1.3; EXPRESSED IN HEART, SIGNAL = 1.5; EXPRESSED IN HELA, SIGNAL = 1.3; EXPRESSED IN HBL100, SIGNAL = 1.1; NT HIT: gi4758229, EVALUE 8.00e-39; EST_HUMAN HIT: BE748918.1, EVALUE 1.00e-38
gtgacttagatacctggcaggaaaataccaatgcatgggaagaagaagaagatgcagcctggcaagcagaagaagttctgaggtatttgagtggcatttatattgcaacctgagtagaagaactagatttcttccctgctgtgtttcaagtcaa

SEQ ID NO: 18133 - DNA, 186 bp, Homo sapiens
  MAP TO AL035661.16; EXPRESSED IN HBL100, SIGNAL = 2.1; EXPRESSED IN HELA, SIGNAL = 3.4; EXPRESSED IN PLACENTA, SIGNAL = 3.4; EXPRESSED IN HEART, SIGNAL =  14; EXPRESSED IN LUNG, SIGNAL = 3.4; EXPRESSED IN BONE MARROW, SIGNAL =   3; EXPRESSED IN BRAIN, SIGNAL = 5.7; EXPRESSED IN BT474, SIGNAL = 3.2; EXPRESSED IN FETAL LIVER, SIGNAL = 4.1; EXPRESSED IN ADULT LIVER, SIGNAL = 5.8; SWISSPROT HIT: Q9ZK81, EVALUE 1.00e+00; EST_HUMAN HIT: AA668298.1, EVALUE 7.00e-03; NT HIT: AL163285.2, EVALUE 1.10e-01
agagatgaatgggaatgcaatgggaattgccacctctgcatccttcaaatctttgatggcagcagtaatctctgccattcctccagtaatgtggtattgctttctgtttactactggtggggggtggttagagaaggcactagtggcttccacatggtctttctcatcataatagccctcactatg

SEQ ID NO: 18134 - DNA, 119 bp, Homo sapiens
  MAP TO AL078583.15; EXPRESSED IN BRAIN, SIGNAL = 1.5; EXPRESSED IN BT474, SIGNAL = 2.4; EXPRESSED IN HEART, SIGNAL = 0.94; NT HIT: AF216854.1, EVALUE 1.40e-02; EST_HUMAN HIT: BE153308.1, EVALUE 1.70e-02; SWISSPROT HIT: P70175, EVALUE 2.30e+00
ttgctgttggtgccaccagcctgaatagtttcccttcacttggtgtctttcctttcctgaaagaaacctcggtggtaaaggccgtggctgagtctgtcaactcaagcctggtcaaaaaa

SEQ ID NO: 18135 - DNA, 122 bp, Homo sapiens
  MAP TO AJ238093.1; EXPRESSED IN FETAL LIVER, SIGNAL =   2; EXPRESSED IN ADULT LIVER, SIGNAL = 1.3; EXPRESSED IN HBL100, SIGNAL = 3.3; EXPRESSED IN HELA, SIGNAL = 1.1; EXPRESSED IN PLACENTA, SIGNAL = 2.8; EXPRESSED IN HEART, SIGNAL = 1.1; EXPRESSED IN BONE MARROW, SIGNAL = 0.98; EXPRESSED IN LUNG, SIGNAL = 1.1; EXPRESSED IN BRAIN, SIGNAL = 1.1; NT HIT: AJ238093.1, EVALUE 1.00e-58; EST_HUMAN HIT: AW876115.1, EVALUE 2.00e-54
atgccagcgcagctggtagacagtgttgctgtggctgtagaaataacactgctcatttttatggaggatattgctgtatgccagttaaagaaattcaagttgaaagacctttaaattttttt

SEQ ID NO: 18136 - DNA, 180 bp, Homo sapiens
  MAP TO AL078634.17; EXPRESSED IN LUNG, SIGNAL =   1; EXPRESSED IN BRAIN, SIGNAL = 1.5; EXPRESSED IN BT474, SIGNAL = 1.9; EXPRESSED IN PLACENTA, SIGNAL = 3.2; EXPRESSED IN BONE MARROW, SIGNAL = 1.2; EXPRESSED IN ADULT LIVER, SIGNAL =   2; EXPRESSED IN FETAL LIVER, SIGNAL = 8.3; EXPRESSED IN HEART, SIGNAL = 1.3; EXPRESSED IN HELA, SIGNAL = 3.3; EXPRESSED IN HBL100, SIGNAL = 5.4; NT HIT: gi11428789, EVALUE 2.00e-64; EST_HUMAN HIT: BE302785.1, EVALUE 3.00e-64; SWISSPROT HIT: O23252, EVALUE 2.20e-02
tgatgacactggggaccatgctcagaatgaagaaaacagcacacagaaagatggagagaaggaaaaaacagaacaagacaagaatcagagcagcagcaagaggaaagctattgtccctggaccagcagagcatcccctacagtacaactacactttctggtattccaggagaacccctag

SEQ ID NO: 18137 - DNA, 120 bp, Homo sapiens
  MAP TO AL049911.1; EXPRESSED IN BT474, SIGNAL = 1.1; EXPRESSED IN FETAL LIVER, SIGNAL = 0.98; EXPRESSED IN PLACENTA, SIGNAL = 1.1; EXPRESSED IN HEART, SIGNAL = 1.1; EXPRESSED IN LUNG, SIGNAL =   1; EST_HUMAN HIT: AA991162.1, EVALUE 4.00e-04; NT HIT: AL163203.2, EVALUE 1.00e-61
gaggcagcaacaaagacagtaactggacaacgagaacgtgatattggcattattgaacgagctccacaagatcaaacaagtaatgacaattttattttttataccaaaataatagaagtg

SEQ ID NO: 18138 - DNA, 168 bp, Homo sapiens
  MAP TO AL096765.4; EXPRESSED IN BONE MARROW, SIGNAL = 4.5; EXPRESSED IN LUNG, SIGNAL = 2.6; EXPRESSED IN BRAIN, SIGNAL = 3.3; EXPRESSED IN BT474, SIGNAL = 3.5; EXPRESSED IN ADULT LIVER, SIGNAL = 2.8; EXPRESSED IN FETAL LIVER, SIGNAL = 3.9; EXPRESSED IN HELA, SIGNAL = 4.3; EXPRESSED IN PLACENTA, SIGNAL =   7; EXPRESSED IN HBL100, SIGNAL = 5.9; EXPRESSED IN HEART, SIGNAL = 3.4; NT HIT: gi4557556, EVALUE 4.00e-47; EST_HUMAN HIT: AW391911.1, EVALUE 6.00e-47; SWISSPROT HIT: Q09472, EVALUE 8.00e-03
taccatccaagcactgccagaaacaatccggtgccgtttcctaaacatcaagcagaagctcccgaacatgcacaccgactacagcaggcccaaatgcttcgcaggaggatggccagcatgcagcggactggtgtggttgggcagcaacagggcctcccttcccccact

SEQ ID NO: 18139 - DNA, 232 bp, Homo sapiens
  MAP TO AL022337.19; EXPRESSED IN BT474, SIGNAL = 1.1; EXPRESSED IN FETAL LIVER, SIGNAL = 1.4; EXPRESSED IN HBL100, SIGNAL = 5.7; EXPRESSED IN HEART, SIGNAL = 1.4; EXPRESSED IN LUNG, SIGNAL =   1; EXPRESSED IN BRAIN, SIGNAL = 1.9; EXPRESSED IN ADULT LIVER, SIGNAL = 1.3; EXPRESSED IN PLACENTA, SIGNAL = 1.4; EXPRESSED IN HELA, SIGNAL = 1.3; EXPRESSED IN BONE MARROW, SIGNAL = 1.7; NT HIT: AF160191.1, EVALUE 1.20e-01; EST_HUMAN HIT: AA436042.1, EVALUE 4.00e-11
gaacctaccccataaggtatttggaaggattaatgagattacagttttttcagcttgtagtaaaatattgataattaggagttgctaccatcttcatcatcatcaccaccatcatccacaccaccaccatcatcttcatcactatttacatcatcattattattttcatctaataaagagaaaactcaatgcttgtcatggctttaatgagcttcatggcatagtgaaaaca

SEQ ID NO: 18140 - DNA, 95 bp, Homo sapiens
  MAP TO AL109918.5; EXPRESSED IN HELA, SIGNAL = 2.4; EXPRESSED IN PLACENTA, SIGNAL = 4.9; EXPRESSED IN HBL100, SIGNAL =  11; EXPRESSED IN HEART, SIGNAL = 2.5; EXPRESSED IN LUNG, SIGNAL = 3.4; EXPRESSED IN BONE MARROW, SIGNAL = 7.2; EXPRESSED IN BRAIN, SIGNAL = 2.6; EXPRESSED IN FETAL LIVER, SIGNAL = 3.6; EXPRESSED IN BT474, SIGNAL = 2.7; EXPRESSED IN ADULT LIVER, SIGNAL = 2.2; NT HIT: AF304163.1, EVALUE 4.00e-21; EST_HUMAN HIT: AA100822.1, EVALUE 2.00e-21
cccggattgtcaatggggaccactaccgtggaggctttgagctcttcatggaggctgtggaacaaaacatgctgcaggagttcctgaaaccggcc

SEQ ID NO: 18141 - DNA, 91 bp, Homo sapiens
  MAP TO AC011499.1; EXPRESSED IN BT474, SIGNAL =  36; EXPRESSED IN PLACENTA, SIGNAL =  21; EXPRESSED IN HBL100, SIGNAL =  65; EXPRESSED IN HEART, SIGNAL =  14; EXPRESSED IN BRAIN, SIGNAL =  10; EXPRESSED IN ADULT LIVER, SIGNAL = 9.5; EXPRESSED IN FETAL LIVER, SIGNAL =  18; EXPRESSED IN HELA, SIGNAL =  60; EXPRESSED IN LUNG, SIGNAL = 8.4; EXPRESSED IN BONE MARROW, SIGNAL =  16; NT HIT: AF257711.1, EVALUE 1.90e-01; EST_HUMAN HIT: AA781201.1, EVALUE 3.00e-04; SWISSPROT HIT: Q29375, EVALUE 1.90e-02
aatccagggcaggcaggaagacagacagcttgctgggatccatgtcacacgcagtcaccatcagctgagccttcttgctgtgtgtgaacat

SEQ ID NO: 18142 - DNA, 161 bp, Homo sapiens
  MAP TO AC009756.1; EXPRESSED IN PLACENTA, SIGNAL = 5.4; EXPRESSED IN BONE MARROW, SIGNAL = 6.9; EXPRESSED IN BRAIN, SIGNAL = 7.4; EXPRESSED IN HELA, SIGNAL = 6.7; EXPRESSED IN HBL100, SIGNAL = 4.1; EXPRESSED IN HEART, SIGNAL = 4.5; EXPRESSED IN LUNG, SIGNAL = 3.9; EXPRESSED IN ADULT LIVER, SIGNAL = 3.1; EXPRESSED IN FETAL LIVER, SIGNAL =   6; EXPRESSED IN BT474, SIGNAL = 4.3; NT HIT: AB046835.1, EVALUE 1.00e-47; EST_HUMAN HIT: AI333427.1, EVALUE 2.00e-47; SWISSPROT HIT: Q05620, EVALUE 6.00e-03
  unsure 24
  unsure 34
  unsure 45
  unsure 55
  unsure 67
  unsure 78
  unsure 85
  unsure 131
acttcagatttcattcacagcttnaccgaacatncagagaattcnatactggtgnagaaaccctacnaaatgtatgcnactgtgnagaaggtttttagaattagttcacagctcattgaacatcagagaanttcacactggtgagaaaccttatgcatgta

SEQ ID NO: 18143 - DNA, 298 bp, Homo sapiens
  MAP TO Z97055.1; EXPRESSED IN BONE MARROW, SIGNAL = 8.2; EXPRESSED IN BT474, SIGNAL = 5.8; EXPRESSED IN LUNG, SIGNAL = 9.1; EXPRESSED IN BRAIN, SIGNAL = 6.4; EXPRESSED IN ADULT LIVER, SIGNAL = 7.5; EXPRESSED IN FETAL LIVER, SIGNAL = 6.9; EXPRESSED IN PLACENTA, SIGNAL =   7; EXPRESSED IN HEART, SIGNAL = 7.7; EXPRESSED IN HELA, SIGNAL = 5.9; EXPRESSED IN HBL100, SIGNAL = 4.6; NT HIT: AJ400877.1, EVALUE 3.00e-12; EST_HUMAN HIT: AI373306.1, EVALUE 1.00e-09; SWISSPROT HIT: P39190, EVALUE 6.90e-02
ctacttcttcttcttcttcttcttcttcttcttcttcttcttcttcttcttcttcttcttcttcctcttcctcttcttcttcttccttcttcttccttcttcttcttcttcttcttcttcttcttcttcttcttcttcttcttcttcttcttcttcttccttcttcttccttcttcttccttcttcttcttctttcttcttctttcttcttcttctttcttcttctttctccttctttcttctttcttcttcttctgatggagtcttgctctgttgcccaggctggagtgcagtggcg

SEQ ID NO: 18144 - DNA, 173 bp, Homo sapiens
  MAP TO AC006001.2; EXPRESSED IN PLACENTA, SIGNAL = 4.6; EXPRESSED IN HELA, SIGNAL =  12; EXPRESSED IN HEART, SIGNAL = 5.4; EXPRESSED IN BONE MARROW, SIGNAL = 4.8; EXPRESSED IN BRAIN, SIGNAL = 7.3; EXPRESSED IN BT474, SIGNAL =  14; EXPRESSED IN HBL100, SIGNAL = 8.5; EXPRESSED IN LUNG, SIGNAL = 5.5; EXPRESSED IN ADULT LIVER, SIGNAL = 2.4; EXPRESSED IN FETAL LIVER, SIGNAL = 6.4; EST_HUMAN HIT: AI674184.1, EVALUE 5.00e-93; NT HIT: AJ001455.1, EVALUE 1.60e+00; SWISSPROT HIT: Q13829, EVALUE 1.00e-06
ccaaagtgtgtgccatctcggtcgatgaagtaccggccctcggagtccgtggggatgtagtgccgcccactgaacatggctgccaacatggtgtcttcgtagcaccgcagtgtggacaggcgtgtagtgaagtgagcccctccgatgttaaggggaacaacctcaggaaactg

SEQ ID NO: 18145 - DNA, 309 bp, Homo sapiens
  MAP TO AC007728.1; EXPRESSED IN BT474, SIGNAL = 0.98; EXPRESSED IN FETAL LIVER, SIGNAL = 0.92; EXPRESSED IN HBL100, SIGNAL = 1.5; EXPRESSED IN HELA, SIGNAL = 1.3; EXPRESSED IN PLACENTA, SIGNAL =   1; EXPRESSED IN HEART, SIGNAL = 0.89; EXPRESSED IN LUNG, SIGNAL =   1; EXPRESSED IN BONE MARROW, SIGNAL = 1.3; EXPRESSED IN BRAIN, SIGNAL = 1.4; EST_HUMAN HIT: AI130924.1, EVALUE 0.00e+00; SWISSPROT HIT: Q10427, EVALUE 1.70e-01; NT HIT: gi11430965, EVALUE 0.00e+00
cctggtggctgaccgatccaacggattaccccatagaaaggagggttctccttaacttcagccaatgagcccacttctagaccatgtgagttcccaggaggcatggccaagggtggactctcttggacgggtgcagtgtttagctcttccattacagactgggctgacagagaaagtggactgtggccaatacttccattggtattgggcatcttggtgagactgaatggtaaagagtggaatctgttctcggtggtcagtgagttcacaggaggaggctggagtggtggtgaagaacggtcaaagtct

SEQ ID NO: 18146 - DNA, 135 bp, Homo sapiens
  MAP TO AC006042.2; EXPRESSED IN HELA, SIGNAL = 1.4; EXPRESSED IN HEART, SIGNAL = 0.97; EXPRESSED IN PLACENTA, SIGNAL = 1.2; NT HIT: U66759.1, EVALUE 4.70e+00; EST_HUMAN HIT: AW183204.1, EVALUE 3.00e-70
cagcaagttcggacctctagtacaataaggcgaacctcctctttggatacaataacaggaccttacctcacaggacagtggccacgggatcctcatgttcactacccttcatgcatgaaagacaaagctactcag

SEQ ID NO: 18147 - DNA, 158 bp, Homo sapiens
  MAP TO AF165423.1; EXPRESSED IN ADULT LIVER, SIGNAL =  16; EXPRESSED IN BT474, SIGNAL = 8.1; EXPRESSED IN FETAL LIVER, SIGNAL = 9.2; EXPRESSED IN HBL100, SIGNAL =  10; EXPRESSED IN PLACENTA, SIGNAL =  15; EXPRESSED IN HELA, SIGNAL =  16; EXPRESSED IN HEART, SIGNAL = 9.4; EXPRESSED IN BONE MARROW, SIGNAL = 9.2; EXPRESSED IN LUNG, SIGNAL = 7.1; EXPRESSED IN BRAIN, SIGNAL =  16; EST_HUMAN HIT: AI027117.1, EVALUE 4.00e-41; SWISSPROT HIT: P42097, EVALUE 2.20e+00; NT HIT: D50561.1, EVALUE 8.00e-39
acgtccagtcatagaaccttcccgtgaacttcatgatgacatagattctattgctcacatgttcgttgctgaccttctccttattatcaccctgactcctactacattcctttttgctaaaataataaaaataataatcaataaaaactgagggaact

SEQ ID NO: 18148 - DNA, 158 bp, Homo sapiens
  MAP TO AL050343.14; EXPRESSED IN BONE MARROW, SIGNAL = 1.7; EXPRESSED IN LUNG, SIGNAL = 1.9; EXPRESSED IN BRAIN, SIGNAL = 2.2; EXPRESSED IN BT474, SIGNAL =   3; EXPRESSED IN ADULT LIVER, SIGNAL = 1.7; EXPRESSED IN FETAL LIVER, SIGNAL = 2.3; EXPRESSED IN HBL100, SIGNAL = 2.7; EXPRESSED IN HELA, SIGNAL = 3.3; EXPRESSED IN PLACENTA, SIGNAL = 4.5; EXPRESSED IN HEART, SIGNAL =   4; EST_HUMAN HIT: AI685321.1, EVALUE 4.00e-84; SWISSPROT HIT: O43847, EVALUE 9.00e-17; NT HIT: X93209.1, EVALUE 5.00e-65
ctatgattgacaagtaccaggctttgatggacggcctttcccttgagtctctgctgagcttcgtcaaagaattcaaatcccagctctttgtggagggcctggtacaagggaatgtcacaagcacagtgagtgtgagatgctctgtaggccaggtctga

SEQ ID NO: 18149 - DNA, 157 bp, Homo sapiens
  MAP TO AC010896.1; EXPRESSED IN HBL100, SIGNAL = 2.3; EXPRESSED IN HELA, SIGNAL = 2.2; EXPRESSED IN HEART, SIGNAL =  17; EXPRESSED IN LUNG, SIGNAL = 1.4; EXPRESSED IN BRAIN, SIGNAL = 2.2; EXPRESSED IN ADULT LIVER, SIGNAL =   2; EXPRESSED IN PLACENTA, SIGNAL = 2.3; EXPRESSED IN BONE MARROW, SIGNAL = 1.6; EXPRESSED IN BT474, SIGNAL = 3.7; EXPRESSED IN FETAL LIVER, SIGNAL = 2.8; EST_HUMAN HIT: AU118266.1, EVALUE 2.00e-83; NT HIT: gi4504326, EVALUE 1.00e-83; SWISSPROT HIT: P55084, EVALUE 3.00e-23
accagtgagaccatgggccactctgcagaccgactggccgctgcctttgctgtttctcggctggaacaggatgaatatgcactgcgctctcacagtctagccaagaaggcacaggatgaaggactcctttctgatgtggtacccttcaaagtaccag

SEQ ID NO: 18150 - DNA, 80 bp, Homo sapiens
  MAP TO AL078623.21; EXPRESSED IN BT474, SIGNAL = 0.98; EXPRESSED IN FETAL LIVER, SIGNAL = 1.1; EXPRESSED IN PLACENTA, SIGNAL = 1.1; EXPRESSED IN HBL100, SIGNAL = 1.5; EXPRESSED IN HELA, SIGNAL =   1; EXPRESSED IN HEART, SIGNAL = 1.3; EXPRESSED IN BONE MARROW, SIGNAL = 0.93; EXPRESSED IN LUNG, SIGNAL = 1.3; EXPRESSED IN BRAIN, SIGNAL = 1.8; NT HIT: AL163209.2, EVALUE 4.10e-02; EST_HUMAN HIT: AA757115.1, EVALUE 6.00e-35
aatgccaattccttgctgtttcctcacatggcagaaagagggtgagagagctctctggagtccctattataaaaacactg

SEQ ID NO: 18151 - DNA, 182 bp, Homo sapiens
  MAP TO AF165423.1; EXPRESSED IN PLACENTA, SIGNAL =   3; EXPRESSED IN HBL100, SIGNAL = 4.6; EXPRESSED IN HEART, SIGNAL = 1.9; EXPRESSED IN BONE MARROW, SIGNAL = 1.5; EXPRESSED IN LUNG, SIGNAL = 2.2; EXPRESSED IN BRAIN, SIGNAL = 3.3; EXPRESSED IN BT474, SIGNAL = 3.2; EXPRESSED IN FETAL LIVER, SIGNAL = 4.5; EXPRESSED IN ADULT LIVER, SIGNAL = 3.5; EXPRESSED IN HELA, SIGNAL = 8.9; EST_HUMAN HIT: BE908025.1, EVALUE 1.00e-82; SWISSPROT HIT: P05142, EVALUE 7.40e-01
gtccatctgcaagatgtgccacccccggacatacatcttcagcgactgtcacagccgggtcctcgagcagctccgagggaatgtccttctcaatggcctctcattagaggcagacatcactgccaacttagatagccccagggtgacagtggcccagctggactgggacgtagcgacggtcc

SEQ ID NO: 18152 - DNA, 479 bp, Homo sapiens
  MAP TO AC010680.2; EXPRESSED IN HEART, SIGNAL = 9.1; EXPRESSED IN BRAIN, SIGNAL = 3.4; EXPRESSED IN BT474, SIGNAL = 5.3; EXPRESSED IN ADULT LIVER, SIGNAL = 1.4; NT HIT: AJ277892.1, EVALUE 0.00e+00; SWISSPROT HIT: P72204, EVALUE 1.00e+00; EST_HUMAN HIT: AA196127.1, EVALUE 0.00e+00
ctcctgaaatcattgatgtatcctctaaagctgaagaagtaaaaataatgactataaccagaaagaaagaggttcagaaagaaaaagaagctgtgtatgagaaaaagcaagcagtccacaaggagaagagagtcttcattgaatctttcgaagaaccttatgacgaactggaggtagaaccatacacagagccatttgaacaaccttattatgaagaaccagatgaagactatgaagagattaaggtagaagctaaaaaagaagttcacgaggaatgggaagaagattttgaagaagggcaagaatactatgaaagggaagaaggctatgacgaaggggaggaagagtgggaagaggcttaccaagaaagggaagtaattcaagttcaaaaggaggtctatgaaggtatgtataaactgaatgacttgtttccctcttttcttcatttttgctcagttcattaaattttcaatgctatg

SEQ ID NO: 18153 - DNA, 138 bp, Homo sapiens
  MAP TO AF188032.1; EXPRESSED IN BT474, SIGNAL = 2.7; EXPRESSED IN FETAL LIVER, SIGNAL =   4; EXPRESSED IN PLACENTA, SIGNAL = 3.5; EXPRESSED IN HBL100, SIGNAL = 2.9; EXPRESSED IN HEART, SIGNAL = 3.1; EXPRESSED IN LUNG, SIGNAL = 3.2; EXPRESSED IN BRAIN, SIGNAL = 3.3; EXPRESSED IN ADULT LIVER, SIGNAL = 4.6; EXPRESSED IN HELA, SIGNAL = 3.3; EXPRESSED IN BONE MARROW, SIGNAL = 4.4; SWISSPROT HIT: P56434, EVALUE 2.30e+00; NT HIT: AL163207.2, EVALUE 1.00e-03; EST_HUMAN HIT: H06616.1, EVALUE 2.00e-03
tggctggagctggagtggctgaaatgcaaagagcagcgtcctgaggttgagcaaggcagcagggccctggacctggcccacaaagaaaccactcagtcttcctacaactctggaactgtgatgggaggggctgccatg

SEQ ID NO: 18154 - DNA, 160 bp, Homo sapiens
  MAP TO AP000459.2; EXPRESSED IN BT474, SIGNAL =  73; EXPRESSED IN FETAL LIVER, SIGNAL =  28; EXPRESSED IN HBL100, SIGNAL =  83; EXPRESSED IN HEART, SIGNAL =  19; EXPRESSED IN LUNG, SIGNAL =  14; EXPRESSED IN BRAIN, SIGNAL =  59; EXPRESSED IN ADULT LIVER, SIGNAL = 7.3; EXPRESSED IN PLACENTA, SIGNAL =  24; EXPRESSED IN HELA, SIGNAL =  56; EXPRESSED IN BONE MARROW, SIGNAL =  30; EST_HUMAN HIT: AW162737.1, EVALUE 8.00e-27; SWISSPROT HIT: Q40831, EVALUE 5.00e-03; NT HIT: K00557.1, EVALUE 2.00e-24
atgtatgccaagttcctttgttcagtattccgtgggtgaacgggtggaggaaggagagttttccgaggcccaccaggacatggttgtccttaagaaggattatgaagtggttagtgtggattctgttgaagaagagggtgagaaggaaggagaggaattc

SEQ ID NO: 18155 - DNA, 293 bp, Homo sapiens
  MAP TO AC011342.1; EXPRESSED IN HBL100, SIGNAL = 1.2; EXPRESSED IN BONE MARROW, SIGNAL = 1.8; EXPRESSED IN BRAIN, SIGNAL = 1.6; EXPRESSED IN FETAL LIVER, SIGNAL = 1.2; EXPRESSED IN HELA, SIGNAL = 0.91; EXPRESSED IN HEART, SIGNAL = 0.96; EXPRESSED IN LUNG, SIGNAL =   1; EXPRESSED IN BT474, SIGNAL = 1.4; NT HIT: gi4506060, EVALUE 6.10e-01; EST_HUMAN HIT: AI208756.1, EVALUE 0.00e+00; SWISSPROT HIT: Q03400, EVALUE 1.70e+00
gtgtctcagccatcctcatcccccgcctggacttggtcatctccctggtaggctccgtgagcagcagcgccctggctctcatcatcccagccctcctggagatcgtcatcttttactctgaggacatgagctgtgtcaccattgccaaggacatcatgattagcatcgtgggccttttagggtgtatatttgggacataccaagccctctatgagttgccccaacccatcagccattccatggccaactccacaggtgtccatgcataattatctgtttttattctaatagct

SEQ ID NO: 18156 - DNA, 290 bp, Homo sapiens
  MAP TO AP000514.1; EXPRESSED IN HELA, SIGNAL =  45; EXPRESSED IN PLACENTA, SIGNAL =  14; EXPRESSED IN HBL100, SIGNAL =  28; EXPRESSED IN HEART, SIGNAL = 8.2; EXPRESSED IN LUNG, SIGNAL = 6.2; EXPRESSED IN BONE MARROW, SIGNAL =  33; EXPRESSED IN BRAIN, SIGNAL =  13; EXPRESSED IN BT474, SIGNAL =  23; EXPRESSED IN FETAL LIVER, SIGNAL =  11; EXPRESSED IN ADULT LIVER, SIGNAL = 4.2; SWISSPROT HIT: P28746, EVALUE 8.00e-51; NT HIT: AF052578.1, EVALUE 0.00e+00; EST_HUMAN HIT: BE895420.1, EVALUE 0.00e+00
tcacaggtcatcatcctcgtccgggagagcagttgtctgagcaacctctaagtcgtgctcatactgtgctgccaaagctgggtccatgacaacttctggtggggcgagagcaggcatggcaacaaattccaagttagggtctccaatgagcttcctagcaagccagaggaagggcttttcaaagttatagttacttttggcagaaatgtcgtagtactgaagattcttctttcggtggaagacaatggatttcgccttcactttcctgtccttaatatccactttgttgc

SEQ ID NO: 18157 - DNA, 213 bp, Homo sapiens
  MAP TO AL109752.4; EXPRESSED IN ADULT LIVER, SIGNAL =  75; EXPRESSED IN BT474, SIGNAL = 4.9e+02; EXPRESSED IN FETAL LIVER, SIGNAL = 1.6e+02; EXPRESSED IN HELA, SIGNAL = 3.9e+02; EXPRESSED IN PLACENTA, SIGNAL = 3.6e+02; EXPRESSED IN HBL100, SIGNAL = 3.7e+02; EXPRESSED IN HEART, SIGNAL =  90; EXPRESSED IN BONE MARROW, SIGNAL = 2e+02; EXPRESSED IN LUNG, SIGNAL = 1.3e+02; EXPRESSED IN BRAIN, SIGNAL = 1.2e+02; SWISSPROT HIT: Q90835, EVALUE 5.00e-31; NT HIT: gi11418792, EVALUE 1.00e-100; EST_HUMAN HIT: BF685721.1, EVALUE 1.00e-102
atctcaggttgactgtgctgtcctgattgttgctgctggtgttggtgaatttgaagctggtatctccaagaatgggcagaccagtgagcatgcccttctggcttacacactggatgtgaaacaactaattgttggtgttaacaaaatggattccactgagccaccctgcagccagaagagatatgaggaaatcgttaaggaagtcagcactta

SEQ ID NO: 18158 - DNA, 139 bp, Homo sapiens
  MAP TO AL050402.16; EXPRESSED IN HEART, SIGNAL = 3.1; EXPRESSED IN BT474, SIGNAL = 2.4; EST_HUMAN HIT: AI024877.1, EVALUE 8.00e-73
atgaacacaagaaataattgccaaattatgcacgttgagttggttttcctgagtctcgagcccttaaaagataaagaagaaacacagcgacgagagtgtctaaaacagacaaacaacctcttggctctggtcgcccaag

SEQ ID NO: 18159 - DNA, 160 bp, Homo sapiens
  MAP TO AC011481.1; EXPRESSED IN BT474, SIGNAL = 5.7; EXPRESSED IN PLACENTA, SIGNAL =  13; EXPRESSED IN HBL100, SIGNAL = 7.5; EXPRESSED IN HEART, SIGNAL = 7.1; EXPRESSED IN BRAIN, SIGNAL = 8.3; EXPRESSED IN ADULT LIVER, SIGNAL =  32; EXPRESSED IN FETAL LIVER, SIGNAL =  33; EXPRESSED IN HELA, SIGNAL =  11; EXPRESSED IN LUNG, SIGNAL = 6.1; EXPRESSED IN BONE MARROW, SIGNAL = 8.5; SWISSPROT HIT: P02655, EVALUE 1.00e-24; NT HIT: X05151.1, EVALUE 3.00e-85; EST_HUMAN HIT: AV655763.1, EVALUE 4.00e-85
ctgagtttctcatctacagcgggcaggtatgtcttctcgtacaggttctgggcggctgtctttgctgactcccagtaactggagagagattccttcacctgggtgaggaaggtcgggctaggcatctcatcttgctggggctgttgggtcccctggacct

SEQ ID NO: 18160 - DNA, 208 bp, Homo sapiens
  MAP TO AC010686.1; EXPRESSED IN BONE MARROW, SIGNAL =   2; EXPRESSED IN BT474, SIGNAL = 5.4; EXPRESSED IN HBL100, SIGNAL = 8.9; EXPRESSED IN HEART, SIGNAL = 2.1; EXPRESSED IN LUNG, SIGNAL = 1.5; EXPRESSED IN BRAIN, SIGNAL = 2.1; EXPRESSED IN ADULT LIVER, SIGNAL = 1.5; EXPRESSED IN FETAL LIVER, SIGNAL = 2.5; EXPRESSED IN PLACENTA, SIGNAL = 3.6; EXPRESSED IN HELA, SIGNAL =   5; NT HIT: J04977.1, EVALUE 2.00e-99; SWISSPROT HIT: P13010, EVALUE 2.00e-30; EST_HUMAN HIT: AU127101.1, EVALUE 3.00e-99
gtgtttgctgagaacaaggatgagattgctttagtcctgtttggtacagatggcactgacaatcccctttctggtggggatcagtatcagaacatcacagtgcacagacatctgatgctaccagattttgatttgctggaggacattgaaagcaaaatccaaccaggttctcaacaggctgactgtatcctttttctgccagagaaga

SEQ ID NO: 18161 - DNA, 124 bp, Homo sapiens
  MAP TO AL078621.19; EXPRESSED IN PLACENTA, SIGNAL = 1.1; EXPRESSED IN HBL100, SIGNAL = 1.4; EXPRESSED IN HELA, SIGNAL = 1.3; EXPRESSED IN HEART, SIGNAL = 2.4; EXPRESSED IN LUNG, SIGNAL = 1.6; EXPRESSED IN BRAIN, SIGNAL = 1.3; EXPRESSED IN FETAL LIVER, SIGNAL = 2.6; EXPRESSED IN ADULT LIVER, SIGNAL = 1.7; NT HIT: L40933.1, EVALUE 5.00e-64; EST_HUMAN HIT: AI685066.1, EVALUE 9.00e-64; SWISSPROT HIT: P38652, EVALUE 6.00e-08
acacctgcggtctcctgcattatcaggaagatcaaggcagctggtggaatcattctaacagccagccactgccctggaggaccagggggagagtttggagtgaagtttaatgttgccaatggag

SEQ ID NO: 18162 - DNA, 173 bp, Homo sapiens
  MAP TO AL121577.1; EXPRESSED IN FETAL LIVER, SIGNAL = 0.92; EXPRESSED IN BT474, SIGNAL = 1.2; EXPRESSED IN HEART, SIGNAL = 3.3; EXPRESSED IN BRAIN, SIGNAL = 1.1; NT HIT: AB035967.1, EVALUE 1.00e-01; SWISSPROT HIT: P47735, EVALUE 5.10e+00; EST_HUMAN HIT: W26539.1, EVALUE 1.00e-81
accatgagcatctcaagccctcagatcgggaattggtatggcagagcgtggactttctcatggaacaggaacaaaactgcaactggccacctgagctcggcgagaccatcgagagagagaatgagctggtgcactggtgccatggcgctccaggtctcacacactctgttacc

SEQ ID NO: 18163 - DNA, 175 bp, Homo sapiens
  MAP TO AC006371.2; EXPRESSED IN BONE MARROW, SIGNAL = 2.8; EXPRESSED IN LUNG, SIGNAL = 1.6; EXPRESSED IN BT474, SIGNAL = 1.5; EXPRESSED IN PLACENTA, SIGNAL = 3.3; EXPRESSED IN HBL100, SIGNAL = 3.7; EXPRESSED IN HEART, SIGNAL = 2.1; EXPRESSED IN BRAIN, SIGNAL = 1.9; EXPRESSED IN ADULT LIVER, SIGNAL = 5.9; EXPRESSED IN FETAL LIVER, SIGNAL = 1.7; EXPRESSED IN HELA, SIGNAL = 2.7; NT HIT: AB008681.1, EVALUE 4.00e-41; SWISSPROT HIT: P32074, EVALUE 1.50e-01; EST_HUMAN HIT: AI821407.1, EVALUE 2.00e-13
agccacattattttcattaaacgccagggtttggtctaacaaaagcatgacatctatccaattgaggtcaaagatttgccctagaccatgtaggacatctatataactatcaggatcatctgaaaacttccgcagatctaccttgatctgctttaaatcagagaggaagaagggg

SEQ ID NO: 18164 - DNA, 118 bp, Homo sapiens
  MAP TO AP000555.1; EXPRESSED IN BONE MARROW, SIGNAL = 2.8; EXPRESSED IN BT474, SIGNAL =   6; EXPRESSED IN HEART, SIGNAL = 2.9; EXPRESSED IN HBL100, SIGNAL = 6.8; EXPRESSED IN LUNG, SIGNAL = 2.2; EXPRESSED IN BRAIN, SIGNAL = 7.3; EXPRESSED IN ADULT LIVER, SIGNAL = 2.2; EXPRESSED IN FETAL LIVER, SIGNAL = 2.9; EXPRESSED IN PLACENTA, SIGNAL =   4; EXPRESSED IN HELA, SIGNAL = 5.1; NT HIT: Z11695.1, EVALUE 2.00e-60; EST_HUMAN HIT: AI953700.1, EVALUE 3.00e-60
agacgtggacaagtgctccccaaggattccggagacggaagcacttgctgcaggctgcaacatcagccaaggtatttccacaagctcctgctctggggaaacagttatggtcaaaagg

SEQ ID NO: 18165 - DNA, 249 bp, Homo sapiens
  MAP TO AL096869.1; EXPRESSED IN PLACENTA, SIGNAL = 3.3; EXPRESSED IN HELA, SIGNAL =   3; EXPRESSED IN BONE MARROW, SIGNAL = 2.6; EXPRESSED IN BRAIN, SIGNAL = 2.3; EXPRESSED IN BT474, SIGNAL =   5; EXPRESSED IN HBL100, SIGNAL = 6.1; EXPRESSED IN HEART, SIGNAL = 4.5; EXPRESSED IN LUNG, SIGNAL = 2.4; EXPRESSED IN ADULT LIVER, SIGNAL = 1.5; EXPRESSED IN FETAL LIVER, SIGNAL = 3.2; NT HIT: AB032966.1, EVALUE 9.00e-06; EST_HUMAN HIT: N44873.1, EVALUE 1.00e-120; SWISSPROT HIT: Q58741, EVALUE 1.00e-03
gccctgatccttcaccagctaggccgctacagtctggcggagaagatcctccgggacgcggtgcaggtgaactcgacagcccacgaggtctggaacgggctgggcgaggtcctccaagctcagggcaacgatgcggcggctacggagtgcttcctgacagccttggagctggaggccagcagccccgccgtgcccttcaccatcatcccccgcgtgctctgagcaggcgcctgccagcctcacctgccg

SEQ ID NO: 18166 - DNA, 385 bp, Homo sapiens
  MAP TO AC010083.1; EXPRESSED IN BT474, SIGNAL = 2.3; EXPRESSED IN FETAL LIVER, SIGNAL =   1; EXPRESSED IN PLACENTA, SIGNAL = 0.97; EXPRESSED IN BONE MARROW, SIGNAL = 1.3; EXPRESSED IN BRAIN, SIGNAL =   5; EXPRESSED IN HBL100, SIGNAL = 1.6; EXPRESSED IN HEART, SIGNAL = 1.4; EXPRESSED IN LUNG, SIGNAL = 1.1; NT HIT: gi4505646, EVALUE 0.00e+00; EST_HUMAN HIT: D53087.1, EVALUE 0.00e+00; SWISSPROT HIT: P16519, EVALUE 7.00e-65
caggcttctctccacggcttcgtccagctcttcctccagctcctctttcttggacatggccaacttggactggtaatcccgcaccacctggtcgatgtacggggcactctgagtgccatgcagcatcagggtccactccttcagcacccccttctgcggggcgctgccgacaaatcccagctccagggtccaggtgcctcgggcgtcttccccccacgtgtgagtggtcatgaaaggccacttgtcaaagcccaccttggagtcgtcatcccttggacgccggctcagcaaaatggacttggtgcccataggggaagtcatgttgatgttcaggtctcctcttctggttgcgttgaccgtgatgacagcctggacatgctccagg

SEQ ID NO: 18167 - DNA, 189 bp, Homo sapiens
  MAP TO Z99716.4; EXPRESSED IN BT474, SIGNAL =  26; EXPRESSED IN ADULT LIVER, SIGNAL =   7; EXPRESSED IN PLACENTA, SIGNAL =  15; EXPRESSED IN BRAIN, SIGNAL =  11; EXPRESSED IN BONE MARROW, SIGNAL = 5.9; EXPRESSED IN FETAL LIVER, SIGNAL =  12; EXPRESSED IN HEART, SIGNAL =  25; EXPRESSED IN HELA, SIGNAL =  38; EXPRESSED IN HBL100, SIGNAL =  35; EXPRESSED IN LUNG, SIGNAL = 4.8; EST_HUMAN HIT: BF691419.1, EVALUE 9.00e-65; NT HIT: gi11421392, EVALUE 4.00e-66; SWISSPROT HIT: P51881, EVALUE 3.00e-22
agagcctgggtgggggaagtatctgatgacactggccaggttaccgcaccaggacaggactccgtgctccttgggaatacagaccatgcagtctctaatgcccttgtattgcttatctgcagtgatctgcttgctggcatgctgcacctgtagcagcagcttgacccgctcgatgggtgctaccgccat

SEQ ID NO: 18168 - DNA, 1683 bp, Homo sapiens
  MAP TO AL049732.9; EXPRESSED IN BONE MARROW, SIGNAL = 2.3; EXPRESSED IN LUNG, SIGNAL = 1.6; EXPRESSED IN BT474, SIGNAL = 4.2; EXPRESSED IN PLACENTA, SIGNAL =   2; EXPRESSED IN BRAIN, SIGNAL = 4.1; EXPRESSED IN ADULT LIVER, SIGNAL = 2.8; EXPRESSED IN FETAL LIVER, SIGNAL = 3.3; EXPRESSED IN HEART, SIGNAL = 2.5; EXPRESSED IN HELA, SIGNAL = 2.7; EXPRESSED IN HBL100, SIGNAL = 3.9; EST_HUMAN HIT: BE894856.1, EVALUE 0.00e+00; NT HIT: gi11420066, EVALUE 0.00e+00; SWISSPROT HIT: Q12816, EVALUE 0.00e+00
ggtagcaccactaaagcaggcactggtgctaggagggccaccaaagcataggttagtattagatgcactgccaaagcagaggctggtgctgggagctccaccaaaacagaggctggtgccatgagcaccaccaaagctgacactggtgctgggagcagcaccaaagccaatgctgttgctgggagtaccaccgaagtcagcagcggtactaagtgccccaccgaagccagcactggtgctaaatgcaccgccaaagccagggttggtgattggtgcaccactgaagcaagcactggtgctgacagcaccactgaagctggcactggtgctgacggcacagccaaagctggcattggtgttgagtgcaccaccaaagccagcactggtgctgggagagccaccaaaacagacgctggtgcttagtgtaccaccaaagtcagtgttggtgctgacagcaccaccataaccagcattggtgttgagtgcactgccaaagctgacactggtgccaggagagccaccaaagcagacactggtgcttagtgtaccgccaaagtcagcactggtgctcatagcaccaccaaaaccagtactggtgttgagcacactgccaaagctggcactggtgttgagagcaccaccaaagccagcaccagtgctgggagagccatcaaagcagatgctggtacttagtgtaccaccaaaattggcactggtgctggaagagccaccaaaggagacactggtgctaagtgtgcctccaaagccagtgctggtgcagggagagccaccgaagcagatactggtactgagtgtaccaccaaagctaccactggagctgggagagccaccaaaacagacactggtgctgagtatgcctccaaagccagtgctggtgctaagcgcactactgaagactgtgctcgttgtgggtgcactgccaaagctggtgctagtgctgagtacaccactaaagccagccgtggtgctgagtgtgcctccaaagccagagctggctccaccactgaaagtggcactggtgctgagtgggccactaaaactagagctgactccaccactaaagctggcactggtacaaggcatgccaccaaagctaatgctggcttcactgctgaaactagtgctggtgctgtgtgcacaaccaaagctaatgctggctgcgctgctgaagctggagctagtgctcagtgtaccaccaaagctaatgctggctgtattgctgaagctggcactggtgctgggtgcaacaccaaaggtaatgccaggtccaccactgaagccaccactggagctgggtgcaccattgaagctaatactagcaccatcgctgaagccagccctggtactagctcctctgctgaagttgacgttggtgctggcatctgcattttcttgggctctggcctcaatttcaaatgaaaatctgctccaggcctgagcatcatcgcctaactcttcccttgttaggcagtcgatatccatgtcatcccaattccagggcccagccacagcttcctctccaatccccatttgggctcttgcctcagccctggcttcagcctcagccacagccacagctgcagcttggacttccatctccactgcctcgcggtactgcacagcccagtccttggggtctttcttctgcacctgaaatgggga

SEQ ID NO: 18169 - DNA, 203 bp, Homo sapiens
  MAP TO AL031427.15; EXPRESSED IN PLACENTA, SIGNAL =  25; EXPRESSED IN HBL100, SIGNAL =  55; EXPRESSED IN HELA, SIGNAL =  36; EXPRESSED IN HEART, SIGNAL = 7.7; EXPRESSED IN BONE MARROW, SIGNAL =  13; EXPRESSED IN BT474, SIGNAL =  21; EXPRESSED IN LUNG, SIGNAL = 6.4; EXPRESSED IN BRAIN, SIGNAL =  11; EXPRESSED IN ADULT LIVER, SIGNAL =  13; EXPRESSED IN FETAL LIVER, SIGNAL =  18; NT HIT: gi5031692, EVALUE 3.00e-82; EST_HUMAN HIT: BE867771.1, EVALUE 1.00e-85
agtccttaatttgattgctgttgtccattataatttccaaaatcattatagttcccaccaccaccatagttaccacggccaaaatttcctccttcattgtaaccatcatatcctccaccaccgccaccatatccaccaccttggtttccacatcctggtccaccacgaccatagccccctctactactataaccaggaccgcc

SEQ ID NO: 18170 - DNA, 163 bp, Homo sapiens
  MAP TO AP000548.1; EXPRESSED IN BT474, SIGNAL = 0.99; EXPRESSED IN FETAL LIVER, SIGNAL = 3.1; EXPRESSED IN PLACENTA, SIGNAL = 1.3; EXPRESSED IN HEART, SIGNAL = 0.86; NT HIT: gi11430598, EVALUE 2.00e-80; EST_HUMAN HIT: R78133.1, EVALUE 4.00e-87; SWISSPROT HIT: P56180, EVALUE 3.00e-12
actatttggagttttcctggtcttactggatgtcactctcgtccttgccgacctaattttcactgacagcaaactttatattccttcggagtatcgttctatttctctagctattgccttattttttctcatggatgttcttcttcgagtatttgtagaaggg

SEQ ID NO: 18171 - DNA, 483 bp, Homo sapiens
  MAP TO AJ238093.1; EXPRESSED IN LUNG, SIGNAL = 7.5; EXPRESSED IN BT474, SIGNAL = 4.9; EXPRESSED IN PLACENTA, SIGNAL =  29; EXPRESSED IN BONE MARROW, SIGNAL = 6.8; EXPRESSED IN BRAIN, SIGNAL = 4.6; EXPRESSED IN ADULT LIVER, SIGNAL = 7.5; EXPRESSED IN FETAL LIVER, SIGNAL = 7.2; EXPRESSED IN HEART, SIGNAL = 5.2; EXPRESSED IN HELA, SIGNAL = 7.4; EXPRESSED IN HBL100, SIGNAL = 4.3; NT HIT: AJ238093.1, EVALUE 0.00e+00; EST_HUMAN HIT: BF575588.1, EVALUE 0.00e+00; SWISSPROT HIT: P51825, EVALUE 1.00e-48
caaactcttccccggacgcaaggaagcagcaaggttcatggcagcagcaataacagtaaaggctattgcccagccaaatctcccaaggacctagcagtgaaagtccatgataaagagacccctcaagacagtttggtggcccctgcccagccgccttctcagacatttccacctccctccctcccctcaaaaagtgttgcaatgcagcagaagcccacggcttatgtccggcccatggatggtcaagatcaggcccctagtgaatcccctgaactgaaaccactgccggaggactatcgacagcagacctttgaaaaaacagacttgaaagtgcctgccaaagccaagctcaccaaactgaagatgccttctcagtcagttgaggtgtgtggaatttcttatcttggggaattccaattcgaagacggatttgagatgaaaatgtccggagatgtggggcaaggtggggaggttagtccatgg

SEQ ID NO: 18172 - DNA, 164 bp, Homo sapiens
  MAP TO AC004955.2; EXPRESSED IN PLACENTA, SIGNAL = 1.6; EXPRESSED IN HBL100, SIGNAL = 1.7; EXPRESSED IN HELA, SIGNAL =   2; EXPRESSED IN HEART, SIGNAL = 0.94; EXPRESSED IN BRAIN, SIGNAL = 1.1; EXPRESSED IN FETAL LIVER, SIGNAL = 1.2; EXPRESSED IN BT474, SIGNAL = 1.9; SWISSPROT HIT: P55001, EVALUE 1.30e+00; EST_HUMAN HIT: R66568.1, EVALUE 2.00e-87; NT HIT: M98832.1, EVALUE 3.80e-01
ctggcttttcacactactcttcttgatcatgttggtgttgaaactggatgagaaagcaccttggaactggttcctcatattcattccagtctggatatttgatactatccttcttgtcctgctgattgtgaaaatggctgggcggtgtaagtctggctttgacc

SEQ ID NO: 18173 - DNA, 195 bp, Homo sapiens
  MAP TO Z84718.2; EXPRESSED IN FETAL LIVER, SIGNAL = 1.5; EXPRESSED IN ADULT LIVER, SIGNAL = 3.4; EXPRESSED IN PLACENTA, SIGNAL = 1.8; EXPRESSED IN HELA, SIGNAL = 2.4; EXPRESSED IN HEART, SIGNAL =   3; EXPRESSED IN BT474, SIGNAL = 2.6; EXPRESSED IN HBL100, SIGNAL = 7.2; EXPRESSED IN BRAIN, SIGNAL = 1.9; EXPRESSED IN LUNG, SIGNAL = 2.1; EXPRESSED IN BONE MARROW, SIGNAL = 1.1; NT HIT: AF240786.1, EVALUE 1.00e-106; EST_HUMAN HIT: AI281103.1, EVALUE 1.00e-106; SWISSPROT HIT: P30711, EVALUE 5.00e-33
cccgtgggtgctggctgccaagtcttcgaaggccgacccaagctggccacatggcggcagcgcgtggaggcagcagtgggggaggacctcttccaggaggcccatgaggtcattctgaaggccaaggacttcccacctgcagaccccaccataaagcagaagctgatgccctgggtgctggccatgatccggtga

SEQ ID NO: 18174 - DNA, 238 bp, Homo sapiens
  MAP TO AL121757.2; EXPRESSED IN BT474, SIGNAL = 9.9; EXPRESSED IN FETAL LIVER, SIGNAL = 3.4; EXPRESSED IN ADULT LIVER, SIGNAL =   5; EXPRESSED IN HBL100, SIGNAL = 7.2; EXPRESSED IN HELA, SIGNAL = 8.1; EXPRESSED IN PLACENTA, SIGNAL = 9.7; EXPRESSED IN HEART, SIGNAL = 1.7; EXPRESSED IN BONE MARROW, SIGNAL = 2.3; EXPRESSED IN LUNG, SIGNAL =   3; EXPRESSED IN BRAIN, SIGNAL = 1.9; NT HIT: AF223391.1, EVALUE 3.00e-67; SWISSPROT HIT: P08547, EVALUE 2.00e-22; EST_HUMAN HIT: AW997709.1, EVALUE 4.00e-77
tcagtctttttgatgtagatattttagggctatgaactttcctcttagcaccaccgttgctctatcccaggggttttgataggttgtgtcactattgtcattcagtctgaagaattttttaatttccatcttgattttgtttttgacccagtgatcattcaggagcagattatttaatttccatatattcgcatggttttgaaggttccttttggagttaatttttagttttattcca

SEQ ID NO: 18175 - DNA, 171 bp, Homo sapiens
  MAP TO AC006445.10; EXPRESSED IN BONE MARROW, SIGNAL =  20; EXPRESSED IN LUNG, SIGNAL =  12; EXPRESSED IN BRAIN, SIGNAL =  17; EXPRESSED IN FETAL LIVER, SIGNAL =  14; EXPRESSED IN ADULT LIVER, SIGNAL = 6.7; EXPRESSED IN PLACENTA, SIGNAL =  20; EXPRESSED IN HEART, SIGNAL =  15; EXPRESSED IN BT474, SIGNAL =  28; EXPRESSED IN HELA, SIGNAL =  34; EXPRESSED IN HBL100, SIGNAL =  66; EST_HUMAN HIT: AV706769.1, EVALUE 6.00e-35; NT HIT: K03002.1, EVALUE 9.00e-33; SWISSPROT HIT: P02433, EVALUE 9.00e-10
agttcctggcccacaaggtcaaggagcaggaagtgctgctgatgtgcaacaaatcttactgtgctgagattgctcacaatgtttcctccaacaaccctggccagctttctttggagcagttatctgttggacagattcaggtccattaaaattctaaagtatttccactga

SEQ ID NO: 18176 - DNA, 363 bp, Homo sapiens
  MAP TO AB020862.1; EXPRESSED IN HBL100, SIGNAL = 2.6; EXPRESSED IN HELA, SIGNAL = 3.3; EXPRESSED IN HEART, SIGNAL = 3.9; EXPRESSED IN LUNG, SIGNAL = 5.4; EXPRESSED IN BRAIN, SIGNAL = 2.5; EXPRESSED IN ADULT LIVER, SIGNAL = 3.6; EXPRESSED IN PLACENTA, SIGNAL = 4.3; EXPRESSED IN BONE MARROW, SIGNAL = 3.2; EXPRESSED IN BT474, SIGNAL = 2.3; EXPRESSED IN FETAL LIVER, SIGNAL =   4; SWISSPROT HIT: P22578, EVALUE 1.90e+00; NT HIT: X76160.1, EVALUE 2.30e-01; EST_HUMAN HIT: BE148911.1, EVALUE 9.10e-01
gagagagagctcccactgaagcgtacgctaaaggaccaactgagtttcacgagaaggtggttcagattcccatgtcttcttccagtgtcgatcaatgccacctctccctcaattcatacttacagtgttatagggcattaaatgcacgtagttcacaaaagaagaaaaagttccagcctggtttatatacgtttctgcaccataaactcaaagcggccggaagtggaatgctgcagcactacagctctgctcaggagtggccaccaaggatggagaggacggaacttctccaggtgggcagaactgtgcagtttttcttgaaacttcaatgccttgaaggatagatggccacatatacagact

SEQ ID NO: 18177 - DNA, 144 bp, Homo sapiens
  MAP TO AB020875.1; EXPRESSED IN HEART, SIGNAL = 1.2; EXPRESSED IN PLACENTA, SIGNAL = 1.4; EXPRESSED IN BRAIN, SIGNAL = 1.7; EXPRESSED IN FETAL LIVER, SIGNAL = 2.3; NT HIT: AF243382.1, EVALUE 1.80e-02; EST_HUMAN HIT: BE397917.1, EVALUE 1.30e+00; SWISSPROT HIT: Q12473, EVALUE 8.80e+00
tatctttgtttcctgtgattgagaccttgaggccaagaatgacgcgtcttcttttatctgtcccccaaatttctagtgcaatgataagccactcagtgacaactattggcctaaacaaacttggaaaagaaaaaaaaatacaaa

SEQ ID NO: 18178 - DNA, 134 bp, Homo sapiens
  MAP TO AC007298.17; EXPRESSED IN HBL100, SIGNAL = 0.92; EXPRESSED IN HELA, SIGNAL = 0.97; EXPRESSED IN HEART, SIGNAL = 0.97; EXPRESSED IN LUNG, SIGNAL = 1.1; EXPRESSED IN BRAIN, SIGNAL = 1.1; EXPRESSED IN ADULT LIVER, SIGNAL = 0.9; EXPRESSED IN PLACENTA, SIGNAL = 1.1; EXPRESSED IN BONE MARROW, SIGNAL = 1.4; EXPRESSED IN BT474, SIGNAL = 1.3; EXPRESSED IN FETAL LIVER, SIGNAL = 1.4; EST_HUMAN HIT: BE719668.1, EVALUE 1.80e+00; NT HIT: AB013290.1, EVALUE 2.60e-01; SWISSPROT HIT: Q9ZCD6, EVALUE 3.00e+00
tcaagattttgacttgggaaaattcacgcaagatttccaaaagttgttggcttttggcttgcttgtagaaattgtaagggggcagccttggtcttcgtcgtggatataggaacaagtctgggcccagggcatgg

SEQ ID NO: 18179 - DNA, 381 bp, Homo sapiens
  MAP TO AB023048.1; EXPRESSED IN BT474, SIGNAL = 2.1; EXPRESSED IN FETAL LIVER, SIGNAL = 1.5; EXPRESSED IN HBL100, SIGNAL = 1.4; EXPRESSED IN HELA, SIGNAL = 1.2; EXPRESSED IN HEART, SIGNAL = 2.2; EXPRESSED IN BRAIN, SIGNAL =   2; EXPRESSED IN ADULT LIVER, SIGNAL = 1.5; EXPRESSED IN PLACENTA, SIGNAL = 1.2; EXPRESSED IN LUNG, SIGNAL = 1.2; EXPRESSED IN BONE MARROW, SIGNAL =   2; EST_HUMAN HIT: BF701593.1, EVALUE 8.90e-02; NT HIT: M64239.1, EVALUE 2.00e-01; SWISSPROT HIT: P16794, EVALUE 4.60e+00
atgggtatggaagtggaagatctatttgacttcggaagtggccacccaaatagaagagggcgggcttgtatacaaagtggcaggccctgcttcttttgtgactgtgatcactgggtgtaaggagggagctggaggaggagatgacagaattggattcattcatgggcatgccagtggccgtggctgggacggaggtgacatcatctaccacactgtggtggtcagcaaaggtggggtgagtgtgcttgggcagatgtgggaggacctgacccaagtggagaaggctgctcacagggacaggagagggtgggctcagacaggtgcgagtgagaatcaacacagcagaggcagtggtggtggctttgatagcaatgggtgtgc

SEQ ID NO: 18180 - DNA, 204 bp, Homo sapiens
  MAP TO AC007425.16; EXPRESSED IN BONE MARROW, SIGNAL = 3.1; EXPRESSED IN LUNG, SIGNAL = 3.6; EXPRESSED IN BRAIN, SIGNAL = 3.4; EXPRESSED IN ADULT LIVER, SIGNAL =   3; EXPRESSED IN BT474, SIGNAL = 3.8; EXPRESSED IN FETAL LIVER, SIGNAL = 3.4; EXPRESSED IN PLACENTA, SIGNAL = 3.1; EXPRESSED IN HBL100, SIGNAL = 2.4; EXPRESSED IN HELA, SIGNAL = 2.5; EXPRESSED IN HEART, SIGNAL = 3.2; SWISSPROT HIT: P24555, EVALUE 1.20e+00; NT HIT: X57025.1, EVALUE 8.00e-06; EST_HUMAN HIT: AW403729.1, EVALUE 1.00e-05
tcattccatccttacaacagcccctctgaagtcactattttcaacattttgcagacgaggaaactgaggcacagaaaagttgagttcttttctcaaggtcagatagggaataggatttgcaccaagtttctctttatccaagagtttgacctctgaagcactgtattcctctccttgcccccatatttgctctcctagaaacat

SEQ ID NO: 18181 - DNA, 248 bp, Homo sapiens
  MAP TO AL109847.1; EXPRESSED IN BT474, SIGNAL = 4.2; EXPRESSED IN FETAL LIVER, SIGNAL = 3.5; EXPRESSED IN PLACENTA, SIGNAL = 4.6; EXPRESSED IN HBL100, SIGNAL = 3.6; EXPRESSED IN HEART, SIGNAL = 3.5; EXPRESSED IN LUNG, SIGNAL = 5.1; EXPRESSED IN BRAIN, SIGNAL =   3; EXPRESSED IN ADULT LIVER, SIGNAL = 2.7; EXPRESSED IN HELA, SIGNAL = 3.3; EXPRESSED IN BONE MARROW, SIGNAL = 2.9; SWISSPROT HIT: Q9VLZ7, EVALUE 6.50e+00; NT HIT: AF038280.1, EVALUE 0.00e+00; EST_HUMAN HIT: AW387766.1, EVALUE 0.00e+00
gtgaagtgaaggacaaaaatgttcaagtggtcgagcttcccattgtagacagtcttcatccccgtcctccatatttacccttggctgtaccagaagacctcgcagatcgacttgtacgagtgcatggtgaccctgcagtgtggtgggtgtctcagtttgtcaaatacttgatccgcccacagccttggctagaaaaagaaatagaagaagccaccaagaagcttggcttcaaacatccagttattggg

SEQ ID NO: 18182 - DNA, 109 bp, Homo sapiens
  MAP TO AC006364.3; EXPRESSED IN BRAIN, SIGNAL = 1.8; EXPRESSED IN BT474, SIGNAL = 1.5; EXPRESSED IN FETAL LIVER, SIGNAL = 1.1; EXPRESSED IN PLACENTA, SIGNAL = 2.1; EXPRESSED IN HELA, SIGNAL = 1.2; EXPRESSED IN HBL100, SIGNAL = 1.6; EXPRESSED IN HEART, SIGNAL = 1.9; EXPRESSED IN LUNG, SIGNAL =   1; EST_HUMAN HIT: BE887759.1, EVALUE 7.00e-55; NT HIT: gi11421184, EVALUE 5.00e-55; SWISSPROT HIT: Q92520, EVALUE 8.00e-16
gcggctcattgctgatttggggagcacatctattactaatcttggttttagagacaactgggtcttctgtggtgggaagggcattaagacaaaaagcccttttgaacag

SEQ ID NO: 18183 - DNA, 301 bp, Homo sapiens
  MAP TO AB020866.1; EXPRESSED IN BONE MARROW, SIGNAL = 0.99; EXPRESSED IN BRAIN, SIGNAL =   1; EXPRESSED IN BT474, SIGNAL = 1.9; EXPRESSED IN FETAL LIVER, SIGNAL = 1.9; EXPRESSED IN HELA, SIGNAL = 1.5; EXPRESSED IN HBL100, SIGNAL = 1.4; EXPRESSED IN HEART, SIGNAL = 1.5; EXPRESSED IN LUNG, SIGNAL = 1.1; NT HIT: M30520.1, EVALUE 2.00e-04; SWISSPROT HIT: P10266, EVALUE 4.00e-36; EST_HUMAN HIT: AV687352.1, EVALUE 2.70e-01
aggaactgaaaaatttttgttttagggtaatgattatctatatggccaacaaaaccagctaaattagactgccattctgataaatgtataaaggcttgttgaacctgtgctttgtttaaaggaactacaattttatctggatcagtgccagtgaatctaactattcttaattgggcttggcctataagaatagctatttgatctaagtaaattgaaaaagtcctagttgtactgtggggtaaaaaagaccattcaaccaagtcaacatcttgaataatcacttctgtaagagaatggagag

SEQ ID NO: 18184 - DNA, 101 bp, Homo sapiens
  MAP TO AC007115.1; EXPRESSED IN HEART, SIGNAL =  18; EXPRESSED IN LUNG, SIGNAL =  11; EXPRESSED IN BONE MARROW, SIGNAL = 0.95; EXPRESSED IN BRAIN, SIGNAL = 2.2; EXPRESSED IN ADULT LIVER, SIGNAL =   4; EXPRESSED IN BT474, SIGNAL = 1.4; EXPRESSED IN FETAL LIVER, SIGNAL = 3.6; EXPRESSED IN PLACENTA, SIGNAL =  34; EXPRESSED IN HBL100, SIGNAL = 1.3; EST_HUMAN HIT: AW867810.1, EVALUE 4.00e-50; SWISSPROT HIT: Q9XSD9, EVALUE 7.00e-06; NT HIT: L01126.1, EVALUE 3.00e-50
tgccaaaggatcttccccctgacacaactctgctagacctgcaaaacaacaaaataaccgaaatcaaagatggagactttaagaacctgaagaaccttcac

SEQ ID NO: 18185 - DNA, 244 bp, Homo sapiens
  MAP TO AB020872.1; EXPRESSED IN HELA, SIGNAL = 0.93; EXPRESSED IN PLACENTA, SIGNAL = 0.97; EXPRESSED IN HBL100, SIGNAL = 0.91; EXPRESSED IN HEART, SIGNAL = 1.4; EXPRESSED IN LUNG, SIGNAL = 1.2; EXPRESSED IN BONE MARROW, SIGNAL = 0.93; EXPRESSED IN BRAIN, SIGNAL = 1.2; EXPRESSED IN BT474, SIGNAL = 0.96; EXPRESSED IN ADULT LIVER, SIGNAL = 0.95; EXPRESSED IN FETAL LIVER, SIGNAL = 0.97; EST_HUMAN HIT: AW629675.1, EVALUE 1.50e-01; NT HIT: D90913.1, EVALUE 1.50e-01
gatactttacccaaagccacatttcaaaatgaacgagtctggatttaagtcaaaccagtgtttaaacaaacaaacaaacaacaacaacaacaacaacatcaacaaaaaactcataccaagaaaaaagaaagaaaaagcaaaagcagatatcttacttcctattgacttaagcaattctgttaaatgcagtgctatgaatctctccatcatcatccagtccacccaaaatataaacagcaacaac

SEQ ID NO: 18186 - DNA, 204 bp, Homo sapiens
  MAP TO AC007458.13; EXPRESSED IN FETAL LIVER, SIGNAL = 2.3; EXPRESSED IN HELA, SIGNAL = 2.8; EXPRESSED IN PLACENTA, SIGNAL = 2.5; EXPRESSED IN HBL100, SIGNAL = 2.3; EXPRESSED IN HEART, SIGNAL =   2; EXPRESSED IN LUNG, SIGNAL = 1.7; EXPRESSED IN BONE MARROW, SIGNAL = 2.9; EXPRESSED IN BRAIN, SIGNAL = 2.3; EXPRESSED IN BT474, SIGNAL = 1.6; EXPRESSED IN ADULT LIVER, SIGNAL = 3.7; NT HIT: AF202635.1, EVALUE 2.00e-22; EST_HUMAN HIT: T70845.1, EVALUE 7.00e-34; SWISSPROT HIT: O43123, EVALUE 3.70e+00
aattgtctaatgtcaatttgttttctgggattgcttcttctatgtcttcttcctcatcgtctggcactggttcagaaacactcatctccatcaagtcgtcttctgctaattcctgtggtgcagtgtctactagctcttgaatttctccaagatccatatcttgatatcttcaacctgctcctgcccccaccatctttttgccat

SEQ ID NO: 18187 - DNA, 401 bp, Homo sapiens
  MAP TO AC007568.1; EXPRESSED IN BRAIN, SIGNAL = 1.1; EXPRESSED IN ADULT LIVER, SIGNAL = 1.2; EXPRESSED IN BT474, SIGNAL =   1; EXPRESSED IN HEART, SIGNAL = 0.88; NT HIT: AF053768.1, EVALUE 7.00e-91; EST_HUMAN HIT: AW157325.1, EVALUE 6.50e-02; SWISSPROT HIT: Q02088, EVALUE 5.00e-04
ccccttttcagttgctcaatcattttcctcatcttgtctatctcctctttgaggtcagtggtgtgtgcttcttcccggttcagcttggcacgaagctgttcccgctcagtgtcaaactcagagagttgtttttccatctgagcttccatttctgtgcttcttcgtttctcagcggagagttcctcttctaattcattcgtctttttcttttcctcttccagtttggccattacgtcttcgagcttctgggcctcctctatgactttgcctgagagctgcttgcactctttgaccagcatcaggaccacctgcttgttcttgccacgctcttcctcaaggcgggcagccagcttcttgtgctcttgctcaagggcttgtagctgaagcttctccatttccag

SEQ ID NO: 18188 - DNA, 210 bp, Homo sapiens
  MAP TO AC009491.2; EXPRESSED IN BT474, SIGNAL = 2.6; EXPRESSED IN FETAL LIVER, SIGNAL = 1.9; EXPRESSED IN ADULT LIVER, SIGNAL = 1.4; EXPRESSED IN HELA, SIGNAL = 1.2; EXPRESSED IN PLACENTA, SIGNAL = 2.2; EXPRESSED IN HBL100, SIGNAL = 1.6; EXPRESSED IN HEART, SIGNAL = 0.9; EXPRESSED IN LUNG, SIGNAL = 1.2; EXPRESSED IN BONE MARROW, SIGNAL =   2; EXPRESSED IN BRAIN, SIGNAL = 1.5; NT HIT: AJ271736.1, EVALUE 1.00e-53; SWISSPROT HIT: P03360, EVALUE 1.00e-06; EST_HUMAN HIT: BF678507.1, EVALUE 1.00e-14
tggataagcctccacccacccagtgtaagtacacagaagaacccgcaaatacttgttacctctacattgcagcatttctgtgaaatccccctgaatatcctcaaaaggagctgctccataagcttgtatgaatggtggaactgtggggccttgcctcgcattggctgttggcaagtaacacaccatcgtgctactgctttggcaagtgct

SEQ ID NO: 18189 - DNA, 123 bp, Homo sapiens
  MAP TO AF152363.1; EXPRESSED IN PLACENTA, SIGNAL = 2.7; EXPRESSED IN HELA, SIGNAL =   3; EXPRESSED IN BONE MARROW, SIGNAL = 2.3; EXPRESSED IN BT474, SIGNAL = 1.5; EXPRESSED IN HEART, SIGNAL = 2.1; EXPRESSED IN HBL100, SIGNAL = 1.5; EXPRESSED IN LUNG, SIGNAL = 2.3; EXPRESSED IN BRAIN, SIGNAL = 2.2; EXPRESSED IN ADULT LIVER, SIGNAL = 2.8; EXPRESSED IN FETAL LIVER, SIGNAL = 2.8; NT HIT: AL163300.2, EVALUE 2.00e-17; EST_HUMAN HIT: T98107.1, EVALUE 4.00e-25; SWISSPROT HIT: P75783, EVALUE 4.00e+00
gcttgctcctgtgaaccaagcagcaatctccagctgcagctcagaaagaacaggagggatgggtaatgtagaaatatggatcaatattctagctctgaacaattatcctgcaaaccctgccag

SEQ ID NO: 18190 - DNA, 113 bp, Homo sapiens
  MAP TO AC009743.1; EXPRESSED IN PLACENTA, SIGNAL = 2.1; EXPRESSED IN HELA, SIGNAL = 1.7; EXPRESSED IN BONE MARROW, SIGNAL = 1.9; EXPRESSED IN BRAIN, SIGNAL = 1.7; EXPRESSED IN BT474, SIGNAL = 1.4; EXPRESSED IN HBL100, SIGNAL = 1.5; EXPRESSED IN HEART, SIGNAL = 2.1; EXPRESSED IN LUNG, SIGNAL =   2; EXPRESSED IN ADULT LIVER, SIGNAL = 1.6; EXPRESSED IN FETAL LIVER, SIGNAL = 2.9; NT HIT: AF185698.1, EVALUE 6.00e-05; EST_HUMAN HIT: AA330642.1, EVALUE 7.00e-11; SWISSPROT HIT: P19077, EVALUE 6.90e+00
ttcatcagggatgctactagcatctagtgagtagaggccaggcatgctgctaaacttcctataaggcaccaatgcagacaacagctgcctaaaacaaagaattatctggcctg

SEQ ID NO: 18191 - DNA, 308 bp, Homo sapiens
  MAP TO AC009948.2; EXPRESSED IN BRAIN, SIGNAL = 5.4; EXPRESSED IN BT474, SIGNAL = 2.2; EXPRESSED IN ADULT LIVER, SIGNAL = 1.2; EXPRESSED IN HEART, SIGNAL = 9.7; NT HIT: gi4507720, EVALUE 0.00e+00; EST_HUMAN HIT: Z19173.1, EVALUE 3.00e-03; SWISSPROT HIT: Q14324, EVALUE 1.00e-14
aacccccaagaaatgttcgtatcactgatatttcaaagaactctgtcagcctttcatggcaacaaccagctttcgatggaggtagcaagattacaggctacattgttgagagacgtgaccttccagatggcagatggaccaaggccagcttcaccaatgttactgaaactcaattcatcatctctggcttgactcagaattcccagtatgaattccgtgtctttgctaggaatgctgttggttccattagcaatccatctgaggttgtagggcccattacttgcatcgattcttatggtaagcatgct

SEQ ID NO: 18192 - DNA, 83 bp, Homo sapiens
  MAP TO AC009966.2; EXPRESSED IN PLACENTA, SIGNAL =  16; EXPRESSED IN HBL100, SIGNAL = 1.1; EXPRESSED IN HELA, SIGNAL = 1.3; EXPRESSED IN HEART, SIGNAL =   5; EXPRESSED IN BONE MARROW, SIGNAL = 0.99; EXPRESSED IN BT474, SIGNAL = 1.7; EXPRESSED IN LUNG, SIGNAL = 7.8; EXPRESSED IN BRAIN, SIGNAL = 6.5; EXPRESSED IN FETAL LIVER, SIGNAL = 1.5; NT HIT: U67195.1, EVALUE 1.00e-39; EST_HUMAN HIT: AI214059.1, EVALUE 1.00e-39; SWISSPROT HIT: P48032, EVALUE 7.00e-09
cttcatctgcttgatggtgtagaccagcgtgccgaagggcccctcctttaccagcttcttccccaccaccttggcccggatca

SEQ ID NO: 18193 - DNA, 276 bp, Homo sapiens
  MAP TO AC010132.2; EXPRESSED IN HBL100, SIGNAL =   1; EXPRESSED IN HELA, SIGNAL = 1.6; EXPRESSED IN HEART, SIGNAL = 1.3; EXPRESSED IN LUNG, SIGNAL = 1.3; EXPRESSED IN BT474, SIGNAL = 1.1; EXPRESSED IN PLACENTA, SIGNAL = 1.2; EXPRESSED IN BONE MARROW, SIGNAL = 2.5; EXPRESSED IN BRAIN, SIGNAL = 1.7; EXPRESSED IN ADULT LIVER, SIGNAL = 1.2; EXPRESSED IN FETAL LIVER, SIGNAL = 1.5; NT HIT: AJ271735.1, EVALUE 3.00e-40; EST_HUMAN HIT: BF035327.1, EVALUE 7.00e-82; SWISSPROT HIT: P46578, EVALUE 7.80e+00
agaaacaacgttaccttaaaccaaagcccaatccagagcgaggccctaactctctttaattctatgaaggccgagagaagtgacaaagctgcagaagaaacgttggaagctagcataggtttgttcatgaggtttaaggaaagaagccatctccataacataaaagcacaaggtggagcagcaagtgctgatgtagaagctgcagtgagttttctagaagatctagctaagatcattgatgaaggtggctacactaaacaacaaattttcaatgta

SEQ ID NO: 18194 - DNA, 354 bp, Homo sapiens
  MAP TO AF188030.1; EXPRESSED IN PLACENTA, SIGNAL = 1.8; EXPRESSED IN HBL100, SIGNAL = 1.5; EXPRESSED IN HELA, SIGNAL = 1.5; EXPRESSED IN HEART, SIGNAL = 2.2; EXPRESSED IN BT474, SIGNAL = 1.4; EXPRESSED IN LUNG, SIGNAL = 1.8; EXPRESSED IN BONE MARROW, SIGNAL = 1.6; EXPRESSED IN BRAIN, SIGNAL = 1.6; EXPRESSED IN ADULT LIVER, SIGNAL =   2; EXPRESSED IN FETAL LIVER, SIGNAL = 2.1; SWISSPROT HIT: P09125, EVALUE 1.00e-06; EST_HUMAN HIT: BF110215.1, EVALUE 1.30e+00
ccagtgtgtgatgacttggcaccagtgcttgatgacctgacaccagtgcatcatgacctgacaccagcgcgcaatgacctgacaccagtgcacgatgacctggcaccagtgcgtgatgacctgacaccagtgcgtcatgacctgacaccagtgcgtgatgacctggcaccagtgcgtgatgacctgacaccagtgtgtgatgacctggcaccagtgtgcgatgacgtggccccagtgtgccatgacctggcaccagtgtgtgatgacctgacaccagtgtgtgatgacctggcaccagtgcacaatgaccttgcagcaatgtgcgtctgatgctgcattcataggaggaaggtt

SEQ ID NO: 18195 - DNA, 118 bp, Homo sapiens
  MAP TO AC009488.1; EXPRESSED IN FETAL LIVER, SIGNAL = 1.8; EXPRESSED IN ADULT LIVER, SIGNAL = 1.2; EXPRESSED IN PLACENTA, SIGNAL = 2.7; EXPRESSED IN HELA, SIGNAL =   2; EXPRESSED IN HEART, SIGNAL =   2; EXPRESSED IN BT474, SIGNAL = 1.9; EXPRESSED IN HBL100, SIGNAL = 3.8; EXPRESSED IN BRAIN, SIGNAL = 1.4; EXPRESSED IN LUNG, SIGNAL = 1.7; EXPRESSED IN BONE MARROW, SIGNAL = 1.5; NT HIT: U40024.1, EVALUE 2.00e-10; SWISSPROT HIT: Q28983, EVALUE 3.00e-16; EST_HUMAN HIT: AW796260.1, EVALUE 6.00e+00
catcctgttggccacagaactcctgggccctacacctccagggctggcagcgaattctgttgttgctttcacagacgcacaactctttgcagcctggcttgtaccaccgctcccctac

SEQ ID NO: 18196 - DNA, 344 bp, Homo sapiens
  MAP TO AC009497.2; EXPRESSED IN BONE MARROW, SIGNAL =   1; EXPRESSED IN LUNG, SIGNAL = 0.91; EXPRESSED IN BRAIN, SIGNAL =  18; EXPRESSED IN BT474, SIGNAL = 4.9; EXPRESSED IN ADULT LIVER, SIGNAL = 5.9; EXPRESSED IN HEART, SIGNAL =   1; NT HIT: U35637.1, EVALUE 0.00e+00; EST_HUMAN HIT: BE185376.1, EVALUE 2.00e-07; SWISSPROT HIT: gi127998, EVALUE 2.00e-20
tatctgtacaaaactgcttatgagaaacagaaaggccattacattggctgtcgcagcgccaaggaagaccctaaactggtttgggcagcaaatgtgttgaagatgcagaatgacaggctgtacaaaaaggcctacaacgaccacaaagccaagatctccatccctgtggacatggtgtccatcagcgctgccaaagaaggtcaggcactggcaagtgatgtggactatcgccattacctgcaccactggtcttgctttcccgaccagaatgatgtgatccaagccaggaaagcctacgacctacagagcgacgtaagtgtgtcccccaggaaacaagtccccca

SEQ ID NO: 18197 - DNA, 111 bp, Homo sapiens
  MAP TO AC009571.2; EXPRESSED IN FETAL LIVER, SIGNAL = 8.1; EXPRESSED IN ADULT LIVER, SIGNAL =  11; EXPRESSED IN PLACENTA, SIGNAL =  16; EXPRESSED IN HBL100, SIGNAL =  57; EXPRESSED IN HELA, SIGNAL =  11; EXPRESSED IN HEART, SIGNAL = 7.7; EXPRESSED IN BRAIN, SIGNAL = 8.1; EXPRESSED IN BT474, SIGNAL =  17; EXPRESSED IN LUNG, SIGNAL = 8.6; EXPRESSED IN BONE MARROW, SIGNAL = 9.8; EST_HUMAN HIT: AV731500.1, EVALUE 3.00e-32; NT HIT: AF029308.1, EVALUE 1.00e-27; SWISSPROT HIT: P28166, EVALUE 4.00e+00
  unsure 86
accacgaacccaaccgaaggaagaaactctaagcacgtctgaacatcagaaggaacaaactccggacacaccatctttaagaactngtaacactcaccgtgagaatccgtg

SEQ ID NO: 18198 - DNA, 223 bp, Homo sapiens
  MAP TO AC009958.1; EXPRESSED IN HBL100, SIGNAL = 2.6; EXPRESSED IN HEART, SIGNAL = 1.8; EXPRESSED IN BONE MARROW, SIGNAL =  84; EXPRESSED IN LUNG, SIGNAL =  15; EXPRESSED IN BRAIN, SIGNAL = 0.91; EXPRESSED IN ADULT LIVER, SIGNAL = 5.9; SWISSPROT HIT: P01594, EVALUE 4.00e-34; EST_HUMAN HIT: AW407113.1, EVALUE 1.00e-120; NT HIT: M64856.1, EVALUE 1.00e-122
tcttcaggctgcaggctgctgatggtgaaagtaaaatctgtcccagatccacttccactgaaccttgatgggacccctgtttccaaattggatgcatcgtagatcaggagcttaggggctttccctggtttctgctgataccaatttaaatagttgctaatgtcctgactcgcctggcaagtgatggtgactctgtctcctacagatgcagacagggaggatg

SEQ ID NO: 18199 - DNA, 151 bp, Homo sapiens
  MAP TO AF165176.1; EXPRESSED IN ADULT LIVER, SIGNAL = 2.4; EXPRESSED IN BT474, SIGNAL = 1.1; EXPRESSED IN FETAL LIVER, SIGNAL = 2.9; EXPRESSED IN PLACENTA, SIGNAL = 2.9; EXPRESSED IN HBL100, SIGNAL = 1.6; EXPRESSED IN HELA, SIGNAL = 2.6; EXPRESSED IN HEART, SIGNAL = 2.3; EXPRESSED IN BONE MARROW, SIGNAL = 2.2; EXPRESSED IN LUNG, SIGNAL = 3.5; EXPRESSED IN BRAIN, SIGNAL = 2.3; EST_HUMAN HIT: BE674034.1, EVALUE 1.30e-01; NT HIT: AL163283.2, EVALUE 5.00e-80; SWISSPROT HIT: P20190, EVALUE 1.00e+00
cacactcgtccattttggtccattttggtccattttgtgtctgatgataaagcacaggagaaatccacccgtcgctgggatccacaggggagtaacgccaaaacacggcaccgctactgtcttcgcagcttttaggatgaggagcctattt

SEQ ID NO: 18200 - DNA, 100 bp, Homo sapiens
  MAP TO AL078592.4; EXPRESSED IN BONE MARROW, SIGNAL = 4.2; EXPRESSED IN LUNG, SIGNAL = 6.4; EXPRESSED IN BRAIN, SIGNAL = 4.4; EXPRESSED IN ADULT LIVER, SIGNAL = 3.8; EXPRESSED IN BT474, SIGNAL = 7.2; EXPRESSED IN FETAL LIVER, SIGNAL = 4.9; EXPRESSED IN PLACENTA, SIGNAL = 4.8; EXPRESSED IN HELA, SIGNAL = 4.2; EXPRESSED IN HBL100, SIGNAL = 4.9; EXPRESSED IN HEART, SIGNAL = 5.8; EST_HUMAN HIT: AA491462.1, EVALUE 4.90e+00; NT HIT: AF023464.1, EVALUE 3.30e+00
ctatcctgaaattcatgattctgacattctcctatatgcaaagaacattgaagtctatgagcagactgaatgtatatgtctaaatatccttgtgaactaa

SEQ ID NO: 18201 - DNA, 455 bp, Homo sapiens; identical to SEQ ID NO: 1442
  MAP TO AL031778.1; EXPRESSED IN HEART, SIGNAL = 3.2; EXPRESSED IN BONE MARROW, SIGNAL = 2.6; EXPRESSED IN LUNG, SIGNAL = 2.9; EXPRESSED IN BRAIN, SIGNAL = 3.4; EXPRESSED IN ADULT LIVER, SIGNAL = 2.5; EXPRESSED IN BT474, SIGNAL = 2.6; EXPRESSED IN FETAL LIVER, SIGNAL = 3.4; EXPRESSED IN PLACENTA, SIGNAL = 2.6; EXPRESSED IN HBL100, SIGNAL = 1.9; EXPRESSED IN HELA, SIGNAL = 4.3; NT HIT: gi6753097, EVALUE 7.00e-17; SWISSPROT HIT: P44717, EVALUE 6.00e+00

SEQ ID NO: 18202 - DNA, 154 bp, Homo sapiens
  MAP TO AL034548.24; EXPRESSED IN FETAL LIVER, SIGNAL = 1.3; EXPRESSED IN HELA, SIGNAL = 1.1; EXPRESSED IN PLACENTA, SIGNAL = 1.2; EXPRESSED IN HBL100, SIGNAL = 1.3; EXPRESSED IN HEART, SIGNAL = 1.2; EXPRESSED IN LUNG, SIGNAL = 1.3; EXPRESSED IN BONE MARROW, SIGNAL = 1.5; EXPRESSED IN BRAIN, SIGNAL = 1.3; EXPRESSED IN BT474, SIGNAL = 1.6; EXPRESSED IN ADULT LIVER, SIGNAL = 0.91; EST_HUMAN HIT: AW374968.1, EVALUE 9.00e-73; SWISSPROT HIT: O74261, EVALUE 1.30e+00
ttgggtctccgaagcagaacatcctcaaatatgacctctcggggttcccgggtctgggcttggagctcttccacctcggcccttaatacaggcatgttctcctcaaactggtcaataatctgagaggaaaggcacagcaggggagaagggagag

SEQ ID NO: 18203 - DNA, 151 bp, Homo sapiens
  MAP TO AL035408.5; EXPRESSED IN BONE MARROW, SIGNAL = 1.1; EXPRESSED IN LUNG, SIGNAL = 1.2; EXPRESSED IN BRAIN, SIGNAL = 0.92; EXPRESSED IN BT474, SIGNAL = 1.1; EXPRESSED IN FETAL LIVER, SIGNAL = 0.97; EXPRESSED IN PLACENTA, SIGNAL = 1.2; EXPRESSED IN HEART, SIGNAL = 1.1; NT HIT: U60211.1, EVALUE 3.40e-01; EST_HUMAN HIT: AW440124.1, EVALUE 3.50e-01; SWISSPROT HIT: P21182, EVALUE 6.70e+00
tgaagacgtgcaactgatgaccacattgcctataaaggatcttggtggtgggaaggaaattagccttgaccagctgtttcattttatttcagtttattttaatgcatcagccagagatgatgatggccctgacctagatggcacacttata

SEQ ID NO: 18204 - DNA, 267 bp, Homo sapiens
  MAP TO AL035462.12; EXPRESSED IN PLACENTA, SIGNAL = 4.2; EXPRESSED IN HBL100, SIGNAL = 2.1; EXPRESSED IN HELA, SIGNAL = 3.2; EXPRESSED IN HEART, SIGNAL = 3.1; EXPRESSED IN LUNG, SIGNAL = 4.7; EXPRESSED IN BONE MARROW, SIGNAL = 3.1; EXPRESSED IN BRAIN, SIGNAL = 2.6; EXPRESSED IN ADULT LIVER, SIGNAL = 2.7; EXPRESSED IN BT474, SIGNAL = 2.6; EXPRESSED IN FETAL LIVER, SIGNAL = 3.3; NT HIT: gi11420835, EVALUE 0.00e+00; EST_HUMAN HIT: AL449552.1, EVALUE 0.00e+00; SWISSPROT HIT: O78756, EVALUE 2.40e+00
gaaccatagctgtcactgtcttcgggaggatatttgaggacaaaaacgagtttttgactttggaacagtaaataagacaagactttgattcgcttagttctgccttgagtcctgccagtgtagatggaatccatgccagacatgattccatttcgaatgtagaatcagcataatttaacctcatcttggaaatctcatgtcccagttcacagccaggcatcagcgtgacagtcagctgagctgctgtcttggcagcttctgggcatt

SEQ ID NO: 18205 - DNA, 489 bp, Homo sapiens; identical to SEQ ID NO: 1446
  MAP TO AL031733.3; EXPRESSED IN HEART, SIGNAL = 0.89; EXPRESSED IN LUNG, SIGNAL = 1.5; EXPRESSED IN BONE MARROW, SIGNAL =   1; EXPRESSED IN FETAL LIVER, SIGNAL =   1; NT HIT: AF195953.1, EVALUE 7.80e-02; EST_HUMAN HIT: AA311281.1, EVALUE 4.00e-62; SWISSPROT HIT: P19158, EVALUE 8.70e+00

SEQ ID NO: 18206 - DNA, 427 bp, Homo sapiens
  MAP TO AL031985.10; EXPRESSED IN BT474, SIGNAL = 1.4; EXPRESSED IN FETAL LIVER, SIGNAL = 1.4; EXPRESSED IN ADULT LIVER, SIGNAL = 1.4; EXPRESSED IN PLACENTA, SIGNAL = 1.4; EXPRESSED IN HBL100, SIGNAL = 1.3; EXPRESSED IN HEART, SIGNAL =   1; EXPRESSED IN LUNG, SIGNAL = 1.1; EXPRESSED IN BONE MARROW, SIGNAL = 2.5; EXPRESSED IN BRAIN, SIGNAL = 1.8; NT HIT: AL137764.1, EVALUE 0.00e+00; EST_HUMAN HIT: AW467220.1, EVALUE 0.00e+00; SWISSPROT HIT: P04929, EVALUE 2.00e-03
caatgttcatggctcccgctcagatggcatatcccacagcctaccccagcttccccggggttacacctcctaacagcataatggggagcatgatgcctccaccagtaggcatggttgctcagccaggagcttctgggatggttgcccccatggccatgcctgcaggctatatgggtggcatgcaggcatcaatgatgggtgtgccgaatggaatgatgaccacccagcaggctggctacatggcaggcatggcagctatgccccagactgtgtatggggtccagccagctcagcagctgcaatggaaccttactcaggtaagctaccccattttacttgcagcaagagttttgagccttcctcaagtttttctcggtttgtacctctccactatcctttgaatcctttccatgtagatgagataatg

SEQ ID NO: 18207 - DNA, 305 bp, Homo sapiens
  MAP TO AL080246.13; EXPRESSED IN LUNG, SIGNAL = 1.5; EXPRESSED IN BONE MARROW, SIGNAL = 3.7; EXPRESSED IN BRAIN, SIGNAL = 3.7; EXPRESSED IN FETAL LIVER, SIGNAL = 2.3; EXPRESSED IN BT474, SIGNAL = 1.8; EXPRESSED IN ADULT LIVER, SIGNAL = 2.6; EXPRESSED IN HELA, SIGNAL = 2.9; EXPRESSED IN PLACENTA, SIGNAL =   3; EXPRESSED IN HBL100, SIGNAL =   2; EXPRESSED IN HEART, SIGNAL = 2.1; NT HIT: AB046839.1, EVALUE 2.90e+00
catggcctccaggatgggtggctacaaaacaatgatgatgatgatgatggtgatggtgatgatgatgatggtgatgatgatagtgatgatgatgatggtgatgatgatagtgatgatgatgctgataatgatggtgatggtgatggcgatgatggtgatggtgatgatgatgtaacgatgatggtgatgataatgatggcaatggtgatggtgatgatggtgatggtgatgataatagtgatggtgatgatgatggtgatggtgctggtgaggaggagaggagaatgagggtgatgatgatggta

SEQ ID NO: 18208 - DNA, 168 bp, Homo sapiens
  MAP TO AL034431.13; EXPRESSED IN FETAL LIVER, SIGNAL = 9.8; EXPRESSED IN ADULT LIVER, SIGNAL = 3.4; EXPRESSED IN PLACENTA, SIGNAL = 5.6; EXPRESSED IN HELA, SIGNAL = 2.5; EXPRESSED IN BONE MARROW, SIGNAL = 2.8; EXPRESSED IN BRAIN, SIGNAL = 3.2; EXPRESSED IN BT474, SIGNAL = 2.4; EXPRESSED IN HBL100, SIGNAL = 2.2; EXPRESSED IN HEART, SIGNAL = 3.9; EXPRESSED IN LUNG, SIGNAL = 3.5; EST_HUMAN HIT: AI266468.1, EVALUE 1.50e-01; SWISSPROT HIT: Q05651, EVALUE 1.70e+00; NT HIT: AL163280.2, EVALUE 9.80e-02
caccctcttggtgtcttcacaacggagaagagacagaagggccaggcagctctctgcagcttctttcctaagggctctgatcccattcatgagggcagaaccctcacaatttcatcacttccccaaaggcctcatctctgaataccaccgccttgggatttatgttcc

SEQ ID NO: 18209 - DNA, 217 bp, Homo sapiens
  MAP TO AL035078.32; EXPRESSED IN LUNG, SIGNAL = 2.7; EXPRESSED IN BT474, SIGNAL = 2.3; EXPRESSED IN ADULT LIVER, SIGNAL = 5.3; EXPRESSED IN HEART, SIGNAL =   2; EXPRESSED IN PLACENTA, SIGNAL = 5.6; EXPRESSED IN BRAIN, SIGNAL = 3.4; EXPRESSED IN BONE MARROW, SIGNAL = 2.5; EXPRESSED IN FETAL LIVER, SIGNAL = 2.2; EXPRESSED IN HELA, SIGNAL = 2.9; EXPRESSED IN HBL100, SIGNAL =   2; EST_HUMAN HIT: AV730761.1, EVALUE 5.00e-82; NT HIT: AL163285.2, EVALUE 3.00e-82; SWISSPROT HIT: P08547, EVALUE 4.00e-24
gtttaaatccattgtttctttgttgactttctctcttgatgacctgtctagtactgtcagtggagtattgaagtcccccactattattgtgttgctgtctatctcatttcttaagtctattagtaattgtttcataaatttggaagctccagtgttaggtgcatatatatttaggattgtgatattttcctgttggacaaggccttttaccattaca

SEQ ID NO: 18210 - DNA, 723 bp, Homo sapiens
  MAP TO AL035587.5; EXPRESSED IN LUNG, SIGNAL = 1.5; EXPRESSED IN BT474, SIGNAL = 1.8; EXPRESSED IN FETAL LIVER, SIGNAL = 1.5; EXPRESSED IN ADULT LIVER, SIGNAL = 2.4; EXPRESSED IN PLACENTA, SIGNAL = 1.7; EXPRESSED IN BRAIN, SIGNAL = 1.7; EXPRESSED IN BONE MARROW, SIGNAL = 1.6; EXPRESSED IN HEART, SIGNAL = 1.2; EXPRESSED IN HELA, SIGNAL = 2.1; EXPRESSED IN HBL100, SIGNAL = 1.7; NT HIT: D87077.1, EVALUE 0.00e+00; SWISSPROT HIT: P36938, EVALUE 1.30e+00
tgtggtccgggatgaacttttccaggcagttttcctgtgaagccataggagaaaagttggggaaatctaactcaacagagccgctaaccgtggggtcactctggggctgccgtcccgcctttttgagttccaagatgttcttaaatgtggtttccaagctctttgtcagctggagatctggctggggttcgcctgaccctttcatgatgtctgtgtgtaaaacttcattctttggagaattcctcagacttttgtcctggaaggaattgttacacgtcatctccaagtgcgaatctgctaggatgcttgacagtttgctctcagtaccatgatccgatctggatgaggttttccggtgcccctcagggccgggagagcactgactggccttcagaggctctctccggctggccttctcttcagacgtgctctggtactgcactaagcccactttgtcaaatttcagtgctctgccaaggcattctgtttttttagaaatgtttccttctgcagagaccacgatgtgattaggcactagatgaaactggtcatgattcatgggttccgtcacaccggttttggctcggtctctgccttgggccttggctggcggttgcagagagctgcttgctttactgccatgctggtcactccggccaaactgtgtctcatgagcagctttatcaagtttgaaggaacaacagaaatcagcctgaaaaccct

SEQ ID NO: 18211 - DNA, 114 bp, Homo sapiens
  MAP TO AL096887.5; EXPRESSED IN LUNG, SIGNAL = 1.3; EXPRESSED IN BT474, SIGNAL = 0.99; EXPRESSED IN ADULT LIVER, SIGNAL = 3.6; EXPRESSED IN HEART, SIGNAL = 1.2; EXPRESSED IN PLACENTA, SIGNAL = 1.2; EXPRESSED IN BRAIN, SIGNAL = 1.1; EXPRESSED IN BONE MARROW, SIGNAL = 1.1; EXPRESSED IN FETAL LIVER, SIGNAL = 1.9; EXPRESSED IN HELA, SIGNAL =   1; EXPRESSED IN HBL100, SIGNAL = 1.1; SWISSPROT HIT: P00740, EVALUE 5.00e-20; NT HIT: gi10518507, EVALUE 5.00e-58; EST_HUMAN HIT: AV696892.1, EVALUE 7.00e-58
atggagatcagtgtgagtccaatccatgtttaaatggcggcagttgcaaggatgacattaattcctatgaatgttggtgtccctttggatttgaaggaaagaactgtgaattag

SEQ ID NO: 18212 - DNA, 332 bp, Homo sapiens
  MAP TO AP000347.1; EXPRESSED IN FETAL LIVER, SIGNAL = 1.8; EXPRESSED IN ADULT LIVER, SIGNAL = 1.6; EXPRESSED IN PLACENTA, SIGNAL = 1.9; EXPRESSED IN HELA, SIGNAL = 1.8; EXPRESSED IN BRAIN, SIGNAL = 2.5; EXPRESSED IN BT474, SIGNAL =   3; EXPRESSED IN HEART, SIGNAL = 0.95; EXPRESSED IN HBL100, SIGNAL =   2; EXPRESSED IN LUNG, SIGNAL = 1.2; EXPRESSED IN BONE MARROW, SIGNAL = 2.8; NT HIT: gi9558718, EVALUE 4.00e-09; EST_HUMAN HIT: AW453046.1, EVALUE 9.00e-04; SWISSPROT HIT: Q03385, EVALUE 4.20e-01
atcctgctccacgtcctgggcaacacgcattaacaatgccggccctggagccagcaccaccactgctggcggacctggggcctgctctggagccagagtcacctgcagccctgggtccaccaggatatctacattcagcaccagggccagcaccagcaccaggggaagggccccctccagggacagtgctggagccacagtcagccccagagtcctcctgtccctgtcgtgggtctgtaaagaaccaacccagtgaggagctgcctgacatgacgaccttccctcccaggctgctggcagagcagctgaccctcatggatgcggtgagcagc

SEQ ID NO: 18213 - DNA, 252 bp, Homo sapiens
  MAP TO AP000352.2; EXPRESSED IN HBL100, SIGNAL = 6.3; EXPRESSED IN HELA, SIGNAL = 9.3; EXPRESSED IN BONE MARROW, SIGNAL = 5.4; EXPRESSED IN LUNG, SIGNAL = 4.9; EXPRESSED IN BT474, SIGNAL = 6.7; EXPRESSED IN ADULT LIVER, SIGNAL = 4.3; EXPRESSED IN HEART, SIGNAL =   5; EXPRESSED IN PLACENTA, SIGNAL = 8.2; EXPRESSED IN BRAIN, SIGNAL = 4.5; EXPRESSED IN FETAL LIVER, SIGNAL = 9.9; NT HIT: gi11417862, EVALUE 0.00e+00; EST_HUMAN HIT: AW856489.1, EVALUE 1.60e-01; SWISSPROT HIT: Q9Y6J0, EVALUE 6.00e-40
gactccttgctccggctgaaggactatcggcagtgttttgagtgttccgatgtggctctgaacgaggctgtccagcagatggtgaactcaggtgaggctgccgccaaggaggagtgggtggccacagtgacccaactgctgatgggcatcgagcaggccctctctgcggacagcagtggtagcatcctgaaggtatcatcctccaccactggccttgtgcggctcaccaacaacctcatccaggtaacccct

SEQ ID NO: 18214 - DNA, 133 bp, Homo sapiens
  MAP TO AP000356.1; EXPRESSED IN FETAL LIVER, SIGNAL = 3.2; EXPRESSED IN ADULT LIVER, SIGNAL = 1.6; EXPRESSED IN PLACENTA, SIGNAL = 3.2; EXPRESSED IN HBL100, SIGNAL = 8.3; EXPRESSED IN HELA, SIGNAL = 5.9; EXPRESSED IN BT474, SIGNAL = 3.2; EXPRESSED IN HEART, SIGNAL = 2.7; EXPRESSED IN BRAIN, SIGNAL = 2.6; EXPRESSED IN LUNG, SIGNAL = 2.1; EXPRESSED IN BONE MARROW, SIGNAL = 2.8; SWISSPROT HIT: P43331, EVALUE 6.00e-18; EST_HUMAN HIT: BE266867.1, EVALUE 1.00e-59; NT HIT: gi11417873, EVALUE 1.00e-59
ggtgtgccgattaaagtactgcatgaggccgagggccacattgtgacatgtgagacgaacaccggtgaggtatatcgggggaagctcattgaagcagaggacaacatgaactgccaggtattctgctttgcat

SEQ ID NO: 18215 - DNA, 406 bp, Homo sapiens
  MAP TO AP000512.1; EXPRESSED IN BRAIN, SIGNAL = 1.6; EXPRESSED IN BONE MARROW, SIGNAL = 1.7; EXPRESSED IN LUNG, SIGNAL = 1.2; EXPRESSED IN ADULT LIVER, SIGNAL = 1.2; EXPRESSED IN BT474, SIGNAL = 1.3; EXPRESSED IN FETAL LIVER, SIGNAL = 2.7; EXPRESSED IN HBL100, SIGNAL = 2.1; EXPRESSED IN HEART, SIGNAL = 1.5; EXPRESSED IN PLACENTA, SIGNAL = 2.3; EXPRESSED IN HELA, SIGNAL = 2.3; NT HIT: gi7661965, EVALUE 0.00e+00; EST_HUMAN HIT: AA774628.1, EVALUE 2.60e-01; SWISSPROT HIT: P46013, EVALUE 2.00e-03
atttcccactacacctcgggaagaatgtggtaggccgaatgcctgactgctctgtggccctgccctttccatctatctccaaacaacatgcagagattgaaatcttagcctgggacaaggcacctatcctccgagactgtgggagccttaatggtactcaaatcctgagacctcctaaggttttgagccctggggtgagtcaccgtctgagggaccaggaattgattctctttgctgacttgctctgccagtaccatcgcctggatgtctctctgccctttgtctcccggggccctctgacagtagaagagacacccagagtacagggagaaactcaaccccagaggcttctgttggctgaggactcggaggaggaagtaggtaagtttgtatattggcagggaga

SEQ ID NO: 18216 - DNA, 357 bp, Homo sapiens
  MAP TO AP000518.1; EXPRESSED IN HEART, SIGNAL = 0.97; EXPRESSED IN PLACENTA, SIGNAL = 3.7; EXPRESSED IN BONE MARROW, SIGNAL =   1; NT HIT: Y07829.2, EVALUE 0.00e+00; SWISSPROT HIT: Q02084, EVALUE 3.00e-12
agggcattttcaatggtcagttcatgatgagacatgtgttcaggggacaccaggcattccacacatagaagaagtctgctctcctcacagaacctgcacaccctcttctggtggttggggcagatatagcctgtccctagcacctcctcagaacagggcttccggcagagggggcagcagaagaccccagaggctgaggccttctccacatgctgtgtcaggcacactcgacagaagagatgtccgcagttggtgctcacggcctccttcaggctctcctggcagatggggcagacaccctcctcctggttgtccttctgcaaagggatcatggcctcgttcctaccctgtcagcct

SEQ ID NO: 18217 - DNA, 85 bp, Homo sapiens
  MAP TO AP000350.1; EXPRESSED IN PLACENTA, SIGNAL = 1.4; EXPRESSED IN HBL100, SIGNAL = 1.9; EXPRESSED IN HEART, SIGNAL = 2.2; EXPRESSED IN BONE MARROW, SIGNAL = 2.6; EXPRESSED IN LUNG, SIGNAL = 1.7; EXPRESSED IN ADULT LIVER, SIGNAL = 3.4; EXPRESSED IN FETAL LIVER, SIGNAL = 3.2; EXPRESSED IN BRAIN, SIGNAL = 1.8; EXPRESSED IN BT474, SIGNAL = 1.7; EXPRESSED IN HELA, SIGNAL = 5.7; SWISSPROT HIT: P26306, EVALUE 9.30e+00; NT HIT: AF293359.1, EVALUE 6.90e-01; EST_HUMAN HIT: BF365612.1, EVALUE 4.00e-06
cctgttccgaccagattctgttttgatcagcgggatcatgaccaaggtcttgaccagtgcttggaaaacaagttctgctgatctc

SEQ ID NO: 18218 - DNA, 201 bp, Homo sapiens
  MAP TO AP000365.1; EXPRESSED IN PLACENTA, SIGNAL = 4.2; EXPRESSED IN HEART, SIGNAL = 0.95; EXPRESSED IN BONE MARROW, SIGNAL =   1; EXPRESSED IN LUNG, SIGNAL = 1.3; EXPRESSED IN ADULT LIVER, SIGNAL = 0.97; EXPRESSED IN FETAL LIVER, SIGNAL = 0.97; NT HIT: AL163201.2, EVALUE 5.00e-93; SWISSPROT HIT: O77811, EVALUE 7.30e-01
gggcagctggttgccctaatggtggattctctgttcaaggatggtgagctagtgttcagctcaggaagccactccacagagatggccaccaaaagggcttcagtggtcccatctcaattaacacctgaaacattgttaattactacagtgaaggtcacaaatgggtttttattagtgaaactgttggcttacaaagcagca

SEQ ID NO: 18219 - DNA, 148 bp, Homo sapiens
  MAP TO AP000509.1; EXPRESSED IN HBL100, SIGNAL = 1.7; EXPRESSED IN LUNG, SIGNAL = 3.2; EXPRESSED IN BONE MARROW, SIGNAL = 2.8; EXPRESSED IN BRAIN, SIGNAL = 2.7; EXPRESSED IN ADULT LIVER, SIGNAL = 2.3; EXPRESSED IN BT474, SIGNAL =   2; EXPRESSED IN FETAL LIVER, SIGNAL = 2.1; EXPRESSED IN HELA, SIGNAL = 2.3; EXPRESSED IN PLACENTA, SIGNAL = 2.6; EXPRESSED IN HEART, SIGNAL = 2.2; SWISSPROT HIT: O57428, EVALUE 1.30e+00; EST_HUMAN HIT: BF347831.1, EVALUE 2.00e+00; NT HIT: AL163301.2, EVALUE 7.20e-02
gaggggcctgtcttcagccagggacaagcagaacattatggtcagcatcatccacaaggtcaagaggccacagagccccctgagggcagtatactggccccttcgatattgtatcctacccagcaggttagtaggactgcatgactga

SEQ ID NO: 18220 - DNA, 219 bp, Homo sapiens
  MAP TO AP000513.1; EXPRESSED IN BT474, SIGNAL = 2.8; EXPRESSED IN HELA, SIGNAL = 6.5; EXPRESSED IN PLACENTA, SIGNAL = 6.1; EXPRESSED IN HBL100, SIGNAL = 5.9; EXPRESSED IN HEART, SIGNAL = 1.5; EXPRESSED IN LUNG, SIGNAL = 1.4; EXPRESSED IN BONE MARROW, SIGNAL = 1.3; EXPRESSED IN ADULT LIVER, SIGNAL =   2; EXPRESSED IN FETAL LIVER, SIGNAL = 2.1; EXPRESSED IN BRAIN, SIGNAL = 1.9; EST_HUMAN HIT: BE266191.1, EVALUE 1.00e-94; SWISSPROT HIT: P07548, EVALUE 5.50e-01; NT HIT: gi10947134, EVALUE 1.00e-94
agcagaggcccgcggcactcaccatgcagacccagcactggagggctgagtggtggggggtctggaaaagtgaagcgcacagtgtactccttagggcgcttcaggagctcaggggcctcctgggattcctcatcttggtttttccgtcggcatttctgctgcttccgagtcagggcttccttcgtttgtttttcctggagaggaagaggaaaaaagaga

SEQ ID NO: 18221 - DNA, 482 bp, Homo sapiens
  MAP TO AP000548.1; EXPRESSED IN LUNG, SIGNAL = 4.2; EXPRESSED IN BRAIN, SIGNAL = 0.97; EXPRESSED IN ADULT LIVER, SIGNAL = 1.6; EXPRESSED IN HEART, SIGNAL = 3.7; EXPRESSED IN PLACENTA, SIGNAL = 6.6; NT HIT: M60676.1, EVALUE 0.00e+00; EST_HUMAN HIT: AU140989.1, EVALUE 2.00e-86; SWISSPROT HIT: P04275, EVALUE 1.00e-52
aatcacctcctccatgaactccttgctcctgttgaagtcggcttcaccaattttgtccaatccttccgggacaaatgccacatccagaaccatggagttcctcttgggccccagggtcgaaagccccaagagccccgggcccacagtgacttgtgccatgtgggggggcagagtaggaggaggggcttcaggggcaaggtcacagaggtagctaacgatctcttccctttgctgctccagctcatccacaccgctcagcacgaaggccttgttctcaggggcctgcttctcaatgaggcggatctgcttgaggttggcatggggcccaatgccaaccgggatcacgatgaccttcttcttcttcaggccctggacgtagcggacaaagttccgggacatccgttggggctcctggctggccatcaggagcagggcgatgcggaaggcttcagggcggtcgatcttgctgatgatttggaaca

SEQ ID NO: 18222 - DNA, 145 bp, Homo sapiens
  MAP TO AC004852.2; EXPRESSED IN BRAIN, SIGNAL = 2.8; EXPRESSED IN FETAL LIVER, SIGNAL = 3.5; EXPRESSED IN BT474, SIGNAL = 2.1; EXPRESSED IN HELA, SIGNAL = 2.4; EXPRESSED IN PLACENTA, SIGNAL = 2.8; EXPRESSED IN HBL100, SIGNAL = 1.7; EXPRESSED IN LUNG, SIGNAL =   3; EXPRESSED IN BONE MARROW, SIGNAL = 3.2; EXPRESSED IN ADULT LIVER, SIGNAL = 2.4; EXPRESSED IN HEART, SIGNAL = 2.4; EST_HUMAN HIT: AI208733.1, EVALUE 2.00e-27; SWISSPROT HIT: P17170, EVALUE 1.00e+00; NT HIT: D38044.1, EVALUE 1.00e-28
cacaaagtcagggtcatcgatagctctgtcttccacatctatatcttgtcccactgaaaggtgttcaggggcaataacatgcatggagctgtcatttcctgtgataacaatatcttcttctggaatacctcctgaaggacttgcc

SEQ ID NO: 18223 - DNA, 132 bp, Homo sapiens
  MAP TO AC007833.1; EXPRESSED IN PLACENTA, SIGNAL = 5.5; EXPRESSED IN HBL100, SIGNAL = 8.5; EXPRESSED IN HEART, SIGNAL = 5.9; EXPRESSED IN LUNG, SIGNAL = 6.2; EXPRESSED IN BONE MARROW, SIGNAL = 5.4; EXPRESSED IN FETAL LIVER, SIGNAL = 7.2; EXPRESSED IN ADULT LIVER, SIGNAL = 4.8; EXPRESSED IN BT474, SIGNAL = 3.7; EXPRESSED IN HELA, SIGNAL = 4.8; EXPRESSED IN BRAIN, SIGNAL = 5.3; EST_HUMAN HIT: BE175877.1, EVALUE 2.00e-30
aaacgccttatacacatggaaagggttaaaggcagaaggctgatcttctatactcctcaaggtcgtctttaaaggtcggatgggtaatggcttttcctctgaactattcatagaaaacagctgttcttttaa

SEQ ID NO: 18224 - DNA, 127 bp, Homo sapiens
  MAP TO AC005488.2; EXPRESSED IN BT474, SIGNAL = 5.4; EXPRESSED IN HELA, SIGNAL = 5.4; EXPRESSED IN PLACENTA, SIGNAL = 4.4; EXPRESSED IN HBL100, SIGNAL = 4.2; EXPRESSED IN HEART, SIGNAL = 2.7; EXPRESSED IN LUNG, SIGNAL = 1.9; EXPRESSED IN BONE MARROW, SIGNAL = 3.5; EXPRESSED IN ADULT LIVER, SIGNAL = 3.7; EXPRESSED IN FETAL LIVER, SIGNAL = 3.5; EXPRESSED IN BRAIN, SIGNAL = 4.8; EST_HUMAN HIT: AW517461.1, EVALUE 6.00e-64; NT HIT: gi11419251, EVALUE 6.00e-64; SWISSPROT HIT: Q06730, EVALUE 5.00e-11
ccagtgtcattcaaagatgtggctgtggatttcacccaggaggagtggtggcaactggaccctgatgagaagataacatacggggatgtgatgttggagaactacagccatctagtttccctgggtg

SEQ ID NO: 18225 - DNA, 87 bp, Homo sapiens
  MAP TO AC008015.4; EXPRESSED IN BONE MARROW, SIGNAL = 2.5; EXPRESSED IN BRAIN, SIGNAL = 1.9; EXPRESSED IN FETAL LIVER, SIGNAL = 1.8; EXPRESSED IN ADULT LIVER, SIGNAL = 1.5; EXPRESSED IN BT474, SIGNAL =   2; EXPRESSED IN HEART, SIGNAL = 1.5; EXPRESSED IN HELA, SIGNAL = 1.3; EXPRESSED IN HBL100, SIGNAL = 1.5; EXPRESSED IN PLACENTA, SIGNAL = 1.4; EXPRESSED IN LUNG, SIGNAL = 1.6; NT HIT: AF042838.1, EVALUE 1.80e-01; EST_HUMAN HIT: BE075691.1, EVALUE 1.80e-01; SWISSPROT HIT: P04114, EVALUE 5.40e+00
gggcccagttgtttgggctctcatctgggaagctgggatggcagtggtgttgcccagccacttcaccactccatacatcacagctgc

SEQ ID NO: 18226 - DNA, 112 bp, Homo sapiens
  MAP TO AC004019.11; EXPRESSED IN BRAIN, SIGNAL = 2.8; EXPRESSED IN BT474, SIGNAL = 1.9; EXPRESSED IN HBL100, SIGNAL = 2.6; EXPRESSED IN HELA, SIGNAL = 2.5; EXPRESSED IN PLACENTA, SIGNAL = 3.8; EXPRESSED IN LUNG, SIGNAL = 3.6; EXPRESSED IN BONE MARROW, SIGNAL = 4.1; EXPRESSED IN ADULT LIVER, SIGNAL = 2.9; EXPRESSED IN FETAL LIVER, SIGNAL = 4.5; EXPRESSED IN HEART, SIGNAL = 3.6; SWISSPROT HIT: P03204, EVALUE 4.00e+00; EST_HUMAN HIT: BF376834.1, EVALUE 2.00e-42; NT HIT: AE001988.1, EVALUE 2.10e-01
aatgcagatgcacccggtccagtcgcaggcctcgttcccaaagacccccacagcagcaacatcacaggaggaggtgccgcctcataagcctccaacacttcccctggatcag

SEQ ID NO: 18227 - DNA, 457 bp, Homo sapiens; identical to SEQ ID NO: 1468
  MAP TO AC007768.1; EXPRESSED IN PLACENTA, SIGNAL = 5.9; EXPRESSED IN BONE MARROW, SIGNAL = 6.2; EXPRESSED IN LUNG, SIGNAL = 5.7; EXPRESSED IN BRAIN, SIGNAL = 5.5; EXPRESSED IN ADULT LIVER, SIGNAL = 5.8; EXPRESSED IN FETAL LIVER, SIGNAL = 4.4; EXPRESSED IN BT474, SIGNAL = 5.4; EXPRESSED IN HEART, SIGNAL = 4.2; EXPRESSED IN HELA, SIGNAL = 4.3; EXPRESSED IN HBL100, SIGNAL = 3.8; SWISSPROT HIT: P39193, EVALUE 6.00e+00; NT HIT: AL163210.2, EVALUE 1.00e-49; EST_HUMAN HIT: BE274263.1, EVALUE 7.00e-43
  unsure 226

SEQ ID NO: 18228 - DNA, 198 bp, Homo sapiens
  MAP TO AC007868.1; EXPRESSED IN BT474, SIGNAL = 2.8; EXPRESSED IN HBL100, SIGNAL = 3.1; EXPRESSED IN HELA, SIGNAL = 3.7; EXPRESSED IN PLACENTA, SIGNAL = 5.5; EXPRESSED IN BRAIN, SIGNAL =   4; EXPRESSED IN LUNG, SIGNAL = 3.7; EXPRESSED IN BONE MARROW, SIGNAL = 5.1; EXPRESSED IN ADULT LIVER, SIGNAL = 5.9; EXPRESSED IN FETAL LIVER, SIGNAL = 4.1; EXPRESSED IN HEART, SIGNAL = 4.1; SWISSPROT HIT: P51671, EVALUE 8.60e+00; NT HIT: AF180942.1, EVALUE 7.30e+00; EST_HUMAN HIT: AW959026.1, EVALUE 2.70e+00
cctgaattccctaattcgaggcaaggacctggtgtcttattcaaatgaatctgtttggcaaaagacccagctctcaaaaccagcctacttacaacagtctagaggggcctgccctggcgagagaatgtctcagggctccactgaagtacagaagagcagtagccagggtgagggggtcctacaccaggaatgagctgc

SEQ ID NO: 18229 - DNA, 162 bp, Homo sapiens
  MAP TO AC005948.6; EXPRESSED IN FETAL LIVER, SIGNAL =  17; EXPRESSED IN BT474, SIGNAL =  22; EXPRESSED IN HEART, SIGNAL = 8.3; EXPRESSED IN HELA, SIGNAL =  28; EXPRESSED IN HBL100, SIGNAL =  19; EXPRESSED IN PLACENTA, SIGNAL =  25; EXPRESSED IN BRAIN, SIGNAL =  11; EXPRESSED IN LUNG, SIGNAL = 9.1; EXPRESSED IN BONE MARROW, SIGNAL =  16; EXPRESSED IN ADULT LIVER, SIGNAL =  12; EST_HUMAN HIT: AV716040.1, EVALUE 8.00e-65; SWISSPROT HIT: P49207, EVALUE 7.00e-19; NT HIT: gi4506636, EVALUE 4.00e-65
tctgactctgtgcttgtgccttcaacactttcacaatgattttctcttcgtcgataaggaaagcatgcttgatcctgtcatgaacacatttagcatacatggaaccaccataggccctgctgacatatttctttgttttggacaatctcataggaattttag

SEQ ID NO: 18230 - DNA, 377 bp, Homo sapiens
  MAP TO AC007919.18; EXPRESSED IN BONE MARROW, SIGNAL =  15; EXPRESSED IN FETAL LIVER, SIGNAL =  23; EXPRESSED IN ADULT LIVER, SIGNAL = 9.3; EXPRESSED IN BT474, SIGNAL =   3; EXPRESSED IN HEART, SIGNAL =  14; EXPRESSED IN HELA, SIGNAL =  12; EXPRESSED IN HBL100, SIGNAL = 7.2; EXPRESSED IN PLACENTA, SIGNAL =  22; EXPRESSED IN BRAIN, SIGNAL =  15; EXPRESSED IN LUNG, SIGNAL = 2.3; NT HIT: U26744.1, EVALUE 2.40e-01; SWISSPROT HIT: P41848, EVALUE 1.50e+00
atggctcaatatcaacattgccaaagtcaaaacatcagttttggaggacatccttgacatcactccaacagacaggttacgggttgagactttgaatggaaaggcacaggtgcctggagtgcacttgtggggccctgacaggcccattgcagtcctcaggttcctcggcttctcaggacagttcatcatagcagccccaccctgctggcagtactccgtctgggcttctctgatgccttcttcccattttttcttgttttcccaacttctgcttcctctgaggctccacctcttcttggcagctctaacactattcttcattcaggggatttcatggatttccagggtttccattatcactgacctgccaacaaatt

SEQ ID NO: 18231 - DNA, 109 bp, Homo sapiens
  MAP TO AC006318.2; EXPRESSED IN PLACENTA, SIGNAL = 1.1; EXPRESSED IN BONE MARROW, SIGNAL =   1; EXPRESSED IN LUNG, SIGNAL = 0.94; EXPRESSED IN ADULT LIVER, SIGNAL = 1.1; EXPRESSED IN FETAL LIVER, SIGNAL = 1.1; EXPRESSED IN BT474, SIGNAL = 1.2; EXPRESSED IN HEART, SIGNAL = 1.4; EXPRESSED IN BRAIN, SIGNAL =   1; EST_HUMAN HIT: BE707829.1, EVALUE 1.40e+00; NT HIT: X96469.1, EVALUE 8.00e-04
attatgatgatgaggaggaggatggtggtgttcactgtggtagtgaatgctaatgaagagcttatcacctgccaaaatcacatgcccaccacaattctgtatgcaggta

SEQ ID NO: 18232 - DNA, 213 bp, Homo sapiens
  MAP TO AC006369.3; EXPRESSED IN HEART, SIGNAL = 1.3; EXPRESSED IN BT474, SIGNAL = 1.1; EXPRESSED IN HBL100, SIGNAL = 1.1; EXPRESSED IN PLACENTA, SIGNAL = 0.96; EXPRESSED IN BRAIN, SIGNAL = 1.2; EXPRESSED IN LUNG, SIGNAL = 1.1; EXPRESSED IN BONE MARROW, SIGNAL = 1.1; EXPRESSED IN ADULT LIVER, SIGNAL = 1.4; NT HIT: U07978.1, EVALUE 3.20e-02; SWISSPROT HIT: P34571, EVALUE 4.40e+00
ccgtcagatggctatgactttttcagccacctcctcgtgctgtcagctcccggtagccttgccgtccagtttataacgccagcagccagagcctgcaccattctgcgcaaatgggattatataattaatgttaacccaaaagcaggacttctattcatcatcattcagttcattcctgtgggcttcatccagccccggctctcggtccaggta

SEQ ID NO: 18233 - DNA, 180 bp, Homo sapiens
  MAP TO AC008013.8; EXPRESSED IN BT474, SIGNAL = 1.6; EXPRESSED IN FETAL LIVER, SIGNAL =   1; EXPRESSED IN HEART, SIGNAL = 1.1; EXPRESSED IN HELA, SIGNAL = 0.96; EXPRESSED IN HBL100, SIGNAL = 4.4; EXPRESSED IN PLACENTA, SIGNAL = 1.1; EXPRESSED IN BRAIN, SIGNAL = 1.7; EXPRESSED IN LUNG, SIGNAL = 1.2; EXPRESSED IN BONE MARROW, SIGNAL = 1.6; EXPRESSED IN ADULT LIVER, SIGNAL = 1.7; SWISSPROT HIT: P48509, EVALUE 2.00e-03; EST_HUMAN HIT: BE562045.1, EVALUE 1.60e-01; NT HIT: Z75248.1, EVALUE 1.70e+00
ctgagtgatgaactgaagcagcacttgaaccggactctggctgagaactacgggcagcccggagccacgcagatcaccgcctcagtggaccgactccagcaggatgtaagccatgccccatatggccttgaaggccaagcccacaaggattcaaatcccgactgttctttcctttctggg

SEQ ID NO: 18234 - DNA, 155 bp, Homo sapiens
  MAP TO AC006445.10; EXPRESSED IN BONE MARROW, SIGNAL = 1.4; EXPRESSED IN BT474, SIGNAL = 1.3; EXPRESSED IN FETAL LIVER, SIGNAL = 1.1; EXPRESSED IN HEART, SIGNAL = 1.1; EXPRESSED IN HELA, SIGNAL = 1.6; EXPRESSED IN HBL100, SIGNAL = 1.4; EXPRESSED IN PLACENTA, SIGNAL = 2.2; EXPRESSED IN BRAIN, SIGNAL = 1.4; EXPRESSED IN LUNG, SIGNAL = 1.2; EXPRESSED IN ADULT LIVER, SIGNAL = 1.4; NT HIT: AB037748.1, EVALUE 8.00e-82; EST_HUMAN HIT: R17437.1, EVALUE 1.00e-81
aatcctcagagccagaaagaaaacgccagaaatcagtttctgatccagtggaggacaagaaagagcaggagtctgatgaggaagaggaagaagaggaagaggacgagccttcaggagccaccacaagatccaccaccagatcagaggctcagagg

SEQ ID NO: 18235 - DNA, 180 bp, Homo sapiens
  MAP TO AC006509.15; EXPRESSED IN ADULT LIVER, SIGNAL = 3.1; EXPRESSED IN HBL100, SIGNAL =  19; EXPRESSED IN PLACENTA, SIGNAL =   4; EXPRESSED IN BRAIN, SIGNAL = 2.8; EXPRESSED IN LUNG, SIGNAL = 2.2; EXPRESSED IN BONE MARROW, SIGNAL = 2.6; EXPRESSED IN FETAL LIVER, SIGNAL = 3.8; EXPRESSED IN BT474, SIGNAL = 9.9; EXPRESSED IN HEART, SIGNAL = 2.2; EXPRESSED IN HELA, SIGNAL =  15; EST_HUMAN HIT: AV724550.1, EVALUE 1.00e-08; NT HIT: gi4505408, EVALUE 7.00e-09; SWISSPROT HIT: Q01768, EVALUE 5.00e-09
ctacttcaggggtttctcagaggcccgaaggaacttcatggtcaccaggtagaatcccttctgctcagagtatttgatgatttcacccaccaggctgtgctgaacagcactcggattgataatgatgctctcagtgttggccatggcctgaggatctgacagtgtcaggtggtgcgggag

SEQ ID NO: 18236 - DNA, 206 bp, Homo sapiens
  MAP TO AC009594.2; EXPRESSED IN BT474, SIGNAL = 1.4; EXPRESSED IN FETAL LIVER, SIGNAL = 1.2; EXPRESSED IN HELA, SIGNAL = 0.96; EXPRESSED IN PLACENTA, SIGNAL = 0.96; EXPRESSED IN HBL100, SIGNAL = 2.3; EXPRESSED IN HEART, SIGNAL = 1.1; EXPRESSED IN BONE MARROW, SIGNAL = 1.3; EXPRESSED IN LUNG, SIGNAL = 0.92; EXPRESSED IN BRAIN, SIGNAL = 1.1; SWISSPROT HIT: Q13606, EVALUE 6.00e-11; NT HIT: AJ251154.1, EVALUE 5.00e-16; EST_HUMAN HIT: AU076406.1, EVALUE 1.30e-01
  unsure 120
  unsure 135
  unsure 177
gcacagccagaaaaggaaatggtctttctttctgaaaggaagctcactagtgtggagggaatagaggtggtggtgtagcagatgtccaagaaggagaggttccccagaaagaagtacatnaggggtgtgaaggtngagggtccaagatgctgattaaaatgagagtaccattccccnagaaggatgaccacatacattatgaagat

SEQ ID NO: 18237 - DNA, 160 bp, Homo sapiens
  MAP TO AC009474.1; EXPRESSED IN BT474, SIGNAL =  50; EXPRESSED IN ADULT LIVER, SIGNAL =  16; EXPRESSED IN FETAL LIVER, SIGNAL =  28; EXPRESSED IN HELA, SIGNAL =  45; EXPRESSED IN PLACENTA, SIGNAL =  37; EXPRESSED IN HBL100, SIGNAL =  51; EXPRESSED IN HEART, SIGNAL =  23; EXPRESSED IN LUNG, SIGNAL =  23; EXPRESSED IN BONE MARROW, SIGNAL =  34; EXPRESSED IN BRAIN, SIGNAL =  20; SWISSPROT HIT: Q16465, EVALUE 7.00e-10; EST_HUMAN HIT: AV742248.1, EVALUE 1.00e-51; NT HIT: gi10863874, EVALUE 1.00e-50
gataaatataaataacagtaaataaaaatgctgctctctcggccttagcaccattttcttggaaacctctgcaccatgagagccaagtggaggaagaagcgaatgcgcaggctgaagcacaaaagaaaaaagatgaggcagaggtccaagtaaactgcta

SEQ ID NO: 18238 - DNA, 164 bp, Homo sapiens
  MAP TO AC009414.2; EXPRESSED IN PLACENTA, SIGNAL = 0.96; EXPRESSED IN HBL100, SIGNAL = 1.1; EXPRESSED IN HEART, SIGNAL = 1.7; EXPRESSED IN LUNG, SIGNAL =   1; EXPRESSED IN BONE MARROW, SIGNAL = 1.1; EXPRESSED IN ADULT LIVER, SIGNAL = 1.2; EXPRESSED IN BT474, SIGNAL = 1.1; EST_HUMAN HIT: AA968926.1, EVALUE 2.20e+00; NT HIT: AB017138.1, EVALUE 8.10e-02; SWISSPROT HIT: P10759, EVALUE 2.90e+00
agctgcggtcacctgtggtttgagaaatgccctctcccagagcagtggttcctgaacctcagaaaccatcagacactccgagagtacttattacacatgcagattctggggctccacgtggtgctggccaaatcagagctgtgacatggagacccagaatttgt

SEQ ID NO: 18239 - DNA, 165 bp, Homo sapiens
  MAP TO AC009752.1; EXPRESSED IN PLACENTA, SIGNAL =   2; EXPRESSED IN BRAIN, SIGNAL =   2; EXPRESSED IN FETAL LIVER, SIGNAL = 1.8; EXPRESSED IN ADULT LIVER, SIGNAL = 1.5; EXPRESSED IN HEART, SIGNAL = 1.2; EXPRESSED IN HELA, SIGNAL = 1.7; EXPRESSED IN HBL100, SIGNAL = 2.5; EXPRESSED IN LUNG, SIGNAL =   3; EXPRESSED IN BONE MARROW, SIGNAL = 1.8; EXPRESSED IN BT474, SIGNAL = 2.1; SWISSPROT HIT: P20093, EVALUE 5.80e-01; NT HIT: AF167077.2, EVALUE 8.20e-02
agaatggcccggcaggatgccaaacctcgtttatctgagcggagcaaggccgcctggtcagtgtccactccacacccaggccctcctctctttgctgcggccacagcagacacgccagctgccccatcgctgcacaatgccaagcctccgtccacctcgccctga

SEQ ID NO: 18240 - DNA, 210 bp, Homo sapiens
  MAP TO AC010754.1; EXPRESSED IN PLACENTA, SIGNAL = 2.4; EXPRESSED IN BONE MARROW, SIGNAL = 1.8; EXPRESSED IN BRAIN, SIGNAL = 1.7; EXPRESSED IN FETAL LIVER, SIGNAL = 1.3; EXPRESSED IN HEART, SIGNAL = 1.3; EXPRESSED IN HELA, SIGNAL = 1.2; EXPRESSED IN HBL100, SIGNAL = 1.3; EXPRESSED IN LUNG, SIGNAL = 2.1; EXPRESSED IN ADULT LIVER, SIGNAL = 1.3; EXPRESSED IN BT474, SIGNAL = 1.7; EST_HUMAN HIT: AW751986.1, EVALUE 3.20e-02; SWISSPROT HIT: Q16787, EVALUE 7.20e-01; NT HIT: X85108.1, EVALUE 9.00e-52
gtgctgtggatgccgccaccgcctacgagaacatcctcaatgccatcaaagcggccgaggacgcagccaacagggctgccagtgcatctgaatctgccctccaggtgggcacctgtaccagcagcttctccacattcgctgtggagatggctgatttttatattttctttccgtgggctccaaggaatagaaacaaagcattattttaaa

SEQ ID NO: 18241 - DNA, 129 bp, Homo sapiens
  MAP TO AC010092.1; EXPRESSED IN BRAIN, SIGNAL = 0.98; EXPRESSED IN BT474, SIGNAL = 1.4; EXPRESSED IN BONE MARROW, SIGNAL =   1; EXPRESSED IN LUNG, SIGNAL = 0.94; EXPRESSED IN FETAL LIVER, SIGNAL = 1.1; EXPRESSED IN PLACENTA, SIGNAL =   2; EXPRESSED IN HEART, SIGNAL = 1.1; EXPRESSED IN HELA, SIGNAL = 1.1; EXPRESSED IN HBL100, SIGNAL =   1; NT HIT: gi11430348, EVALUE 8.00e-48; EST_HUMAN HIT: AW074403.1, EVALUE 8.00e-48; SWISSPROT HIT: Q9YB24, EVALUE 4.00e+00
cagatgaggaaggagtggaatgtgaatgtgaattttgaggagaacggattgcaggaggtatgcctcttactggacttgagccatttccaccctggtactgagtaaaagaaaaaggaagcattattattt

SEQ ID NO: 18242 - DNA, 94 bp, Homo sapiens
  MAP TO AC010128.1; EXPRESSED IN ADULT LIVER, SIGNAL = 1.8; EXPRESSED IN PLACENTA, SIGNAL = 1.8; EXPRESSED IN BONE MARROW, SIGNAL =   3; EXPRESSED IN BT474, SIGNAL = 1.5; EXPRESSED IN FETAL LIVER, SIGNAL = 1.7; EXPRESSED IN HEART, SIGNAL = 1.9; EXPRESSED IN HELA, SIGNAL = 1.6; EXPRESSED IN HBL100, SIGNAL = 1.4; EXPRESSED IN BRAIN, SIGNAL = 2.4; EXPRESSED IN LUNG, SIGNAL = 2.2; NT HIT: AF109907.1, EVALUE 3.00e-09; EST_HUMAN HIT: AI207699.1, EVALUE 1.00e-11; SWISSPROT HIT: P21249, EVALUE 4.10e+00
agtgatccttccccctcagcctcctgagtacctggaactacaggtgcaccaccatgctcagattgattgactgattgattgattgattatagac

SEQ ID NO: 18243 - DNA, 144 bp, Homo sapiens
  MAP TO AC010904.1; EXPRESSED IN BONE MARROW, SIGNAL = 1.8; EXPRESSED IN LUNG, SIGNAL = 1.9; EXPRESSED IN BRAIN, SIGNAL = 1.3; EXPRESSED IN ADULT LIVER, SIGNAL = 1.2; EXPRESSED IN BT474, SIGNAL = 1.1; EXPRESSED IN FETAL LIVER, SIGNAL = 1.4; EXPRESSED IN PLACENTA, SIGNAL = 1.3; EXPRESSED IN HBL100, SIGNAL = 0.92; EXPRESSED IN HELA, SIGNAL = 1.1; EXPRESSED IN HEART, SIGNAL = 1.5; NT HIT: AJ276505.1, EVALUE 1.30e+00; EST_HUMAN HIT: BF588887.1, EVALUE 1.20e-01; SWISSPROT HIT: O00476, EVALUE 1.50e-01
agacactgtaagggaactaactctgttgttcagagcaatgtcccctatcctattggtacttcctgttccattgacaaactctgtcctattagtatttactgttctgctggttatttcctgttctcttggcatctcctgtcctgt

SEQ ID NO: 18244 - DNA, 194 bp, Homo sapiens
  MAP TO AC010125.2; EXPRESSED IN BONE MARROW, SIGNAL = 1.9; EXPRESSED IN LUNG, SIGNAL =   2; EXPRESSED IN BRAIN, SIGNAL = 1.4; EXPRESSED IN BT474, SIGNAL = 1.2; EXPRESSED IN FETAL LIVER, SIGNAL = 1.7; EXPRESSED IN ADULT LIVER, SIGNAL = 1.8; EXPRESSED IN HELA, SIGNAL = 1.5; EXPRESSED IN PLACENTA, SIGNAL =   2; EXPRESSED IN HBL100, SIGNAL = 1.4; EXPRESSED IN HEART, SIGNAL = 1.8; NT HIT: M73707.1, EVALUE 3.90e-01; EST_HUMAN HIT: AW851844.1, EVALUE 5.00e-04; SWISSPROT HIT: Q01753, EVALUE 3.30e-01
aaggaattactgtagtatgtacttatgttaggcttcatgtgagggttgagaatgttgtagttccaaaaatcaaggaagtgctgaaaaatacaaaacaaataaaaacatcatttgtagttatgttagtggggccagagttaactgaaagagctctcagtgaccatggctggatcaatttgaacaaggaagcaaaa

SEQ ID NO: 18245 - DNA, 181 bp, Homo sapiens
  MAP TO AC010131.1; EXPRESSED IN HBL100, SIGNAL = 4.6; EXPRESSED IN HEART, SIGNAL = 4.6; EXPRESSED IN LUNG, SIGNAL = 2.9; EXPRESSED IN BRAIN, SIGNAL = 3.4; EXPRESSED IN ADULT LIVER, SIGNAL = 3.4; EXPRESSED IN PLACENTA, SIGNAL = 3.3; EXPRESSED IN HELA, SIGNAL = 2.5; EXPRESSED IN BONE MARROW, SIGNAL =   3; EXPRESSED IN BT474, SIGNAL = 2.5; EXPRESSED IN FETAL LIVER, SIGNAL = 3.1; SWISSPROT HIT: P55359, EVALUE 3.00e+00; NT HIT: AJ299441.1, EVALUE 6.60e+00
gattggtcttttgagagatatctctccaggtttttcatttgtgatgcaaatggctccacctggacctgccgaccctgctctcctatggccccacgaagaagcaattcagcctgcaggagcaacatttgagagacattatggcagagcaggaaagggctataccattgaaactgttttggat

SEQ ID NO: 18246 - DNA, 100 bp, Homo sapiens
  MAP TO AC011331.1; EXPRESSED IN LUNG, SIGNAL = 1.8; EXPRESSED IN BONE MARROW, SIGNAL = 1.2; EXPRESSED IN BRAIN, SIGNAL =   2; EXPRESSED IN BT474, SIGNAL = 1.8; EXPRESSED IN FETAL LIVER, SIGNAL = 1.3; EXPRESSED IN PLACENTA, SIGNAL = 1.5; EXPRESSED IN HEART, SIGNAL = 1.3; SWISSPROT HIT: Q10813, EVALUE 5.30e+00; EST_HUMAN HIT: BE299465.1, EVALUE 8.60e-01; NT HIT: M55544.1, EVALUE 2.10e-01
atgtcagctctagtcctggcatcccaggagcatacggtgacagtggaagtgaagcgcaagccgagtcctgggaaccaatgtctgccagaattaattaaaa

SEQ ID NO: 18247 - DNA, 406 bp, Homo sapiens
  MAP TO AL050343.14; EXPRESSED IN BONE MARROW, SIGNAL = 8.5; EXPRESSED IN BRAIN, SIGNAL = 6.5; EXPRESSED IN HBL100, SIGNAL =  15; EXPRESSED IN HELA, SIGNAL =  12; EXPRESSED IN HEART, SIGNAL = 8.6; EXPRESSED IN LUNG, SIGNAL = 4.6; EXPRESSED IN ADULT LIVER, SIGNAL = 5.3; EXPRESSED IN FETAL LIVER, SIGNAL = 7.4; EXPRESSED IN BT474, SIGNAL =  18; EXPRESSED IN PLACENTA, SIGNAL =  10; SWISSPROT HIT: P12236, EVALUE 1.00e-34; EST_HUMAN HIT: BF569772.1, EVALUE 1.00e-28; NT HIT: M24103.1, EVALUE 1.00e-21
atttcccaacgttggctgccaggcaggttctggcaaattccaggggatagaagaagcacagggagatggccccagccgcccctcaggaagccaggttgcctgcaaaatatctccagaactgtgcatgcttatgcacgcctcccagaaggacctgcttgtacttatccctaaaggcaaagttgagggcttgcatggggaagcagtggatggtgctggccaggtgcccctccagaaggacaagtgccctgctccttggggatgtggaccttgcagcccaccacaccacgcctttgtacggtgtcgccacaatctgcttactggcatgttgcacctgcagcagtgccttgactggctcaactcgggtcgctgccctcttggaaatagcgagggcaatgcctccggccag

SEQ ID NO: 18248 - DNA, 97 bp, Homo sapiens
  MAP TO AL109830.7; EXPRESSED IN BT474, SIGNAL = 3.4; EXPRESSED IN PLACENTA, SIGNAL =  21; EXPRESSED IN BRAIN, SIGNAL =  15; EXPRESSED IN FETAL LIVER, SIGNAL =  22; EXPRESSED IN ADULT LIVER, SIGNAL =  11; EXPRESSED IN HEART, SIGNAL =  18; EXPRESSED IN HELA, SIGNAL =  12; EXPRESSED IN HBL100, SIGNAL = 7.2; EXPRESSED IN LUNG, SIGNAL = 1.6; EXPRESSED IN BONE MARROW, SIGNAL =  17; EST_HUMAN HIT: BE965591.2, EVALUE 7.60e-02
gcagttgagtgtcctacacttggggaaatcatgagagtcagcacaaggagcctcccttgggaaaacactttcctgatcctggtgtctctcctgccag

SEQ ID NO: 18249 - DNA, 202 bp, Homo sapiens
  MAP TO AF153342.1; EXPRESSED IN BONE MARROW, SIGNAL = 1.2; EXPRESSED IN BRAIN, SIGNAL = 1.2; EXPRESSED IN BT474, SIGNAL =   1; EXPRESSED IN HBL100, SIGNAL =   1; EXPRESSED IN LUNG, SIGNAL = 1.6; EXPRESSED IN ADULT LIVER, SIGNAL = 1.2; EXPRESSED IN FETAL LIVER, SIGNAL = 1.2; EXPRESSED IN PLACENTA, SIGNAL = 0.94; EXPRESSED IN HEART, SIGNAL = 1.1; NT HIT: U41194.1, EVALUE 4.00e-01; SWISSPROT HIT: Q28611, EVALUE 1.60e+00; EST_HUMAN HIT: AA897474.1, EVALUE 1.20e-01
atgaactcccagttacccttctgaaagccttaattgcagtgttcccttaattaaaacgtctttaatcaaacctgttgttaaaagtgtggaccctggggtcagaaatgtcatggctgtgaaccaaatcggcccggcactcgctgtgcggacaggcctcatttctctctatccacttgaccacgtaggtcctccagtagtctac

SEQ ID NO: 18250 - DNA, 155 bp, Homo sapiens
  MAP TO AL121749.2; EXPRESSED IN PLACENTA, SIGNAL = 5.8; EXPRESSED IN BONE MARROW, SIGNAL =   6; EXPRESSED IN BRAIN, SIGNAL = 5.6; EXPRESSED IN FETAL LIVER, SIGNAL = 6.6; EXPRESSED IN HEART, SIGNAL = 6.3; EXPRESSED IN HELA, SIGNAL = 5.3; EXPRESSED IN HBL100, SIGNAL = 3.5; EXPRESSED IN LUNG, SIGNAL = 4.7; EXPRESSED IN ADULT LIVER, SIGNAL = 5.5; EXPRESSED IN BT474, SIGNAL =   3; EST_HUMAN HIT: AA846457.1, EVALUE 5.30e-01; NT HIT: AJ006755.1, EVALUE 3.00e-01; SWISSPROT HIT: Q99186, EVALUE 1.70e+00
gttttcttggtagcaaccacattagcttcaaggttactgaacacgagataaatgactgtagaacccatgagtgcctgcaggaagaaatgatgttcaagaaccactttatctacatttctatacctccagctttcctccttttgctcaagatgtga

SEQ ID NO: 18251 - DNA, 157 bp, Homo sapiens
  MAP TO AL109656.1; EXPRESSED IN BRAIN, SIGNAL = 1.9; EXPRESSED IN FETAL LIVER, SIGNAL = 2.3; EXPRESSED IN ADULT LIVER, SIGNAL = 1.5; EXPRESSED IN PLACENTA, SIGNAL = 3.1; EXPRESSED IN HBL100, SIGNAL =   1; EXPRESSED IN HELA, SIGNAL =  14; EXPRESSED IN HEART, SIGNAL = 3.6; EXPRESSED IN BONE MARROW, SIGNAL = 2.9; EXPRESSED IN LUNG, SIGNAL = 1.7; NT HIT: AL163201.2, EVALUE 5.00e-09; EST_HUMAN HIT: AW867767.1, EVALUE 1.00e-10; SWISSPROT HIT: O14204, EVALUE 3.90e+00
tctcacttacatgtagaatctaaaacaatcaaactcatagaagcagaattagaatggtggttaccagaggctggagtgttgggggaaatggggagatgattgtaaagggtacaaagcctcagactagaaggataagattttttcaagatctattaac

SEQ ID NO: 18252 - DNA, 122 bp, Homo sapiens
  MAP TO AL118496.4; EXPRESSED IN ADULT LIVER, SIGNAL = 1.1; EXPRESSED IN BT474, SIGNAL =   1; EXPRESSED IN HELA, SIGNAL = 0.92; EXPRESSED IN HEART, SIGNAL = 1.5; EXPRESSED IN BONE MARROW, SIGNAL = 1.3; EXPRESSED IN LUNG, SIGNAL = 0.91; NT HIT: gi6677980, EVALUE 2.30e-01; EST_HUMAN HIT: AA642975.1, EVALUE 2.80e-01
ggaaatagctgccttgctctctccatggacattgacagcaccctcattatagactatggggtagcaagaattgcctacctgcaaacaactgtgggcgtcagggttacaacgattatctactc

SEQ ID NO: 18253 - DNA, 437 bp, Homo sapiens
  MAP TO AL031772.4; EXPRESSED IN ADULT LIVER, SIGNAL =   2; EXPRESSED IN PLACENTA, SIGNAL = 2.6; EXPRESSED IN FETAL LIVER, SIGNAL = 1.6; EXPRESSED IN BT474, SIGNAL = 1.4; EXPRESSED IN HEART, SIGNAL = 1.3; EXPRESSED IN HELA, SIGNAL = 1.2; EXPRESSED IN HBL100, SIGNAL = 3.1; EXPRESSED IN BRAIN, SIGNAL = 1.4; EXPRESSED IN LUNG, SIGNAL = 2.2; EXPRESSED IN BONE MARROW, SIGNAL = 2.1; NT HIT: gi7706434, EVALUE 0.00e+00; EST_HUMAN HIT: AA283110.1, EVALUE 4.00e-59; SWISSPROT HIT: P13942, EVALUE 5.70e-02
atgtctcgacgggcttaggaacaaagttccatccaccagtgggaactgttcgaacaccgggagcgcccggtggcacagggcacagtttaccacgtttctgtggctggcactgagcgcggccagaatgaacttccgcaagtcttccccctggcccacttgggcatcgtcttccatgcgcacgtggaaagtgttcagcttatgcctggggatgtgagtgaggagttcggagaggtccagccgccgaaggaactgcacgggggtgtcgaagtgtccccccctgtgaactgccaaccccgcagggctgtaatcaaagtgggcatttctgaacacatggcccccagccatggccttcttgtgaggctccagatggatggcgttctttaagaactccccgaggtatctggaggagcgggggccgctgaagtgggcaggagaga

SEQ ID NO: 18254 - DNA, 117 bp, Homo sapiens
  MAP TO AP000493.1; EXPRESSED IN PLACENTA, SIGNAL = 3.8; EXPRESSED IN ADULT LIVER, SIGNAL = 3.2; EXPRESSED IN FETAL LIVER, SIGNAL = 4.5; EXPRESSED IN BT474, SIGNAL = 3.3; EXPRESSED IN HEART, SIGNAL = 3.6; EXPRESSED IN HELA, SIGNAL = 2.6; EXPRESSED IN HBL100, SIGNAL = 2.3; EXPRESSED IN BRAIN, SIGNAL = 2.9; EXPRESSED IN LUNG, SIGNAL = 3.2; EXPRESSED IN BONE MARROW, SIGNAL = 5.3; NT HIT: AK024437.1, EVALUE 4.00e+00
agatgggacttttctgattcaagaagttcagtatctttgtgaggaactgcgccacacgaatgttgatgcgcagttcagtgtgacaaaggctgtttgtacaataaatattgttgaatc

SEQ ID NO: 18255 - DNA, 290 bp, Homo sapiens
  MAP TO AL109628.2; EXPRESSED IN PLACENTA, SIGNAL = 2.8; EXPRESSED IN HELA, SIGNAL =   3; EXPRESSED IN HBL100, SIGNAL =  11; EXPRESSED IN HEART, SIGNAL = 1.8; EXPRESSED IN BONE MARROW, SIGNAL = 3.5; EXPRESSED IN LUNG, SIGNAL = 2.2; EXPRESSED IN BRAIN, SIGNAL = 3.7; EXPRESSED IN ADULT LIVER, SIGNAL = 3.1; EXPRESSED IN BT474, SIGNAL = 2.7; EXPRESSED IN FETAL LIVER, SIGNAL = 2.3; NT HIT: AJ006345.1, EVALUE 1.00e-39; EST_HUMAN HIT: AW880046.1, EVALUE 3.00e-28; SWISSPROT HIT: P34132, EVALUE 1.90e-01
ttggcggaagaacacaaaagcagcaggacgtcgagaggggcatgccggcaaagagcacaccgggagactccagtagacaccggcaggccaaccagtggaacgacacagagtttggctggggtggccggaggagggcccgggctgctgagctgcctgactccaggggaaaaccacctccccactccatctcccttctggctccccatccatctgctgagaacttccacccaataaaaccttgcacccattccccaagcccacgtgggatccgattcttcccgtacaccaag

SEQ ID NO: 18256 - DNA, 205 bp, Homo sapiens
  MAP TO AL078604.10; EXPRESSED IN PLACENTA, SIGNAL = 1.7; EXPRESSED IN HBL100, SIGNAL = 1.4; EXPRESSED IN HEART, SIGNAL = 1.3; EXPRESSED IN LUNG, SIGNAL = 1.2; EXPRESSED IN BRAIN, SIGNAL = 1.7; EXPRESSED IN ADULT LIVER, SIGNAL = 1.9; EXPRESSED IN HELA, SIGNAL = 1.4; EXPRESSED IN BONE MARROW, SIGNAL =   2; EXPRESSED IN BT474, SIGNAL = 1.6; EXPRESSED IN FETAL LIVER, SIGNAL =   1; EST_HUMAN HIT: BF061411.1, EVALUE 4.00e-55; NT HIT: AF003530.1, EVALUE 4.00e-26; SWISSPROT HIT: P11260, EVALUE 1.70e-02
aaaacccaattcaaggaaactaagaatcacaataaaatgatacaggagctgaaagatgaaatagccagtataaaaaagaacctaactgctctgatagagctgaaaaacacactacaagaatttcacaatgcaatcacaagtattaactgcaaaatagaccatggtgaggaaaggatctcagaccctgaagactggctgtctgaaa

SEQ ID NO: 18257 - DNA, 143 bp, Homo sapiens
  MAP TO AL121655.1; EXPRESSED IN BONE MARROW, SIGNAL =   1; EXPRESSED IN BRAIN, SIGNAL =   1; EXPRESSED IN BT474, SIGNAL = 2.1; EXPRESSED IN ADULT LIVER, SIGNAL =   1; EXPRESSED IN FETAL LIVER, SIGNAL = 0.91; EXPRESSED IN HELA, SIGNAL = 1.5; EXPRESSED IN PLACENTA, SIGNAL = 1.1; EXPRESSED IN HBL100, SIGNAL = 1.3; EXPRESSED IN HEART, SIGNAL = 1.2; EST_HUMAN HIT: BF239279.1, EVALUE 1.00e-29; NT HIT: X66452.1, EVALUE 2.80e-01
gactggagatctaccttctgctttgatgacttttctgcattaatcttctcattttctactattctctagtgaattcaaaaaaacagtgcatgaacatttcaaataaccaggttattttgagtgctaaacaaaactaatggaaa

SEQ ID NO: 18258 - DNA, 203 bp, Homo sapiens
  MAP TO AF172273.1; EXPRESSED IN LUNG, SIGNAL = 1.9; EXPRESSED IN BONE MARROW, SIGNAL =   3; EXPRESSED IN BRAIN, SIGNAL = 1.8; EXPRESSED IN BT474, SIGNAL = 1.8; EXPRESSED IN ADULT LIVER, SIGNAL = 1.8; EXPRESSED IN FETAL LIVER, SIGNAL = 2.1; EXPRESSED IN HELA, SIGNAL = 1.6; EXPRESSED IN PLACENTA, SIGNAL = 2.3; EXPRESSED IN HBL100, SIGNAL = 1.7; EXPRESSED IN HEART, SIGNAL = 1.9; SWISSPROT HIT: P40059, EVALUE 9.50e-01; NT HIT: gi11423816, EVALUE 2.00e-03; EST_HUMAN HIT: AW371796.1, EVALUE 3.00e-03
aagtaaacagatggggtcagcctcccacagcacagacagagtagagaaggatggagagtggatctggaagggcaaacaaaacaaccagtgctgctgcagctgtcgacatcaggccaatggttctgacatctggagcaaggacatcagggcctccaccttcaccatcaacatatctgtcatttccaaggctaatagaggatggt

SEQ ID NO: 18259 - DNA, 241 bp, Homo sapiens
  MAP TO AL050318.12; EXPRESSED IN HBL100, SIGNAL = 0.96; EXPRESSED IN HEART, SIGNAL = 0.96; EXPRESSED IN BONE MARROW, SIGNAL =   1; EXPRESSED IN BRAIN, SIGNAL = 1.3; EXPRESSED IN FETAL LIVER, SIGNAL = 1.1; EXPRESSED IN ADULT LIVER, SIGNAL = 1.2; EXPRESSED IN BT474, SIGNAL = 0.97; EST_HUMAN HIT: AV723785.1, EVALUE 1.40e-02; SWISSPROT HIT: Q27368, EVALUE 3.40e+00; NT HIT: AF242865.1, EVALUE 3.70e-02
gccaggtgatttaggaaaatcatccacaccttctgaacctcccttttctcatgttgtggaaacacaaggcttcggtgagagtcaaagaaaacaggcacaccccttgtttcattgtgccttgcttttttgcgctttgcaggtactgcgtttttttcaaattgagggcttttggcaaccctgtgtcgagcaaagtctaccagcattatttttccaaaaggatgctcagtatgtgtctctgtgc

SEQ ID NO: 18260 - DNA, 185 bp, Homo sapiens
  MAP TO AL118498.6; EXPRESSED IN BONE MARROW, SIGNAL = 2.7; EXPRESSED IN BRAIN, SIGNAL = 1.8; EXPRESSED IN BT474, SIGNAL = 1.4; EXPRESSED IN HEART, SIGNAL = 1.6; EXPRESSED IN LUNG, SIGNAL = 1.5; EXPRESSED IN ADULT LIVER, SIGNAL =   2; EXPRESSED IN FETAL LIVER, SIGNAL =   2; EXPRESSED IN PLACENTA, SIGNAL = 1.8; EXPRESSED IN HELA, SIGNAL = 1.4; EXPRESSED IN HBL100, SIGNAL = 1.3; NT HIT: AL355841.1, EVALUE 4.00e-78; EST_HUMAN HIT: AA725842.1, EVALUE 3.00e-73; SWISSPROT HIT: P12815, EVALUE 3.30e-01
gtgagctttcctttgcttttagcaggaggacacagctctgaatgaagtcacagtatgcaaatttcccgttgctctttaagtcgtattttataatgagctgctgacactcctctttgcttatgtccaggttgaatttctccacaagagctacagaaaaaaatggcagttcaattggtggcgattca

SEQ ID NO: 18261 - DNA, 132 bp, Homo sapiens
  MAP TO AL050343.14; EXPRESSED IN HEART, SIGNAL = 0.85; EXPRESSED IN BONE MARROW, SIGNAL = 1.5; EXPRESSED IN BRAIN, SIGNAL = 0.9; EXPRESSED IN FETAL LIVER, SIGNAL = 0.87; EXPRESSED IN ADULT LIVER, SIGNAL = 1.5; EST_HUMAN HIT: W28922.1, EVALUE 6.80e+00; SWISSPROT HIT: P42338, EVALUE 2.30e+00; NT HIT: AL115624.1, EVALUE 2.50e-01
accaacagcatggcaattatttttctatatagggatttaactaagttcatcgtggaaatatcctgtagaactgtagtcacattcaaaattccaggcaaaagtgatctctacatggatgaacctttgaaaaca

SEQ ID NO: 18262 - DNA, 131 bp, Homo sapiens
  MAP TO AL079339.11; EXPRESSED IN BT474, SIGNAL = 2.1; EXPRESSED IN ADULT LIVER, SIGNAL = 2.3; EXPRESSED IN PLACENTA, SIGNAL = 2.8; EXPRESSED IN BONE MARROW, SIGNAL = 2.5; EXPRESSED IN BRAIN, SIGNAL = 2.5; EXPRESSED IN FETAL LIVER, SIGNAL = 2.9; EXPRESSED IN HEART, SIGNAL = 2.5; EXPRESSED IN HELA, SIGNAL = 2.2; EXPRESSED IN HBL100, SIGNAL = 1.8; EXPRESSED IN LUNG, SIGNAL = 2.3; EST_HUMAN HIT: AU140363.1, EVALUE 1.10e-01; NT HIT: AL161595.2, EVALUE 9.90e-01; SWISSPROT HIT: Q49123, EVALUE 6.80e+00
cttacatgttcccttcatagcctgcatggtctccatgtgcccagtcgtctttttgcccagtaggccctccatggggttagaagctaggttcaattcattcatctctgcatccccactgtctggcagagttc

SEQ ID NO: 18263 - DNA, 78 bp, Homo sapiens
  MAP TO AL121758.4; EXPRESSED IN LUNG, SIGNAL = 3.5; EXPRESSED IN BRAIN, SIGNAL = 3.9; EXPRESSED IN ADULT LIVER, SIGNAL =   4; EXPRESSED IN PLACENTA, SIGNAL = 4.3; EXPRESSED IN BONE MARROW, SIGNAL = 4.5; EXPRESSED IN BT474, SIGNAL = 3.1; EXPRESSED IN FETAL LIVER, SIGNAL = 4.4; EXPRESSED IN HEART, SIGNAL = 4.1; EXPRESSED IN HELA, SIGNAL = 3.2; EXPRESSED IN HBL100, SIGNAL = 2.7; NT HIT: AF298117.1, EVALUE 1.60e-01; EST_HUMAN HIT: AA365227.1, EVALUE 6.30e-01
atgtcccacagctcagcaactgagacactgttcattcctcactcaggttccatgtccactgggggccgggatctgaag

SEQ ID NO: 18264 - DNA, 265 bp, Homo sapiens
  MAP TO AL117186.1; EXPRESSED IN BT474, SIGNAL = 2.7; EXPRESSED IN FETAL LIVER, SIGNAL = 2.9; EXPRESSED IN PLACENTA, SIGNAL = 2.1; EXPRESSED IN HBL100, SIGNAL = 2.1; EXPRESSED IN HELA, SIGNAL = 1.7; EXPRESSED IN HEART, SIGNAL = 1.8; EXPRESSED IN BONE MARROW, SIGNAL = 2.9; EXPRESSED IN LUNG, SIGNAL = 2.8; EXPRESSED IN BRAIN, SIGNAL = 2.5; EXPRESSED IN ADULT LIVER, SIGNAL = 2.4; SWISSPROT HIT: P10241, EVALUE 1.00e-07; EST_HUMAN HIT: N58527.1, EVALUE 3.80e+00
ctctccatgctgtcacacctcccaagatcacaccagccttagctccagccactgtcatacctcgcaagctcataccagccttagttccagccactgtcacacctcacaagctcacaccagccttagctccagccactgtcacacctcgcaagctcacaccagccttagttccagccactgtcatacctcccaagctcacactggccttagctccagccactgtcacacctcgcaagctcacactggccttagctccagccactgt

SEQ ID NO: 18265 - DNA, 255 bp, Homo sapiens
  MAP TO AL117356.1; EXPRESSED IN ADULT LIVER, SIGNAL = 1.3; EXPRESSED IN FETAL LIVER, SIGNAL = 2.3; EXPRESSED IN PLACENTA, SIGNAL = 0.97; EXPRESSED IN HEART, SIGNAL = 0.91; EXPRESSED IN BONE MARROW, SIGNAL = 1.1; EXPRESSED IN LUNG, SIGNAL =   1; EXPRESSED IN BRAIN, SIGNAL = 1.6; NT HIT: gi4506064, EVALUE 5.20e-01; EST_HUMAN HIT: AW368128.1, EVALUE 1.00e-02; SWISSPROT HIT: P15184, EVALUE 2.60e-01
ggcatatcccaggacccaaaaccccgaggagttcaactgtctgcagatcatttggaccacccacctgtggtagctgcacagcctgtccaaaccccacagaaacgcaaatgcctgcctctcactatctctccaaatggcgcccaggaggctttgctcctccgtggaattgctgagctagacaagaatattactcctctggcccagtgttacttgcagatggaagggaaaggaaaattaagacacaaattccatggt

SEQ ID NO: 18266 - DNA, 177 bp, Homo sapiens
  MAP TO AP000463.1; EXPRESSED IN BONE MARROW, SIGNAL = 1.7; EXPRESSED IN LUNG, SIGNAL = 1.1; EXPRESSED IN BRAIN, SIGNAL = 1.7; EXPRESSED IN ADULT LIVER, SIGNAL = 1.2; EXPRESSED IN FETAL LIVER, SIGNAL = 1.1; EXPRESSED IN HELA, SIGNAL = 1.1; EXPRESSED IN PLACENTA, SIGNAL =   1; EXPRESSED IN HBL100, SIGNAL = 0.92; EXPRESSED IN HEART, SIGNAL = 1.1; NT HIT: AJ229041.1, EVALUE 2.00e-06; EST_HUMAN HIT: AW006890.1, EVALUE 1.00e-04; SWISSPROT HIT: P23653, EVALUE 6.50e+00
ctacctacctccctatctatgaggagaattattacgggaatcacaattatgaaggccgagaagtaccacaatctgctgtctgtgagctggagagccaggaaagtcagaggtataattccctctgtgtccaaaggctcaagaagcaggagcattgttgttcaagggcaggagagggtg

SEQ ID NO: 18267 - DNA, 195 bp, Homo sapiens
  MAP TO AL121748.1; EXPRESSED IN LUNG, SIGNAL = 2.7; EXPRESSED IN BRAIN, SIGNAL = 1.3; EXPRESSED IN BT474, SIGNAL = 1.6; EXPRESSED IN ADULT LIVER, SIGNAL = 3.1; EXPRESSED IN FETAL LIVER, SIGNAL = 1.6; EXPRESSED IN HELA, SIGNAL =   1; EXPRESSED IN PLACENTA, SIGNAL = 8.8; EXPRESSED IN HBL100, SIGNAL = 1.8; EXPRESSED IN HEART, SIGNAL = 2.7; EST_HUMAN HIT: AA976114.1, EVALUE 1.00e-106; SWISSPROT HIT: O14786, EVALUE 2.00e-34; NT HIT: gi11430876, EVALUE 1.00e-106
ccacccgcacctcattcctacatcaatgagtggctccaaatagacctgggggaggagaagatcgtgaggggcatcatcattcagggtgggaagcaccgagagaacaaggtgttcatgaggaagttcaagatcgggtacagcaacaacggctcggactggaagatgatcatggatgacagcaaacgcaaggcgaag

SEQ ID NO: 18268 - DNA, 417 bp, Homo sapiens
  MAP TO AC011399.1; EXPRESSED IN BT474, SIGNAL = 2.5; EXPRESSED IN PLACENTA, SIGNAL = 2.7; EXPRESSED IN HBL100, SIGNAL =   3; EXPRESSED IN HEART, SIGNAL = 0.95; EXPRESSED IN BRAIN, SIGNAL = 1.8; EXPRESSED IN FETAL LIVER, SIGNAL = 1.5; EXPRESSED IN ADULT LIVER, SIGNAL = 1.9; EXPRESSED IN HELA, SIGNAL = 3.1; EXPRESSED IN LUNG, SIGNAL = 1.1; EXPRESSED IN BONE MARROW, SIGNAL = 1.9; NT HIT: X05242.1, EVALUE 6.60e-02; EST_HUMAN HIT: AU122533.1, EVALUE 0.00e+00; SWISSPROT HIT: P48225, EVALUE 7.00e+00
cttttcttcttgggaatgaaggagcagtgaggggtatttagaggaattcacatccatcacaaaatttaactcttggcttttaccaccactgctactctcactgttgcagtctgtgctgtccaagttatctgaatcactattcccacctgcaccaccacctctaggttctccatttattttatttttatctgccttttgttgggctaaagacatatgttgttctggtaaaattaaatgtgctgtaggaggggtttcttttgttttgttcttcttatttttccgattggtgctgggagttgtcaccacattggccctttttttcccaaacacatttgtgaatgttgcagatgttgcagagattccaatcgtagtggtggtggttgcactaggaggttctatgggaacttcttgctccac

SEQ ID NO: 18269 - DNA, 118 bp, Homo sapiens
  MAP TO AL118508.6; EXPRESSED IN BT474, SIGNAL = 1.9; EXPRESSED IN PLACENTA, SIGNAL = 1.1; EXPRESSED IN BRAIN, SIGNAL = 1.6; EXPRESSED IN ADULT LIVER, SIGNAL = 1.3; EXPRESSED IN FETAL LIVER, SIGNAL = 1.2; EXPRESSED IN HEART, SIGNAL = 0.86; EXPRESSED IN HBL100, SIGNAL = 1.7; EXPRESSED IN BONE MARROW, SIGNAL = 1.9; SWISSPROT HIT: O97883, EVALUE 1.40e+00; NT HIT: AF100956.1, EVALUE 2.60e-01; EST_HUMAN HIT: AA761086.1, EVALUE 3.80e-01
ggttggtccaggcagctggcaatatccaggaagtgggctctggggacagcaactgcagagatgcttacatgctgttttatctagaaagcaaagaataacattagaaaaataaagtaga

SEQ ID NO: 18270 - DNA, 138 bp, Homo sapiens
  MAP TO AL096869.1; EXPRESSED IN BT474, SIGNAL = 1.6; EXPRESSED IN ADULT LIVER, SIGNAL = 2.6; EXPRESSED IN PLACENTA, SIGNAL = 2.7; EXPRESSED IN BONE MARROW, SIGNAL = 1.9; EXPRESSED IN BRAIN, SIGNAL = 1.9; EXPRESSED IN FETAL LIVER, SIGNAL = 1.5; EXPRESSED IN HEART, SIGNAL = 2.2; EXPRESSED IN HELA, SIGNAL = 2.1; EXPRESSED IN HBL100, SIGNAL = 1.7; EXPRESSED IN LUNG, SIGNAL =   2; NT HIT: U20365.1, EVALUE 4.80e+00; EST_HUMAN HIT: AA975144.1, EVALUE 3.10e-01; SWISSPROT HIT: P98137, EVALUE 2.30e+00
gtccctgtgggaggagagattcagcatgaagatgatgaacttcccagggggctcctccagaaactggcactcggtgtctgtgtgtctgtccagtttatccatcagcctagtgagggctacccaggatccagacaggca

SEQ ID NO: 18271 - DNA, 174 bp, Homo sapiens
  MAP TO AL121754.3; EXPRESSED IN PLACENTA, SIGNAL = 0.99; EXPRESSED IN HELA, SIGNAL = 1.6; EXPRESSED IN HEART, SIGNAL = 1.1; EXPRESSED IN ADULT LIVER, SIGNAL = 1.2; EST_HUMAN HIT: H41120.1, EVALUE 2.00e-15; NT HIT: gi8923201, EVALUE 2.00e-15
tgatctactgcccatctgtaggctccttctccaactaaaaagctaacaacagaaaaattatttttaaaattcacagtgtcatcttctcctacatattcaataaatataggtaatatggtaaggcagttgagaaaaagtcttgcatatggacataattccagatttacctcaaag

SEQ ID NO: 18272 - DNA, 107 bp, Homo sapiens
  MAP TO AL034417.14; EXPRESSED IN LUNG, SIGNAL =  14; EXPRESSED IN BRAIN, SIGNAL =  12; EXPRESSED IN BT474, SIGNAL =  61; EXPRESSED IN PLACENTA, SIGNAL =  34; EXPRESSED IN BONE MARROW, SIGNAL =  25; EXPRESSED IN ADULT LIVER, SIGNAL =  18; EXPRESSED IN FETAL LIVER, SIGNAL =  42; EXPRESSED IN HEART, SIGNAL =  10; EXPRESSED IN HELA, SIGNAL =  99; EXPRESSED IN HBL100, SIGNAL =  90; EST_HUMAN HIT: AW372318.1, EVALUE 2.00e-39; NT HIT: X06705.1, EVALUE 1.00e-33; SWISSPROT HIT: P32429, EVALUE 3.00e-08
tttgctggcagctgtcttctcagcccagagccaacagcctctgcttcttctcttgctttgtctctggtctgtacttgtgggccagcttaagcagctgagtagctgta

SEQ ID NO: 18273 - DNA, 111 bp, Homo sapiens
  MAP TO AC008132.19; EXPRESSED IN PLACENTA, SIGNAL =   6; EXPRESSED IN HBL100, SIGNAL = 4.4; EXPRESSED IN HELA, SIGNAL = 6.1; EXPRESSED IN HEART, SIGNAL =   5; EXPRESSED IN BONE MARROW, SIGNAL =   7; EXPRESSED IN LUNG, SIGNAL = 4.1; EXPRESSED IN BRAIN, SIGNAL = 4.2; EXPRESSED IN ADULT LIVER, SIGNAL = 6.2; EXPRESSED IN BT474, SIGNAL = 3.4; EXPRESSED IN FETAL LIVER, SIGNAL = 9.8; EST_HUMAN HIT: AL045185.1, EVALUE 2.00e-39; NT HIT: gi7657020, EVALUE 1.00e-39; SWISSPROT HIT: P52591, EVALUE 2.10e-01
agctggggtaccgggtcactgctgaagacctggaccaggagaaggaggcggctttccagcgcatcaagagtgcactgcaggttgaggacaaggccatttagtactgcagac

SEQ ID NO: 18274 - DNA, 516 bp, Homo sapiens
  MAP TO AL021395.8; EXPRESSED IN BT474, SIGNAL = 1.3e+02; EXPRESSED IN FETAL LIVER, SIGNAL =  24; EXPRESSED IN HBL100, SIGNAL =  42; EXPRESSED IN PLACENTA, SIGNAL =  28; EXPRESSED IN HELA, SIGNAL = 1.1e+02; EXPRESSED IN HEART, SIGNAL =  12; EXPRESSED IN BONE MARROW, SIGNAL =  30; EXPRESSED IN LUNG, SIGNAL =  16; EXPRESSED IN BRAIN, SIGNAL =  50; EXPRESSED IN ADULT LIVER, SIGNAL =  17; SWISSPROT HIT: P04374, EVALUE 2.00e-79; EST_HUMAN HIT: AV727362.1, EVALUE 0.00e+00; NT HIT: AF023860.1, EVALUE 0.00e+00
aaatggaagtcaaacttatcgaagttgtctgcagtcagcaatgattatcttcttgctggtcttgccattcctggacccagagtactccatggcctccacaatcttcatgccttctttcaccttgccgaagaccacatgcttgccatccaaccactcagtcttggcagtgcagatgaaaaactgggaatcgtttgtgttgggtccagcatttgtcatggacaagatgccaggacctgtatgctttaggatgaagttcttatcatcaaatttctccctgcagatgggcttgccaccagtgccaatttggcgtgtgaagtcaccaccctggcacataaaccctggaataattctgtgaaagcaggaacccttataaccaaatcctttctctccagtgctcagagcatgaaaattttctgccgtctttggaatcttgtttgcaaacagctcaaaggagacacagcccaaggactcggtgttgatagcaatgtcgaaggacacagtggggttgaccatggc

SEQ ID NO: 18275 - DNA, 96 bp, Homo sapiens
  MAP TO AL080317.11; EXPRESSED IN BONE MARROW, SIGNAL = 7.2; EXPRESSED IN LUNG, SIGNAL = 7.2; EXPRESSED IN BRAIN, SIGNAL = 6.6; EXPRESSED IN PLACENTA, SIGNAL = 7.8; EXPRESSED IN ADULT LIVER, SIGNAL = 6.8; EXPRESSED IN FETAL LIVER, SIGNAL = 7.3; EXPRESSED IN BT474, SIGNAL = 5.6; EXPRESSED IN HEART, SIGNAL = 6.1; EXPRESSED IN HELA, SIGNAL = 6.8; EXPRESSED IN HBL100, SIGNAL = 4.7; NT HIT: AF058907.1, EVALUE 6.00e-29; EST_HUMAN HIT: AI963604.1, EVALUE 2.00e-29; SWISSPROT HIT: P08235, EVALUE 9.20e+00
ggaagtccttactgttcaagtccaaattttaaggaaattgggtcccgcgatgaatttcctcatgtttcggccgtgcgtggaccagtcagcttccag

SEQ ID NO: 18276 - DNA, 420 bp, Homo sapiens
  MAP TO AP000426.1; EXPRESSED IN HBL100, SIGNAL = 1.1; EXPRESSED IN HELA, SIGNAL = 1.1; EXPRESSED IN HEART, SIGNAL = 0.97; EXPRESSED IN BRAIN, SIGNAL = 5.5; EXPRESSED IN ADULT LIVER, SIGNAL = 0.95; EXPRESSED IN PLACENTA, SIGNAL =   1; EXPRESSED IN LUNG, SIGNAL = 1.1; EXPRESSED IN FETAL LIVER, SIGNAL =   1; EXPRESSED IN BT474, SIGNAL = 2.4; SWISSPROT HIT: P29554, EVALUE 5.00e-71; NT HIT: D10884.1, EVALUE 0.00e+00; EST_HUMAN HIT: AW963861.1, EVALUE 0.00e+00
gatggggaaacagaacagcaagctgcgcccggaggtcatgcaggacttgctggaaagcacagactttacagagcatgagatccaggaatggtataaaggcttcttgagagactgccccagtggacatttgtcaatggaagagtttaagaaaatatatgggaactttttcccttatggggatgcttccaaatttgcagagcatgtcttccgcaccttcgatgcaaatggagatgggacaatagactttagagaattcatcatcgccttgagtgtaacttcgagggggaagctggagcagaagctgaaatgggccttcagcatgtacgacctggacggaaatggctatatcagcaaggcagagatgctagagatcgtgcaggtacgtagactgagccctttaaaaaaagaagggcatgtatc

SEQ ID NO: 18277 - DNA, 145 bp, Homo sapiens
  MAP TO AC011342.1; EXPRESSED IN PLACENTA, SIGNAL =  11; EXPRESSED IN HBL100, SIGNAL = 2.3; EXPRESSED IN HEART, SIGNAL = 1.5; EXPRESSED IN LUNG, SIGNAL = 1.9; EXPRESSED IN BRAIN, SIGNAL = 1.9; EXPRESSED IN ADULT LIVER, SIGNAL = 1.5; EXPRESSED IN HELA, SIGNAL = 2.2; EXPRESSED IN BONE MARROW, SIGNAL = 1.7; EXPRESSED IN BT474, SIGNAL = 1.9; EXPRESSED IN FETAL LIVER, SIGNAL = 0.99; EST_HUMAN HIT: BE182886.1, EVALUE 2.00e-76; SWISSPROT HIT: P17900, EVALUE 7.00e-25; NT HIT: X16087.1, EVALUE 2.00e-76
gcaggggctctgggcagggctccccagtaggaattaacatgtcaagcacatcacagaagtgttcaaaggtacagctgccaatgtagtctgtgcatgggatcttgatccagaggccagccacctccttctccaaaactaaatccac

SEQ ID NO: 18278 - DNA, 467 bp, Homo sapiens; identical to SEQ ID NO: 1519
  MAP TO AF176681.1; EXPRESSED IN BT474, SIGNAL = 2.4; EXPRESSED IN FETAL LIVER, SIGNAL = 3.7; EXPRESSED IN PLACENTA, SIGNAL = 3.2; EXPRESSED IN HELA, SIGNAL = 4.8; EXPRESSED IN HBL100, SIGNAL = 1.9; EXPRESSED IN HEART, SIGNAL =   2; EXPRESSED IN BONE MARROW, SIGNAL = 2.2; EXPRESSED IN LUNG, SIGNAL = 1.7; EXPRESSED IN BRAIN, SIGNAL = 2.1; EXPRESSED IN ADULT LIVER, SIGNAL = 5.1; NT HIT: U78027.1, EVALUE 0.00e+00; EST_HUMAN HIT: AW997712.1, EVALUE 1.00e-116; SWISSPROT HIT: P08547, EVALUE 1.00e-33

SEQ ID NO: 18279 - DNA, 318 bp, Homo sapiens
  MAP TO AC005082.2; EXPRESSED IN HEART, SIGNAL = 3.9; EXPRESSED IN LUNG, SIGNAL = 4.6; EXPRESSED IN BONE MARROW, SIGNAL =   2; EXPRESSED IN BRAIN, SIGNAL = 2.1; EXPRESSED IN BT474, SIGNAL = 5.7; EXPRESSED IN ADULT LIVER, SIGNAL =   2; EXPRESSED IN FETAL LIVER, SIGNAL = 1.9; EXPRESSED IN HELA, SIGNAL = 5.1; EXPRESSED IN PLACENTA, SIGNAL =  27; EXPRESSED IN HBL100, SIGNAL =   2; SWISSPROT HIT: Q14956, EVALUE 8.00e-46; EST_HUMAN HIT: BE672596.1, EVALUE 0.00e+00; NT HIT: AF322909.1, EVALUE 0.00e+00
ctaaagaaggggtgggttttgaaggtctgggtggtggtggcggtggcggacaaggtcctggtgctgcagctttcacagtgaggttaaggctgaaggttccattgagcacatacgtgtgattcacagtatgattggtggaaacaaacaggccagtattatccccgaagctccacttgtagttaatggtagaataattgaggaagtggctaggatcatgaatcaggacatcaaacataatggggagatctttgaggaaggtttcgtcggatgaatttcgatcgttcttctggaacatagtcacaaacacaggaatctgat

SEQ ID NO: 18280 - DNA, 572 bp, Homo sapiens
  MAP TO AL096678.8; EXPRESSED IN BT474, SIGNAL = 2.7; EXPRESSED IN PLACENTA, SIGNAL = 3.9; EXPRESSED IN HBL100, SIGNAL = 2.6; EXPRESSED IN HEART, SIGNAL = 3.1; EXPRESSED IN BRAIN, SIGNAL = 3.3; EXPRESSED IN ADULT LIVER, SIGNAL =   3; EXPRESSED IN FETAL LIVER, SIGNAL = 3.3; EXPRESSED IN HELA, SIGNAL = 2.9; EXPRESSED IN LUNG, SIGNAL = 3.4; EXPRESSED IN BONE MARROW, SIGNAL = 3.3; SWISSPROT HIT: P05659, EVALUE 1.10e-01; NT HIT: gi11418976, EVALUE 0.00e+00; EST_HUMAN HIT: AA476676.1, EVALUE 0.00e+00
gtgtggaccaattagtggtgactgcaggtccagcagcagcttccgacagctcccctccagtggttaggcccaaagagaaggccctcaactccactgctacccagagactccagcaggagctgtcgtcttctgactgtacaggctcccgactgagaaacgtcaaggtccagacagccttgctacccatgaatgaggcagccagatctgatcagcaggctgggccctgcgtcaacagaggcactcaaactaagaagtctgggaagagtgggccaacaaggcatcgtgcccagcaacccgcagccagcagcacctgtgggcagccgccaccagccacaggcagcgagcagactggccctcacattcgggacacctcccaagctctggagcttacccagtatttttttgaggctgtttctacccagatggaaaagtggtatgaaaggaagattgaagaagcacgaagccaagccaatcagaaagcccagcaagataaggctacattgaaggaacacattaaaagtttagaagaggaacttgccaaactaaggactagggtgcagaaggaaaattag

SEQ ID NO: 18281 - DNA, 316 bp, Homo sapiens
  MAP TO Z95114.19; EXPRESSED IN BONE MARROW, SIGNAL =   7; EXPRESSED IN BT474, SIGNAL = 7.1; EXPRESSED IN HBL100, SIGNAL = 7.4; EXPRESSED IN HEART, SIGNAL = 8.4; EXPRESSED IN LUNG, SIGNAL = 8.2; EXPRESSED IN BRAIN, SIGNAL = 7.3; EXPRESSED IN ADULT LIVER, SIGNAL =  11; EXPRESSED IN FETAL LIVER, SIGNAL = 8.6; EXPRESSED IN PLACENTA, SIGNAL = 9.8; EXPRESSED IN HELA, SIGNAL = 6.1; EST_HUMAN HIT: AW818488.1, EVALUE 1.00e-110; NT HIT: gi11418041, EVALUE 0.00e+00; SWISSPROT HIT: O95236, EVALUE 1.00e-03
aaggaaatttcttcttcctattccccacactctccagtcccctctcctcccttattccaggctccagcattcctgccttctccttggtgcacttgccatctgcattaacccctcccctgctgtgctcagctacagaaatgccaaagtcactaacactcagctccataaactttaccttgccctctttatccccctaataaaatgcctgcattttgtcgtggcctgtgtatggctcacctcccctgctggctgcactggtctggggtcagtgggtatggcatggattcagacgctgatagatctgagtgagctccat

SEQ ID NO: 18282 - DNA, 303 bp, Homo sapiens
  MAP TO AC006946.18; EXPRESSED IN BONE MARROW, SIGNAL =   3; EXPRESSED IN BRAIN, SIGNAL = 2.7; EXPRESSED IN BT474, SIGNAL = 3.5; EXPRESSED IN HEART, SIGNAL = 2.9; EXPRESSED IN LUNG, SIGNAL =   4; EXPRESSED IN ADULT LIVER, SIGNAL = 3.7; EXPRESSED IN FETAL LIVER, SIGNAL = 2.5; EXPRESSED IN PLACENTA, SIGNAL = 3.2; EXPRESSED IN HELA, SIGNAL = 3.5; EXPRESSED IN HBL100, SIGNAL = 3.9; NT HIT: gi11526291, EVALUE 1.00e-113; EST_HUMAN HIT: BF528236.1, EVALUE 1.00e-113; SWISSPROT HIT: P36151, EVALUE 6.00e-03
agcccacccacctttgggttcctgttggacatcgatggagtgcttgtgcggggccacagagtgatccctgctgctctgaaagccttccgaaggctggtgaactcccaggggcagctgcgggtgcccgtggtttttgttacaaatgctgggaacatcttacaacacagcaaagcccaggagctgtcagccctgctggggtgcgaggtgagaaggcagccagaggcatggaagcccaaggacctggttcctaatggagccgctgccccagctccaagtccctttcccctgggttgggatatggaa

SEQ ID NO: 18283 - DNA, 169 bp, Homo sapiens
  MAP TO AC008013.8; EXPRESSED IN PLACENTA, SIGNAL = 3.3; EXPRESSED IN BONE MARROW, SIGNAL =   4; EXPRESSED IN BRAIN, SIGNAL = 3.2; EXPRESSED IN HELA, SIGNAL = 2.4; EXPRESSED IN HBL100, SIGNAL = 2.1; EXPRESSED IN HEART, SIGNAL =  18; EXPRESSED IN LUNG, SIGNAL = 1.2; EXPRESSED IN ADULT LIVER, SIGNAL = 1.4; EXPRESSED IN FETAL LIVER, SIGNAL =   3; EXPRESSED IN BT474, SIGNAL = 2.8; NT HIT: AK024481.1, EVALUE 1.00e-10; EST_HUMAN HIT: AI204066.1, EVALUE 6.00e-77; SWISSPROT HIT: O26373, EVALUE 3.80e+00
gatctctctgatgttgacgagcagcatggagacctggggagaccccccaagcgcctcctccatgtcatccttgggctccagcttggcgctcacacacacaggaaaggacttcagcttctcctgggagggctgggtggctgaggggtggtggatttcggagttggactag

SEQ ID NO: 18284 - DNA, 214 bp, Homo sapiens
  MAP TO AL035684.25; EXPRESSED IN FETAL LIVER, SIGNAL = 2.3; EXPRESSED IN BT474, SIGNAL = 1.2; EXPRESSED IN HEART, SIGNAL = 1.5; EXPRESSED IN BONE MARROW, SIGNAL = 0.96; EXPRESSED IN BRAIN, SIGNAL = 1.4; SWISSPROT HIT: Q05652, EVALUE 2.00e+00; EST_HUMAN HIT: AA329548.1, EVALUE 4.00e-26
gtttaagatgctactctttatgcacataacttagcataattttattaggcagctcatcaccaacagaattagtgaaaatcaggccagaaaaaatctgagagccaggcttatgcagacgtggaggcttttgctctaaaatggtctgctcacgcttggggaagaccccaagagaaagcactacctttcttctgggccctgagcgggttgggagtgg

SEQ ID NO: 18285 - DNA, 166 bp, Homo sapiens
  MAP TO AL117352.3; EXPRESSED IN BONE MARROW, SIGNAL =  13; EXPRESSED IN LUNG, SIGNAL =  12; EXPRESSED IN BT474, SIGNAL =  11; EXPRESSED IN PLACENTA, SIGNAL =  18; EXPRESSED IN BRAIN, SIGNAL =  11; EXPRESSED IN ADULT LIVER, SIGNAL =  16; EXPRESSED IN FETAL LIVER, SIGNAL = 9.2; EXPRESSED IN HEART, SIGNAL = 6.8; EXPRESSED IN HELA, SIGNAL =  18; EXPRESSED IN HBL100, SIGNAL =  15; SWISSPROT HIT: O15522, EVALUE 2.20e+00; NT HIT: L78810.1, EVALUE 1.00e-62; EST_HUMAN HIT: AI961087.1, EVALUE 8.00e-55
atggagcagagggtggcgctcgttggggaggctcgggcagcacaggagcccatggaggtggtgcgaggctcaggcatggcgggctgcaggtgccgagccctgccccgcgggaaggcagctaaggcccggtgagaaatcgagcacagtgccggtgggctggcactgc

SEQ ID NO: 18286 - DNA, 300 bp, Homo sapiens
  MAP TO AL109823.6; EXPRESSED IN BONE MARROW, SIGNAL = 2.5; EXPRESSED IN BT474, SIGNAL = 3.4; EXPRESSED IN LUNG, SIGNAL =   8; EXPRESSED IN BRAIN, SIGNAL = 1.8; EXPRESSED IN ADULT LIVER, SIGNAL = 3.6; EXPRESSED IN FETAL LIVER, SIGNAL =   9; EXPRESSED IN PLACENTA, SIGNAL =  65; EXPRESSED IN HEART, SIGNAL =   5; EXPRESSED IN HELA, SIGNAL = 3.7; EXPRESSED IN HBL100, SIGNAL =   3; NT HIT: M98478.1, EVALUE 0.00e+00; EST_HUMAN HIT: BE385335.1, EVALUE 0.00e+00; SWISSPROT HIT: P21980, EVALUE 6.00e-46
ccaggttgaggttgagcaggtacttggtgccacactcgggccccaagatcccattgtagctgacggtgcgggcacagagcaggaggcggcagacgtactcctcagcggtgttgttggtgatgtgggcaaagacgtcaaagtcactgcccatgttcatgctctggcccacacggatccgcatggccatccctgtctcctccttctcggccagtttgttcaggtggttcgcccttgtgaaggcctccctctcctctgaggaccctgtaggggttgagaagagagcctcaatcacagctggaa

SEQ ID NO: 18287 - DNA, 213 bp, Homo sapiens
  MAP TO AL117340.3; EXPRESSED IN PLACENTA, SIGNAL = 1.3; EXPRESSED IN HBL100, SIGNAL = 1.6; EXPRESSED IN HELA, SIGNAL = 1.4; EXPRESSED IN HEART, SIGNAL = 1.3; EXPRESSED IN BT474, SIGNAL = 1.3; EXPRESSED IN LUNG, SIGNAL = 1.1; EXPRESSED IN BONE MARROW, SIGNAL = 1.2; EXPRESSED IN BRAIN, SIGNAL = 1.1; EXPRESSED IN ADULT LIVER, SIGNAL = 1.7; EXPRESSED IN FETAL LIVER, SIGNAL = 2.5; SWISSPROT HIT: P52919, EVALUE 4.40e+00; EST_HUMAN HIT: AI694355.1, EVALUE 1.00e-100
acatatatgcttatcagaagcttttacaaaatggaaattttatgttagaagatttgggctaccagtaatattcactgtgcatattttaaaaaaaaaggtgaacagagttcattgtttagggaaaatgattatggagaaactaaaatcaagagcaattttaatgtggatattaatgacagtgatcactttcatatccatgactttatctgttcc

SEQ ID NO: 18288 - DNA, 108 bp, Homo sapiens
  MAP TO AC009696.2; EXPRESSED IN BT474, SIGNAL = 1.1; EXPRESSED IN FETAL LIVER, SIGNAL =   1; EXPRESSED IN ADULT LIVER, SIGNAL = 1.1; EXPRESSED IN HBL100, SIGNAL = 1.2; EXPRESSED IN HEART, SIGNAL = 1.6; EXPRESSED IN BONE MARROW, SIGNAL = 1.3; EXPRESSED IN LUNG, SIGNAL =   1; EXPRESSED IN BRAIN, SIGNAL = 1.4; SWISSPROT HIT: Q62227, EVALUE 7.20e+00; NT HIT: M84751.1, EVALUE 1.00e-30; EST_HUMAN HIT: AA655008.1, EVALUE 2.00e-54
tacaggaaatgacagcttgccttgaggtgaggagctgggggatcaccaacaatgctgcccttgttggcatgtaaggatttggaaattggacttttttctatggttttt

SEQ ID NO: 18289 - DNA, 993 bp, Homo sapiens
  MAP TO AC010680.2; EXPRESSED IN BONE MARROW, SIGNAL = 1.2; EXPRESSED IN LUNG, SIGNAL = 1.1; EXPRESSED IN BRAIN, SIGNAL = 3.7; EXPRESSED IN BT474, SIGNAL = 2.4; EXPRESSED IN ADULT LIVER, SIGNAL =   2; EXPRESSED IN PLACENTA, SIGNAL = 0.97; EXPRESSED IN HEART, SIGNAL = 5.8; EXPRESSED IN HELA, SIGNAL = 0.95; EXPRESSED IN HBL100, SIGNAL = 1.1; NT HIT: gi4507720, EVALUE 0.00e+00; SWISSPROT HIT: P16419, EVALUE 2.00e-37; EST_HUMAN HIT: BF575343.1, EVALUE 0.00e+00
aggtaattcaaggtgcacattgtgcccaattctcacagtgacttgtgccccagggatatctgacaggtcaacttcaggtgtaataataagttctttcactgtaattggcccaatagtgacaggatcactcagtcctttctcatttttggcaaacactctgaactccaggactgactgctccttaagttggctaacctcaatttcacatgtcttacttatgccagcgtgggaccacgtctgttcacctttacctttcctttctacaacatattctgtgatgacgctaccaccatcaaagtcaggtttggtccagctgaggatgacagatgtctttgttgagtctttcattgagagatcacgtataggagctggtacttcagcagccttcactggctctgtagtttcacagggttccccaattccaatttcattttctgcaagaactctgaagaagaatggagtcttctccgacaaatctattagcttgaaggatgtgctagaacatttgtgtgacacgacagaccatgttctcttggtggcatctctcttttcaatgacataattaattattggagatcctccatcaatgagaggaggatcccagagcaaagtgactgtgcctcgagaaacatgtttaacctgtagtttctggcaggcagctggtgtgtcaagcactttaacactcacagttgaagacttaggttcaccaactccattttctattgtgagaatatattttcctgtatcattgcgagtaacttgaggaatggtgagtaatgaggatgaatcagtgttttcaatgctgtatctggcatcactgccaagattcttctcatcttttctccatgtgacagtaggtggaggtctgcctttaaagggaatcaacacttgtacatcttcaccagctttggcaataacagaagttctgagagccacatccaggtcaatctctggtgcctctgtagacataaaatggatacatacagtgaattt

SEQ ID NO: 18290 - DNA, 397 bp, Homo sapiens
  MAP TO AC007376.7; EXPRESSED IN HBL100, SIGNAL =  62; EXPRESSED IN HELA, SIGNAL =  75; EXPRESSED IN HEART, SIGNAL =  11; EXPRESSED IN LUNG, SIGNAL =  13; EXPRESSED IN BRAIN, SIGNAL =  12; EXPRESSED IN ADULT LIVER, SIGNAL =  11; EXPRESSED IN PLACENTA, SIGNAL =  28; EXPRESSED IN BONE MARROW, SIGNAL =  26; EXPRESSED IN BT474, SIGNAL =  43; EXPRESSED IN FETAL LIVER, SIGNAL =  29; SWISSPROT HIT: P08865, EVALUE 4.00e-58; NT HIT: gi11427320, EVALUE 0.00e+00; EST_HUMAN HIT: AI923116.1, EVALUE 0.00e+00
cctatgcaagaacagcttaagaccattcagtggttgctcctacccattcagtggcctgagcagtgggagctgcagaccagtcttctatggcaggctgagcgctccagtcttcagtagggaactgctgaataggcacagagggcacctgcacaccttcagaccagtctgcaacctcaggccgagtagcagtgaactcaggagctggagcagtccattcaccctgaaattcctcctcggtcactgccttttcagcagcagcctactcttctttttcaatctctccaggatctctgtagaagtagagatcaggcatgacctcccatgggtgttcacgggaaatggtgccatgcatgcgcagaacttcccaagccagcatccaccacatcaaacccactga

SEQ ID NO: 18291 - DNA, 225 bp, Homo sapiens
  MAP TO AL109954.10; EXPRESSED IN BONE MARROW, SIGNAL = 1.5; EXPRESSED IN LUNG, SIGNAL = 1.5; EXPRESSED IN BRAIN, SIGNAL = 1.8; EXPRESSED IN PLACENTA, SIGNAL = 1.7; EXPRESSED IN ADULT LIVER, SIGNAL = 1.6; EXPRESSED IN FETAL LIVER, SIGNAL = 1.3; EXPRESSED IN BT474, SIGNAL = 1.1; EXPRESSED IN HEART, SIGNAL = 1.5; EXPRESSED IN HELA, SIGNAL = 1.3; EXPRESSED IN HBL100, SIGNAL = 1.2; NT HIT: M95098.1, EVALUE 4.50e-01; SWISSPROT HIT: O60676, EVALUE 3.80e-02; EST_HUMAN HIT: AI200857.1, EVALUE 1.00e-100
attctattgactctgatggccctcccctaccaagcaaggaagaaaacctttctaagcgtccatgaagtgatggcagtagaaaactatgcgaaggacagcttgcagtggatcaccgaccagtataacaaggaaagtgatgacaagtaccacttcaggatcttccgagtccttaaagtccagaggcaggtgagtgtatgacttcccgcctctccccaggcctgatac

SEQ ID NO: 18292 - DNA, 110 bp, Homo sapiens
  MAP TO AL035457.11; EXPRESSED IN HBL100, SIGNAL = 3.8; EXPRESSED IN HELA, SIGNAL = 4.3; EXPRESSED IN HEART, SIGNAL = 2.5; EXPRESSED IN LUNG, SIGNAL = 2.3; EXPRESSED IN BRAIN, SIGNAL =   2; EXPRESSED IN ADULT LIVER, SIGNAL =   2; EXPRESSED IN PLACENTA, SIGNAL = 2.7; EXPRESSED IN BONE MARROW, SIGNAL = 2.1; EXPRESSED IN BT474, SIGNAL = 4.7; EXPRESSED IN FETAL LIVER, SIGNAL =   3; EST_HUMAN HIT: F34210.1, EVALUE 3.50e-01; NT HIT: X14061.1, EVALUE 2.40e-01
ctgggcaggcctgagtttcttcgtttcttttcccctccgttcccttcccttccttttgccaatctgcatagtgtctggcacatgtgtgacccgcagaagatgctcaatga

SEQ ID NO: 18293 - DNA, 129 bp, Homo sapiens
  MAP TO AC009475.2; EXPRESSED IN PLACENTA, SIGNAL = 1.4; EXPRESSED IN HBL100, SIGNAL =   2; EXPRESSED IN HEART, SIGNAL =   1; EXPRESSED IN BONE MARROW, SIGNAL = 1.2; EXPRESSED IN LUNG, SIGNAL = 1.3; EXPRESSED IN BRAIN, SIGNAL = 1.4; EXPRESSED IN BT474, SIGNAL = 4.2; EXPRESSED IN FETAL LIVER, SIGNAL = 1.2; EXPRESSED IN ADULT LIVER, SIGNAL = 1.5; EXPRESSED IN HELA, SIGNAL = 1.2; NT HIT: gi11496280, EVALUE 1.10e+00; EST_HUMAN HIT: R25481.1, EVALUE 1.00e-66
agtcaggagatacccgttggtaccactggtcccattggtggttgtcgcagtgtggggattctttcccggaggttctgagtcctcctcatctgagctagactcaatatcacttcgatcatccttggacac

SEQ ID NO: 18294 - DNA, 133 bp, Homo sapiens
  MAP TO AC007748.2; EXPRESSED IN HEART, SIGNAL = 1.3; EXPRESSED IN BRAIN, SIGNAL = 3.2; EXPRESSED IN BT474, SIGNAL = 1.5; EXPRESSED IN FETAL LIVER, SIGNAL = 1.1; EXPRESSED IN HELA, SIGNAL = 2.5; EXPRESSED IN PLACENTA, SIGNAL = 1.1; EXPRESSED IN HBL100, SIGNAL = 1.6; NT HIT: D32210.1, EVALUE 2.50e-01; EST_HUMAN HIT: BF528573.1, EVALUE 4.00e-69; SWISSPROT HIT: P46530, EVALUE 2.00e-11
ggatctcacagtttgctcccacccaaccatgcgggcagtggcagttataaccattgggctggtccaggcagctcccaccatggtggcaggggttactgtcacattcatttatgtcaatgtcgcactcttcacc

SEQ ID NO: 18295 - DNA, 186 bp, Homo sapiens
  MAP TO AC004938.2; EXPRESSED IN HELA, SIGNAL = 1.5; EXPRESSED IN PLACENTA, SIGNAL = 1.2; EXPRESSED IN HBL100, SIGNAL = 3.3; EXPRESSED IN HEART, SIGNAL = 1.5; EXPRESSED IN BONE MARROW, SIGNAL = 1.5; EXPRESSED IN LUNG, SIGNAL = 0.99; EXPRESSED IN BRAIN, SIGNAL = 2.6; EXPRESSED IN BT474, SIGNAL =   2; EXPRESSED IN FETAL LIVER, SIGNAL = 2.1; EXPRESSED IN ADULT LIVER, SIGNAL = 1.5; SWISSPROT HIT: P56941, EVALUE 5.00e-08; NT HIT: AF192523.1, EVALUE 1.00e-99
gtggactccaaggccacgctgggcctcggcggggtggccgtggtcctgggagcagtcatggctgccatgggcttcttctcctacttgggtatccgctcctccctggtcatcctgcaagtggttcctttcctggtgctgtccgtgggggctgataacatcttcatctttgttctcgagtaccaggta

SEQ ID NO: 18296 - DNA, 107 bp, Homo sapiens
  MAP TO AC008122.15; EXPRESSED IN HELA, SIGNAL = 1.3; EXPRESSED IN PLACENTA, SIGNAL = 3.5; EXPRESSED IN HBL100, SIGNAL = 1.5; EXPRESSED IN HEART, SIGNAL = 1.6; EXPRESSED IN LUNG, SIGNAL = 1.1; EXPRESSED IN BONE MARROW, SIGNAL = 1.5; EXPRESSED IN BRAIN, SIGNAL =   1; EXPRESSED IN BT474, SIGNAL = 1.6; EXPRESSED IN ADULT LIVER, SIGNAL = 1.1; EXPRESSED IN FETAL LIVER, SIGNAL = 1.2; EST_HUMAN HIT: BF570087.1, EVALUE 5.30e+00; NT HIT: AF260700.1, EVALUE 2.00e-01; SWISSPROT HIT: P24235, EVALUE 2.10e-01
gacagctgccttacccaagtcatgcagggcaacctgcatccaatgaatccagtgactggttgaggtgttataaacgtcccagttcaggacaacattgccctatgccc

SEQ ID NO: 18297 - DNA, 210 bp, Homo sapiens
  MAP TO AC006020.2; EXPRESSED IN BT474, SIGNAL = 1.5; EXPRESSED IN FETAL LIVER, SIGNAL = 1.2; EXPRESSED IN ADULT LIVER, SIGNAL = 3.2; EXPRESSED IN HBL100, SIGNAL = 1.4; EXPRESSED IN PLACENTA, SIGNAL = 1.1; EXPRESSED IN HEART, SIGNAL = 0.92; EXPRESSED IN LUNG, SIGNAL = 0.95; EXPRESSED IN BONE MARROW, SIGNAL = 1.5; EXPRESSED IN BRAIN, SIGNAL = 1.3; SWISSPROT HIT: P33485, EVALUE 1.90e-01; NT HIT: gi11421179, EVALUE 1.00e-115
atcatgaatggcccgccgattcgaaggctgtatcaagaccttgtatcccagattggtgatgcctttgatgtgcttgggagctagcggggcccttctctcccaggcgttcacatcctccctccggacggccaacacagctttgtggtgaagacccttggagaggctgacccccagcctgcccagtccagtcctatgtacttgcagcatctt

SEQ ID NO: 18298 - DNA, 181 bp, Homo sapiens
  MAP TO AC009185.2; EXPRESSED IN LUNG, SIGNAL = 0.94; EXPRESSED IN BT474, SIGNAL = 1.3; EXPRESSED IN ADULT LIVER, SIGNAL = 1.5; EXPRESSED IN PLACENTA, SIGNAL = 1.1; EXPRESSED IN BONE MARROW, SIGNAL = 1.5; EXPRESSED IN FETAL LIVER, SIGNAL =   1; EXPRESSED IN HEART, SIGNAL =   1; EXPRESSED IN HBL100, SIGNAL = 1.1; NT HIT: gi5031810, EVALUE 8.00e-98; SWISSPROT HIT: Q08881, EVALUE 5.00e-31; EST_HUMAN HIT: BE617762.1, EVALUE 6.30e-01
ggccatgccctcacacacatccagacacatgcccagcagggtctctgcagcaaaaagtccccgctgggtgcgtagataatctgacaggcagccgtgctccatgaactcaaacaccaggcagatgggggcctgctccaggcacaccccatacagctgcaccagtttgggatgagagagtttc

SEQ ID NO: 18299 - DNA, 118 bp, Homo sapiens
  MAP TO AC009473.2; EXPRESSED IN HEART, SIGNAL = 7.3; EXPRESSED IN LUNG, SIGNAL =  19; EXPRESSED IN BRAIN, SIGNAL = 5.2; EXPRESSED IN BT474, SIGNAL =  30; EXPRESSED IN ADULT LIVER, SIGNAL =  12; EXPRESSED IN PLACENTA, SIGNAL =  31; EXPRESSED IN HBL100, SIGNAL =  49; EXPRESSED IN BONE MARROW, SIGNAL =  15; EXPRESSED IN FETAL LIVER, SIGNAL =  15; EXPRESSED IN HELA, SIGNAL =  29; EST_HUMAN HIT: BE042968.1, EVALUE 4.00e-41; NT HIT: U43701.1, EVALUE 2.00e-41
gatggcgccgaaagcgaagaaggaagctcctgcccctcctacagctgaagccaaagtgaaggcttcgaaggccaagaaggcagtgttgaaaggtgtccacaaccacaaaaaaagaaaa

SEQ ID NO: 18300 - DNA, 693 bp, Homo sapiens
  MAP TO AC010680.2; EXPRESSED IN BONE MARROW, SIGNAL = 0.94; EXPRESSED IN BRAIN, SIGNAL = 2.9; EXPRESSED IN BT474, SIGNAL = 2.2; EXPRESSED IN HEART, SIGNAL = 5.8; EXPRESSED IN PLACENTA, SIGNAL = 1.4; SWISSPROT HIT: P52179, EVALUE 3.00e-26; NT HIT: gi4507720, EVALUE 0.00e+00; EST_HUMAN HIT: AA192980.1, EVALUE 2.90e-02
atactcctgggccacctgtcaatgtgactgttaaggaaatatccaaagactctgcttatgttacctgggagcctcccattattgatggcggaagccccatcataaactatgtggtacaaaaacgtgatgcagagaggaaatcctggtctacagtgacaactgagtgctccaaaacaagcttcagagtagctaatttggaggagggaaaatcctacttcttccgagtgtttgctgaaaatgagtatggcattggtgatcccggtgaaactcgtgatgctgtcaaagcttcccgtaagcaaatgaaccatcatcccatcattttgagttatatccttcctttgttatatggggcttacacttatcatttctcctttgctttagaaactcctggaccagttgtggacctgaaagtgaggtctgtatctaagtcatcctgtagcattggctggaaaaagcctcacagtgatggtggaagtcggattattggatatgtagttgatttcctgactgaagaaaataagtggcaacgagttatgaaatccttaagcctacagtactctgcaaaagatttgactgaagggaaggaatataccttcagagtgagtgctgagaatgaaaatggagaaggaaccccaagcgaaatcactgttgtggcaagggatgatgttggtaaggctctatgcacacatcttc

SEQ ID NO: 18301 - DNA, 193 bp, Homo sapiens
  MAP TO AL021394.7; EXPRESSED IN HELA, SIGNAL = 1.7; EXPRESSED IN HEART, SIGNAL = 1.3; EXPRESSED IN LUNG, SIGNAL = 1.2; EXPRESSED IN BRAIN, SIGNAL = 1.5; EXPRESSED IN BT474, SIGNAL = 1.2; EXPRESSED IN PLACENTA, SIGNAL = 3.8; EXPRESSED IN BONE MARROW, SIGNAL = 2.1; EXPRESSED IN ADULT LIVER, SIGNAL = 3.7; EXPRESSED IN FETAL LIVER, SIGNAL = 1.4; NT HIT: AF058907.1, EVALUE 3.00e-08; EST_HUMAN HIT: AA678246.1, EVALUE 2.00e-46; SWISSPROT HIT: O54898, EVALUE 2.20e+00
tcagggggttgaacctcacacaaacctccggtagtaaggaaaatattcagaactcccctttcctttcttctcaggggaagaaagagtagctccactcctgccggttcctcccctaggggaagggcaaggagaggggagaacagcggcataagtggctggcagaggcagggaaagaccagcagaggaaagagag

SEQ ID NO: 18302 - DNA, 475 bp, Homo sapiens
  MAP TO AC010724.1; EXPRESSED IN PLACENTA, SIGNAL =  14; EXPRESSED IN HBL100, SIGNAL = 8.5; EXPRESSED IN HELA, SIGNAL =  13; EXPRESSED IN HEART, SIGNAL =  13; EXPRESSED IN BRAIN, SIGNAL =  12; EXPRESSED IN BT474, SIGNAL =   7; EXPRESSED IN LUNG, SIGNAL =  15; EXPRESSED IN BONE MARROW, SIGNAL =  10; EXPRESSED IN ADULT LIVER, SIGNAL =  10; EXPRESSED IN FETAL LIVER, SIGNAL =  12; EST_HUMAN HIT: BF530254.1, EVALUE 0.00e+00; NT HIT: gi4503098, EVALUE 0.00e+00; SWISSPROT HIT: Q00657, EVALUE 5.00e-51
accgtgctgttccgtgtcaccggaggcctgccgttcagggagctgcagaagcagggggctggtggggtggaggatgctgagtggtgggtcacacaggcgttcaccagcaggatgtggagcagggcacgtgaggtacctgagcactgaccacagcactacaccgaggacaccgtggagaacctggatctgcaggtgcaggtgagctggaaaatcctgagcaatctgtccttcctagtgaccatccagagagccactgtgtggatgctgcagctggagccactgcacactcagaacacccagcaggaggccctcaccacagcccacctggaggccaccctggaggaggcaggcccaagccccccaaccttccactgtgaggtggttcaggctcccaggaaaggcaactttcaactacagggcacgatgctgtcagacggtcagggcttcacccaggatgacgtacaggctgcagagg

SEQ ID NO: 18303 - DNA, 160 bp, Homo sapiens
  MAP TO AC011004.1; EXPRESSED IN HBL100, SIGNAL =   1; EXPRESSED IN HELA, SIGNAL = 0.91; EXPRESSED IN HEART, SIGNAL = 1.5; EXPRESSED IN LUNG, SIGNAL = 1.1; EXPRESSED IN BRAIN, SIGNAL = 1.5; EXPRESSED IN ADULT LIVER, SIGNAL = 2.7; EXPRESSED IN PLACENTA, SIGNAL = 1.4; EXPRESSED IN BONE MARROW, SIGNAL = 1.3; EXPRESSED IN BT474, SIGNAL = 1.4; EXPRESSED IN FETAL LIVER, SIGNAL = 1.5; SWISSPROT HIT: P36245, EVALUE 1.70e+00; EST_HUMAN HIT: BF678085.1, EVALUE 3.50e-02; NT HIT: AE001501.1, EVALUE 7.90e-02
aagcatagtcttctggatcctgcgcctctttgtgaagttggcctttgctggtggctctgccactggtttggaaatcagagatggtttttccatgcccatgatgaggacaaaggtgagtgtcccctgtctccacattgggaaaagaaacacacccatccct

SEQ ID NO: 18304 - DNA, 119 bp, Homo sapiens
  MAP TO AC011193.1; EXPRESSED IN ADULT LIVER, SIGNAL =   2; EXPRESSED IN BT474, SIGNAL = 2.9; EXPRESSED IN FETAL LIVER, SIGNAL = 2.9; EXPRESSED IN HBL100, SIGNAL = 2.4; EXPRESSED IN PLACENTA, SIGNAL = 2.7; EXPRESSED IN HELA, SIGNAL = 2.6; EXPRESSED IN HEART, SIGNAL = 3.1; EXPRESSED IN BONE MARROW, SIGNAL = 2.3; EXPRESSED IN LUNG, SIGNAL = 2.2; EXPRESSED IN BRAIN, SIGNAL = 1.6; NT HIT: AF187850.1, EVALUE 2.20e-01; EST_HUMAN HIT: BF035701.1, EVALUE 1.50e+00
  unsure 23
cctggctggcgagacccaagtgntataatagcatcatgtttctaatggtcacagcaaagaaggattcagtcagagtcaaagctgatggccacagtttaaactgtttgccatctgagtga

SEQ ID NO: 18305 - DNA, 120 bp, Homo sapiens
  MAP TO AC011304.1; EXPRESSED IN HEART, SIGNAL = 0.88; EXPRESSED IN BONE MARROW, SIGNAL =   1; EXPRESSED IN BRAIN, SIGNAL = 1.1; NT HIT: U16125.1, EVALUE 1.00e+00; SWISSPROT HIT: Q09950, EVALUE 3.10e+00
gaggaaaggggaggcaaagcagcaggcagaagacagcacagccaggtcagcacagggcgaagccaggtgggctccatcatacaggtagtgaggagccactgccaggtgggctttattcat

SEQ ID NO: 18306 - DNA, 123 bp, Homo sapiens
  MAP TO AL031284.9; EXPRESSED IN BONE MARROW, SIGNAL = 4.2; EXPRESSED IN LUNG, SIGNAL = 1.4; EXPRESSED IN BRAIN, SIGNAL = 1.4; EXPRESSED IN ADULT LIVER, SIGNAL = 1.5; EXPRESSED IN BT474, SIGNAL = 1.5; EXPRESSED IN FETAL LIVER, SIGNAL = 3.4; EXPRESSED IN PLACENTA, SIGNAL = 1.5; EXPRESSED IN HBL100, SIGNAL = 1.5; EXPRESSED IN HELA, SIGNAL = 1.7; EXPRESSED IN HEART, SIGNAL = 2.5; NT HIT: gi11139304, EVALUE 2.00e-63; SWISSPROT HIT: P18577, EVALUE 2.00e-20; EST_HUMAN HIT: T84327.1, EVALUE 3.00e-53
cgttgctctctgatcattatcctccgttcccttgggtagaggctttggcaggcaccaggccacagtcagcccaaaataggctgcgaacacgtagaagtgcctcaggttcatgtggtagtctgt

SEQ ID NO: 18307 - DNA, 304 bp, Homo sapiens
  MAP TO AC010678.1; EXPRESSED IN HEART, SIGNAL = 1.2; EXPRESSED IN BONE MARROW, SIGNAL = 1.1; EXPRESSED IN BRAIN, SIGNAL = 0.98; EXPRESSED IN ADULT LIVER, SIGNAL =   1; EXPRESSED IN FETAL LIVER, SIGNAL = 1.1; EXPRESSED IN PLACENTA, SIGNAL = 0.95; NT HIT: AF075009.1, EVALUE 1.00e-26; EST_HUMAN HIT: AI969279.1, EVALUE 2.00e-47; SWISSPROT HIT: P02858, EVALUE 4.10e+00
aggttgcaggtatttagattgtcataccccacgtcctagtgattggtcctcttgtaaactgaactggtggtggattcaaaacagccaccttgcagaccttcttgctgatctcttttgttattttgtaacttttcctgtgcccttgaataagaccttgtgtagggaaacctacgaccgtcatgctttacttcgtttagactcctattctgttcccctgtggctacgctctcaccttaaggatgatctgagtggtccttttccccctcatccttgccccctaccccatgcatcttgttttccagtg

SEQ ID NO: 18308 - DNA, 475 bp, Homo sapiens
  MAP TO AL008723.8; EXPRESSED IN FETAL LIVER, SIGNAL = 1.6; EXPRESSED IN HBL100, SIGNAL = 0.9; EXPRESSED IN HEART, SIGNAL = 0.95; EXPRESSED IN BRAIN, SIGNAL = 3.4; EXPRESSED IN PLACENTA, SIGNAL = 1.8; EXPRESSED IN HELA, SIGNAL = 2.3; EXPRESSED IN BONE MARROW, SIGNAL = 1.4; EXPRESSED IN LUNG, SIGNAL = 4.9; NT HIT: X51755.1, EVALUE 6.00e-30; EST_HUMAN HIT: BF309107.1, EVALUE 6.00e-25; SWISSPROT HIT: P18488, EVALUE 3.80e-02
aggggtgtgtggactcaatgagcagatgccaccagggggagtggccagagcttccttcctcacagctgcagtgggggctgggggtaggggcatcccagggaggggtttttgtatgagcctgtgtcacaatgtggcgctgggtctgctggcgggcctcctgatggttcttgcctgtgcccatggcagcaggtgggacagaacaatcctcaggctcccaggtgcttgcctggaagtgcagcggcggcgagtggggcaagtcttccctcaagccctgggacagtatctgggtgggctggttcccagacacaatgaaggtacgtgcaattttgtgtcagccctgctgctgggggtgggatgtggggttgctgtcagtggcagcagccacaggcagatggctctcaggctcatgcacttgggtttcctttgtcatggagctggcctccttggtgcactgcattgcccattccctggggtg

SEQ ID NO: 18309 - DNA, 165 bp, Homo sapiens
  MAP TO AC010720.1; EXPRESSED IN BT474, SIGNAL = 4.4; EXPRESSED IN FETAL LIVER, SIGNAL = 4.5; EXPRESSED IN PLACENTA, SIGNAL = 6.4; EXPRESSED IN HBL100, SIGNAL = 4.3; EXPRESSED IN HEART, SIGNAL = 6.3; EXPRESSED IN LUNG, SIGNAL = 5.3; EXPRESSED IN BRAIN, SIGNAL = 4.4; EXPRESSED IN ADULT LIVER, SIGNAL = 4.8; EXPRESSED IN HELA, SIGNAL = 4.5; EXPRESSED IN BONE MARROW, SIGNAL = 5.6; SWISSPROT HIT: P21414, EVALUE 2.00e-06; NT HIT: AF297658.1, EVALUE 3.80e-01; EST_HUMAN HIT: R18746.1, EVALUE 2.20e+00
aatagctccagttgcctttgtacagttattttttttatttgagacactgctcaagggagtctgcagtactgagtgttctgcctcagtgtctactaggaaacgtacaggctggtcctccactgtagcagttactatgggatcctgggggccaagagtgagggagcc

SEQ ID NO: 18310 - DNA, 368 bp, Homo sapiens
  MAP TO AC010799.1; EXPRESSED IN BONE MARROW, SIGNAL = 3.9; EXPRESSED IN LUNG, SIGNAL =   3; EXPRESSED IN BRAIN, SIGNAL = 3.8; EXPRESSED IN ADULT LIVER, SIGNAL = 3.1; EXPRESSED IN BT474, SIGNAL = 3.6; EXPRESSED IN FETAL LIVER, SIGNAL = 2.6; EXPRESSED IN PLACENTA, SIGNAL = 3.8; EXPRESSED IN HBL100, SIGNAL = 8.9; EXPRESSED IN HELA, SIGNAL = 4.8; EXPRESSED IN HEART, SIGNAL = 2.1; NT HIT: AF163441.1, EVALUE 6.00e-48; SWISSPROT HIT: Q08379, EVALUE 2.60e-02; EST_HUMAN HIT: BF087405.1, EVALUE 1.00e-107
  unsure 2
  unsure 34
  unsure 124
tnagaagtaacctttcacgcgagggctacactgnccccattttagaggtggggaaacaaaggcccggagggctagggaggagggcaggctccccagttggggcaacgcaccagctcctcgaagnacgctctgtggcttggccagctgccgaagcttctcgtgctgctcctgaagcctctcctcctgcttccgaagcctctcttcctgttcccgaatcctctcttcttgtcgccggttcaggagacttatgtgctgattgtttttgacctgggactggagctctcctgccactctctctagttccttcctcaggtgctgcagctccacctcagagggcactgctgggggctccgggggcaagggttcag

SEQ ID NO: 18311 - DNA, 486 bp, Homo sapiens; identical to SEQ ID NO: 1552
  MAP TO AL022068.2; EXPRESSED IN PLACENTA, SIGNAL = 1.1; EXPRESSED IN HEART, SIGNAL = 0.91; EXPRESSED IN BONE MARROW, SIGNAL =   1; EXPRESSED IN ADULT LIVER, SIGNAL = 1.1; EST_HUMAN HIT: AI138977.1, EVALUE 5.00e-03; SWISSPROT HIT: P07977, EVALUE 8.60e+00

SEQ ID NO: 18312 - DNA, 131 bp, Homo sapiens
  MAP TO AC011191.1; EXPRESSED IN BONE MARROW, SIGNAL = 3.2; EXPRESSED IN FETAL LIVER, SIGNAL = 0.97; EXPRESSED IN HEART, SIGNAL = 0.84; EXPRESSED IN LUNG, SIGNAL = 1.2; SWISSPROT HIT: P55268, EVALUE 5.20e+00; NT HIT: AF245455.1, EVALUE 9.90e-01; EST_HUMAN HIT: BF244590.1, EVALUE 1.70e+00
ggacaggggccatcttcccggatttcagggagtcgtcatcagatctaaacaatgtggattctgtcagcaggaagagagtgggcaatgtttgctggatgggcaaacgtggcatctatggggccatttggaaa

SEQ ID NO: 18313 - DNA, 110 bp, Homo sapiens
  MAP TO AC011288.1; EXPRESSED IN HELA, SIGNAL = 0.95; EXPRESSED IN PLACENTA, SIGNAL = 1.2; EXPRESSED IN HEART, SIGNAL = 0.93; EXPRESSED IN BONE MARROW, SIGNAL = 1.2; EXPRESSED IN BRAIN, SIGNAL = 1.3; EXPRESSED IN BT474, SIGNAL = 1.2; EXPRESSED IN ADULT LIVER, SIGNAL = 1.2; EST_HUMAN HIT: AA034140.1, EVALUE 2.00e-06; SWISSPROT HIT: P04626, EVALUE 5.30e+00
gaggctgataagtccaagcatatggtgccagcatctggtgaggccttcttgctgtgtaatctcatggcagaagagtggaaggacaagtgagcacatgcaaaagggattgt

SEQ ID NO: 18314 - DNA, 188 bp, Homo sapiens
  MAP TO AL109829.6; EXPRESSED IN BONE MARROW, SIGNAL =   7; EXPRESSED IN BRAIN, SIGNAL = 5.8; EXPRESSED IN FETAL LIVER, SIGNAL = 4.8; EXPRESSED IN BT474, SIGNAL = 5.1; EXPRESSED IN ADULT LIVER, SIGNAL = 7.7; EXPRESSED IN HELA, SIGNAL =   6; EXPRESSED IN PLACENTA, SIGNAL = 8.1; EXPRESSED IN HBL100, SIGNAL =   4; EXPRESSED IN HEART, SIGNAL = 5.5; EXPRESSED IN LUNG, SIGNAL = 4.9; NT HIT: AL163303.2, EVALUE 1.00e-44; EST_HUMAN HIT: BE390947.1, EVALUE 1.00e-38; SWISSPROT HIT: O62732, EVALUE 1.50e-01
ggtcttgggcagctccacccctgtgactttgcagggtacaccctccatcctggctgccttcatgggctggcattgaatgtctgcggcctttccaggtacatggtgcaagctgtcggtggatctactattctggggtctggaggacagcatggtggcccttgtcttacagctccactaggtggtgtccc

SEQ ID NO: 18315 - DNA, 221 bp, Homo sapiens
  MAP TO AL049593.4; EXPRESSED IN BRAIN, SIGNAL = 2.8; EXPRESSED IN ADULT LIVER, SIGNAL = 0.93; EXPRESSED IN BT474, SIGNAL = 0.99; EXPRESSED IN HEART, SIGNAL = 0.99; EST_HUMAN HIT: AU158115.1, EVALUE 6.00e-88; NT HIT: AB011153.1, EVALUE 1.00e-121; SWISSPROT HIT: P10894, EVALUE 5.00e-31
aagtggaagcacagaccatcgaagaactaaagcaacagaaatcgtttgtgaaacttcaaaagaaacactacaaagaaatgaaagacctggttaagagacaccacaagaaaaccactgaccttatcaaagaacacactaccaagtataatgaaattcagaatgactacttgagaaggagagccgctttggaaaagtccgccaaaaaggacagtaagaaaaag

SEQ ID NO: 18316 - DNA, 452 bp, Homo sapiens; identical to SEQ ID NO: 1557
  MAP TO AL049648.6; EXPRESSED IN PLACENTA, SIGNAL = 3.1; EXPRESSED IN HELA, SIGNAL = 2.3; EXPRESSED IN BONE MARROW, SIGNAL = 3.4; EXPRESSED IN BRAIN, SIGNAL = 2.6; EXPRESSED IN BT474, SIGNAL = 2.4; EXPRESSED IN HBL100, SIGNAL =   4; EXPRESSED IN HEART, SIGNAL = 3.1; EXPRESSED IN LUNG, SIGNAL = 2.8; EXPRESSED IN ADULT LIVER, SIGNAL = 3.7; EXPRESSED IN FETAL LIVER, SIGNAL = 2.9; SWISSPROT HIT: P25582, EVALUE 2.00e+00; EST_HUMAN HIT: AA299985.1, EVALUE 6.60e+00

SEQ ID NO: 18317 - DNA, 75 bp, Homo sapiens
  MAP TO AL049812.3; EXPRESSED IN PLACENTA, SIGNAL = 1.8; EXPRESSED IN HBL100, SIGNAL = 1.4; EXPRESSED IN HELA, SIGNAL = 1.5; EXPRESSED IN HEART, SIGNAL = 2.8; EXPRESSED IN BONE MARROW, SIGNAL = 1.8; EXPRESSED IN BT474, SIGNAL = 1.5; EXPRESSED IN LUNG, SIGNAL = 1.5; EXPRESSED IN BRAIN, SIGNAL = 2.1; EXPRESSED IN ADULT LIVER, SIGNAL = 1.1; EXPRESSED IN FETAL LIVER, SIGNAL = 1.2; NT HIT: gi7427522, EVALUE 9.00e-15; EST_HUMAN HIT: AA100552.1, EVALUE 3.50e+00
ttcgattcttatcatggttcgggcgagcaatgctgcagtcctcgggccgcacacgggtgtcacaatgttgagggt

SEQ ID NO: 18318 - DNA, 106 bp, Homo sapiens
  MAP TO AL109757.1; EXPRESSED IN PLACENTA, SIGNAL = 5.6; EXPRESSED IN HBL100, SIGNAL = 1.7; EXPRESSED IN HELA, SIGNAL = 2.5; EXPRESSED IN HEART, SIGNAL = 1.4; EXPRESSED IN BT474, SIGNAL = 1.3; EXPRESSED IN LUNG, SIGNAL = 1.6; EXPRESSED IN BONE MARROW, SIGNAL = 2.9; EXPRESSED IN BRAIN, SIGNAL = 1.7; EXPRESSED IN ADULT LIVER, SIGNAL =   4; EXPRESSED IN FETAL LIVER, SIGNAL = 0.92; NT HIT: AF003528.1, EVALUE 7.00e-26; EST_HUMAN HIT: BE222256.1, EVALUE 1.00e-21
tttctatataaattagagaactcaaacagttcttttcgagtgtagtacacctcctcgtgagtcacactctcaacctcacatctaggggcctgccgggactttaggt

SEQ ID NO: 18319 - DNA, 163 bp, Homo sapiens
  MAP TO AL109933.5; EXPRESSED IN HBL100, SIGNAL = 1.1; EXPRESSED IN HELA, SIGNAL = 8.7; EXPRESSED IN HEART, SIGNAL = 1.1; EXPRESSED IN LUNG, SIGNAL = 1.2; EXPRESSED IN BRAIN, SIGNAL = 1.2; EXPRESSED IN BT474, SIGNAL = 0.96; EXPRESSED IN PLACENTA, SIGNAL = 1.1; EXPRESSED IN BONE MARROW, SIGNAL = 1.3; EXPRESSED IN ADULT LIVER, SIGNAL =  15; EXPRESSED IN FETAL LIVER, SIGNAL = 9.4; SWISSPROT HIT: P00747, EVALUE 2.00e-22; EST_HUMAN HIT: AV694621.1, EVALUE 1.00e-60; NT HIT: M33282.1, EVALUE 9.00e-85
catactcactgcagcgggggatgtcacaaagttcccagcgcttgttggggtcggtggtgaaacaccaaggccgcagctccctatcggggttacgacagtaattcttcttcaggttcttgtttggaaatctgaatggacaagaaagattttagtagcactgaac

SEQ ID NO: 18320 - DNA, 143 bp, Homo sapiens
  MAP TO AL049756.16; EXPRESSED IN HBL100, SIGNAL =  53; EXPRESSED IN HELA, SIGNAL =  49; EXPRESSED IN HEART, SIGNAL = 9.6; EXPRESSED IN LUNG, SIGNAL =  18; EXPRESSED IN BRAIN, SIGNAL = 7.8; EXPRESSED IN ADULT LIVER, SIGNAL =  17; EXPRESSED IN PLACENTA, SIGNAL =  34; EXPRESSED IN BONE MARROW, SIGNAL =  22; EXPRESSED IN BT474, SIGNAL =  41; EXPRESSED IN FETAL LIVER, SIGNAL =  31; NT HIT: S35960.1, EVALUE 7.00e-33; SWISSPROT HIT: Q29195, EVALUE 7.00e-14; EST_HUMAN HIT: AW157212.1, EVALUE 3.00e-33
gctgctcatattcatctgacaccatgtggccacagagtagaaactcatccacttttgccttcttccaacccaggtcaaagaggcgaatcttggcattagggaaaccttggcagaagtaagaatgggtatggcttcttcttaca

SEQ ID NO: 18321 - DNA, 381 bp, Homo sapiens
  MAP TO AL049822.17; EXPRESSED IN BONE MARROW, SIGNAL = 9.8; EXPRESSED IN LUNG, SIGNAL = 3.1; EXPRESSED IN BRAIN, SIGNAL = 1.7; EXPRESSED IN ADULT LIVER, SIGNAL = 2.7; EXPRESSED IN BT474, SIGNAL =  12; EXPRESSED IN FETAL LIVER, SIGNAL =  10; EXPRESSED IN HBL100, SIGNAL =  26; EXPRESSED IN PLACENTA, SIGNAL =  11; EXPRESSED IN HELA, SIGNAL =   9; EXPRESSED IN HEART, SIGNAL = 1.7; NT HIT: Z83738.1, EVALUE 0.00e+00; SWISSPROT HIT: Q99879, EVALUE 2.00e-48; EST_HUMAN HIT: BE880791.1, EVALUE 1.00e-118
tccctaaaaaaggctccaagaaggccattaacaaggctcagaagaaggatggaaagaagcgcaaacgcagccgcaaggagagctactctgtgtatgtgtacaaggtgctgaagcaggtccaccccgacaccggcatctcttccaaggctatgggaatcatgaactccttcgtcaacgacatctttgagcgtatcgccggagaagcgtcacgcctggcgcattacaacaagcgctcgaccatcacttcgagggagatccagacggccgtgcgcctactgctacccggggaattggccaagcacgccgtgtccgagggcaccaaggccgtcaccaagtataccagctccaagtgagcctctcgctgcagtaacagttccgccg

SEQ ID NO: 18322 - DNA, 329 bp, Homo sapiens
  MAP TO AL050330.9; EXPRESSED IN HBL100, SIGNAL = 2.8; EXPRESSED IN HELA, SIGNAL = 2.1; EXPRESSED IN HEART, SIGNAL = 1.4; EXPRESSED IN BONE MARROW, SIGNAL = 1.8; EXPRESSED IN LUNG, SIGNAL = 1.9; EXPRESSED IN BRAIN, SIGNAL = 1.6; EXPRESSED IN PLACENTA, SIGNAL = 2.5; EXPRESSED IN ADULT LIVER, SIGNAL = 1.9; EXPRESSED IN FETAL LIVER, SIGNAL = 2.2; EXPRESSED IN BT474, SIGNAL = 1.3; SWISSPROT HIT: Q13410, EVALUE 2.00e-26; NT HIT: gi11418862, EVALUE 0.00e+00; EST_HUMAN HIT: BE070378.1, EVALUE 0.00e+00
tcttggccacggttggagaaaacactacgttacgctgccatctgtcacccgagaaaaatgctgaggacatggaggtgcggtggttccggtctcagttctcccccgcagtgtttgtgtataaaggtggcagagagagaacagaggagcagatggaggagtaccgaggaagaaccacctttgtgagcaaagacatcagcaggggcagcgtggccctggtcatacacaacatcacagcccaggaaaacggcacctaccgctgttacttccaagaaggcaggtcctacgatgaggccatcctgcacctcgtagtggcaggtgcgtcgcttcat

SEQ ID NO: 18323 - DNA, 582 bp, Homo sapiens
  MAP TO Z95114.19; EXPRESSED IN BONE MARROW, SIGNAL =  13; EXPRESSED IN LUNG, SIGNAL = 8.5; EXPRESSED IN BRAIN, SIGNAL =  11; EXPRESSED IN ADULT LIVER, SIGNAL =  14; EXPRESSED IN BT474, SIGNAL = 7.4; EXPRESSED IN FETAL LIVER, SIGNAL = 7.6; EXPRESSED IN PLACENTA, SIGNAL =  11; EXPRESSED IN HBL100, SIGNAL = 6.1; EXPRESSED IN HELA, SIGNAL = 9.8; EXPRESSED IN HEART, SIGNAL = 5.5; EST_HUMAN HIT: AV690831.1, EVALUE 0.00e+00; NT HIT: gi7656972, EVALUE 1.00e-31; SWISSPROT HIT: O95236, EVALUE 7.00e-44
aggttgactacatccagcacaacaaggacacctgaagtggccttgcccaggttccgggctacttttctcactatccgggtgggggccccacgtgttctcagtgtctcaacaacatttataggtacatatcgccaagcaatcaaagggcgtccaacagtggctttagatctcctgagtgtatggacatcattcgcaatcatttttgtggcttcgtcaaaatcaagtgcaaaagaaagcacattgggtgtgatgtcacgcagaatgtcccttaatgcctccaattggtcagtgctggttgcagtcagcctgctggctgtgagttctgctgaccttgtgtatgtgttctccacgatgctggaggcgatcccagccgtggcagatgctattcccagccctaccccagctgcagtaatgctcaggctcagccctgctgtaaatggtgccaacataacgccaatgacagacaggatgccagtggagccagacaccacattggcgatgacgcagcctctgtggaccttttcaatctcatttgcaatgacacgaagcctttctatggactcctgaatcttccatctgatt

SEQ ID NO: 18324 - DNA, 285 bp, Homo sapiens
  MAP TO Z82201.1; EXPRESSED IN ADULT LIVER, SIGNAL = 1.2; EXPRESSED IN BT474, SIGNAL = 1.1; EXPRESSED IN FETAL LIVER, SIGNAL = 1.5; EXPRESSED IN HELA, SIGNAL = 1.1; EXPRESSED IN PLACENTA, SIGNAL = 0.99; EXPRESSED IN HEART, SIGNAL = 1.2; EXPRESSED IN BONE MARROW, SIGNAL = 1.4; EXPRESSED IN LUNG, SIGNAL = 0.98; EXPRESSED IN BRAIN, SIGNAL = 1.3; SWISSPROT HIT: P27625, EVALUE 1.00e-06
actctatggagttcacagcacagacagtccactttatgcagcccacagcacagacagtccactctatagagtccacagtgcagcaagtcctgtctgtggagtccacagcacagacagtctgctttatggagtccacagcacagacagtccactctatggagtccacagcacagacagtccactctatggagtccacagcacagacagtccactctatggagtccacagcacagacagtccactctgtgcaggacaggaggttgggtagagacagtccctggaggt

SEQ ID NO: 18325 - DNA, 192 bp, Homo sapiens
  MAP TO Z92540.1; EXPRESSED IN HEART, SIGNAL = 0.98; EXPRESSED IN BONE MARROW, SIGNAL = 1.3; EXPRESSED IN LUNG, SIGNAL = 0.99; EXPRESSED IN BRAIN, SIGNAL = 1.5; EXPRESSED IN ADULT LIVER, SIGNAL = 0.99; EXPRESSED IN FETAL LIVER, SIGNAL = 1.8; EXPRESSED IN PLACENTA, SIGNAL =   1; EXPRESSED IN HBL100, SIGNAL = 1.1; EXPRESSED IN HELA, SIGNAL = 3.8; NT HIT: gi11436166, EVALUE 1.10e-01; EST_HUMAN HIT: BF213280.1, EVALUE 6.70e-01; SWISSPROT HIT: P76289, EVALUE 2.80e+00
agggttgtgacacatcaagaactgctgccaagagaagagcattgccatctcctcatgcaggggaatttggaagacaaatggactatcaactgtcttgcaattctcttgggttttctcatccaggactatggttttcaccatcccctacattagaaagtccttcagatcctaatcctcagtccttaccacgat

SEQ ID NO: 18326 - DNA, 290 bp, Homo sapiens
  MAP TO Z97055.1; EXPRESSED IN BT474, SIGNAL = 1.3; EXPRESSED IN FETAL LIVER, SIGNAL = 1.1; EXPRESSED IN ADULT LIVER, SIGNAL = 1.3; EXPRESSED IN HELA, SIGNAL = 0.95; EXPRESSED IN HBL100, SIGNAL = 1.3; EXPRESSED IN HEART, SIGNAL = 1.3; EXPRESSED IN BONE MARROW, SIGNAL = 1.6; EXPRESSED IN LUNG, SIGNAL = 0.95; EXPRESSED IN BRAIN, SIGNAL = 1.5; NT HIT: U29895.1, EVALUE 1.80e-01; EST_HUMAN HIT: AV708305.1, EVALUE 4.00e-03; SWISSPROT HIT: O68609, EVALUE 6.50e+00
cattctctccctgtttgaaacccaggtaggaaggatggatgttttaactggggaacttctcagacaccccgacagtgtggtagaagagaagggctctgggttcagatggacctgctctgacacacaccagctctaggatctcggccacgttcacgaccctcggcctcagtgtcttcatctgtaaagtgaccgcgggcctgacctacatggtcactgtcagaactggagaccgtgtcggggaagcacccagcacctgccaggccgtccacgacaacagacggctccggttc

SEQ ID NO: 18327 - DNA, 426 bp, Homo sapiens
  MAP TO Z99716.4; EXPRESSED IN BONE MARROW, SIGNAL = 1.1; EXPRESSED IN BRAIN, SIGNAL = 1.3; EXPRESSED IN ADULT LIVER, SIGNAL = 0.99; EXPRESSED IN BT474, SIGNAL = 1.4; EXPRESSED IN FETAL LIVER, SIGNAL = 1.2; EXPRESSED IN HELA, SIGNAL = 1.2; EXPRESSED IN HBL100, SIGNAL = 1.4; EXPRESSED IN HEART, SIGNAL = 0.93; EST_HUMAN HIT: BE390882.1, EVALUE 5.00e-92; SWISSPROT HIT: Q12772, EVALUE 3.00e-28; NT HIT: gi11418194, EVALUE 5.00e-92
gtggcagcattggagtcaacagatgcacatgtcatatcagtgtggggcgtggcagtcactggcttgggcccctctgcctgtcacgcaggtgacacatagtgacctgcctctcgactccctgtcactgctgcaggagccccctggtgaaggccatcttccatgcctgcagagccatgcatgcctcactccctgggaaagcagatgggcagcagagttccttctgccattgcgagagggccagtggccacctatggagcagcctcaacgtcagtggggccacctctgaccctgccctcaaccacgtgagtgggagctgagttggcccctgggggaggtgctctgcactggtttacgagaacactcccactcacctcatgctgaccctgcgggtggggccatccgaaagacagagaaaccaggacagca

SEQ ID NO: 18328 - DNA, 603 bp, Homo sapiens
  MAP TO AL109912.4; EXPRESSED IN BT474, SIGNAL = 1.6; EXPRESSED IN FETAL LIVER, SIGNAL =   1; EXPRESSED IN ADULT LIVER, SIGNAL = 1.3; EXPRESSED IN HELA, SIGNAL = 1.4; EXPRESSED IN PLACENTA, SIGNAL = 1.9; EXPRESSED IN HBL100, SIGNAL = 2.8; EXPRESSED IN HEART, SIGNAL = 0.98; EXPRESSED IN LUNG, SIGNAL =   1; EXPRESSED IN BONE MARROW, SIGNAL = 1.2; EXPRESSED IN BRAIN, SIGNAL = 1.6; EST_HUMAN HIT: BE250561.1, EVALUE 5.70e-01; SWISSPROT HIT: O60673, EVALUE 2.00e-80; NT HIT: gi11417568, EVALUE 0.00e+00
ctttccagaagttttctctgtatgattggtgtactatgaaagcaaagtgattcacatttcccagttcttgccctagtattaattggagatatcactagaggctcttgaggctcactgcaggggcttttttgtataccatcttttattggctttaagaagttctcaaaagccaatgaaggcagctcctctactggtgatgagggtctatcatctccatttaatgctttggaatctggggatattggttgttgccaagggggaattactggagaatcaggggagctataactaatgtaatagttatcatcatcatcttcatctttttcgggatcacttgcagaggcaactggtggcagcatctgactttcacttgcagtttgactacatcccgtggttggtgcttgtaaagcaatctgagaattatcaacatcctccttggtatgtgctgtagtggggagtatacatggacttacatccatttttggaggcactacaggtttgtcatctgggttaactgaagagctaaagttctcagcagattttacaactccagttggcttggttttaggcagtttcttggaacgttcgtattcttctttggct

SEQ ID NO: 18329 - DNA, 848 bp, Homo sapiens
  MAP TO AC009487.1; EXPRESSED IN BONE MARROW, SIGNAL = 1.6; EXPRESSED IN LUNG, SIGNAL = 1.2; EXPRESSED IN BRAIN, SIGNAL = 1.2; EXPRESSED IN ADULT LIVER, SIGNAL = 1.6; EXPRESSED IN BT474, SIGNAL = 5.3; EXPRESSED IN FETAL LIVER, SIGNAL = 1.2; EXPRESSED IN HELA, SIGNAL = 2.5; EXPRESSED IN PLACENTA, SIGNAL = 1.7; EXPRESSED IN HBL100, SIGNAL = 3.2; EXPRESSED IN HEART, SIGNAL = 0.89; EST_HUMAN HIT: BE071796.1, EVALUE 3.00e-70; NT HIT: U67553.1, EVALUE 1.20e-01; SWISSPROT HIT: P49177, EVALUE 1.20e+00
gtgttctctgtctttatgaccttggaatatcaaaagtagttaaagcagttgttcttcctggaagggtaacagctattgaacctataattaatcatggaggagccagtgcaagcactcagcatttacatccaagtctgcgatggctttttggagtggcagctgtggtcactgatgttggacagatccttcttattgacctatgtttggatgacttgtcatgcaatcaaaatgaagttgaagcatcagatcttgaagttctaactggtatcccagctgaagtaccacacattagagaaagtgtgatgagagaagggcgccatctgtgtttccagttagtaagtccaacaggaacagccgtttcaactcttagttacataagcaggacaaatcagcttgctgcaggtttttctgatggctatctagcactttggaacatgaaaagcatgaaaagagaatattacatacaattggaaagtggacaagttcctgtatatgctgtcacttttcaagaacctgagaatgatcgtcggaattgctgctacttgtgggctgttcagtctacacaagatagtgaaggggatgttttgagtttgcatctactgcagctggcctttggtaatagaaagtgtttggcatcaggacaaatcttatatgagtggttagaatactgtgaagaaagatacactctggacctgacaggtggcatgttccctttgaggggacagacgagtaataccaaattgttgggatgccagagtatagagaaatttcgatctcatggtgacagggaggaaggcgtgaatgaagctctatcgcctgacactagtgtttcagtctttacctggcag

SEQ ID NO: 18330 - DNA, 574 bp, Homo sapiens
  MAP TO AC010130.2; EXPRESSED IN BONE MARROW, SIGNAL = 4.8; EXPRESSED IN LUNG, SIGNAL = 4.1; EXPRESSED IN BT474, SIGNAL = 6.1; EXPRESSED IN PLACENTA, SIGNAL = 6.8; EXPRESSED IN HBL100, SIGNAL = 6.4; EXPRESSED IN HEART, SIGNAL = 2.5; EXPRESSED IN BRAIN, SIGNAL = 9.8; EXPRESSED IN ADULT LIVER, SIGNAL = 3.2; EXPRESSED IN FETAL LIVER, SIGNAL = 3.2; EXPRESSED IN HELA, SIGNAL = 3.7; NT HIT: gi11430273, EVALUE 0.00e+00; SWISSPROT HIT: P37275, EVALUE 2.00e-33; EST_HUMAN HIT: BF245591.1, EVALUE 0.00e+00
gaaaaagaccacatcagtgtcagatttgtaagaaagcgtttaaacacaagcaccaccttatcgagcactcaaggcttcactcgggcgagaagccctatcagtgtgataaatgtggcaagcgcttctcacactcgggctcgtactcgcagcacatgaatcacaggtattcctactgcaagcgggaggcggaggagcgggaagcggcggagcgcgaggcgcgcgagaaagggcacttggaacccaccgagctgctgatgaaccgggcttacttgcagagcattacccctcaggggtactctgactcggaggagagggagagtatgccgagggatggcgagagcgagaaggagcacgagaaagaaggcgaggatggctacgggaagctgggcagacaggatggcgacgaggagttcgaggaggaagaggaagaaagtgaaaataaaagtatggatacggatcccgaaacgatacgagatgaagaagagactggagatcactccatggacgatagttcggaggatgggaaaatggaaaccaaatcagaccacgaggaagacaatatggaagatggcat

SEQ ID NO: 18331 - DNA, 383 bp, Homo sapiens; identical to SEQ ID NO: 1573
  MAP TO Z95114.19; EXPRESSED IN BT474, SIGNAL = 5.1; EXPRESSED IN FETAL LIVER, SIGNAL = 5.6; EXPRESSED IN ADULT LIVER, SIGNAL = 6.8; EXPRESSED IN HELA, SIGNAL = 6.8; EXPRESSED IN PLACENTA, SIGNAL = 6.2; EXPRESSED IN HBL100, SIGNAL = 4.4; EXPRESSED IN HEART, SIGNAL = 4.9; EXPRESSED IN LUNG, SIGNAL = 5.7; EXPRESSED IN BONE MARROW, SIGNAL = 8.7; EXPRESSED IN BRAIN, SIGNAL = 6.3; NT HIT: M35603.1, EVALUE 9.50e-01; SWISSPROT HIT: P29400, EVALUE 2.00e-03

SEQ ID NO: 18332 - DNA, 912 bp, Homo sapiens
  MAP TO AC009945.1; EXPRESSED IN LUNG, SIGNAL =  43; EXPRESSED IN BONE MARROW, SIGNAL =  26; EXPRESSED IN BRAIN, SIGNAL =  43; EXPRESSED IN FETAL LIVER, SIGNAL =  37; EXPRESSED IN BT474, SIGNAL = 1.1e+02; EXPRESSED IN ADULT LIVER, SIGNAL =  19; EXPRESSED IN HELA, SIGNAL =  44; EXPRESSED IN PLACENTA, SIGNAL =  57; EXPRESSED IN HBL100, SIGNAL =  85; EXPRESSED IN HEART, SIGNAL =  14; NT HIT: AB034951.1, EVALUE 0.00e+00; SWISSPROT HIT: P19120, EVALUE 0.00e+00; EST_HUMAN HIT: BE260667.1, EVALUE 0.00e+00
ccacctactcttacgtgggtgttttccagcacggaaaagtagagataattgccaatgatcagggaaactgaaccactccaagctatgtcgcctttatggacactaaacagttgattggtgatgccgcaaagcatcaagttgcaatgaaccccaccaacacagtttttgatgccaaacgtctgattggacgcagatttgatgatgctgttgtccagtctgatatgaagcattggcccttcatggtagtgaatgatgctgacaggccccaggtccaagtagaatacaagggagagaccaaaagcttctatccagaggaggtatcctctattgttctgacaaagatgaaggaaattgcagaagcctaccttgggaagactgttaccagtgctgtggtcacagtgccagcttactttaatgactctcagtttcaggttaccaaagatgctggaactattgctggtctcaatgtacttagaattattaatgagccaactgttgctgctattgtttacaaaagttcagacaaaaaggttggagcacaaagaaacgtgcttatctttgacctggggggtggcactttcggtgtgtcaatcctcactattgaggatggaatctttgaggtcaagtctacagccagagacaaccacttgggtggagaagattttgacaaccgaatggtcaaccattttattgctgagctcaagcgcaagcataagaaggacatcagtgagagcaagagagctgtaagatgcctccgtactgcttgtgaacatgctaagcgtactctctcttccagcacccaagtcagtattgagatcgattctctctatgtaggaattgacttctatacctccattacctgtgcccagtttgaagaattgaatgctgacctgttctgtggcaccctggacc

SEQ ID NO: 18333 - DNA, 266 bp, Homo sapiens
  MAP TO Z98745.1; EXPRESSED IN BONE MARROW, SIGNAL = 2.2; EXPRESSED IN LUNG, SIGNAL = 1.4; EXPRESSED IN BT474, SIGNAL = 3.5; EXPRESSED IN PLACENTA, SIGNAL = 1.6; EXPRESSED IN HEART, SIGNAL = 1.2; EXPRESSED IN HBL100, SIGNAL =   2; EXPRESSED IN BRAIN, SIGNAL = 1.7; EXPRESSED IN ADULT LIVER, SIGNAL = 1.4; EXPRESSED IN FETAL LIVER, SIGNAL = 1.1; EXPRESSED IN HELA, SIGNAL = 1.8; NT HIT: gi7662109, EVALUE 2.00e-47; SWISSPROT HIT: O43309, EVALUE 2.00e-39; EST_HUMAN HIT: BE513403.1, EVALUE 5.00e-18
ctgctctcctgggtcatccagctctctctccaaatcctccagcacagtcactgcctcctctccactcacaggacggtgctgtctgacccaggcctggagctcctcaggcaggatagtcaggaactgctccagcaccagcagctctaggatctgctccttggtgtgcatctctggtctcagccactgatggcagagctcctggagtctttgaagagcctcccggggcccaggggactcctgatagcagaactgcctgaagcgtctac

SEQ ID NO: 18334 - DNA, 1194 bp, Homo sapiens
  MAP TO AC010127.2; EXPRESSED IN BT474, SIGNAL = 2.1; EXPRESSED IN FETAL LIVER, SIGNAL = 0.87; EXPRESSED IN ADULT LIVER, SIGNAL = 2.3; EXPRESSED IN PLACENTA, SIGNAL = 1.5; EXPRESSED IN BRAIN, SIGNAL = 7.9; EXPRESSED IN BONE MARROW, SIGNAL = 1.6; EXPRESSED IN HELA, SIGNAL = 1.3; EXPRESSED IN HBL100, SIGNAL = 2.3; EXPRESSED IN HEART, SIGNAL = 0.94; EXPRESSED IN LUNG, SIGNAL = 1.2; NT HIT: M91803.1, EVALUE 0.00e+00; SWISSPROT HIT: P04774, EVALUE 0.00e+00; EST_HUMAN HIT: AL120392.1, EVALUE 1.00e-129
tttgccttcttgctcatgtttttccacaattggctttgtcacccggtcataggaaggtggacaagctgcagtggacatggtcagatcagttttttctgtaatagagttttcatttattctgtcaattatcatgtcttcttttataagaagattagccccacctttgattttgtttttattgtacgtaaaggaagcttgttttacagttcgctttaaaaggtggcgtctgtaagcacgctgaataatgacagcagatacttcctcttgttttcgttttaaagtagtagtgattggctgataggagaccttggaaggattggaagccatgaatcgctcttccatctgtattcgtagagcatccatctctccactctctcctagaacccgctttgtaaaagcaaataagatatcaagacagtggatccggtcaccactcaccatgggcaaatccatggcaatgagctggagtttgtttggttgtggcagattgagaggcggttcaagcgcagctgcaaactgagataatttttcaaattccatgaactgagttgcatcgggatcaaacttctcccaaacctcatagaacatctcaaagtcatcctcactcagaggctctgcactttcttcagtagcaacactgaagttctccaggatgaccgcgatgtacatgttcaccacaaccaggaaggatatgatgatgtaactgacaaaaaagaaaattccaacagatgggttcccacagtctcccttaactgagcttccagggttaactttattagggtcacagtcgggtggcttactgttgagaatgggtgctagcaatccatcccagccagcagaggttgtaatttggaataggcagatcatgctgttgccaaaggtctcaaagttgaacatgtcatcgatcccaacttccctcttaacataggcaaagttggacatcccaaagatggcgtagatgaacatgactaggaagagtaggaggccgatgttaaacaacgcaggaagggacatcatcaaagcaaagagcagcgtgcggatcccctttgctcctttgatcagacgtaggattcggccaatcctagcaagacggatcactcggaacagggtaggggacacgaaatacttttctatcagctcggcaagaaacatacctatgaataaacaatgagaataccaaccagtgaagaaatc

SEQ ID NO: 18335 - DNA, 219 bp, Homo sapiens
  MAP TO AC006977.3; EXPRESSED IN LUNG, SIGNAL = 3.3; EXPRESSED IN BT474, SIGNAL = 3.8; EXPRESSED IN ADULT LIVER, SIGNAL = 2.7; EXPRESSED IN PLACENTA, SIGNAL =  10; EXPRESSED IN BRAIN, SIGNAL = 3.8; EXPRESSED IN BONE MARROW, SIGNAL = 3.5; EXPRESSED IN FETAL LIVER, SIGNAL = 4.2; EXPRESSED IN HEART, SIGNAL = 2.9; EXPRESSED IN HELA, SIGNAL = 1.8; EXPRESSED IN HBL100, SIGNAL = 3.3; SWISSPROT HIT: P00533, EVALUE 9.00e-10; NT HIT: X00663.1, EVALUE 2.00e-74; EST_HUMAN HIT: BE745530.1, EVALUE 3.00e-74
gcctaagatcccgtccatcgccactgggatggtgggggccctcctcttgctgctggtggtggccctggggatcggcctcttcatgcgaaggcgccacatcgttcggaagcgcacgctgcggaggctgctgcaggagagggaggtgagtgccagtcctgggtgggctcaggagccctcgcaccccgacaggaacaagggccagccccgagaacgggccat

SEQ ID NO: 18336 - DNA, 218 bp, Homo sapiens
  MAP TO AC007308.13; EXPRESSED IN HBL100, SIGNAL = 3.1; EXPRESSED IN HELA, SIGNAL = 2.4; EXPRESSED IN HEART, SIGNAL = 2.3; EXPRESSED IN LUNG, SIGNAL = 1.7; EXPRESSED IN BRAIN, SIGNAL = 3.8; EXPRESSED IN BT474, SIGNAL = 3.3; EXPRESSED IN PLACENTA, SIGNAL = 3.5; EXPRESSED IN BONE MARROW, SIGNAL = 2.4; EXPRESSED IN ADULT LIVER, SIGNAL = 2.3; EXPRESSED IN FETAL LIVER, SIGNAL = 2.3; NT HIT: AF012872.1, EVALUE 1.00e-103; EST_HUMAN HIT: BE314516.1, EVALUE 2.00e-71; SWISSPROT HIT: Q9UPW0, EVALUE 9.40e-01
atgagaggcaaggcagtctgtctcaccctgctcgtccttcacagcccacaccatgaggtccacacaggcagcattcgcctgacagcgcagtttgagggggctcagctcattgtggatccggtctgcgtcatgtagaatcttctggagctccccctggctcgtgttgaactgctccagcacaaaatcatggatctccttcacaaaagaggtcgggaggt

SEQ ID NO: 18337 - DNA, 162 bp, Homo sapiens
  MAP TO AC007383.2; EXPRESSED IN HBL100, SIGNAL = 2.1; EXPRESSED IN HELA, SIGNAL = 2.8; EXPRESSED IN HEART, SIGNAL = 3.1; EXPRESSED IN BONE MARROW, SIGNAL = 1.3; EXPRESSED IN LUNG, SIGNAL = 0.88; EXPRESSED IN BRAIN, SIGNAL = 2.3; EXPRESSED IN ADULT LIVER, SIGNAL = 1.8; EXPRESSED IN PLACENTA, SIGNAL = 2.1; EXPRESSED IN FETAL LIVER, SIGNAL = 1.3; EXPRESSED IN BT474, SIGNAL = 2.8; EST_HUMAN HIT: BE281179.1, EVALUE 4.00e-84; SWISSPROT HIT: P28331, EVALUE 3.00e-25; NT HIT: gi11430585, EVALUE 2.00e-86
aaggcatagggcttagaggttagggcacctacagggcagatatcaatgatattcccagacagttcagacatgaacatcttttcaatgtatgtgccaacttgcatatcatttcctctgcctgttgttcccaaatcatctactcctgcaatctcacttgcaaac

SEQ ID NO: 18338 - DNA, 160 bp, Homo sapiens
  MAP TO AC007649.12; EXPRESSED IN BRAIN, SIGNAL = 1.7; EXPRESSED IN ADULT LIVER, SIGNAL = 1.4; EXPRESSED IN BT474, SIGNAL = 1.9; EXPRESSED IN FETAL LIVER, SIGNAL = 2.1; EXPRESSED IN PLACENTA, SIGNAL = 1.9; EXPRESSED IN HBL100, SIGNAL = 1.9; EXPRESSED IN HELA, SIGNAL = 1.8; EXPRESSED IN HEART, SIGNAL = 1.9; EXPRESSED IN BONE MARROW, SIGNAL = 2.2; EXPRESSED IN LUNG, SIGNAL = 1.5; EST_HUMAN HIT: H56433.1, EVALUE 3.50e-02; SWISSPROT HIT: O00507, EVALUE 4.40e-01; NT HIT: M15972.1, EVALUE 5.70e+00
ttagactgcggggtgaggtccagggcggtgcctgcaaggaggggagctgccccttccttgggcttccggggggaccggggacaccaggcattcagaggtggaaggctccttgtcagcctcctccacctggtgctggtggtgacacaagcggtggggaagc

SEQ ID NO: 18339 - DNA, 203 bp, Homo sapiens
  MAP TO AC007695.12; EXPRESSED IN HBL100, SIGNAL =  21; EXPRESSED IN HELA, SIGNAL =  11; EXPRESSED IN PLACENTA, SIGNAL =   8; EXPRESSED IN HEART, SIGNAL = 2.8; EXPRESSED IN BONE MARROW, SIGNAL = 9.4; EXPRESSED IN LUNG, SIGNAL = 4.4; EXPRESSED IN BRAIN, SIGNAL = 3.3; EXPRESSED IN BT474, SIGNAL =  11; EXPRESSED IN ADULT LIVER, SIGNAL =   4; EXPRESSED IN FETAL LIVER, SIGNAL = 7.4; EST_HUMAN HIT: BE256906.1, EVALUE 5.00e-76; NT HIT: gi4503476, EVALUE 3.00e-76; SWISSPROT HIT: P34826, EVALUE 8.00e-26
tagcctccaggtgctcaacgattacctggtggacaagagctacatcgagggtatgtgccatcacaagcacgtgtggcagtctatgaagcagtgtccggcccaccgcctgctgacttgtgtcatgccctatgttggtataatcagatcaagtcttatgaaaaggaaaaggccagcctgccaggagtgaagaaagctgtgggcag

SEQ ID NO: 18340 - DNA, 428 bp, Homo sapiens
  MAP TO AC007375.4; EXPRESSED IN BONE MARROW, SIGNAL = 2.4; EXPRESSED IN LUNG, SIGNAL = 1.7; EXPRESSED IN BRAIN, SIGNAL =   3; EXPRESSED IN ADULT LIVER, SIGNAL = 2.2; EXPRESSED IN BT474, SIGNAL = 2.4; EXPRESSED IN FETAL LIVER, SIGNAL = 1.9; EXPRESSED IN PLACENTA, SIGNAL = 2.1; EXPRESSED IN HELA, SIGNAL = 1.8; EXPRESSED IN HBL100, SIGNAL = 2.1; EXPRESSED IN HEART, SIGNAL = 1.8; SWISSPROT HIT: Q09701, EVALUE 2.00e-07; NT HIT: AJ010302.1, EVALUE 4.20e+00; EST_HUMAN HIT: AA412502.1, EVALUE 1.00e-03
cggagaagaactggctgatggaggtgggcaggagcgtgaggaaggccaaggggtgggcgaaggagatggaaaggacagcggagatgtaggccacgccggccaccatggagtagaggcaggccagggaggtgtagaggcagaacaggacgaagttgcgcatgttcctgctgccgatgcagttgccggtgaagaaacagtgatggtcgtgcctcagggtgactctggcgcacactcggcagaagtgggtgctaggtgaggggcatggagtcttcctggccgaggccccctggcaggcccccaggtcgtctggggagttctggatgacaaggacgtaattgcccagggcgttggccgagaggaataggaagagcgccccgtggagcagggcgggcgagaagagccgggcggccgcggggtcctcgcgcatg

SEQ ID NO: 18341 - DNA, 219 bp, Homo sapiens
  MAP TO AC007378.2; EXPRESSED IN FETAL LIVER, SIGNAL = 2.5; EXPRESSED IN HELA, SIGNAL = 4.3; EXPRESSED IN PLACENTA, SIGNAL =  11; EXPRESSED IN HBL100, SIGNAL = 4.7; EXPRESSED IN HEART, SIGNAL = 3.9; EXPRESSED IN BONE MARROW, SIGNAL = 2.5; EXPRESSED IN LUNG, SIGNAL = 3.6; EXPRESSED IN BRAIN, SIGNAL = 3.1; EXPRESSED IN BT474, SIGNAL = 2.6; EXPRESSED IN ADULT LIVER, SIGNAL = 3.6; NT HIT: gi11430555, EVALUE 1.00e-120; SWISSPROT HIT: P98089, EVALUE 4.00e-04; EST_HUMAN HIT: BE514705.1, EVALUE 1.00e-120
cccgctgtgaagtccagttctctccacgttgtcctgaagattctgttctgatcgagggttatgctcctcctggggagtgctgtcccttacccagccgctgcgtgtgcaaccccgcaggctgtctgcgcaaagtctgccagccgggaaacctgaacatactagtgtcaaaagcctcagggaagccgggagagtgctgtgacctctatgagtgcaaaccag

SEQ ID NO: 18342 - DNA, 95 bp, Homo sapiens
  MAP TO AC007599.1; EXPRESSED IN BONE MARROW, SIGNAL =   1; EXPRESSED IN BT474, SIGNAL = 1.3; EXPRESSED IN FETAL LIVER, SIGNAL =   1; EXPRESSED IN PLACENTA, SIGNAL =   2; EXPRESSED IN HBL100, SIGNAL = 1.2; EXPRESSED IN HEART, SIGNAL = 0.91; EXPRESSED IN BRAIN, SIGNAL = 1.4; EXPRESSED IN LUNG, SIGNAL = 0.97; EXPRESSED IN ADULT LIVER, SIGNAL = 1.2; EXPRESSED IN HELA, SIGNAL = 1.6; EST_HUMAN HIT: AW966447.1, EVALUE 7.00e-29; NT HIT: AF212247.1, EVALUE 7.00e-29
tgcatgagaatgtggaattcgcattttacttgtagtggtcaatgctggatgccatgataaattcctaaaaaataaaataaaaatacttttcttaa

SEQ ID NO: 18343 - DNA, 181 bp, Homo sapiens
  MAP TO AC007718.1; EXPRESSED IN BONE MARROW, SIGNAL = 0.96; EXPRESSED IN BT474, SIGNAL =   1; EXPRESSED IN ADULT LIVER, SIGNAL = 1.3; EXPRESSED IN HELA, SIGNAL = 0.92; EXPRESSED IN PLACENTA, SIGNAL = 1.1; EXPRESSED IN HEART, SIGNAL = 1.1; EXPRESSED IN LUNG, SIGNAL = 0.92; SWISSPROT HIT: Q92337, EVALUE 4.90e+00
gcctttagtgtgctttaattcatcgactaatttcctaagatggaaactacaacaagtaataattttcaaagaaaaagattttctggttgcatgtttgtcgtccagtgagttagtcttgtctttactttcaaacacagcattattgatcaattctttcgttgtttcaggaaataccagagac

SEQ ID NO: 18344 - DNA, 120 bp, Homo sapiens
  MAP TO AC008644.1; EXPRESSED IN BONE MARROW, SIGNAL = 1.2; EXPRESSED IN BRAIN, SIGNAL = 1.2; EXPRESSED IN FETAL LIVER, SIGNAL = 1.2; EXPRESSED IN PLACENTA, SIGNAL = 1.1; EXPRESSED IN HEART, SIGNAL = 1.4; NT HIT: M13366.1, EVALUE 2.70e-01; EST_HUMAN HIT: AW005952.1, EVALUE 6.10e+00
tatggagattgcaaaaatgagggagctgaagaaagagttagaatgacagtgaatgtgagaagagagagagatgaataccacgaagttgcgtatgtactgctggactataccctgaactga

SEQ ID NO: 18345 - DNA, 109 bp, Homo sapiens
  MAP TO AC009302.1; EXPRESSED IN LUNG, SIGNAL =   7; EXPRESSED IN BT474, SIGNAL =  10; EXPRESSED IN ADULT LIVER, SIGNAL =  17; EXPRESSED IN PLACENTA, SIGNAL =  28; EXPRESSED IN BRAIN, SIGNAL =  23; EXPRESSED IN BONE MARROW, SIGNAL =  23; EXPRESSED IN FETAL LIVER, SIGNAL =  29; EXPRESSED IN HEART, SIGNAL =  66; EXPRESSED IN HELA, SIGNAL =  25; EXPRESSED IN HBL100, SIGNAL =  14; EST_HUMAN HIT: BF210098.1, EVALUE 1.40e+00
gctggcctagcacacactggtgggccatggtgtctcctgcctcctgttggtcatgaacaatctcacagacacaaacatcagacatggtcactctgaggccatcataaag

SEQ ID NO: 18346 - DNA, 167 bp, Homo sapiens
  MAP TO AC008072.2; EXPRESSED IN FETAL LIVER, SIGNAL = 1.4; EXPRESSED IN ADULT LIVER, SIGNAL =   1; EXPRESSED IN HEART, SIGNAL = 1.1; EXPRESSED IN PLACENTA, SIGNAL = 1.3; EXPRESSED IN HBL100, SIGNAL = 1.2; EXPRESSED IN HELA, SIGNAL =   1; EXPRESSED IN BONE MARROW, SIGNAL = 1.6; EXPRESSED IN BT474, SIGNAL = 1.7; EXPRESSED IN LUNG, SIGNAL = 0.93; EXPRESSED IN BRAIN, SIGNAL = 1.5; NT HIT: AF098919.1, EVALUE 6.00e+00; EST_HUMAN HIT: AW664742.1, EVALUE 1.50e+00; SWISSPROT HIT: P82094, EVALUE 3.80e+00
gttaagaatggcatcttgggagctggcatgcttcccctgggctccaggctgacttctgtctctgcaaagaggacctcagaacccaggagccagaggaaccagggcaagaggtcccaggggcattctctggagcttcctgagcccagtgggagccccacatcagacag

SEQ ID NO: 18347 - DNA, 153 bp, Homo sapiens
  MAP TO AC009478.1; EXPRESSED IN BONE MARROW, SIGNAL = 3.3; EXPRESSED IN BRAIN, SIGNAL = 3.2; EXPRESSED IN FETAL LIVER, SIGNAL = 2.4; EXPRESSED IN ADULT LIVER, SIGNAL = 3.2; EXPRESSED IN BT474, SIGNAL = 2.7; EXPRESSED IN HEART, SIGNAL = 3.1; EXPRESSED IN HBL100, SIGNAL = 2.2; EXPRESSED IN PLACENTA, SIGNAL = 3.4; EXPRESSED IN HELA, SIGNAL = 2.7; EXPRESSED IN LUNG, SIGNAL = 2.5; EST_HUMAN HIT: AV652123.1, EVALUE 1.00e-10; NT HIT: AF109907.1, EVALUE 1.00e-03; SWISSPROT HIT: P11378, EVALUE 1.20e-01
gggcagctgctcctatgctcaggagggcagggctcctgcctgttcctggctccctctggcttcctggagcttgcagccccagccacacctcccctgctgcagccagcatctttgcagtggcagcaccacgtgagtcactgttgccatcatttt

SEQ ID NO: 18348 - DNA, 102 bp, Homo sapiens
  MAP TO AC009487.1; EXPRESSED IN BRAIN, SIGNAL = 0.99; EXPRESSED IN FETAL LIVER, SIGNAL = 0.99; EXPRESSED IN ADULT LIVER, SIGNAL = 1.1; EXPRESSED IN BT474, SIGNAL = 2.2; EXPRESSED IN HEART, SIGNAL = 0.84; EXPRESSED IN PLACENTA, SIGNAL = 1.1; EXPRESSED IN HBL100, SIGNAL = 1.4; EXPRESSED IN HELA, SIGNAL = 1.7; EXPRESSED IN BONE MARROW, SIGNAL =   1; NT HIT: gi11429973, EVALUE 6.00e-51; SWISSPROT HIT: P43588, EVALUE 2.10e-01; EST_HUMAN HIT: AI825945.1, EVALUE 9.00e-51
agttggatggaaggtttgacacttcaggactacagtgaacattgtaaacacaatgaatcagtggtaaaagagatgttggaattagccaagaattacaataag

SEQ ID NO: 18349 - DNA, 418 bp, Homo sapiens
  MAP TO AC008248.1; EXPRESSED IN BONE MARROW, SIGNAL =   7; EXPRESSED IN LUNG, SIGNAL = 3.7; EXPRESSED IN FETAL LIVER, SIGNAL = 7.4; EXPRESSED IN ADULT LIVER, SIGNAL = 3.8; EXPRESSED IN BT474, SIGNAL = 9.7; EXPRESSED IN HEART, SIGNAL = 4.7; EXPRESSED IN HBL100, SIGNAL = 9.9; EXPRESSED IN BRAIN, SIGNAL = 5.9; EXPRESSED IN PLACENTA, SIGNAL = 6.3; EXPRESSED IN HELA, SIGNAL = 8.9; EST_HUMAN HIT: H26973.1, EVALUE 0.00e+00; SWISSPROT HIT: P08104, EVALUE 1.40e+00
  unsure 32
  unsure 44
catcatttttctccaattgccccttgtttaancgtggttcctgntcctcttctttctctttcccctccaacatacagacatccctcaaggatcctatccttacttttgcttcttctttcttcattttctttatcagtgattcctgggatatgaaaatcgctcctaagcagatgacctacaaatctcctggtagctctaacctccctctgtattctagtcccttaacttggacaagcctgtcatgctcaaaaagaaacttctctcctcttccttatcctctgttatatcttctttctgaaaatgacccaactgctctctcagctaagcctgacaatgatcttttggcctcccttttcccttcctcactttccagtgactgttcaagctcctcagataattcccgcacaccacctcttag

SEQ ID NO: 18350 - DNA, 175 bp, Homo sapiens
  MAP TO AC009492.1; EXPRESSED IN PLACENTA, SIGNAL = 1.8; EXPRESSED IN ADULT LIVER, SIGNAL =   1; EXPRESSED IN HEART, SIGNAL =   1; EXPRESSED IN HBL100, SIGNAL = 0.94; EST_HUMAN HIT: AI214577.1, EVALUE 6.00e-01; SWISSPROT HIT: P51758, EVALUE 5.00e+00
ctccaaagacaactgccaataaagcatttcttctgtcttttgtacaaacaagtttacactccgagaactatgccacttgtgtctccctttgttattggtatatactatttcatggatacctaaacccctatagtgcatctggacctgattcaaaggttttgatggacaaccagtg

SEQ ID NO: 18351 - DNA, 163 bp, Homo sapiens
  MAP TO AC009189.1; EXPRESSED IN HBL100, SIGNAL =   2; EXPRESSED IN HELA, SIGNAL = 1.9; EXPRESSED IN BONE MARROW, SIGNAL = 2.6; EXPRESSED IN LUNG, SIGNAL = 2.2; EXPRESSED IN BT474, SIGNAL = 2.1; EXPRESSED IN ADULT LIVER, SIGNAL = 2.4; EXPRESSED IN BRAIN, SIGNAL = 2.3; EXPRESSED IN PLACENTA, SIGNAL = 2.4; EXPRESSED IN FETAL LIVER, SIGNAL = 2.3; EXPRESSED IN HEART, SIGNAL = 2.1; NT HIT: AE002338.2, EVALUE 1.30e+00; EST_HUMAN HIT: AW050778.1, EVALUE 8.70e+00; SWISSPROT HIT: O70695, EVALUE 6.80e+00
gtctcctttgtgatgggttggtggtagaagagctgattccagaaagttatttggaaccagagggccctttttagtctcctactcagcattctcattccccacctggtcaacgtgactcagccactgaacagctccaccctgaaggaagagatgtgaaagtcaa

SEQ ID NO: 18352 - DNA, 394 bp, Homo sapiens
  MAP TO AC009297.2; EXPRESSED IN HELA, SIGNAL = 0.95; EXPRESSED IN BRAIN, SIGNAL = 0.91; EXPRESSED IN PLACENTA, SIGNAL = 1.1; EXPRESSED IN BONE MARROW, SIGNAL =   1; EXPRESSED IN BT474, SIGNAL = 1.1; EXPRESSED IN ADULT LIVER, SIGNAL = 1.2; EXPRESSED IN HEART, SIGNAL =   1; SWISSPROT HIT: Q10473, EVALUE 4.00e-31; NT HIT: L07780.1, EVALUE 2.00e-20; EST_HUMAN HIT: AV756505.1, EVALUE 2.00e-15
atttaaatatatcaagatcttccaaattcgcatcctttgccaaaagtaagtatagtgtaccagttctaaattttgcatcagatatttgcttgaaacatgtaaaatacgaagatttggcctaagcttcagttgcttcatctcatacaatattattgcattatttacaatgattgttccttttcccagatttggcaatgtggaggctccttggagattgttacttgctcccatgttggtcatgtttttcggaaggcaactccatacacttttcctggtggcactggtcatgtcatcaacaagaacaacaggagactggcagaagtttggatggatgaatttaaagatttcttctacatcatatccccaggtacacaattctgacatttttctttct

SEQ ID NO: 18353 - DNA, 156 bp, Homo sapiens
  MAP TO AC009303.1; EXPRESSED IN BT474, SIGNAL = 2.4; EXPRESSED IN FETAL LIVER, SIGNAL = 2.4; EXPRESSED IN HEART, SIGNAL = 2.3; EXPRESSED IN HBL100, SIGNAL = 3.9; EXPRESSED IN HELA, SIGNAL = 4.1; EXPRESSED IN ADULT LIVER, SIGNAL = 4.4; EXPRESSED IN LUNG, SIGNAL = 2.9; EXPRESSED IN BRAIN, SIGNAL =   3; EXPRESSED IN PLACENTA, SIGNAL = 3.8; EXPRESSED IN BONE MARROW, SIGNAL = 3.8; EST_HUMAN HIT: BE002894.1, EVALUE 6.00e-16; NT HIT: AF223391.1, EVALUE 9.00e-48; SWISSPROT HIT: P32364, EVALUE 8.70e+00
agcaatcagctgtgcatttgtctcctgggagcagagggatgactttgagttctgtctgtcctttgtccacaaggaattattttgtggacaaattgtgagggaggtatgtaggtttttatctttgtagccatcctatttaggaatagaatgggaggc

SEQ ID NO: 18354 - DNA, 141 bp, Homo sapiens
  MAP TO AC009758.1; EXPRESSED IN PLACENTA, SIGNAL = 4.4; EXPRESSED IN HELA, SIGNAL =  10; EXPRESSED IN BONE MARROW, SIGNAL = 5.9; EXPRESSED IN LUNG, SIGNAL = 5.4; EXPRESSED IN ADULT LIVER, SIGNAL =   3; EXPRESSED IN BT474, SIGNAL = 3.4; EXPRESSED IN FETAL LIVER, SIGNAL =   6; EXPRESSED IN HEART, SIGNAL = 3.9; EXPRESSED IN HBL100, SIGNAL =   4; EXPRESSED IN BRAIN, SIGNAL = 4.9; NT HIT: AF079864.1, EVALUE 9.00e-11; EST_HUMAN HIT: BF677705.1, EVALUE 8.00e-09; SWISSPROT HIT: P23269, EVALUE 2.00e-05
  unsure 13
  unsure 115
  unsure 135
cttggtgtagtgncagtggcttgcagatagccacatagcggtcaaaggccatggccagcagcactgctgactccatgatggagaaggagtgaaggaagaacatctgggccagacnaggcaaagaagtttatctcnccgatc

SEQ ID NO: 18355 - DNA, 423 bp, Homo sapiens
  MAP TO AC010133.1; EXPRESSED IN HBL100, SIGNAL = 3.1; EXPRESSED IN HELA, SIGNAL = 2.8; EXPRESSED IN BONE MARROW, SIGNAL = 4.2; EXPRESSED IN LUNG, SIGNAL = 1.4; EXPRESSED IN FETAL LIVER, SIGNAL = 2.6; EXPRESSED IN HEART, SIGNAL = 1.9; EXPRESSED IN BRAIN, SIGNAL = 3.2; EXPRESSED IN PLACENTA, SIGNAL = 1.9; EXPRESSED IN ADULT LIVER, SIGNAL = 1.6; EXPRESSED IN BT474, SIGNAL = 2.2
agttttctctcagaacaatggcagtattctgaaaagaagagggagaaagaaaagaagaagatggaggaggaggaagaagaagaggaggaagaggaggaggaggaagaagaagaagaagaacaagaagaacaagaagaagaagaacaagaagaagaacaagaacaacaagaagaagaagaacaagaacaacaagaagaagaacaagaagaaaaaaacaagaagaaaagaaggagaagaagaagaagaagaatgagaaggagaagaaaagaagaagaaagaagaagaagaagaagaagaagaagaagaagaagaagaagaagaagaacaagaagaagaagaacaagaacaagaacaagaagaacaagaacaagaagaacaagaagaaggaaaagaagcaaggtgaagaaggattcaagaactttt

SEQ ID NO: 18356 - DNA, 83 bp, Homo sapiens
  MAP TO AC009808.2; EXPRESSED IN BT474, SIGNAL = 1.2; EXPRESSED IN FETAL LIVER, SIGNAL = 1.6; EXPRESSED IN HEART, SIGNAL = 1.6; EXPRESSED IN HELA, SIGNAL = 1.3; EXPRESSED IN BONE MARROW, SIGNAL = 1.5; EXPRESSED IN LUNG, SIGNAL = 1.1; EXPRESSED IN BRAIN, SIGNAL = 1.5; EXPRESSED IN PLACENTA, SIGNAL = 1.4; EXPRESSED IN ADULT LIVER, SIGNAL = 1.2; EST_HUMAN HIT: N74410.1, EVALUE 1.00e+00
ggaccaacgaaagctgatcccaaaacgagatggagatacaaagtagaaggacattcttggagatctggaaactaattttaggg

SEQ ID NO: 18357 - DNA, 317 bp, Homo sapiens
  MAP TO AC010136.1; EXPRESSED IN LUNG, SIGNAL = 2.6; EXPRESSED IN FETAL LIVER, SIGNAL = 7.6; EXPRESSED IN HEART, SIGNAL = 1.5; EXPRESSED IN BRAIN, SIGNAL = 1.3; EXPRESSED IN PLACENTA, SIGNAL = 3.9; EXPRESSED IN ADULT LIVER, SIGNAL = 2.4; NT HIT: AF225896.1, EVALUE 2.00e-93; EST_HUMAN HIT: AU133689.1, EVALUE 2.00e-64; SWISSPROT HIT: Q04205, EVALUE 3.00e-21
aacaaagagaagagggcatgctggcacaggggctggtggcagggataccagtcatgtagaggtggtgagcagatggaagcatagagggcacaggacagtgggcacgaggatccatcctcaccaggtagttgcctccatgtttggacttgagcatctgcgccacctcacggaggttgctccggaagttctcctcattggctgtgctggggaaggagacagcgatgatcctctctgtgacgtacaccaggtccagctcacagctgtcctccatggtccggctcacactcatgtttctagggagacagcaggcagcggag

SEQ ID NO: 18358 - DNA, 87 bp, Homo sapiens
  MAP TO AC009813.2; EXPRESSED IN BONE MARROW, SIGNAL =   1; EXPRESSED IN ADULT LIVER, SIGNAL = 1.1; EXPRESSED IN BT474, SIGNAL = 0.95; EXPRESSED IN FETAL LIVER, SIGNAL = 0.96; EXPRESSED IN HEART, SIGNAL = 0.84; EXPRESSED IN BRAIN, SIGNAL = 1.2; SWISSPROT HIT: P18488, EVALUE 1.90e-02; EST_HUMAN HIT: BF210406.1, EVALUE 2.70e-01; NT HIT: AF013255.1, EVALUE 6.00e-01
  unsure 78
tgctgccctatcatgagcatgtggaaagctggggaaatgttcagctggtggtgcatagaggtgggaaggcgggcttangggcatgag

SEQ ID NO: 18359 - DNA, 136 bp, Homo sapiens
  MAP TO AC009945.1; EXPRESSED IN HEART, SIGNAL =   1; EXPRESSED IN BRAIN, SIGNAL = 1.2; EXPRESSED IN BONE MARROW, SIGNAL = 1.2; EXPRESSED IN FETAL LIVER, SIGNAL = 1.1; EXPRESSED IN HELA, SIGNAL = 0.95; NT HIT: U82695.2, EVALUE 3.00e-04; EST_HUMAN HIT: AI126371.1, EVALUE 2.00e-11; SWISSPROT HIT: P19507, EVALUE 7.80e-01
ataattattttagtcagcatgagttgctacaacaagtgccatatagagtgggtagcttaccacaacaggcatttatttctcacagttctaggagcttggaagtccaacatcaaggtgccaaccgattcggttcttg

SEQ ID NO: 18360 - DNA, 170 bp, Homo sapiens
  MAP TO AC009955.1; EXPRESSED IN BONE MARROW, SIGNAL =   6; EXPRESSED IN LUNG, SIGNAL = 1.1; EXPRESSED IN ADULT LIVER, SIGNAL = 1.9; EXPRESSED IN BT474, SIGNAL = 2.3; EXPRESSED IN FETAL LIVER, SIGNAL = 4.6; EXPRESSED IN HELA, SIGNAL = 1.4; EXPRESSED IN HEART, SIGNAL = 5.1; EXPRESSED IN PLACENTA, SIGNAL = 2.2; EXPRESSED IN HBL100, SIGNAL = 1.9; EXPRESSED IN BRAIN, SIGNAL = 3.1; NT HIT: gi11430193, EVALUE 3.00e-91; SWISSPROT HIT: P48751, EVALUE 1.00e-25; EST_HUMAN HIT: C16631.1, EVALUE 1.00e-72
cttggtcacatagggctgctcaggatggtgttttgccggcatgaggatgagcaacaaacgctgggacagctggataccagacagggacgtgacccccatgtacaggaagatcccaaagagcacagccaatgggatccgacgcagcacagcccccatgacgatggacaggc

SEQ ID NO: 18361 - DNA, 352 bp, Homo sapiens
  MAP TO AC010732.1; EXPRESSED IN BT474, SIGNAL = 2.1; EXPRESSED IN FETAL LIVER, SIGNAL = 1.5; EXPRESSED IN HELA, SIGNAL = 9.5; EXPRESSED IN HEART, SIGNAL = 1.4; EXPRESSED IN PLACENTA, SIGNAL = 1.9; EXPRESSED IN HBL100, SIGNAL =   2; EXPRESSED IN LUNG, SIGNAL = 1.5; EXPRESSED IN BRAIN, SIGNAL =   2; EXPRESSED IN BONE MARROW, SIGNAL = 2.3; EXPRESSED IN ADULT LIVER, SIGNAL = 1.6; EST_HUMAN HIT: AW962209.1, EVALUE 2.00e-29; NT HIT: AB046829.1, EVALUE 0.00e+00; SWISSPROT HIT: Q9V7G5, EVALUE 2.40e+00
atgggagagccctatttagcacccccaccctctccctttctccagagctctttgcccgtgctgtgccactcgtcaaggttcaggtcaccaagtcttaccttgaaactgaggcttcacctcccaagagcaagaggcaaacccaccgaacacatgcttgtcatggtcctcgaggacagccacacagggcccccggtgagtgatgtggccacagagctgggagaagctgtgtccatggagctcagacgaaaagagcaggcgccagcggtgccgctgctcccgaggcagctgggcgttgatgtacatgacagagaggacatccaggatgctctcaaaacccctgccctggtccact

SEQ ID NO: 18362 - DNA, 110 bp, Homo sapiens
  MAP TO AC009811.2; EXPRESSED IN HBL100, SIGNAL = 0.92; EXPRESSED IN BRAIN, SIGNAL = 1.1; EXPRESSED IN BONE MARROW, SIGNAL = 0.96; EXPRESSED IN ADULT LIVER, SIGNAL = 1.1; EXPRESSED IN BT474, SIGNAL = 1.1; EXPRESSED IN HEART, SIGNAL = 1.2; EST_HUMAN HIT: BF310688.1, EVALUE 3.50e-01; SWISSPROT HIT: P20918, EVALUE 9.10e+00
ttacctgtggctctggacctacttctaatatctctggagatatccaccttcaaacacctgccacatccagctatgagggtctagtacctgggctccagagacatgttcag

SEQ ID NO: 18363 - DNA, 138 bp, Homo sapiens
  MAP TO AC009884.2; EXPRESSED IN BT474, SIGNAL = 1.9; EXPRESSED IN FETAL LIVER, SIGNAL = 2.2; EXPRESSED IN HELA, SIGNAL = 1.8; EXPRESSED IN HEART, SIGNAL = 1.7; EXPRESSED IN PLACENTA, SIGNAL = 1.6; EXPRESSED IN HBL100, SIGNAL = 1.3; EXPRESSED IN LUNG, SIGNAL = 1.7; EXPRESSED IN BRAIN, SIGNAL = 1.6; EXPRESSED IN BONE MARROW, SIGNAL = 2.2; EXPRESSED IN ADULT LIVER, SIGNAL = 1.9; SWISSPROT HIT: O93229, EVALUE 5.10e+00; EST_HUMAN HIT: AW118830.1, EVALUE 1.80e+00
tcaatcctggggagttgcaacatggatacacaggatattcagaggaagattaatgttgaagtcaaattcatccttcttcacatctttggcctcttctggccctagatgagtattgaggtgaactagtgtctaaagaag

SEQ ID NO: 18364 - DNA, 120 bp, Homo sapiens
  MAP TO AC010149.1; EXPRESSED IN BONE MARROW, SIGNAL = 2.5; EXPRESSED IN ADULT LIVER, SIGNAL = 2.3; EXPRESSED IN BT474, SIGNAL = 1.9; EXPRESSED IN HELA, SIGNAL = 3.1; EXPRESSED IN FETAL LIVER, SIGNAL = 2.1; EXPRESSED IN HEART, SIGNAL = 1.9; EXPRESSED IN PLACENTA, SIGNAL = 2.6; EXPRESSED IN HBL100, SIGNAL = 1.7; EXPRESSED IN LUNG, SIGNAL = 2.1; EXPRESSED IN BRAIN, SIGNAL = 2.2; SWISSPROT HIT: Q92881, EVALUE 8.00e-10; NT HIT: gi11526194, EVALUE 6.70e-02
cagaagcccatgtggttaaacaaagtcaagacaagtttgaatgagcagatgtacacccgagtagaagggtttgtgcaggacatgcgtctcatctttcataaccacaaggaattttacagg

SEQ ID NO: 18365 - DNA, 230 bp, Homo sapiens
  MAP TO AC010683.1; EXPRESSED IN BT474, SIGNAL = 2.1; EXPRESSED IN HELA, SIGNAL = 1.7; EXPRESSED IN HEART, SIGNAL = 2.8; EXPRESSED IN PLACENTA, SIGNAL = 2.4; EXPRESSED IN HBL100, SIGNAL =  11; EXPRESSED IN LUNG, SIGNAL = 1.8; EXPRESSED IN BRAIN, SIGNAL =   2; EXPRESSED IN BONE MARROW, SIGNAL = 2.2; EXPRESSED IN FETAL LIVER, SIGNAL = 2.3; EXPRESSED IN ADULT LIVER, SIGNAL = 1.7; NT HIT: AF146683.1, EVALUE 2.20e+00; EST_HUMAN HIT: AW840207.1, EVALUE 8.20e-01; SWISSPROT HIT: Q9ZDF2, EVALUE 2.30e+00
gatacttcagggaagtcagatacacactgagtccccagtcagagcacacgaaagtctttttcagcttcttcggcatgtagattcttttggaattggacctattaaagaacatcaaccacagtgtctgcaaccaatatgtgtttgtataaaacatctggggccagatctccccaaaatcataacaccacaccttggatgtggcttcagtaatcaaaatcttatattccaga

SEQ ID NO: 18366 - DNA, 165 bp, Homo sapiens
  MAP TO AC009953.2; EXPRESSED IN BONE MARROW, SIGNAL = 1.7; EXPRESSED IN FETAL LIVER, SIGNAL = 1.6; EXPRESSED IN ADULT LIVER, SIGNAL = 2.2; EXPRESSED IN BT474, SIGNAL = 1.9; EXPRESSED IN HELA, SIGNAL = 1.6; EXPRESSED IN HEART, SIGNAL = 0.93; EXPRESSED IN PLACENTA, SIGNAL = 4.2; EXPRESSED IN HBL100, SIGNAL = 1.9; EXPRESSED IN LUNG, SIGNAL =   1; EXPRESSED IN BRAIN, SIGNAL = 1.4; SWISSPROT HIT: P23093, EVALUE 8.70e-02; NT HIT: AF162666.1, EVALUE 3.00e-88; EST_HUMAN HIT: BE173421.1, EVALUE 4.00e-88
aagggatcattctctgctccattgactgctttgtttttcctttgttttggttcagaattggtagagggtgcctgagaattattagctgtgggaggtttgcgtttggctagaagtttcctttgcctttcaatatcttccctttgctgattcacccattcttgttgc

SEQ ID NO: 18367 - DNA, 137 bp, Homo sapiens
  MAP TO AC009958.1; EXPRESSED IN HEART, SIGNAL = 2.2; EXPRESSED IN PLACENTA, SIGNAL = 3.6; EXPRESSED IN HBL100, SIGNAL = 1.8; EXPRESSED IN LUNG, SIGNAL =   2; EXPRESSED IN BRAIN, SIGNAL =   2; EXPRESSED IN BONE MARROW, SIGNAL = 2.5; EXPRESSED IN FETAL LIVER, SIGNAL =   2; EXPRESSED IN ADULT LIVER, SIGNAL = 2.1; EXPRESSED IN BT474, SIGNAL = 1.5; EXPRESSED IN HELA, SIGNAL = 3.1; NT HIT: M64857.1, EVALUE 3.00e-07; EST_HUMAN HIT: AW291458.1, EVALUE 7.90e-02; SWISSPROT HIT: P51022, EVALUE 7.80e-01
tgggcagactccatggtcatgctgctgctctctctgagatgggcagactccatggtcatgctgctgctctctctgagctggggaaggcagctctgcctgcatgcatgccagaccacagtgtctggaatagcatcccc

SEQ ID NO: 18368 - DNA, 152 bp, Homo sapiens
  MAP TO AC010731.1; EXPRESSED IN HELA, SIGNAL = 1.1; EXPRESSED IN HEART, SIGNAL =   1; EXPRESSED IN PLACENTA, SIGNAL =   1; EXPRESSED IN HBL100, SIGNAL = 0.92; EXPRESSED IN BONE MARROW, SIGNAL =   1; EXPRESSED IN FETAL LIVER, SIGNAL = 0.9; EXPRESSED IN ADULT LIVER, SIGNAL = 0.98; NT HIT: AF010597.1, EVALUE 2.90e-01; SWISSPROT HIT: Q9SML8, EVALUE 1.00e-02; EST_HUMAN HIT: AW263177.1, EVALUE 6.00e-74
gccagtttggtattccgaaagggatcgtcttttctatgcctgtgaaatttgagaatggaacttgggtggttcttacagatctcaaagatgttgaaataagtgaacaaataatgacccgaatgacaagtgatctaattcaggtaatgtcagaa

SEQ ID NO: 18369 - DNA, 211 bp, Homo sapiens
  MAP TO AC009962.1; EXPRESSED IN BONE MARROW, SIGNAL = 3.2; EXPRESSED IN FETAL LIVER, SIGNAL = 2.6; EXPRESSED IN ADULT LIVER, SIGNAL = 2.6; EXPRESSED IN HBL100, SIGNAL =   4; EXPRESSED IN BT474, SIGNAL = 2.6; EXPRESSED IN HELA, SIGNAL = 3.5; EXPRESSED IN HEART, SIGNAL = 3.2; EXPRESSED IN PLACENTA, SIGNAL = 4.2; EXPRESSED IN LUNG, SIGNAL = 2.6; EXPRESSED IN BRAIN, SIGNAL = 3.3; NT HIT: M57505.1, EVALUE 2.00e+00
ctcttccccccgctgccggcagctgcgcgccgggaaggtcctccccctcgtcctcctcctcgtcctgcgtcgtcgcttctgtggacagatcctccgtctccgacgcttgccaggagctgcggcacttggcccaggccttcctcctgcgactcgccacttgccactccagttcctcctccgcctccgccgacgacgacaggggccggtccat

SEQ ID NO: 18370 - DNA, 119 bp, Homo sapiens
  MAP TO AC011092.1; EXPRESSED IN BT474, SIGNAL = 1.2; EXPRESSED IN HELA, SIGNAL = 0.91; EXPRESSED IN HEART, SIGNAL = 0.95; EXPRESSED IN BRAIN, SIGNAL = 0.97; EXPRESSED IN PLACENTA, SIGNAL =   1; EXPRESSED IN BONE MARROW, SIGNAL = 0.9; EXPRESSED IN FETAL LIVER, SIGNAL = 0.91; EXPRESSED IN ADULT LIVER, SIGNAL = 1.1; NT HIT: gi7656978, EVALUE 5.60e-02; EST_HUMAN HIT: BE257400.1, EVALUE 6.00e-61; SWISSPROT HIT: Q03264, EVALUE 2.30e+00
tcatagaaggttaggcatgagcagtaatgtcgatctgagtcaatgtctgtcaggacaaccacaaagaacgttggctgcttcctctctctggacagctgccacccgccaggctgacaaaa

SEQ ID NO: 18371 - DNA, 498 bp, Homo sapiens
  MAP TO AC011480.1; EXPRESSED IN BT474, SIGNAL = 1.4; EXPRESSED IN HBL100, SIGNAL = 1.2; EXPRESSED IN HELA, SIGNAL = 5.4; EXPRESSED IN HEART, SIGNAL = 1.2; EXPRESSED IN BONE MARROW, SIGNAL = 1.6; EXPRESSED IN BRAIN, SIGNAL = 1.3; EXPRESSED IN PLACENTA, SIGNAL = 1.1; EXPRESSED IN LUNG, SIGNAL = 0.95; EXPRESSED IN FETAL LIVER, SIGNAL = 1.5; EXPRESSED IN ADULT LIVER, SIGNAL = 1.2; SWISSPROT HIT: Q14934, EVALUE 1.20e-01; EST_HUMAN HIT: R11920.1, EVALUE 1.80e+00
gttctgggaaagtggcccagcgctgcggaagcggccctttcatcgggcatccgggtgctctttcgacccctcgtggccagtcttggacctgcatggaaaaatgtgccaagaaagttctgctggaaaagtgctggtgattctccacgtgaccctcctccgcgcccccagggtcactctcagccttccttccccagctcggggccctgggagaccgccgtgtgcaaattctatcggcagggtcggtggagagaggtcagggtatttgcttcctgggcccctccctgcatcccgcactcacagtggctgtggttcccctcctctgagccgcagttcctctgggaactcgagctgtccctggagacgggtaacagactccctccctgtcccttctgccctaggctggcgatggcttcgtgcccacttcggatggtcccctggggccgccccatcctttgtggctttctccactctgcccatccctctataaactgcccataa

SEQ ID NO: 18372 - DNA, 124 bp, Homo sapiens
  MAP TO AL050325.20; EXPRESSED IN PLACENTA, SIGNAL = 1.7; EXPRESSED IN BONE MARROW, SIGNAL = 2.5; EXPRESSED IN LUNG, SIGNAL = 2.8; EXPRESSED IN FETAL LIVER, SIGNAL = 2.8; EXPRESSED IN ADULT LIVER, SIGNAL = 2.1; EXPRESSED IN HBL100, SIGNAL = 2.1; EXPRESSED IN BT474, SIGNAL = 2.2; EXPRESSED IN HELA, SIGNAL = 3.7; EXPRESSED IN HEART, SIGNAL = 2.8; EXPRESSED IN BRAIN, SIGNAL = 2.7; SWISSPROT HIT: Q9WUQ1, EVALUE 9.20e+00
tcagccctgcctctgggagctcagagactggggaagatgtgctgccctcaggtggtgggggtgggccagagaggctggggcttgtgtctggccctggttttcctcattctcctcatctgtataa

SEQ ID NO: 18373 - DNA, 340 bp, Homo sapiens
  MAP TO AC011201.1; EXPRESSED IN BONE MARROW, SIGNAL = 2.6; EXPRESSED IN LUNG, SIGNAL = 1.5; EXPRESSED IN FETAL LIVER, SIGNAL = 3.5; EXPRESSED IN ADULT LIVER, SIGNAL = 2.3; EXPRESSED IN HEART, SIGNAL = 3.1; EXPRESSED IN BRAIN, SIGNAL = 2.7; EXPRESSED IN PLACENTA, SIGNAL = 3.1; EXPRESSED IN BT474, SIGNAL = 1.5; EXPRESSED IN HELA, SIGNAL =   2; EXPRESSED IN HBL100, SIGNAL = 1.6; SWISSPROT HIT: Q92376, EVALUE 4.90e+00
cctacacaccagggataaaaatggtgagaaaaactgtagtttcacctggcaaagtggtgccaattcacttattcaaagtaagaggcgagaccagaagtggacaaggagttacaaaattagaagtgagcagcttgttgtgagatggaatgccatatagcagagcaagctgttcagaaccaagacagagaataatgtgcggatgttggaggctcacttcttgcagaatggactgagtgataaaaacaagattgctttattttaaaggactctgttggatagaataacggacagctgacaaagacttgctttgtcttttgttctgccaaacagtattcttgaa

SEQ ID NO: 18374 - DNA, 144 bp, Homo sapiens
  MAP TO AC010985.1; EXPRESSED IN BRAIN, SIGNAL = 1.2; EXPRESSED IN BONE MARROW, SIGNAL = 0.91; EXPRESSED IN ADULT LIVER, SIGNAL = 0.91; EXPRESSED IN BT474, SIGNAL = 0.95; EXPRESSED IN HEART, SIGNAL = 0.95; NT HIT: AJ229041.1, EVALUE 1.00e-09; EST_HUMAN HIT: AI148443.1, EVALUE 3.00e-04; SWISSPROT HIT: Q58447, EVALUE 3.00e+00
gaagaagaatacacttgctttctcttcttgagctgggacatccatctcctcctgagctgggacatccatctcctcctgcctttggacaacagggcttctggttcttgggcctttgaacttcaggactttcaccaacagatctcc

SEQ ID NO: 18375 - DNA, 154 bp, Homo sapiens
  MAP TO AL109830.7; EXPRESSED IN FETAL LIVER, SIGNAL = 6.3; EXPRESSED IN HELA, SIGNAL = 6.8; EXPRESSED IN PLACENTA, SIGNAL = 7.3; EXPRESSED IN HBL100, SIGNAL = 5.3; EXPRESSED IN HEART, SIGNAL = 6.4; EXPRESSED IN BRAIN, SIGNAL = 5.3; EXPRESSED IN BONE MARROW, SIGNAL = 6.7; EXPRESSED IN LUNG, SIGNAL = 5.8; EXPRESSED IN BT474, SIGNAL = 4.3; EXPRESSED IN ADULT LIVER, SIGNAL = 5.4; NT HIT: AJ237934.1, EVALUE 3.00e-01; SWISSPROT HIT: Q25434, EVALUE 3.40e-01; EST_HUMAN HIT: AA775964.1, EVALUE 1.30e-01
caagttctcaaccaaactgaccaccaatactatcgaaaagacagcagcccccaagcaatttggcccaaagcccacgaacctcctaccctcctcccatccctctattttccctattattcagaaagaaatcactgttattcattgcacagaccag

SEQ ID NO: 18376 - DNA, 177 bp, Homo sapiens
  MAP TO AL079337.3; EXPRESSED IN HBL100, SIGNAL = 4.4; EXPRESSED IN HEART, SIGNAL = 8.5; EXPRESSED IN LUNG, SIGNAL = 5.5; EXPRESSED IN BONE MARROW, SIGNAL = 6.9; EXPRESSED IN BRAIN, SIGNAL = 6.1; EXPRESSED IN ADULT LIVER, SIGNAL = 6.9; EXPRESSED IN BT474, SIGNAL = 4.2; EXPRESSED IN FETAL LIVER, SIGNAL = 8.4; EXPRESSED IN PLACENTA, SIGNAL = 7.7; EXPRESSED IN HELA, SIGNAL = 5.8; NT HIT: AL163282.2, EVALUE 4.00e-29; EST_HUMAN HIT: AI500406.1, EVALUE 4.00e-41; SWISSPROT HIT: P39770, EVALUE 1.50e-01
  unsure 87
agttccacatggctggggaggcctcagaatcatggcgggagtcaaaaagcacttcttacatggaggcgtcaagagaaaatgaggaangaagcaaacccagtaatccctgataaaccaatcagacctcatgagactattcactatcataagaatagcacaggaaagactggcccccca

SEQ ID NO: 18377 - DNA, 189 bp, Homo sapiens
  MAP TO AF187000.1; EXPRESSED IN PLACENTA, SIGNAL = 4.9; EXPRESSED IN HELA, SIGNAL =  12; EXPRESSED IN HBL100, SIGNAL = 4.7; EXPRESSED IN HEART, SIGNAL =   5; EXPRESSED IN LUNG, SIGNAL = 3.6; EXPRESSED IN BONE MARROW, SIGNAL =   6; EXPRESSED IN BRAIN, SIGNAL = 6.1; EXPRESSED IN ADULT LIVER, SIGNAL = 3.8; EXPRESSED IN BT474, SIGNAL = 4.2; EXPRESSED IN FETAL LIVER, SIGNAL =   5
cgtaatcagcatcattggcatcagcatcatcagcatcaccaccctcatcatcatcagtagcatcaatatcactatcatcagcattagcatcagcatcatcagcagcatcagcaccatcagcatcatcgtcatcaggatcatcagcatcatcagcagcatcaccaccattatcagcatcaggatcaccat

SEQ ID NO: 18378 - DNA, 134 bp, Homo sapiens
  MAP TO AL050341.18; EXPRESSED IN LUNG, SIGNAL = 3.4; EXPRESSED IN BRAIN, SIGNAL = 3.9; EXPRESSED IN BT474, SIGNAL = 5.9; EXPRESSED IN ADULT LIVER, SIGNAL =   5; EXPRESSED IN PLACENTA, SIGNAL = 5.4; EXPRESSED IN HBL100, SIGNAL = 5.7; EXPRESSED IN HEART, SIGNAL = 3.5; EXPRESSED IN BONE MARROW, SIGNAL = 4.5; EXPRESSED IN FETAL LIVER, SIGNAL = 3.5; EXPRESSED IN HELA, SIGNAL = 4.7; SWISSPROT HIT: P41997, EVALUE 6.90e-02; NT HIT: gi11431886, EVALUE 8.00e-48; EST_HUMAN HIT: AW248177.1, EVALUE 1.00e-47
gttcttcggcaacttcttgtgtagttgtaaggggatcagctccgatgattgctctccattggtcattgtcaacttccgatggcctgccactacgctcctcatcttcaaggctctcatctcctttgcaaacttct

SEQ ID NO: 18379 - DNA, 77 bp, Homo sapiens
  MAP TO AL033380.10; EXPRESSED IN PLACENTA, SIGNAL = 1.2; EXPRESSED IN HELA, SIGNAL =   1; EXPRESSED IN BONE MARROW, SIGNAL = 1.7; EXPRESSED IN BRAIN, SIGNAL = 1.5; EXPRESSED IN BT474, SIGNAL = 1.5; EXPRESSED IN HEART, SIGNAL = 1.1; EXPRESSED IN HBL100, SIGNAL = 1.3; EXPRESSED IN LUNG, SIGNAL = 0.88; EXPRESSED IN ADULT LIVER, SIGNAL = 1.1; EXPRESSED IN FETAL LIVER, SIGNAL = 1.3; EST_HUMAN HIT: W02144.1, EVALUE 3.60e+00; NT HIT: AF110763.1, EVALUE 3.30e-02; SWISSPROT HIT: Q58016, EVALUE 5.40e+00
ctgggagacggtgcagccagattcaaagccaggtctgcctggctcctgggatcattcctttgggcaggactgatcat

SEQ ID NO: 18380 - DNA, 179 bp, Homo sapiens
  MAP TO AL049541.19; EXPRESSED IN FETAL LIVER, SIGNAL = 1.9; EXPRESSED IN ADULT LIVER, SIGNAL = 0.95; EXPRESSED IN PLACENTA, SIGNAL = 1.3; EXPRESSED IN HBL100, SIGNAL =   2; EXPRESSED IN HELA, SIGNAL = 1.8; EXPRESSED IN BONE MARROW, SIGNAL = 2.6; EXPRESSED IN BT474, SIGNAL = 2.3; EXPRESSED IN HEART, SIGNAL = 1.1; EXPRESSED IN BRAIN, SIGNAL =   2; NT HIT: U35776.1, EVALUE 3.50e-01
aggcagggctgggttagggtgagcaagtgaggccaaattgtgcaagtgctgccttgaatcctgtctcctttcctcctcatccccctcctcctccttccccctgctcctcctcctcttcctccgtctttcttcttcctcctcctcctccttcctcacaaaggatcctgtctttaaatttt

SEQ ID NO: 18381 - DNA, 187 bp, Homo sapiens
  MAP TO AF165124.1; EXPRESSED IN BT474, SIGNAL =   3; EXPRESSED IN FETAL LIVER, SIGNAL = 2.2; EXPRESSED IN ADULT LIVER, SIGNAL = 6.3; EXPRESSED IN PLACENTA, SIGNAL = 5.6; EXPRESSED IN HBL100, SIGNAL = 2.5; EXPRESSED IN BONE MARROW, SIGNAL = 4.4; EXPRESSED IN HELA, SIGNAL = 4.3; EXPRESSED IN HEART, SIGNAL = 2.4; EXPRESSED IN BRAIN, SIGNAL = 3.4; EXPRESSED IN LUNG, SIGNAL = 2.9; NT HIT: U78027.1, EVALUE 2.00e-46; SWISSPROT HIT: P08630, EVALUE 3.30e-01; EST_HUMAN HIT: AW847744.1, EVALUE 2.00e-13
cagctgcagcgaaacccacccaaggagtcagctcagacacgcctagccctgccaccacccaatggtccttccctacccaccctggtaactgaagacaaagggcatatactctcgggagttctagggctctgcccaccacttgttcctccacacactactgatgctctctggaaagcaccacctcctg

SEQ ID NO: 18382 - DNA, 178 bp, Homo sapiens
  MAP TO AL050343.14; EXPRESSED IN BONE MARROW, SIGNAL = 2.2; EXPRESSED IN LUNG, SIGNAL = 1.7; EXPRESSED IN BRAIN, SIGNAL = 2.2; EXPRESSED IN ADULT LIVER, SIGNAL = 1.4; EXPRESSED IN BT474, SIGNAL = 2.6; EXPRESSED IN FETAL LIVER, SIGNAL = 2.3; EXPRESSED IN PLACENTA, SIGNAL = 2.4; EXPRESSED IN HBL100, SIGNAL =   2; EXPRESSED IN HELA, SIGNAL = 3.7; EXPRESSED IN HEART, SIGNAL =   2; EST_HUMAN HIT: AA776605.1, EVALUE 7.00e-80; SWISSPROT HIT: P47245, EVALUE 2.00e-23; NT HIT: U64898.1, EVALUE 6.00e-80
tgtggtcctctttgatatctttgtcaatatccttacgcataaccttgcggaaccagcttatgaagcagatgtggcacagctggagtataaactggtagctggagaacatggtttaattattcgagtgaaaggatttaaccacaaactacctgtaagtacaagtactctgttttcctta

SEQ ID NO: 18383 - DNA, 215 bp, Homo sapiens
  MAP TO AL049539.16; EXPRESSED IN BT474, SIGNAL = 4.1; EXPRESSED IN FETAL LIVER, SIGNAL = 1.5; EXPRESSED IN HBL100, SIGNAL = 3.1; EXPRESSED IN HELA, SIGNAL = 3.3; EXPRESSED IN HEART, SIGNAL = 1.6; EXPRESSED IN LUNG, SIGNAL =   2; EXPRESSED IN ADULT LIVER, SIGNAL = 1.8; EXPRESSED IN PLACENTA, SIGNAL = 3.5; EXPRESSED IN BRAIN, SIGNAL = 2.3; EXPRESSED IN BONE MARROW, SIGNAL = 2.2; EST_HUMAN HIT: BE866833.1, EVALUE 4.00e-95; SWISSPROT HIT: P32802, EVALUE 3.00e-05; NT HIT: gi11420944, EVALUE 3.00e-95
cccacaaatcggttcatgtaccaccgctgctcggggatctgccggggaatctggttggtgcgcacagggttgtcatatggctgctttcggaagccgaagtagtagcccaagtagacgaggggcagggagatcccgaaccacatgcacagcagagccaccatggtgggaaagggcacctgtagacatggcaccatgaggcccccacgaggccctga

SEQ ID NO: 18384 - DNA, 77 bp, Homo sapiens
  MAP TO AL078645.18; EXPRESSED IN BONE MARROW, SIGNAL = 1.6; EXPRESSED IN LUNG, SIGNAL = 1.2; EXPRESSED IN BRAIN, SIGNAL = 1.6; EXPRESSED IN BT474, SIGNAL = 1.7; EXPRESSED IN FETAL LIVER, SIGNAL = 1.3; EXPRESSED IN HBL100, SIGNAL = 1.8; EXPRESSED IN HELA, SIGNAL = 1.1; EXPRESSED IN HEART, SIGNAL = 1.6; EXPRESSED IN ADULT LIVER, SIGNAL = 1.6; EXPRESSED IN PLACENTA, SIGNAL = 1.4; EST_HUMAN HIT: AA508350.1, EVALUE 6.00e-36; NT HIT: Y17304.1, EVALUE 8.00e-03
tttgctctgggttgatgaactaatcccggaacctctttattagttttaagtcttacatttgagctggcacttttttc

SEQ ID NO: 18385 - DNA, 81 bp, Homo sapiens
  MAP TO AL020996.3; EXPRESSED IN BONE MARROW, SIGNAL = 2.1; EXPRESSED IN BRAIN, SIGNAL = 2.2; EXPRESSED IN LUNG, SIGNAL = 1.6; EXPRESSED IN ADULT LIVER, SIGNAL = 2.3; EXPRESSED IN BT474, SIGNAL = 1.9; EXPRESSED IN FETAL LIVER, SIGNAL =   2; EXPRESSED IN HELA, SIGNAL = 1.6; EXPRESSED IN PLACENTA, SIGNAL =  14; EXPRESSED IN HBL100, SIGNAL = 1.7; EXPRESSED IN HEART, SIGNAL = 1.7; SWISSPROT HIT: P39098, EVALUE 2.00e-04; NT HIT: gi9966902, EVALUE 2.00e-38; EST_HUMAN HIT: AA437353.1, EVALUE 2.00e-38
gttgtcgtggttgggggtgctactgtacacgtcttggatcccagagaaaccggcttctgtccgacagtatttctccaaggc

SEQ ID NO: 18386 - DNA, 119 bp, Homo sapiens
  MAP TO AL079303.2; EXPRESSED IN PLACENTA, SIGNAL = 2.9; EXPRESSED IN HBL100, SIGNAL = 2.8; EXPRESSED IN HELA, SIGNAL = 3.3; EXPRESSED IN HEART, SIGNAL = 2.1; EXPRESSED IN BRAIN, SIGNAL = 2.6; EXPRESSED IN BONE MARROW, SIGNAL = 2.3; EXPRESSED IN LUNG, SIGNAL = 2.6; EXPRESSED IN ADULT LIVER, SIGNAL = 2.4; EXPRESSED IN BT474, SIGNAL = 3.3; EXPRESSED IN FETAL LIVER, SIGNAL = 2.2; NT HIT: AF301601.1, EVALUE 2.60e-01; EST_HUMAN HIT: AA596033.1, EVALUE 6.00e-61; SWISSPROT HIT: P27280, EVALUE 4.00e+00
actctgatgcttggagttgagcctgtgtcacacagagccatgtggctgccaggcctctctgcggatgctcacattcgcaggattatggtctgtgtcctcccatcatacctgagggcagg

SEQ ID NO: 18387 - DNA, 148 bp, Homo sapiens
  MAP TO AL050348.19; EXPRESSED IN HEART, SIGNAL = 1.5; EXPRESSED IN BONE MARROW, SIGNAL = 1.1; EXPRESSED IN BRAIN, SIGNAL = 1.1; EXPRESSED IN ADULT LIVER, SIGNAL = 1.1; EXPRESSED IN BT474, SIGNAL = 1.5; EST_HUMAN HIT: BF197609.1, EVALUE 5.00e-78; NT HIT: AB032950.1, EVALUE 1.10e+00; SWISSPROT HIT: O46655, EVALUE 5.00e-05
tgcattgttggctgtgtgatggatgagaattgtcaagctggagaaaaatgttgcaagtcaggctgtggccgcttctgtgtcccaccagtcctgcccccaaaactgaccatgaaccccaactggactgtgaggtctgattccgaattag

SEQ ID NO: 18388 - DNA, 166 bp, Homo sapiens
  MAP TO AP000402.1; EXPRESSED IN PLACENTA, SIGNAL =   3; EXPRESSED IN HBL100, SIGNAL = 2.1; EXPRESSED IN HELA, SIGNAL = 4.6; EXPRESSED IN BONE MARROW, SIGNAL = 4.1; EXPRESSED IN BT474, SIGNAL = 2.8; EXPRESSED IN FETAL LIVER, SIGNAL = 2.5; EXPRESSED IN HEART, SIGNAL = 2.9; EXPRESSED IN BRAIN, SIGNAL = 2.9; EXPRESSED IN LUNG, SIGNAL = 5.5; EXPRESSED IN ADULT LIVER, SIGNAL = 3.4; EST_HUMAN HIT: BF056478.1, EVALUE 6.00e-41; NT HIT: AJ133269.1, EVALUE 5.00e-25; SWISSPROT HIT: P56868, EVALUE 6.60e+00
ttctttagtgctgatttccgagatttcagtgcacccatcacccaagcagtgtacactgtactcaatgtgtggtcttctatccctcagccctactcccaccctttcccccaagtccccaacgtccatcgtatcattcttatgcctttgcatcctcatagcttagctc

SEQ ID NO: 18389 - DNA, 198 bp, Homo sapiens
  MAP TO AP000494.1; EXPRESSED IN BT474, SIGNAL =   3; EXPRESSED IN ADULT LIVER, SIGNAL = 3.1; EXPRESSED IN PLACENTA, SIGNAL = 2.9; EXPRESSED IN HBL100, SIGNAL = 2.2; EXPRESSED IN BONE MARROW, SIGNAL =   3; EXPRESSED IN FETAL LIVER, SIGNAL = 2.8; EXPRESSED IN HELA, SIGNAL = 2.8; EXPRESSED IN HEART, SIGNAL = 2.6; EXPRESSED IN BRAIN, SIGNAL = 2.8; EXPRESSED IN LUNG, SIGNAL = 2.4; SWISSPROT HIT: Q02897, EVALUE 2.90e+00; EST_HUMAN HIT: AA149938.1, EVALUE 2.70e+00
tcttggtggtgaggaagtttatacgaccacagatgcttctcaccccaaggtacccgtgccctgtgctgctggtgccactcatcctagggcattcctgcttggcagtagcagattctagattgtcctgtttgctggtttgggggctgcaggggtctgcagagtgccgcaaggaggaggagtcccagatcactggttgac

SEQ ID NO: 18390 - DNA, 248 bp, Homo sapiens
  MAP TO AL035665.22; EXPRESSED IN PLACENTA, SIGNAL =   1; EXPRESSED IN HEART, SIGNAL = 1.1; EXPRESSED IN BONE MARROW, SIGNAL = 1.3; EXPRESSED IN BRAIN, SIGNAL = 1.1; EXPRESSED IN ADULT LIVER, SIGNAL = 1.1; EXPRESSED IN BT474, SIGNAL =   1; EXPRESSED IN FETAL LIVER, SIGNAL = 0.88; EST_HUMAN HIT: W00648.1, EVALUE 6.10e-01; SWISSPROT HIT: Q98864, EVALUE 4.80e+00
aagtcaagcttcttctatcctgtagggtcattcccatggtgcttagtgggaagtctgggcttggtgacattatgtgtgggctcttgtcttcctatgtgagccctgcagggaaggcagtgtttccaggacagagcctgggtctgggagttgggaatcagagccttgctgacatagcttcaggacctaaggtggaaatgcagacatctctgataatagtgccataccacccaattgtcatgaggattcaa

SEQ ID NO: 18391 - DNA, 172 bp, Homo sapiens
  MAP TO AL031662.24; EXPRESSED IN HELA, SIGNAL = 2.8; EXPRESSED IN BONE MARROW, SIGNAL =   3; EXPRESSED IN LUNG, SIGNAL = 1.9; EXPRESSED IN BRAIN, SIGNAL = 3.1; EXPRESSED IN BT474, SIGNAL = 1.9; EXPRESSED IN PLACENTA, SIGNAL = 2.9; EXPRESSED IN HEART, SIGNAL = 2.1; EXPRESSED IN HBL100, SIGNAL = 2.3; EXPRESSED IN ADULT LIVER, SIGNAL = 2.2; EXPRESSED IN FETAL LIVER, SIGNAL = 2.1; SWISSPROT HIT: Q9UGV2, EVALUE 2.00e-14; EST_HUMAN HIT: AU132685.1, EVALUE 1.00e-51; NT HIT: gi11968028, EVALUE 8.00e-52
gaagagttacaggccaacctggacctgatccaaacctacagaatgcatattgcccaagacatcaaccaagacaacctgcagctcttcttgaattcctacaatgggtatagttttttcctgtttcttcacttaaatgtaaacaggttctaaaaagaggagggtgggagaagga

SEQ ID NO: 18392 - DNA, 108 bp, Homo sapiens
  MAP TO AL035078.32; EXPRESSED IN HEART, SIGNAL = 1.4; EXPRESSED IN LUNG, SIGNAL = 0.96; EXPRESSED IN BRAIN, SIGNAL = 1.2; EXPRESSED IN BT474, SIGNAL = 0.99; EXPRESSED IN FETAL LIVER, SIGNAL = 1.1; EXPRESSED IN ADULT LIVER, SIGNAL = 0.97; EXPRESSED IN PLACENTA, SIGNAL = 1.1; EXPRESSED IN BONE MARROW, SIGNAL = 1.3; EXPRESSED IN HELA, SIGNAL =   1; EST_HUMAN HIT: BE958074.1, EVALUE 1.40e+00; NT HIT: U32739.1, EVALUE 7.90e-01
ggccacagtcctacagtagcaagtggaggcaaaagtcatttaggcatcattcacaatgaaattattttggtactcctagacttgggagggatggagaaatttgatgat

SEQ ID NO: 18393 - DNA, 128 bp, Homo sapiens
  MAP TO AF165140.1; EXPRESSED IN PLACENTA, SIGNAL = 1.4; EXPRESSED IN HEART, SIGNAL = 1.1; EXPRESSED IN LUNG, SIGNAL = 1.2; EXPRESSED IN BRAIN, SIGNAL =   1; EXPRESSED IN BONE MARROW, SIGNAL = 0.91; EXPRESSED IN BT474, SIGNAL = 0.98; EXPRESSED IN FETAL LIVER, SIGNAL =   1; EXPRESSED IN ADULT LIVER, SIGNAL = 3.5; EXPRESSED IN HBL100, SIGNAL = 1.1; SWISSPROT HIT: P39944, EVALUE 7.00e+00; NT HIT: Y18889.1, EVALUE 1.60e-02; EST_HUMAN HIT: D78789.1, EVALUE 7.30e-02
cccttccattcttcctccactacaggaatgcctgctcgtctttcagtacccagatcaaatggaagcctcgctgaactcccctggcaaactctctctcttcctgtctttccatggcaatttttaaaggt

SEQ ID NO: 18394 - DNA, 154 bp, Homo sapiens
  MAP TO AL049543.14; EXPRESSED IN FETAL LIVER, SIGNAL = 1.4; EXPRESSED IN ADULT LIVER, SIGNAL = 1.7; EXPRESSED IN HBL100, SIGNAL = 1.2; EXPRESSED IN HELA, SIGNAL = 1.6; EXPRESSED IN HEART, SIGNAL = 1.2; EXPRESSED IN LUNG, SIGNAL = 1.2; EXPRESSED IN BRAIN, SIGNAL = 1.4; EXPRESSED IN BT474, SIGNAL = 1.2; EXPRESSED IN PLACENTA, SIGNAL = 1.4; EXPRESSED IN BONE MARROW, SIGNAL = 1.7; NT HIT: gi11526407, EVALUE 1.00e-81; SWISSPROT HIT: O75715, EVALUE 6.00e-26; EST_HUMAN HIT: AA054048.1, EVALUE 2.00e-06
atggattgccacaaagacgagaaaggcaccatctatgactatgaggccatcgcacttaataagaatgaatatgtttccttcaagcagtatgtgggcaagcacatcctcttcgtcaacgtggccacctactgtggtctgacagcgcaatatcctg

SEQ ID NO: 18395 - DNA, 165 bp, Homo sapiens
  MAP TO AL078602.10; EXPRESSED IN BONE MARROW, SIGNAL = 9.5; EXPRESSED IN LUNG, SIGNAL = 8.8; EXPRESSED IN FETAL LIVER, SIGNAL =  10; EXPRESSED IN ADULT LIVER, SIGNAL = 9.1; EXPRESSED IN PLACENTA, SIGNAL =  11; EXPRESSED IN HELA, SIGNAL =  12; EXPRESSED IN HEART, SIGNAL =  11; EXPRESSED IN BRAIN, SIGNAL = 7.5; EXPRESSED IN BT474, SIGNAL = 7.8; EXPRESSED IN HBL100, SIGNAL =  15; NT HIT: AF059736.1, EVALUE 3.00e-05; EST_HUMAN HIT: AA766310.1, EVALUE 4.00e-05
ctttttctgctgctgtctcttcttcctctttgtcttctttttcctcttcctgttcctcctcccctttttctccttcttcctcttcttccttctttcttcctcttcttccttctttcttcatcttcatcttcgtctcactctgccatccaggctggagtgcaatgg

SEQ ID NO: 18396 - DNA, 92 bp, Homo sapiens
  MAP TO AF165140.1; EXPRESSED IN FETAL LIVER, SIGNAL = 2.8; EXPRESSED IN ADULT LIVER, SIGNAL = 4.8; EXPRESSED IN HBL100, SIGNAL = 2.7; EXPRESSED IN HELA, SIGNAL = 3.1; EXPRESSED IN HEART, SIGNAL = 1.8; EXPRESSED IN LUNG, SIGNAL = 2.5; EXPRESSED IN BT474, SIGNAL = 3.3; EXPRESSED IN PLACENTA, SIGNAL = 3.7; EXPRESSED IN BRAIN, SIGNAL = 3.4; EXPRESSED IN BONE MARROW, SIGNAL = 5.5; NT HIT: L77570.1, EVALUE 7.60e-01; SWISSPROT HIT: P23961, EVALUE 3.10e+00; EST_HUMAN HIT: AA468110.1, EVALUE 3.00e-03
aacaacaacaacaacaacaaaccatgtggctgggtggaggggatcatgccagtgatctcaacatttggagacgccaaggtgggcagattgct

SEQ ID NO: 18397 - DNA, 104 bp, Homo sapiens
  MAP TO AL049597.17; EXPRESSED IN FETAL LIVER, SIGNAL = 1.3; EXPRESSED IN HBL100, SIGNAL = 1.3; EXPRESSED IN HELA, SIGNAL = 1.6; EXPRESSED IN PLACENTA, SIGNAL = 1.7; EXPRESSED IN HEART, SIGNAL = 0.93; EXPRESSED IN BONE MARROW, SIGNAL = 1.2; EXPRESSED IN LUNG, SIGNAL = 1.1; EXPRESSED IN BT474, SIGNAL = 1.2; EXPRESSED IN ADULT LIVER, SIGNAL = 1.1; EST_HUMAN HIT: AW954061.1, EVALUE 6.00e-52; NT HIT: AF257318.1, EVALUE 4.00e-52
attttttctgtccatattttggtacattcagctttgctaaggaggttctctaagtgagcatccaattctgtcttctcagcctggccaagcttttcttctgtgaa

SEQ ID NO: 18398 - DNA, 464 bp, Homo sapiens
  MAP TO AL096770.14; EXPRESSED IN PLACENTA, SIGNAL = 2.7; EXPRESSED IN HBL100, SIGNAL =   9; EXPRESSED IN HELA, SIGNAL = 6.6; EXPRESSED IN HEART, SIGNAL =   2; EXPRESSED IN BRAIN, SIGNAL = 1.4; EXPRESSED IN BONE MARROW, SIGNAL = 3.3; EXPRESSED IN LUNG, SIGNAL =   2; EXPRESSED IN ADULT LIVER, SIGNAL = 1.3; EXPRESSED IN BT474, SIGNAL = 7.7; EXPRESSED IN FETAL LIVER, SIGNAL = 3.3; SWISSPROT HIT: O95371, EVALUE 1.00e-31; NT HIT: gi11526387, EVALUE 3.00e-07; EST_HUMAN HIT: AI909504.1, EVALUE 2.00e-05
agcaatggagaatgtcactacaatgaatgagtttcttctacttggcctgactggtgttcaggagctgcagcctttcttctttgggattttcttaatcatttacctgataaacttgattggaaatggatctatattggtgatggttgttttggaaccacaactccactcccctatgtatttttttctgggaaacctttcttgtctggatatttcttattcttcagtgacactgcccaagctgctcgtaaacctcgtgtgcagtcgcagggctatatcttttctaggctgtatcacccagctacacttcttccactttttgggaagcacagaggccattttactggctatcatggcctttgaccgttttgttgccatctgcaatcctcttcgctacactgtcatcatgaacccccaggtgtgtattctgttggcagctgcggcctggctcatcagcttcttttacg

SEQ ID NO: 18399 - DNA, 115 bp, Homo sapiens
  MAP TO AL023583.13; EXPRESSED IN BONE MARROW, SIGNAL = 0.95; EXPRESSED IN BT474, SIGNAL = 1.3; EXPRESSED IN FETAL LIVER, SIGNAL = 0.9; EXPRESSED IN HELA, SIGNAL = 1.8; EXPRESSED IN PLACENTA, SIGNAL = 1.3; EXPRESSED IN HBL100, SIGNAL = 1.5; EXPRESSED IN HEART, SIGNAL =   2; SWISSPROT HIT: Q99323, EVALUE 6.90e+00; NT HIT: Y00493.1, EVALUE 2.50e-01; EST_HUMAN HIT: AW292568.1, EVALUE 2.00e-58
catgcccagcaagatcgggcccttacccagacagacaggaagatcgaaactgaggttgctggcctcaaaaccatgcttgagtcacacaagcttgataatattaaatatttagcag

SEQ ID NO: 18400 - DNA, 135 bp, Homo sapiens
  MAP TO Z98044.10; EXPRESSED IN PLACENTA, SIGNAL = 1.4; EXPRESSED IN HELA, SIGNAL = 1.6; EXPRESSED IN HBL100, SIGNAL = 1.8; EXPRESSED IN HEART, SIGNAL = 1.3; EXPRESSED IN BONE MARROW, SIGNAL = 1.3; EXPRESSED IN LUNG, SIGNAL = 0.96; EXPRESSED IN BRAIN, SIGNAL =   1; EXPRESSED IN ADULT LIVER, SIGNAL = 1.6; EXPRESSED IN BT474, SIGNAL = 1.5; EXPRESSED IN FETAL LIVER, SIGNAL = 1.2; SWISSPROT HIT: P03259, EVALUE 8.90e+00; NT HIT: AF152604.1, EVALUE 6.50e-02; EST_HUMAN HIT: N53039.1, EVALUE 2.00e-61
aagatgaagctgtctgcgacctccaagatgaacaggatgggactggtggtagtgaaatcagtgaggcagcctttgctgccatcaaaggaagtaacaaaggtaggagggaacgaagtcacagtgaactgcaaagaa

SEQ ID NO: 18401 - DNA, 244 bp, Homo sapiens
  MAP TO AL078621.19; EXPRESSED IN BT474, SIGNAL =  36; EXPRESSED IN ADULT LIVER, SIGNAL = 6.9; EXPRESSED IN FETAL LIVER, SIGNAL = 8.5; EXPRESSED IN HELA, SIGNAL =  37; EXPRESSED IN PLACENTA, SIGNAL =  23; EXPRESSED IN HBL100, SIGNAL =  32; EXPRESSED IN HEART, SIGNAL = 6.8; EXPRESSED IN BRAIN, SIGNAL =  11; EXPRESSED IN BONE MARROW, SIGNAL =  13; EXPRESSED IN LUNG, SIGNAL =  20; NT HIT: U43701.1, EVALUE 1.00e-87; EST_HUMAN HIT: AA595083.1, EVALUE 1.00e-130; SWISSPROT HIT: P29316, EVALUE 8.00e-34
ggtggtgaccttggccacatcactgtcatagagcttcttcacagcctgtctgatctggtgcttgttggctttaacatccacagtgaacacaagcgtgttgttttcttctatcttcttcacggccgactcagtggtcagcggaaacttgatgatagcatagtggccaagcttgtttctcctgggggtgctcttctgaggctatctgggctgcctccggagtcacagtgtcttgggccgcctgaag

SEQ ID NO: 18402 - DNA, 169 bp, Homo sapiens
  MAP TO AL117258.1; EXPRESSED IN LUNG, SIGNAL = 1.5; EXPRESSED IN BRAIN, SIGNAL = 1.2; EXPRESSED IN BT474, SIGNAL = 5.6; EXPRESSED IN FETAL LIVER, SIGNAL = 1.4; EXPRESSED IN ADULT LIVER, SIGNAL =   1; EXPRESSED IN PLACENTA, SIGNAL = 2.6; EXPRESSED IN HBL100, SIGNAL = 4.6; EXPRESSED IN HEART, SIGNAL =   4; EXPRESSED IN BONE MARROW, SIGNAL = 1.8; EXPRESSED IN HELA, SIGNAL = 3.1; EST_HUMAN HIT: AA306641.1, EVALUE 2.00e-90; SWISSPROT HIT: P77247, EVALUE 5.80e-01; NT HIT: gi11433916, EVALUE 1.00e-90
atcccaaagatgtagctggcactcaaagatagaaggtggtcggtctgccccagacacactaagctgctccagactatccagcagtggttgtaatttttctggcactgccttagctaccaggtcctctaggaaacgttcacgctggggacctgaccaattggcaaaccag

SEQ ID NO: 18403 - DNA, 474 bp, Homo sapiens
  MAP TO AC011506.1; EXPRESSED IN HELA, SIGNAL =  13; EXPRESSED IN LUNG, SIGNAL = 0.97; EXPRESSED IN BRAIN, SIGNAL = 1.7; EXPRESSED IN BT474, SIGNAL = 2.6; EXPRESSED IN ADULT LIVER, SIGNAL = 1.1; EXPRESSED IN PLACENTA, SIGNAL = 1.3; EXPRESSED IN HEART, SIGNAL = 1.3; EXPRESSED IN HBL100, SIGNAL = 3.3; EXPRESSED IN BONE MARROW, SIGNAL = 1.8; EXPRESSED IN FETAL LIVER, SIGNAL = 0.91; SWISSPROT HIT: P51523, EVALUE 1.00e-39; NT HIT: gi6677628, EVALUE 1.20e+00; EST_HUMAN HIT: AI768104.1, EVALUE 0.00e+00
acaatttcagccgactgaaggctcttggacacttggaacatttgtagggtttctctccggagtggatgcgctggtgctccttcaggctccccctgtaggtgaaaactttcttgcagtctttacattcgaagggcttctcccctgtgtggcttctcttgtgacacttcaagtaggacttctgggtgaactgcttctggcagacgtcacacgtgtagggcctctcgccagtgtgggttcgctggtgaaattggaggctaataagctgcatgaagcgcttcccacagagattacattgaaagagtctctcgcctgtgtgtgatctcttgtggatgactagcttggaattacacgtaaacctcttctcgcacacgtcacatgcaaagggcggcagtgccttggcttcttggccatccgggtgactgactgggctcgcagggcctggggaatgaattgaattcatcccagcttgtcccg

SEQ ID NO: 18404 - DNA, 527 bp, Homo sapiens
  MAP TO AF159056.1; EXPRESSED IN BONE MARROW, SIGNAL = 3.6; EXPRESSED IN LUNG, SIGNAL =   3; EXPRESSED IN FETAL LIVER, SIGNAL = 2.5; EXPRESSED IN ADULT LIVER, SIGNAL = 2.4; EXPRESSED IN PLACENTA, SIGNAL = 2.8; EXPRESSED IN HBL100, SIGNAL = 2.4; EXPRESSED IN HELA, SIGNAL = 3.2; EXPRESSED IN HEART, SIGNAL = 3.3; EXPRESSED IN BRAIN, SIGNAL = 2.6; EXPRESSED IN BT474, SIGNAL = 2.2; NT HIT: AF057177.1, EVALUE 0.00e+00; EST_HUMAN HIT: AI961098.1, EVALUE 0.00e+00; SWISSPROT HIT: P03979, EVALUE 5.00e-39
ccagtcagaaatcttccaacttggaagggagaacgaagtcagtcatcaggcagactgggtcatctgctgaaatcacttgtgatcttgctgaaggaagtaccggctacatccactggtacctacaccaggaggggaaggccccacagcgtcttctgtactatgactcctacacctccagcgttgtgttggaatcaggaatcagcccagggaagtatgatacttatggaagcacaaggaagaacttgagaatgatactgcgaaatcttattgaaaatgactctggagtctattactgtgccacctgggatgggcacagtgattcagatccgccctacaccacactgaaaacctgccttgtggctgcttctggtacacaagatagagctgccccctctcatttcctgccaccaaatttaccgtgtgctgaacaagagaaacattgcttaactcctgatctcccctgcaatattacactcccctggcagcagctgcaccctgttccccaccctcccccaggacttccctga

SEQ ID NO: 18405 - DNA, 292 bp, Homo sapiens
  MAP TO AP000459.2; EXPRESSED IN FETAL LIVER, SIGNAL =  20; EXPRESSED IN HBL100, SIGNAL = 1e+02; EXPRESSED IN HELA, SIGNAL =  60; EXPRESSED IN HEART, SIGNAL = 6.5; EXPRESSED IN BONE MARROW, SIGNAL =  25; EXPRESSED IN LUNG, SIGNAL =  14; EXPRESSED IN ADULT LIVER, SIGNAL = 4.2; EXPRESSED IN BT474, SIGNAL =  61; EXPRESSED IN PLACENTA, SIGNAL =  23; EXPRESSED IN BRAIN, SIGNAL =  50; EST_HUMAN HIT: BE735581.1, EVALUE 7.00e-82; SWISSPROT HIT: P02552, EVALUE 6.00e-41; NT HIT: AF081484.1, EVALUE 4.00e-82
atattgagtgtccaaactacactaaccttaaccatctcattggccatattgtgtcctctatcactgcttccctcagatttgatggagccctgaatattgatctgacagaattccagaccaatctagtgccatatacccacatccacttccctctggccatgtgtgcccctgtcatctctgctgaaaaagcctaccatgaacggttttctgtagtagagatcaccaatgcttattttgagccagccaaccagatggtaagatgtgatccacaccatggtaaatacataacttg

SEQ ID NO: 18406 - DNA, 229 bp, Homo sapiens
  MAP TO AC005082.2; EXPRESSED IN FETAL LIVER, SIGNAL = 7.1; EXPRESSED IN ADULT LIVER, SIGNAL = 2.1; EXPRESSED IN HBL100, SIGNAL =  11; EXPRESSED IN HELA, SIGNAL = 8.4; EXPRESSED IN HEART, SIGNAL = 5.5; EXPRESSED IN LUNG, SIGNAL = 5.1; EXPRESSED IN BT474, SIGNAL =  11; EXPRESSED IN PLACENTA, SIGNAL = 5.1; EXPRESSED IN BRAIN, SIGNAL = 4.3; EXPRESSED IN BONE MARROW, SIGNAL = 5.9; NT HIT: gi6679073, EVALUE 1.00e-114; EST_HUMAN HIT: AU133949.1, EVALUE 1.00e-113; SWISSPROT HIT: Q9Z9M1, EVALUE 1.40e+00
agaagtttcttttcatctttctgctcatcaggactaagtgaagcaaatgggttctcagacaatccaaagccttccttcctgttagttgaagctccagaatcaaaagaactgaaatatggcttttcttgatctctgctgcccccccatggtgtggatttggagaaactggatggctggatgacattggaatatctctggctagttgtattccatccacgtctattattac

SEQ ID NO: 18407 - DNA, 264 bp, Homo sapiens
  MAP TO AF146367.1; EXPRESSED IN HBL100, SIGNAL = 2.1; EXPRESSED IN BONE MARROW, SIGNAL = 1.7; EXPRESSED IN LUNG, SIGNAL = 1.2; EXPRESSED IN FETAL LIVER, SIGNAL = 1.4; EXPRESSED IN ADULT LIVER, SIGNAL = 1.2; EXPRESSED IN PLACENTA, SIGNAL = 2.1; EXPRESSED IN HEART, SIGNAL = 1.6; EXPRESSED IN HELA, SIGNAL = 2.2; EXPRESSED IN BRAIN, SIGNAL = 1.8; EXPRESSED IN BT474, SIGNAL = 3.3; SWISSPROT HIT: P17097, EVALUE 2.00e-47; EST_HUMAN HIT: AU142758.1, EVALUE 0.00e+00; NT HIT: M29580.1, EVALUE 0.00e+00
atccctggggtgcgtccttggtgaaggtcttgggaaccacagtctcctcattcaaacagttattttggaaggtaaagcctgtcactttcagcccgggactgcccagatgactgtctaaccagacctcagaatcagaaacgtctccaaagccaggattctgaggaaagtcctgtggggagattctgaccactgtcccataggattctgattttaggatgtccatgtcctcacaggcctgctcattttcagtcctaatcgtagaat

SEQ ID NO: 18408 - DNA, 159 bp, Homo sapiens
  MAP TO AP000354.1; EXPRESSED IN HBL100, SIGNAL = 2.1; EXPRESSED IN HELA, SIGNAL = 2.3; EXPRESSED IN BONE MARROW, SIGNAL = 2.9; EXPRESSED IN LUNG, SIGNAL = 2.5; EXPRESSED IN ADULT LIVER, SIGNAL = 2.3; EXPRESSED IN FETAL LIVER, SIGNAL = 2.4; EXPRESSED IN PLACENTA, SIGNAL = 3.6; EXPRESSED IN HEART, SIGNAL = 4.9; EXPRESSED IN BRAIN, SIGNAL = 3.6; EXPRESSED IN BT474, SIGNAL = 2.6; NT HIT: gi7657020, EVALUE 9.00e-85; EST_HUMAN HIT: AL043953.1, EVALUE 1.00e-65; SWISSPROT HIT: P11274, EVALUE 2.00e-17
gcctccaatgctcaccgatgccctctgcgaagctggggtagaactcgtcagtgaagaggggctcaggcagctcacggaagtacagcttcagcgtgcctgcgatggcgttcatgtccgtctcgctcatcatcaccgacatgtccttcttatctggaaaga

SEQ ID NO: 18409 - DNA, 397 bp, Homo sapiens
  MAP TO AC011019.1; EXPRESSED IN BONE MARROW, SIGNAL = 1.5; EXPRESSED IN BRAIN, SIGNAL = 1.4; EXPRESSED IN BT474, SIGNAL =  46; EXPRESSED IN FETAL LIVER, SIGNAL = 6.8; EXPRESSED IN HBL100, SIGNAL =  27; EXPRESSED IN HELA, SIGNAL =  39; EXPRESSED IN HEART, SIGNAL = 1.2; EXPRESSED IN LUNG, SIGNAL =  11; EXPRESSED IN ADULT LIVER, SIGNAL =  12; EXPRESSED IN PLACENTA, SIGNAL =  64; NT HIT: gi11434787, EVALUE 0.00e+00; SWISSPROT HIT: P05783, EVALUE 3.00e-60; EST_HUMAN HIT: BF568474.1, EVALUE 0.00e+00
attgacaatgcccatcttgctggtgatgactttagggtcaagtatgagacagagctggccatgcaccagtctgtagagagcaacatacatgggctccgcaaggtcactgatgacacaaatgtcactcagctgcagctgcagacagagatcgagcctctcaaggaggagctgctcttcatgaagaagcacgaagaggaagtaaaaggtctacaagcccagattgccagctctgggttgaccatggaggtagatgcccccaaatctcaggacctcgccaagatcatggcagacatccgggaccaatatgatgagctggctcggaagaaccgagaggacctggacaagtactggtctcagtagattgaggagagcaccacagtggtcaccacgcagtctg

SEQ ID NO: 18410 - DNA, 567 bp, Homo sapiens
  MAP TO AP000163.1; EXPRESSED IN PLACENTA, SIGNAL = 2.4; EXPRESSED IN HBL100, SIGNAL = 1.4; EXPRESSED IN HELA, SIGNAL = 1.7; EXPRESSED IN HEART, SIGNAL = 0.92; EXPRESSED IN BONE MARROW, SIGNAL = 2.1; EXPRESSED IN LUNG, SIGNAL = 1.8; EXPRESSED IN BRAIN, SIGNAL = 1.5; EXPRESSED IN ADULT LIVER, SIGNAL = 1.5; EXPRESSED IN BT474, SIGNAL =   1; EXPRESSED IN FETAL LIVER, SIGNAL = 0.95; SWISSPROT HIT: P11308, EVALUE 9.00e-99; EST_HUMAN HIT: R87572.1, EVALUE 0.00e+00; NT HIT: M17254.1, EVALUE 0.00e+00
ttagtagtaagtgcccagatgagaaggcatatggctggtggggagcctagtgttggggtatatacccccagttggtgaattccagtatgggtttggggcagcaaaaaaactggaagatgtcacggggagggctggagggtggggcgccacaaagttcatcttctgtgggtgggcgtgataggagcccatgtacgggaggtctgaggggtacttgtacagagatgactccggggggtggggctggagggcctgggcgatcccgtggaagtcgaacttgtaggcgtagcgcttcccatggaccttggtcatgatgttcttgtcatagtagtaacggagggcgcggctgagcttatcgtagttcatgttgggtttgctcttccgctctccccagcgccgggccacctcgtcgggatccgtcatcttgaactccccgttggtgccttcccaggtgatgcagctggagttggagctgtccgacaggagctccaggaggaactgccaaagctggatctggccactgcctaatgaggtcaggagaggaaggaaaactccagtgagcacaggttc

SEQ ID NO: 18411 - DNA, 96 bp, Homo sapiens
  MAP TO AL109615.8; EXPRESSED IN HBL100, SIGNAL = 3.8; EXPRESSED IN PLACENTA, SIGNAL = 4.5; EXPRESSED IN HELA, SIGNAL = 4.3; EXPRESSED IN HEART, SIGNAL = 4.4; EXPRESSED IN BRAIN, SIGNAL = 3.4; EXPRESSED IN BONE MARROW, SIGNAL = 3.9; EXPRESSED IN LUNG, SIGNAL = 3.4; EXPRESSED IN ADULT LIVER, SIGNAL = 3.6; EXPRESSED IN BT474, SIGNAL = 3.4; EXPRESSED IN FETAL LIVER, SIGNAL = 3.8; EST_HUMAN HIT: BF591021.1, EVALUE 3.00e-47; NT HIT: gi6981141, EVALUE 1.70e-01; SWISSPROT HIT: Q13790, EVALUE 3.10e+00
tttcattgctgtagcctcagtgcccagagccgtgcctggcaacatagcggctgtctaggggtttccagggccaaggctgtgaagtctctaggcact

SEQ ID NO: 18412 - DNA, 119 bp, Homo sapiens
  MAP TO AP000513.1; EXPRESSED IN BT474, SIGNAL =   3; EXPRESSED IN ADULT LIVER, SIGNAL = 2.4; EXPRESSED IN FETAL LIVER, SIGNAL = 2.4; EXPRESSED IN HBL100, SIGNAL = 3.5; EXPRESSED IN HELA, SIGNAL = 2.8; EXPRESSED IN PLACENTA, SIGNAL = 2.8; EXPRESSED IN HEART, SIGNAL = 1.8; EXPRESSED IN BRAIN, SIGNAL = 2.2; EXPRESSED IN BONE MARROW, SIGNAL = 3.2; EXPRESSED IN LUNG, SIGNAL = 2.1; EST_HUMAN HIT: AI879140.1, EVALUE 8.00e-61; NT HIT: gi11419104, EVALUE 6.00e-61
gagtcctggagatcctaaccaactgacccggaaaggcaggaagaggaaaagtgtgacatggcctgaggaaggcaaactgagagaatatttctattttgaattggatgaaactgaacgag

SEQ ID NO: 18413 - DNA, 276 bp, Homo sapiens
  MAP TO AF165124.1; EXPRESSED IN BRAIN, SIGNAL = 3.2; EXPRESSED IN LUNG, SIGNAL = 1.2; EXPRESSED IN BT474, SIGNAL = 1.8; EXPRESSED IN HELA, SIGNAL = 1.6; EXPRESSED IN PLACENTA, SIGNAL = 3.2; EXPRESSED IN HBL100, SIGNAL = 1.3; EXPRESSED IN HEART, SIGNAL = 1.1; SWISSPROT HIT: P21548, EVALUE 8.00e-53; NT HIT: gi4557610, EVALUE 0.00e+00; EST_HUMAN HIT: AW949419.1, EVALUE 0.00e+00
tcacaggtagaggtaggagacccaatagaccagattaaacaggcagaaggcagtggggaagaagatccgagcataggagtccattttggcaatgcggatatgtatcctcccatgtctccaagctcctgttcgacaatcttcaaaacagcagaaaaaactggcacagtccttgccgtccagacactcatagccgtactcttcatctctctcttgaaggtgtgtagcattattcatttgaatggttgctgatcttgggcggatatcaatggtaggggc

SEQ ID NO: 18414 - DNA, 206 bp, Homo sapiens
  MAP TO AC004900.2; EXPRESSED IN ADULT LIVER, SIGNAL = 3.7; EXPRESSED IN BT474, SIGNAL = 4.1; EXPRESSED IN FETAL LIVER, SIGNAL = 4.4; EXPRESSED IN PLACENTA, SIGNAL = 7.1; EXPRESSED IN HBL100, SIGNAL = 3.1; EXPRESSED IN HELA, SIGNAL = 4.4; EXPRESSED IN HEART, SIGNAL = 5.9; EXPRESSED IN BRAIN, SIGNAL = 4.4; EXPRESSED IN BONE MARROW, SIGNAL = 3.1; EXPRESSED IN LUNG, SIGNAL = 2.5; SWISSPROT HIT: P16793, EVALUE 5.50e-01; NT HIT: AB007900.1, EVALUE 1.00e-112; EST_HUMAN HIT: AW408046.1, EVALUE 1.00e-112
gcagcgatttcattcctaaggtgtaagaaggcctcctcaacgggagcgacttggggagagaagggtacgtgctactgaagaggacgtcgttgggcagggcttggtccagaagtgacgccctggaggtgaaaaagtgctccctctggctattgtaaatgctctcgtccgacagtgttctgtgcaaggcccgccgtgaggtgggggtg

SEQ ID NO: 18415 - DNA, 387 bp, Homo sapiens
  MAP TO AP000353.1; EXPRESSED IN BONE MARROW, SIGNAL = 5.2; EXPRESSED IN LUNG, SIGNAL = 2.9; EXPRESSED IN BT474, SIGNAL =   5; EXPRESSED IN ADULT LIVER, SIGNAL = 3.7; EXPRESSED IN FETAL LIVER, SIGNAL = 3.7; EXPRESSED IN HELA, SIGNAL = 4.6; EXPRESSED IN PLACENTA, SIGNAL = 4.3; EXPRESSED IN HBL100, SIGNAL = 8.7; EXPRESSED IN HEART, SIGNAL =   3; EXPRESSED IN BRAIN, SIGNAL = 3.2; SWISSPROT HIT: P36269, EVALUE 1.00e-22; NT HIT: gi11417866, EVALUE 1.00e-117; EST_HUMAN HIT: H30132.1, EVALUE 0.00e+00
atgtccggcctggacacaggactcatggtggggccagacttcagctctgggcagagcagtgtcttagtagcctgcggcctccccactcttcctcaggtccgagacggcgtacacacaggccccctcctgggacacagcctggaccacgttcaggaagaagggcctctgggtctggttctggccacggtcttggagtcccctctgcacctcctggagaggagagaaagcaggttcacaggggagggcagctcagcccatctccaggagggagaggcctctgcaagaaatgagaaaaatgatcaaaaggcaagacggagaggaagagggcctgaagacacaggaagaggggaggaccagatgggagcatggaagagatccaaaggccca

SEQ ID NO: 18416 - DNA, 155 bp, Homo sapiens
  MAP TO AL096819.2; EXPRESSED IN BRAIN, SIGNAL = 1.2; EXPRESSED IN BONE MARROW, SIGNAL = 2.1; EXPRESSED IN LUNG, SIGNAL = 1.2; EXPRESSED IN BT474, SIGNAL = 2.1; EXPRESSED IN FETAL LIVER, SIGNAL = 1.5; EXPRESSED IN ADULT LIVER, SIGNAL = 1.5; EXPRESSED IN HELA, SIGNAL = 1.4; EXPRESSED IN PLACENTA, SIGNAL = 2.2; EXPRESSED IN HBL100, SIGNAL = 1.8; EXPRESSED IN HEART, SIGNAL = 1.8; EST_HUMAN HIT: AL046390.1, EVALUE 2.00e-82; SWISSPROT HIT: P37837, EVALUE 2.20e+00
tcatgcaggagatgattgaattgtcaagtcagcaacaaaaagaacagcagctgcctccacgagctgtacaaattgtttcccacccattttttggcagggtagtattgactgctggaccagctcagtttgggctggatctgtctaaacataaagag

SEQ ID NO: 18417 - DNA, 391 bp, Homo sapiens
  MAP TO AL021807.1; EXPRESSED IN ADULT LIVER, SIGNAL = 2.2; EXPRESSED IN PLACENTA, SIGNAL =  10; EXPRESSED IN HBL100, SIGNAL =  19; EXPRESSED IN HELA, SIGNAL = 5.5; EXPRESSED IN BONE MARROW, SIGNAL = 7.3; EXPRESSED IN BT474, SIGNAL =  11; EXPRESSED IN FETAL LIVER, SIGNAL = 6.6; EXPRESSED IN HEART, SIGNAL = 1.2; EXPRESSED IN BRAIN, SIGNAL = 1.3; EXPRESSED IN LUNG, SIGNAL = 3.1; SWISSPROT HIT: P06899, EVALUE 2.00e-45; NT HIT: gi11036645, EVALUE 0.00e+00; EST_HUMAN HIT: BF344622.1, EVALUE 0.00e+00
atgccggaaccagcgaagtccgctcccgcgcccaagaagggctcgaagaaagccgtgactaaggcgcagaagaaggacggcaagaagcgcaagcgcagccgcaaggagagctactccgtatacgtgtacaaggtgctgaagcaggtccaccccgacaccggcatctcctctaaggccatgggaatcatgaactccttcgtcaacgacatcttcgaacgcatcgcgggtgaggcttcccgcctggcgcattacaacaagcgctcgaccatcacctccagggagatccagacggccgtgcgcctgctgctgcccggggagttggccaagcacgccgtgtccgagggcaccaaggccgtcaccaagtacaccagcgctaagtaaacttgccaag

SEQ ID NO: 18418 - DNA, 133 bp, Homo sapiens
  MAP TO AC008072.2; EXPRESSED IN LUNG, SIGNAL = 5.1; EXPRESSED IN BRAIN, SIGNAL = 5.2; EXPRESSED IN BT474, SIGNAL = 4.2; EXPRESSED IN FETAL LIVER, SIGNAL = 5.6; EXPRESSED IN ADULT LIVER, SIGNAL = 9.1; EXPRESSED IN PLACENTA, SIGNAL =  17; EXPRESSED IN HEART, SIGNAL = 2.2; EXPRESSED IN HBL100, SIGNAL = 6.4; EXPRESSED IN BONE MARROW, SIGNAL =   5; EXPRESSED IN HELA, SIGNAL =  11; NT HIT: AF198490.1, EVALUE 1.00e-40; EST_HUMAN HIT: AA233352.1, EVALUE 2.00e-51; SWISSPROT HIT: P02790, EVALUE 6.80e+00
tcttgggctggtcggtctgaggaccaaggtcgtaggtggatctttctcttggaacaaagaacaggaggacaggggattgatctcccaagggtggtcccccgatccgagtcacagcaccaaatttcatgcgtgt

SEQ ID NO: 18419 - DNA, 175 bp, Homo sapiens
  MAP TO AP000511.1; EXPRESSED IN HELA, SIGNAL = 8.8; EXPRESSED IN PLACENTA, SIGNAL =  13; EXPRESSED IN HBL100, SIGNAL = 9.2; EXPRESSED IN HEART, SIGNAL = 9.2; EXPRESSED IN BONE MARROW, SIGNAL = 8.8; EXPRESSED IN LUNG, SIGNAL = 8.5; EXPRESSED IN BRAIN, SIGNAL = 8.1; EXPRESSED IN ADULT LIVER, SIGNAL = 6.9; EXPRESSED IN BT474, SIGNAL = 8.7; EXPRESSED IN FETAL LIVER, SIGNAL = 8.6; EST_HUMAN HIT: BE744806.1, EVALUE 1.00e-79; SWISSPROT HIT: Q08345, EVALUE 1.00e-24; NT HIT: X99033.1, EVALUE 4.00e-90
ctgccggccctggtcccggaagaactcccccgcgttctcgatgacctgctcgtcggtgagctgcccaaagggctgggccctacagagcatcagcacctcccacagggtcacaccaaaggcccacacgtcactcgcagtcgtgaacttcccctgggatgcagagaaggcagcaaaa

SEQ ID NO: 18420 - DNA, 368 bp, Homo sapiens
  MAP TO Z83840.7; EXPRESSED IN ADULT LIVER, SIGNAL = 9.5; EXPRESSED IN BT474, SIGNAL =  38; EXPRESSED IN FETAL LIVER, SIGNAL =  20; EXPRESSED IN PLACENTA, SIGNAL =  21; EXPRESSED IN HELA, SIGNAL =  18; EXPRESSED IN HBL100, SIGNAL =  65; EXPRESSED IN HEART, SIGNAL = 7.9; EXPRESSED IN LUNG, SIGNAL = 9.1; EXPRESSED IN BONE MARROW, SIGNAL =  28; EXPRESSED IN BRAIN, SIGNAL =  14; EST_HUMAN HIT: BE797445.1, EVALUE 0.00e+00; NT HIT: gi5031748, EVALUE 0.00e+00; SWISSPROT HIT: P80272, EVALUE 2.00e-07
aaacttgataaaaaatagtatttcaaactgtacagtcaccagaagtacacagttaccaaaaatgtacacacttcacttggcatctccagcaccttcagctttctgtgcctggtctgtcttggcatctccattttctgcagggttattcccttccttgccagcatccacttttccctttttccctttgggtaccttctcttctttgcaggggcctttttaggcttgggctctggctttggaggagcagattttgcagacaaccttgtggatcttctctgtggttcgtccttcaccttggctttatctcctttagcatcaccttcagcctttgtcttgggcatggtggcagcagcgacggcagcgggatg

SEQ ID NO: 18421 - DNA, 289 bp, Homo sapiens
  MAP TO AP000508.1; EXPRESSED IN HELA, SIGNAL =   2; EXPRESSED IN LUNG, SIGNAL =   1; EXPRESSED IN BRAIN, SIGNAL = 1.1; EXPRESSED IN BT474, SIGNAL = 1.6; EXPRESSED IN ADULT LIVER, SIGNAL = 0.96; EXPRESSED IN PLACENTA, SIGNAL = 2.2; EXPRESSED IN HEART, SIGNAL = 0.98; EXPRESSED IN HBL100, SIGNAL = 1.9; EXPRESSED IN BONE MARROW, SIGNAL = 1.2; EXPRESSED IN FETAL LIVER, SIGNAL = 1.3; NT HIT: gi4827053, EVALUE 1.00e-127; EST_HUMAN HIT: AA769858.1, EVALUE 1.00e-127; SWISSPROT HIT: P40818, EVALUE 2.00e-43
atacatgaaggcctcaagtgtcctagactttttgtgacgggtgaggcactgtactgtagatttgaattgaccctgaaaaagtgcaacaataatagactcatagagccgcttgtgtttctgccaggcatgttctgcagctttaaagtcattgagatgatcattattttcttctttatatgtcttccgattatcagttttatttagatcttcacggagaccatccattaggaacagaaaaaattcttgtgaatcttgactgtatcctgcaaactggtaattgatcttccca

SEQ ID NO: 18422 - DNA, 166 bp, Homo sapiens
  MAP TO AL121755.1; EXPRESSED IN HELA, SIGNAL = 1.8; EXPRESSED IN BONE MARROW, SIGNAL =   2; EXPRESSED IN LUNG, SIGNAL = 1.3; EXPRESSED IN BRAIN, SIGNAL = 1.8; EXPRESSED IN BT474, SIGNAL = 1.4; EXPRESSED IN PLACENTA, SIGNAL = 2.7; EXPRESSED IN HEART, SIGNAL = 2.3; EXPRESSED IN HBL100, SIGNAL = 1.8; EXPRESSED IN ADULT LIVER, SIGNAL = 3.1; EXPRESSED IN FETAL LIVER, SIGNAL = 1.6; NT HIT: AF223391.1, EVALUE 6.00e-49; SWISSPROT HIT: P08547, EVALUE 9.00e-17; EST_HUMAN HIT: AW997709.1, EVALUE 7.00e-56
ccgttgctctatcccaggggttttgataggttgtgtcactattgtcattcagtctgaagaattttttaatttccatcttgattttgtttttgacccagtgatcattcaggagcagattatttaatttccatatattcgcatggttttgaaggttccttttggagtt

SEQ ID NO: 18423 - DNA, 222 bp, Homo sapiens
  MAP TO AC007378.2; EXPRESSED IN FETAL LIVER, SIGNAL = 1.1; EXPRESSED IN ADULT LIVER, SIGNAL = 1.6; EXPRESSED IN PLACENTA, SIGNAL =  19; EXPRESSED IN HELA, SIGNAL = 3.8; EXPRESSED IN HBL100, SIGNAL = 3.5; EXPRESSED IN HEART, SIGNAL = 1.3; EXPRESSED IN LUNG, SIGNAL = 2.8; EXPRESSED IN BONE MARROW, SIGNAL =   1; EXPRESSED IN BRAIN, SIGNAL = 1.3; NT HIT: gi11430555, EVALUE 1.00e-122; EST_HUMAN HIT: T98917.1, EVALUE 1.00e-121; SWISSPROT HIT: P35440, EVALUE 1.00e-10
atcaaccttttcggccttccttgtcccgcaataacagcgtacctaattactgcaaaaatgatgaaggggatatattcctggcagctgagtcctggaagcctgacgtttgtaccagctgcatctgcattgatagcgtaattagctgtttctctgagtcctgcccttctgtatcctgtgaaagacctgtcttgagaaaaggccagtgttgtccctactgcatag

SEQ ID NO: 18424 - DNA, 157 bp, Homo sapiens
  MAP TO AP000365.1; EXPRESSED IN HEART, SIGNAL = 2.2; EXPRESSED IN LUNG, SIGNAL = 4.2; EXPRESSED IN BRAIN, SIGNAL = 4.3; EXPRESSED IN BT474, SIGNAL = 2.1; EXPRESSED IN FETAL LIVER, SIGNAL = 2.6; EXPRESSED IN ADULT LIVER, SIGNAL =   6; EXPRESSED IN PLACENTA, SIGNAL = 7.1; EXPRESSED IN HBL100, SIGNAL = 3.4; EXPRESSED IN BONE MARROW, SIGNAL = 3.4; EXPRESSED IN HELA, SIGNAL = 7.1; NT HIT: AF109907.1, EVALUE 6.00e-52; EST_HUMAN HIT: AW812488.1, EVALUE 4.00e-47
agtcccaatacttcctcagcctccactcctccaccctataatccttctatcacctcccctcctcacacctggtccggcttacagtttagttccgcgactagcgcttccccacctgcccaacaatttcctcttagagaagtggctggagctgaaggca

SEQ ID NO: 18425 - DNA, 89 bp, Homo sapiens
  MAP TO AC009967.1; EXPRESSED IN FETAL LIVER, SIGNAL = 1.8; EXPRESSED IN ADULT LIVER, SIGNAL = 0.96; EXPRESSED IN HELA, SIGNAL = 4.5; EXPRESSED IN BONE MARROW, SIGNAL = 1.6; EXPRESSED IN LUNG, SIGNAL = 1.7; EXPRESSED IN BRAIN, SIGNAL = 2.1; EXPRESSED IN BT474, SIGNAL = 4.4; EXPRESSED IN PLACENTA, SIGNAL = 2.5; EXPRESSED IN HEART, SIGNAL = 1.5; EXPRESSED IN HBL100, SIGNAL = 4.4; EST_HUMAN HIT: BE748601.1, EVALUE 5.00e-43; NT HIT: X69804.1, EVALUE 3.00e-43; SWISSPROT HIT: Q04504, EVALUE 4.00e-10
ctactggtctccagcaccattttctgttttctgttgtttggatgcaggttcttctttgtctgtttcttctcttgctcttttcacaggtc

SEQ ID NO: 18426 - DNA, 110 bp, Homo sapiens
  MAP TO AC007298.17; EXPRESSED IN LUNG, SIGNAL = 2.4; EXPRESSED IN BRAIN, SIGNAL = 2.7; EXPRESSED IN FETAL LIVER, SIGNAL = 3.2; EXPRESSED IN ADULT LIVER, SIGNAL =   2; EXPRESSED IN PLACENTA, SIGNAL = 4.8; EXPRESSED IN HEART, SIGNAL = 2.2; EXPRESSED IN HELA, SIGNAL = 2.1; EXPRESSED IN BONE MARROW, SIGNAL = 2.6; EXPRESSED IN BT474, SIGNAL = 3.4; EXPRESSED IN HBL100, SIGNAL = 2.5; NT HIT: gi7706340, EVALUE 1.00e-24; EST_HUMAN HIT: H24217.1, EVALUE 2.00e-24; SWISSPROT HIT: P38191, EVALUE 1.80e+00
tttaagatctggtcatgctcactggcagccacagggttcaagatgtgagctgcaaaagttgcaatagcaaaccggggtggatttatgaatttgccactggagatagccat

SEQ ID NO: 18427 - DNA, 327 bp, Homo sapiens
  MAP TO AC007425.16; EXPRESSED IN HBL100, SIGNAL =   1; EXPRESSED IN HEART, SIGNAL = 1.8; EXPRESSED IN BONE MARROW, SIGNAL = 1.6; EST_HUMAN HIT: AV730015.1, EVALUE 7.00e-33; NT HIT: AB032158.1, EVALUE 1.30e-02; SWISSPROT HIT: Q99680, EVALUE 2.80e+00
attcagggggcacatgtgcaaagttgtttgccatctcaaccacagctgtgttgatttttgcaacctcctcaaccttggcaaatcctttgacgtcatagataaatctctcgagtgtcttcttgcagatgccatttatatactccttggtgacatcaccccaagcctaagcaaggttcttagtgtacttatagatgttgtaattcttccagaacttatcagtatcttctcagtgtcttcctcagttgcactgatgggtatattgtgtaatggtgaggtttgggcctccattgtatccgtaacccaaatagtgaacattgtacccaacag

SEQ ID NO: 18428 - DNA, 335 bp, Homo sapiens
  MAP TO AC006511.5; EXPRESSED IN BONE MARROW, SIGNAL = 5.4; EXPRESSED IN BRAIN, SIGNAL = 3.5; EXPRESSED IN FETAL LIVER, SIGNAL = 4.4; EXPRESSED IN ADULT LIVER, SIGNAL = 4.6; EXPRESSED IN HBL100, SIGNAL = 5.2; EXPRESSED IN HELA, SIGNAL = 5.6; EXPRESSED IN HEART, SIGNAL = 4.5; EXPRESSED IN LUNG, SIGNAL = 4.5; EXPRESSED IN BT474, SIGNAL = 4.8; EXPRESSED IN PLACENTA, SIGNAL = 6.1; NT HIT: gi8923841, EVALUE 0.00e+00; SWISSPROT HIT: P22357, EVALUE 4.30e-01
atgggagcctggccttgtgcctgtggctgtggaggtggtggctgctgggcagggtgggagtggggatggtgctgatgagggtggtagcctccatgctgcagcgggggtggatgcatggccattacagggggaggcccatagccttccgccccagcttgctttccccctggtggggtacaaccatctgtgcttggggtgtgcagtggaggagcaccccctacagctgaggggccctgggcaggtgcctgctgctgctgtggctgggactgctggggaggtggctgtggcggctgctgctgctgctgctgctgttgaggtggcggtggctgctgctg

SEQ ID NO: 18429 - DNA, 88 bp, Homo sapiens
  MAP TO AB020860.1; EXPRESSED IN BONE MARROW, SIGNAL = 2.1; EXPRESSED IN LUNG, SIGNAL =   1; EXPRESSED IN BRAIN, SIGNAL = 1.1; EXPRESSED IN FETAL LIVER, SIGNAL = 1.9; EXPRESSED IN ADULT LIVER, SIGNAL = 0.95; EXPRESSED IN PLACENTA, SIGNAL = 1.2; EXPRESSED IN HEART, SIGNAL = 1.5; EXPRESSED IN HELA, SIGNAL = 1.1; EXPRESSED IN HBL100, SIGNAL = 1.1; EXPRESSED IN BT474, SIGNAL = 0.95; EST_HUMAN HIT: AA806969.1, EVALUE 4.00e-40; NT HIT: gi11423219, EVALUE 1.00e-42
gtgatggctgctcctttccagcttgccttgttaaccaggatcctgaacaagcatctactcctgcagggctgaattccacagctaaaaa

SEQ ID NO: 18430 - DNA, 220 bp, Homo sapiens
  MAP TO AC006977.3; EXPRESSED IN BT474, SIGNAL = 3.3; EXPRESSED IN HBL100, SIGNAL = 3.2; EXPRESSED IN BONE MARROW, SIGNAL = 4.6; EXPRESSED IN LUNG, SIGNAL = 4.2; EXPRESSED IN FETAL LIVER, SIGNAL = 4.7; EXPRESSED IN ADULT LIVER, SIGNAL = 5.3; EXPRESSED IN PLACENTA, SIGNAL = 7.8; EXPRESSED IN HEART, SIGNAL = 4.5; EXPRESSED IN HELA, SIGNAL = 4.5; EXPRESSED IN BRAIN, SIGNAL = 3.5; NT HIT: U48724.1, EVALUE 1.00e-106; SWISSPROT HIT: P00533, EVALUE 3.00e-22; EST_HUMAN HIT: AU140518.1, EVALUE 3.00e-71
ccgcagttccattctcccgcagaaatcctgcatggcgccgtgcggttcagcaacaaccctgccctgtgcaacgtggagagcatccagtggcgggacatagtcagcagtgactttctcagcaacatgtcgatggacttccagaaccacctgggcagctgtaagtgtcgcatacacactatctctgcctccagctcctatgggggacagctctacagcactg

SEQ ID NO: 18431 - DNA, 217 bp, Homo sapiens
  MAP TO AC007568.1; EXPRESSED IN ADULT LIVER, SIGNAL = 1.9; EXPRESSED IN BT474, SIGNAL = 1.6; EXPRESSED IN FETAL LIVER, SIGNAL = 1.9; EXPRESSED IN PLACENTA, SIGNAL = 2.4; EXPRESSED IN HBL100, SIGNAL = 1.7; EXPRESSED IN HELA, SIGNAL = 2.1; EXPRESSED IN HEART, SIGNAL = 2.4; EXPRESSED IN BRAIN, SIGNAL =   2; EXPRESSED IN BONE MARROW, SIGNAL = 2.7; EXPRESSED IN LUNG, SIGNAL =   2; EST_HUMAN HIT: BE893604.1, EVALUE 3.00e-03; NT HIT: AF053768.1, EVALUE 1.00e-69; SWISSPROT HIT: Q03133, EVALUE 6.20e+00
cttcttttgtctgctctcagcagcagccagctgtgcggacatcctttcttgcattttcttgcagtgggccatgactgcttcaaggatggagagggggttggtacaaactggcttcttctctttgtcaccagcacctgcttcatagtctctctggagtgccaggaacgggtcatttagattaaatctcccataccgttcctggataaatacctccttc

SEQ ID NO: 18432 - DNA, 94 bp, Homo sapiens
  MAP TO AC011457.1; EXPRESSED IN BRAIN, SIGNAL = 6.9; EXPRESSED IN BONE MARROW, SIGNAL = 7.9; EXPRESSED IN LUNG, SIGNAL = 2.5; EXPRESSED IN BT474, SIGNAL = 8.2; EXPRESSED IN FETAL LIVER, SIGNAL =   4; EXPRESSED IN ADULT LIVER, SIGNAL = 2.7; EXPRESSED IN HELA, SIGNAL = 8.2; EXPRESSED IN PLACENTA, SIGNAL =   3; EXPRESSED IN HBL100, SIGNAL =   8; EXPRESSED IN HEART, SIGNAL = 3.6; NT HIT: gi11545814, EVALUE 8.00e-44; EST_HUMAN HIT: AW770544.1, EVALUE 4.00e-46; SWISSPROT HIT: P52738, EVALUE 2.00e-07
tgtcgaatcagggatgaactccgactatatgccttcccacatttactacattcatagggtttctctgaagaatgacttctctgatgtcgaataa

SEQ ID NO: 18433 - DNA, 244 bp, Homo sapiens
  MAP TO AC009493.1; EXPRESSED IN PLACENTA, SIGNAL =   2; EXPRESSED IN HEART, SIGNAL =   1; EXPRESSED IN BONE MARROW, SIGNAL = 0.96; EXPRESSED IN LUNG, SIGNAL = 1.3; EXPRESSED IN FETAL LIVER, SIGNAL = 0.92; NT HIT: M75980.1, EVALUE 0.00e+00; EST_HUMAN HIT: AA815465.1, EVALUE 1.50e-01; SWISSPROT HIT: P14210, EVALUE 1.00e-24
agacttgaaagattatgaagcttggcttggaattcatgatgtccacggaagaggagatgagaaatgcaaacaggttctcaatgtttcccagctggtatatggccctgaaggatcagatctggttttaatgaagcttgccaggttagttactttagaagattttgtatttttcacctggacaagaattgttggagcattttcttcagctgtgtggcagttcgttctctctcatacagatgcatta

SEQ ID NO: 18434 - DNA, 153 bp, Homo sapiens
  MAP TO AC009507.1; EXPRESSED IN ADULT LIVER, SIGNAL = 3.3; EXPRESSED IN BT474, SIGNAL =   1; EXPRESSED IN FETAL LIVER, SIGNAL = 1.6; EXPRESSED IN PLACENTA, SIGNAL = 4.1; EXPRESSED IN HBL100, SIGNAL = 1.7; EXPRESSED IN HELA, SIGNAL = 2.9; EXPRESSED IN HEART, SIGNAL = 3.4; EXPRESSED IN BRAIN, SIGNAL = 1.6; EXPRESSED IN BONE MARROW, SIGNAL = 2.1; EXPRESSED IN LUNG, SIGNAL = 1.9; NT HIT: AL163284.2, EVALUE 1.00e-43; SWISSPROT HIT: P42797, EVALUE 5.10e+00; EST_HUMAN HIT: BF508546.1, EVALUE 2.00e-43
tcttttgtcttaaatgtaggaggagcccaaagtgtccaggtggcaatcttaacttccagtttaatggattcgttgttgtgtctcctggtggcagtgttcctccctctggaactaatacctctaggccagcagaatgcaatgttgcaggaacag

SEQ ID NO: 18435 - DNA, 93 bp, Homo sapiens
  MAP TO AF181898.1; EXPRESSED IN ADULT LIVER, SIGNAL = 1.2; EXPRESSED IN BT474, SIGNAL = 1.3; EXPRESSED IN FETAL LIVER, SIGNAL = 1.9; EXPRESSED IN PLACENTA, SIGNAL = 1.5; EXPRESSED IN HELA, SIGNAL = 1.3; EXPRESSED IN HBL100, SIGNAL = 1.4; EXPRESSED IN HEART, SIGNAL =   2; EXPRESSED IN LUNG, SIGNAL = 1.6; EXPRESSED IN BONE MARROW, SIGNAL = 1.8; EXPRESSED IN BRAIN, SIGNAL = 1.3; NT HIT: X75491.1, EVALUE 1.10e-02; SWISSPROT HIT: Q01538, EVALUE 5.40e+00
gttgctatacacatctgtgtgcgggttgatgtgtggatgtaagttttgagcttctttgggtgaatacctgggggcgtgattgctggactgcat

SEQ ID NO: 18436 - DNA, 267 bp, Homo sapiens
  MAP TO AC010133.1; EXPRESSED IN LUNG, SIGNAL = 0.93; EXPRESSED IN BRAIN, SIGNAL = 1.1; EXPRESSED IN ADULT LIVER, SIGNAL = 1.2; EXPRESSED IN PLACENTA, SIGNAL = 1.1; EXPRESSED IN HBL100, SIGNAL = 1.1; EXPRESSED IN HELA, SIGNAL = 2.5; EXPRESSED IN BONE MARROW, SIGNAL = 1.4; EXPRESSED IN BT474, SIGNAL = 1.4; EXPRESSED IN FETAL LIVER, SIGNAL = 1.2; EXPRESSED IN HEART, SIGNAL = 1.4; NT HIT: gi4826973, EVALUE 0.00e+00; EST_HUMAN HIT: AI220048.1, EVALUE 1.00e-45; SWISSPROT HIT: O35479, EVALUE 2.00e-11
ggacctctcatggtgcaccacctgcaagagggcctcggatgtcttatggtggaagcacctgccacgcatatagtaatacacgagatagatatggcagaagttgggagagttactcgagctgtggtgattttcattattgtgatcgtgagcatgtttgcagaaaagaccaaaggaatccgccttctctgggtagggtgctccctgatcctcgtgaagcatgtggtagctcaagttatgtggcatctatagtagatggtggggagagtc

SEQ ID NO: 18437 - DNA, 75 bp, Homo sapiens
  MAP TO AC009958.1; EXPRESSED IN HEART, SIGNAL = 2.3; EXPRESSED IN LUNG, SIGNAL =  18; EXPRESSED IN BRAIN, SIGNAL = 1.4; EXPRESSED IN FETAL LIVER, SIGNAL = 1.3; EXPRESSED IN ADULT LIVER, SIGNAL = 5.1; EXPRESSED IN PLACENTA, SIGNAL = 2.3; EXPRESSED IN HELA, SIGNAL = 1.7; EXPRESSED IN BONE MARROW, SIGNAL =  62; EXPRESSED IN BT474, SIGNAL = 1.4; EXPRESSED IN HBL100, SIGNAL = 1.5; EST_HUMAN HIT: AW407426.1, EVALUE 2.00e-25; SWISSPROT HIT: P01601, EVALUE 1.00e-05; NT HIT: X63392.1, EVALUE 5.00e-35
gtgccagatgtaacatccagatgacccagtctccatctgccatgtctgcatctgtaggagacagagtcaccatca

SEQ ID NO: 18438 - DNA, 116 bp, Homo sapiens
  MAP TO AF186995.1; EXPRESSED IN HBL100, SIGNAL = 8.3; EXPRESSED IN LUNG, SIGNAL = 9.8; EXPRESSED IN BRAIN, SIGNAL = 8.2; EXPRESSED IN FETAL LIVER, SIGNAL = 8.2; EXPRESSED IN ADULT LIVER, SIGNAL = 8.9; EXPRESSED IN PLACENTA, SIGNAL =  11; EXPRESSED IN HEART, SIGNAL = 9.9; EXPRESSED IN HELA, SIGNAL =  11; EXPRESSED IN BONE MARROW, SIGNAL =  11; EXPRESSED IN BT474, SIGNAL = 6.8; EST_HUMAN HIT: AW394127.1, EVALUE 5.00e-59; NT HIT: X02901.1, EVALUE 3.00e-59; SWISSPROT HIT: P00750, EVALUE 1.00e-17
tgactttggtgggcatcatcagctggggcctgggctgtggacagaaggatgtcccgggtgtgtacaccaaggttaccaactacctagactggattcgtgacaacatgcgaccgtga

SEQ ID NO: 18439 - DNA, 124 bp, Homo sapiens
  MAP TO AL031681.13; EXPRESSED IN BONE MARROW, SIGNAL = 1.7; EXPRESSED IN FETAL LIVER, SIGNAL = 1.5; EXPRESSED IN ADULT LIVER, SIGNAL = 1.4; EXPRESSED IN HBL100, SIGNAL = 1.5; EXPRESSED IN HELA, SIGNAL = 1.7; EXPRESSED IN HEART, SIGNAL = 1.7; EXPRESSED IN BRAIN, SIGNAL = 1.4; EXPRESSED IN LUNG, SIGNAL = 1.1; EXPRESSED IN BT474, SIGNAL = 1.4; EXPRESSED IN PLACENTA, SIGNAL = 1.5; EST_HUMAN HIT: AW445040.1, EVALUE 6.00e-64; SWISSPROT HIT: P04859, EVALUE 5.20e+00; NT HIT: U89358.1, EVALUE 5.00e-64
catggcctctggctccgactcctcctctgatgggctctggtattccctgcgcttcctcttcttcatgggtttgaggagctcagaagcgctggtagagcctgaggagttctccactatgactgac

SEQ ID NO: 18440 - DNA, 245 bp, Homo sapiens
  MAP TO AL080250.11; EXPRESSED IN BT474, SIGNAL = 2.3; EXPRESSED IN HBL100, SIGNAL = 5.8; EXPRESSED IN BONE MARROW, SIGNAL = 1.7; EXPRESSED IN LUNG, SIGNAL = 2.7; EXPRESSED IN ADULT LIVER, SIGNAL = 2.1; EXPRESSED IN FETAL LIVER, SIGNAL = 1.8; EXPRESSED IN PLACENTA, SIGNAL = 1.6; EXPRESSED IN HEART, SIGNAL =   2; EXPRESSED IN HELA, SIGNAL = 2.5; EXPRESSED IN BRAIN, SIGNAL = 1.3; SWISSPROT HIT: Q99715, EVALUE 6.00e-38; NT HIT: gi11418424, EVALUE 1.00e-122
cagcaagaagttcatccctttggtagtactgatttaagttaaattcagtcctggtatcagagctgtattgaacaactccaactcttgtcttctcttccccaatgtcaaaagcagacacaagagcagcaatgaagtctaaaatgtacttgaaattatttcttcccacactccaagagccatccacgaggaaaaccaaatcagtccaggcactgacagagcattctgaaatacatttgatatctttt

SEQ ID NO: 18441 - DNA, 511 bp, Homo sapiens
  MAP TO AL096774.7; EXPRESSED IN BONE MARROW, SIGNAL =  20; EXPRESSED IN LUNG, SIGNAL = 9.7; EXPRESSED IN BT474, SIGNAL =   7; EXPRESSED IN ADULT LIVER, SIGNAL = 4.4; EXPRESSED IN FETAL LIVER, SIGNAL = 3.8; EXPRESSED IN HBL100, SIGNAL = 7.6; EXPRESSED IN HELA, SIGNAL = 5.9; EXPRESSED IN PLACENTA, SIGNAL = 6.6; EXPRESSED IN HEART, SIGNAL = 2.6; EXPRESSED IN BRAIN, SIGNAL = 4.1; NT HIT: gi11386182, EVALUE 0.00e+00; EST_HUMAN HIT: AW499926.1, EVALUE 0.00e+00; SWISSPROT HIT: Q92558, EVALUE 6.20e-01
acggatggctgaaagcaggtcgctacgggcatcgctcacggcaggcaaggaggacttgggcttggtggtatcagaaagcggtggtggtatagcaggctggccatctgcaccagtgaaagggggaggagggggccccggaggaggaggaggagggggaggaggaggtgctcctcctgttggctgggacaagggaggtggtggcagagttgggtagtcagctgctggtggtggaggaggaggtggaggggcagcaaaatcagggtgaggtgggaaagatgggggtgagggtggtggaggcgtccctggagacccaaatcctacaggcggtggtggaggtgggatgcctatcattggaggcggaggtggcggaggggcaggtggtggagcaaacccgggtttagggcctggtggagagcctagaggaggagctggtggtggatggcttgggctgaccacactggatcttttgggtccagccaaaccagatcctctttggttgtccactgggtaa

SEQ ID NO: 18442 - DNA, 208 bp, Homo sapiens
  MAP TO AL035542.7; EXPRESSED IN PLACENTA, SIGNAL = 1.6; EXPRESSED IN BRAIN, SIGNAL = 2.2; EXPRESSED IN BT474, SIGNAL = 1.9; EXPRESSED IN FETAL LIVER, SIGNAL = 1.4; EXPRESSED IN ADULT LIVER, SIGNAL = 1.6; EXPRESSED IN HBL100, SIGNAL = 1.4; EXPRESSED IN HELA, SIGNAL = 1.5; EXPRESSED IN HEART, SIGNAL = 2.7; EXPRESSED IN LUNG, SIGNAL = 1.1; EXPRESSED IN BONE MARROW, SIGNAL = 1.4; EST_HUMAN HIT: AA299832.1, EVALUE 5.00e-01; SWISSPROT HIT: P35410, EVALUE 4.00e-39; NT HIT: S78653.1, EVALUE 2.00e-92
acttatcatggagtcgtgttttttatccctgatttcctggccatattgtctcccttctcctttgaggtgtgtctctgtctcctggtggccatcagcacagagcggtgtgtgtgtgtcctcttccccatctggtacagatgccaccgcccaaaatacacatctaatgttgtctgcaccctcatctggggcctgcctttttgcatcaaca

SEQ ID NO: 18443 - DNA, 277 bp, Homo sapiens
  MAP TO AL031733.3; EXPRESSED IN BRAIN, SIGNAL = 2.2; EXPRESSED IN BONE MARROW, SIGNAL = 2.6; EXPRESSED IN LUNG, SIGNAL = 1.6; EXPRESSED IN BT474, SIGNAL = 1.9; EXPRESSED IN ADULT LIVER, SIGNAL = 2.2; EXPRESSED IN FETAL LIVER, SIGNAL = 3.2; EXPRESSED IN HELA, SIGNAL = 2.2; EXPRESSED IN PLACENTA, SIGNAL = 2.6; EXPRESSED IN HBL100, SIGNAL = 1.8; EXPRESSED IN HEART, SIGNAL = 2.6; NT HIT: S94400.1, EVALUE 0.00e+00; EST_HUMAN HIT: AA354674.1, EVALUE 2.00e-93; SWISSPROT HIT: P20963, EVALUE 5.00e-04
aaccgaaagggggagtgcgaatttcttggccctgtcggcaggtgctttctcaaaggccccacagtcctccacttcctggggaggtagctgcagaataaaaccagcagagactccttttctcctaaccgtcccggccaccgctgcctcagcctctgcctcccagcctctttctgagggaaaggacaagatgaagtggaaggcgcttttcaccgcggccatcctgcaggcacagttgccgattacaggtagggccgacgtgtcgacggcagggaacttc

SEQ ID NO: 18444 - DNA, 384 bp, Homo sapiens
  MAP TO AL080312.4; EXPRESSED IN HEART, SIGNAL = 1.8; EXPRESSED IN BRAIN, SIGNAL = 1.7; EXPRESSED IN BONE MARROW, SIGNAL = 2.1; EXPRESSED IN LUNG, SIGNAL = 1.3; EXPRESSED IN BT474, SIGNAL = 1.5; EXPRESSED IN ADULT LIVER, SIGNAL = 1.7; EXPRESSED IN FETAL LIVER, SIGNAL = 1.8; EXPRESSED IN HELA, SIGNAL = 2.1; EXPRESSED IN PLACENTA, SIGNAL = 2.6; EXPRESSED IN HBL100, SIGNAL = 1.5; EST_HUMAN HIT: BE893165.1, EVALUE 1.40e+00; SWISSPROT HIT: P12659, EVALUE 1.20e+00; NT HIT: AF111170.3, EVALUE 2.00e-01
ctgctaaacaaggtaacgttatcattgtatccagggctgaacactccaagttctctagtaaaacaggactgctctcattgccattcagagagatgacttctttcttagcagtggatgtcagcttactccaggtaatgtcagtatttttaaaagcatgtagaagaaagatgccaaggataatagtgaagaatccattcagggtctcgatgatatctccagttttcatgccataccactcttggagtaagatggcagagcaagtcactaccatggatgtgaagaacgcaaaataaatgggagtcacaggagatgtattcacggtgtctggtgccttgagatagttaatctgtgtagtcaccaaaaacacaagtatagccagcaaaa

SEQ ID NO: 18445 - DNA, 233 bp, Homo sapiens
  MAP TO AL096702.3; EXPRESSED IN BT474, SIGNAL = 5.3; EXPRESSED IN FETAL LIVER, SIGNAL = 2.5; EXPRESSED IN HELA, SIGNAL = 3.3; EXPRESSED IN PLACENTA, SIGNAL = 3.7; EXPRESSED IN HBL100, SIGNAL = 3.3; EXPRESSED IN HEART, SIGNAL = 2.9; EXPRESSED IN BONE MARROW, SIGNAL = 3.1; EXPRESSED IN BRAIN, SIGNAL = 2.7; EXPRESSED IN LUNG, SIGNAL = 2.5; EXPRESSED IN ADULT LIVER, SIGNAL = 2.7; SWISSPROT HIT: Q9Z2K3, EVALUE 2.00e-05; EST_HUMAN HIT: BE870023.1, EVALUE 1.00e-128; NT HIT: AF254085.1, EVALUE 1.00e-128
cttctggatgtgtttgttcaagtaggacttagagcggaagaagctcccacattcagggcatgggtacttcttctccccatcagactccattttgtttttggggactgccatgtcgcaggagaaagagccattggcactctgcttctctggcgtcttcaggtcgctggcatctgagaggtcaccataggagtcagagctctcaatcggatcctgatgtgagcatttctggcctt

SEQ ID NO: 18446 - DNA, 271 bp, Homo sapiens
  MAP TO AL096818.2; EXPRESSED IN HELA, SIGNAL = 1.5; EXPRESSED IN LUNG, SIGNAL =   1; EXPRESSED IN BRAIN, SIGNAL =   1; EXPRESSED IN BT474, SIGNAL = 2.4; EXPRESSED IN FETAL LIVER, SIGNAL = 1.3; EXPRESSED IN ADULT LIVER, SIGNAL = 1.2; EXPRESSED IN PLACENTA, SIGNAL = 1.4; EXPRESSED IN HEART, SIGNAL = 1.2; EXPRESSED IN HBL100, SIGNAL = 2.4; EXPRESSED IN BONE MARROW, SIGNAL = 1.5; SWISSPROT HIT: Q27459, EVALUE 1.90e+00; NT HIT: AL445066.1, EVALUE 4.20e-02; EST_HUMAN HIT: T67911.1, EVALUE 4.30e-02
ggcagaggattctgggggaagcagggtggggctttcagtaccagagagtatcatggtttcttggggggcagaaacaaggaagatgtcaattgccaagaagaggttaaagactgtttttccacttttgacttttctaaggtcattgttggtggcaactctcactaccatgaccactgctgaagatcttgcatgtgatgctgccctggggaatgagttctttcttgaagccagccttgctaggttgacttatgtcaagaataggcattgtgct

SEQ ID NO: 18447 - DNA, 118 bp, Homo sapiens
  MAP TO AP000343.1; EXPRESSED IN HEART, SIGNAL = 1.3; EXPRESSED IN LUNG, SIGNAL = 1.4; EXPRESSED IN BRAIN, SIGNAL = 1.3; EXPRESSED IN ADULT LIVER, SIGNAL = 1.2; EXPRESSED IN PLACENTA, SIGNAL = 2.2; EXPRESSED IN HBL100, SIGNAL = 1.5; EXPRESSED IN HELA, SIGNAL = 1.4; EXPRESSED IN BONE MARROW, SIGNAL = 1.3; EXPRESSED IN BT474, SIGNAL = 1.2; EXPRESSED IN FETAL LIVER, SIGNAL = 1.2; EST_HUMAN HIT: BE397010.1, EVALUE 2.00e-60; SWISSPROT HIT: P11274, EVALUE 6.00e-08; NT HIT: gi11038638, EVALUE 2.00e-60
cttccagatggtggatgaactggaggcagtgcccaacatccccctggtgcccgatgaggagctggacgctttgaagatcaagatctcccagatcaagagtgacatccagagagagaag

SEQ ID NO: 18448 - DNA, 131 bp, Homo sapiens
  MAP TO AP000347.1; EXPRESSED IN HELA, SIGNAL = 3.9; EXPRESSED IN LUNG, SIGNAL = 2.8; EXPRESSED IN BRAIN, SIGNAL = 1.6; EXPRESSED IN BT474, SIGNAL = 2.7; EXPRESSED IN ADULT LIVER, SIGNAL = 2.6; EXPRESSED IN PLACENTA, SIGNAL = 5.7; EXPRESSED IN HEART, SIGNAL = 1.7; EXPRESSED IN HBL100, SIGNAL = 5.5; EXPRESSED IN BONE MARROW, SIGNAL = 3.9; EXPRESSED IN FETAL LIVER, SIGNAL = 2.4; NT HIT: gi4504222, EVALUE 1.00e-30; EST_HUMAN HIT: AI651992.1, EVALUE 6.00e-64; SWISSPROT HIT: P08236, EVALUE 2.00e-13
tcaccactgtctcgcttcacgccggtggtgacggtgacgtcatcgatgtaggtggggggtgtcgtgtatagaagcagagaccacagcagtcctgcgtagctgaagaagtcaaagtctgtgttctggacaaa

SEQ ID NO: 18449 - DNA, 281 bp, Homo sapiens
  MAP TO AP000350.1; EXPRESSED IN PLACENTA, SIGNAL = 1.7; EXPRESSED IN BONE MARROW, SIGNAL = 2.5; EXPRESSED IN FETAL LIVER, SIGNAL = 1.6; EXPRESSED IN ADULT LIVER, SIGNAL = 1.5; EXPRESSED IN HBL100, SIGNAL = 1.6; EXPRESSED IN HELA, SIGNAL = 1.5; EXPRESSED IN HEART, SIGNAL = 2.3; EXPRESSED IN BRAIN, SIGNAL = 1.6; EXPRESSED IN LUNG, SIGNAL = 1.3; EXPRESSED IN BT474, SIGNAL = 1.7; SWISSPROT HIT: P20135, EVALUE 3.00e-05; NT HIT: AF240786.1, EVALUE 1.00e-129; EST_HUMAN HIT: AI208550.1, EVALUE 9.00e-96
gggcgcatgggcctgaggctgtgggagaggacacgggtgaggctggtccccagactgaccacgtctttgtcttcgtctatccacagcccatggcagccaactataatgtcttcctcaacagctccaagctagctgagtggcgtatgcgggtggagctcaatatcagctctggcctctttagggaggcccatgatcgactaatgcagttggccgactgggacttttcaacactggattcaatggtcaaggagaatatttctgagttgctgaagaagagcagg

SEQ ID NO: 18450 - DNA, 139 bp, Homo sapiens
  MAP TO AB020862.1; EXPRESSED IN PLACENTA, SIGNAL =   1; EXPRESSED IN BRAIN, SIGNAL = 3.3; EXPRESSED IN BT474, SIGNAL = 1.9; EXPRESSED IN FETAL LIVER, SIGNAL = 1.7; EXPRESSED IN ADULT LIVER, SIGNAL = 1.7; EXPRESSED IN HEART, SIGNAL =   1; EXPRESSED IN HELA, SIGNAL = 1.7; EXPRESSED IN HBL100, SIGNAL = 2.2; EXPRESSED IN LUNG, SIGNAL = 0.89; EXPRESSED IN BONE MARROW, SIGNAL = 2.9
ccttcttcctcctccttctcctcctcttcctcctgattcttcccctcctcctcctccttctgatccttccatccctcgttttcccccttcctcctcttcctcccgcccctccactcctccttctcctcctccttcttat

SEQ ID NO: 18451 - DNA, 181 bp, Homo sapiens
  MAP TO AC005488.2; EXPRESSED IN BT474, SIGNAL = 5.9; EXPRESSED IN FETAL LIVER, SIGNAL = 1.6; EXPRESSED IN HELA, SIGNAL = 3.4; EXPRESSED IN PLACENTA, SIGNAL = 2.8; EXPRESSED IN HBL100, SIGNAL = 3.3; EXPRESSED IN HEART, SIGNAL = 0.98; EXPRESSED IN BONE MARROW, SIGNAL = 2.7; EXPRESSED IN BRAIN, SIGNAL = 2.7; EXPRESSED IN LUNG, SIGNAL = 2.6; EXPRESSED IN ADULT LIVER, SIGNAL = 4.4; NT HIT: AB017006.1, EVALUE 9.00e-98; SWISSPROT HIT: P54278, EVALUE 2.00e-27; EST_HUMAN HIT: AW390677.1, EVALUE 9.00e-98
tgtcaccatttctacctgccacgtatcggcgaaggttgggactcgactggtgtttgatcacgatgggaaaatcatccagaaaaccccctacccccaccccagagggaccacagtcagcgtgaagcagttattttctacgctacctgtgcgccataaggaatttcaaaggaatattaagaag

SEQ ID NO: 18452 - DNA, 126 bp, Homo sapiens
  MAP TO AC007898.1; EXPRESSED IN ADULT LIVER, SIGNAL = 1.7; EXPRESSED IN BT474, SIGNAL = 2.5; EXPRESSED IN FETAL LIVER, SIGNAL =   2; EXPRESSED IN PLACENTA, SIGNAL = 1.9; EXPRESSED IN HELA, SIGNAL = 1.4; EXPRESSED IN HBL100, SIGNAL =   2; EXPRESSED IN HEART, SIGNAL = 1.5; EXPRESSED IN BONE MARROW, SIGNAL = 2.2; EXPRESSED IN LUNG, SIGNAL = 1.1; EXPRESSED IN BRAIN, SIGNAL =   2; EST_HUMAN HIT: AW860020.1, EVALUE 2.80e-01; NT HIT: AF204973.1, EVALUE 4.40e+00; SWISSPROT HIT: O33949, EVALUE 1.80e+00
  unsure 11
  unsure 117
cctgtgccccnctccagaaaccgcacggccaggtggaatggggcacagacaagttcaagcccctggtccacacagagcaggtgcaggtaggatggggagagagagagcagcggccanggtgggacc

SEQ ID NO: 18453 - DNA, 133 bp, Homo sapiens
  MAP TO AC008000.7; EXPRESSED IN ADULT LIVER, SIGNAL = 4.1; EXPRESSED IN BT474, SIGNAL = 3.1; EXPRESSED IN FETAL LIVER, SIGNAL = 6.1; EXPRESSED IN HELA, SIGNAL = 5.2; EXPRESSED IN PLACENTA, SIGNAL = 4.5; EXPRESSED IN HBL100, SIGNAL = 3.6; EXPRESSED IN HEART, SIGNAL = 5.4; EXPRESSED IN BONE MARROW, SIGNAL = 5.1; EXPRESSED IN BRAIN, SIGNAL = 4.8; EXPRESSED IN LUNG, SIGNAL = 4.5; SWISSPROT HIT: Q9XT58, EVALUE 3.10e+00; EST_HUMAN HIT: BE698944.1, EVALUE 4.40e-01
agttccccactgccagctttgtcctccccaggggtactgtctttcagcaccaggaccacgtgggcagttctcactcccagcctaggttagtcaacctgctggggagagagggggcctgtagttatcaggttcc

SEQ ID NO: 18454 - DNA, 118 bp, Homo sapiens
  MAP TO AC008015.4; EXPRESSED IN HEART, SIGNAL =   3; EXPRESSED IN LUNG, SIGNAL = 2.5; EXPRESSED IN BRAIN, SIGNAL = 3.5; EXPRESSED IN ADULT LIVER, SIGNAL = 2.8; EXPRESSED IN PLACENTA, SIGNAL = 3.2; EXPRESSED IN HBL100, SIGNAL = 2.2; EXPRESSED IN HELA, SIGNAL = 3.8; EXPRESSED IN BONE MARROW, SIGNAL = 2.9; EXPRESSED IN BT474, SIGNAL = 2.3; EXPRESSED IN FETAL LIVER, SIGNAL = 3.3; EST_HUMAN HIT: AV651512.1, EVALUE 6.00e+00; SWISSPROT HIT: P12959, EVALUE 1.40e+00; NT HIT: D38642.1, EVALUE 1.00e+00
cgcagaactgcatggcaccccctttcccagacagaattgagcttctgctgagcctgaccctgttcgaggtgggggttggggccagcaaagggatgcaggaggggactctgctcgacat

SEQ ID NO: 18455 - DNA, 125 bp, Homo sapiens
  MAP TO AC007878.2; EXPRESSED IN FETAL LIVER, SIGNAL = 0.95; EXPRESSED IN ADULT LIVER, SIGNAL = 7.1; EXPRESSED IN HELA, SIGNAL = 1.1; EXPRESSED IN BRAIN, SIGNAL =   1; EXPRESSED IN BONE MARROW, SIGNAL = 1.3; EXPRESSED IN BT474, SIGNAL = 1.1; EXPRESSED IN PLACENTA, SIGNAL = 1.2; EXPRESSED IN HEART, SIGNAL = 1.1; EXPRESSED IN HBL100, SIGNAL =   1; EST_HUMAN HIT: BE145646.1, EVALUE 1.10e+00; NT HIT: U13841.1, EVALUE 1.10e+00
aggaatgcattcagatgtccaacctgatgacaccacacaagtaccaagaaggcaccaaaagatgtatcgtgcatatcatgagattttccatgcttcaggcttccaagcaggtcaacaaatgagag

SEQ ID NO: 18456 - DNA, 99 bp, Homo sapiens
  MAP TO AC006369.3; EXPRESSED IN FETAL LIVER, SIGNAL = 1.2; EXPRESSED IN ADULT LIVER, SIGNAL = 2.1; EXPRESSED IN HELA, SIGNAL = 1.5; EXPRESSED IN BRAIN, SIGNAL = 1.8; EXPRESSED IN LUNG, SIGNAL = 1.1; EXPRESSED IN BONE MARROW, SIGNAL =   2; EXPRESSED IN BT474, SIGNAL = 1.2; EXPRESSED IN PLACENTA, SIGNAL = 1.9; EXPRESSED IN HEART, SIGNAL = 1.2; EXPRESSED IN HBL100, SIGNAL = 1.7; NT HIT: AL163248.2, EVALUE 1.00e-20; EST_HUMAN HIT: AA970713.1, EVALUE 4.00e-21
tcagcatggctggggagccttcaggaaacttacaatcatggtagaaagcgaagagaaagcaagacaccttcttcacaaggtggcaagaaggagaagtgc

SEQ ID NO: 18457 - DNA, 135 bp, Homo sapiens
  MAP TO AC006967.2; EXPRESSED IN BONE MARROW, SIGNAL = 2.1; EXPRESSED IN FETAL LIVER, SIGNAL = 1.4; EXPRESSED IN HBL100, SIGNAL = 1.6; EXPRESSED IN HELA, SIGNAL = 1.9; EXPRESSED IN HEART, SIGNAL = 2.2; EXPRESSED IN BRAIN, SIGNAL = 1.8; EXPRESSED IN LUNG, SIGNAL = 1.2; EXPRESSED IN BT474, SIGNAL = 1.2; EXPRESSED IN ADULT LIVER, SIGNAL =   2; EXPRESSED IN PLACENTA, SIGNAL =   2; NT HIT: AE000764.1, EVALUE 6.50e-02; SWISSPROT HIT: P26185, EVALUE 1.10e+00; EST_HUMAN HIT: BE889914.1, EVALUE 4.50e-01
ggccctcccacaatctgcacgccccacccatcaccgacctgcatagaaccttcccccagaatagttcctgaacctgttgctcttcgtcctcacctctctagtctcagccctcatcagcacctgcctgagctttta

SEQ ID NO: 18458 - DNA, 75 bp, Homo sapiens
  MAP TO AC009401.1; EXPRESSED IN BONE MARROW, SIGNAL = 4.5; EXPRESSED IN HBL100, SIGNAL = 2.3; EXPRESSED IN HELA, SIGNAL = 3.1; EXPRESSED IN LUNG, SIGNAL = 2.4; EXPRESSED IN BRAIN, SIGNAL = 3.4; EXPRESSED IN BT474, SIGNAL = 2.1; EXPRESSED IN ADULT LIVER, SIGNAL = 4.7; EXPRESSED IN FETAL LIVER, SIGNAL =   2; EXPRESSED IN PLACENTA, SIGNAL = 3.6; EXPRESSED IN HEART, SIGNAL = 3.3; NT HIT: AL163283.2, EVALUE 9.00e-15; EST_HUMAN HIT: BF589937.1, EVALUE 8.00e-35
gtctccttcctgccacctagtgaagaagttgcctttcttccctttgccttccagcatgattgtaaagcttcctga

SEQ ID NO: 18459 - DNA, 144 bp, Homo sapiens
  MAP TO AC009411.1; EXPRESSED IN FETAL LIVER, SIGNAL = 1.4; EXPRESSED IN BT474, SIGNAL = 2.2; EXPRESSED IN HBL100, SIGNAL =   2; EXPRESSED IN PLACENTA, SIGNAL =   1; EXPRESSED IN HELA, SIGNAL = 1.4; EXPRESSED IN HEART, SIGNAL =   1; EXPRESSED IN BRAIN, SIGNAL =   1; EXPRESSED IN BONE MARROW, SIGNAL = 1.1; EST_HUMAN HIT: BF306144.1, EVALUE 4.80e-01; SWISSPROT HIT: P19901, EVALUE 3.00e+00
caggactgtttccatccctgctgcctcaagtttgatagttcaaccggggtgaagcaggccatgaaaaccagcagcctcattgtcactgctgggaagagggagagagcttacatgatttagagcattgttgattaaagttgtgat

SEQ ID NO: 18460 - DNA, 77 bp, Homo sapiens
  MAP TO AC009722.1; EXPRESSED IN ADULT LIVER, SIGNAL = 0.97; EXPRESSED IN FETAL LIVER, SIGNAL = 1.3; EXPRESSED IN PLACENTA, SIGNAL = 1.4; EXPRESSED IN HELA, SIGNAL = 1.2; EXPRESSED IN HEART, SIGNAL = 1.3; EXPRESSED IN BONE MARROW, SIGNAL = 1.3; EXPRESSED IN LUNG, SIGNAL = 0.91; EXPRESSED IN BRAIN, SIGNAL = 1.3; EST_HUMAN HIT: BF431612.1, EVALUE 2.30e-01
cttctgcactttcagcttctttctgtcaacgggctccatcctttttgcctctaaaactgctaaaggctctttcattc

SEQ ID NO: 18461 - DNA, 196 bp, Homo sapiens
  MAP TO AC009414.2; EXPRESSED IN PLACENTA, SIGNAL =  13; EXPRESSED IN HBL100, SIGNAL = 3.6; EXPRESSED IN HEART, SIGNAL =   1; EXPRESSED IN BRAIN, SIGNAL = 1.2; EXPRESSED IN BONE MARROW, SIGNAL = 1.1; EXPRESSED IN LUNG, SIGNAL = 1.8; EXPRESSED IN BT474, SIGNAL = 1.3; EXPRESSED IN ADULT LIVER, SIGNAL =   2; EXPRESSED IN FETAL LIVER, SIGNAL = 1.2; EXPRESSED IN HELA, SIGNAL = 2.4; EST_HUMAN HIT: BE152304.1, EVALUE 4.70e-01; SWISSPROT HIT: P25391, EVALUE 9.60e-01; NT HIT: gi10092638, EVALUE 4.00e-94
ttcaattctctttaaagctgaaaggcacatatcctgacttggaaactcaaagggattgctgcaggttcgaatggtgttacattcacatttcccattgattatattgcagccagcaataaggttttcattgcatggtttaaaaccaagcagttggtcatcagtccagttctcatctgtaaaacaattaacaaccaga

SEQ ID NO: 18462 - DNA, 112 bp, Homo sapiens
  MAP TO AC009430.1; EXPRESSED IN ADULT LIVER, SIGNAL = 2.4; EXPRESSED IN BT474, SIGNAL = 1.4; EXPRESSED IN FETAL LIVER, SIGNAL = 1.3; EXPRESSED IN HELA, SIGNAL = 1.5; EXPRESSED IN PLACENTA, SIGNAL = 2.1; EXPRESSED IN HBL100, SIGNAL = 1.8; EXPRESSED IN HEART, SIGNAL =   1; EXPRESSED IN BONE MARROW, SIGNAL = 1.9; EXPRESSED IN BRAIN, SIGNAL =  12; EXPRESSED IN LUNG, SIGNAL = 1.2; NT HIT: X87344.1, EVALUE 3.00e-03; EST_HUMAN HIT: BE734871.1, EVALUE 2.00e-08
ggccaggaaaaactctctgtgtgtggtagcctcgtgcaaggttcccagttttcctttctcttcagcccagcttctgtgtctttcctccatccactctcagtggcttctctct

SEQ ID NO: 18463 - DNA, 509 bp, Homo sapiens
  MAP TO AC009706.2; EXPRESSED IN LUNG, SIGNAL = 1.9; EXPRESSED IN ADULT LIVER, SIGNAL = 4.3; EXPRESSED IN BT474, SIGNAL = 1.4; EXPRESSED IN FETAL LIVER, SIGNAL = 1.5; EXPRESSED IN HELA, SIGNAL = 1.4; EXPRESSED IN PLACENTA, SIGNAL = 4.9; EXPRESSED IN HBL100, SIGNAL = 1.8; EXPRESSED IN HEART, SIGNAL = 2.1; EXPRESSED IN BONE MARROW, SIGNAL = 1.7; EXPRESSED IN BRAIN, SIGNAL = 1.7; NT HIT: AL163202.2, EVALUE 2.00e-70; EST_HUMAN HIT: BF508736.1, EVALUE 4.00e-57; SWISSPROT HIT: P30414, EVALUE 2.40e-02
ttatggaatcctatgtgagggacaaacactcagaacacagctggagtgttttgcaatgttatgtgagacacaaatattcagaccctcgtagcagtgttctggaatcctatgtgagggacaaacattcagaccccagcagcagtgttctggaatcctatgtgagggaaaaacattcaaaccctcgtagcagtgttggggaatcctatgtgagggaaaaactttcaaagagtcgtagcagtgttctggaatcctatgttacggacaaacgttcagactctcgttgcagtgttctggaattctatgtgagggacaaacactcagaatccagcagaagtgttctggaatccggtgtgatggacatacatgtagaccccagcagcagtgttctggaatcctatgtgagggacaatcattcagaaactcgtagcagtgttctggaattctgtttgagggacaaacgttcaaaccctcgtagcagtgttctggaaacctgtgtgagggacaaacat

SEQ ID NO: 18464 - DNA, 134 bp, Homo sapiens
  MAP TO AC010881.1; EXPRESSED IN BT474, SIGNAL = 2.2; EXPRESSED IN HEART, SIGNAL = 2.2; EXPRESSED IN LUNG, SIGNAL = 1.2; EXPRESSED IN BRAIN, SIGNAL = 2.2; EXPRESSED IN FETAL LIVER, SIGNAL = 2.7; EXPRESSED IN ADULT LIVER, SIGNAL =   2; EXPRESSED IN PLACENTA, SIGNAL = 2.7; EXPRESSED IN HELA, SIGNAL = 2.3; EXPRESSED IN HBL100, SIGNAL =   2; EXPRESSED IN BONE MARROW, SIGNAL = 2.4; NT HIT: gi9507150, EVALUE 5.00e-03; EST_HUMAN HIT: AI017136.1, EVALUE 3.00e-01; SWISSPROT HIT: Q60002, EVALUE 3.00e+00
taccacttgccagcttctcagaatagcagcagacattccatactggctctatgaaaactggcagatgctggggcctgctgagtgctggccgttggactctcttgctgtacagcctgctctgatgctagccccag

SEQ ID NO: 18465 - DNA, 243 bp, Homo sapiens
  MAP TO AC010889.1; EXPRESSED IN BONE MARROW, SIGNAL = 2.6; EXPRESSED IN FETAL LIVER, SIGNAL = 2.3; EXPRESSED IN HELA, SIGNAL = 2.9; EXPRESSED IN BRAIN, SIGNAL = 1.9; EXPRESSED IN LUNG, SIGNAL = 2.1; EXPRESSED IN BT474, SIGNAL = 2.8; EXPRESSED IN ADULT LIVER, SIGNAL = 2.1; EXPRESSED IN PLACENTA, SIGNAL = 3.3; EXPRESSED IN HEART, SIGNAL = 1.8; EXPRESSED IN HBL100, SIGNAL = 2.6; SWISSPROT HIT: P41229, EVALUE 2.00e-27; EST_HUMAN HIT: BE697077.1, EVALUE 6.00e-79; NT HIT: AF273841.1, EVALUE 0.00e+00
gccctcatatgcaacgatgtatatagacttgacgtgtcttctgtctacgtgagcaggggtgagccgaagacctggtatggtgtaccctccctggcagcagagcatttggaggaggtgatgaagatgctgacacctgagctgtttgatagccagcctgatctcctacaccagcttgtcactctcatgaatcccaacactttgatgtcccatggtgtgccagtaagtaccaaggatcaaaacaat

SEQ ID NO: 18466 - DNA, 194 bp, Homo sapiens
  MAP TO AC010104.1; EXPRESSED IN HEART, SIGNAL = 1.5; NT HIT: AP001514.1, EVALUE 1.20e-01; SWISSPROT HIT: P40467, EVALUE 4.30e-01; EST_HUMAN HIT: AW466904.1, EVALUE 4.60e-01
tcagctggtgtcactgtacatatgtttagagtcgttgctaaggtgaaaagcccagcagcccacacagggtttctggaaggctgggaagctgcgtggcggggtctgttcacattggggccccatccctccaatctgtgggaatctcctgttccaacttaaattgtctgcttccttttgtttgattgcctgattac

SEQ ID NO: 18467 - DNA, 219 bp, Homo sapiens
  MAP TO AC010130.2; EXPRESSED IN BT474, SIGNAL = 1.2; EXPRESSED IN HBL100, SIGNAL =   1; EXPRESSED IN HEART, SIGNAL = 0.87; EXPRESSED IN LUNG, SIGNAL = 1.2; EXPRESSED IN BRAIN, SIGNAL = 1.5; EXPRESSED IN FETAL LIVER, SIGNAL = 0.9; EXPRESSED IN PLACENTA, SIGNAL = 1.6; EXPRESSED IN BONE MARROW, SIGNAL = 1.1; SWISSPROT HIT: P36197, EVALUE 3.00e-11; EST_HUMAN HIT: BE830818.1, EVALUE 1.00e-101; NT HIT: gi7662183, EVALUE 1.00e-101
aagaatgcaaattgcacatcagattttgaggaatactttgccaaaagaaaactggaggaacgcgatggtcatgcagtcagcatcgaggagtaccttcagcgcagtgacacagccattatttacccagaagcccctgaggagctgtctcgccttggcacgccagaggccaatgggcaagaagaaaatggtgaggctgtaaatcatttttagccactgcac

SEQ ID NO: 18468 - DNA, 174 bp, Homo sapiens
  MAP TO AC010798.1; EXPRESSED IN BT474, SIGNAL = 1.4; EXPRESSED IN HBL100, SIGNAL = 1.2; EXPRESSED IN LUNG, SIGNAL = 1.4; EXPRESSED IN BRAIN, SIGNAL = 1.4; EXPRESSED IN ADULT LIVER, SIGNAL = 1.2; EXPRESSED IN FETAL LIVER, SIGNAL =   1; EXPRESSED IN PLACENTA, SIGNAL = 1.8; EXPRESSED IN HEART, SIGNAL = 1.5; EXPRESSED IN HELA, SIGNAL = 1.5; EXPRESSED IN BONE MARROW, SIGNAL = 1.6; NT HIT: gi11433106, EVALUE 2.60e-02; EST_HUMAN HIT: AW961278.1, EVALUE 2.60e-02; SWISSPROT HIT: O79436, EVALUE 3.80e+00
ttatacatctccaaaatccatcttctatcatccctgcccttatggatcagattctcaacatctctttcttgacctactgcaatagtctcctcacaaatacctctgtctgtctggctttccttgttctccttgttctctacagtggcattagggttgtttatacaaaatgtaaaa

SEQ ID NO: 18469 - DNA, 262 bp, Homo sapiens
  MAP TO AC010087.2; EXPRESSED IN PLACENTA, SIGNAL = 1.5; EXPRESSED IN BONE MARROW, SIGNAL = 1.6; EXPRESSED IN FETAL LIVER, SIGNAL = 1.4; EXPRESSED IN ADULT LIVER, SIGNAL = 1.4; EXPRESSED IN HEART, SIGNAL = 1.4; EXPRESSED IN HELA, SIGNAL = 1.4; EXPRESSED IN HBL100, SIGNAL = 1.2; EXPRESSED IN BRAIN, SIGNAL = 1.5; EXPRESSED IN LUNG, SIGNAL = 0.89; EXPRESSED IN BT474, SIGNAL = 1.4; NT HIT: AB016283.1, EVALUE 2.50e+00; SWISSPROT HIT: P19455, EVALUE 4.70e-01
tgctgaagagaagagattttgggaaatgggcaggggatcttacataaatgacatgattaaaaaaaaagatgacagagtagaagatgaaggctgtcgatttgaaaatgaaagaatatcatttcgaggccgtcgcaaaaggagatctgttatccataagatggaagttaatgctgtcacagagtctgaggactttggaaagctttttgagaggctactggaagcagcagcagcaggcagggtagatactgaccaagataatggg

SEQ ID NO: 18470 - DNA, 104 bp, Homo sapiens
  MAP TO AC010879.1; EXPRESSED IN FETAL LIVER, SIGNAL = 0.99; EXPRESSED IN BT474, SIGNAL = 1.3; EXPRESSED IN PLACENTA, SIGNAL = 1.7; EXPRESSED IN HBL100, SIGNAL = 1.2; EXPRESSED IN HELA, SIGNAL = 1.1; EXPRESSED IN HEART, SIGNAL = 0.95; EXPRESSED IN BONE MARROW, SIGNAL = 1.3; EXPRESSED IN BRAIN, SIGNAL = 1.4
catttctcctcttcctcctcctgctcctcctcctcttcctcctcctcttccctttccccttactctctttctcccccaccttctcctctttcttcctcttcttc

SEQ ID NO: 18471 - DNA, 165 bp, Homo sapiens
  MAP TO AC010092.1; EXPRESSED IN BT474, SIGNAL = 4.8; EXPRESSED IN HBL100, SIGNAL = 4.8; EXPRESSED IN BONE MARROW, SIGNAL = 4.1; EXPRESSED IN LUNG, SIGNAL = 3.9; EXPRESSED IN ADULT LIVER, SIGNAL = 3.8; EXPRESSED IN FETAL LIVER, SIGNAL = 4.6; EXPRESSED IN PLACENTA, SIGNAL = 6.8; EXPRESSED IN HEART, SIGNAL = 4.2; EXPRESSED IN HELA, SIGNAL = 5.7; EXPRESSED IN BRAIN, SIGNAL = 3.1; SWISSPROT HIT: P06915, EVALUE 4.40e-01; NT HIT: AF162666.1, EVALUE 3.00e-88; EST_HUMAN HIT: BE173421.1, EVALUE 4.00e-88
aagggaagatattgaaaggcaaaggaaacttctagccaaacgcaaacctcccacagctaataattctcaggcaccctctaccaattctgaaccaaaacaaaggaaaaacaaagcagtcaatggagcagagaatgatccctttgttagaccaaatttaccacaact

SEQ ID NO: 18472 - DNA, 271 bp, Homo sapiens
  MAP TO AC010885.1; EXPRESSED IN BRAIN, SIGNAL = 1.7; EXPRESSED IN BONE MARROW, SIGNAL = 1.8; EXPRESSED IN LUNG, SIGNAL = 1.2; EXPRESSED IN BT474, SIGNAL = 1.8; EXPRESSED IN FETAL LIVER, SIGNAL = 1.4; EXPRESSED IN ADULT LIVER, SIGNAL = 1.3; EXPRESSED IN HBL100, SIGNAL = 1.6; EXPRESSED IN HELA, SIGNAL = 1.6; EXPRESSED IN PLACENTA, SIGNAL = 1.8; EXPRESSED IN HEART, SIGNAL = 1.5; NT HIT: AE001710.1, EVALUE 1.40e-01; EST_HUMAN HIT: AI188024.1, EVALUE 1.70e-01; SWISSPROT HIT: P15169, EVALUE 2.50e+00
gctgtttggtggcttcacagttggaattgctgtacatcacatttcatttccacaaggacatcctttatgccggtctgccttatgtggcattcgtctcttcctcttgccaggctgggccagcttctcccgctgtaccttccacatcagctgttcattttccccctgctgctgtcactgataatttccaggttaaatcttataagtggaaattggatccacagctggagttgaaacgcagctccttggagttattaccacagtctgttcccgg

SEQ ID NO: 18473 - DNA, 196 bp, Homo sapiens
  MAP TO AC010102.1; EXPRESSED IN PLACENTA, SIGNAL = 5.4; EXPRESSED IN BRAIN, SIGNAL = 1.6; EXPRESSED IN FETAL LIVER, SIGNAL = 2.7; EXPRESSED IN HEART, SIGNAL = 1.5; EXPRESSED IN HELA, SIGNAL = 5.7; EXPRESSED IN HBL100, SIGNAL = 4.6; EXPRESSED IN LUNG, SIGNAL = 6.1; EXPRESSED IN BONE MARROW, SIGNAL = 2.5; EXPRESSED IN ADULT LIVER, SIGNAL = 2.9; EXPRESSED IN BT474, SIGNAL = 2.3; EST_HUMAN HIT: BE675436.1, EVALUE 3.00e-92; NT HIT: AF136275.1, EVALUE 1.00e-107; SWISSPROT HIT: Q01958, EVALUE 6.50e-02
aacatcaagaggaagggagcgtggccctccaccctcctgtccgtgcagaacgtcatcgactgcggtaacgctggctcctgtgaagggggtaatgacctgtccgtgtgggactacgcccaccagcacggcatccctgacgagacctgcaacaactaccaggccaaggaccagggtaggctgctgcccgtgcccccac

SEQ ID NO: 18474 - DNA, 213 bp, Homo sapiens
  MAP TO AC010925.1; EXPRESSED IN PLACENTA, SIGNAL = 3.7; EXPRESSED IN BRAIN, SIGNAL =   1; EXPRESSED IN FETAL LIVER, SIGNAL = 1.3; EXPRESSED IN HEART, SIGNAL = 6.3; EXPRESSED IN HELA, SIGNAL = 1.7; EXPRESSED IN HBL100, SIGNAL = 3.1; EXPRESSED IN LUNG, SIGNAL = 0.89; EXPRESSED IN ADULT LIVER, SIGNAL = 1.2; SWISSPROT HIT: Q04652, EVALUE 6.00e-13; NT HIT: gi11435903, EVALUE 1.00e-117; EST_HUMAN HIT: AA913929.1, EVALUE 1.00e-117
actttatgcagttggtggtcgtgatggaagttcttgtctcaaatcagtagaatgttttgatcctcatactaataagtggacactgtgtgcacagatgtcaaaaaggagaggtggcgtaggagtgacgacctggaatggactgctgtatgctataggggggcacgatgctcccgcatccaacttgacttccagactctcagactgtgtggaaag

SEQ ID NO: 18475 - DNA, 131 bp, Homo sapiens
  MAP TO AL049553.14; EXPRESSED IN HELA, SIGNAL = 2.3; EXPRESSED IN HEART, SIGNAL = 2.4; EXPRESSED IN BRAIN, SIGNAL = 2.6; EXPRESSED IN BONE MARROW, SIGNAL = 2.8; EXPRESSED IN LUNG, SIGNAL = 1.2; EXPRESSED IN ADULT LIVER, SIGNAL = 1.9; EXPRESSED IN BT474, SIGNAL = 2.4; EXPRESSED IN FETAL LIVER, SIGNAL =   3; EXPRESSED IN PLACENTA, SIGNAL = 2.5; EXPRESSED IN HBL100, SIGNAL = 2.4; EST_HUMAN HIT: BE797787.1, EVALUE 6.80e+00; NT HIT: AF109905.1, EVALUE 6.30e-02
caagcactgaggtcagagcctggagggattctgtaggtcttccttccatcatcatcatcattgtcatcgtcgtcatcatcatcatcatcatcgtcgtcgtcgtcatcatcatcatccaaggacatagaggc

SEQ ID NO: 18476 - DNA, 97 bp, Homo sapiens
  MAP TO AC011302.1; EXPRESSED IN HELA, SIGNAL = 9.2; EXPRESSED IN PLACENTA, SIGNAL = 8.5; EXPRESSED IN HBL100, SIGNAL = 7.1; EXPRESSED IN HEART, SIGNAL = 7.4; EXPRESSED IN BRAIN, SIGNAL = 6.8; EXPRESSED IN BONE MARROW, SIGNAL =   9; EXPRESSED IN LUNG, SIGNAL = 5.5; EXPRESSED IN BT474, SIGNAL = 6.4; EXPRESSED IN ADULT LIVER, SIGNAL = 7.3; EXPRESSED IN FETAL LIVER, SIGNAL = 9.2
catcactatcatcttcatcatcatcacaaccatcaccatcatcaccatcatcattgatatcatcatcatcatcctgtttatcaactgcaaggtcact

SEQ ID NO: 18477 - DNA, 134 bp, Homo sapiens
  MAP TO AL049823.13; EXPRESSED IN BONE MARROW, SIGNAL = 0.97; EXPRESSED IN BRAIN, SIGNAL = 0.93; EXPRESSED IN FETAL LIVER, SIGNAL = 0.91; EXPRESSED IN PLACENTA, SIGNAL = 1.3; EXPRESSED IN HELA, SIGNAL = 1.1; EXPRESSED IN HBL100, SIGNAL = 1.4; EXPRESSED IN HEART, SIGNAL = 1.3; NT HIT: AB006531.1, EVALUE 1.00e+00; SWISSPROT HIT: P25052, EVALUE 8.90e+00
ggcatactcataaggaaatttgacttcagccaagaatgtgttagcagcagagtagattggtgggagaggcaactcaccaaagccctgagtatccatccctgtactttcttgctagaatcccaagaaaagaaggt

SEQ ID NO: 18478 - DNA, 108 bp, Homo sapiens
  MAP TO AC011347.1; EXPRESSED IN PLACENTA, SIGNAL = 3.9; EXPRESSED IN HBL100, SIGNAL =   4; EXPRESSED IN HELA, SIGNAL = 3.2; EXPRESSED IN HEART, SIGNAL = 1.6; EXPRESSED IN BRAIN, SIGNAL = 4.3; EXPRESSED IN BONE MARROW, SIGNAL = 3.8; EXPRESSED IN LUNG, SIGNAL = 2.7; EXPRESSED IN ADULT LIVER, SIGNAL = 2.7; EXPRESSED IN BT474, SIGNAL = 2.1; EXPRESSED IN FETAL LIVER, SIGNAL =   2; NT HIT: U67525.1, EVALUE 2.00e-01; EST_HUMAN HIT: BE743245.1, EVALUE 3.40e-01
ggtatataggcaagacaggaatcaaggtttacttggagggtttaggcctgaccaactgggtgaataaaattgccattgactgagaaggcataaacttagaagaaggag

SEQ ID NO: 18479 - DNA, 211 bp, Homo sapiens
  MAP TO Z97832.10; EXPRESSED IN BRAIN, SIGNAL = 0.97; EXPRESSED IN BONE MARROW, SIGNAL = 1.1; EXPRESSED IN FETAL LIVER, SIGNAL = 1.5; EXPRESSED IN BT474, SIGNAL = 1.1; EXPRESSED IN ADULT LIVER, SIGNAL = 1.2; EXPRESSED IN HELA, SIGNAL = 0.92; EXPRESSED IN PLACENTA, SIGNAL =   1; EXPRESSED IN HBL100, SIGNAL = 1.2; EXPRESSED IN HEART, SIGNAL = 1.1; SWISSPROT HIT: P25723, EVALUE 4.00e-08
atgtggatgaatgcagcatcaaccggggaggttgccgctttggctgcatcaacactcctggcagctaccagtgtacctgcccagcaggccagggtcggctgcactggaatggcaaagattgcacaggtgggcagtgccctctgctggccaaagatgacactgccatttcagggagcagttggggttctggaaagcatagagtatcacattg

SEQ ID NO: 18480 - DNA, 122 bp, Homo sapiens
  MAP TO AL031772.4; EXPRESSED IN PLACENTA, SIGNAL = 1.2; EXPRESSED IN HELA, SIGNAL = 1.1; EXPRESSED IN HBL100, SIGNAL = 1.2; EXPRESSED IN HEART, SIGNAL = 1.4; EXPRESSED IN BONE MARROW, SIGNAL = 1.2; EXPRESSED IN BRAIN, SIGNAL = 1.1; EXPRESSED IN FETAL LIVER, SIGNAL = 0.94; EXPRESSED IN ADULT LIVER, SIGNAL = 1.2; EST_HUMAN HIT: AA056343.1, EVALUE 7.00e-02; SWISSPROT HIT: P75602, EVALUE 4.10e+00
ttgagtccctcatcatggggactcttcataatccccaccagctgacgactcaggagaggaagcctcttactcatcttagtgtttccggcaccactgggcccaggctttgtaaaactccagtg

SEQ ID NO: 18481 - DNA, 127 bp, Homo sapiens
  MAP TO AL078590.5; EXPRESSED IN BONE MARROW, SIGNAL =   2; EXPRESSED IN BT474, SIGNAL = 1.2; EXPRESSED IN HBL100, SIGNAL = 1.4; EXPRESSED IN HEART, SIGNAL = 1.4; EXPRESSED IN LUNG, SIGNAL =   1; EXPRESSED IN BRAIN, SIGNAL = 1.3; EXPRESSED IN ADULT LIVER, SIGNAL = 1.2; EXPRESSED IN FETAL LIVER, SIGNAL = 1.5; EXPRESSED IN PLACENTA, SIGNAL = 1.2; EXPRESSED IN HELA, SIGNAL = 2.2; SWISSPROT HIT: Q99014, EVALUE 2.30e+00
ttcagatcaagagagtttacgtagagattcacatgaaggcaaatctcagggaaaaccaggaacagaaaacaaagtgcttctgggtcttggtgagcctgggactggagctatactggattcaggacaa

SEQ ID NO: 18482 - DNA, 100 bp, Homo sapiens
  MAP TO AL117694.1; EXPRESSED IN PLACENTA, SIGNAL = 4.3; EXPRESSED IN BONE MARROW, SIGNAL =   4; EXPRESSED IN FETAL LIVER, SIGNAL = 2.8; EXPRESSED IN HELA, SIGNAL = 3.9; EXPRESSED IN HBL100, SIGNAL =  14; EXPRESSED IN BRAIN, SIGNAL = 2.8; EXPRESSED IN LUNG, SIGNAL = 3.2; EXPRESSED IN BT474, SIGNAL = 3.8; EXPRESSED IN ADULT LIVER, SIGNAL = 2.7; EXPRESSED IN HEART, SIGNAL = 2.5; SWISSPROT HIT: P12814, EVALUE 8.00e-12; NT HIT: gi11435217, EVALUE 1.00e-49; EST_HUMAN HIT: BE831655.1, EVALUE 1.00e-49
agtttgacgcctttgctggctatgaaatccagggccttgttgacgttggagatcttgtgcactctcatcttgcctcgctctggcttggccaagcgttcac

SEQ ID NO: 18483 - DNA, 164 bp, Homo sapiens
  MAP TO AL035685.13; EXPRESSED IN BT474, SIGNAL = 1.1; EXPRESSED IN HEART, SIGNAL = 1.5; EXPRESSED IN BONE MARROW, SIGNAL = 1.7; EXPRESSED IN LUNG, SIGNAL = 0.91; EXPRESSED IN ADULT LIVER, SIGNAL = 1.3; EXPRESSED IN FETAL LIVER, SIGNAL = 1.4; EXPRESSED IN PLACENTA, SIGNAL = 1.1; EXPRESSED IN HELA, SIGNAL = 1.2; EXPRESSED IN HBL100, SIGNAL = 1.3; EXPRESSED IN BRAIN, SIGNAL = 1.5; NT HIT: M84722.1, EVALUE 5.90e+00; EST_HUMAN HIT: AW897230.1, EVALUE 4.00e-75; SWISSPROT HIT: P35442, EVALUE 4.40e-01
aacaaactgttgcacttccccacgttctgctgccagcccatctcccgggctggaaagccgcaagcccttggcactttcttctgccccttgcctgacagtgtttgcctttctttggatgatggagcagtgagatcatccaggtgccccccaggggcttggcagag

SEQ ID NO: 18484 - DNA, 267 bp, Homo sapiens
  MAP TO AL109897.6; EXPRESSED IN PLACENTA, SIGNAL = 4.8; EXPRESSED IN BT474, SIGNAL = 2.8; EXPRESSED IN HEART, SIGNAL = 2.5; EXPRESSED IN HELA, SIGNAL =   6; EXPRESSED IN HBL100, SIGNAL = 4.3; EXPRESSED IN BRAIN, SIGNAL = 2.7; EXPRESSED IN LUNG, SIGNAL =   3; EXPRESSED IN BONE MARROW, SIGNAL = 4.5; EXPRESSED IN ADULT LIVER, SIGNAL = 4.8; EXPRESSED IN FETAL LIVER, SIGNAL = 2.9; EST_HUMAN HIT: AA130269.1, EVALUE 1.00e-09; SWISSPROT HIT: P03815, EVALUE 9.60e+00; NT HIT: AL163207.2, EVALUE 1.00e-17
aaatgccatccaagagtcaaggccggggatcagggaccccaggagcccgcttggtgctcgttaacccactctggctgagctggtacccaggctgccagacaaagtcccccttactcttccctttcctttccttattcagaggcagtctctccccatggccaccacagctgggaatgtgctgggtcatacctgaagccagcatagctctcagtctcacctgtgacccgtggtgagtattgcctggctaccactgctgactgttcaggc

SEQ ID NO: 18485 - DNA, 241 bp, Homo sapiens
  MAP TO AJ239329.2; EXPRESSED IN LUNG, SIGNAL =  11; EXPRESSED IN HEART, SIGNAL =  29; EXPRESSED IN PLACENTA, SIGNAL =  26; EXPRESSED IN BONE MARROW, SIGNAL =  19; EXPRESSED IN ADULT LIVER, SIGNAL =  14; EXPRESSED IN BT474, SIGNAL = 6.4; EXPRESSED IN FETAL LIVER, SIGNAL =  21; EXPRESSED IN HELA, SIGNAL =  21; EXPRESSED IN HBL100, SIGNAL = 9.9; EXPRESSED IN BRAIN, SIGNAL =  20; SWISSPROT HIT: P46492, EVALUE 1.10e+00
cacacacacatatacacacacacatacattttctcatctttctagagaaccttgattaatacactattcgttttgatcatttttctaccagtaacaatgttcatatcttgtcttatgatgagatacactgcagcgattttaccactgctacacccactgagaatttttctcagcaaggtataaaatatagttaaggaataagaaataatacagacttaaagatttccattttgctttttga

SEQ ID NO: 18486 - DNA, 337 bp, Homo sapiens
  MAP TO AL121578.1; EXPRESSED IN ADULT LIVER, SIGNAL = 1.1; EXPRESSED IN HEART, SIGNAL = 0.97; EXPRESSED IN PLACENTA, SIGNAL =   1; EXPRESSED IN HBL100, SIGNAL = 0.96; EXPRESSED IN BONE MARROW, SIGNAL = 0.95; NT HIT: U32657.1, EVALUE 1.00e-61; SWISSPROT HIT: Q00728, EVALUE 2.00e-08
gcgagaaagtcagcatgcccggcacctgagctcaaccacacctgttttcctggctggtgttctcgagtatctgacagccaacatcctggaaaaggtgggcaaggaggtcaagaacagctgcaggctgtgcatcaccccagaacacgtgaagagggcactgcaaaaggatgagcagctcagatggatcttggagttggaagatgacacccactctcaagtagaagaaatgccccaatctgaggaggaagaggaggaggaggaggagaaggaggaggagatggtggtgctggtggtgatggggggaaggaggaggaggaggagaagaaggaggaggaag

SEQ ID NO: 18487 - DNA, 109 bp, Homo sapiens
  MAP TO AL035415.20; EXPRESSED IN HBL100, SIGNAL = 2.5; EXPRESSED IN BRAIN, SIGNAL = 1.2; EXPRESSED IN BONE MARROW, SIGNAL = 1.3; EXPRESSED IN ADULT LIVER, SIGNAL = 1.5; EXPRESSED IN BT474, SIGNAL = 1.4; EXPRESSED IN FETAL LIVER, SIGNAL = 1.1; EXPRESSED IN HELA, SIGNAL = 1.3; EXPRESSED IN PLACENTA, SIGNAL = 1.2; EXPRESSED IN HEART, SIGNAL = 1.1; SWISSPROT HIT: P98164, EVALUE 9.10e+00; EST_HUMAN HIT: AA704971.1, EVALUE 5.00e-55
cacagactggtactgataaatggcgtctctgagatgtctgtgcaccttatctgtattgggcagaatggtcctgtcccactcctgcatatggccactgcatggctaaatg

SEQ ID NO: 18488 - DNA, 220 bp, Homo sapiens
  MAP TO AL050349.8; EXPRESSED IN HELA, SIGNAL = 1.1; EXPRESSED IN PLACENTA, SIGNAL = 1.3; EXPRESSED IN HBL100, SIGNAL = 1.2; EXPRESSED IN HEART, SIGNAL = 1.4; EXPRESSED IN BRAIN, SIGNAL = 1.1; EXPRESSED IN BONE MARROW, SIGNAL = 1.3; EXPRESSED IN ADULT LIVER, SIGNAL = 1.3; EXPRESSED IN BT474, SIGNAL = 1.1; EXPRESSED IN FETAL LIVER, SIGNAL =   1; NT HIT: gi5834897, EVALUE 8.20e+00; EST_HUMAN HIT: AA450138.1, EVALUE 2.00e-03; SWISSPROT HIT: P97367, EVALUE 4.20e-01
gtggtggggacacagtgatgaatgtgaccatcacatcttacttcatggacctcacagtttcaggggatgctgagcggttttccaaacctaccaggactatacaattatcaagtacacgctccttctcctgtttcccaacttcattactgccatcaccatccaaccagctgcccaagctatgaactggggaatcatcctccactcccctctctccttcgtc

SEQ ID NO: 18489 - DNA, 247 bp, Homo sapiens
  MAP TO AC011499.1; EXPRESSED IN FETAL LIVER, SIGNAL = 1.4; EXPRESSED IN HEART, SIGNAL = 1.1; EXPRESSED IN PLACENTA, SIGNAL = 1.1; EST_HUMAN HIT: R06644.1, EVALUE 2.20e-01; NT HIT: AF128894.1, EVALUE 3.20e-02
ggtagagatctcagtgccctggtccagggtgttagcaatgaagatggaatgtggaagttggatttggggagttcaggaagtggagccgtctcaaggggcaggacagggaagatgaggagagggagtaacaacaggtcaggagtgataggtccatgcagccacagtggcctctgtgatgctgggatgattgcaaaggaacaggccagcctgcatgtccagcccccaggccagaatgctggtgttgaag

SEQ ID NO: 18490 - DNA, 175 bp, Homo sapiens
  MAP TO AL096765.4; EXPRESSED IN BRAIN, SIGNAL = 2.6; EXPRESSED IN LUNG, SIGNAL = 2.5; EXPRESSED IN HEART, SIGNAL = 3.4; EXPRESSED IN BONE MARROW, SIGNAL = 4.2; EXPRESSED IN ADULT LIVER, SIGNAL = 2.9; EXPRESSED IN BT474, SIGNAL =   2; EXPRESSED IN FETAL LIVER, SIGNAL = 5.1; EXPRESSED IN HELA, SIGNAL = 3.4; EXPRESSED IN PLACENTA, SIGNAL = 3.2; EXPRESSED IN HBL100, SIGNAL = 6.4; NT HIT: gi4557556, EVALUE 3.00e-94; EST_HUMAN HIT: BE003657.1, EVALUE 3.00e-94; SWISSPROT HIT: Q09472, EVALUE 4.00e-18
gcggaatactaccaccttctagctgagaaaatctataagatccagaaagaactagaagaaaaacgaaggaccagactacagaagcagaacatgctaccaaatgctgcaggcatggttccagtttccatgaatccagggcctaacatgggacagccgcaaccaggaatgacttcta

SEQ ID NO: 18491 - DNA, 131 bp, Homo sapiens
  MAP TO AP000494.1; EXPRESSED IN ADULT LIVER, SIGNAL = 1.7; EXPRESSED IN FETAL LIVER, SIGNAL = 1.4; EXPRESSED IN BT474, SIGNAL = 1.1; EXPRESSED IN HELA, SIGNAL = 1.4; EXPRESSED IN PLACENTA, SIGNAL = 1.6; EXPRESSED IN HEART, SIGNAL = 1.3; EXPRESSED IN HBL100, SIGNAL = 1.1; EXPRESSED IN BRAIN, SIGNAL = 1.7; EXPRESSED IN LUNG, SIGNAL = 1.1; EXPRESSED IN BONE MARROW, SIGNAL = 1.8; NT HIT: gi11321594, EVALUE 7.00e-30; EST_HUMAN HIT: AI033580.1, EVALUE 2.00e-27; SWISSPROT HIT: Q13797, EVALUE 2.00e-06
gaattgccgttcagaggactgtgccgcagacctgcagcttcagggtaaactgctgctctccagtatgtcggtgtttccttcagagcattgttctcaggctcctttttcttgaccccaggtcccaaacctga

SEQ ID NO: 18492 - DNA, 166 bp, Homo sapiens
  MAP TO AL079351.1; EXPRESSED IN HELA, SIGNAL = 1.3; EXPRESSED IN PLACENTA, SIGNAL = 1.3; EXPRESSED IN HEART, SIGNAL = 1.2; EXPRESSED IN HBL100, SIGNAL = 1.1; EXPRESSED IN BRAIN, SIGNAL = 1.2; EXPRESSED IN BONE MARROW, SIGNAL = 1.5; EXPRESSED IN ADULT LIVER, SIGNAL = 1.2; EXPRESSED IN BT474, SIGNAL = 1.4; EXPRESSED IN FETAL LIVER, SIGNAL = 0.92; NT HIT: X74437.1, EVALUE 3.80e-01; EST_HUMAN HIT: AW338434.1, EVALUE 3.90e-01; SWISSPROT HIT: Q24574, EVALUE 1.70e+00
actgtgtcctctaccccggactccagggaaggtttcttctcactgttaccctcataaaggagttggaagatcctgctcactttcaaggcaagaggcagctcatgaattttcatcacctgcacagatgctgatacggtcaaggggagtttccacacctcctactccc

SEQ ID NO: 18493 - DNA, 260 bp, Homo sapiens
  MAP TO AL110122.1; EXPRESSED IN BONE MARROW, SIGNAL = 2.5; EXPRESSED IN FETAL LIVER, SIGNAL = 4.1; EXPRESSED IN ADULT LIVER, SIGNAL = 1.3; EXPRESSED IN BT474, SIGNAL = 1.1; EXPRESSED IN HELA, SIGNAL = 1.3; EXPRESSED IN PLACENTA, SIGNAL = 1.5; EXPRESSED IN HEART, SIGNAL = 1.2; EXPRESSED IN HBL100, SIGNAL = 1.2; EXPRESSED IN BRAIN, SIGNAL = 2.6; EXPRESSED IN LUNG, SIGNAL = 0.98; SWISSPROT HIT: P03341, EVALUE 2.70e-01
ctttcatctgatttcactggtacatgggcaaatttatcattattatcgttggcccccaagcccatctttccctgcactgttagctgtgttgtcactggcctctgaaatgcagccttcttctgctcctgcacctgctgagctcctatgcatcccttatccacagcggccatcagtgcaggttcactgtctgccacctggtgctcggctaggacccagtgctggggagacaaatacaaagcacatgccctgccattcagagg

SEQ ID NO: 18494 - DNA, 237 bp, Homo sapiens
  MAP TO AL031768.9; EXPRESSED IN BT474, SIGNAL = 1.5; EXPRESSED IN HBL100, SIGNAL = 1.4; EXPRESSED IN HELA, SIGNAL = 1.8; EXPRESSED IN HEART, SIGNAL = 1.8; EXPRESSED IN PLACENTA, SIGNAL = 1.9; EXPRESSED IN LUNG, SIGNAL = 1.4; EXPRESSED IN BRAIN, SIGNAL = 1.5; EXPRESSED IN BONE MARROW, SIGNAL = 1.6; EXPRESSED IN ADULT LIVER, SIGNAL = 1.6; EXPRESSED IN FETAL LIVER, SIGNAL = 1.5; NT HIT: U41418.1, EVALUE 1.20e-01; SWISSPROT HIT: P73555, EVALUE 4.30e+00; EST_HUMAN HIT: BF373515.1, EVALUE 5.00e-33
cttttgtttagaagtttgcagcagtccgggaaggaggttttcttcctcccggagctgagaaggcctgtcttcagcaccaacgtgtcttctggccttgccaataaagaagtaagaagccactgtgaaaaaaccatcattctcaacaataggccaataaacggttggcagaaatgccatgcgcgcccctccgaggacggggcagcgtgtttgaagagtcaccatggtagtgatatttta

SEQ ID NO: 18495 - DNA, 354 bp, Homo sapiens
  MAP TO AC009485.2; EXPRESSED IN HBL100, SIGNAL =  52; EXPRESSED IN HELA, SIGNAL =  27; EXPRESSED IN HEART, SIGNAL = 5.9; EXPRESSED IN PLACENTA, SIGNAL =  24; EXPRESSED IN BRAIN, SIGNAL =  10; EXPRESSED IN BONE MARROW, SIGNAL =  17; EXPRESSED IN LUNG, SIGNAL =  21; EXPRESSED IN BT474, SIGNAL =  66; EXPRESSED IN ADULT LIVER, SIGNAL =  10; EXPRESSED IN FETAL LIVER, SIGNAL = 9.9; SWISSPROT HIT: P06302, EVALUE 1.90e-02; NT HIT: M26708.1, EVALUE 3.00e-62; EST_HUMAN HIT: AI929419.1, EVALUE 1.00e-64
atgtcagatgcagctgtagacaccagctctgaaatcattgccaaggacttaaaggagaagaaggaagttgtgaaagaggcggaaaatggaagagacgcccctgctaacgggaatgctaatgaggaaaatggggagcaggaggctgacaaggaggtagatgaagaaggggaagaaagtggggaggaagaggaggaggaaaaagaaggtgatggtgaggaagaggatggagatgaagaggaagctgagtctgctacaggcaagcgggcagctgaagatgatgaggatgatgatgtcgataccaagaagcagaagaccgacaaggatgactagacagcaaaaaaggaaaagttaaac

SEQ ID NO: 18496 - DNA, 193 bp, Homo sapiens
  MAP TO AL031963.11; EXPRESSED IN LUNG, SIGNAL = 3.4; EXPRESSED IN ADULT LIVER, SIGNAL = 3.6; EXPRESSED IN BT474, SIGNAL = 5.5; EXPRESSED IN FETAL LIVER, SIGNAL = 5.1; EXPRESSED IN HBL100, SIGNAL = 6.3; EXPRESSED IN HELA, SIGNAL =  36; EXPRESSED IN HEART, SIGNAL = 3.4; EXPRESSED IN PLACENTA, SIGNAL = 4.8; EXPRESSED IN BONE MARROW, SIGNAL = 3.9; EXPRESSED IN BRAIN, SIGNAL = 3.5; EST_HUMAN HIT: T97495.1, EVALUE 3.00e-85; SWISSPROT HIT: Q13546, EVALUE 1.00e-23; NT HIT: gi11418767, EVALUE 2.00e-83
gcacaacgaggccctcttggaggaggcgaagatgatgaacagactgagacacagccgggtggtgaagctcctgggcgtcatcatagaggaagggaagtactccctggtgatggagtacatggagaagggcaacctgatgcacgtgctgaaagccgaggtagagagggcccctccgcacggggatccccagcgc

SEQ ID NO: 18497 - DNA, 179 bp, Homo sapiens
  MAP TO AC007318.2; EXPRESSED IN HBL100, SIGNAL = 4.6; EXPRESSED IN HEART, SIGNAL =   2; EXPRESSED IN BONE MARROW, SIGNAL = 2.3; EXPRESSED IN LUNG, SIGNAL =   4; EXPRESSED IN BRAIN, SIGNAL = 2.6; EXPRESSED IN ADULT LIVER, SIGNAL = 1.9; EXPRESSED IN BT474, SIGNAL = 6.4; EXPRESSED IN FETAL LIVER, SIGNAL = 3.3; EXPRESSED IN PLACENTA, SIGNAL =  10; EXPRESSED IN HELA, SIGNAL = 3.4; NT HIT: gi11430618, EVALUE 1.00e-96; EST_HUMAN HIT: AA165326.1, EVALUE 2.00e-96; SWISSPROT HIT: P11476, EVALUE 2.00e-27
actgcttgactggagtgctctgaattttaacattggacttctcagcaccaccagctgttgctccgggacccattcgctttttaatctcagctgccatcgtcatgaaagactgttctacattcgttgcattcttagcactggtttccaaaaacggaattccaagggaatcagcaaattcc

SEQ ID NO: 18498 - DNA, 218 bp, Homo sapiens
  MAP TO AL096801.15; EXPRESSED IN PLACENTA, SIGNAL = 3.5; EXPRESSED IN HBL100, SIGNAL = 2.6; EXPRESSED IN HELA, SIGNAL = 2.2; EXPRESSED IN BONE MARROW, SIGNAL = 2.8; EXPRESSED IN BT474, SIGNAL = 2.4; EXPRESSED IN FETAL LIVER, SIGNAL = 1.7; EXPRESSED IN HEART, SIGNAL = 1.6; EXPRESSED IN BRAIN, SIGNAL = 1.7; EXPRESSED IN LUNG, SIGNAL = 2.7; EXPRESSED IN ADULT LIVER, SIGNAL = 4.8; EST_HUMAN HIT: AU121585.1, EVALUE 1.00e-73; NT HIT: AF115343.1, EVALUE 4.40e-01; SWISSPROT HIT: O17583, EVALUE 8.00e+00
actttttcacactgatgatgaggaggaacgagagtataatgaagtaacagaagaggttacagaccaggtctatgtgccagctaaagctaaagcggcaaaggagggagaggttcaaccctacctttctgcaccccctccttattattttgaagaaaagaccctccagatctttcttttccagaggacactgggcaaaaagtagttgccccagtgactgt

SEQ ID NO: 18499 - DNA, 140 bp, Homo sapiens
  MAP TO AL049821.6; EXPRESSED IN PLACENTA, SIGNAL = 6.4; EXPRESSED IN HBL100, SIGNAL = 4.4; EXPRESSED IN HEART, SIGNAL = 5.5; EXPRESSED IN BONE MARROW, SIGNAL = 5.5; EXPRESSED IN LUNG, SIGNAL = 4.1; EXPRESSED IN BRAIN, SIGNAL = 4.7; EXPRESSED IN ADULT LIVER, SIGNAL = 4.7; EXPRESSED IN BT474, SIGNAL = 3.2; EXPRESSED IN FETAL LIVER, SIGNAL = 6.4; EXPRESSED IN HELA, SIGNAL = 5.4; NT HIT: AF288041.1, EVALUE 1.20e+00; EST_HUMAN HIT: BE543881.1, EVALUE 7.30e+00; SWISSPROT HIT: P04784, EVALUE 3.90e+00
gatgaggaaagtgaaggtggaggatatagccctcttgactgccttgacctggacctggaacatctcttttgctcccattccatggggaagaactagtgacatggtggcccatagctgcagaggggaggctgagaaatgca

SEQ ID NO: 18500 - DNA, 132 bp, Homo sapiens
  MAP TO AL049795.20; EXPRESSED IN BONE MARROW, SIGNAL = 0.95; EXPRESSED IN FETAL LIVER, SIGNAL = 1.1; EXPRESSED IN BT474, SIGNAL = 1.2; EXPRESSED IN HELA, SIGNAL = 1.2; EXPRESSED IN PLACENTA, SIGNAL = 1.5; EXPRESSED IN HBL100, SIGNAL =   2; EXPRESSED IN HEART, SIGNAL = 1.1; EST_HUMAN HIT: AU129978.1, EVALUE 5.00e-44; SWISSPROT HIT: O35345, EVALUE 8.00e-11; NT HIT: gi11424000, EVALUE 3.00e-44
tctcagcagaccaaaattgtcattgaagcaggggctgtccccatttttatagagctgcttaattcagactttgaggatgttcaggaacaggtaatgcttagatttggtgtgattctttatagtacctgtggt

SEQ ID NO: 18501 - DNA, 156 bp, Homo sapiens
  MAP TO AC005082.2; EXPRESSED IN HELA, SIGNAL = 2.7; EXPRESSED IN BONE MARROW, SIGNAL = 1.1; EXPRESSED IN BRAIN, SIGNAL = 1.5; EXPRESSED IN BT474, SIGNAL = 2.4; EXPRESSED IN PLACENTA, SIGNAL = 1.8; EXPRESSED IN HEART, SIGNAL = 1.5; EXPRESSED IN HBL100, SIGNAL =   8; EXPRESSED IN ADULT LIVER, SIGNAL = 1.3; EXPRESSED IN FETAL LIVER, SIGNAL = 2.1; EST_HUMAN HIT: AI967954.1, EVALUE 9.00e-83; NT HIT: AL163204.2, EVALUE 7.70e-02; SWISSPROT HIT: P05848, EVALUE 8.80e-02
atgaagtatcatcttctattccaagaatgaagtcttcaggtactgtctcaggtgctatctgagctaactggtcatcataagaacgtagggtccataatttctctaattcatagatttctctggtttctggaagcatcaaatgaatcaccatgctgc

SEQ ID NO: 18502 - DNA, 104 bp, Homo sapiens
  MAP TO AF165926.1; EXPRESSED IN PLACENTA, SIGNAL = 1.6; EXPRESSED IN HELA, SIGNAL = 1.9; EXPRESSED IN BONE MARROW, SIGNAL = 1.1; EXPRESSED IN BRAIN, SIGNAL =   1; EXPRESSED IN BT474, SIGNAL = 1.2; EXPRESSED IN HEART, SIGNAL = 8.6; EXPRESSED IN HBL100, SIGNAL = 2.1; EXPRESSED IN LUNG, SIGNAL = 1.1; EXPRESSED IN ADULT LIVER, SIGNAL = 1.1; EXPRESSED IN FETAL LIVER, SIGNAL = 1.4; SWISSPROT HIT: O75694, EVALUE 2.00e-13; EST_HUMAN HIT: AL041977.1, EVALUE 6.00e-52; NT HIT: gi4758843, EVALUE 4.00e-52
aaataagactgaaaaagaaagaatgttaagggaatcattaaaggaatatcaaaaaattagcaatcaagtggacctttccaatgtttgtgctcagtatagacaag

SEQ ID NO: 18503 - DNA, 439 bp, Homo sapiens
  MAP TO AL080243.21; EXPRESSED IN FETAL LIVER, SIGNAL = 1.3; EXPRESSED IN ADULT LIVER, SIGNAL = 2.2; EXPRESSED IN PLACENTA, SIGNAL = 3.2; EXPRESSED IN HBL100, SIGNAL = 3.3; EXPRESSED IN HELA, SIGNAL = 1.6; EXPRESSED IN HEART, SIGNAL = 0.9; EXPRESSED IN BONE MARROW, SIGNAL = 2.4; EXPRESSED IN BRAIN, SIGNAL = 3.4; EXPRESSED IN BT474, SIGNAL = 2.6; EXPRESSED IN LUNG, SIGNAL = 1.9; EST_HUMAN HIT: H59378.1, EVALUE 1.00e-125; NT HIT: gi11418175, EVALUE 0.00e+00; SWISSPROT HIT: Q09472, EVALUE 1.00e-16
gcacaaatgtctagttcttcctgcccggtgaactctcctataatgcctccagggtctcaggggagccacattcactgtccccagcttcctcaaccagctcttcatcagaattcaccctcgcctgtacctagtcgtacccccacccctcaccatactcccccaagcataggggctcagcagccaccagcaacaacaattccagcccctgttcctacacctcctgccatgccacctgggccacagtcccaggctctacatccccctccaaggcagacacctacaccaccaacaacacaacttccccaacaagtgcagccttcacttcctgctgcaccttctgctgaccagccccagcagcagcctcgctcacagcagagcacagcagcgtctgttcctaccccaacagcaccgctgcttcctccgcagcctgcaactccag

SEQ ID NO: 18504 - DNA, 116 bp, Homo sapiens
  MAP TO AL121757.2; EXPRESSED IN FETAL LIVER, SIGNAL = 1.9; EXPRESSED IN ADULT LIVER, SIGNAL = 2.3; EXPRESSED IN PLACENTA, SIGNAL = 2.1; EXPRESSED IN HBL100, SIGNAL = 2.2; EXPRESSED IN HELA, SIGNAL = 2.2; EXPRESSED IN HEART, SIGNAL = 2.2; EXPRESSED IN BRAIN, SIGNAL = 2.2; EXPRESSED IN BT474, SIGNAL = 1.4; EXPRESSED IN LUNG, SIGNAL = 1.4; EXPRESSED IN BONE MARROW, SIGNAL = 2.2; NT HIT: AF100956.1, EVALUE 4.00e+00; EST_HUMAN HIT: AW573183.1, EVALUE 1.70e-02
gtgctgggaggctggctgggatggggagttggtggcagagaatagtgtctgttttcttcctggtagctggagagctctgcgacagaggactgaggtcattaggaacaagcgggcag

SEQ ID NO: 18505 - DNA, 468 bp, Homo sapiens
  MAP TO AC011406.1; EXPRESSED IN HBL100, SIGNAL = 2.7; EXPRESSED IN HELA, SIGNAL =   2; EXPRESSED IN PLACENTA, SIGNAL = 2.5; EXPRESSED IN HEART, SIGNAL = 1.2; EXPRESSED IN BRAIN, SIGNAL = 1.4; EXPRESSED IN BONE MARROW, SIGNAL =   2; EXPRESSED IN LUNG, SIGNAL = 1.9; EXPRESSED IN BT474, SIGNAL =   2; EXPRESSED IN FETAL LIVER, SIGNAL = 1.5; EXPRESSED IN ADULT LIVER, SIGNAL = 1.5; NT HIT: D83778.1, EVALUE 0.00e+00; EST_HUMAN HIT: BF206102.1, EVALUE 0.00e+00; SWISSPROT HIT: Q12766, EVALUE 9.00e-78
agtgtgtcctgcccagagctcttggaccagcattatactgtggacatgacagaaactgagcactctatccagcacccagtcaccaagactgccacgcggcgcatcgtccatgcaggcctacagcccaatcctggtgaccccagtgctgggcaccactccttggccctgtgccctgaattggcaccttacgcaaccatcctggcctccatcgtggacagcaaaccaaacggtgtccgccagcggcccattgccttcgacaatgccactcactattacctctacaaccgcctcatggacttcctcaccagccgcgaaattgtcaatcgtcagatccatgacattgtacagagctgccagcctggtgaggtggtcattcgtgacaccctctaccgccttggggttgctcagatcaagacagagacagaggaggagggtgaggaagaggaggtggccgcagtggcagaataa

SEQ ID NO: 18506 - DNA, 129 bp, Homo sapiens
  MAP TO AL049820.14; EXPRESSED IN HBL100, SIGNAL = 1.2; EXPRESSED IN HELA, SIGNAL = 0.98; EXPRESSED IN BONE MARROW, SIGNAL = 1.2; EXPRESSED IN FETAL LIVER, SIGNAL = 0.98; EXPRESSED IN ADULT LIVER, SIGNAL = 1.2; EXPRESSED IN PLACENTA, SIGNAL = 1.3; EXPRESSED IN HEART, SIGNAL = 0.85; EXPRESSED IN BRAIN, SIGNAL = 1.1; EXPRESSED IN BT474, SIGNAL = 1.4; NT HIT: AF153836.1, EVALUE 4.50e+00; SWISSPROT HIT: P53341, EVALUE 3.00e+00; EST_HUMAN HIT: BF332938.1, EVALUE 5.00e-50
gccaccatacattaggtcgcctgcttatcccagccagtctggggctggcggacgccccatgttttcttcccagcaccccaactatggcaactctcaggctcccatggtgcaccagcctgaccagtacgg

SEQ ID NO: 18507 - DNA, 115 bp, Homo sapiens
  MAP TO AL117327.3; EXPRESSED IN BT474, SIGNAL = 2.2; EXPRESSED IN FETAL LIVER, SIGNAL = 3.2; EXPRESSED IN HBL100, SIGNAL = 3.9; EXPRESSED IN HELA, SIGNAL = 7.1; EXPRESSED IN HEART, SIGNAL = 1.9; EXPRESSED IN BONE MARROW, SIGNAL = 3.4; EXPRESSED IN LUNG, SIGNAL = 4.3; EXPRESSED IN ADULT LIVER, SIGNAL = 6.2; EXPRESSED IN PLACENTA, SIGNAL =  10; EXPRESSED IN BRAIN, SIGNAL = 3.5; NT HIT: AL163213.2, EVALUE 2.00e-44; EST_HUMAN HIT: AA172121.1, EVALUE 5.00e-49; SWISSPROT HIT: P00748, EVALUE 3.10e+00
gtctgaggaccagaggtcgtaggtggatctttctcatggagcaaagagcaggaggacaggggattgatctcccaagggaggtccccccgatccgagtcacggcaccaaatttcat

SEQ ID NO: 18508 - DNA, 432 bp, Homo sapiens
  MAP TO AP000567.1; EXPRESSED IN ADULT LIVER, SIGNAL = 0.99; EXPRESSED IN BT474, SIGNAL = 1.1; EXPRESSED IN HEART, SIGNAL = 1.1; EXPRESSED IN BONE MARROW, SIGNAL = 1.3; EXPRESSED IN BRAIN, SIGNAL = 1.2; NT HIT: gi6754491, EVALUE 1.00e-21; EST_HUMAN HIT: W76571.1, EVALUE 0.00e+00; SWISSPROT HIT: P08131, EVALUE 1.00e-07
aagccactggacccacagcccactgagtagcagctcctcgatccatagcccagggagcggcagctgctggatccaaagcctagagacccagagtaagttgtctggcagggactgcagagcaaggaggttctgggacggtagcaggaggtctggcaggggctggactccacataggatgtctggcagctggtgggctcccagcaggtctgctgacagcccctatagagagaggaacccagctggcacgtgctgggagagcagaggtcagtgctgtagacctggttgctggggtaggaaaagccacaggaggaggctgggtagtgcaggtagccaccacaggagcgggaggagaagtttccagagcagcagttgtaggacatgttgatgggagatgtgagttcagctgagttacactgagaagattctgagttt

SEQ ID NO: 18509 - DNA, 323 bp, Homo sapiens
  MAP TO AL096829.10; EXPRESSED IN BONE MARROW, SIGNAL =  14; EXPRESSED IN BRAIN, SIGNAL =  11; EXPRESSED IN LUNG, SIGNAL =  28; EXPRESSED IN ADULT LIVER, SIGNAL =  17; EXPRESSED IN BT474, SIGNAL =  55; EXPRESSED IN FETAL LIVER, SIGNAL =  13; EXPRESSED IN HELA, SIGNAL =  46; EXPRESSED IN PLACENTA, SIGNAL =  26; EXPRESSED IN HBL100, SIGNAL =  69; EXPRESSED IN HEART, SIGNAL =  17; EST_HUMAN HIT: BF205012.1, EVALUE 3.00e-75; NT HIT: AF116627.1, EVALUE 1.00e-55; SWISSPROT HIT: P47914, EVALUE 6.00e-19
gaagatgcaggccaacaatgccaaggccatgagtgcacgtgcaaaggctatcaaggccctggtaaagcccaaggaagttaagcccaagatcccaaagggtgtcagccacaagctccatcgacttgcccacattgcccactccaagcttgggaagcatgatcatgcccacattgccaaagggctcaggctgtgtgggccaaaggccaagaccaaggatcaaaccaaggcccagcctgcagctccagcttcaattccagctcaggctcccaaaggcgcccaggccactacaaagggttcaaagtagagatctccatctgccaata

SEQ ID NO: 18510 - DNA, 152 bp, Homo sapiens
  MAP TO AL020995.13; EXPRESSED IN PLACENTA, SIGNAL = 4.8; EXPRESSED IN HELA, SIGNAL = 6.3; EXPRESSED IN HBL100, SIGNAL =   4; EXPRESSED IN HEART, SIGNAL = 6.4; EXPRESSED IN BONE MARROW, SIGNAL = 4.7; EXPRESSED IN LUNG, SIGNAL = 3.2; EXPRESSED IN BRAIN, SIGNAL = 5.1; EXPRESSED IN ADULT LIVER, SIGNAL = 5.8; EXPRESSED IN BT474, SIGNAL = 3.6; EXPRESSED IN FETAL LIVER, SIGNAL = 6.3; NT HIT: D90069.1, EVALUE 9.00e-17; EST_HUMAN HIT: R35321.1, EVALUE 2.00e-80; SWISSPROT HIT: P35678, EVALUE 3.00e+00
tcagttttcaaacccaattcccaaataattgctattttcagcatcatgatgcagatcacaaaaatattccaatttggcctggctctttttatgacgatatcctctcccagtaatttctgtaacctgcaaagtaagtgcctttttccttccac

SEQ ID NO: 18511 - DNA, 154 bp, Homo sapiens
  MAP TO AL035669.27; EXPRESSED IN PLACENTA, SIGNAL = 1.6; EXPRESSED IN HELA, SIGNAL = 1.6; EXPRESSED IN HBL100, SIGNAL = 1.9; EXPRESSED IN HEART, SIGNAL =   1; EXPRESSED IN LUNG, SIGNAL =   1; EXPRESSED IN BONE MARROW, SIGNAL = 1.2; EXPRESSED IN BRAIN, SIGNAL =   1; EXPRESSED IN BT474, SIGNAL =   2; EXPRESSED IN FETAL LIVER, SIGNAL =   1; NT HIT: gi4506674, EVALUE 3.00e-01; EST_HUMAN HIT: R67792.1, EVALUE 2.00e-62; SWISSPROT HIT: P51524, EVALUE 1.30e+00
cttccccattctccagctcttccttggtgatggagaagttatctccgcatgggcagggacagaaatatgtctccgagtcctcgtcatattggaagtcctcgatttccacctcgtcatgaaatactgccatggtcagcgggggttgctgaagggg

SEQ ID NO: 18512 - DNA, 157 bp, Homo sapiens
  MAP TO AL080245.13; EXPRESSED IN ADULT LIVER, SIGNAL = 1.3; EXPRESSED IN PLACENTA, SIGNAL = 1.4; EXPRESSED IN HBL100, SIGNAL = 1.7; EXPRESSED IN HELA, SIGNAL = 1.4; EXPRESSED IN BONE MARROW, SIGNAL = 1.7; EXPRESSED IN BT474, SIGNAL = 2.1; EXPRESSED IN FETAL LIVER, SIGNAL = 1.3; EXPRESSED IN HEART, SIGNAL = 1.9; EXPRESSED IN BRAIN, SIGNAL = 1.9; EXPRESSED IN LUNG, SIGNAL =   1; NT HIT: D86970.1, EVALUE 1.00e-06; EST_HUMAN HIT: AA993492.1, EVALUE 2.00e-83; SWISSPROT HIT: P54697, EVALUE 1.30e-02
catggtggtggactctccaggcttccagaacccccggcaccagggcaaggaccgggcggccacctttgaggagctgtgccacaactacgcccatgagcgcctgcagctgctgttctaccagcggacctttgtctccacgctacagcgatatcaagag

SEQ ID NO: 18513 - DNA, 128 bp, Homo sapiens
  MAP TO AL031847.9; EXPRESSED IN LUNG, SIGNAL = 2.1; EXPRESSED IN BRAIN, SIGNAL = 4.8; EXPRESSED IN BT474, SIGNAL = 3.9; EXPRESSED IN FETAL LIVER, SIGNAL = 4.1; EXPRESSED IN ADULT LIVER, SIGNAL = 2.4; EXPRESSED IN PLACENTA, SIGNAL = 2.9; EXPRESSED IN HBL100, SIGNAL = 5.5; EXPRESSED IN HEART, SIGNAL = 2.6; EXPRESSED IN BONE MARROW, SIGNAL = 3.3; EXPRESSED IN HELA, SIGNAL = 4.8; NT HIT: U91316.1, EVALUE 4.00e-34; SWISSPROT HIT: Q64559, EVALUE 4.00e-13; EST_HUMAN HIT: AW849754.1, EVALUE 2.00e-49
ctagggctgaggctccgcgtggccctgtcgcttcgccttcatctgcaggtaccgccctttgccttcctcaaagcgcttcttctcgtcctcggtctcgggctgtggaccacacacagagacaggcaggt

SEQ ID NO: 18514 - DNA, 212 bp, Homo sapiens
  MAP TO AC007028.2; EXPRESSED IN HELA, SIGNAL = 2.5; EXPRESSED IN PLACENTA, SIGNAL = 1.4; EXPRESSED IN HBL100, SIGNAL = 1.6; EXPRESSED IN HEART, SIGNAL = 1.3; EXPRESSED IN BONE MARROW, SIGNAL = 1.8; EXPRESSED IN BRAIN, SIGNAL = 1.1; EXPRESSED IN ADULT LIVER, SIGNAL = 1.1; EXPRESSED IN BT474, SIGNAL = 1.1; EXPRESSED IN FETAL LIVER, SIGNAL = 2.2; EST_HUMAN HIT: T62628.1, EVALUE 5.00e-41; SWISSPROT HIT: P21696, EVALUE 1.50e+00; NT HIT: AB017184.1, EVALUE 2.00e+00
ccttaatctgcagttcaagtcagcaaatctggaaggtgataacaccaaaagagaacattggagctgtgggagggaacaactggggaaaacaagaggactccacagcagggaaaagagcaagaacacacagaccaacatctcatttggaggaagttcagaaacattggaaaggtcacacccagactcatgttcacaatatgaacccagggaag

SEQ ID NO: 18515 - DNA, 312 bp, Homo sapiens
  MAP TO AC007688.15; EXPRESSED IN BT474, SIGNAL = 2.5; EXPRESSED IN FETAL LIVER, SIGNAL = 5.3; EXPRESSED IN PLACENTA, SIGNAL = 5.5; EXPRESSED IN HELA, SIGNAL = 5.8; EXPRESSED IN HBL100, SIGNAL = 3.2; EXPRESSED IN HEART, SIGNAL = 5.1; EXPRESSED IN LUNG, SIGNAL = 3.8; EXPRESSED IN BONE MARROW, SIGNAL = 4.3; EXPRESSED IN BRAIN, SIGNAL = 4.7; EXPRESSED IN ADULT LIVER, SIGNAL = 4.2; NT HIT: AL163210.2, EVALUE 1.20e-02; SWISSPROT HIT: Q01643, EVALUE 5.00e-05; EST_HUMAN HIT: AA527446.1, EVALUE 1.00e-106
ttatacgctggcatgcttccggagtcttgtgttccttctcccctgactcttcccttggtgtaggctgtccacacttgcgcagtggcctgccagcacctgggaggggagcatgcgcagtgtgtggcctgccagcacctgggaggggagcatgcgcagtgtgtggcctgccagcacctgggaggggagcatgcgcagtgtgtggcctgccggcacctgggaggggagcatgcgcagtgtgtggcctgccagcgcctgggaggggagcatgcgcagtgtgtttgtacgcatgcaggagttgtacacatgctcacg

SEQ ID NO: 18516 - DNA, 448 bp, Homo sapiens
  MAP TO Z83844.5; EXPRESSED IN LUNG, SIGNAL = 3.9; EXPRESSED IN BRAIN, SIGNAL = 4.6; EXPRESSED IN BT474, SIGNAL = 3.3; EXPRESSED IN ADULT LIVER, SIGNAL = 4.4; EXPRESSED IN PLACENTA, SIGNAL = 4.9; EXPRESSED IN HBL100, SIGNAL = 4.1; EXPRESSED IN BONE MARROW, SIGNAL = 4.2; EXPRESSED IN FETAL LIVER, SIGNAL = 3.5; EXPRESSED IN HELA, SIGNAL = 5.4; EXPRESSED IN HEART, SIGNAL = 3.5; NT HIT: X91348.1, EVALUE 4.40e+00; SWISSPROT HIT: P32182, EVALUE 4.50e-02; EST_HUMAN HIT: H55236.1, EVALUE 6.50e+00
gtcaggccgtgggccccctccccaccaccccccgggccctgcaccggaaaaggccctgcaaaggggcctgtggccagtgctgagtcaccagagagggcgctgggctgtggcggaccaggaccgtcccagctggaagtgggcgaccgccagggcctggcaggagccccagctgctacagacaccgagggggaggcccctggctgctcacgacttcctcctgctgtgctcagccctccacacaacctcgatgctgcagcaccccagagggaagtccaagcccagcttctccctccccccagacatcactcccttgcccagcaccaatcgcagtttgtttgggagcagacccagggaccctgagctgggcccctgccactcgcagcggcagctctcccccacacagtgctatcagttttctccaaccaggaggctggggtccaagcttggg

SEQ ID NO: 18517 - DNA, 241 bp, Homo sapiens
  MAP TO AC008068.2; EXPRESSED IN HELA, SIGNAL = 3.5; EXPRESSED IN BONE MARROW, SIGNAL = 2.9; EXPRESSED IN LUNG, SIGNAL = 2.3; EXPRESSED IN BRAIN, SIGNAL = 3.2; EXPRESSED IN BT474, SIGNAL = 2.2; EXPRESSED IN PLACENTA, SIGNAL = 3.3; EXPRESSED IN HEART, SIGNAL = 3.2; EXPRESSED IN HBL100, SIGNAL = 2.6; EXPRESSED IN ADULT LIVER, SIGNAL = 2.4; EXPRESSED IN FETAL LIVER, SIGNAL =   3; NT HIT: D38521.1, EVALUE 4.00e-54
gtggagagtttcctggtccagaagaggcccccgggccacagctcttggagctgcacggcccggcccaggttgcatttgatctgggccagctgcaagtcggactcggcgtctagccgctccgcgtagggcagcagcttgttgtagacgatctccttctgcgggacgaagccccgcgggcccggctcgggacgcccgcccggctccgggggctctccgactcccgcccgctcggccggctcca

SEQ ID NO: 18518 - DNA, 379 bp, Homo sapiens
  MAP TO AL031985.10; EXPRESSED IN HEART, SIGNAL = 7.3; EXPRESSED IN LUNG, SIGNAL =  17; EXPRESSED IN BRAIN, SIGNAL = 5.7; EXPRESSED IN BT474, SIGNAL =  21; EXPRESSED IN FETAL LIVER, SIGNAL =  14; EXPRESSED IN ADULT LIVER, SIGNAL =  11; EXPRESSED IN PLACENTA, SIGNAL =  24; EXPRESSED IN HBL100, SIGNAL =  22; EXPRESSED IN BONE MARROW, SIGNAL =  15; EXPRESSED IN HELA, SIGNAL =  20; SWISSPROT HIT: P46778, EVALUE 1.00e-55; NT HIT: gi11432694, EVALUE 0.00e+00; EST_HUMAN HIT: BF575117.1, EVALUE 0.00e+00
gtttcaggaagctatctcggcttttagagtgcttaatgtgctcaatacacacattaattctcttggcaagaatcttgcccttaacttgtttgtttacaacaatgccaacagcatgctggggaacattgtagactcttccagttttgccatggtaacacttgtgggacattcctttttgaacagtacccattcccttgatgtctacaatatcacctttcttatagattcgcatatacatggccaaaggaacaactccatgttttctaaaaggcctagagaacatgtatcgggtgcctctcctctttccctttgtgtttgtcattttggcgaattactggaaggtggcgtttctggccgtaaggctgatattcttcatttt

SEQ ID NO: 18519 - DNA, 95 bp, Homo sapiens
  MAP TO AP000508.1; EXPRESSED IN HELA, SIGNAL =  44; EXPRESSED IN LUNG, SIGNAL = 1e+02; EXPRESSED IN BRAIN, SIGNAL = 6.9; EXPRESSED IN BT474, SIGNAL =  12; EXPRESSED IN ADULT LIVER, SIGNAL =  20; EXPRESSED IN PLACENTA, SIGNAL =  32; EXPRESSED IN HEART, SIGNAL =  14; EXPRESSED IN HBL100, SIGNAL =  91; EXPRESSED IN BONE MARROW, SIGNAL =  48; EXPRESSED IN FETAL LIVER, SIGNAL =  16; NT HIT: gi11321588, EVALUE 9.00e-47; SWISSPROT HIT: P10321, EVALUE 7.20e+00; EST_HUMAN HIT: AI557325.1, EVALUE 1.00e-46
catcatgggcatcgttgctggcctggctgtcctggttgtcctagctgtccttggagctgtggtcaccgctatgatgtgtaggaggaagagctcag

SEQ ID NO: 18520 - DNA, 481 bp, Homo sapiens
  MAP TO AL035669.27; EXPRESSED IN FETAL LIVER, SIGNAL = 7.4; EXPRESSED IN ADULT LIVER, SIGNAL = 3.3; EXPRESSED IN PLACENTA, SIGNAL =   9; EXPRESSED IN HELA, SIGNAL =  16; EXPRESSED IN BONE MARROW, SIGNAL = 5.9; EXPRESSED IN BRAIN, SIGNAL = 2.8; EXPRESSED IN BT474, SIGNAL =  16; EXPRESSED IN HEART, SIGNAL = 4.6; EXPRESSED IN HBL100, SIGNAL =  13; EXPRESSED IN LUNG, SIGNAL = 6.4; NT HIT: AB002331.1, EVALUE 0.00e+00; EST_HUMAN HIT: AA703499.1, EVALUE 0.00e+00; SWISSPROT HIT: Q07663, EVALUE 3.30e-01
ccacgaaggaagacaggaggtccgaggagaaagcggcagccatggcagcctcaaagaaaacagcccctccaggctccgcggtgggcaagcagcctgcacctagaaacctcgtgccaaagaagtcttcttttgctaatgtggcagcagccacaccagccattaaaaagccaccctcaggtttcaagggcaccatccccaagaggccatggctctccgctaccccatcgagtggtgcttcagctgccaggcaggccggaccggcacctgcagcggcaacggctgcctccaagaagttccctggctccgctgctttggtgggagccgtaaggaagccagtggtaccttctgttccaatggcctcgccagccccaggacgccttggggctatgagtgctgcaccatcgcagccaaattcacaaattcggcaaaatatcagacgctccttaaaagagattttgtggaaaaggtgggctgttctgct

SEQ ID NO: 18521 - DNA, 559 bp, Homo sapiens
  MAP TO AL022312.7; EXPRESSED IN HBL100, SIGNAL =  14; EXPRESSED IN HELA, SIGNAL =  14; EXPRESSED IN HEART, SIGNAL = 4.3; EXPRESSED IN LUNG, SIGNAL =  11; EXPRESSED IN BRAIN, SIGNAL = 4.1; EXPRESSED IN BT474, SIGNAL =  26; EXPRESSED IN ADULT LIVER, SIGNAL =   6; EXPRESSED IN PLACENTA, SIGNAL =  25; EXPRESSED IN BONE MARROW, SIGNAL = 6.6; EXPRESSED IN FETAL LIVER, SIGNAL = 9.6; SWISSPROT HIT: P18848, EVALUE 5.00e-66; EST_HUMAN HIT: AW959371.1, EVALUE 0.00e+00; NT HIT: M86842.1, EVALUE 0.00e+00
cgacaaggctaaggcgggctcctccgaatggctggctgtggatgggttggtcagtccctccaacaacagcaagggtgagtgggccaccaccacatcgtcctggtgggatctagggttaggggcctcctacctttgtatctgactcacttggccccatcactcaaatgttttgcagaggatgccttctccgggacagattggatgttggagaaaatggatttgaaggagttcgacttggatgccctgttgggtatagatgacctggaaaccatgccagatgaccttctgaccacgttggatgacacttgtgatctctttgcccccctagtccaggagactaataagcagcccccccagacggtgaacccaattggccatctcccagaaagtttaacaaaacccgaccaggttgcccccttcaccttcttacaacctcttcccctttccccaggggtcctgtcctccactccagatcattcctttagtttagagctgggcagtgaagtggatatcactgaaggagataggaagccagactacactgcttacgttgccatga

SEQ ID NO: 18522 - DNA, 227 bp, Homo sapiens
  MAP TO AC007283.3; EXPRESSED IN FETAL LIVER, SIGNAL = 2.3; EXPRESSED IN ADULT LIVER, SIGNAL = 3.1; EXPRESSED IN HBL100, SIGNAL = 2.4; EXPRESSED IN HELA, SIGNAL = 2.7; EXPRESSED IN HEART, SIGNAL = 3.8; EXPRESSED IN BONE MARROW, SIGNAL = 2.8; EXPRESSED IN LUNG, SIGNAL = 5.4; EXPRESSED IN BRAIN, SIGNAL = 1.6; EXPRESSED IN BT474, SIGNAL = 3.6; EXPRESSED IN PLACENTA, SIGNAL = 5.9; EST_HUMAN HIT: AI139524.1, EVALUE 1.00e-122; NT HIT: AF015450.1, EVALUE 1.00e-125; SWISSPROT HIT: P96254, EVALUE 6.60e+00
tcttgtctcagtttctgggagaggcactgcaggtacagggatggtgagctgtgagactgctccagcagggacatgtccgcagtacacaggctccagaagaagtcagcttctcggtgaactgtgcacagccctcgcttctgagccttgaattccacattcttcatcgctggcccatccacctccaagaggctgctgtcctccagctggccctctgacaccacatagtt

SEQ ID NO: 18523 - DNA, 197 bp, Homo sapiens
  MAP TO AL096818.2; EXPRESSED IN FETAL LIVER, SIGNAL = 2.6; EXPRESSED IN ADULT LIVER, SIGNAL = 1.7; EXPRESSED IN PLACENTA, SIGNAL = 3.1; EXPRESSED IN HBL100, SIGNAL = 2.3; EXPRESSED IN HELA, SIGNAL = 2.7; EXPRESSED IN HEART, SIGNAL = 4.8; EXPRESSED IN BRAIN, SIGNAL =   2; EXPRESSED IN BONE MARROW, SIGNAL = 1.8; EXPRESSED IN BT474, SIGNAL = 1.8; EXPRESSED IN LUNG, SIGNAL = 1.6; NT HIT: gi4508020, EVALUE 3.00e-88; EST_HUMAN HIT: AA626734.1, EVALUE 4.00e-88; SWISSPROT HIT: O75312, EVALUE 8.00e-30
agatgatgccctggtgatcacacactacaaccagacccgacagcaggaagagatgctggggctccaagcagaagcaccaacagagaagccagaagaggaagatctcagaaatgaagtgctccagtttaacacaaacggcccagaatgcaatgcccccactcagaccaacatgaagctagtacaaatccctcacttta

SEQ ID NO: 18524 - DNA, 134 bp, Homo sapiens
  MAP TO AC011004.1; EXPRESSED IN LUNG, SIGNAL = 1.4; EXPRESSED IN BRAIN, SIGNAL =   1; EXPRESSED IN FETAL LIVER, SIGNAL = 1.6; EXPRESSED IN ADULT LIVER, SIGNAL = 2.4; EXPRESSED IN PLACENTA, SIGNAL = 2.4; EXPRESSED IN HELA, SIGNAL = 1.7; EXPRESSED IN HEART, SIGNAL = 1.9; EXPRESSED IN BONE MARROW, SIGNAL = 2.3; EXPRESSED IN BT474, SIGNAL = 3.6; EXPRESSED IN HBL100, SIGNAL = 4.6; EST_HUMAN HIT: AI497807.1, EVALUE 7.00e-70; SWISSPROT HIT: O10348, EVALUE 6.80e+00; NT HIT: X82834.1, EVALUE 5.00e-03
ccacgtgctggtccattatggatgtgaaggaagcagagaccctgctccacaaagcctcgggttccaagtctaccagatacctagaaaccaattctttgtgttcaataatacagaaaatcgtactttcatattta

SEQ ID NO: 18525 - DNA, 222 bp, Homo sapiens
  MAP TO AC009363.3; EXPRESSED IN HBL100, SIGNAL = 4.6; EXPRESSED IN HELA, SIGNAL = 6.3; EXPRESSED IN LUNG, SIGNAL = 4.1; EXPRESSED IN BRAIN, SIGNAL = 4.5; EXPRESSED IN BT474, SIGNAL = 3.5; EXPRESSED IN FETAL LIVER, SIGNAL = 6.2; EXPRESSED IN ADULT LIVER, SIGNAL = 6.2; EXPRESSED IN PLACENTA, SIGNAL = 6.9; EXPRESSED IN HEART, SIGNAL = 5.9; EXPRESSED IN BONE MARROW, SIGNAL = 5.1; NT HIT: U09850.1, EVALUE 1.00e-114; SWISSPROT HIT: Q60765, EVALUE 2.00e-15; EST_HUMAN HIT: BE906024.1, EVALUE 1.00e-122
gaatccgagcggctggaactcatgaacgcagagctgaagacccagattgaggagctgaagcaggagcggcagcagctcatcctgatgctgaaccgacaccgccccacctgcatcgtccggaccgacagtgtcaagacccccgagtcagaaggcaacccactgctcgagcagctcgagaagaagtgaccatgggctgggaggaggtggaggaggaggaagagg

SEQ ID NO: 18526 - DNA, 227 bp, Homo sapiens
  MAP TO AC004938.2; EXPRESSED IN HBL100, SIGNAL = 4.4; EXPRESSED IN HELA, SIGNAL = 4.4; EXPRESSED IN HEART, SIGNAL = 2.4; EXPRESSED IN LUNG, SIGNAL = 2.2; EXPRESSED IN BRAIN, SIGNAL = 2.3; EXPRESSED IN BT474, SIGNAL = 3.7; EXPRESSED IN ADULT LIVER, SIGNAL = 3.1; EXPRESSED IN PLACENTA, SIGNAL = 4.1; EXPRESSED IN BONE MARROW, SIGNAL = 2.8; EXPRESSED IN FETAL LIVER, SIGNAL = 3.2; NT HIT: gi9506930, EVALUE 1.00e-124; EST_HUMAN HIT: BF033383.1, EVALUE 1.00e-124; SWISSPROT HIT: Q06218, EVALUE 2.00e-10
tcccagctgcctgggccagaccagttacagcagtttcaggtggtctgtgagactgaggaagacaaattcctcctgctgtatgccctgctcaagctgtcattgattcggggcaagtctctgctctttgtcaacactctagaacggagttaccggctacgcctgttcttggaacagttcagcatccccacctgtgtgctcaatggagagcttccactgcgctccaggtc

SEQ ID NO: 18527 - DNA, 112 bp, Homo sapiens
  MAP TO AC009433.1; EXPRESSED IN FETAL LIVER, SIGNAL = 1.5; EXPRESSED IN ADULT LIVER, SIGNAL =   3; EXPRESSED IN HBL100, SIGNAL = 1.7; EXPRESSED IN HELA, SIGNAL = 1.7; EXPRESSED IN HEART, SIGNAL = 1.6; EXPRESSED IN LUNG, SIGNAL = 0.95; EXPRESSED IN BRAIN, SIGNAL = 1.5; EXPRESSED IN BT474, SIGNAL = 1.5; EXPRESSED IN PLACENTA, SIGNAL = 1.5; EXPRESSED IN BONE MARROW, SIGNAL = 2.2; EST_HUMAN HIT: AA496109.1, EVALUE 8.00e-57; SWISSPROT HIT: P49605, EVALUE 2.30e+00; NT HIT: AE001972.1, EVALUE 3.80e+00
ggcctatttgcctggcatcggcggcggcagaaagagaagggccgagacctggctccccgtgtctcctacacacctgccatgaggatgaccagcaccgactactccctctcag

SEQ ID NO: 18528 - DNA, 469 bp, Homo sapiens; identical to SEQ ID NO: 1775
  MAP TO AC004815.2; EXPRESSED IN FETAL LIVER, SIGNAL = 2.4; EXPRESSED IN HBL100, SIGNAL = 1.4; EXPRESSED IN HELA, SIGNAL = 2.5; EXPRESSED IN HEART, SIGNAL = 2.6; EXPRESSED IN BONE MARROW, SIGNAL = 2.1; EXPRESSED IN LUNG, SIGNAL = 1.4; EXPRESSED IN ADULT LIVER, SIGNAL = 2.7; EXPRESSED IN BT474, SIGNAL = 1.3; EXPRESSED IN PLACENTA, SIGNAL = 2.1; EXPRESSED IN BRAIN, SIGNAL = 1.6; NT HIT: U78045.1, EVALUE 2.00e-24; EST_HUMAN HIT: AA663332.1, EVALUE 1.00e-28; SWISSPROT HIT: P26951, EVALUE 5.50e-01

SEQ ID NO: 18529 - DNA, 177 bp, Homo sapiens
  MAP TO AC007778.1; EXPRESSED IN FETAL LIVER, SIGNAL = 4.1; EXPRESSED IN ADULT LIVER, SIGNAL =  12; EXPRESSED IN HBL100, SIGNAL =  20; EXPRESSED IN HELA, SIGNAL = 8.8; EXPRESSED IN HEART, SIGNAL = 5.1; EXPRESSED IN LUNG, SIGNAL = 7.6; EXPRESSED IN BT474, SIGNAL = 8.4; EXPRESSED IN PLACENTA, SIGNAL =  11; EXPRESSED IN BRAIN, SIGNAL = 4.9; EXPRESSED IN BONE MARROW, SIGNAL = 7.5; EST_HUMAN HIT: H91193.1, EVALUE 4.00e-35; SWISSPROT HIT: P35254, EVALUE 8.50e+00; NT HIT: AL163249.2, EVALUE 9.00e-27
  unsure 169
cgcgaaggtctgcagcgtcactcctgaagccagcgagactatgaacctaccgggaggatgcgccaccttaaaagctttaacactcacagcgaaggtttgcagcttcactcctgaagccagcgagaccacgaacccacctggaggaacgaacaactccagacgtgccgcncttaagag

SEQ ID NO: 18530 - DNA, 310 bp, Homo sapiens
  MAP TO AC004897.1; EXPRESSED IN PLACENTA, SIGNAL =  10; EXPRESSED IN HBL100, SIGNAL = 1.8; EXPRESSED IN HEART, SIGNAL = 1.2; EXPRESSED IN BONE MARROW, SIGNAL = 1.5; EXPRESSED IN BRAIN, SIGNAL = 0.91; EXPRESSED IN LUNG, SIGNAL = 1.6; EXPRESSED IN ADULT LIVER, SIGNAL = 2.8; EXPRESSED IN BT474, SIGNAL = 0.99; EXPRESSED IN FETAL LIVER, SIGNAL = 1.4; EXPRESSED IN HELA, SIGNAL = 1.7; NT HIT: AL163280.2, EVALUE 1.00e-105; EST_HUMAN HIT: AA668227.1, EVALUE 2.00e-23; SWISSPROT HIT: P14077, EVALUE 1.00e-09
agatcaggaggagcaggtggaacaggacaaacgggataaaaagaaggccaccgctttagtcatggccttcaggcaagcggactttggagactctggaacagggaaaggctgggcaaatcaaatgcctaatagggcttgcttccagtgcagtttgcaaggacactttaaaaaagattgtcagaatagaaataagccgccccctcgtccatgccccttatgtcaagggaatcactggaaggtccactgccccaggggacaaaggtcctctgagtcagaagccactaaccagaagatccagcagcaggactga

SEQ ID NO: 18531 - DNA, 171 bp, Homo sapiens
  MAP TO AC007917.15; EXPRESSED IN PLACENTA, SIGNAL = 1.4; EXPRESSED IN HELA, SIGNAL = 1.1; EXPRESSED IN HEART, SIGNAL = 1.3; EXPRESSED IN BONE MARROW, SIGNAL = 1.1; EXPRESSED IN FETAL LIVER, SIGNAL =   1; NT HIT: gi11434722, EVALUE 8.00e-92; EST_HUMAN HIT: H23494.1, EVALUE 3.00e-85; SWISSPROT HIT: P49619, EVALUE 2.00e-14
aatcaaatatggctgagaagcaagcaccagctgaagaccaagtggctgcgacccccctggaaccccccgtccctcggtcttcaagctcggaatccccagtggtatacctgaaggatgttgtgtgctacctgtccctgctggagacggggaggcctcaggataagctggagt

SEQ ID NO: 18532 - DNA, 153 bp, Homo sapiens
  MAP TO AC007938.1; EXPRESSED IN BONE MARROW, SIGNAL = 1.4; EXPRESSED IN BT474, SIGNAL = 1.7; EXPRESSED IN PLACENTA, SIGNAL = 1.5; EXPRESSED IN HBL100, SIGNAL = 1.6; EXPRESSED IN HEART, SIGNAL = 0.99; EXPRESSED IN BRAIN, SIGNAL = 1.3; EST_HUMAN HIT: AW779612.1, EVALUE 4.00e-81; SWISSPROT HIT: P53620, EVALUE 5.00e-15; NT HIT: gi6912319, EVALUE 2.00e-73
cttcaagggttttggtagaactgagggcaaaggtttcctctttctcaaaggtatctcccacctcttcccaagcagcagcaaagttaggcttcagtactttctgaatatggtcagacacagtcacttcgagatcttccagctagtgggtaataa

SEQ ID NO: 18533 - DNA, 341 bp, Homo sapiens
  MAP TO AC007993.2; EXPRESSED IN HELA, SIGNAL = 1.1; EXPRESSED IN PLACENTA, SIGNAL = 1.3; EXPRESSED IN HBL100, SIGNAL = 1.6; EXPRESSED IN HEART, SIGNAL = 1.1; EXPRESSED IN BONE MARROW, SIGNAL = 1.7; EXPRESSED IN BRAIN, SIGNAL = 0.93; EXPRESSED IN LUNG, SIGNAL = 0.98; EXPRESSED IN ADULT LIVER, SIGNAL = 1.5; EXPRESSED IN BT474, SIGNAL = 1.5; EXPRESSED IN FETAL LIVER, SIGNAL =   1; EST_HUMAN HIT: AI000692.1, EVALUE 3.00e-65; SWISSPROT HIT: P45481, EVALUE 8.60e+00; NT HIT: gi11426006, EVALUE 5.00e-27
agttccctcaggaggtagaaccatctctaactcagcaggagattccagctcagattccagagccccctatggaggcagaaccttctccaacccagcaagaggccacagttcagactccagagccccctaaggaggtagaaccttcaagccagcagatggtcccatctcagcctccagagccacctaaggaggttgcagctcaacctccagctcattatgaggtgacagttccaacacaaggtcaggatcaagctcagcattcaatattgcccagtatcacagttcaacctttggacctgggacttaccatcactccagaatccactacggaggttgaactt

SEQ ID NO: 18534 - DNA, 280 bp, Homo sapiens
  MAP TO AC009288.8; EXPRESSED IN ADULT LIVER, SIGNAL =   1; EXPRESSED IN BT474, SIGNAL = 2.3; EXPRESSED IN FETAL LIVER, SIGNAL = 1.4; EXPRESSED IN PLACENTA, SIGNAL = 3.1; EXPRESSED IN HBL100, SIGNAL = 1.3; EXPRESSED IN HEART, SIGNAL =   1; EXPRESSED IN LUNG, SIGNAL =   1; EST_HUMAN HIT: BE717028.1, EVALUE 1.00e-110; SWISSPROT HIT: Q62786, EVALUE 5.00e-12; NT HIT: gi4504626, EVALUE 0.00e+00
gtgtggtgtcagcacagcggcaggtcaccgttcaggaaggacccttgtaccgcacggagggctcccacatcactatctggtgcaatgtgagtggctaccagggaccttctgaacagaatttccagtggtccatttacctgccttcgtcgccagagcgagaggtgcagatcgtcagcaccatggactcttccttcccctatgccatctacacccagcgcgtccgcggagggaagatcttcatagaaagagtccaggggaacccaaccctattgcacatcac

SEQ ID NO: 18535 - DNA, 167 bp, Homo sapiens
  MAP TO AC010154.1; EXPRESSED IN HELA, SIGNAL =   2; EXPRESSED IN LUNG, SIGNAL = 1.7; EXPRESSED IN BRAIN, SIGNAL = 0.92; EXPRESSED IN BT474, SIGNAL = 1.1; EXPRESSED IN ADULT LIVER, SIGNAL = 9.1; EXPRESSED IN PLACENTA, SIGNAL = 2.3; EXPRESSED IN HEART, SIGNAL = 1.4; EXPRESSED IN HBL100, SIGNAL = 2.4; EXPRESSED IN BONE MARROW, SIGNAL = 1.8; EXPRESSED IN FETAL LIVER, SIGNAL = 1.4; NT HIT: AB008681.1, EVALUE 8.00e-36; EST_HUMAN HIT: AV731601.1, EVALUE 2.00e-40; SWISSPROT HIT: P21416, EVALUE 3.40e-01
tggtccctataatagaacaccaaggttgccaggtttattaaagcctccagattttgttcagggcccagctctgatttttggagcattctcctgatatctgcagctgattgggtaataaacttatctttcaggatcaattgactcttgagggagtcaggtgacaggta

SEQ ID NO: 18536 - DNA, 128 bp, Homo sapiens
  MAP TO AJ239326.3; EXPRESSED IN HELA, SIGNAL =   4; EXPRESSED IN BONE MARROW, SIGNAL = 2.2; EXPRESSED IN LUNG, SIGNAL = 2.9; EXPRESSED IN BRAIN, SIGNAL =   2; EXPRESSED IN BT474, SIGNAL = 2.4; EXPRESSED IN PLACENTA, SIGNAL =   2; EXPRESSED IN HEART, SIGNAL =   2; EXPRESSED IN HBL100, SIGNAL = 2.5; EXPRESSED IN ADULT LIVER, SIGNAL = 1.8; EXPRESSED IN FETAL LIVER, SIGNAL = 1.7; NT HIT: gi11423661, EVALUE 3.00e-66; SWISSPROT HIT: P78563, EVALUE 4.60e-01; EST_HUMAN HIT: AW316808.1, EVALUE 2.90e-01
cgtgtcccccaaggatggcagcacacctgggcctggcgagggctctcagctctccaatgggggtggtggtggccccggcagaaagcggcccctggaggagggcagcaatggccactccaagtaccgcc

SEQ ID NO: 18537 - DNA, 210 bp, Homo sapiens
  MAP TO AC010680.2; EXPRESSED IN ADULT LIVER, SIGNAL = 1.8; EXPRESSED IN BT474, SIGNAL = 1.9; EXPRESSED IN HEART, SIGNAL = 3.1; EST_HUMAN HIT: AA211337.1, EVALUE 2.00e-80; NT HIT: AJ277892.1, EVALUE 1.00e-115
aagtaactataatggaagagaaagaaagggcttataccctagaagaagaagctgtttcagtacaacgggaagaagaatatgaggaatatgaagaatatgattataaagaatttgaggagtatgaaccaacagaagaatatgaccaatatgaagaatacgaggagcgggagtatgaacgatatgaagagcatgaagaatacatcacaggta

SEQ ID NO: 18538 - DNA, 91 bp, Homo sapiens
  MAP TO AC010726.2; EXPRESSED IN PLACENTA, SIGNAL = 1.1; EXPRESSED IN HEART, SIGNAL = 1.6; EXPRESSED IN BONE MARROW, SIGNAL = 1.2; EXPRESSED IN BT474, SIGNAL = 1.1; EXPRESSED IN FETAL LIVER, SIGNAL = 0.99; EXPRESSED IN ADULT LIVER, SIGNAL = 1.2; EXPRESSED IN HELA, SIGNAL = 1.5; NT HIT: L41825.1, EVALUE 7.00e-04; SWISSPROT HIT: P10264, EVALUE 3.10e+00; EST_HUMAN HIT: AW855920.1, EVALUE 4.40e+00
tttttggccaaattacacaatgcagttccaaattctgtctctgatgagcgcactcaagatattgtcgttcgtatgtcaacttttgagaatg

SEQ ID NO: 18539 - DNA, 300 bp, Homo sapiens
  MAP TO AL021707.2; EXPRESSED IN HELA, SIGNAL = 3.4; EXPRESSED IN LUNG, SIGNAL = 1.5; EXPRESSED IN BRAIN, SIGNAL =   1; EXPRESSED IN BT474, SIGNAL = 2.3; EXPRESSED IN ADULT LIVER, SIGNAL = 0.93; EXPRESSED IN PLACENTA, SIGNAL = 1.2; EXPRESSED IN HEART, SIGNAL = 1.2; EXPRESSED IN HBL100, SIGNAL =   2; EXPRESSED IN BONE MARROW, SIGNAL = 1.1; EXPRESSED IN FETAL LIVER, SIGNAL = 0.96; NT HIT: gi11418123, EVALUE 5.00e-88; EST_HUMAN HIT: AL039248.1, EVALUE 6.00e-88; SWISSPROT HIT: Q15040, EVALUE 3.00e-27
tcttgagtttggagtcgaggttgtagtaggcccctcccacctctcgaacacagatccagtgctgccttttgaggggcagtttcagtggaccccagcataggctggagggcagattcatgatgaagcccatgacgttagtgagggcaatgacaccgacatccctgcaggggagaaatggtggcaggctctgatgcagcccattttccaaggttccctggctgtaataccacaactggctacctccccactcatgccatgagcccaagtactaaaagcttataccacaaccgtgctgttctc

SEQ ID NO: 18540 - DNA, 136 bp, Homo sapiens
  MAP TO AC010889.1; EXPRESSED IN FETAL LIVER, SIGNAL = 0.88; EXPRESSED IN ADULT LIVER, SIGNAL =   2; EXPRESSED IN HELA, SIGNAL = 2.7; EXPRESSED IN BONE MARROW, SIGNAL = 1.5; EXPRESSED IN LUNG, SIGNAL = 1.6; EXPRESSED IN BRAIN, SIGNAL = 1.3; EXPRESSED IN BT474, SIGNAL =   2; EXPRESSED IN PLACENTA, SIGNAL = 1.8; EXPRESSED IN HEART, SIGNAL = 1.1; EXPRESSED IN HBL100, SIGNAL = 1.4; SWISSPROT HIT: P10266, EVALUE 2.00e-09; EST_HUMAN HIT: AI823404.1, EVALUE 8.00e-39
tgatcatctagttgctactgcaatgtctaatgctagacactttcacaacttaacccatgtaaatgcctctggtctcaaacgcagatacagcattacctggaaagaagctaaagtgattattcagcgatgcacatct

SEQ ID NO: 18541 - DNA, 122 bp, Homo sapiens
  MAP TO AC011193.1; EXPRESSED IN HBL100, SIGNAL = 1.4; EXPRESSED IN HELA, SIGNAL = 1.3; EXPRESSED IN HEART, SIGNAL = 1.5; EXPRESSED IN LUNG, SIGNAL = 1.8; EXPRESSED IN BRAIN, SIGNAL = 1.6; EXPRESSED IN BT474, SIGNAL = 1.1; EXPRESSED IN ADULT LIVER, SIGNAL = 1.7; EXPRESSED IN PLACENTA, SIGNAL = 2.2; EXPRESSED IN BONE MARROW, SIGNAL = 1.5; EXPRESSED IN FETAL LIVER, SIGNAL = 2.4; SWISSPROT HIT: O86436, EVALUE 9.00e+00; EST_HUMAN HIT: AV734258.1, EVALUE 7.00e-49; NT HIT: X99886.1, EVALUE 8.00e-54
  unsure 35
  unsure 116
catgagcagcaggcacagaagcgctgcagaaaccnttcatcttggagggcaagggtgtgagcttcagcatgagaggtgaaggtttctgggttgttctcaacctctctgctcctcgngtggct

SEQ ID NO: 18542 - DNA, 228 bp, Homo sapiens
  MAP TO AC010872.2; EXPRESSED IN FETAL LIVER, SIGNAL = 5.3; EXPRESSED IN HBL100, SIGNAL = 1.8; EXPRESSED IN HELA, SIGNAL = 2.2; EXPRESSED IN HEART, SIGNAL = 2.3; EXPRESSED IN BONE MARROW, SIGNAL =   2; EXPRESSED IN LUNG, SIGNAL = 1.4; EXPRESSED IN ADULT LIVER, SIGNAL =  12; EXPRESSED IN BT474, SIGNAL = 1.4; EXPRESSED IN PLACENTA, SIGNAL = 2.3; EXPRESSED IN BRAIN, SIGNAL = 1.5; NT HIT: M19816.1, EVALUE 1.00e-117; EST_HUMAN HIT: AI174976.1, EVALUE 1.00e-111; SWISSPROT HIT: P04114, EVALUE 7.00e-34
tcagtgtggacagcctcagtgctccactcacatcctccagtggctgaaacgtgtgcatgccaacccccttctgatagatgtggtcacctacctggtggccctgatccccgagccctcagcacagcagctgcgagagatcttcaacatggcgagggatcagcgcagccgagccaccttgtatgcgctgagccacgcggtcaacaagtgagtttccacactgtatttctc

SEQ ID NO: 18543 - DNA, 448 bp, Homo sapiens; identical to SEQ ID NO: 1791
  MAP TO AL022068.2; EXPRESSED IN BONE MARROW, SIGNAL = 1.2; EXPRESSED IN BRAIN, SIGNAL = 1.1; EXPRESSED IN FETAL LIVER, SIGNAL = 1.1; EXPRESSED IN ADULT LIVER, SIGNAL = 1.2; EXPRESSED IN HBL100, SIGNAL = 0.97; EXPRESSED IN HELA, SIGNAL = 1.4; EXPRESSED IN HEART, SIGNAL = 1.4; EXPRESSED IN BT474, SIGNAL = 0.99; EXPRESSED IN PLACENTA, SIGNAL = 1.7; EST_HUMAN HIT: BF183307.1, EVALUE 1.10e-01; NT HIT: AF224268.1, EVALUE 2.00e-04

SEQ ID NO: 18544 - DNA, 115 bp, Homo sapiens
  MAP TO AC011191.1; EXPRESSED IN BT474, SIGNAL = 2.3; EXPRESSED IN HBL100, SIGNAL = 2.7; EXPRESSED IN HELA, SIGNAL = 3.6; EXPRESSED IN BONE MARROW, SIGNAL = 4.1; EXPRESSED IN LUNG, SIGNAL = 2.7; EXPRESSED IN ADULT LIVER, SIGNAL = 3.4; EXPRESSED IN FETAL LIVER, SIGNAL = 3.7; EXPRESSED IN PLACENTA, SIGNAL = 3.9; EXPRESSED IN HEART, SIGNAL = 3.9; EXPRESSED IN BRAIN, SIGNAL = 2.8; SWISSPROT HIT: Q01900, EVALUE 1.80e+00; EST_HUMAN HIT: BF671063.1, EVALUE 9.40e-02
aggaattgaggttgcagcagctggatatgccactggaccagctgcaggtggggaaggggcctccggcgggcccggggatgctcacagcccagggagagcatggatgctaattcac

SEQ ID NO: 18545 - DNA, 376 bp, Homo sapiens
  MAP TO AC011290.1; EXPRESSED IN PLACENTA, SIGNAL = 7.2; EXPRESSED IN BONE MARROW, SIGNAL = 6.6; EXPRESSED IN BRAIN, SIGNAL = 5.8; EXPRESSED IN BT474, SIGNAL = 4.1; EXPRESSED IN FETAL LIVER, SIGNAL = 7.6; EXPRESSED IN HBL100, SIGNAL = 5.6; EXPRESSED IN HELA, SIGNAL = 7.6; EXPRESSED IN HEART, SIGNAL =  10; EXPRESSED IN LUNG, SIGNAL =   5; EXPRESSED IN ADULT LIVER, SIGNAL = 7.2; NT HIT: gi6005855, EVALUE 0.00e+00; EST_HUMAN HIT: AI928867.1, EVALUE 1.00e-86; SWISSPROT HIT: P31367, EVALUE 1.00e-45
gtttgaaaagctggacatcacccctaaaagtgcccagaagatcaagccggtgcttgagcggtggatggctgaggctgaggcccgccatcgagcaggtatgcagaacctgaccgagtttatcgggagtgaaccatccaaaaagcgcaagcggcgcacctccttcacaccccaggcccttgagatcctcaatgcccactttgagaagaacacacacccttctgggcaggaaatgaccgaaattgctgagaagctgaactatgaccgagaagtagttagagtttggttctgcaataagaggcaagccctgaagaacacaattaaacgcttaaaacagcacgagccggccacggcagtccctttggagcccttaacagac

SEQ ID NO: 18546 - DNA, 140 bp, Homo sapiens
  MAP TO AL035691.17; EXPRESSED IN BONE MARROW, SIGNAL = 2.4; EXPRESSED IN LUNG, SIGNAL = 1.4; EXPRESSED IN BT474, SIGNAL = 1.8; EXPRESSED IN ADULT LIVER, SIGNAL = 1.9; EXPRESSED IN FETAL LIVER, SIGNAL = 1.6; EXPRESSED IN HELA, SIGNAL =   2; EXPRESSED IN PLACENTA, SIGNAL = 2.1; EXPRESSED IN HBL100, SIGNAL = 2.7; EXPRESSED IN HEART, SIGNAL = 1.3; EXPRESSED IN BRAIN, SIGNAL = 1.8; SWISSPROT HIT: P11717, EVALUE 6.00e-16; NT HIT: gi11418394, EVALUE 1.00e-53; EST_HUMAN HIT: BF690617.1, EVALUE 3.00e-02
tacaaacagcacttgatggcccgcactggacaatatccacacttccacagatgttgattttataaagtacattatttttggtatcaacagcttcccatgtataactggaaaggaagaaaaacaacttgtcaatgtcactg

SEQ ID NO: 18547 - DNA, 143 bp, Homo sapiens
  MAP TO AL049593.4; EXPRESSED IN ADULT LIVER, SIGNAL = 2.1; EXPRESSED IN BT474, SIGNAL =   2; EXPRESSED IN FETAL LIVER, SIGNAL = 2.5; EXPRESSED IN PLACENTA, SIGNAL = 2.2; EXPRESSED IN HBL100, SIGNAL = 1.8; EXPRESSED IN HELA, SIGNAL =   2; EXPRESSED IN HEART, SIGNAL =   2; EXPRESSED IN BRAIN, SIGNAL = 2.8; EXPRESSED IN BONE MARROW, SIGNAL = 2.4; EXPRESSED IN LUNG, SIGNAL = 1.4; SWISSPROT HIT: P10687, EVALUE 2.00e-06; NT HIT: AY004175.1, EVALUE 3.00e-75; EST_HUMAN HIT: BE697682.1, EVALUE 5.00e-75
ttgagcaagacctcgctgctctggatgctgaaatgacccaaaagttaatagacttgaaggacaaacaacagcagcagctgcttaatcttcggcaagaacagtattatagtgaaaaataccagaagcgagaacatattaaactg

SEQ ID NO: 18548 - DNA, 99 bp, Homo sapiens
  MAP TO AL049812.3; EXPRESSED IN HEART, SIGNAL = 1.4; EXPRESSED IN LUNG, SIGNAL = 1.1; EXPRESSED IN BRAIN, SIGNAL = 2.9; EXPRESSED IN BT474, SIGNAL = 2.1; EXPRESSED IN ADULT LIVER, SIGNAL = 3.5; EXPRESSED IN PLACENTA, SIGNAL = 2.7; EXPRESSED IN HBL100, SIGNAL = 2.4; EXPRESSED IN BONE MARROW, SIGNAL = 3.1; EXPRESSED IN FETAL LIVER, SIGNAL = 3.9; EXPRESSED IN HELA, SIGNAL =   2; EST_HUMAN HIT: BE009795.1, EVALUE 2.00e-02; NT HIT: U80017.1, EVALUE 8.00e-13
gggaaacctcaggaagcttacagtcatggtggaagggaagggatagcagccatgtcacatggtaagagagagaggaggaggttctagactctaactctt

SEQ ID NO: 18549 - DNA, 233 bp, Homo sapiens
  MAP TO AL109757.1; EXPRESSED IN PLACENTA, SIGNAL = 1.5; EXPRESSED IN HBL100, SIGNAL = 2.9; EXPRESSED IN HEART, SIGNAL = 0.95; EXPRESSED IN LUNG, SIGNAL =   1; EXPRESSED IN BRAIN, SIGNAL = 0.99; EXPRESSED IN BONE MARROW, SIGNAL = 0.96; EXPRESSED IN BT474, SIGNAL = 2.8; EXPRESSED IN ADULT LIVER, SIGNAL = 0.91; EXPRESSED IN FETAL LIVER, SIGNAL = 0.89; NT HIT: AB007922.2, EVALUE 1.00e-107; EST_HUMAN HIT: M78374.1, EVALUE 1.00e-97; SWISSPROT HIT: Q07878, EVALUE 6.00e-06
gtatcattggtggactgaccagtgttataacttcgacagtggaaggtgtgaaaacagaagggggtgtcagcggtttcatatctggccttggaaaagggcttgttggcactgtaaccaagccagtggcaggcgccctggattttgcatcagaaacagcccaggcggtgagagacacagccacactcagcggccccaggtcagtggtgtgggaagaatggcttttgcagtttcca

SEQ ID NO: 18550 - DNA, 211 bp, Homo sapiens
  MAP TO AL109801.5; EXPRESSED IN FETAL LIVER, SIGNAL = 1.2; EXPRESSED IN ADULT LIVER, SIGNAL = 1.1; EXPRESSED IN HELA, SIGNAL = 1.4; EXPRESSED IN PLACENTA, SIGNAL = 1.3; EXPRESSED IN HBL100, SIGNAL = 0.93; EXPRESSED IN HEART, SIGNAL = 1.4; EXPRESSED IN BONE MARROW, SIGNAL = 1.2; EXPRESSED IN BRAIN, SIGNAL =   1; EST_HUMAN HIT: AI538768.1, EVALUE 2.00e-19; NT HIT: U78027.1, EVALUE 1.00e-115; SWISSPROT HIT: P23961, EVALUE 3.20e-01
acatgtactggaattagaatgatgcagagaagattagcatggtccctgcacaaggatgatgcacaaatccgtgaagtattccatataaaaacaaagaagaagaagaaggtggatcatggcagacgggaggcaagactagattgcagctccaacttcgatgaacagagcagcatgtggaggctcgcatcatgaatttttgctccagaacgac

SEQ ID NO: 18551 - DNA, 240 bp, Homo sapiens
  MAP TO AL049830.2; EXPRESSED IN FETAL LIVER, SIGNAL = 9.3; EXPRESSED IN HBL100, SIGNAL =  39; EXPRESSED IN HELA, SIGNAL =  17; EXPRESSED IN HEART, SIGNAL = 4.6; EXPRESSED IN LUNG, SIGNAL =  11; EXPRESSED IN BRAIN, SIGNAL = 2.6; EXPRESSED IN BT474, SIGNAL =  21; EXPRESSED IN ADULT LIVER, SIGNAL = 5.8; EXPRESSED IN PLACENTA, SIGNAL =  16; EXPRESSED IN BONE MARROW, SIGNAL = 9.1; EST_HUMAN HIT: AA557801.1, EVALUE 5.00e-94; NT HIT: L05094.1, EVALUE 4.00e-94; SWISSPROT HIT: P08526, EVALUE 1.00e-15
gacacaaagctgtcatcgtgaagaacattgatgatggcacctcagatcgcccctacagccatgccctggtggctggaattgaccactatccctgcaaagtaagagctgccatgggcaagaagaagatcaccaagaggtcaaagatcaagtcttttgtgaaagtttataactaatcacctaatgcccacaaggtactctgtggatatcctcttggacaaaactgtcattaataaggatgtc

SEQ ID NO: 18552 - DNA, 165 bp, Homo sapiens
  MAP TO AL050330.9; EXPRESSED IN BONE MARROW, SIGNAL =   1; EXPRESSED IN BRAIN, SIGNAL = 1.2; EXPRESSED IN FETAL LIVER, SIGNAL = 1.2; EXPRESSED IN ADULT LIVER, SIGNAL = 1.3; EXPRESSED IN PLACENTA, SIGNAL = 1.2; EXPRESSED IN HELA, SIGNAL = 1.3; EXPRESSED IN HEART, SIGNAL = 1.2; SWISSPROT HIT: P25340, EVALUE 2.20e+00; EST_HUMAN HIT: BE504541.1, EVALUE 2.20e+00
cacagcctatggagtgtctagcttcagagaatatgtactccactggcagcgtgagaaacaaatacccaagaaaatacaatatagcacaaaccaggagctgagggtgaatgaagatgctcagaaagatctgcagtaagaatttcctgggaaaggtaaaacaatgtc

SEQ ID NO: 18553 - DNA, 234 bp, Homo sapiens
  MAP TO Z97832.10; EXPRESSED IN BONE MARROW, SIGNAL = 2.9; EXPRESSED IN LUNG, SIGNAL = 2.5; EXPRESSED IN BRAIN, SIGNAL = 2.8; EXPRESSED IN FETAL LIVER, SIGNAL = 2.2; EXPRESSED IN ADULT LIVER, SIGNAL = 2.4; EXPRESSED IN PLACENTA, SIGNAL = 4.1; EXPRESSED IN HEART, SIGNAL = 2.4; EXPRESSED IN HELA, SIGNAL = 2.7; EXPRESSED IN HBL100, SIGNAL = 5.2; EXPRESSED IN BT474, SIGNAL = 3.1; NT HIT: gi11418522, EVALUE 1.00e-129; EST_HUMAN HIT: BE742328.1, EVALUE 1.00e-124; SWISSPROT HIT: P36508, EVALUE 2.00e-41
gggagaagccatacgtttgcacggtgccaggctgcgggaaacgcttcaccgagtactcgagcttgtataagcaccacgtggtgcacacacactgcaagccctacacctgcagcacctgcggcaagacctaccggcagacctccaccttggccatgcacaagcgcagtgcccacggcgagctggaggccacggaggagagcgagcaggccctctatgagcagcagcaacttgagg

SEQ ID NO: 18554 - DNA, 348 bp, Homo sapiens; identical to SEQ ID NO: 1803
  MAP TO Z99716.4; EXPRESSED IN BT474, SIGNAL = 1.1; EXPRESSED IN FETAL LIVER, SIGNAL = 2.8; EXPRESSED IN HBL100, SIGNAL = 1.2; EXPRESSED IN HELA, SIGNAL = 1.7; EXPRESSED IN HEART, SIGNAL = 0.92; EXPRESSED IN BRAIN, SIGNAL = 1.2; EXPRESSED IN BONE MARROW, SIGNAL = 1.4; SWISSPROT HIT: P18573, EVALUE 2.10e-01; EST_HUMAN HIT: N64727.1, EVALUE 3.20e-01

SEQ ID NO: 18555 - DNA, 607 bp, Homo sapiens
  MAP TO AL035685.13; EXPRESSED IN BRAIN, SIGNAL = 4.3; EXPRESSED IN BT474, SIGNAL = 3.4; EXPRESSED IN FETAL LIVER, SIGNAL =   5; EXPRESSED IN HBL100, SIGNAL = 3.3; EXPRESSED IN HELA, SIGNAL = 3.2; EXPRESSED IN HEART, SIGNAL = 3.2; EXPRESSED IN LUNG, SIGNAL = 2.8; EXPRESSED IN BONE MARROW, SIGNAL = 3.3; EXPRESSED IN ADULT LIVER, SIGNAL = 4.8; EXPRESSED IN PLACENTA, SIGNAL = 3.6; NT HIT: gi11420793, EVALUE 0.00e+00; EST_HUMAN HIT: AI566537.1, EVALUE 2.50e-02; SWISSPROT HIT: P15387, EVALUE 1.00e-104
ccaacagtagtcatggtgatggtggcccaccagaaagaggctgggatgcttttgaacttggtgtcgtcctcatccttctcagcaaagaagacaaggctggagaagatcataatgcccatggcaaggaagaggatgagcaagcccaactcattgtagctcctccgcaaagtgaagcccagagactggaggccagtggagtggcgtgcaagcttaaggatgcggagaattcgcatgatgcggaagatctggaccacgcggcggacattctggaattgcagcacgctcttgttggattcggtgaggaaaatggtgacatagtatggcagaatggccaacaagtcaatggcattgagtgggcccttgaagaacttccacttcttgggcgaggagaggaacctcagcaggtactccatggtgaaccatgcgatgcacacggcctccacgtgggccagctgggggttgtctgtggactggccgaactcatcgaggctctgtagctcaggcagcgtgttgagggacagggcaatggtggagaggacgatgaacatgatggaaattatggcaaggatctgtgaggagaagagagtgggatttagttatcaaccac

SEQ ID NO: 18556 - DNA, 570 bp, Homo sapiens
  MAP TO AL049843.18; EXPRESSED IN PLACENTA, SIGNAL = 7.4; EXPRESSED IN HBL100, SIGNAL = 8.1; EXPRESSED IN HELA, SIGNAL = 7.4; EXPRESSED IN HEART, SIGNAL = 4.5; EXPRESSED IN BONE MARROW, SIGNAL = 6.9; EXPRESSED IN LUNG, SIGNAL = 4.1; EXPRESSED IN BRAIN, SIGNAL = 5.5; EXPRESSED IN ADULT LIVER, SIGNAL = 5.1; EXPRESSED IN BT474, SIGNAL = 6.4; EXPRESSED IN FETAL LIVER, SIGNAL = 8.6; NT HIT: U07147.1, EVALUE 0.00e+00; EST_HUMAN HIT: W26964.1, EVALUE 3.00e-32; SWISSPROT HIT: P23942, EVALUE 1.00e-102
agttggcccaagggctctggctcatgaactggttctccgtgttggctggcatcatcatcttcagcctaggactgttcctgaagattgaactccgaaagaggagcgatgtgatgaataattctgagagccattttgtgcccaactcattgatagggatgggggtgctatcctgtgtcttcaactcgctggctgggaagatctgctacgacgccctggacccagccaagtatgccagatggaagccctggctgaagccgtacctggctatctgtgttctcttcaacatcatcctcttccttgtggctctctgctgctttctgcttcggggctcgctggagaacaccctgggccaagggctcaagaacggcatgaagtactaccgggacacagacacccctggcaggtgtttcatgaagaagaccatcgacatgctgcagatcgagttcaaatgctgcggcaacaacggttttcgggactggtttgagattcagtggatcagcaatcgctacctggacttttcctccaaagaagtcaaagagtgagtggcttccagtcctggggtcagagcta

SEQ ID NO: 18557 - DNA, 179 bp, Homo sapiens
  MAP TO NM_006894.1; EXPRESSED IN LUNG, SIGNAL = 2.9; EXPRESSED IN HEART, SIGNAL = 0.89; EST_HUMAN HIT: AV733798.1, EVALUE 2.00e-96; SWISSPROT HIT: Q99518, EVALUE 8.00e-30; NT HIT: gi11428377, EVALUE 1.00e-96
aagatggccgagcaagtatctatcaatctgtcgttaccaacaccagcaaagaaatgtcctgtttcagtgactttccaatgcctgaagattttccaaacttcctgcataattctaaacttctggaatatttcaggatttttgctaaaaaatttgatctgctaaaatatattcagttccag

SEQ ID NO: 18558 - DNA, 317 bp, Homo sapiens
  MAP TO Z83844.5; EXPRESSED IN BRAIN, SIGNAL = 1.1; EXPRESSED IN BONE MARROW, SIGNAL = 1.8; EXPRESSED IN LUNG, SIGNAL = 1.3; EXPRESSED IN BT474, SIGNAL = 1.8; EXPRESSED IN ADULT LIVER, SIGNAL = 1.3; EXPRESSED IN FETAL LIVER, SIGNAL = 1.6; EXPRESSED IN HELA, SIGNAL = 1.4; EXPRESSED IN PLACENTA, SIGNAL =   3; EXPRESSED IN HBL100, SIGNAL =   2; EXPRESSED IN HEART, SIGNAL = 1.1; NT HIT: AB015343.1, EVALUE 1.00e-88; EST_HUMAN HIT: R78078.1, EVALUE 1.00e-92; SWISSPROT HIT: P97434, EVALUE 2.00e-05
gacaagcgcttcacctcgggaaagtaccaggacgtctatgtggagctgagccacatcaagacacggtctgagcgggagatcgagcagctgaaggagcacctgcgtcttgccatggccgccctccaggagaaggagtcgatgcgcaacagcctggctgagtagaggtggatgccgaggcgtgtgccctgcagggtgggcaggggctgaggctctcccacacccgggactccctggaccaccccagccaggccacttccttcttctggcctccaattcccgttctgtaaaaaggacaatgaaaccagcaacacggggtt

SEQ ID NO: 18559 - DNA, 448 bp, Homo sapiens; identical to SEQ ID NO: 1808
  MAP TO Z98745.1; EXPRESSED IN BONE MARROW, SIGNAL =  27; EXPRESSED IN LUNG, SIGNAL =  10; EXPRESSED IN ADULT LIVER, SIGNAL =  17; EXPRESSED IN BT474, SIGNAL = 7.2; EXPRESSED IN FETAL LIVER, SIGNAL =  27; EXPRESSED IN PLACENTA, SIGNAL =  30; EXPRESSED IN HBL100, SIGNAL =  15; EXPRESSED IN HELA, SIGNAL =  21; EXPRESSED IN HEART, SIGNAL =  24; EXPRESSED IN BRAIN, SIGNAL =  33; EST_HUMAN HIT: AA464443.1, EVALUE 1.70e+00; NT HIT: AF267753.1, EVALUE 2.40e-01

SEQ ID NO: 18560 - DNA, 2296 bp, Homo sapiens
  MAP TO AC011307.1; EXPRESSED IN HEART, SIGNAL = 1.5; EXPRESSED IN BRAIN, SIGNAL = 1.5; EXPRESSED IN BONE MARROW, SIGNAL = 1.5; EXPRESSED IN LUNG, SIGNAL = 1.7; EXPRESSED IN BT474, SIGNAL = 4.2; EXPRESSED IN ADULT LIVER, SIGNAL = 2.5; EXPRESSED IN FETAL LIVER, SIGNAL = 1.3; EXPRESSED IN HELA, SIGNAL = 1.2; EXPRESSED IN PLACENTA, SIGNAL = 2.3; EXPRESSED IN HBL100, SIGNAL = 1.5; SWISSPROT HIT: P46590, EVALUE 4.00e-01; NT HIT: AF245505.1, EVALUE 0.00e+00; EST_HUMAN HIT: AW207280.1, EVALUE 0.00e+00
ggcagaccatatcacggtgggaatcacagtgaccaagaaaggttctggctcgccatccaaaagaggcagatggccaggtccaaaggctctttccagatgagagaagacatcgtggaggatgaaggggtctcaggcacgggagatgaagagaacacttcaaggagacttctacatccaaagcaccaagaggcgttcctcaaaacaaaggatgatgccatcaatggagataagaaagccaagaaagggagaagaaagctgaaactctggaagcattcagaaaaagaaccagagaccagtgttgcagaagatctcagagtgtttgaatcaagacgaaggataaacgtggcaaacaaacagattaatccggagcactgggctgatattttagccaaagtctttgggaaaaatctccctacaggcacagaagtatccccaattattaaaaccacaagttctccattcttgagcctagtagtcacaccacctttgcctgctgtttctccccccttggcatctccaatacagacagcaacaagtgctgaagaatcctcagcagatgtacctctactcagcgaaggaaagcacattttgagtaccatttcctcagccagcatgggactagaacaccacaacaatggagttattcttgttgaacctgaagtaacaagcacacctctggaagaagttgttgatgagtattccaagaagactgaggagatgacttccactgaaggcgacctgaaggggactgcagcctctacacttatatctgagccttatgaacaatctcctactctacacaccttagacacagtctatgaagagcccacccatgaagagacggaaacagagggttggtctgcagcagatgttggatcctcaccagatcccacatccagtgagtatgagcttccattggttgttgtctccttggctgagtctaagcctgtgcaatactttgacccagatttggagactaattcacaaccacatgaggataacataaaagaatacagttttgcacaccttactccaaccgccatcatctggtttaatgactctagtacatcactgtcatttgaggattctactgtaggggaacaaggtgtcccaggcaaatcacatctacaaggaccgacagagaacatccagcttgtgaaaagtagttttagcactcaagacaccttattgattaaaaaaggtatgaaagagatgtctcagacactacagggaggaaatatgctagagggagaccctacacactccagaagttctgagaatgagggccaagagagcaaatccatcactttacctgactccacactgggtataacgagcagtacgtctccagttaagaagcctgcggaaaccacagttgtcaccctgctacacaaagacaccacaacagaaacaactccaaggcaaaaagtggcttcatcatccaccatgagcactcacccttctcgaaggagacccaatgggagaaaattacaccctcacaaattccaccaccggcacaagcaaaccccacccacaacttttgctccattagagactttttctactcaaccaactcaagcaactgacattaagatttcaaatcaaatggagagttctctggttcctacatcttgggagattaacacagttaatacccccaaacagctggaaatggagaagaatgtagagctcatatcaaagggaactccacggagaaaacacgggaagaggccaaacaaacatcgatataccccttctacagtgagttcaagagcatctgcatccaagcccagcccttctccagaaaataaacatagaaacattgttactcccagttcagaaactacacttttgcctagaaatgtttctctgaaaactgagggcgtttatgattccttagattacacgacaaccaccagaaaaatacattcatctcaccataaagtccaagacacacttccagtcatgtataaacccacatcagatggaaaagaaattcaggatgatgttgccacaaatgttgacaaacataaaagtgacattttagtccctggtgagtcaattacaaatgtcacacaaacttctcgctccttggtctccactatgggagaatttaaggaagaatcctctcctgtgggctttccaggaattccaacctggaatccctcaaggaaagctcagcctgggaggctacagacagacatacatgttaccacttctggggaaacccctacagaccctccccttgttaacgagcttgaggatgtggattttacttctgagtttttgtcctctg

SEQ ID NO: 18561 - DNA, 111 bp, Homo sapiens
  MAP TO AC007026.3; EXPRESSED IN BONE MARROW, SIGNAL = 1.4; EXPRESSED IN BRAIN, SIGNAL = 1.2; EXPRESSED IN ADULT LIVER, SIGNAL = 0.91; EXPRESSED IN BT474, SIGNAL = 2.6; EXPRESSED IN FETAL LIVER, SIGNAL = 1.1; EXPRESSED IN PLACENTA, SIGNAL = 0.97; EXPRESSED IN HELA, SIGNAL = 1.1; EXPRESSED IN HBL100, SIGNAL =   2; EXPRESSED IN HEART, SIGNAL = 1.2; EXPRESSED IN LUNG, SIGNAL = 0.9; EST_HUMAN HIT: BE093705.1, EVALUE 2.30e-02; NT HIT: U22061.1, EVALUE 5.20e-02; SWISSPROT HIT: P13604, EVALUE 4.00e+00
cggagccaagatagccaactagacacagccatttggaacatgtgatgctgagggactggaacatcaggtagactggcagattccaagcagatcttcagagggaaggcactg

SEQ ID NO: 18562 - DNA, 130 bp, Homo sapiens
  MAP TO AC007218.2; EXPRESSED IN HELA, SIGNAL = 4.1; EXPRESSED IN HEART, SIGNAL =   4; EXPRESSED IN LUNG, SIGNAL = 2.6; EXPRESSED IN BRAIN, SIGNAL = 4.1; EXPRESSED IN BT474, SIGNAL = 3.1; EXPRESSED IN ADULT LIVER, SIGNAL = 3.3; EXPRESSED IN PLACENTA, SIGNAL = 6.7; EXPRESSED IN HBL100, SIGNAL = 3.3; EXPRESSED IN BONE MARROW, SIGNAL = 3.6; EXPRESSED IN FETAL LIVER, SIGNAL = 4.7; SWISSPROT HIT: P16899, EVALUE 7.00e+00; NT HIT: AF181897.1, EVALUE 3.00e-07; EST_HUMAN HIT: AW270271.1, EVALUE 2.00e-08
ttgttagtaggtttggtttcttctgagtcctgtgtacttggcttgcagatggcggccttctcaatgtggccccacatggtctttatgtgtgtgcacgtgcctgtgttcaaatatcctgcttcagttatac

SEQ ID NO: 18563 - DNA, 117 bp, Homo sapiens
  MAP TO AC007308.13; EXPRESSED IN HEART, SIGNAL = 3.3; EXPRESSED IN LUNG, SIGNAL = 3.7; EXPRESSED IN BRAIN, SIGNAL = 3.2; EXPRESSED IN FETAL LIVER, SIGNAL = 4.4; EXPRESSED IN ADULT LIVER, SIGNAL = 2.1; EXPRESSED IN PLACENTA, SIGNAL = 3.2; EXPRESSED IN HELA, SIGNAL =  17; EXPRESSED IN HBL100, SIGNAL = 3.1; EXPRESSED IN BONE MARROW, SIGNAL = 3.4; EXPRESSED IN BT474, SIGNAL = 2.3; NT HIT: AF012872.1, EVALUE 6.00e-42; EST_HUMAN HIT: BE592062.1, EVALUE 3.80e-01; SWISSPROT HIT: P20239, EVALUE 6.90e+00
ctgaagatcagattcaatcagaaaaatgcccaatgcaatcactgcatctctccgtctttcatctaactggaagatcccatggaaatccactggacacatgcaaagaagcttttggac

SEQ ID NO: 18564 - DNA, 162 bp, Homo sapiens
  MAP TO AC007375.4; EXPRESSED IN FETAL LIVER, SIGNAL = 2.8; EXPRESSED IN HELA, SIGNAL = 2.3; EXPRESSED IN LUNG, SIGNAL = 4.2; EXPRESSED IN BRAIN, SIGNAL = 2.4; EXPRESSED IN BT474, SIGNAL = 1.5; EXPRESSED IN ADULT LIVER, SIGNAL = 2.1; EXPRESSED IN PLACENTA, SIGNAL = 2.4; EXPRESSED IN HEART, SIGNAL = 2.2; EXPRESSED IN HBL100, SIGNAL = 1.7; EXPRESSED IN BONE MARROW, SIGNAL =   2; EST_HUMAN HIT: BF370841.1, EVALUE 3.00e-55; NT HIT: gi11434921, EVALUE 8.00e-58; SWISSPROT HIT: O13898, EVALUE 4.00e-04
aaggctcactgacctgctgctgacgggcaccaatgccctcggggtagaggtgcctgtgggagtgcagatagccgatggccatccggaggttcttcacagtgatcacagagccgtaggccaggtctgggaggaagggagacagcagaggggtgagctggcaca

SEQ ID NO: 18565 - DNA, 132 bp, Homo sapiens
  MAP TO AC007078.2; EXPRESSED IN BT474, SIGNAL = 3.3; EXPRESSED IN HBL100, SIGNAL = 4.2; EXPRESSED IN LUNG, SIGNAL = 2.8; EXPRESSED IN BRAIN, SIGNAL = 3.7; EXPRESSED IN FETAL LIVER, SIGNAL = 3.9; EXPRESSED IN ADULT LIVER, SIGNAL = 3.4; EXPRESSED IN PLACENTA, SIGNAL = 4.4; EXPRESSED IN HEART, SIGNAL = 4.5; EXPRESSED IN HELA, SIGNAL = 4.2; EXPRESSED IN BONE MARROW, SIGNAL = 4.7; NT HIT: gi6005983, EVALUE 1.00e-61; SWISSPROT HIT: P53785, EVALUE 6.00e-18; EST_HUMAN HIT: BE747227.1, EVALUE 2.00e-61
gtaactgacgatgccctggtgtacagcaccttcctgctccatgacccccgccccgtgggaaacctgtccatcgtgaggactaaccgcgcagagattcccatcgagtgccgctaccccaggtcggtgtgggac

SEQ ID NO: 18566 - DNA, 118 bp, Homo sapiens
  MAP TO AC007242.3; EXPRESSED IN BONE MARROW, SIGNAL = 4.4; EXPRESSED IN FETAL LIVER, SIGNAL = 5.3; EXPRESSED IN HBL100, SIGNAL = 3.3; EXPRESSED IN HELA, SIGNAL = 4.8; EXPRESSED IN HEART, SIGNAL = 4.8; EXPRESSED IN BRAIN, SIGNAL = 4.4; EXPRESSED IN LUNG, SIGNAL = 3.1; EXPRESSED IN BT474, SIGNAL = 3.4; EXPRESSED IN ADULT LIVER, SIGNAL = 4.2; EXPRESSED IN PLACENTA, SIGNAL =   5; NT HIT: X82440.1, EVALUE 4.00e-03; SWISSPROT HIT: Q04899, EVALUE 5.00e-13; EST_HUMAN HIT: BE562611.1, EVALUE 3.00e-60
aatcagccagtttgagctctcccaggtgactgatgagtaagttctgaggtttcaggtccctgtgaagaacgtgttggtggtggatgtacgccaggccccgcaaaagttgaaacatgaa

SEQ ID NO: 18567 - DNA, 152 bp, Homo sapiens
  MAP TO AC007279.3; EXPRESSED IN BONE MARROW, SIGNAL = 1.5; EXPRESSED IN LUNG, SIGNAL = 0.9; EXPRESSED IN FETAL LIVER, SIGNAL = 1.4; EXPRESSED IN ADULT LIVER, SIGNAL =   1; EXPRESSED IN PLACENTA, SIGNAL = 1.6; EXPRESSED IN HEART, SIGNAL = 1.9; EXPRESSED IN HELA, SIGNAL = 1.5; EXPRESSED IN HBL100, SIGNAL = 1.5; EXPRESSED IN BRAIN, SIGNAL = 1.2; EXPRESSED IN BT474, SIGNAL =   4; SWISSPROT HIT: P54936, EVALUE 2.30e-02; EST_HUMAN HIT: AI444821.1, EVALUE 2.00e-80; NT HIT: gi10864070, EVALUE 3.00e-35
gatgaagacctacaagagatggaaaatttagcccaaagaatggaaactcagtttggccaattttttgatcatgtgattgtgaatgacagcttgcacgatgcatgtgcccagttgttgtctgccatacagaaggctcaggaggagcctcagtg

SEQ ID NO: 18568 - DNA, 217 bp, Homo sapiens
  MAP TO AC007375.4; EXPRESSED IN BT474, SIGNAL = 1.7; EXPRESSED IN FETAL LIVER, SIGNAL = 2.4; EXPRESSED IN ADULT LIVER, SIGNAL = 1.2; EXPRESSED IN HBL100, SIGNAL = 1.7; EXPRESSED IN HELA, SIGNAL = 1.8; EXPRESSED IN PLACENTA, SIGNAL =   2; EXPRESSED IN HEART, SIGNAL = 1.7; EXPRESSED IN BRAIN, SIGNAL = 2.1; EXPRESSED IN BONE MARROW, SIGNAL = 2.4; EXPRESSED IN LUNG, SIGNAL = 1.3; EST_HUMAN HIT: AA398742.1, EVALUE 3.40e-02; NT HIT: AB048342.1, EVALUE 1.00e-04; SWISSPROT HIT: P13709, EVALUE 8.60e-01
tcacaggggcctcagcccaagaagtccccggctcttgcagttgggaccagccagtgtggctgccaccaggaggggaagcaggggacagggagcgggcggcagctgcatcacagccagagtgaggagcaggccaagcaggggacagggagcgggcggcagctgcatcacagccagagtgaggagcaggcccggcttccctgctgagtcatccccgctg

SEQ ID NO: 18569 - DNA, 199 bp, Homo sapiens
  MAP TO AC007688.15; EXPRESSED IN PLACENTA, SIGNAL = 1.3; EXPRESSED IN BT474, SIGNAL = 1.5; EXPRESSED IN FETAL LIVER, SIGNAL = 1.8; EXPRESSED IN HBL100, SIGNAL = 1.1; EXPRESSED IN HELA, SIGNAL = 1.2; EXPRESSED IN HEART, SIGNAL = 0.99; EXPRESSED IN LUNG, SIGNAL = 1.2; EXPRESSED IN BONE MARROW, SIGNAL = 1.3; EXPRESSED IN ADULT LIVER, SIGNAL = 1.1; NT HIT: gi11435913, EVALUE 3.00e-73; SWISSPROT HIT: O84771, EVALUE 4.30e-01; EST_HUMAN HIT: BF081325.1, EVALUE 4.00e-73
gaagaagttgcctatgaagaaagggcctgtgaaggcggcaaatttgccacagtagaagtgacagataagcctgtggatgaggctctacgggaagcaatgcccaaggtcgcaaagtatgcggggggcaccaatgacaagggtgagtacccctgcaggatgtggctctggtctcggggaccagctttgcaaggtctcactt

SEQ ID NO: 18570 - DNA, 108 bp, Homo sapiens
  MAP TO AC007718.1; EXPRESSED IN BT474, SIGNAL = 1.4; EXPRESSED IN FETAL LIVER, SIGNAL = 1.7; EXPRESSED IN PLACENTA, SIGNAL = 1.1; EXPRESSED IN HBL100, SIGNAL = 2.4; EXPRESSED IN HELA, SIGNAL = 1.3; EXPRESSED IN HEART, SIGNAL = 1.6; EXPRESSED IN BONE MARROW, SIGNAL = 1.2; EXPRESSED IN BRAIN, SIGNAL = 1.2; EXPRESSED IN ADULT LIVER, SIGNAL = 3.1; NT HIT: gi8923891, EVALUE 5.00e-05; EST_HUMAN HIT: BE796979.1, EVALUE 9.00e-05; SWISSPROT HIT: O05634, EVALUE 3.10e+00
atgaactgtgctggcgtccgcaccctctagttcatcctcagtacccaccagaagcacccccaacaaatttgcggcaaaagctgaagtgtctttcccctccagaaattt

SEQ ID NO: 18571 - DNA, 187 bp, Homo sapiens
  MAP TO AC009496.1; EXPRESSED IN FETAL LIVER, SIGNAL = 1.4; EXPRESSED IN HEART, SIGNAL = 0.86; EXPRESSED IN BRAIN, SIGNAL = 0.99; SWISSPROT HIT: P21849, EVALUE 2.90e+00; EST_HUMAN HIT: BE010166.1, EVALUE 2.60e+00; NT HIT: AF045586.1, EVALUE 4.40e-01
ggcagaagaagtcggctgtgcacagagccatccctatctgcatatcccaggcactcccaagggagaagcacaaagtgttttggaaatgtaaacatgttaagggaacagtcgtctatcaaggccacaagaagcattgtggatccacgaaggcacaattagcagctgcagagattactgccctggaaat

SEQ ID NO: 18572 - DNA, 223 bp, Homo sapiens
  MAP TO AC009248.6; EXPRESSED IN PLACENTA, SIGNAL = 1.2; EXPRESSED IN HBL100, SIGNAL = 1.4; EXPRESSED IN HEART, SIGNAL = 0.86; EXPRESSED IN LUNG, SIGNAL = 0.9; EXPRESSED IN BT474, SIGNAL = 0.98; EXPRESSED IN FETAL LIVER, SIGNAL = 1.2; EST_HUMAN HIT: BE739263.1, EVALUE 1.30e-02; SWISSPROT HIT: P49651, EVALUE 3.20e-01; NT HIT: AF051784.1, EVALUE 1.10e-01
gtacaatagaaagtccaattccttgaaagaaagtctgctttcagctgtgaaaccaaatgaggttaagagcctgaggaagtttctgattcatatttaaaaaacgttttgttaatatgctttgagaaaacatgagcagagaaaatatgaaactgttttgtgtatgatatttcaacatcagtttcactttattacttatacaaaatagcagttttttcatgttaca

SEQ ID NO: 18573 - DNA, 90 bp, Homo sapiens
  MAP TO AC009503.2; EXPRESSED IN FETAL LIVER, SIGNAL = 1.1; EXPRESSED IN PLACENTA, SIGNAL = 0.97; EXPRESSED IN HEART, SIGNAL = 0.94; EXPRESSED IN BRAIN, SIGNAL = 0.91; NT HIT: AF167341.1, EVALUE 7.00e-07; EST_HUMAN HIT: H65390.1, EVALUE 8.00e-07
atacttatagcaaatctcaattcaaactagccacatttcaaatgcttaatggctattggcaactacattggatggcacagctctatagag

SEQ ID NO: 18574 - DNA, 281 bp, Homo sapiens
  MAP TO AC009302.1; EXPRESSED IN BONE MARROW, SIGNAL = 1.5; EXPRESSED IN BRAIN, SIGNAL = 1.6; EXPRESSED IN ADULT LIVER, SIGNAL = 1.2; EXPRESSED IN BT474, SIGNAL = 1.2; EXPRESSED IN FETAL LIVER, SIGNAL = 2.2; EXPRESSED IN PLACENTA, SIGNAL = 1.9; EXPRESSED IN HELA, SIGNAL = 1.8; EXPRESSED IN HBL100, SIGNAL = 1.3; EXPRESSED IN HEART, SIGNAL = 1.9; EXPRESSED IN LUNG, SIGNAL =   1; NT HIT: gi11420011, EVALUE 6.80e-01; EST_HUMAN HIT: BF222118.1, EVALUE 2.60e-01; SWISSPROT HIT: Q56222, EVALUE 2.70e+00
gtcccactgctctgtgactgggtgagcatgtgacccaggctgcccaatttgagttcttttcttgggattgacaataacactgggaaagaaagtctttctctttctgagatctccagcaataaggatgatgtatgcctggagcttctgctgaccatctttgccatcatgtgcatagagccaggctgagaatgaaacagtggctaattgtattttgcaaatatgtctctcatcccacatgctcttctttgatatgccacctataaagatatggggcctatgtt

SEQ ID NO: 18575 - DNA, 152 bp, Homo sapiens
  MAP TO AC008072.2; EXPRESSED IN HELA, SIGNAL = 8.5; EXPRESSED IN HEART, SIGNAL =   3; EXPRESSED IN LUNG, SIGNAL = 1.9; EXPRESSED IN BRAIN, SIGNAL = 2.2; EXPRESSED IN BT474, SIGNAL = 8.7; EXPRESSED IN ADULT LIVER, SIGNAL = 2.1; EXPRESSED IN PLACENTA, SIGNAL = 4.9; EXPRESSED IN HBL100, SIGNAL = 9.4; EXPRESSED IN BONE MARROW, SIGNAL =   6; EXPRESSED IN FETAL LIVER, SIGNAL = 3.7; SWISSPROT HIT: P79781, EVALUE 4.50e-01; NT HIT: gi11428757, EVALUE 2.00e-12; EST_HUMAN HIT: AW268547.1, EVALUE 2.00e-12
aaggacactcctgacggaggctactaattttgccattgtcatccatcctatagtatttcaggacagtcagcttcaccttcttattgtttttgggaggggtgtaagacttcttccttttcttagagccactacaaagtctcagcatgagacaa

SEQ ID NO: 18576 - DNA, 96 bp, Homo sapiens
  MAP TO AC009484.1; EXPRESSED IN LUNG, SIGNAL = 2.5; EXPRESSED IN BONE MARROW, SIGNAL = 3.6; EXPRESSED IN BRAIN, SIGNAL = 3.1; EXPRESSED IN ADULT LIVER, SIGNAL = 3.4; EXPRESSED IN BT474, SIGNAL = 1.7; EXPRESSED IN FETAL LIVER, SIGNAL = 2.4; EXPRESSED IN PLACENTA, SIGNAL = 3.1; EXPRESSED IN HELA, SIGNAL = 3.5; EXPRESSED IN HBL100, SIGNAL = 2.3; EXPRESSED IN HEART, SIGNAL = 3.4; EST_HUMAN HIT: AL038099.2, EVALUE 2.00e-26; SWISSPROT HIT: P11369, EVALUE 2.00e-04; NT HIT: AJ229043.1, EVALUE 4.00e-21
ggtctccaattccacccagattgccgtgaatgccatgattttgttcctttttatggctgagtagtattccatggtgtgtgtgtatatatatatata

SEQ ID NO: 18577 - DNA, 202 bp, Homo sapiens
  MAP TO AC009297.2; EXPRESSED IN FETAL LIVER, SIGNAL = 2.4; EXPRESSED IN ADULT LIVER, SIGNAL =   2; EXPRESSED IN HELA, SIGNAL =   5; EXPRESSED IN BRAIN, SIGNAL = 1.9; EXPRESSED IN LUNG, SIGNAL = 1.9; EXPRESSED IN BONE MARROW, SIGNAL = 1.9; EXPRESSED IN BT474, SIGNAL =  22; EXPRESSED IN PLACENTA, SIGNAL = 2.8; EXPRESSED IN HEART, SIGNAL = 2.2; EXPRESSED IN HBL100, SIGNAL = 9.8; NT HIT: gi11434431, EVALUE 4.00e-60; SWISSPROT HIT: P35232, EVALUE 4.00e-22; EST_HUMAN HIT: AA310484.1, EVALUE 6.00e-60
agttggggatcagctctgctgtcttggagttgccgtcggcaaagatgatggctgccttcttctgatgctcagccttttccaccacaaatctggccctctctgcttcctgctgagccaattgtttggcttccaccgcttctgtgaactccttctcaaaggtcagatgtgtcaaggacatgccatccaaaggtggctgcttgcc

SEQ ID NO: 18578 - DNA, 191 bp, Homo sapiens
  MAP TO AC009303.1; EXPRESSED IN PLACENTA, SIGNAL = 1.4; EXPRESSED IN HELA, SIGNAL = 1.3; EXPRESSED IN HEART, SIGNAL = 1.2; EXPRESSED IN LUNG, SIGNAL = 0.91; EXPRESSED IN BRAIN, SIGNAL =   1; EXPRESSED IN BONE MARROW, SIGNAL = 1.2; EXPRESSED IN FETAL LIVER, SIGNAL = 0.99; EXPRESSED IN ADULT LIVER, SIGNAL = 1.1; SWISSPROT HIT: P27432, EVALUE 1.70e+00; NT HIT: X59375.1, EVALUE 4.50e-01
atttccggctccagaatatagagatgccagcccacaggagggatgacttaaagttttatgagtatttgggagtgtttctttgtgatgttttctccatattgtcaggagcttggtcaccaatccaagtgatcaaggtaattctgaatgtctgtgtctctgatgacaagagctcccagtttaagccaaaccct

SEQ ID NO: 18579 - DNA, 138 bp, Homo sapiens
  MAP TO AC010133.1; EXPRESSED IN PLACENTA, SIGNAL = 2.9; EXPRESSED IN FETAL LIVER, SIGNAL = 3.3; EXPRESSED IN ADULT LIVER, SIGNAL = 2.8; EXPRESSED IN HBL100, SIGNAL = 2.2; EXPRESSED IN HELA, SIGNAL = 3.2; EXPRESSED IN HEART, SIGNAL = 3.1; EXPRESSED IN BRAIN, SIGNAL = 3.4; EXPRESSED IN LUNG, SIGNAL = 1.9; EXPRESSED IN BONE MARROW, SIGNAL = 4.2; EXPRESSED IN BT474, SIGNAL = 1.4; SWISSPROT HIT: P52756, EVALUE 6.70e+00
gacagtgatgacagtgaagtccaggtttataaggtatctggtgaaaatgaggaacttattagagattggaagaaggttgcacacgttatattctagcaagaaacttggctgcattatttttatgccctagccatctgt

SEQ ID NO: 18580 - DNA, 155 bp, Homo sapiens
  MAP TO AC009808.2; EXPRESSED IN LUNG, SIGNAL = 3.7; EXPRESSED IN FETAL LIVER, SIGNAL = 5.5; EXPRESSED IN ADULT LIVER, SIGNAL = 3.6; EXPRESSED IN PLACENTA, SIGNAL = 5.3; EXPRESSED IN HEART, SIGNAL = 5.8; EXPRESSED IN HELA, SIGNAL = 6.3; EXPRESSED IN HBL100, SIGNAL = 3.7; EXPRESSED IN BRAIN, SIGNAL = 4.3; EXPRESSED IN BONE MARROW, SIGNAL = 5.3; EXPRESSED IN BT474, SIGNAL = 2.4; NT HIT: AF199339.1, EVALUE 3.00e-01; SWISSPROT HIT: Q90233, EVALUE 8.90e+00; EST_HUMAN HIT: W05340.1, EVALUE 2.30e-02
aactctgtaagaataaattatgttatgacatcatttggattaagaatgggaagaaagtgatagaatggaactggatactattcagacacaccaaagaggtggaaggtaccttgcagaggagtgacaaaaaaagcaatactggtaagcaaaataag

SEQ ID NO: 18581 - DNA, 162 bp, Homo sapiens
  MAP TO AC009896.2; EXPRESSED IN BT474, SIGNAL = 1.3; EXPRESSED IN HBL100, SIGNAL = 1.7; EXPRESSED IN BONE MARROW, SIGNAL = 2.1; EXPRESSED IN LUNG, SIGNAL = 1.5; EXPRESSED IN ADULT LIVER, SIGNAL = 1.4; EXPRESSED IN FETAL LIVER, SIGNAL = 2.3; EXPRESSED IN PLACENTA, SIGNAL = 1.8; EXPRESSED IN HEART, SIGNAL = 2.3; EXPRESSED IN HELA, SIGNAL = 1.9; EXPRESSED IN BRAIN, SIGNAL = 2.4; SWISSPROT HIT: P29362, EVALUE 2.90e+00; NT HIT: gi11525667, EVALUE 2.40e-02; EST_HUMAN HIT: BF670154.1, EVALUE 3.50e-02
  unsure 128
  unsure 132
  unsure 144
  unsure 154
cttggaaagtcctgtaccaagaagaaaaggtaagcacctaccaccgggcctgtggcaaggagaaaagaacattggaggaagccaaggggggccccaatgtgggcctgggcccaaagcgcaaatgagangganggcgaaactagnatgagtaggncagggagc

SEQ ID NO: 18582 - DNA, 271 bp, Homo sapiens
  MAP TO AC009946.1; EXPRESSED IN PLACENTA, SIGNAL = 2.3; EXPRESSED IN BRAIN, SIGNAL = 3.3; EXPRESSED IN FETAL LIVER, SIGNAL = 3.3; EXPRESSED IN HBL100, SIGNAL = 5.5; EXPRESSED IN HELA, SIGNAL =   5; EXPRESSED IN HEART, SIGNAL = 1.5; EXPRESSED IN LUNG, SIGNAL = 7.2; EXPRESSED IN BONE MARROW, SIGNAL = 1.6; EXPRESSED IN ADULT LIVER, SIGNAL = 5.8; EXPRESSED IN BT474, SIGNAL =   9; NT HIT: D13643.2, EVALUE 1.00e-109; EST_HUMAN HIT: AU123596.1, EVALUE 1.00e-109; SWISSPROT HIT: O17397, EVALUE 2.00e-17
attccaagggaatgcacctggtgcgccctccctgccctgccccactcacgtggatgtcgttttggaaggtgtgcagggcctgctgcaggcacttcatgggcaccagcatgtcctgcaccacgtggtgctgctcgtacagcttgcgcagggtctcaccctgggtcagcttcaggagggagatcttgggaggcaccatccagccaaagaggtagcggaagatggggttgttgccaaaggggataatgtcctggaaaacaaagattagggttgg

SEQ ID NO: 18583 - DNA, 408 bp, Homo sapiens
  MAP TO AC009955.1; EXPRESSED IN BT474, SIGNAL = 3.1; EXPRESSED IN BONE MARROW, SIGNAL = 3.5; EXPRESSED IN LUNG, SIGNAL = 1.9; EXPRESSED IN BRAIN, SIGNAL = 3.5; EXPRESSED IN ADULT LIVER, SIGNAL = 2.4; EXPRESSED IN FETAL LIVER, SIGNAL = 3.4; EXPRESSED IN PLACENTA, SIGNAL = 3.2; EXPRESSED IN HEART, SIGNAL = 2.1; EXPRESSED IN HELA, SIGNAL = 2.7; EXPRESSED IN HBL100, SIGNAL = 2.9; SWISSPROT HIT: P40603, EVALUE 4.00e+00; EST_HUMAN HIT: BE277465.1, EVALUE 0.00e+00; NT HIT: AF205540.1, EVALUE 4.00e+00
gatggttcgtgcagcagcacccggagctggagctcatgagcagcttccgggaacggttcggccgcaactggctgcagtacaggagtcacctggagccctccggaaaccctctgccggccacccccactacttctgcacccagtgcacctccagccagctcccagggccccgacactgcacccagaccttcacccccgcaggaggaagccagaggcccccaggagtcaccacagaaaatgtcagaggaggtcagggcggagccacaggaggaggaagaggagaaggaggggaaggaggagaaggaggagggggagatggtggaacagggagaagaggaggcaggagaggaggaagaagaggagcaggaccagaaggaagtggaaggtgagccctttgtgggctggggcg

SEQ ID NO: 18584 - DNA, 107 bp, Homo sapiens
  MAP TO AC009961.2; EXPRESSED IN FETAL LIVER, SIGNAL = 1.4; EXPRESSED IN HEART, SIGNAL = 0.87; NT HIT: gi4505052, EVALUE 6.00e-54; EST_HUMAN HIT: BE006233.1, EVALUE 7.00e-54; SWISSPROT HIT: P50452, EVALUE 6.90e+00
cgtcagctctctgttatctgtccatttgtttatcttttcataggcagtccagcgcaaaccaatccataaagtagcttccatatccggaagcaaggatgtaataaagt

SEQ ID NO: 18585 - DNA, 122 bp, Homo sapiens
  MAP TO AC010135.1; EXPRESSED IN ADULT LIVER, SIGNAL =   4; EXPRESSED IN BT474, SIGNAL = 1.7; EXPRESSED IN FETAL LIVER, SIGNAL = 1.4; EXPRESSED IN PLACENTA, SIGNAL = 3.8; EXPRESSED IN HBL100, SIGNAL = 1.8; EXPRESSED IN HELA, SIGNAL = 2.1; EXPRESSED IN HEART, SIGNAL = 1.4; EXPRESSED IN BONE MARROW, SIGNAL = 3.2; EXPRESSED IN LUNG, SIGNAL = 1.7; EXPRESSED IN BRAIN, SIGNAL = 1.8; SWISSPROT HIT: P25304, EVALUE 6.80e+00; EST_HUMAN HIT: AI658703.1, EVALUE 6.00e-40; NT HIT: AJ131016.1, EVALUE 5.00e-27
tccataaccctataactgcactccaataccaccttgttctcagcataaacaagggcatagccccaaagcactgaggccacggacaacccatagccttcctatcaaaaatccttaacccagca

SEQ ID NO: 18586 - DNA, 80 bp, Homo sapiens
  MAP TO AC009813.2; EXPRESSED IN BONE MARROW, SIGNAL =   7; EXPRESSED IN LUNG, SIGNAL = 6.5; EXPRESSED IN ADULT LIVER, SIGNAL = 8.3; EXPRESSED IN BT474, SIGNAL = 4.5; EXPRESSED IN FETAL LIVER, SIGNAL = 3.9; EXPRESSED IN HBL100, SIGNAL = 5.3; EXPRESSED IN PLACENTA, SIGNAL =  10; EXPRESSED IN HELA, SIGNAL = 5.7; EXPRESSED IN HEART, SIGNAL = 6.5; EXPRESSED IN BRAIN, SIGNAL = 5.9; NT HIT: AL163227.2, EVALUE 3.00e-06; EST_HUMAN HIT: BE897739.1, EVALUE 2.00e-11
  unsure 69
atggtagatccaccaactgcttgtgccatgaacctggaaaagccacagatactcaatgccagccagtgnaaagcagccag

SEQ ID NO: 18587 - DNA, 144 bp, Homo sapiens
  MAP TO AC009884.2; EXPRESSED IN PLACENTA, SIGNAL =   2; EXPRESSED IN BRAIN, SIGNAL = 1.8; EXPRESSED IN BT474, SIGNAL = 1.1; EXPRESSED IN FETAL LIVER, SIGNAL = 1.6; EXPRESSED IN ADULT LIVER, SIGNAL = 3.3; EXPRESSED IN HEART, SIGNAL = 1.8; EXPRESSED IN HELA, SIGNAL = 1.6; EXPRESSED IN HBL100, SIGNAL = 1.4; EXPRESSED IN LUNG, SIGNAL =   1; EXPRESSED IN BONE MARROW, SIGNAL = 1.8; NT HIT: gi6754849, EVALUE 5.10e+00; EST_HUMAN HIT: AW865517.1, EVALUE 1.00e-22
ttacccttctctcctttcttgcctctttttgacttagttttgtttttatctttccctctctccctccacacacgctcaagtttagatgctatatgctgcttttgggctttcattatcctagaaattacaataaacatatccaac

SEQ ID NO: 18588 - DNA, 158 bp, Homo sapiens
  MAP TO AC010684.1; EXPRESSED IN HELA, SIGNAL = 3.3; EXPRESSED IN PLACENTA, SIGNAL = 3.2; EXPRESSED IN HBL100, SIGNAL = 2.5; EXPRESSED IN HEART, SIGNAL = 2.2; EXPRESSED IN BRAIN, SIGNAL = 2.9; EXPRESSED IN BONE MARROW, SIGNAL = 2.4; EXPRESSED IN LUNG, SIGNAL = 1.6; EXPRESSED IN BT474, SIGNAL = 2.6; EXPRESSED IN FETAL LIVER, SIGNAL = 2.5; EXPRESSED IN ADULT LIVER, SIGNAL = 1.9; NT HIT: gi7706500, EVALUE 5.00e-34; EST_HUMAN HIT: BF036260.1, EVALUE 8.00e-34; SWISSPROT HIT: Q50709, EVALUE 2.90e+00
tcagtgcaccacccaccttgattcggcaacccaaggtggatgatatgagtgtggccaccattgagaagaaagccacaacaaccaccagtgccaagccacagatcactgctaattccaaggcagagcttacttgatttgtgcccatggcattgagagta

SEQ ID NO: 18589 - DNA, 96 bp, Homo sapiens
  MAP TO AC009963.2; EXPRESSED IN FETAL LIVER, SIGNAL = 1.2; EXPRESSED IN ADULT LIVER, SIGNAL = 1.1; EXPRESSED IN HELA, SIGNAL = 1.2; EXPRESSED IN PLACENTA, SIGNAL = 1.3; EXPRESSED IN HBL100, SIGNAL = 0.97; EXPRESSED IN HEART, SIGNAL = 1.2; EXPRESSED IN BRAIN, SIGNAL = 1.2; EXPRESSED IN BONE MARROW, SIGNAL = 1.3; NT HIT: gi11141884, EVALUE 5.00e-33
tcctggcagctttcgggtgcctggtgatggccatcccagccatactcattggggccattggagcatcaacaggtaaatctcttgcagcttcaccac

SEQ ID NO: 18590 - DNA, 119 bp, Homo sapiens
  MAP TO AC010734.1; EXPRESSED IN FETAL LIVER, SIGNAL = 1.8; EXPRESSED IN HELA, SIGNAL = 1.1; EXPRESSED IN PLACENTA, SIGNAL = 1.2; EXPRESSED IN HBL100, SIGNAL = 1.1; EXPRESSED IN HEART, SIGNAL = 1.1; EXPRESSED IN BONE MARROW, SIGNAL = 1.2; EXPRESSED IN BRAIN, SIGNAL = 1.6; EST_HUMAN HIT: AA496759.1, EVALUE 6.80e-02; NT HIT: AF283519.1, EVALUE 1.00e+00
aatcaggtaggctataccccaggtggacttagatgccaagagggtaaggcatttagggggatcttcctctccatccccacagaactcaccaatagcttcagagagctcagtttttgggt

SEQ ID NO: 18591 - DNA, 174 bp, Homo sapiens
  MAP TO AC011460.1; EXPRESSED IN FETAL LIVER, SIGNAL = 1.5; EXPRESSED IN ADULT LIVER, SIGNAL = 1.2; EXPRESSED IN HELA, SIGNAL = 0.91; EXPRESSED IN BRAIN, SIGNAL = 1.4; EXPRESSED IN BONE MARROW, SIGNAL = 1.3; EXPRESSED IN BT474, SIGNAL = 1.5; EXPRESSED IN PLACENTA, SIGNAL = 1.2; EXPRESSED IN HEART, SIGNAL = 1.5; EXPRESSED IN HBL100, SIGNAL = 1.3; NT HIT: AF309561.1, EVALUE 2.00e-03; SWISSPROT HIT: Q06730, EVALUE 2.00e-11; EST_HUMAN HIT: BE837782.1, EVALUE 3.00e-67
gctgtccttacctattgatactaggttgatgtagttctccaacattacttccttgtacaagaccttctgagactggtccaaaaactgccactcctccctggtgaagcccacagccacatcttcgaatgacaatgacccctataataacaattccaatgcaatctgaggtggata

SEQ ID NO: 18592 - DNA, 342 bp, Homo sapiens
  MAP TO AC011482.1; EXPRESSED IN BT474, SIGNAL = 2.3; EXPRESSED IN HEART, SIGNAL = 1.2; EXPRESSED IN BRAIN, SIGNAL = 2.1; EXPRESSED IN FETAL LIVER, SIGNAL = 1.5; EXPRESSED IN ADULT LIVER, SIGNAL = 1.2; EXPRESSED IN PLACENTA, SIGNAL = 1.8; EXPRESSED IN HELA, SIGNAL = 1.8; EXPRESSED IN HBL100, SIGNAL = 2.6; EXPRESSED IN BONE MARROW, SIGNAL = 1.5; SWISSPROT HIT: P35227, EVALUE 6.60e+00; NT HIT: U02513.1, EVALUE 2.10e-01; EST_HUMAN HIT: BE257857.1, EVALUE 2.00e-69
agtaacctttgcaaatggaacacaagatatatggggtcagctcagagagattaatcaggcgctcctcctcgtcctccgagtcttgccggcctccctccagcctcaacgagaagtgactcatgtcctcctcctcctcctcctcttcttcctcctctagctcctcttcttcttccaactgctcgtccttatcctcgaagcggcctctgaagcggcccaggctgcgctctggctccagctcagggggccgggagccggagcagccgggagccccagtctcagacagaggcgccggtccctcctcacccgctgcgggtgcgagggtgagggcgggcggggagacag

SEQ ID NO: 18593 - DNA, 256 bp, Homo sapiens
  MAP TO AL109614.4; EXPRESSED IN HBL100, SIGNAL = 4.2; EXPRESSED IN HEART, SIGNAL =   5; EXPRESSED IN LUNG, SIGNAL = 2.7; EXPRESSED IN FETAL LIVER, SIGNAL = 4.1; EXPRESSED IN ADULT LIVER, SIGNAL = 2.8; EXPRESSED IN PLACENTA, SIGNAL = 3.9; EXPRESSED IN HELA, SIGNAL = 3.6; EXPRESSED IN BRAIN, SIGNAL = 2.3; EXPRESSED IN BONE MARROW, SIGNAL = 3.2; EXPRESSED IN BT474, SIGNAL =   4; NT HIT: M24461.1, EVALUE 6.20e-01; EST_HUMAN HIT: AI686126.1, EVALUE 9.20e-01; SWISSPROT HIT: P23500, EVALUE 3.90e+00
ggatgctcttcaggaggcagtagataaatggtccagctttcctggggctcaggaagaggtgggagttgaggtcctgaatcaaaaactctgattggctctttgtgacatcatagaaatggggagtagtgtagtaaaagaagcctttgaccataaaaatatggaaggtaacttgtccaaaccagtttttcatgttgaacttgctgtcccaggtgagcttgctagaattgaattctttcaaactaagctctttggactt

SEQ ID NO: 18594 - DNA, 182 bp, Homo sapiens
  MAP TO AC011087.1; EXPRESSED IN PLACENTA, SIGNAL =  16; EXPRESSED IN BONE MARROW, SIGNAL = 8.4; EXPRESSED IN FETAL LIVER, SIGNAL =  22; EXPRESSED IN ADULT LIVER, SIGNAL = 6.7; EXPRESSED IN HEART, SIGNAL = 7.9; EXPRESSED IN HELA, SIGNAL = 6.9; EXPRESSED IN HBL100, SIGNAL = 5.2; EXPRESSED IN BRAIN, SIGNAL =  10; EXPRESSED IN LUNG, SIGNAL = 4.9; EXPRESSED IN BT474, SIGNAL = 3.5; EST_HUMAN HIT: W85765.1, EVALUE 1.60e-01; NT HIT: U94165.1, EVALUE 2.30e-02; SWISSPROT HIT: Q69154, EVALUE 1.30e+00
tccctgctttagttcttccactcgtaatcttagtttctttacttctgcttcattttgatccactcggttgtttgcatgagtcagttctgcaatatttgcctggtattgtctgtttagtttatagtaggcatgttgaaggttcagtaattcctttcaaaggaaaacaaaaattacattattta

SEQ ID NO: 18595 - DNA, 273 bp, Homo sapiens
  MAP TO AL033526.19; EXPRESSED IN BRAIN, SIGNAL = 2.2; EXPRESSED IN BONE MARROW, SIGNAL = 1.9; EXPRESSED IN LUNG, SIGNAL = 1.2; EXPRESSED IN BT474, SIGNAL = 1.6; EXPRESSED IN FETAL LIVER, SIGNAL = 2.1; EXPRESSED IN ADULT LIVER, SIGNAL = 1.7; EXPRESSED IN HBL100, SIGNAL = 1.9; EXPRESSED IN HELA, SIGNAL = 1.9; EXPRESSED IN PLACENTA, SIGNAL = 1.9; EXPRESSED IN HEART, SIGNAL = 1.8; SWISSPROT HIT: P34820, EVALUE 2.00e-32; NT HIT: gi4502428, EVALUE 1.00e-104
agcccgagccattctgagtgccagcccagcgctgctttgtcttctagtggagcgagaccgtgccctgggccaccaggagccccattggaaggagttccgctttgacctgacccagatcccggctggggaggcggtcacagctgcggagttccggatttacaaggtgcccagcatccacctgctcaacaggaccctccacgtcagcatgttccaggtggtccaggagcagtccaacaggtgccttccccttggcccgggtgccccacctaaccc

SEQ ID NO: 18596 - DNA, 319 bp, Homo sapiens
  MAP TO AL117325.3; EXPRESSED IN HELA, SIGNAL =   1; EXPRESSED IN HEART, SIGNAL = 1.1; EXPRESSED IN PLACENTA, SIGNAL =   1; EXPRESSED IN BONE MARROW, SIGNAL = 0.95; EXPRESSED IN BRAIN, SIGNAL = 1.1; EXPRESSED IN FETAL LIVER, SIGNAL = 0.92; NT HIT: AL163252.2, EVALUE 3.00e-03; EST_HUMAN HIT: AI738592.1, EVALUE 4.00e-18
atatttgcataaaatatcctataacaagctatataaggctgataacaaattaacaatgatggtatttaaaaactctatacttttattccatccttctctgctttatgatattgatatcagcatttacatcttttcatattatgtatttttaacaaattattgtaactattgttattttaataattttgtttttaatcttcatataggatatatatatgatttatacaccaacattactgtattagagtattctgaatttaactgtgtacttacttgtactagtgagttttatactttcatgtgcttttgtgttaccaat

SEQ ID NO: 18597 - DNA, 221 bp, Homo sapiens
  MAP TO AL080238.9; EXPRESSED IN HEART, SIGNAL = 1.3; EXPRESSED IN BRAIN, SIGNAL = 1.1; EXPRESSED IN BONE MARROW, SIGNAL = 0.94; EXPRESSED IN BT474, SIGNAL = 1.1; EXPRESSED IN FETAL LIVER, SIGNAL = 1.1; EXPRESSED IN HELA, SIGNAL =   5; NT HIT: AB033078.1, EVALUE 4.50e-01; SWISSPROT HIT: P01132, EVALUE 8.90e-01; EST_HUMAN HIT: BE871330.1, EVALUE 2.00e-01
tatggggagagacttggagaatactctctcttcctgctatgtgtaccatcagaattgaaccaggggaaatgtgaacgggtctccagttactttgggatgaatctttcgggggttctaaagaaacttccttttcctccaaccagagaatcttggcctcctccacacttcaccggcaccccccacaatcatcatggaggagtcagcaatggtgctttgggatg

SEQ ID NO: 18598 - DNA, 282 bp, Homo sapiens
  MAP TO AL022337.19; EXPRESSED IN PLACENTA, SIGNAL = 1.6; EXPRESSED IN BONE MARROW, SIGNAL = 1.2; EXPRESSED IN BRAIN, SIGNAL = 1.4; EXPRESSED IN FETAL LIVER, SIGNAL = 1.2; EXPRESSED IN BT474, SIGNAL = 0.96; EXPRESSED IN HEART, SIGNAL = 0.98; EXPRESSED IN HELA, SIGNAL = 1.8; EXPRESSED IN HBL100, SIGNAL = 1.1; EXPRESSED IN LUNG, SIGNAL =   1; EXPRESSED IN ADULT LIVER, SIGNAL = 1.1
atttaatgatgatggcaatgatagtgatgatggtgatgatggccatgttggtgatgaagatagtgataacttgatgatgatgatggtgatgatcataatgataatcatggcaatgatggtggtggtgatactaataatggagatgatgatgatgatgatagcgatgatgatgatggtgatggttatgatgctgatgatgacagtgatgatgatgatggtgatggtcatggtataatggtgatgataatagacatgctcacataccagattctgtcctacctt

SEQ ID NO: 18599 - DNA, 168 bp, Homo sapiens
  MAP TO AL096819.2; EXPRESSED IN BT474, SIGNAL = 1.2; EXPRESSED IN HBL100, SIGNAL = 1.9; EXPRESSED IN HEART, SIGNAL = 2.2; EXPRESSED IN LUNG, SIGNAL = 1.1; SWISSPROT HIT: P22316, EVALUE 2.90e+00; EST_HUMAN HIT: BE838026.1, EVALUE 8.00e-68; NT HIT: gi11545796, EVALUE 6.00e-68
attccgtgaagatggaaccttgttatactaaagtcaacctgcttcacgagcgcctgcaggatctcaagagccgcttcagattcccccacattgatctggtggttcagaggacacagaactacatgcaggaggtgggtgtggcaggggcatccgtggtggatgagggta

SEQ ID NO: 18600 - DNA, 239 bp, Homo sapiens
  MAP TO AL078463.11; EXPRESSED IN ADULT LIVER, SIGNAL = 1.4; EXPRESSED IN PLACENTA, SIGNAL = 1.3; EXPRESSED IN BRAIN, SIGNAL = 1.1; EXPRESSED IN LUNG, SIGNAL =   1; EXPRESSED IN BONE MARROW, SIGNAL =   1; EXPRESSED IN FETAL LIVER, SIGNAL = 1.5; EXPRESSED IN HEART, SIGNAL = 1.3; EXPRESSED IN HELA, SIGNAL = 0.94; EXPRESSED IN HBL100, SIGNAL = 0.95; NT HIT: gi6671564, EVALUE 3.10e-02; EST_HUMAN HIT: BF107749.1, EVALUE 5.50e-02
aactgggatcttcaacacctttgggattcattcatcagatatggaattcagactgcttaaagccttggagaactgcaactaggcagcagagagctagctggtttctaaggagatcgagactgagcagacgatacagaagtagagcatcctctagaggtcgcctagtccaccaccccaccacctcctgctcactcccacccctccccagcagcaggctaccaggaagcaagagcagacag

SEQ ID NO: 18601 - DNA, 118 bp, Homo sapiens
  MAP TO AL049612.11; EXPRESSED IN BT474, SIGNAL = 1.1; EXPRESSED IN FETAL LIVER, SIGNAL = 3.8; EXPRESSED IN ADULT LIVER, SIGNAL = 1.5; EXPRESSED IN HELA, SIGNAL = 1.8; EXPRESSED IN PLACENTA, SIGNAL = 2.2; EXPRESSED IN HBL100, SIGNAL = 1.3; EXPRESSED IN HEART, SIGNAL = 2.5; EXPRESSED IN BRAIN, SIGNAL = 2.3; EXPRESSED IN BONE MARROW, SIGNAL =   2; EXPRESSED IN LUNG, SIGNAL = 1.3; NT HIT: AF094481.1, EVALUE 1.00e+00; EST_HUMAN HIT: AI220285.1, EVALUE 6.70e-02; SWISSPROT HIT: P48574, EVALUE 5.30e+00
atggcccaccaaggtgacacaaaattcacgatcacacccagtctggaatttctttcaatggttgtacttgagtattatttcctgaactttaacagcagttttcttcaaacacagccat

SEQ ID NO: 18602 - DNA, 468 bp, Homo sapiens
  MAP TO AF172272.1; EXPRESSED IN ADULT LIVER, SIGNAL = 1.1; EXPRESSED IN BT474, SIGNAL = 1.4; EXPRESSED IN FETAL LIVER, SIGNAL = 1.8; EXPRESSED IN HELA, SIGNAL = 1.7; EXPRESSED IN PLACENTA, SIGNAL =   1; EXPRESSED IN HEART, SIGNAL = 0.99; EXPRESSED IN BRAIN, SIGNAL = 0.93; EST_HUMAN HIT: BE006292.1, EVALUE 0.00e+00; SWISSPROT HIT: P15082, EVALUE 2.10e+00; NT HIT: AF255549.1, EVALUE 1.20e+00
agcaaaccaaattgttcaagggaaagctgtaatttttgtcagtcctcagctgtccatgagtactttttgccaggttatacaatttccctccaggagccaaccactctggaggaacatgaagttcagaaagggcaccacagagcaaacatttgtgaaggcgattatccattactgcttttttagcagctgctgtgacttcctcaggctgaactcctatcactccagtccttctgtagaaatactgatggacatcagcaaccaaactaggatggataccatgtttgtccataaagacttcttccatagcagcaacaagcctaagtaagtatttatcttgcaaacttctgtcacctccaataacacaaccaccatcctcttcaagttttatgtactttttaataaggtcctgaggcacaccccatgctttaggaagcaaattcataggcagtttgggcaaagcagcccctt

SEQ ID NO: 18603 - DNA, 143 bp, Homo sapiens
  MAP TO AL109628.2; EXPRESSED IN PLACENTA, SIGNAL =  24; EXPRESSED IN HBL100, SIGNAL =  37; EXPRESSED IN HELA, SIGNAL =  36; EXPRESSED IN HEART, SIGNAL =  19; EXPRESSED IN BRAIN, SIGNAL = 5.1; EXPRESSED IN BONE MARROW, SIGNAL =  24; EXPRESSED IN LUNG, SIGNAL =  22; EXPRESSED IN ADULT LIVER, SIGNAL =  18; EXPRESSED IN BT474, SIGNAL =  45; EXPRESSED IN FETAL LIVER, SIGNAL =  12; SWISSPROT HIT: P19944, EVALUE 8.00e-12; EST_HUMAN HIT: BE739578.1, EVALUE 3.00e-27; NT HIT: gi11431783, EVALUE 3.00e-23
attgcagatgaagctcctgatgttgacattggccagtcctttgcaaacaaatcaggccagaaaggttcaacatttatatcagctgctttaacaagggcattgatctaatccactgtgatggtcacctcattgtcgtgcagaat

SEQ ID NO: 18604 - DNA, 135 bp, Homo sapiens
  MAP TO AL034346.18; EXPRESSED IN FETAL LIVER, SIGNAL = 6.6; EXPRESSED IN HELA, SIGNAL = 6.4; EXPRESSED IN PLACENTA, SIGNAL = 7.7; EXPRESSED IN HBL100, SIGNAL = 4.9; EXPRESSED IN HEART, SIGNAL = 8.6; EXPRESSED IN BRAIN, SIGNAL = 4.3; EXPRESSED IN BONE MARROW, SIGNAL = 6.4; EXPRESSED IN LUNG, SIGNAL = 4.9; EXPRESSED IN BT474, SIGNAL =   4; EXPRESSED IN ADULT LIVER, SIGNAL = 4.8; NT HIT: AL161472.2, EVALUE 2.60e-01; EST_HUMAN HIT: Z20673.1, EVALUE 3.10e-01
atgaacttgaaggaagaagaggcgaaaggaatgagcaagaacacggtctttggcatcttgaggagctgcaggtcagtcccactgcagcaggacagtcctagagaggcagcaggcagtctggcacctttgcatggc

SEQ ID NO: 18605 - DNA, 314 bp, Homo sapiens
  MAP TO AL121758.4; EXPRESSED IN BT474, SIGNAL = 2.5; EXPRESSED IN FETAL LIVER, SIGNAL = 2.3; EXPRESSED IN ADULT LIVER, SIGNAL = 2.2; EXPRESSED IN HELA, SIGNAL =   3; EXPRESSED IN PLACENTA, SIGNAL = 1.7; EXPRESSED IN HBL100, SIGNAL =   3; EXPRESSED IN HEART, SIGNAL = 5.9; EXPRESSED IN BRAIN, SIGNAL =   2; EXPRESSED IN BONE MARROW, SIGNAL = 1.9; EXPRESSED IN LUNG, SIGNAL = 1.2; SWISSPROT HIT: O67718, EVALUE 5.10e-01; EST_HUMAN HIT: BE855812.1, EVALUE 1.00e-06; NT HIT: U80017.1, EVALUE 2.00e-10
atctaatcctaagagcccttttaaagcagtgagtttttcccggttggtcacagaagaggaagtcaaagacatgaagcataaggaggattcaaaacaccattgctcacttgaagatggaggggccacacatcaaggaatgcaggtggcttctagccaacaaaaaaatcgtctgttacggtcagtcccacaaccgcaagacgctgaacattgcgaacaacaagaatgaacttgggggcaacccattttcgccaggacccctctctctgcaacagagagagcttttctctttcttttgcctattaaacttctgctct

SEQ ID NO: 18606 - DNA, 365 bp, Homo sapiens
  MAP TO Z95330.7; EXPRESSED IN HEART, SIGNAL = 1.4; EXPRESSED IN LUNG, SIGNAL =   1; EXPRESSED IN BRAIN, SIGNAL = 1.4; EXPRESSED IN ADULT LIVER, SIGNAL = 1.3; EXPRESSED IN PLACENTA, SIGNAL = 1.6; EXPRESSED IN HELA, SIGNAL =   4; EXPRESSED IN HBL100, SIGNAL = 4.1; EXPRESSED IN BONE MARROW, SIGNAL = 1.3; EXPRESSED IN BT474, SIGNAL = 2.1; EXPRESSED IN FETAL LIVER, SIGNAL = 1.3; NT HIT: gi11422974, EVALUE 5.00e-33; EST_HUMAN HIT: BE302937.1, EVALUE 8.00e-33; SWISSPROT HIT: P19623, EVALUE 6.00e-31
gtcccaagtccgtgccccacattgcctgcctgccatggagcctgaccctaagggccctgctgcctccagcctcactgccatccccgaagtctcgttccaccagacgtgtagcctgtggtccgggcaggccttgtctctgctccacgaccagcactcgcactaccagaacatccttgtcttctgcagtaaaacctacagcaatatgctggtgttggatggcatcgtcctgggcatagggagggatgagttctcctgccaggagatggtagccatcctgcctctctgcagccaccccaagccacgaaaggtgctgatcatcgtgggcagagatgggtgtcttgcacaaggtggggaagcacctctcc

SEQ ID NO: 18607 - DNA, 120 bp, Homo sapiens
  MAP TO AL049820.14; EXPRESSED IN BONE MARROW, SIGNAL = 1.1; EXPRESSED IN ADULT LIVER, SIGNAL = 1.2; EXPRESSED IN PLACENTA, SIGNAL = 1.2; EXPRESSED IN HEART, SIGNAL = 0.92; EXPRESSED IN BRAIN, SIGNAL = 0.98; SWISSPROT HIT: P41972, EVALUE 1.80e+00
agggaccagactggagctaaggatgctcttggaggattttgtgtatggacaacacagccatggaggttgggtactgcagagggtgagggagcatcatgtgaatgcctggcccctacctcg

SEQ ID NO: 18608 - DNA, 128 bp, Homo sapiens
  MAP TO AL110114.1; EXPRESSED IN PLACENTA, SIGNAL = 1.4; EXPRESSED IN HELA, SIGNAL = 1.4; EXPRESSED IN HBL100, SIGNAL = 1.1; EXPRESSED IN HEART, SIGNAL = 1.4; EXPRESSED IN BONE MARROW, SIGNAL = 1.2; EXPRESSED IN BRAIN, SIGNAL = 1.3; EXPRESSED IN ADULT LIVER, SIGNAL = 1.1; EXPRESSED IN BT474, SIGNAL = 0.98; EXPRESSED IN FETAL LIVER, SIGNAL = 1.2; SWISSPROT HIT: P39880, EVALUE 6.00e-01; NT HIT: AF251708.1, EVALUE 2.40e-01
gcagctctgtctggtaccagagctgagggtctggggagctccaccatcctgctttccaggcaacatctttacccatctctgttttggtccaaggcacaaagctggtgtcagatggctcttggataagc

SEQ ID NO: 18609 - DNA, 423 bp, Homo sapiens
  MAP TO AP000497.1; EXPRESSED IN BT474, SIGNAL = 1.3; EXPRESSED IN FETAL LIVER, SIGNAL = 1.6; EXPRESSED IN HEART, SIGNAL = 1.8; EXPRESSED IN LUNG, SIGNAL = 1.1; EXPRESSED IN BRAIN, SIGNAL = 1.9; EXPRESSED IN ADULT LIVER, SIGNAL = 1.4; EXPRESSED IN PLACENTA, SIGNAL = 2.1; EXPRESSED IN HELA, SIGNAL = 1.7; EXPRESSED IN HBL100, SIGNAL = 1.7; EXPRESSED IN BONE MARROW, SIGNAL = 1.9; NT HIT: gi7706762, EVALUE 4.00e-77; EST_HUMAN HIT: BE813232.1, EVALUE 3.00e-82; SWISSPROT HIT: P02640, EVALUE 5.00e-09
ggaaattcatggggcaccttgcgtcacagctgggtggggcgagagctttctccatgagcagagagggaccctgtacccagagcagagcggagtgctcggggagaaaccacggggctcagaggagggcccagggctcccactcctgagaagtggcttcccaggccctggggtggggcacttgtgccatgggctggggtgcccctctgggtggctcacagccttgctgtccgtgctggccaggctccctgaggaggtccccagcttccagccacgactgtttgagtgctccagccacatgggctgcctggtcctcgcagaagtggggttcttcagccaggaggacctggacaagtatgacatcatgttactggacacctggcaggaggtaaggtggccatccctgcctggtggggctgtgaacgg

SEQ ID NO: 18610 - DNA, 503 bp, Homo sapiens
  MAP TO AL034405.4; EXPRESSED IN FETAL LIVER, SIGNAL = 2.8; EXPRESSED IN HELA, SIGNAL =   3; EXPRESSED IN HEART, SIGNAL =   5; EXPRESSED IN LUNG, SIGNAL = 1.9; EXPRESSED IN BRAIN, SIGNAL = 3.3; EXPRESSED IN BT474, SIGNAL = 2.4; EXPRESSED IN ADULT LIVER, SIGNAL = 2.4; EXPRESSED IN PLACENTA, SIGNAL = 3.7; EXPRESSED IN HBL100, SIGNAL = 2.6; EXPRESSED IN BONE MARROW, SIGNAL = 2.8; NT HIT: gi11420514, EVALUE 1.00e-90; EST_HUMAN HIT: AA601246.1, EVALUE 9.00e-79; SWISSPROT HIT: P39806, EVALUE 5.00e-13
caagcaagtttctgtagctgtggctttgctcagccagaaagctggaagccaaggtctgtctctggacaccttaaacaagccaagctatctcaccagcatcccttctgctgccagctctgtgaccccatggctgacacccttcaccctgaagctggataggacacgggtgctcctgaatattgtgtctcagctcccaagtgctttgctacctcaggcttgggttctgtgctcttccagagtcctttctctactgtggcattatacccatccaagaaagagaaagataagccaccaaacatctgagatgtgtgtcaaacccaaagacgaggccatcctctacaagcacaactgtaagaactgtagcaaggtttgggagactggtagctccttgcagatctatccccacatgcatactggagagagacccttcatgttctctgtgtgtggtcatggcttcaccaccaagggtaacctcaaggtatactttaatcaatatccccagg

SEQ ID NO: 18611 - DNA, 138 bp, Homo sapiens
  MAP TO AL079307.2; EXPRESSED IN PLACENTA, SIGNAL = 4.4; EXPRESSED IN HBL100, SIGNAL = 2.8; EXPRESSED IN HEART, SIGNAL = 3.9; EXPRESSED IN FETAL LIVER, SIGNAL = 3.3; EXPRESSED IN ADULT LIVER, SIGNAL = 2.6; EXPRESSED IN HELA, SIGNAL = 3.8; EXPRESSED IN BRAIN, SIGNAL = 3.3; EXPRESSED IN LUNG, SIGNAL = 2.7; EXPRESSED IN BONE MARROW, SIGNAL = 4.1; EXPRESSED IN BT474, SIGNAL = 3.3; NT HIT: gi11425200, EVALUE 1.20e+00; EST_HUMAN HIT: BE067219.1, EVALUE 8.00e-02
acctgccgagaggtgcccctggcggccaggctgctgctggccatggccctcatggatgagtggttctacctctgccctgaccacttcttcattgcctcttgatggtccatggcagatgccaggcactgtccctgtggc

SEQ ID NO: 18612 - DNA, 145 bp, Homo sapiens
  MAP TO AL035704.7; EXPRESSED IN HBL100, SIGNAL = 1.6; EXPRESSED IN HEART, SIGNAL = 1.7; EXPRESSED IN LUNG, SIGNAL = 0.99; EXPRESSED IN FETAL LIVER, SIGNAL = 1.4; EXPRESSED IN ADULT LIVER, SIGNAL = 2.3; EXPRESSED IN PLACENTA, SIGNAL = 2.1; EXPRESSED IN HELA, SIGNAL = 1.8; EXPRESSED IN BRAIN, SIGNAL =   2; EXPRESSED IN BONE MARROW, SIGNAL = 1.8; EXPRESSED IN BT474, SIGNAL = 1.2; NT HIT: AJ296671.1, EVALUE 5.10e+00; EST_HUMAN HIT: AI815784.1, EVALUE 8.40e-02; SWISSPROT HIT: P08639, EVALUE 1.30e+00
atactgccacaggaagcagccagtcatgaccactgagagcaggcagaagaagctgcagatggccgggaggagccacttcttcttcactttcagcaagttgggccaccagccatcctgggagagcaaggacataaggtacagtccc

SEQ ID NO: 18613 - DNA, 226 bp, Homo sapiens
  MAP TO AL078463.11; EXPRESSED IN BRAIN, SIGNAL = 0.96; EXPRESSED IN ADULT LIVER, SIGNAL = 1.1; EXPRESSED IN HELA, SIGNAL = 0.92; EXPRESSED IN PLACENTA, SIGNAL = 1.3; EXPRESSED IN HEART, SIGNAL = 0.94; EST_HUMAN HIT: AI522334.1, EVALUE 2.00e-01; SWISSPROT HIT: P53940, EVALUE 2.20e+00
gaaaagagcttcctggattttcaagaggctggttccatcgttgacaggtaaggtgaattgggtccttaagattatcatgattattttgagttttcctttgtcaaattgttcaacctatacccaaggaagtacgataacaattgagttccgaaagcattcagagacccaaagacaaagacataccacgataagaataaccacacttttgagtctaccttggccaaga

SEQ ID NO: 18614 - DNA, 241 bp, Homo sapiens
  MAP TO AL034347.15; EXPRESSED IN FETAL LIVER, SIGNAL = 1.3; EXPRESSED IN BT474, SIGNAL = 1.1; EXPRESSED IN HBL100, SIGNAL = 1.9; EXPRESSED IN PLACENTA, SIGNAL = 1.3; EXPRESSED IN HELA, SIGNAL = 1.3; EXPRESSED IN HEART, SIGNAL = 1.4; EXPRESSED IN BRAIN, SIGNAL = 1.2; EXPRESSED IN BONE MARROW, SIGNAL = 0.99; NT HIT: AF129756.1, EVALUE 2.30e+00; SWISSPROT HIT: P37600, EVALUE 3.40e+00
ttgattcaaccatcttgctaaaacctggaaagttccttcctgtcccagttttgctgtcatcaattgggtctgaatggagggttccacctgtttctccattccctgttatattcccaggctcccaaattattgttgcccattggttgccaaataaccctctcaagatcattaattcattcactccatagactccttccatgtgccaagtgtgtacttggcttggagaatatcttctaggtga

SEQ ID NO: 18615 - DNA, 140 bp, Homo sapiens
  MAP TO AL078583.15; EXPRESSED IN BONE MARROW, SIGNAL = 4.7; EXPRESSED IN HBL100, SIGNAL = 3.1; EXPRESSED IN HELA, SIGNAL = 3.8; EXPRESSED IN HEART, SIGNAL = 3.9; EXPRESSED IN BRAIN, SIGNAL = 3.8; EXPRESSED IN LUNG, SIGNAL = 2.9; EXPRESSED IN BT474, SIGNAL = 2.6; EXPRESSED IN ADULT LIVER, SIGNAL = 4.8; EXPRESSED IN FETAL LIVER, SIGNAL =   4; EXPRESSED IN PLACENTA, SIGNAL = 3.9; NT HIT: AF156673.1, EVALUE 6.80e-02; SWISSPROT HIT: P09714, EVALUE 4.50e-01
gtaagccgcccagctgggatggaatccaggcgatgcagtcttctcagctccacacgctgcccccaggaacctgagccaggaggcaggagcagactctgatgtccatgctgggcatgggctggagtgggtagacatccagg

SEQ ID NO: 18616 - DNA, 75 bp, Homo sapiens
  MAP TO AL121757.2; EXPRESSED IN HELA, SIGNAL = 1.3; EXPRESSED IN HEART, SIGNAL = 1.5; EXPRESSED IN PLACENTA, SIGNAL = 0.98; EXPRESSED IN BONE MARROW, SIGNAL = 1.7; EXPRESSED IN BRAIN, SIGNAL =   1; EXPRESSED IN FETAL LIVER, SIGNAL = 1.6; EST_HUMAN HIT: AW195606.1, EVALUE 2.20e-01; NT HIT: AF223251.1, EVALUE 2.30e+00
ctccacctccctgacaccagataccccctggatggagctaggaccctgggggaagagggttaggaaagagaagag

SEQ ID NO: 18617 - DNA, 227 bp, Homo sapiens
  MAP TO AP000426.1; EXPRESSED IN BT474, SIGNAL = 1.1; EXPRESSED IN BONE MARROW, SIGNAL = 1.3; EXPRESSED IN ADULT LIVER, SIGNAL = 1.1; EXPRESSED IN FETAL LIVER, SIGNAL = 1.8; EXPRESSED IN PLACENTA, SIGNAL = 1.3; EXPRESSED IN HEART, SIGNAL = 1.4; EXPRESSED IN HELA, SIGNAL = 0.93; EXPRESSED IN HBL100, SIGNAL = 1.1; EXPRESSED IN BRAIN, SIGNAL = 1.4; NT HIT: L00036.1, EVALUE 8.40e+00; SWISSPROT HIT: P40472, EVALUE 5.80e-01
ttgtgtccttggccctttctaaaactgcaacaacttcctgtctggaaggtcctccctaatcccaaaatgcaggaagaacatttgctgatgctctggcaaagcagaaggctagacaaaccaatacccctaagtcctctcctgcaactcaacacacagcgggaaggaggagcaggatagacatcactcaggaaagtaatcagtctgcttctgaaagcagaggcactggg

SEQ ID NO: 18618 - DNA, 219 bp, Homo sapiens
  MAP TO AL049537.18; EXPRESSED IN PLACENTA, SIGNAL = 1.4; EXPRESSED IN HEART, SIGNAL = 1.1; EXPRESSED IN BRAIN, SIGNAL = 1.1; EXPRESSED IN BONE MARROW, SIGNAL = 0.99; EXPRESSED IN BT474, SIGNAL = 4.5; EXPRESSED IN FETAL LIVER, SIGNAL = 0.97; EXPRESSED IN ADULT LIVER, SIGNAL = 1.2; EXPRESSED IN HBL100, SIGNAL = 1.3; EXPRESSED IN HELA, SIGNAL = 1.1; EST_HUMAN HIT: AA508649.1, EVALUE 3.00e-89; SWISSPROT HIT: P11075, EVALUE 1.00e-05; NT HIT: gi11422086, EVALUE 4.00e-97
gctcttctgactgcagtgacttccccacacattgaaattcatgagggtactatcctgcagacagtgagaacatgttacaatatctatttggccagcaaaaatctcatcaatcaaaccactgccaaggctacccttactcagatgctgaacgtcattttcacccgcatggaaaaccaagtggtgagtgacagcacttacgtgctaggggcaagacatcat

SEQ ID NO: 18619 - DNA, 224 bp, Homo sapiens
  MAP TO AF191068.1; EXPRESSED IN FETAL LIVER, SIGNAL = 1.7; EXPRESSED IN ADULT LIVER, SIGNAL =   1; EXPRESSED IN PLACENTA, SIGNAL = 1.2; EXPRESSED IN HELA, SIGNAL = 1.2; EXPRESSED IN HEART, SIGNAL = 1.7; EXPRESSED IN BONE MARROW, SIGNAL = 1.3; EXPRESSED IN LUNG, SIGNAL = 0.89; EXPRESSED IN BRAIN, SIGNAL = 1.4; SWISSPROT HIT: Q63259, EVALUE 5.80e-01; NT HIT: AE001931.1, EVALUE 4.50e-01
tcagtattggccccactcacagatgttctttcctgggttgggccagctccttttggacacttttgagatccacctcgggcccgtctgcgtttgcgatgctgcttttctgtggctccttccggctactgggactgttcccttctggcattgccttcggcagcacttcgaggaactcagcctccagggcctcctgttgtccttgaaaatgcagttttatttcatta

SEQ ID NO: 18620 - DNA, 228 bp, Homo sapiens
  MAP TO AL117694.1; EXPRESSED IN HBL100, SIGNAL = 2.7; EXPRESSED IN HELA, SIGNAL = 2.6; EXPRESSED IN PLACENTA, SIGNAL = 3.5; EXPRESSED IN HEART, SIGNAL = 2.4; EXPRESSED IN BRAIN, SIGNAL =   3; EXPRESSED IN BONE MARROW, SIGNAL =   5; EXPRESSED IN LUNG, SIGNAL =   2; EXPRESSED IN BT474, SIGNAL = 2.2; EXPRESSED IN ADULT LIVER, SIGNAL = 3.2; EXPRESSED IN FETAL LIVER, SIGNAL = 2.6; EST_HUMAN HIT: AW855422.1, EVALUE 9.00e-07; NT HIT: U62631.1, EVALUE 8.00e-06
tgtctcggggtggcagaggcagaagaggtggaggaggaggaaggggaggcaggagaggcaggcacagtcggtataacttttatgaaaaaaaatcttgtaagtgaacctgcacagttcaaacctgtgatgttcaagggtcggttgtatattgtttatttgaaatttgctaagacagcagatcttagtatcctcatcacatatacatacatacaaacaatgacaactatg

SEQ ID NO: 18621 - DNA, 99 bp, Homo sapiens
  MAP TO AL031943.5; EXPRESSED IN PLACENTA, SIGNAL = 2.2; EXPRESSED IN HBL100, SIGNAL = 1.5; EXPRESSED IN HELA, SIGNAL = 1.9; EXPRESSED IN HEART, SIGNAL = 1.8; EXPRESSED IN BRAIN, SIGNAL = 2.1; EXPRESSED IN BONE MARROW, SIGNAL = 1.9; EXPRESSED IN LUNG, SIGNAL = 1.2; EXPRESSED IN ADULT LIVER, SIGNAL = 1.7; EXPRESSED IN BT474, SIGNAL = 1.2; EXPRESSED IN FETAL LIVER, SIGNAL = 1.8; EST_HUMAN HIT: AI753555.1, EVALUE 4.80e+00
agaagcagactttgagaccagaattttcgtgcaagcaatttcttcaggcagttctcctggagaaactgatcaacaggcaggaacagcacagcaggaaag

SEQ ID NO: 18622 - DNA, 226 bp, Homo sapiens
  MAP TO AL121714.1; EXPRESSED IN BRAIN, SIGNAL = 1.8; EXPRESSED IN BT474, SIGNAL = 1.5; EXPRESSED IN HELA, SIGNAL = 1.1; EXPRESSED IN PLACENTA, SIGNAL =   1; EXPRESSED IN HBL100, SIGNAL = 0.99; EXPRESSED IN HEART, SIGNAL =   1; NT HIT: gi11421690, EVALUE 1.00e-103; EST_HUMAN HIT: AI267881.1, EVALUE 1.00e-103; SWISSPROT HIT: P32687, EVALUE 3.30e-01
ataaactgtttactttcgctttggttatcacctgagttgtagaaaaggtcaggtctttcgagaatatctccttcatgaatgtatggctcaattcgatcatcaccatacaagtactgctcactctcatccatctgacgactctctaccatctccagccactgagagttatgccagcgaaacttttcactctgaattttcttagcccattcttcatcatattcctatt

SEQ ID NO: 18623 - DNA, 88 bp, Homo sapiens
  MAP TO AL035703.17; EXPRESSED IN HBL100, SIGNAL = 1.4; EXPRESSED IN HEART, SIGNAL = 1.6; EXPRESSED IN BONE MARROW, SIGNAL = 1.7; EXPRESSED IN LUNG, SIGNAL = 1.1; EXPRESSED IN BRAIN, SIGNAL = 1.8; EXPRESSED IN ADULT LIVER, SIGNAL = 1.5; EXPRESSED IN BT474, SIGNAL = 1.3; EXPRESSED IN FETAL LIVER, SIGNAL = 1.5; EXPRESSED IN PLACENTA, SIGNAL = 2.3; EXPRESSED IN HELA, SIGNAL = 1.5; NT HIT: AB051897.1, EVALUE 1.80e-01; EST_HUMAN HIT: AW821631.1, EVALUE 1.90e-01
ctgggtgaccttggtctttgtcaccgtgctcttgctctgctgcagaggtcatggagtccttgcactgccgtgggtggagccacggcat

SEQ ID NO: 18624 - DNA, 155 bp, Homo sapiens
  MAP TO AL078602.10; EXPRESSED IN PLACENTA, SIGNAL = 6.5; EXPRESSED IN HELA, SIGNAL = 6.2; EXPRESSED IN HBL100, SIGNAL = 3.8; EXPRESSED IN HEART, SIGNAL = 6.1; EXPRESSED IN LUNG, SIGNAL = 4.6; EXPRESSED IN BONE MARROW, SIGNAL = 6.1; EXPRESSED IN BRAIN, SIGNAL = 6.7; EXPRESSED IN ADULT LIVER, SIGNAL = 5.2; EXPRESSED IN BT474, SIGNAL = 3.9; EXPRESSED IN FETAL LIVER, SIGNAL = 6.4; NT HIT: gi8922527, EVALUE 1.20e+00; SWISSPROT HIT: P56287, EVALUE 8.70e+00
tatcatttttccccttggaggctctcatgtcactagaaaatatgtcacgttggggagtcaatacaaaccagcaaagaaaatgctctgaatgcttattcaatacgcgggcatccatttccacaaagtgattcggggatgactccacattgactctg

SEQ ID NO: 18625 - DNA, 174 bp, Homo sapiens
  MAP TO AL121675.2; EXPRESSED IN BT474, SIGNAL =   2; EXPRESSED IN HEART, SIGNAL = 1.8; EXPRESSED IN LUNG, SIGNAL = 1.2; EXPRESSED IN BRAIN, SIGNAL = 1.4; EXPRESSED IN ADULT LIVER, SIGNAL = 1.4; EXPRESSED IN FETAL LIVER, SIGNAL = 1.5; EXPRESSED IN PLACENTA, SIGNAL = 1.6; EXPRESSED IN HELA, SIGNAL = 1.6; EXPRESSED IN HBL100, SIGNAL = 2.3; EXPRESSED IN BONE MARROW, SIGNAL = 1.3; EST_HUMAN HIT: AW838171.1, EVALUE 2.00e-31; SWISSPROT HIT: P51531, EVALUE 8.60e-02
tggatgtttctgagagattgagcgaggtggggaccatcggatttggccacgtgggaggtgctggaaaaggaagctggcctgcagtgggctgggaaggaaggagctggggatgggaaggacccacaagccttgaagaaggtttgctgtgaatatcacgcagcaggggcgtggtcg

SEQ ID NO: 18626 - DNA, 98 bp, Homo sapiens
  MAP TO AJ239326.3; EXPRESSED IN PLACENTA, SIGNAL =  14; EXPRESSED IN HBL100, SIGNAL =  15; EXPRESSED IN HEART, SIGNAL =  45; EXPRESSED IN FETAL LIVER, SIGNAL =  19; EXPRESSED IN ADULT LIVER, SIGNAL =  25; EXPRESSED IN HELA, SIGNAL =  17; EXPRESSED IN BRAIN, SIGNAL =  30; EXPRESSED IN LUNG, SIGNAL = 7.3; EXPRESSED IN BONE MARROW, SIGNAL =  14; EXPRESSED IN BT474, SIGNAL =  39; SWISSPROT HIT: Q9ZXY2, EVALUE 1.00e-10; NT HIT: AL163302.2, EVALUE 1.00e-48; EST_HUMAN HIT: BE877948.1, EVALUE 4.00e-22
aagattataacgaatgcatgggctgtgacgatgacgtcgtggatgtggtcattacctagaaggttgccgggttggcctagttcagcccgaataaggag

SEQ ID NO: 18627 - DNA, 199 bp, Homo sapiens
  MAP TO AL096861.9; EXPRESSED IN HEART, SIGNAL = 1.4; EXPRESSED IN PLACENTA, SIGNAL = 1.7; EXPRESSED IN BONE MARROW, SIGNAL = 1.8; EXPRESSED IN FETAL LIVER, SIGNAL = 2.2; EXPRESSED IN HELA, SIGNAL = 2.9; EXPRESSED IN HBL100, SIGNAL = 3.1; EXPRESSED IN BRAIN, SIGNAL =   1; EXPRESSED IN BT474, SIGNAL = 3.3; EST_HUMAN HIT: AU156359.1, EVALUE 1.80e-01; SWISSPROT HIT: P38041, EVALUE 3.70e+00
atcctctataaaaaacgaaacaattatcttgctttttctatgttttctgaatttgttaatagcttcatcgttggcatagcagtacaaggccacaattttagcgtcagctccaaagccttcctctttttctgccatcattgtaaatgatttactgagttcaattgagttttattctttatgagacttcaaaataatatgt

SEQ ID NO: 18628 - DNA, 153 bp, Homo sapiens
  MAP TO AL034346.18; EXPRESSED IN BT474, SIGNAL = 1.2; EXPRESSED IN HEART, SIGNAL = 0.87; EXPRESSED IN PLACENTA, SIGNAL = 0.99; EXPRESSED IN HBL100, SIGNAL = 1.1; EXPRESSED IN HELA, SIGNAL = 1.1; EXPRESSED IN BONE MARROW, SIGNAL = 0.93; NT HIT: AL163278.2, EVALUE 7.50e-02; EST_HUMAN HIT: T46983.1, EVALUE 3.50e-01; SWISSPROT HIT: Q00039, EVALUE 3.00e+00
gtacttcctattgtgtgcagtcgtaggaaggcagtgccggcccacccagaaaccagggcggcagagcctttcttctccccagaacagccaagggcaggcatctacggcagatttgcccagtcactgtctctataccagcactttgaattctga

SEQ ID NO: 18629 - DNA, 202 bp, Homo sapiens
  MAP TO AC011460.1; EXPRESSED IN FETAL LIVER, SIGNAL = 1.5; EXPRESSED IN PLACENTA, SIGNAL = 1.5; EXPRESSED IN BT474, SIGNAL = 1.7; EXPRESSED IN HEART, SIGNAL = 1.5; EXPRESSED IN HELA, SIGNAL = 1.1; EXPRESSED IN HBL100, SIGNAL = 0.92; EXPRESSED IN BRAIN, SIGNAL = 1.2; EXPRESSED IN BONE MARROW, SIGNAL = 1.4; EXPRESSED IN ADULT LIVER, SIGNAL = 1.1; EST_HUMAN HIT: W17364.1, EVALUE 1.00e-110; NT HIT: AF309561.1, EVALUE 1.00e-110; SWISSPROT HIT: P52745, EVALUE 6.00e-07
gatcacggaaggcacaaccacattcactgcattcacaaggtttctgtcctgtgcaaatcctctgttatctcctgaggctgcacatctgaccactggctgtcccacaaggactacgttcctgtttgcgaggaggccgctgatgtttaatgatgtctgaggggccacagaaggcacttgtgtagtcgccccgttagcagagttt

SEQ ID NO: 18630 - DNA, 171 bp, Homo sapiens
  MAP TO AF186190.1; EXPRESSED IN ADULT LIVER, SIGNAL = 7.8; EXPRESSED IN BT474, SIGNAL =  41; EXPRESSED IN FETAL LIVER, SIGNAL = 5.2; EXPRESSED IN HEART, SIGNAL = 8.3; EXPRESSED IN HBL100, SIGNAL =  49; EXPRESSED IN HELA, SIGNAL =  20; EXPRESSED IN PLACENTA, SIGNAL =  20; EXPRESSED IN BRAIN, SIGNAL = 4.7; EXPRESSED IN BONE MARROW, SIGNAL =  12; EXPRESSED IN LUNG, SIGNAL =  21; EST_HUMAN HIT: AA550929.1, EVALUE 6.00e-65; SWISSPROT HIT: P02433, EVALUE 1.00e-23; NT HIT: K03002.1, EVALUE 1.00e-62
atgggaacccagaggtattaacagcagggttcacagaaggttcaaaggccagatcttgatgcccaacattggttatgggagcaaccaaaaaacaaagcacatgctgcccagtggcttctggaagttcctggtccacaatgtcaaggagctggaagtgctgctgatgtgcaa

SEQ ID NO: 18631 - DNA, 249 bp, Homo sapiens
  MAP TO AC011145.1; EXPRESSED IN PLACENTA, SIGNAL = 3.1; EXPRESSED IN HEART, SIGNAL = 3.5; EXPRESSED IN HBL100, SIGNAL = 2.5; EXPRESSED IN BRAIN, SIGNAL = 2.2; EXPRESSED IN BONE MARROW, SIGNAL =   2; EXPRESSED IN LUNG, SIGNAL = 2.3; EXPRESSED IN ADULT LIVER, SIGNAL = 1.8; EXPRESSED IN BT474, SIGNAL = 3.1; EXPRESSED IN FETAL LIVER, SIGNAL = 2.9; EXPRESSED IN HELA, SIGNAL = 3.1; SWISSPROT HIT: P46153, EVALUE 5.00e+00; EST_HUMAN HIT: BF667027.1, EVALUE 0.00e+00; NT HIT: gi11416981, EVALUE 0.00e+00
ctgaataaaagcatttgcttgcacacactttgcattttccactgttactttgataccatttttagttgcgaaacacgtggcatgttctcggaaatgaatagctttcaagatagtggagagattcctaacgttgtcaaggctggccacaaggctgtactgatcatcctcgtcttggatctgttgggtcagaaggggcatcgtccactgcgcattcggccccgagggatgctcctggggccaacaacttct

SEQ ID NO: 18632 - DNA, 235 bp, Homo sapiens
  MAP TO AC011474.1; EXPRESSED IN HELA, SIGNAL = 1.8; EXPRESSED IN HBL100, SIGNAL = 1.2; EXPRESSED IN BRAIN, SIGNAL = 1.9; EXPRESSED IN PLACENTA, SIGNAL = 2.1; EXPRESSED IN HEART, SIGNAL = 2.4; EXPRESSED IN LUNG, SIGNAL = 1.3; EXPRESSED IN BONE MARROW, SIGNAL = 1.8; EXPRESSED IN ADULT LIVER, SIGNAL = 1.6; EXPRESSED IN BT474, SIGNAL = 1.1; EXPRESSED IN FETAL LIVER, SIGNAL = 2.8; NT HIT: AF099810.1, EVALUE 4.80e-01; SWISSPROT HIT: P22063, EVALUE 1.60e-01
actcatgaaggttttcctggaactgctgctgatggaatgcctggcacagtggtgggacttctcacccacaggagaggagaccattttctgcaaagtgaaacacttgccaagcaccctgactcactgcctgggggcgctggggcaggctggaagcacccccattttacagaataaacccaggtctgcagtaatgggagctttcctcaaagtcatagagctgggccctgcaggctaa

SEQ ID NO: 18633 - DNA, 189 bp, Homo sapiens
  MAP TO AL080316.8; EXPRESSED IN BONE MARROW, SIGNAL =   3; EXPRESSED IN ADULT LIVER, SIGNAL = 5.6; EXPRESSED IN FETAL LIVER, SIGNAL = 2.9; EXPRESSED IN BT474, SIGNAL =   2; EXPRESSED IN HELA, SIGNAL = 7.4; EXPRESSED IN PLACENTA, SIGNAL = 9.1; EXPRESSED IN HEART, SIGNAL = 2.2; EXPRESSED IN HBL100, SIGNAL =   3; EXPRESSED IN BRAIN, SIGNAL = 4.1; EXPRESSED IN LUNG, SIGNAL = 5.3; SWISSPROT HIT: P07207, EVALUE 2.20e+00; NT HIT: AJ133269.1, EVALUE 1.00e-78; EST_HUMAN HIT: N66951.1, EVALUE 2.00e-83
gctgctcctcgccaggctgagctaggtcccaattcttcctcagcctctgctcctccaccctataatccttttatcacctcccctcctcacacctggtccggcttacagtttcattccgtgactagccctcccccacctgcccagcaatttactcttaaaagggtggctgaagctaaaggcatagtcaag

SEQ ID NO: 18634 - DNA, 194 bp, Homo sapiens
  MAP TO AC004913.2; EXPRESSED IN PLACENTA, SIGNAL = 2.4; EXPRESSED IN HBL100, SIGNAL = 1.6; EXPRESSED IN LUNG, SIGNAL = 1.4; EXPRESSED IN BRAIN, SIGNAL = 1.9; EXPRESSED IN BONE MARROW, SIGNAL = 2.1; EXPRESSED IN ADULT LIVER, SIGNAL = 6.4; EXPRESSED IN HEART, SIGNAL = 1.8; EXPRESSED IN FETAL LIVER, SIGNAL = 1.2; EXPRESSED IN BT474, SIGNAL = 1.5; EXPRESSED IN HELA, SIGNAL = 2.6; EST_HUMAN HIT: AA281670.1, EVALUE 1.00e-104; NT HIT: D50918.1, EVALUE 1.00e-105
tttttcttctctttgtctctcttcagagtctgtgagcctccagcctgggagccctgggactggagcagctcagccgccgtctttctttgcttgaaagcattcacttcatcatccagggatttcttcttatcctccagtttcttcttctcgtcctggtgcagtttcttcagacggtcaaacttctcgtgcagctg

SEQ ID NO: 18635 - DNA, 184 bp, Homo sapiens
  MAP TO AC005049.2; EXPRESSED IN HELA, SIGNAL = 1.2; EXPRESSED IN PLACENTA, SIGNAL = 1.2; EXPRESSED IN HBL100, SIGNAL = 1.1; EXPRESSED IN BRAIN, SIGNAL = 1.4; EXPRESSED IN HEART, SIGNAL = 1.1; EXPRESSED IN BONE MARROW, SIGNAL = 1.2; EXPRESSED IN ADULT LIVER, SIGNAL = 1.3; EXPRESSED IN FETAL LIVER, SIGNAL = 0.91; EXPRESSED IN BT474, SIGNAL =   1; NT HIT: gi4503730, EVALUE 1.00e-99; EST_HUMAN HIT: AA446529.1, EVALUE 1.00e-87; SWISSPROT HIT: P27124, EVALUE 9.00e-10
ctgagagagcacaaaacttgtctgactcagcacagtccaggaagtcaagcagctcaatctcaaacaggacagtggtgtttggggggatcaagggagggcagcccagcgttccataggcgtagttcggtttgaacagaaacctggccagctctcctctccgcatgctcagaaggcccagctccat

SEQ ID NO: 18636 - DNA, 145 bp, Homo sapiens
  MAP TO AL022400.8; EXPRESSED IN FETAL LIVER, SIGNAL =   1; EXPRESSED IN ADULT LIVER, SIGNAL = 1.1; EXPRESSED IN HELA, SIGNAL =   1; EXPRESSED IN PLACENTA, SIGNAL = 0.99; EXPRESSED IN HEART, SIGNAL = 1.4; EXPRESSED IN BRAIN, SIGNAL = 0.91; EXPRESSED IN BONE MARROW, SIGNAL =   1; EST_HUMAN HIT: AA253954.1, EVALUE 2.00e-76; SWISSPROT HIT: Q08100, EVALUE 3.00e+00
tctgagggaaaaggccataccaatgctggagatgcaatatatgaggtggtgagtctacagcgagagtctgacaaggaggaaccagtcactcctactagtggagggggtccaatgtcaccccaggatgatgaagcagaagagggta

SEQ ID NO: 18637 - DNA, 174 bp, Homo sapiens
  MAP TO AC010896.1; EXPRESSED IN BONE MARROW, SIGNAL = 2.4; EXPRESSED IN FETAL LIVER, SIGNAL = 2.6; EXPRESSED IN ADULT LIVER, SIGNAL = 2.2; EXPRESSED IN BT474, SIGNAL = 1.5; EXPRESSED IN HELA, SIGNAL = 2.3; EXPRESSED IN HBL100, SIGNAL = 1.5; EXPRESSED IN PLACENTA, SIGNAL = 2.2; EXPRESSED IN HEART, SIGNAL = 3.3; EXPRESSED IN BRAIN, SIGNAL = 2.4; EXPRESSED IN LUNG, SIGNAL = 1.6; NT HIT: AF029318.1, EVALUE 8.70e-02; EST_HUMAN HIT: AA625755.1, EVALUE 7.00e-77; SWISSPROT HIT: O35568, EVALUE 3.40e-01
cgggttcgggatggctgaagacaaggcagccacaaggctggtggttgtggaggctttgacaaggagggtaatggaggcagatgctggtgttccactggtagccagagaggcaagcacaatagaaattccccttgtggttgacattacactctgacagagagaagagaagagggg

SEQ ID NO: 18638 - DNA, 134 bp, Homo sapiens
  MAP TO AL109928.5; EXPRESSED IN PLACENTA, SIGNAL = 1.7; EXPRESSED IN HEART, SIGNAL = 1.6; EXPRESSED IN LUNG, SIGNAL = 1.2; EXPRESSED IN BRAIN, SIGNAL = 1.7; EXPRESSED IN BONE MARROW, SIGNAL = 1.9; EXPRESSED IN FETAL LIVER, SIGNAL = 1.6; EXPRESSED IN ADULT LIVER, SIGNAL = 1.1; EXPRESSED IN BT474, SIGNAL = 1.9; EXPRESSED IN HELA, SIGNAL = 1.4; EXPRESSED IN HBL100, SIGNAL = 2.4; NT HIT: AF169690.1, EVALUE 7.00e-70; EST_HUMAN HIT: AA282955.1, EVALUE 7.00e-70
gagactacagaggagaatcggcaggtggtcacaattgcagggctgtctcaggctgagcagagagtacggtggaggggcatgggcctgctgttggcggtgagggccttggaaatggcttcctggaggagatggca

SEQ ID NO: 18639 - DNA, 308 bp, Homo sapiens
  MAP TO AL080317.11; EXPRESSED IN HBL100, SIGNAL = 1.6; EXPRESSED IN HELA, SIGNAL = 1.5; EXPRESSED IN HEART, SIGNAL = 1.6; EXPRESSED IN PLACENTA, SIGNAL = 1.6; EXPRESSED IN LUNG, SIGNAL = 1.2; EXPRESSED IN BRAIN, SIGNAL = 1.2; EXPRESSED IN BONE MARROW, SIGNAL = 1.1; EXPRESSED IN ADULT LIVER, SIGNAL = 1.6; EXPRESSED IN FETAL LIVER, SIGNAL = 1.8; EXPRESSED IN BT474, SIGNAL = 1.5; NT HIT: gi11417568, EVALUE 0.00e+00; EST_HUMAN HIT: AA569313.1, EVALUE 0.00e+00; SWISSPROT HIT: O60673, EVALUE 2.00e-53
tgtacttctgggagttcgaggttttcttggggacgttaccgatcgtgtccgtttatttgctttgttatgctcaagggaaccagaaatatttttatttggttgatgtttattggataatgggtcttgtgtagtatttgcattttgtgctttctgctgtcttttttgtaacaattcttttagaactgccagtccagactgtccttcaccaaatgctgaaggtgttgacacatttcgatttttacactgagaaagtgctttggtttgtgaaattgcttctgataacgacctcggttttactctttcaggtt

SEQ ID NO: 18640 - DNA, 217 bp, Homo sapiens
  MAP TO AL008718.23; EXPRESSED IN LUNG, SIGNAL = 2.9; EXPRESSED IN BRAIN, SIGNAL =   6; EXPRESSED IN BONE MARROW, SIGNAL = 2.9; EXPRESSED IN FETAL LIVER, SIGNAL = 2.2; EXPRESSED IN ADULT LIVER, SIGNAL = 2.5; EXPRESSED IN BT474, SIGNAL = 3.7; EXPRESSED IN HELA, SIGNAL = 2.5; EXPRESSED IN HEART, SIGNAL = 2.1; EXPRESSED IN HBL100, SIGNAL = 3.4; EXPRESSED IN PLACENTA, SIGNAL =   3; NT HIT: AB023147.1, EVALUE 1.00e-119; EST_HUMAN HIT: BE407261.1, EVALUE 1.00e-119; SWISSPROT HIT: P25941, EVALUE 3.50e+00
gcgtgggatgtcccaggttggaggtgtgcgtgttggcggtgttctttggctggaagcaaaaggccgttctggcgggatcggggccgtctgctcagctggaggcctttctggaactgggcgtgggtgaggtattcccagcccagggcaaagccatcaaacttctcgtgttcccatctcctattagaacaaagtggtaaactggggaggatgagctggg

SEQ ID NO: 18641 - DNA, 84 bp, Homo sapiens
  MAP TO AL078633.10; EXPRESSED IN PLACENTA, SIGNAL = 2.8; EXPRESSED IN LUNG, SIGNAL = 2.2; EXPRESSED IN BRAIN, SIGNAL = 1.6; EXPRESSED IN BONE MARROW, SIGNAL = 1.9; EXPRESSED IN FETAL LIVER, SIGNAL = 1.4; EXPRESSED IN ADULT LIVER, SIGNAL = 1.3; EXPRESSED IN HEART, SIGNAL = 2.2; EXPRESSED IN BT474, SIGNAL = 4.9; EXPRESSED IN HELA, SIGNAL = 3.3; EXPRESSED IN HBL100, SIGNAL = 6.4; EST_HUMAN HIT: BE794903.1, EVALUE 4.00e-40; NT HIT: AF054185.1, EVALUE 3.00e-40; SWISSPROT HIT: P48004, EVALUE 1.00e-11
tctgccctcatcgtgggtttcgactttgatggcactcctaggctctatcagactgacccctcgggcacataccatgcctggaag

SEQ ID NO: 18642 - DNA, 185 bp, Homo sapiens
  MAP TO AC007868.1; EXPRESSED IN BT474, SIGNAL = 2.9; EXPRESSED IN HBL100, SIGNAL = 2.7; EXPRESSED IN HELA, SIGNAL = 2.1; EXPRESSED IN HEART, SIGNAL =   2; EXPRESSED IN PLACENTA, SIGNAL =  15; EXPRESSED IN LUNG, SIGNAL = 3.4; EXPRESSED IN BRAIN, SIGNAL = 2.8; EXPRESSED IN BONE MARROW, SIGNAL = 2.5; EXPRESSED IN ADULT LIVER, SIGNAL = 1.2; EXPRESSED IN FETAL LIVER, SIGNAL = 1.7; EST_HUMAN HIT: AW504457.1, EVALUE 4.00e-63; SWISSPROT HIT: P54282, EVALUE 4.90e+00; NT HIT: AB018260.1, EVALUE 3.00e-63
ccgcttgaggtggaggtagtcctccttctcacgctccttccgtgcccgctggtaatgatcttcctccttcaggtaccacacaggtggccaccgatgcttctcgaaatactcctggttttctggagcagagagcaggcagcttggttagaaaggaggcagagggacaagaggaacgtgggacacca

SEQ ID NO: 18643 - DNA, 172 bp, Homo sapiens
  MAP TO AC007981.24; EXPRESSED IN FETAL LIVER, SIGNAL = 4.3; EXPRESSED IN ADULT LIVER, SIGNAL = 1.3; EXPRESSED IN BT474, SIGNAL = 2.6; EXPRESSED IN HBL100, SIGNAL = 1.6; EXPRESSED IN HELA, SIGNAL = 1.5; EXPRESSED IN HEART, SIGNAL = 1.5; EXPRESSED IN PLACENTA, SIGNAL = 2.5; EXPRESSED IN LUNG, SIGNAL = 1.9; EXPRESSED IN BRAIN, SIGNAL = 2.4; EXPRESSED IN BONE MARROW, SIGNAL = 1.7; EST_HUMAN HIT: AL046113.1, EVALUE 3.00e-92; NT HIT: U07000.1, EVALUE 3.00e-75; SWISSPROT HIT: P11274, EVALUE 8.00e-17
tccaaggtgccctacatcgtgcgccagtgcgtggaggagatcgagcgccgaggcatggaggaggtgggcatctaccgcatgtctggggtggccgcagacatccaggcactgaaggcagccttcaacgtcagtgagtgtcggcctgcgcaggacgggatggaggtgtgggcag

SEQ ID NO: 18644 - DNA, 431 bp, Homo sapiens
  MAP TO AF107885.2; EXPRESSED IN FETAL LIVER, SIGNAL = 1.7; EXPRESSED IN ADULT LIVER, SIGNAL = 1.7; EXPRESSED IN BT474, SIGNAL = 3.4; EXPRESSED IN HBL100, SIGNAL = 1.3; EXPRESSED IN HELA, SIGNAL = 1.5; EXPRESSED IN HEART, SIGNAL = 2.3; EXPRESSED IN BRAIN, SIGNAL = 1.5; EXPRESSED IN PLACENTA, SIGNAL = 3.2; EXPRESSED IN LUNG, SIGNAL = 1.8; EXPRESSED IN BONE MARROW, SIGNAL =   2; NT HIT: gi4507464, EVALUE 0.00e+00; SWISSPROT HIT: P10600, EVALUE 3.00e-46; EST_HUMAN HIT: AL120171.1, EVALUE 0.00e+00
tgtgctccgccagcccctggatcatgtcgaatttatggatttctttggcatagtattccgactcggtgttttcctgggtgcagccttcctccctctccccatgcatctcctccagcagctcccgggtgctgttgtaaagggccaggacctgataggggacgtgggtcatcaccgttggctcaggggggctggtgagcctgagcttgctcaagatctgtcccctaatggcttccaccctcttcttcttgatgtggccgaagtccaaggtggtgcaagtggacagagagaggctgaccgtggcaaagttcagcagggccaggaccaccagagccctttgcaagtgcatcttcatgtgtgagctgggaagagaggccagggggacggcaaggcctggagaggaagagaccccagcagacgtgcagaaggaggga

SEQ ID NO: 18645 - DNA, 147 bp, Homo sapiens
  MAP TO AC004617.1; EXPRESSED IN BT474, SIGNAL =   2; EXPRESSED IN HBL100, SIGNAL = 2.3; EXPRESSED IN HELA, SIGNAL = 5.7; EXPRESSED IN HEART, SIGNAL = 2.5; EXPRESSED IN PLACENTA, SIGNAL = 9.4; EXPRESSED IN BONE MARROW, SIGNAL = 2.9; EXPRESSED IN LUNG, SIGNAL = 5.5; EXPRESSED IN ADULT LIVER, SIGNAL = 4.7; EXPRESSED IN BRAIN, SIGNAL = 4.1; EXPRESSED IN FETAL LIVER, SIGNAL = 2.4; EST_HUMAN HIT: AW813147.1, EVALUE 1.00e-47; SWISSPROT HIT: O95754, EVALUE 8.70e+00; NT HIT: M18048.1, EVALUE 3.00e-50
gaaggaaatatggggaaattgaatgaatgtcaggtggatcagagagatacagtcatgggggtcaggtgtggtatctgcaataatgtgggaagccggattgaagtccaggccaggaacaatggtaactgtgggagactcagcaaaggg

SEQ ID NO: 18646 - DNA, 259 bp, Homo sapiens
  MAP TO AL096801.15; EXPRESSED IN BONE MARROW, SIGNAL = 1.1; EXPRESSED IN LUNG, SIGNAL = 1.4; EXPRESSED IN BRAIN, SIGNAL = 1.4; EXPRESSED IN ADULT LIVER, SIGNAL =   1; EXPRESSED IN BT474, SIGNAL = 1.1; EXPRESSED IN HBL100, SIGNAL = 1.2; EXPRESSED IN HELA, SIGNAL = 1.2; EXPRESSED IN HEART, SIGNAL = 1.2; EXPRESSED IN PLACENTA, SIGNAL = 2.4; NT HIT: gi11419183, EVALUE 0.00e+00; EST_HUMAN HIT: AA155873.1, EVALUE 0.00e+00; SWISSPROT HIT: P46590, EVALUE 2.00e-01
gcatgaactcaacagaatccaactcttctgcctctgttagaccaaaggtactgagtagcatccaggaagggacagtccctgacaacacaagctcagcaagggggaaggaagacgtgaacaagaccctcccaaaccttcaggtagtcaaccaccagcaaggcccccaccacagacacatcctgaagctgctgccgtccatggaggccactgggggcgagaagtccagcacgcccatcaagggccccaagaggggacatcc

SEQ ID NO: 18647 - DNA, 198 bp, Homo sapiens
  MAP TO AC009966.2; EXPRESSED IN HELA, SIGNAL = 3.9; EXPRESSED IN HEART, SIGNAL = 7.8; EXPRESSED IN PLACENTA, SIGNAL =  73; EXPRESSED IN BRAIN, SIGNAL = 2.5; EXPRESSED IN BONE MARROW, SIGNAL = 2.1; EXPRESSED IN LUNG, SIGNAL =  44; EXPRESSED IN FETAL LIVER, SIGNAL = 3.2; EXPRESSED IN ADULT LIVER, SIGNAL = 5.5; EXPRESSED IN BT474, SIGNAL = 1.7; EXPRESSED IN HBL100, SIGNAL = 3.1; SWISSPROT HIT: P35625, EVALUE 2.00e-38; NT HIT: gi11418022, EVALUE 2.00e-95; EST_HUMAN HIT: AU135996.1, EVALUE 4.00e-95
tcaggggtctgtggcattgatgatgcttttatccgggggggcccatcctcggtaccagctgcagtagccgcccttctgccggatgcaggcgtagtgtttggactggtagccagggtaaccgaaattggagagcatgtcggtccagagacactcgttcttggaagtcacaaagcaaggcaggtagtagcaggacttgat

SEQ ID NO: 18648 - DNA, 346 bp, Homo sapiens
  MAP TO AP000351.2; EXPRESSED IN HBL100, SIGNAL = 6.5; EXPRESSED IN HELA, SIGNAL = 8.6; EXPRESSED IN PLACENTA, SIGNAL = 6.4; EXPRESSED IN BONE MARROW, SIGNAL = 5.6; EXPRESSED IN LUNG, SIGNAL = 3.7; EXPRESSED IN FETAL LIVER, SIGNAL = 5.7; EXPRESSED IN ADULT LIVER, SIGNAL = 4.6; EXPRESSED IN HEART, SIGNAL = 5.3; EXPRESSED IN BRAIN, SIGNAL = 4.3; EXPRESSED IN BT474, SIGNAL = 6.4; NT HIT: AF240786.1, EVALUE 0.00e+00; EST_HUMAN HIT: AW054828.1, EVALUE 1.00e-104; SWISSPROT HIT: P04722, EVALUE 5.10e+00
atactaggcaggcattggtgtggggccagtcaccccagccctctctccctcactcgcggcacctgccccctcctctttgtgaacaccagcaggtacctccttgtgcctccgctgatgcaggagcagctgccccaaggggagtaacccctgccagcacaccctgcagctgagggccaggaagtggacaagaatgaaccctttcttccaaatgatcagctcttccagcccctgctgggggccccacgaccccttccttaggttgacgtgcctgggaaagctcacctccccctcttccctaagagaggaaataaaagccaccttcgccctagggcaaaaaataaataaa

SEQ ID NO: 18649 - DNA, 349 bp, Homo sapiens
  MAP TO AC010684.1; EXPRESSED IN BT474, SIGNAL =  29; EXPRESSED IN FETAL LIVER, SIGNAL = 8.4; EXPRESSED IN ADULT LIVER, SIGNAL = 4.8; EXPRESSED IN HBL100, SIGNAL =  15; EXPRESSED IN HELA, SIGNAL =  11; EXPRESSED IN HEART, SIGNAL = 3.7; EXPRESSED IN PLACENTA, SIGNAL = 9.6; EXPRESSED IN BRAIN, SIGNAL = 4.8; EXPRESSED IN BONE MARROW, SIGNAL =   9; EXPRESSED IN LUNG, SIGNAL =   9; EST_HUMAN HIT: AW575412.1, EVALUE 8.00e-76; NT HIT: gi11434209, EVALUE 6.00e-76; SWISSPROT HIT: P07156, EVALUE 7.00e-17
aaggggagacaagaaagaagttcaaggatcccaaggcacccaagaggcctccttcagcctttttttctattctgttctgagtattgcccaaaacatcctggcctgtccattggtgatgctgcgaagagactgggagagatgtggaatgacactgctgcaggtgacaagcagccttaggagaagaaggctgcaaagccgaaggaaaaatgcgaaaagggtcttgctgcatatcgagctaaaggaaagcctgatgcagcaaaaaagggagttgtcaaggctgaaaaaaagcaagaaaaagaggaggaagctgaggaaaatgaagagggtgaggagggggaagataaagaga

SEQ ID NO: 18650 - DNA, 177 bp, Homo sapiens
  MAP TO AL020996.3; EXPRESSED IN LUNG, SIGNAL =   2; EXPRESSED IN ADULT LIVER, SIGNAL = 1.8; EXPRESSED IN BT474, SIGNAL = 2.8; EXPRESSED IN FETAL LIVER, SIGNAL = 1.6; EXPRESSED IN HBL100, SIGNAL = 1.7; EXPRESSED IN HELA, SIGNAL = 1.8; EXPRESSED IN HEART, SIGNAL = 3.3; EXPRESSED IN PLACENTA, SIGNAL =   4; EXPRESSED IN BONE MARROW, SIGNAL = 1.4; EXPRESSED IN BRAIN, SIGNAL = 1.9; NT HIT: gi11426820, EVALUE 2.00e-95; SWISSPROT HIT: Q02853, EVALUE 2.20e+00; EST_HUMAN HIT: BE746249.1, EVALUE 3.00e-95
cgcaagtggctcagctcgtcctgcagctcagtagtgcggcttagggctggcagagctggcttcttcagggccagaagcctctcctcggacccacgcaggttgggaacagaggcattgcgctgcatgacaatcagagggctgggtttccaggtgtgcctcagggggcgcgtatcactc

SEQ ID NO: 18651 - DNA, 237 bp, Homo sapiens
  MAP TO AC007938.1; EXPRESSED IN PLACENTA, SIGNAL = 2.1; EXPRESSED IN BONE MARROW, SIGNAL = 1.6; EXPRESSED IN LUNG, SIGNAL =   1; EXPRESSED IN BRAIN, SIGNAL = 1.6; EXPRESSED IN BT474, SIGNAL = 1.4; EXPRESSED IN FETAL LIVER, SIGNAL = 1.5; EXPRESSED IN HBL100, SIGNAL = 1.3; EXPRESSED IN HELA, SIGNAL = 2.1; EXPRESSED IN HEART, SIGNAL = 1.6; EXPRESSED IN ADULT LIVER, SIGNAL = 5.9; NT HIT: gi11419816, EVALUE 1.00e-101; SWISSPROT HIT: P15085, EVALUE 4.00e-32; EST_HUMAN HIT: AW583212.1, EVALUE 1.00e-101
agtaacccctgctcggagacttaccacggcaagtttgccaattccgaagtggaggtcaagtccattgtagactttgtgaaggaccatgggaacatcaaggccttcatctccatccacagctactcccagctcctcatgtatccctatggctacaaaacagaaccagtccctgaccaggatgagctggtaggcactgacctcggcttgccccctcgtccccaaggtggcttcggacag

SEQ ID NO: 18652 - DNA, 146 bp, Homo sapiens
  MAP TO AP000346.1; EXPRESSED IN HBL100, SIGNAL = 3.1; EXPRESSED IN HELA, SIGNAL = 3.1; EXPRESSED IN HEART, SIGNAL = 1.5; EXPRESSED IN PLACENTA, SIGNAL = 9.7; EXPRESSED IN BRAIN, SIGNAL = 1.8; EXPRESSED IN BONE MARROW, SIGNAL =   3; EXPRESSED IN LUNG, SIGNAL = 2.9; EXPRESSED IN ADULT LIVER, SIGNAL =   3; EXPRESSED IN BT474, SIGNAL = 3.3; EXPRESSED IN FETAL LIVER, SIGNAL = 2.5; NT HIT: S82637.1, EVALUE 3.00e-72; EST_HUMAN HIT: AW898081.1, EVALUE 2.00e-73; SWISSPROT HIT: P08236, EVALUE 6.00e-20
cactggttagtcatgaaatcggcaaaattccagatgagctctccaaccacgtattttctgagtttttgatccagacccagatggtactgctctagcagacttttctggtagtcttcactgaacatcagaggtggatcctgggattc

SEQ ID NO: 18653 - DNA, 511 bp, Homo sapiens
  MAP TO AL049762.19; EXPRESSED IN FETAL LIVER, SIGNAL = 5.1; EXPRESSED IN HBL100, SIGNAL = 3.8; EXPRESSED IN HELA, SIGNAL = 3.4; EXPRESSED IN HEART, SIGNAL = 1.9; EXPRESSED IN PLACENTA, SIGNAL = 5.3; EXPRESSED IN BRAIN, SIGNAL = 1.4; EXPRESSED IN BONE MARROW, SIGNAL = 2.9; EXPRESSED IN LUNG, SIGNAL = 3.9; EXPRESSED IN BT474, SIGNAL = 2.3; EXPRESSED IN ADULT LIVER, SIGNAL = 1.9; NT HIT: M55632.1, EVALUE 0.00e+00; SWISSPROT HIT: P11387, EVALUE 2.00e-73; EST_HUMAN HIT: BE748187.1, EVALUE 0.00e+00
agactcaatactggtattctgaataagcatctccaggatctcatggagagcttgacagccaaggtattccatacatacaatgcctccatcacgctacagcagcagctagaagaactcacagccccggatgagaacatcccagcgaagatcctttcttataaccgtgccaatcgagctgttgcaattctttgtaaccatcagagggcaccaccaaaaacttttgagaagtctatgatgaacttgcaaactaagattgatgccaagaaggaacagctagcagatgcccggagaaacctgaaaagtgctaaggctgatgccaaggtcatgaaagatgcaaagatgaagaaggtagtagagtcaaagaagaaggctgttcagagactggaggaacagttgatgaagctggaagttcaagccacagaccgagaggaaaataaacagatggccttgggaacctccaaactcaattatctggatgctaggatcactgtgccttggtgcaagaagtggg

SEQ ID NO: 18654 - DNA, 176 bp, Homo sapiens
  MAP TO AC011457.1; EXPRESSED IN FETAL LIVER, SIGNAL =   1; EXPRESSED IN HELA, SIGNAL = 0.89; EXPRESSED IN HEART, SIGNAL = 0.89; EXPRESSED IN PLACENTA, SIGNAL =   1; EXPRESSED IN BRAIN, SIGNAL = 1.2; NT HIT: AF207818.1, EVALUE 1.40e+00; EST_HUMAN HIT: AA383813.1, EVALUE 6.10e-01; SWISSPROT HIT: O14199, EVALUE 5.70e-01
agatgtcaggcgggttactttccaggaagactacagcaaaggtccccagaaccaagaagcccaaatagctcaagacacagtagaaaacagtgatagagcccccattacactggatgatgattataccaggactatgggtctttgtctagggaggaaggagatgtttccaactagat

SEQ ID NO: 18655 - DNA, 228 bp, Homo sapiens
  MAP TO AP000425.1; EXPRESSED IN BONE MARROW, SIGNAL = 4.4; EXPRESSED IN LUNG, SIGNAL = 4.2; EXPRESSED IN BRAIN, SIGNAL = 2.6; EXPRESSED IN BT474, SIGNAL = 2.2; EXPRESSED IN FETAL LIVER, SIGNAL = 3.3; EXPRESSED IN HEART, SIGNAL =   3; EXPRESSED IN HELA, SIGNAL = 4.9; EXPRESSED IN HBL100, SIGNAL = 2.6; EXPRESSED IN ADULT LIVER, SIGNAL = 8.1; EXPRESSED IN PLACENTA, SIGNAL =   5; SWISSPROT HIT: O60813, EVALUE 6.80e+00; EST_HUMAN HIT: AI261584.1, EVALUE 1.00e-63; NT HIT: AF095703.1, EVALUE 7.00e-53
ctttctgagcattccacaagttacttcctccttcctttgttctctgcctttgcctcttttgaaaagttctaagttgctagccaattgggacaaatacagaatgtgaggtcctgttccagccagtggaaactggtaacagcagtagggtgaatgtgtcaggttataaatgtccctgtctcctttgttcagtgtattctcgtggcagaagtgctggcgagtgtacccttt

SEQ ID NO: 18656 - DNA, 375 bp, Homo sapiens
  MAP TO AC006441.13; EXPRESSED IN PLACENTA, SIGNAL = 2.3; EXPRESSED IN HELA, SIGNAL = 2.5; EXPRESSED IN HBL100, SIGNAL =   5; EXPRESSED IN HEART, SIGNAL = 0.86; EXPRESSED IN BONE MARROW, SIGNAL = 1.7; EXPRESSED IN LUNG, SIGNAL = 2.5; EXPRESSED IN BRAIN, SIGNAL = 1.6; EXPRESSED IN ADULT LIVER, SIGNAL = 2.3; EXPRESSED IN BT474, SIGNAL =  47; EXPRESSED IN FETAL LIVER, SIGNAL = 1.2; SWISSPROT HIT: Q61792, EVALUE 5.00e-06; NT HIT: gi5453709, EVALUE 4.00e-55; EST_HUMAN HIT: AI684554.1, EVALUE 2.00e-55
atttagcacacaggcccccacagaatacagtcccttcaagaagaaaatgctatgcgtgctggtggtctgggggtacacagagaagaggcatctgggaaccccaagctcttccccaggcccaccctggagggcaggggtagtggaggcactggcctcattcacatctgccaggcttgcgtctgccaggctggcaggaaggggaccaaacagagggcagcagggatgccgcagggcagggcaagagctcacgttactgatctggtcctgggtcttcttgattctctggagctcgggcgtgtctgccactacgctgaaacctttgcccttgttcttctcaaactcctccttgtagcgcacctgcaggaggggaggaag

SEQ ID NO: 18657 - DNA, 184 bp, Homo sapiens
  MAP TO AB015752.1; EXPRESSED IN BT474, SIGNAL = 3.3; EXPRESSED IN FETAL LIVER, SIGNAL = 7.2; EXPRESSED IN PLACENTA, SIGNAL = 5.7; EXPRESSED IN HBL100, SIGNAL = 4.6; EXPRESSED IN HELA, SIGNAL = 5.5; EXPRESSED IN HEART, SIGNAL = 6.2; EXPRESSED IN BRAIN, SIGNAL = 5.7; EXPRESSED IN BONE MARROW, SIGNAL = 6.4; EXPRESSED IN LUNG, SIGNAL = 3.7; EXPRESSED IN ADULT LIVER, SIGNAL = 4.7; EST_HUMAN HIT: BF676779.1, EVALUE 6.40e-01; SWISSPROT HIT: P42571, EVALUE 9.70e-01
gaacaaattgttacattaaaggtcaattccacagtgaggacaagggatatattgctttttgctttaaagtggggcatgagctgaagagggatggatttaagaggcatcctgctgccacagtgcttggtgctttaaggacaccagggctgcaggacccagtgagggtggacctcaagaggctgag

SEQ ID NO: 18658 - DNA, 174 bp, Homo sapiens
  MAP TO AB020863.1; EXPRESSED IN BRAIN, SIGNAL = 1.2; EXPRESSED IN BONE MARROW, SIGNAL = 1.1; EXPRESSED IN FETAL LIVER, SIGNAL = 1.2; EXPRESSED IN HEART, SIGNAL = 0.94; EST_HUMAN HIT: BE885137.1, EVALUE 3.80e-02; NT HIT: AF218380.1, EVALUE 3.40e-01; SWISSPROT HIT: P34066, EVALUE 5.00e+00
acttgcaacctgtagcccacatcttctggaaccttctggaattctggcacaactggatttacagcatgcctttgcaaatggttatctatctccttagatattatcaccacaatgcaaaatgaatggttatctatctccttagatattaccaccacaatacaatacaaaatgaag

SEQ ID NO: 18659 - DNA, 198 bp, Homo sapiens
  MAP TO AC007078.2; EXPRESSED IN PLACENTA, SIGNAL =   4; EXPRESSED IN HBL100, SIGNAL = 2.1; EXPRESSED IN HEART, SIGNAL = 2.9; EXPRESSED IN BONE MARROW, SIGNAL = 4.8; EXPRESSED IN BRAIN, SIGNAL = 2.3; EXPRESSED IN LUNG, SIGNAL = 2.3; EXPRESSED IN ADULT LIVER, SIGNAL = 3.8; EXPRESSED IN BT474, SIGNAL = 1.4; EXPRESSED IN FETAL LIVER, SIGNAL = 2.5; EXPRESSED IN HELA, SIGNAL = 3.4; EST_HUMAN HIT: BE079780.1, EVALUE 6.00e-20; NT HIT: AF003528.1, EVALUE 5.00e-22
aatgttcacagcatcttcaccaggaatagattccatttcaataaacttatttctttgctcatccataagaagcaactccttatttgctaaagttttatcatgagactgtagtgattcagtcacatcttcaggctttacttctttttttgtttgttttaattttactttaagttcctggatacatgcgcagaaagtgtg

SEQ ID NO: 18660 - DNA, 444 bp, Homo sapiens
  MAP TO AB020870.1; EXPRESSED IN PLACENTA, SIGNAL = 2.4; EXPRESSED IN HELA, SIGNAL = 2.6; EXPRESSED IN HBL100, SIGNAL = 2.3; EXPRESSED IN HEART, SIGNAL = 3.1; EXPRESSED IN LUNG, SIGNAL = 1.5; EXPRESSED IN BONE MARROW, SIGNAL = 2.8; EXPRESSED IN BRAIN, SIGNAL = 2.4; EXPRESSED IN ADULT LIVER, SIGNAL = 2.2; EXPRESSED IN BT474, SIGNAL = 1.4; EXPRESSED IN FETAL LIVER, SIGNAL = 3.7; EST_HUMAN HIT: AI732656.1, EVALUE 1.00e-80; SWISSPROT HIT: O14064, EVALUE 4.40e+00; NT HIT: AL163282.2, EVALUE 2.00e-76
gtctgttttcatgctgatgataaagacatacctgagactgggaagaaaaagagttttaattggacttacagttccatatgactggggaggactcagaatcatggtcggaggcaaaaggcactccttacatggcagcggcaagagaaaaatgaggaagatgcaaaagtggaaacccctgacaaaccatcatatcttgtgacacttatttattaccatgagaacagtatggggggaaccgcccccatgtttcaaattacctttcaccaggcccctctcacaacacattggaattatgggagtacagttcaagatgagatttgggtgaggacacagagtcaaaccatatcaaagaagatgccatgtaagacttttatagctagagaggagatgtcaatgcctgactttaaagctccaatggacatagtgcagcttgtgactttcaat

SEQ ID NO: 18661 - DNA, 107 bp, Homo sapiens
  MAP TO AC007158.5; EXPRESSED IN ADULT LIVER, SIGNAL = 2.2; EXPRESSED IN PLACENTA, SIGNAL = 2.1; EXPRESSED IN HBL100, SIGNAL = 1.7; EXPRESSED IN HELA, SIGNAL =   2; EXPRESSED IN BONE MARROW, SIGNAL =   2; EXPRESSED IN BT474, SIGNAL = 1.3; EXPRESSED IN FETAL LIVER, SIGNAL = 2.5; EXPRESSED IN HEART, SIGNAL = 2.4; EXPRESSED IN BRAIN, SIGNAL = 2.2; EXPRESSED IN LUNG, SIGNAL = 1.3; NT HIT: AL163201.2, EVALUE 1.30e-02; EST_HUMAN HIT: AI379357.1, EVALUE 1.50e-02; SWISSPROT HIT: P47996, EVALUE 4.00e+00
ctttacctcactttctctttttctcttctccctatgcttctctttccatcttcctctccaacaccatctccctttctctctctgtctgtctaggagaaagattaacc

SEQ ID NO: 18662 - DNA, 299 bp, Homo sapiens
  MAP TO AC007298.17; EXPRESSED IN BRAIN, SIGNAL = 1.9; EXPRESSED IN BONE MARROW, SIGNAL = 1.9; EXPRESSED IN BT474, SIGNAL = 1.5; EXPRESSED IN FETAL LIVER, SIGNAL = 3.4; EXPRESSED IN ADULT LIVER, SIGNAL = 2.9; EXPRESSED IN HELA, SIGNAL = 1.2; EXPRESSED IN PLACENTA, SIGNAL = 1.7; EXPRESSED IN HBL100, SIGNAL = 1.5; EXPRESSED IN HEART, SIGNAL =   2; NT HIT: gi11435889, EVALUE 0.00e+00; EST_HUMAN HIT: AV689503.1, EVALUE 2.00e-76; SWISSPROT HIT: P42357, EVALUE 1.00e-44
atgcccagatacacggtgcacgtacgtggggaatggctggcagtgccctgccaggacgcgcagctcactgtgggctggctgggccgggaggccgtgaggcgctatatcaagaataagcccgacaatggtggcttcacctccgtggatgacgcgcacttccttgtgcgccggtgcaagggcctgggcctgctggacaacgaggaccggctcgaggtggccctagagaacaacgagttcgtggaagtgggtgagtggctgcaggagagggccgcgaacgggtgcggtttggcctggcttag

SEQ ID NO: 18663 - DNA, 101 bp, Homo sapiens
  MAP TO AB023048.1; EXPRESSED IN HELA, SIGNAL = 4.4; EXPRESSED IN PLACENTA, SIGNAL = 3.4; EXPRESSED IN HBL100, SIGNAL = 3.4; EXPRESSED IN HEART, SIGNAL = 3.7; EXPRESSED IN BONE MARROW, SIGNAL = 3.2; EXPRESSED IN LUNG, SIGNAL = 3.2; EXPRESSED IN BRAIN, SIGNAL = 2.3; EXPRESSED IN ADULT LIVER, SIGNAL = 1.8; EXPRESSED IN BT474, SIGNAL = 7.3; EXPRESSED IN FETAL LIVER, SIGNAL =   3; SWISSPROT HIT: Q9V419, EVALUE 5.50e+00; NT HIT: X79140.1, EVALUE 7.20e-01
cttcttgataccgtacattaggctgacaattgctgccaccaaagtgagagtgatcaacacaatggcccagtctgagacagagtccttctggggcttcggac

SEQ ID NO: 18664 - DNA, 102 bp, Homo sapiens
  MAP TO AC006364.3; EXPRESSED IN HELA, SIGNAL = 1.5; EXPRESSED IN BONE MARROW, SIGNAL = 2.2; EXPRESSED IN LUNG, SIGNAL = 1.5; EXPRESSED IN BRAIN, SIGNAL = 1.8; EXPRESSED IN BT474, SIGNAL = 1.5; EXPRESSED IN PLACENTA, SIGNAL = 2.2; EXPRESSED IN HEART, SIGNAL = 2.3; EXPRESSED IN HBL100, SIGNAL = 1.6; EXPRESSED IN ADULT LIVER, SIGNAL = 1.7; EXPRESSED IN FETAL LIVER, SIGNAL = 1.8; EST_HUMAN HIT: AA331940.1, EVALUE 2.00e-41; SWISSPROT HIT: P96554, EVALUE 9.10e+00
ataatttgcaggtgattggaattaagccactgaacaccaccaacaaccaatacagtctggccagtattctctaggggacgtgatctgaaattcagaaagaaa

SEQ ID NO: 18665 - DNA, 77 bp, Homo sapiens; identical to SEQ ID NO: 17782
  MAP TO AC006978.2; EXPRESSED IN HELA, SIGNAL = 2.2; EXPRESSED IN LUNG, SIGNAL = 1.5; EXPRESSED IN BRAIN, SIGNAL = 2.2; EXPRESSED IN BT474, SIGNAL = 1.5; EXPRESSED IN ADULT LIVER, SIGNAL = 2.2; EXPRESSED IN PLACENTA, SIGNAL = 2.7; EXPRESSED IN HEART, SIGNAL = 2.6; EXPRESSED IN HBL100, SIGNAL = 1.7; EXPRESSED IN BONE MARROW, SIGNAL = 2.1; EXPRESSED IN FETAL LIVER, SIGNAL = 2.3; NT HIT: AL117078.1, EVALUE 1.30e-01; SWISSPROT HIT: P97803, EVALUE 9.40e+00; EST_HUMAN HIT: AI373222.1, EVALUE 1.60e-01

SEQ ID NO: 18666 - DNA, 158 bp, Homo sapiens
  MAP TO AB020866.1; EXPRESSED IN HELA, SIGNAL = 1.3; EXPRESSED IN BONE MARROW, SIGNAL = 1.2; EXPRESSED IN LUNG, SIGNAL = 1.6; EXPRESSED IN BRAIN, SIGNAL = 1.2; EXPRESSED IN BT474, SIGNAL = 2.9; EXPRESSED IN PLACENTA, SIGNAL = 2.4; EXPRESSED IN HEART, SIGNAL = 1.1; EXPRESSED IN HBL100, SIGNAL = 1.9; EXPRESSED IN ADULT LIVER, SIGNAL = 1.7; EXPRESSED IN FETAL LIVER, SIGNAL = 1.9; EST_HUMAN HIT: BE885079.1, EVALUE 6.00e-84; NT HIT: gi11427197, EVALUE 4.00e-84; SWISSPROT HIT: P18160, EVALUE 2.20e+00
aaatccacaagtagcttccacttggaatgaagtaaatagtcatagtaatgcacagtgtgtttctaataatagagatgggcgaacagttaattctaattgtgaaattaacaacagatctgctgccaacataagggctctaaacgtgcctccttctttag

SEQ ID NO: 18667 - DNA, 87 bp, Homo sapiens
  MAP TO AB020873.1; EXPRESSED IN LUNG, SIGNAL = 1.9; EXPRESSED IN BRAIN, SIGNAL = 2.4; EXPRESSED IN FETAL LIVER, SIGNAL = 2.7; EXPRESSED IN ADULT LIVER, SIGNAL = 2.7; EXPRESSED IN PLACENTA, SIGNAL = 3.2; EXPRESSED IN HELA, SIGNAL = 2.4; EXPRESSED IN BONE MARROW, SIGNAL = 2.8; EXPRESSED IN BT474, SIGNAL = 1.5; EXPRESSED IN HBL100, SIGNAL = 1.8; EXPRESSED IN HEART, SIGNAL =   3; EST_HUMAN HIT: AI693948.1, EVALUE 4.60e-02
gcaaatagtagcatcattaagaagtcagctgcaaggatgatggtagtacgcatacatacacacactaatatatatgttgcaattgga

SEQ ID NO: 18668 - DNA, 141 bp, Homo sapiens
  MAP TO AB026898.1; EXPRESSED IN FETAL LIVER, SIGNAL = 2.3; EXPRESSED IN ADULT LIVER, SIGNAL =   2; EXPRESSED IN PLACENTA, SIGNAL = 3.1; EXPRESSED IN HBL100, SIGNAL = 1.4; EXPRESSED IN HELA, SIGNAL = 2.6; EXPRESSED IN HEART, SIGNAL = 2.4; EXPRESSED IN BRAIN, SIGNAL =   2; EXPRESSED IN BONE MARROW, SIGNAL = 2.2; EXPRESSED IN BT474, SIGNAL = 1.2; EXPRESSED IN LUNG, SIGNAL = 1.5; EST_HUMAN HIT: AI825583.1, EVALUE 4.00e-25; NT HIT: AB026898.1, EVALUE 4.00e-74
gtggacgtggatcatcacaaagggcttctcattgtcttcacgttgagtaggctgaggacaaggaggaaaaggagtgtctggttggtcttgctgtctcaggggtggcagaaacagagaaaattcatgtattattatgagtag

SEQ ID NO: 18669 - DNA, 165 bp, Homo sapiens
  MAP TO AC007488.15; EXPRESSED IN BONE MARROW, SIGNAL =   1; EXPRESSED IN ADULT LIVER, SIGNAL =   1; EXPRESSED IN PLACENTA, SIGNAL = 0.97; EXPRESSED IN HEART, SIGNAL = 0.95; SWISSPROT HIT: P34306, EVALUE 6.60e+00; NT HIT: AF190899.1, EVALUE 2.10e-02
tgtgacaaagcgccctggcttctgcaggataccctcatcaccaacatcagaggcaacaagaatggacaagagtttcagcctgtccttgtgaggctccagctcatgcttccccatgccagcccacttgtgatcgtcttgactttttgcccagtagacttccagctc

SEQ ID NO: 18670 - DNA, 79 bp, Homo sapiens
  MAP TO AF165147.1; EXPRESSED IN FETAL LIVER, SIGNAL = 1.4; EXPRESSED IN HBL100, SIGNAL = 1.4; EXPRESSED IN HELA, SIGNAL = 4.5; EXPRESSED IN HEART, SIGNAL = 1.5; EXPRESSED IN BONE MARROW, SIGNAL = 2.4; EXPRESSED IN ADULT LIVER, SIGNAL = 1.2; EXPRESSED IN PLACENTA, SIGNAL = 1.3; EXPRESSED IN BRAIN, SIGNAL = 1.7; NT HIT: AL163247.2, EVALUE 2.00e-37; EST_HUMAN HIT: AA827420.1, EVALUE 7.00e-04
ttgtgacaaggaaaatgtctccagacattgcccagatgtccatgggggacagaatcactttcagatgaggactgctggt

SEQ ID NO: 18671 - DNA, 183 bp, Homo sapiens
  MAP TO AC010000.1; EXPRESSED IN BONE MARROW, SIGNAL = 1.4; EXPRESSED IN BRAIN, SIGNAL = 1.4; EXPRESSED IN BT474, SIGNAL = 1.3; EXPRESSED IN FETAL LIVER, SIGNAL = 1.3; EXPRESSED IN HBL100, SIGNAL = 0.92; EXPRESSED IN HELA, SIGNAL = 1.4; EXPRESSED IN HEART, SIGNAL = 2.4; EXPRESSED IN ADULT LIVER, SIGNAL = 1.4; EXPRESSED IN PLACENTA, SIGNAL =   1; NT HIT: Y11365.1, EVALUE 5.00e-99; EST_HUMAN HIT: AV697803.1, EVALUE 2.00e-81; SWISSPROT HIT: P97697, EVALUE 2.00e-24
tggagatctgcttcactctccataattttacctgtaacatccattagcacgccaccagcttcagtaacaataatgccagctcctgcaacatcccagcagtgaattcccatttcataatatgcatctgctccgccagttgccacaaggcacatattaacagctgctgttccaacactccggatc

SEQ ID NO: 18672 - DNA, 243 bp, Homo sapiens
  MAP TO AC010134.1; EXPRESSED IN BT474, SIGNAL = 1.3; EXPRESSED IN FETAL LIVER, SIGNAL = 0.98; EXPRESSED IN ADULT LIVER, SIGNAL = 0.94; EXPRESSED IN HELA, SIGNAL = 0.96; EXPRESSED IN HEART, SIGNAL = 0.89; EXPRESSED IN LUNG, SIGNAL = 0.98; EXPRESSED IN BONE MARROW, SIGNAL = 1.2; EXPRESSED IN PLACENTA, SIGNAL =   1; EXPRESSED IN BRAIN, SIGNAL = 1.3; NT HIT: gi11429810, EVALUE 1.00e-121; SWISSPROT HIT: P50607, EVALUE 1.20e+00
ccactcctcctcgtgccagtccacctgcagggaagatcggctgtttctccctgtccaccgggccatgagggtgtcctggtcatttctaagcatcacctgctcctcctcagtcgaagtgggagaggccttggaggcaatgtagtcaggccgtgcagcgttcagcccatggatggagttggccaggagcttgcagtcgcagaccgtgaccagctgccgtgtctgcaggtgcacacaaaccaaggc

SEQ ID NO: 18673 - DNA, 458 bp, Homo sapiens; identical to SEQ ID NO: 1924
  MAP TO AF191069.1; EXPRESSED IN PLACENTA, SIGNAL =   1; EXPRESSED IN BONE MARROW, SIGNAL = 0.9; EXPRESSED IN BRAIN, SIGNAL = 1.2; EXPRESSED IN ADULT LIVER, SIGNAL = 1.1; EXPRESSED IN FETAL LIVER, SIGNAL = 0.99; EXPRESSED IN HELA, SIGNAL =   1; EXPRESSED IN HEART, SIGNAL = 1.1; NT HIT: AL163252.2, EVALUE 0.00e+00; SWISSPROT HIT: P07273, EVALUE 7.90e+00; EST_HUMAN HIT: AI291174.1, EVALUE 3.00e-78

SEQ ID NO: 18674 - DNA, 91 bp, Homo sapiens
  MAP TO AC011502.1; EXPRESSED IN BT474, SIGNAL = 5.5; EXPRESSED IN FETAL LIVER, SIGNAL = 1.3; EXPRESSED IN PLACENTA, SIGNAL = 4.6; EXPRESSED IN HBL100, SIGNAL = 1.6; EXPRESSED IN HELA, SIGNAL = 1.3; EXPRESSED IN HEART, SIGNAL = 1.8; EXPRESSED IN BRAIN, SIGNAL = 2.1; EXPRESSED IN BONE MARROW, SIGNAL = 2.9; EXPRESSED IN LUNG, SIGNAL = 1.9; EXPRESSED IN ADULT LIVER, SIGNAL = 1.4; NT HIT: gi6005975, EVALUE 6.00e-35; SWISSPROT HIT: Q05481, EVALUE 6.00e-10; EST_HUMAN HIT: BF530154.1, EVALUE 1.00e-34
cattcctatataaattctgctgtgcagtgtccaggcattgccactcctccagagagaattgtatggccacatcccgaaatgtcaacgatcc

SEQ ID NO: 18675 - DNA, 306 bp, Homo sapiens
  MAP TO AC009497.2; EXPRESSED IN BT474, SIGNAL = 2.6; EXPRESSED IN ADULT LIVER, SIGNAL = 2.9; EXPRESSED IN PLACENTA, SIGNAL = 1.4; EXPRESSED IN BONE MARROW, SIGNAL = 1.8; EXPRESSED IN LUNG, SIGNAL = 0.88; EXPRESSED IN FETAL LIVER, SIGNAL = 1.1; EXPRESSED IN HELA, SIGNAL = 1.1; EXPRESSED IN HEART, SIGNAL = 1.1; EXPRESSED IN BRAIN, SIGNAL = 1.1; NT HIT: gi8400716, EVALUE 0.00e+00; EST_HUMAN HIT: BE185376.1, EVALUE 2.00e-16; SWISSPROT HIT: gi127998, EVALUE 9.00e-15
atcgctctgcagttcgtaggccttcttggcctgaatcacatcgttctggtcgggcatgcaggtccactggtgcaggtaattgcggtaatccatgtcactgaccagagcctgggaatttttagagtgcaggatggaaagcatgtccacagggctctggatcttggccttccatttggcccagtccagccggtactctcgttcattctggagcttgtcagctatgagggcccagcggatcttgttgtcatccctggctgtgagggtgcccacgtagtgtcccttctgcttctcatggtcaagcttata

SEQ ID NO: 18676 - DNA, 326 bp, Homo sapiens
  MAP TO AC009612.2; EXPRESSED IN PLACENTA, SIGNAL =  13; EXPRESSED IN HBL100, SIGNAL = 9.5; EXPRESSED IN HEART, SIGNAL = 8.1; EXPRESSED IN BONE MARROW, SIGNAL =   3; EXPRESSED IN BRAIN, SIGNAL = 2.5; EXPRESSED IN LUNG, SIGNAL = 7.5; EXPRESSED IN ADULT LIVER, SIGNAL = 3.9; EXPRESSED IN BT474, SIGNAL =  10; EXPRESSED IN FETAL LIVER, SIGNAL = 2.1; EXPRESSED IN HELA, SIGNAL =   7; SWISSPROT HIT: Q90734, EVALUE 2.00e-45; EST_HUMAN HIT: AW373931.1, EVALUE 0.00e+00; NT HIT: gi4826638, EVALUE 0.00e+00
tgccatgctgtcggacatcaaagccctcattctcaagcacgaggccttcgagagctacctggctgcggcacaccagcaccgcgtggagcagatcgcagcctttgcccaggagctcaacgagctggattactatgactcccacaatgtccacacccggtgccagaagatctgggaccagtgggacgccctcggctctctgaccaacagtcgcagggaagccctggagaaaacagagaagcagctggaggccatagaccatctgcacctggagtatgccaagcgcgtggcccccttcaacaactggatggagagcgccatggaggacc

SEQ ID NO: 18677 - DNA, 104 bp, Homo sapiens
  MAP TO AF165423.1; EXPRESSED IN HELA, SIGNAL =   3; EXPRESSED IN PLACENTA, SIGNAL = 3.4; EXPRESSED IN HBL100, SIGNAL = 1.7; EXPRESSED IN HEART, SIGNAL = 2.4; EXPRESSED IN BONE MARROW, SIGNAL = 2.2; EXPRESSED IN BRAIN, SIGNAL = 2.4; EXPRESSED IN LUNG, SIGNAL = 2.8; EXPRESSED IN ADULT LIVER, SIGNAL = 3.1; EXPRESSED IN BT474, SIGNAL = 2.1; EXPRESSED IN FETAL LIVER, SIGNAL = 1.8; NT HIT: gi11422948, EVALUE 2.20e-01; EST_HUMAN HIT: BF327942.1, EVALUE 1.00e-16
ttaacaccgagacgctctgcaattgctccttcaaaacgactcagaagaagatccagtgctgagacaatcgtgttctctctctggatcactgcccagagacaagg

SEQ ID NO: 18678 - DNA, 298 bp, Homo sapiens
  MAP TO AC010102.1; EXPRESSED IN LUNG, SIGNAL = 1.2; EXPRESSED IN BRAIN, SIGNAL = 1.1; EXPRESSED IN BT474, SIGNAL = 1.6; EXPRESSED IN ADULT LIVER, SIGNAL = 1.5; EXPRESSED IN PLACENTA, SIGNAL = 1.4; EXPRESSED IN HBL100, SIGNAL = 1.6; EXPRESSED IN BONE MARROW, SIGNAL = 1.3; EXPRESSED IN FETAL LIVER, SIGNAL = 1.1; EXPRESSED IN HELA, SIGNAL = 1.5; EXPRESSED IN HEART, SIGNAL = 1.1; EST_HUMAN HIT: AW962016.1, EVALUE 3.00e-77; SWISSPROT HIT: P41997, EVALUE 6.00e-08; NT HIT: gi5730038, EVALUE 3.00e-77
ttattcgagttcaaaatggattgtaaagcagtggagacaactcgcaacatcaatggcccaggaactgctaatgaacataccgtgcagtgggggttcaagaagttttgcaaaagagaggagagccttgaagatgaggagcgtagcggccagtcgtcggaagttgacaaccaccaactgagagcaatcacggaagctggtcctcttacaactacaccagaagctgctgaagaactcaacgtccacctttctacggtcattcggcatttgacgcaaactggaaaggtgaaaaagctcgata

SEQ ID NO: 18679 - DNA, 111 bp, Homo sapiens
  MAP TO AC010152.1; EXPRESSED IN HELA, SIGNAL = 2.6; EXPRESSED IN PLACENTA, SIGNAL = 4.5; EXPRESSED IN HBL100, SIGNAL = 2.6; EXPRESSED IN HEART, SIGNAL =  10; EXPRESSED IN BONE MARROW, SIGNAL = 3.6; EXPRESSED IN LUNG, SIGNAL = 2.1; EXPRESSED IN BRAIN, SIGNAL = 3.3; EXPRESSED IN ADULT LIVER, SIGNAL = 3.9; EXPRESSED IN BT474, SIGNAL = 1.9; EXPRESSED IN FETAL LIVER, SIGNAL = 2.5; EST_HUMAN HIT: AA720574.1, EVALUE 2.00e-39; NT HIT: AL163227.2, EVALUE 2.00e-32
ctttactacagttcccaacaacttcttcacctccatctgagaccacctcatcctggacttcattgtccatatcattatcagcattttggtcaaagccattcaacaagtctc

SEQ ID NO: 18680 - DNA, 236 bp, Homo sapiens
  MAP TO AL031728.12; EXPRESSED IN HEART, SIGNAL = 1.1; EXPRESSED IN LUNG, SIGNAL = 1.1; EXPRESSED IN BRAIN, SIGNAL = 1.3; EXPRESSED IN BONE MARROW, SIGNAL = 1.2; EXPRESSED IN FETAL LIVER, SIGNAL = 1.1; EXPRESSED IN BT474, SIGNAL = 1.3; EXPRESSED IN ADULT LIVER, SIGNAL = 1.1; NT HIT: Z50097.1, EVALUE 3.10e-02; EST_HUMAN HIT: AA633289.1, EVALUE 1.50e-01; SWISSPROT HIT: P34501, EVALUE 4.90e-01
agctgagatcagggtcgggtggaagcaggaaaccatggcatgggccaggatgctgctcacccactggaggcagcacatgggggctgtgggacacgcagggttccctgctgctggcctgctggctgccaccattccagctggacaacagtatccccaggaggcggctgagaagcagggagaagaacaccaggcttggagtcaggtgggtggctctgggcaggtcgtgtccctctctg

SEQ ID NO: 18681 - DNA, 237 bp, Homo sapiens
  MAP TO AL033527.25; EXPRESSED IN HEART, SIGNAL = 1.3; EXPRESSED IN LUNG, SIGNAL = 0.89; EXPRESSED IN BRAIN, SIGNAL = 1.4; EXPRESSED IN BT474, SIGNAL = 0.99; EXPRESSED IN FETAL LIVER, SIGNAL = 1.4; EXPRESSED IN ADULT LIVER, SIGNAL = 0.97; EXPRESSED IN PLACENTA, SIGNAL = 0.95; EXPRESSED IN HBL100, SIGNAL = 1.3; EXPRESSED IN BONE MARROW, SIGNAL = 1.4; EXPRESSED IN HELA, SIGNAL = 1.1; SWISSPROT HIT: P34820, EVALUE 7.00e-32; NT HIT: gi4502428, EVALUE 1.00e-103
ctgttggactgctcctggaccacctggaacatgctgacgtggagggtcctgttgagcaggtggatgctgggcaccttgtaaatccggaactccgcagctgtgaccgcctccccagccgggatctgggtcaggtcaaagcggaactccttccaatggggctcctggtggcccagggcacggtctcgctccactagaagacaaagcagcgctgggctggcactcagaatggctcgggct

SEQ ID NO: 18682 - DNA, 223 bp, Homo sapiens
  MAP TO AL034384.1; EXPRESSED IN FETAL LIVER, SIGNAL = 9.6; EXPRESSED IN ADULT LIVER, SIGNAL = 7.6; EXPRESSED IN HELA, SIGNAL =  25; EXPRESSED IN BONE MARROW, SIGNAL =  16; EXPRESSED IN LUNG, SIGNAL =  19; EXPRESSED IN BRAIN, SIGNAL =  15; EXPRESSED IN BT474, SIGNAL =  35; EXPRESSED IN PLACENTA, SIGNAL =  32; EXPRESSED IN HEART, SIGNAL =  19; EXPRESSED IN HBL100, SIGNAL =  28; NT HIT: gi11419946, EVALUE 4.00e-48; SWISSPROT HIT: Q13495, EVALUE 8.00e-04; EST_HUMAN HIT: AW371805.1, EVALUE 1.00e-41
gcagccttccctgctccactacctgcagcagccgacaccaacgcaggcctcctcagccactgcctcctccacggccactgccaccttgcagctgcagcagcagcagcagcaacagcagcagcagcctgaccattcttcattccttctgcagcagatgatgcagcaaccccagcgttttcagcgatcagtggcctcagattccatgcctgctctgcccagacag

SEQ ID NO: 18683 - DNA, 173 bp, Homo sapiens
  MAP TO AL096699.11; EXPRESSED IN FETAL LIVER, SIGNAL = 5.3; EXPRESSED IN ADULT LIVER, SIGNAL = 3.7; EXPRESSED IN PLACENTA, SIGNAL = 4.4; EXPRESSED IN HELA, SIGNAL = 4.6; EXPRESSED IN BRAIN, SIGNAL = 4.3; EXPRESSED IN BONE MARROW, SIGNAL = 4.2; EXPRESSED IN BT474, SIGNAL = 2.5; EXPRESSED IN HEART, SIGNAL = 5.1; EXPRESSED IN HBL100, SIGNAL = 3.6; EXPRESSED IN LUNG, SIGNAL =   3; NT HIT: AF047677.1, EVALUE 4.00e-93; EST_HUMAN HIT: BE299007.1, EVALUE 2.00e-67; SWISSPROT HIT: P11532, EVALUE 5.00e-19
ctggtggtgaagttgattacattaacctgtggataattacgagttgattgtcggacccagctcaggagaatcttttcactgttggtttgttgcaatccagccatgatatttttcattacatttttgacctacatgtggaaataaattttcataagaaaatgcattccttgagc

SEQ ID NO: 18684 - DNA, 272 bp, Homo sapiens
  MAP TO AL034548.24; EXPRESSED IN HEART, SIGNAL =   3; EXPRESSED IN LUNG, SIGNAL = 1.4; EXPRESSED IN BRAIN, SIGNAL = 2.1; EXPRESSED IN FETAL LIVER, SIGNAL = 3.2; EXPRESSED IN ADULT LIVER, SIGNAL = 2.1; EXPRESSED IN PLACENTA, SIGNAL = 2.7; EXPRESSED IN HELA, SIGNAL = 2.1; EXPRESSED IN BONE MARROW, SIGNAL = 2.4; EXPRESSED IN BT474, SIGNAL = 1.3; EXPRESSED IN HBL100, SIGNAL = 1.7
tcatttcagactgtgattccctgtcatatgctcctcagagttcttcttcttttcttcttcttcttctttcctcttcttcttcttcttcttcttcttcttcttcttcttcttcttcttcttcttcttcttcttcttctcttcttctttcttcttcttcttctttcttttcttcttcttcctcttcctcttcttcttcttcttcttctcctcctcctcctcctcctcctcctcctccttctccttccttctttcttcttcttcttcttcttttg

SEQ ID NO: 18685 - DNA, 114 bp, Homo sapiens
  MAP TO AL035414.18; EXPRESSED IN HBL100, SIGNAL = 3.3; EXPRESSED IN HELA, SIGNAL = 8.3; EXPRESSED IN HEART, SIGNAL = 5.3; EXPRESSED IN LUNG, SIGNAL = 4.6; EXPRESSED IN BRAIN, SIGNAL =   5; EXPRESSED IN BT474, SIGNAL =   3; EXPRESSED IN ADULT LIVER, SIGNAL = 5.5; EXPRESSED IN PLACENTA, SIGNAL = 5.9; EXPRESSED IN BONE MARROW, SIGNAL = 5.5; EXPRESSED IN FETAL LIVER, SIGNAL = 5.2; NT HIT: gi11427711, EVALUE 7.00e-51; SWISSPROT HIT: P21522, EVALUE 1.10e-02; EST_HUMAN HIT: BE764527.1, EVALUE 1.50e+00
aggatagatgaatttcaccccaaagcaacaagaactctctttattggcaaccttgaagaacgcactacttaccatgaccttcgcaacatcttccagcgctttggagaaattgtg

SEQ ID NO: 18686 - DNA, 374 bp, Homo sapiens
  MAP TO AL033378.6; EXPRESSED IN BONE MARROW, SIGNAL = 1.1; EXPRESSED IN LUNG, SIGNAL = 2.3; EXPRESSED IN FETAL LIVER, SIGNAL =   1; EXPRESSED IN ADULT LIVER, SIGNAL = 1.4; EXPRESSED IN PLACENTA, SIGNAL = 2.1; EXPRESSED IN HEART, SIGNAL = 1.2; EXPRESSED IN HELA, SIGNAL = 1.1; EXPRESSED IN BRAIN, SIGNAL = 1.4; EXPRESSED IN BT474, SIGNAL = 1.5; SWISSPROT HIT: P37743, EVALUE 1.50e+00; EST_HUMAN HIT: AU141284.1, EVALUE 0.00e+00; NT HIT: AB018333.1, EVALUE 0.00e+00
cccgtggcttagggacccgagacccttcttcatctccccctcggtgagggagcgggacactttctgggccttttcttcttctgggtaggagaagaatgtccccatcttcttggggggcttaatcaggccccggctctctcctttgctgaaggttttgaccaacttccggccagccccccaggtgtccaggctgctggaggatggagacgtggtgagagagtctgagtcatcttcgggaggtttctcaggagagccatcaaagaaaaggggcttcttgtgcacgccagagtagagggcggaccgttcatccaggaccggcgaattctcaaacacgtgctcctccccacctggagggaaaccaacagagtctcttg

SEQ ID NO: 18687 - DNA, 319 bp, Homo sapiens
  MAP TO AL080246.13; EXPRESSED IN BT474, SIGNAL = 1.9; EXPRESSED IN FETAL LIVER, SIGNAL = 2.8; EXPRESSED IN ADULT LIVER, SIGNAL = 2.8; EXPRESSED IN HBL100, SIGNAL =   2; EXPRESSED IN HELA, SIGNAL =   3; EXPRESSED IN PLACENTA, SIGNAL = 3.2; EXPRESSED IN HEART, SIGNAL = 3.8; EXPRESSED IN BRAIN, SIGNAL = 2.6; EXPRESSED IN BONE MARROW, SIGNAL = 3.2; EXPRESSED IN LUNG, SIGNAL =   2; EST_HUMAN HIT: AA234884.1, EVALUE 2.90e-01; NT HIT: gi11425961, EVALUE 2.00e-01; SWISSPROT HIT: P98159, EVALUE 6.80e-01
agttattcacgcaattgctttttttggcacctgctcctggttctctccttcccttaatggaactgactgtctccattgtggatggagaagtttggaagacagaatccaacgtgggtctcgtgatcgcagcggggtgagcagggggcagactgaacctctgcagtatgatgaccaaatgaagtgctgtggtgttcagggcaggggtgacggggtagtaggaagaggccggaagatcagcgaggatttgtgccatgaagaaaagctgaggagtgcttttgggaggagaaagagcaggggtgtctgtctcagctctgggcct

SEQ ID NO: 18688 - DNA, 474 bp, Homo sapiens
  MAP TO AL034485.5; EXPRESSED IN BONE MARROW, SIGNAL = 1.1; EXPRESSED IN BRAIN, SIGNAL = 1.2; EXPRESSED IN FETAL LIVER, SIGNAL =   1; EXPRESSED IN ADULT LIVER, SIGNAL = 1.1; EXPRESSED IN PLACENTA, SIGNAL =   1; EXPRESSED IN HEART, SIGNAL = 0.84; EXPRESSED IN HELA, SIGNAL = 0.92; EXPRESSED IN HBL100, SIGNAL =   1; EXPRESSED IN BT474, SIGNAL = 1.1; EST_HUMAN HIT: N55323.1, EVALUE 3.00e-66; SWISSPROT HIT: P02281, EVALUE 5.00e-14; NT HIT: gi11036645, EVALUE 1.20e+00
tcagatgtcgagttggactgtgacatagagccatgtggccacactaaattcccccccacccttcccctgtccacaaccgtcattgtctgttcttgccatccagtggccactgcctccaccatggctgaggctttctctaagacaacctctgaggaagaccagagcatccaggagcccaaagaggccaactccatgacggcccagaagcagaagaagtgagggcttcgaggctcccgtaggcgccatgccaacagcggcggagatatcttcggggacagctttgccgcctatttcccccgggtgctgaagcaggttcaccaggccctcagcctttcccaggaggccgtgagtgtcatggattctatggttcgtgacatactggaccgcatcgccaccgaggctggtcacctggcccactactccaagtgcgtgaccatcacctcccgggacattcggatggccgtgtgcctgctg

SEQ ID NO: 18689 - DNA, 303 bp, Homo sapiens
  MAP TO AL035079.14; EXPRESSED IN BT474, SIGNAL = 2.3; EXPRESSED IN HBL100, SIGNAL =   2; EXPRESSED IN HELA, SIGNAL = 1.9; EXPRESSED IN BONE MARROW, SIGNAL = 3.1; EXPRESSED IN LUNG, SIGNAL = 1.5; EXPRESSED IN ADULT LIVER, SIGNAL = 2.8; EXPRESSED IN FETAL LIVER, SIGNAL = 4.6; EXPRESSED IN PLACENTA, SIGNAL = 2.6; EXPRESSED IN HEART, SIGNAL = 2.1; EXPRESSED IN BRAIN, SIGNAL = 3.1; SWISSPROT HIT: P04040, EVALUE 2.00e-25; NT HIT: X04092.1, EVALUE 1.00e-130; EST_HUMAN HIT: AW955654.1, EVALUE 6.00e-91
gcagcacctggggagcacctttaccaagcaggaggtcctgcggggccagcttgagagccactggcctggcctcccgcccatctgctccacgtgccctctgcccacgcagggggagcccaacgtctttaggcctaccctgattgtcctgcatgcacatcgggccgtcacgctggtagttggccactcgagcacggtagggacagttcacaggtatatgaagataattgggtcccaggcgatggcggtgagtgtcaggataggcaaaaaggcggccctgcagtaataaatacaatagacactgac

SEQ ID NO: 18690 - DNA, 304 bp, Homo sapiens
  MAP TO AL035427.17; EXPRESSED IN PLACENTA, SIGNAL = 1.4; EXPRESSED IN BONE MARROW, SIGNAL =   1; EXPRESSED IN BRAIN, SIGNAL = 1.5; EXPRESSED IN FETAL LIVER, SIGNAL = 1.1; EXPRESSED IN HBL100, SIGNAL = 1.1; EXPRESSED IN HELA, SIGNAL = 1.1; EXPRESSED IN HEART, SIGNAL =   1; EXPRESSED IN LUNG, SIGNAL = 1.9; EXPRESSED IN ADULT LIVER, SIGNAL = 1.1; NT HIT: U10334.1, EVALUE 1.60e-01; SWISSPROT HIT: P53535, EVALUE 6.20e-01; EST_HUMAN HIT: BE828281.1, EVALUE 4.30e+00
aggaatttgaaaaacttgttagcttacttaagtcaactactgatcctcttattcataaaatagcacggattgcaatgggtgtccataatgttcacccatttgcccaagagtttattaacgaagtaggtgtagtgacacttattgaaagcttgctcagttttccttcccctgaaatgagaaaaaagactgtaattactctgaatcctccttctggggatgaaagacaacgcaaaattgaattacatgttaagcatatgtgtaaagaaaccatgtcatttcctttgaactcaccgggacagcaatc

SEQ ID NO: 18691 - DNA, 232 bp, Homo sapiens
  MAP TO AL096818.2; EXPRESSED IN PLACENTA, SIGNAL =  15; EXPRESSED IN HBL100, SIGNAL = 8.7; EXPRESSED IN HELA, SIGNAL =  11; EXPRESSED IN HEART, SIGNAL =  10; EXPRESSED IN BONE MARROW, SIGNAL =  13; EXPRESSED IN LUNG, SIGNAL =  13; EXPRESSED IN BRAIN, SIGNAL = 9.3; EXPRESSED IN ADULT LIVER, SIGNAL =  11; EXPRESSED IN BT474, SIGNAL = 8.5; EXPRESSED IN FETAL LIVER, SIGNAL =  10; NT HIT: AF302095.1, EVALUE 8.60e+00; SWISSPROT HIT: P53979, EVALUE 1.00e+00; EST_HUMAN HIT: AA720615.1, EVALUE 1.40e-01
agtgcccctaagttcccaagtcaatttgattaggaaaggagaggattgggaaatggaaatctctgtaaagcagtggattcattccttgatcaaaggcatggtggttggcagcaagcataaaaatatgaatgtgtatgttgacagaggaggcacccggctactacttgtcaatgtagtgaggcaggggatggataaagaagacatgcttctgaaccttcagaatcttacaaat

SEQ ID NO: 18692 - DNA, 480 bp, Homo sapiens
  MAP TO AL035588.21; EXPRESSED IN BT474, SIGNAL = 1.2; EXPRESSED IN FETAL LIVER, SIGNAL = 1.4; EXPRESSED IN HBL100, SIGNAL = 1.4; EXPRESSED IN PLACENTA, SIGNAL = 1.9; EXPRESSED IN HELA, SIGNAL = 1.3; EXPRESSED IN HEART, SIGNAL =   2; EXPRESSED IN BRAIN, SIGNAL = 1.7; EXPRESSED IN BONE MARROW, SIGNAL = 1.6; EXPRESSED IN LUNG, SIGNAL = 2.8; EXPRESSED IN ADULT LIVER, SIGNAL = 1.5; EST_HUMAN HIT: BE797399.1, EVALUE 0.00e+00; NT HIT: M33782.1, EVALUE 0.00e+00; SWISSPROT HIT: P19484, EVALUE 4.00e-34
gagctggagatgcaggctcgagtgcacggcctccctaccacctccccgtccggcatgaacatggctgagctggcccagcaggtggtgaagcaggagctgcctagcgaagagggcccaggggaggccctgatgctgggggctgaggtccctgaccctgagccactgccagctctgcccccgcaagccccgctgcccctgcccacccagccaccatccccattccatcacctggacttcagccacagcctgagctttgggggcagggaggacgagggtcccccgggctaccccgaacccctggcgccggggcatggctccccattccccagcctgtccaagaaggatctggacctcatgctcctggacgactcactgctaccgctggcctctgatccacttctgtccaccatgtcccccgaggcctccaaggccagcagccgccggagcagcttcagcatggaggagggcgatgtgctgtga

SEQ ID NO: 18693 - DNA, 101 bp, Homo sapiens
  MAP TO AP000344.1; EXPRESSED IN BRAIN, SIGNAL = 1.4; EXPRESSED IN BT474, SIGNAL = 1.2; EXPRESSED IN FETAL LIVER, SIGNAL = 1.5; EXPRESSED IN ADULT LIVER, SIGNAL = 1.3; EXPRESSED IN HBL100, SIGNAL = 1.1; EXPRESSED IN HELA, SIGNAL = 1.5; EXPRESSED IN HEART, SIGNAL =   2; EXPRESSED IN LUNG, SIGNAL =   1; EXPRESSED IN BONE MARROW, SIGNAL = 1.5; EXPRESSED IN PLACENTA, SIGNAL = 1.8; EST_HUMAN HIT: AA781364.1, EVALUE 2.00e-08; NT HIT: AJ271735.1, EVALUE 6.00e-11
gcatgggtatgttgcacgatgctgaggtttggggtacggatcccgtcacccaggtagtgagcatagtttttcaactcatgcccatccctcattcccttctt

SEQ ID NO: 18694 - DNA, 777 bp, Homo sapiens
  MAP TO AL078605.18; EXPRESSED IN ADULT LIVER, SIGNAL = 1.7; EXPRESSED IN BT474, SIGNAL = 3.2; EXPRESSED IN FETAL LIVER, SIGNAL = 0.89; EXPRESSED IN PLACENTA, SIGNAL = 3.2; EXPRESSED IN HBL100, SIGNAL =   2; EXPRESSED IN HELA, SIGNAL = 1.7; EXPRESSED IN HEART, SIGNAL = 1.3; EXPRESSED IN BRAIN, SIGNAL = 1.6; EXPRESSED IN BONE MARROW, SIGNAL = 1.3; EXPRESSED IN LUNG, SIGNAL = 2.4; SWISSPROT HIT: Q04893, EVALUE 3.00e-08; EST_HUMAN HIT: AW193024.1, EVALUE 0.00e+00; NT HIT: AJ012488.1, EVALUE 2.00e+00
ttaagatttcagtgtctgaaaccatggttacttgttgctttacttcaggccccacatttgtggggtcttcttgtttaatttcagggtttgtacacatgagagcttctagcttaaattcaaaatctgttgctacaggtaatttttgattgatttcagcgtgtgtacacatggagtcttcttgcttggatataggatctgtacatatgggaacttcctgtttggattcatggcctgtacacataatttcttgcctagattcagggtctgtccgtattaaaacttcttgcctggattcagggcctgtatacatgggaacttcttgcctggattcagggcctgtatacatgggaacttcttgcctgggttcagagcctgtatacatgggaacttcttgcctgggttcagagtctgtatacatgggaacttcttgcctgggttcagagtctgtatacatgggaacttcttgcctggcttcagggcctgtacacatgggaacttcttgcctgggttcagggtctgaacacatgggaacttctcgcctggattcagggcctgtacacgtgggaacttcttgcctgggttcagggtctgaacacatgggaacttcttgcctgggttcagaatctgtatacacgggaacttctcgcctggattcagggcctgtacacatgggaacttcttgcctggattcagcatctgaacacatgggaacttcttccctggattcggcgtctgaactcgtggatattacttgtttgtccaaagttattacacctt

SEQ ID NO: 18695 - DNA, 373 bp, Homo sapiens
  MAP TO AP000352.2; EXPRESSED IN BONE MARROW, SIGNAL = 6.2; EXPRESSED IN LUNG, SIGNAL = 6.1; EXPRESSED IN BT474, SIGNAL = 6.8; EXPRESSED IN ADULT LIVER, SIGNAL = 3.7; EXPRESSED IN FETAL LIVER, SIGNAL = 7.9; EXPRESSED IN HELA, SIGNAL = 9.8; EXPRESSED IN PLACENTA, SIGNAL = 9.7; EXPRESSED IN HBL100, SIGNAL = 8.5; EXPRESSED IN HEART, SIGNAL = 8.4; EXPRESSED IN BRAIN, SIGNAL =   6; EST_HUMAN HIT: T49552.1, EVALUE 5.40e+00; SWISSPROT HIT: Q9Y6J0, EVALUE 3.00e-59; NT HIT: AB002328.1, EVALUE 0.00e+00
aggagtcattggagagtacagaaggcttccgggctgcagagcaaggtgtccagaagcctgctgcagaaaccccagcctctgcttgcatccctggcaagccctcagcatccacacccaccctgtgggatgggaagaagagaggggacctcccaggggagccagtggccttcccccaggggctgccggctggtgctgaggagcagcggcagtttctcacagagcagtgcatcgcctccttccgcctgtgcctgagccgcttcccccagcactataagagtctctaccgtctggccttcctctacacctacagcaagacccaccgggtgagtggctgccgggccaagggggcttggatcttcccagggcagctggg

SEQ ID NO: 18696 - DNA, 181 bp, Homo sapiens
  MAP TO AP000356.1; EXPRESSED IN HELA, SIGNAL = 5.3; EXPRESSED IN PLACENTA, SIGNAL = 5.1; EXPRESSED IN HBL100, SIGNAL = 2.9; EXPRESSED IN HEART, SIGNAL = 4.3; EXPRESSED IN BONE MARROW, SIGNAL = 4.9; EXPRESSED IN BRAIN, SIGNAL = 3.9; EXPRESSED IN LUNG, SIGNAL = 3.5; EXPRESSED IN ADULT LIVER, SIGNAL = 4.3; EXPRESSED IN BT474, SIGNAL = 2.3; EXPRESSED IN FETAL LIVER, SIGNAL = 3.6; NT HIT: X12817.1, EVALUE 1.10e-01; SWISSPROT HIT: P02810, EVALUE 5.00e-02; EST_HUMAN HIT: AI249317.1, EVALUE 2.50e+00
tggctgtgcctcggatcaggaccagaatgacacccattcatttccctgggcctttgctccggtggtccctgcaccctggcctctgcctgacgaggatggtggggagaggaggggggacatcccccacgctgctgtctccactgtggcctctgagcttccaggactgcagcgggtgggtggg

SEQ ID NO: 18697 - DNA, 569 bp, Homo sapiens
  MAP TO AL035660.11; EXPRESSED IN HELA, SIGNAL =   1; EXPRESSED IN PLACENTA, SIGNAL = 1.1; EXPRESSED IN HBL100, SIGNAL = 1.4; EXPRESSED IN HEART, SIGNAL = 0.92; EXPRESSED IN BRAIN, SIGNAL = 1.6; EXPRESSED IN BONE MARROW, SIGNAL = 1.4; EXPRESSED IN BT474, SIGNAL = 1.5; EXPRESSED IN FETAL LIVER, SIGNAL = 0.92; EXPRESSED IN ADULT LIVER, SIGNAL = 1.1; SWISSPROT HIT: P04279, EVALUE 1.00e-103; EST_HUMAN HIT: BF679615.1, EVALUE 0.00e+00; NT HIT: Z47556.1, EVALUE 0.00e+00
gctactagctcttcagtttggagaacataactgctttgggatccgccttgttttctacctttttgtgcaccagagacggaagtttgttctttacttagtccatgaacccacagcctttcttctgtgtttgaatattgactggatattccctttccagatgggctattcccctgatcttgagaaggattttgtgtcccacgatgagctttgcctcctttatggtgtataactaccctgtgaaaatgaccttttgatttatcatggtctctgccttcttgtttattatggagcagttgttgacttccacctagatgtcgttgtgattttgtcgtcttatgtagggcattcaaatcatattgctgactttttcgggactggtcatgatcattggcatctacatgatatgtgtattgaatagaaaaactgcctttggattcagtttgttgcttgcctttttgtccagaatagtgctggcccttttgtccgtgtggaaattgggaaaattcacttggtaatcggccttttgatccacctggtaattgataataagaaggtatgcattcattatc

SEQ ID NO: 18698 - DNA, 130 bp, Homo sapiens
  MAP TO AP000346.1; EXPRESSED IN BT474, SIGNAL = 3.7; EXPRESSED IN FETAL LIVER, SIGNAL = 8.4; EXPRESSED IN HELA, SIGNAL =  11; EXPRESSED IN PLACENTA, SIGNAL = 4.5; EXPRESSED IN HBL100, SIGNAL = 3.3; EXPRESSED IN HEART, SIGNAL = 4.7; EXPRESSED IN BONE MARROW, SIGNAL = 5.5; EXPRESSED IN LUNG, SIGNAL = 3.9; EXPRESSED IN BRAIN, SIGNAL = 5.1; EXPRESSED IN ADULT LIVER, SIGNAL = 6.7; NT HIT: AF003533.1, EVALUE 1.00e-06; EST_HUMAN HIT: H85597.1, EVALUE 2.00e-06; SWISSPROT HIT: Q46578, EVALUE 6.80e+00
caatgagcaggtcagcatctgccctctgtccacgtctagaaagggccaggtggagctggtgttctcaggccacaagccccagctgccccagaggtcattcattcattcactcactcactcattcacctga

SEQ ID NO: 18699 - DNA, 233 bp, Homo sapiens
  MAP TO AL079339.11; EXPRESSED IN HEART, SIGNAL = 2.2; EXPRESSED IN LUNG, SIGNAL = 0.9; EXPRESSED IN BRAIN, SIGNAL = 1.6; EXPRESSED IN BT474, SIGNAL = 1.3; EXPRESSED IN ADULT LIVER, SIGNAL = 1.3; EXPRESSED IN PLACENTA, SIGNAL = 1.6; EXPRESSED IN HBL100, SIGNAL = 1.2; EXPRESSED IN BONE MARROW, SIGNAL = 1.5; EXPRESSED IN FETAL LIVER, SIGNAL = 1.3; EXPRESSED IN HELA, SIGNAL = 1.1; EST_HUMAN HIT: AA358970.1, EVALUE 3.30e+00; NT HIT: AF302691.1, EVALUE 2.00e-03
atgatgccgatgccaataccaatgacgatggtgatgcagatcatgatgcagatggtgatgcacgtgctgatgcaggtgctgatgctgaggcaggtgctgatgcagataatgatgcagatgctgatgcaggtgctggtgctgatgctgaggcagatatgatgcagatgctggtgcaaatgctgaagcaggtgttgatgcagatactaatctgacgcagctgctgatgttaaagc

SEQ ID NO: 18700 - DNA, 144 bp, Homo sapiens
  MAP TO AP000354.1; EXPRESSED IN HELA, SIGNAL = 1.8; EXPRESSED IN LUNG, SIGNAL =   1; EXPRESSED IN BRAIN, SIGNAL = 1.3; EXPRESSED IN BT474, SIGNAL = 1.8; EXPRESSED IN ADULT LIVER, SIGNAL = 1.3; EXPRESSED IN PLACENTA, SIGNAL = 1.4; EXPRESSED IN HEART, SIGNAL = 1.4; EXPRESSED IN HBL100, SIGNAL = 1.2; EXPRESSED IN BONE MARROW, SIGNAL = 1.4; EXPRESSED IN FETAL LIVER, SIGNAL = 1.2; SWISSPROT HIT: P39188, EVALUE 1.30e-02; EST_HUMAN HIT: AI582769.1, EVALUE 1.00e-04; NT HIT: AF037338.1, EVALUE 5.00e-06
atgttgcccaggctggtctcctgggttcagtggatcctcctgcctcagcctctcgagtagctggactagaggtgtgcgtatgcatgcacaactggaaacatgatctgttcattccaggcagggccctgatagatcatggcttaa

SEQ ID NO: 18701 - DNA, 279 bp, Homo sapiens
  MAP TO AP000471.1; EXPRESSED IN FETAL LIVER, SIGNAL = 3.4; EXPRESSED IN ADULT LIVER, SIGNAL = 1.9; EXPRESSED IN PLACENTA, SIGNAL = 3.1; EXPRESSED IN HELA, SIGNAL = 2.6; EXPRESSED IN BRAIN, SIGNAL = 2.6; EXPRESSED IN BONE MARROW, SIGNAL = 2.9; EXPRESSED IN BT474, SIGNAL = 1.7; EXPRESSED IN HEART, SIGNAL = 2.4; EXPRESSED IN HBL100, SIGNAL = 2.1; EXPRESSED IN LUNG, SIGNAL = 1.8; EST_HUMAN HIT: AU142850.1, EVALUE 1.00e-114; SWISSPROT HIT: O95613, EVALUE 2.00e-36; NT HIT: gi11423682, EVALUE 1.00e-116
cttgctcacttccgacagagaaaaacaaaaggtgacagttcgcattcggagaaaaagacggcgaagaggaagggctcggctgtcgatgcgtctgtccaggaggagagtccggtaaccaaggaggacagcgcactctgtggaggaggggacatttgcaaaagcacatcatgtgacgacacccctgatggggcaggaggggcctttgcagctcaggtagatttgctcaatgttgtatttgaacatttcgcttatcttctagtgatttctagtgtgatttac

SEQ ID NO: 18702 - DNA, 125 bp, Homo sapiens
  MAP TO AP000510.1; EXPRESSED IN FETAL LIVER, SIGNAL = 3.4; EXPRESSED IN ADULT LIVER, SIGNAL = 2.1; EXPRESSED IN HELA, SIGNAL = 2.1; EXPRESSED IN BONE MARROW, SIGNAL = 1.7; EXPRESSED IN LUNG, SIGNAL = 1.3; EXPRESSED IN BRAIN, SIGNAL = 1.6; EXPRESSED IN BT474, SIGNAL = 1.3; EXPRESSED IN PLACENTA, SIGNAL = 2.1; EXPRESSED IN HEART, SIGNAL = 2.1; EXPRESSED IN HBL100, SIGNAL = 1.4; NT HIT: X54794.1, EVALUE 2.80e-01; EST_HUMAN HIT: AI804667.1, EVALUE 4.00e-34; SWISSPROT HIT: Q14246, EVALUE 1.30e+00
atgaagcccaatccaacaaagagcacaacagtgactgtggttgcagccagggatatgaggataattcccatgggtgtcaggagcctggtgggtttcactgctgtgactgaagtagttcacagaag

SEQ ID NO: 18703 - DNA, 242 bp, Homo sapiens
  MAP TO AP000513.1; EXPRESSED IN HEART, SIGNAL = 0.94; EXPRESSED IN LUNG, SIGNAL = 5.7; EXPRESSED IN BRAIN, SIGNAL = 2.5; EXPRESSED IN FETAL LIVER, SIGNAL = 1.7; EXPRESSED IN ADULT LIVER, SIGNAL = 1.5; EXPRESSED IN PLACENTA, SIGNAL = 2.6; EXPRESSED IN HELA, SIGNAL = 2.7; EXPRESSED IN BONE MARROW, SIGNAL = 1.9; EXPRESSED IN BT474, SIGNAL = 1.9; EXPRESSED IN HBL100, SIGNAL = 3.3; SWISSPROT HIT: P36915, EVALUE 1.00e-17; NT HIT: gi11419102, EVALUE 1.00e-38; EST_HUMAN HIT: AA827377.1, EVALUE 2.00e-38
gcacctgggagtcccatccagagaccacggagctggtggttttgcagggcagggtggggccagcaggtgacgaggaggaggaggaagaggaagagctgagcagctcctgtgaggaggagggagaggaggaccgggatgcggatgaggagggagaaggggatgaggagaccccaacctcggctccagggtccagcctggctggccgaaacccttatgccctgctgggtgaggatgagtgctga

SEQ ID NO: 18704 - DNA, 331 bp, Homo sapiens
  MAP TO AL008639.10; EXPRESSED IN HBL100, SIGNAL = 3.5; EXPRESSED IN HELA, SIGNAL = 4.4; EXPRESSED IN HEART, SIGNAL = 2.3; EXPRESSED IN LUNG, SIGNAL = 6.1; EXPRESSED IN BRAIN, SIGNAL = 3.7; EXPRESSED IN BT474, SIGNAL = 5.4; EXPRESSED IN FETAL LIVER, SIGNAL = 2.2; EXPRESSED IN ADULT LIVER, SIGNAL =   3; EXPRESSED IN PLACENTA, SIGNAL =   5; EXPRESSED IN BONE MARROW, SIGNAL = 3.1; NT HIT: AB040946.1, EVALUE 0.00e+00; SWISSPROT HIT: O60035, EVALUE 1.90e-01; EST_HUMAN HIT: AV716024.1, EVALUE 0.00e+00
ctcacagcttcaggtgctggatgtcgtggtctacaagccactgaatgacagtgtgcgggcccagtactccaactggcttctggctgggaacctggcgctgagcccaaccgggaatgctaagaagccacccctgggcctctttctggagtgggtcatggtcgcgtggaatagcatctcaagtgagtccatcgtccaagggttcaagaagtgccatatctccagcaacttggaggaggaagacgatgtcctgtgggaaatcgagagtgagttgccaggaggaggagaaccaccaaaagattgtgacaccgaaagcatggctgagagcaactga

SEQ ID NO: 18705 - DNA, 314 bp, Homo sapiens
  MAP TO AB020873.1; EXPRESSED IN LUNG, SIGNAL =  12; EXPRESSED IN FETAL LIVER, SIGNAL = 7.6; EXPRESSED IN ADULT LIVER, SIGNAL = 7.3; EXPRESSED IN PLACENTA, SIGNAL = 8.9; EXPRESSED IN HBL100, SIGNAL =  22; EXPRESSED IN HELA, SIGNAL =  13; EXPRESSED IN HEART, SIGNAL =  22; EXPRESSED IN BRAIN, SIGNAL =  12; EXPRESSED IN BONE MARROW, SIGNAL =  15; EXPRESSED IN BT474, SIGNAL =  22; EST_HUMAN HIT: AU148165.1, EVALUE 2.00e-14; NT HIT: L44140.1, EVALUE 1.00e-14; SWISSPROT HIT: P39195, EVALUE 2.00e-05
ggtctcactctgctgcccatgctggagtgcagcattgccatcacaggttgctgcagccttaaccacctgggctcaagtgattctcccacctcagcctcccagatgggactgcaggtgtgcaccaccatgcccagctaattatttctttttcttctccttctccttcctcttcctctccttctcctcctcctcttcctctccttccccttctcgtctctttcctcctcctcctcctccttctcctcctcctccccttcctcctcctcctccttcttcttctagacagggtctctctatgttgcccaggctggtct

SEQ ID NO: 18706 - DNA, 203 bp, Homo sapiens
  MAP TO AC007721.7; EXPRESSED IN HBL100, SIGNAL = 2.4; EXPRESSED IN LUNG, SIGNAL = 4.6; EXPRESSED IN BRAIN, SIGNAL = 3.6; EXPRESSED IN FETAL LIVER, SIGNAL =  12; EXPRESSED IN ADULT LIVER, SIGNAL = 3.9; EXPRESSED IN PLACENTA, SIGNAL = 4.4; EXPRESSED IN HEART, SIGNAL =   5; EXPRESSED IN HELA, SIGNAL = 4.3; EXPRESSED IN BONE MARROW, SIGNAL =   5; EXPRESSED IN BT474, SIGNAL = 2.3; EST_HUMAN HIT: BF333627.1, EVALUE 5.00e-45; SWISSPROT HIT: Q00653, EVALUE 2.10e+00
ttcaccgaactgagctgagacagccggcatcctttccgccctgcgaggttctgcctgctgctgctgctgctgcactgggtccctgggccccagccgggtcaacagctcttcccactcccgggagctctgtggggttcccttcctctggggcggctccgtcaggctggtctctggcatcctcatttctgcgcccttgggttgag

SEQ ID NO: 18707 - DNA, 136 bp, Homo sapiens
  MAP TO AC004852.2; EXPRESSED IN BT474, SIGNAL = 1.1; EXPRESSED IN FETAL LIVER, SIGNAL =   1; EXPRESSED IN ADULT LIVER, SIGNAL = 0.97; EXPRESSED IN HELA, SIGNAL = 1.3; EXPRESSED IN PLACENTA, SIGNAL = 1.1; EXPRESSED IN HEART, SIGNAL = 1.5; EXPRESSED IN BRAIN, SIGNAL = 1.3; EXPRESSED IN BONE MARROW, SIGNAL = 1.3; EST_HUMAN HIT: AI792081.1, EVALUE 4.00e-26; SWISSPROT HIT: P11369, EVALUE 4.00e-04; NT HIT: gi5031614, EVALUE 4.00e-25
tattcatgatggaatattactccatgataaaaaaaagaatgaattaatggtatttgcagcaacctggatggaactggaggctattattctaaatgaagtaactcaggaatggaaaaccaaatattgcgtgctctaa

SEQ ID NO: 18708 - DNA, 130 bp, Homo sapiens
  MAP TO AC006205.7; EXPRESSED IN FETAL LIVER, SIGNAL = 2.5; EXPRESSED IN HBL100, SIGNAL = 1.9; EXPRESSED IN HELA, SIGNAL = 1.8; EXPRESSED IN HEART, SIGNAL = 1.9; EXPRESSED IN LUNG, SIGNAL = 2.7; EXPRESSED IN BONE MARROW, SIGNAL = 4.2; EXPRESSED IN ADULT LIVER, SIGNAL = 1.4; EXPRESSED IN BT474, SIGNAL = 1.5; EXPRESSED IN PLACENTA, SIGNAL = 1.9; EXPRESSED IN BRAIN, SIGNAL =   2; SWISSPROT HIT: P39736, EVALUE 1.80e+00; NT HIT: gi11436398, EVALUE 7.00e-36; EST_HUMAN HIT: BF438052.1, EVALUE 1.00e-35
aagaccaagatggtggctgcgttgttgagctggttgagtcgccactgcttttctacctcattcaggttcagccgtgctgcagggaagtggagtggggggaaagggtcagagacggggccacagcacggag

SEQ ID NO: 18709 - DNA, 244 bp, Homo sapiens
  MAP TO AC006466.3; EXPRESSED IN HEART, SIGNAL = 0.9; EXPRESSED IN PLACENTA, SIGNAL = 1.1; EXPRESSED IN BONE MARROW, SIGNAL = 1.2; EXPRESSED IN BRAIN, SIGNAL = 1.5; EXPRESSED IN FETAL LIVER, SIGNAL = 1.2; EST_HUMAN HIT: AA077714.1, EVALUE 7.00e-13; SWISSPROT HIT: P70205, EVALUE 4.00e-28; NT HIT: gi11420971, EVALUE 4.00e-82
gtggaatgtaaggccgtcatggttttcttccactactgtgttgtgtccaactacttctggctgttcatcgagggcctgtacctcttcactctgctggtggagaccttcttccctgaaaggagatacttctactggtacaccatcattggctggggtaggttcctggctgtggcttggacaggttcaggtcccgtggtcaggtgtgtccaggtgtgtctttggttccatcttcaggaagtgtcag

SEQ ID NO: 18710 - DNA, 158 bp, Homo sapiens
  MAP TO AC005003.2; EXPRESSED IN PLACENTA, SIGNAL = 2.4; EXPRESSED IN BRAIN, SIGNAL = 2.4; EXPRESSED IN BT474, SIGNAL = 7.1; EXPRESSED IN FETAL LIVER, SIGNAL = 1.9; EXPRESSED IN ADULT LIVER, SIGNAL = 1.6; EXPRESSED IN HBL100, SIGNAL =   4; EXPRESSED IN HELA, SIGNAL = 2.9; EXPRESSED IN HEART, SIGNAL =   3; EXPRESSED IN LUNG, SIGNAL = 2.1; EXPRESSED IN BONE MARROW, SIGNAL = 3.1; NT HIT: gi11417994, EVALUE 4.00e-84; SWISSPROT HIT: Q9Z2K3, EVALUE 2.00e-04; EST_HUMAN HIT: BF342162.1, EVALUE 6.00e-84
ttgttcaagtaggacttagagcggaagaagctcccacattcagggcatgggtacttcttctccccatcagactccattttgtttttggggactgccatgtcgcaggagaaagagccattggcactctgcttctctggcgtcttcaggtcgctggcatc

SEQ ID NO: 18711 - DNA, 157 bp, Homo sapiens
  MAP TO AC006445.10; EXPRESSED IN HELA, SIGNAL =   1; EXPRESSED IN PLACENTA, SIGNAL =   1; EXPRESSED IN HBL100, SIGNAL = 0.97; EXPRESSED IN HEART, SIGNAL =   1; EXPRESSED IN BRAIN, SIGNAL = 1.2; EXPRESSED IN BONE MARROW, SIGNAL = 1.1; EXPRESSED IN FETAL LIVER, SIGNAL =  54; EXPRESSED IN ADULT LIVER, SIGNAL = 1.1; NT HIT: gi9506744, EVALUE 1.40e+00; SWISSPROT HIT: Q03413, EVALUE 4.00e+00
aaagggaaggcttttaatcctggcttcatttaccacgtgccactccttggtgacagtgcagatcctagtgtgcaggtagctctggcgggcctcacaggcaaggcggaggacccagggccgttcctcctacctggggtgacaggaaggagggtacaag

SEQ ID NO: 18712 - DNA, 103 bp, Homo sapiens
  MAP TO AC006977.3; EXPRESSED IN ADULT LIVER, SIGNAL = 2.1; EXPRESSED IN BT474, SIGNAL = 1.5; EXPRESSED IN FETAL LIVER, SIGNAL = 2.3; EXPRESSED IN PLACENTA, SIGNAL = 2.7; EXPRESSED IN HELA, SIGNAL = 2.2; EXPRESSED IN HBL100, SIGNAL = 1.6; EXPRESSED IN HEART, SIGNAL = 2.6; EXPRESSED IN LUNG, SIGNAL = 1.6; EXPRESSED IN BONE MARROW, SIGNAL = 2.3; EXPRESSED IN BRAIN, SIGNAL = 2.3; NT HIT: M33388.1, EVALUE 3.40e+00
tgtgccttgcaatgtggaaatgatatactgggtaagaggagctgtagtaaagaggcttctagtgacgtagtgacaagctgtggggagagggagtgttgcacag

SEQ ID NO: 18713 - DNA, 167 bp, Homo sapiens
  MAP TO AC009406.1; EXPRESSED IN HEART, SIGNAL = 0.86; EXPRESSED IN BRAIN, SIGNAL = 0.92; EXPRESSED IN BONE MARROW, SIGNAL = 0.97; EXPRESSED IN FETAL LIVER, SIGNAL = 2.1; EST_HUMAN HIT: BF374237.1, EVALUE 5.70e-01; NT HIT: gi5835680, EVALUE 8.30e-02; SWISSPROT HIT: Q04747, EVALUE 8.60e+00
ggtaagattagtctggataaattgtttaatggaatgctaaagcctgagtatgggatagcagagaatgtagaactcctggtgggtgcagtctgagagaagacttttctctcactcacaggattttttccatagaactcaatagcctcaccaaaaagattgttgagcat

SEQ ID NO: 18714 - DNA, 123 bp, Homo sapiens
  MAP TO AC009413.1; EXPRESSED IN HELA, SIGNAL = 1.5; EXPRESSED IN LUNG, SIGNAL = 0.94; EXPRESSED IN BRAIN, SIGNAL = 2.3; EXPRESSED IN BT474, SIGNAL = 1.2; EXPRESSED IN ADULT LIVER, SIGNAL = 1.4; EXPRESSED IN PLACENTA, SIGNAL = 1.5; EXPRESSED IN HEART, SIGNAL = 1.8; EXPRESSED IN HBL100, SIGNAL = 1.4; EXPRESSED IN BONE MARROW, SIGNAL = 2.1; EXPRESSED IN FETAL LIVER, SIGNAL = 2.1; NT HIT: AL163281.2, EVALUE 1.10e+00
gtgggggtggtctgaaaggagcagctcttggaggcccttgggcccatgatccttgttggctgtgtctccactctcggggagggctgtggtgagtacaggctgcagcagaaagtgacagggatg

SEQ ID NO: 18715 - DNA, 171 bp, Homo sapiens
  MAP TO AC009474.1; EXPRESSED IN HBL100, SIGNAL = 1.4; EXPRESSED IN HEART, SIGNAL = 1.8; EXPRESSED IN LUNG, SIGNAL = 1.1; EXPRESSED IN BRAIN, SIGNAL = 2.1; EXPRESSED IN FETAL LIVER, SIGNAL = 1.3; EXPRESSED IN ADULT LIVER, SIGNAL = 1.4; EXPRESSED IN PLACENTA, SIGNAL = 2.2; EXPRESSED IN HELA, SIGNAL = 1.6; EXPRESSED IN BONE MARROW, SIGNAL = 1.7; EXPRESSED IN BT474, SIGNAL = 1.1; NT HIT: AJ278419.1, EVALUE 2.50e-02; SWISSPROT HIT: Q09357, EVALUE 2.90e+00; EST_HUMAN HIT: BE877543.1, EVALUE 5.90e-01
gttctggaccagggaaatttctttttaccagaatagccattatgatcaagagagagaaagtatagatgagtagccagagcttggtacctgggttcaaaacccactgtcctctcttgcttgttactgacgaggggtcagtttgctccccctgttcgagtccaatttcatctc

SEQ ID NO: 18716 - DNA, 163 bp, Homo sapiens
  MAP TO AC009403.1; EXPRESSED IN PLACENTA, SIGNAL = 1.3; EXPRESSED IN HBL100, SIGNAL = 0.92; EXPRESSED IN HELA, SIGNAL = 3.5; EXPRESSED IN HEART, SIGNAL = 1.3; EXPRESSED IN BONE MARROW, SIGNAL = 1.3; EXPRESSED IN BRAIN, SIGNAL = 1.1; EXPRESSED IN FETAL LIVER, SIGNAL = 1.3; EXPRESSED IN ADULT LIVER, SIGNAL =   1; NT HIT: AB033065.1, EVALUE 1.30e+00; EST_HUMAN HIT: AI080721.1, EVALUE 9.60e-02; SWISSPROT HIT: P77156, EVALUE 3.80e+00
tggaactgctctggcaaagagctcaatactgagggcttggaaattagcaacggctttgctgtgtgcattttgatatggatcacgctatggtccttggccgtctacgctgcccttggccgtctacgcggctatcttcagagtgcttccctctcttctgccactc

SEQ ID NO: 18717 - DNA, 101 bp, Homo sapiens
  MAP TO AC009408.2; EXPRESSED IN HBL100, SIGNAL = 1.9; EXPRESSED IN HELA, SIGNAL = 2.8; EXPRESSED IN LUNG, SIGNAL =   2; EXPRESSED IN BRAIN, SIGNAL = 3.2; EXPRESSED IN BT474, SIGNAL =   2; EXPRESSED IN ADULT LIVER, SIGNAL = 2.4; EXPRESSED IN FETAL LIVER, SIGNAL = 2.6; EXPRESSED IN PLACENTA, SIGNAL = 3.4; EXPRESSED IN HEART, SIGNAL = 2.9; EXPRESSED IN BONE MARROW, SIGNAL = 3.1; NT HIT: gi7706140, EVALUE 4.60e-02; EST_HUMAN HIT: AL048956.1, EVALUE 3.00e-37; SWISSPROT HIT: Q00765, EVALUE 7.00e-04
gtcaaatggatgatgtactggattatatttgcacttttcaccacagcagagacattcacagacatcttcctttgttggtaagtactccaggagttgggatg

SEQ ID NO: 18718 - DNA, 115 bp, Homo sapiens
  MAP TO AC009599.2; EXPRESSED IN BONE MARROW, SIGNAL =  11; EXPRESSED IN FETAL LIVER, SIGNAL =  14; EXPRESSED IN HBL100, SIGNAL = 7.1; EXPRESSED IN HELA, SIGNAL =  16; EXPRESSED IN HEART, SIGNAL =  21; EXPRESSED IN BRAIN, SIGNAL =  11; EXPRESSED IN LUNG, SIGNAL = 8.7; EXPRESSED IN BT474, SIGNAL = 5.6; EXPRESSED IN ADULT LIVER, SIGNAL =  10; EXPRESSED IN PLACENTA, SIGNAL =  17; EST_HUMAN HIT: AA099777.1, EVALUE 4.00e-03
  unsure 96
aataccttttagagactctgcttttagttctttggagtatttattacgaagaattgctgaattagatggcagtttcatattttttatttttttttngaggagctgccgtactgtt

SEQ ID NO: 18719 - DNA, 104 bp, Homo sapiens
  MAP TO AC009468.1; EXPRESSED IN BT474, SIGNAL = 2.6; EXPRESSED IN HBL100, SIGNAL = 1.2; EXPRESSED IN HELA, SIGNAL = 0.99; EXPRESSED IN HEART, SIGNAL = 0.91; EXPRESSED IN FETAL LIVER, SIGNAL = 3.9; EST_HUMAN HIT: AA029136.1, EVALUE 1.30e+00; NT HIT: AF171901.1, EVALUE 2.20e-01
ttagaccacccactactcctcagtgtcctctgccactgctttcttcggtttttcctaaacaggctggacaatactcccaatttaatgttatcactcatctctct

SEQ ID NO: 18720 - DNA, 81 bp, Homo sapiens
  MAP TO AC009974.2; EXPRESSED IN ADULT LIVER, SIGNAL = 1.1; EXPRESSED IN BT474, SIGNAL =   1; EXPRESSED IN FETAL LIVER, SIGNAL = 1.5; EXPRESSED IN HBL100, SIGNAL = 0.96; EXPRESSED IN PLACENTA, SIGNAL = 1.3; EXPRESSED IN HELA, SIGNAL = 1.2; EXPRESSED IN HEART, SIGNAL =   1; EXPRESSED IN BRAIN, SIGNAL = 1.1; EXPRESSED IN BONE MARROW, SIGNAL = 1.2; EXPRESSED IN LUNG, SIGNAL = 0.98; EST_HUMAN HIT: BE887717.1, EVALUE 2.00e-38; NT HIT: gi7661969, EVALUE 1.00e-38
ctgagactgaagatacagaagaagaactagtagatggtttggaagactgttgtagccgtgatgagaatgaagaggaggagg

SEQ ID NO: 18721 - DNA, 169 bp, Homo sapiens
  MAP TO AC010799.1; EXPRESSED IN HELA, SIGNAL = 1.2; EXPRESSED IN HEART, SIGNAL =   1; EXPRESSED IN BRAIN, SIGNAL = 3.2; EXPRESSED IN FETAL LIVER, SIGNAL = 1.3; NT HIT: AJ229043.1, EVALUE 2.00e-08; SWISSPROT HIT: P08548, EVALUE 7.00e-10; EST_HUMAN HIT: BF478029.1, EVALUE 2.00e-03
  unsure 4
  unsure 52
  unsure 164
aatnggaaagtttgtcatcataaaaaaggctatgaaaaagccacagttaacnatcatagtcaatgggaaaaaaattaaagcttttccgctaagatctggtacaaggcaaggatgcccactcttgctgcttctattcagcgtggtactggaaatactagcaagangcaat

SEQ ID NO: 18722 - DNA, 256 bp, Homo sapiens
  MAP TO AC010889.1; EXPRESSED IN ADULT LIVER, SIGNAL = 0.9; EXPRESSED IN PLACENTA, SIGNAL = 1.9; EXPRESSED IN HELA, SIGNAL = 1.2; EXPRESSED IN BONE MARROW, SIGNAL = 1.2; EXPRESSED IN LUNG, SIGNAL = 1.7; EXPRESSED IN BRAIN, SIGNAL =   1; EXPRESSED IN BT474, SIGNAL = 1.7; EXPRESSED IN HEART, SIGNAL = 0.86; EXPRESSED IN HBL100, SIGNAL = 0.94; NT HIT: AF273841.1, EVALUE 0.00e+00; EST_HUMAN HIT: AU123787.1, EVALUE 3.00e-62; SWISSPROT HIT: P41229, EVALUE 7.00e-23
aatggtgaccactacccctgtctagatgacttggagggcctggtggctgtgggccgggacctgcctgtggggctggaagagctgagacagctagagctgcaggtattgacagcacattcctggagagagaaggcctccaagacctttctcaagaagaattcttgctacacactgcttgaggtgaggtctgagaccctgacccacagcctcttcttcatctggcctggctgctgtgagatggcgcatataatgagaa

SEQ ID NO: 18723 - DNA, 188 bp, Homo sapiens
  MAP TO AC010106.1; EXPRESSED IN BRAIN, SIGNAL = 2.1; EXPRESSED IN BONE MARROW, SIGNAL = 2.4; EXPRESSED IN LUNG, SIGNAL = 1.9; EXPRESSED IN ADULT LIVER, SIGNAL = 2.8; EXPRESSED IN BT474, SIGNAL = 8.6; EXPRESSED IN FETAL LIVER, SIGNAL = 1.6; EXPRESSED IN PLACENTA, SIGNAL = 2.6; EXPRESSED IN HBL100, SIGNAL = 1.7; EXPRESSED IN HELA, SIGNAL =   2; EXPRESSED IN HEART, SIGNAL = 2.2; EST_HUMAN HIT: AA720574.1, EVALUE 1.00e-13; SWISSPROT HIT: P15501, EVALUE 4.30e-01; NT HIT: L07951.1, EVALUE 7.00e-06
ctttgtttttattcccaatatcttcttcatctccatctgagacttcatcaccttggactttattgtccatatctttatcagcattttggttgcaaccacttaaccagcctctagggagttttaaattttctctcatcctcctatcttcttctgagctctcccagctctcacaacctctgctcattacc

SEQ ID NO: 18724 - DNA, 152 bp, Homo sapiens
  MAP TO AC010905.1; EXPRESSED IN FETAL LIVER, SIGNAL =  11; EXPRESSED IN HELA, SIGNAL = 1.2; EXPRESSED IN HEART, SIGNAL = 1.4; EXPRESSED IN BRAIN, SIGNAL = 1.3; EST_HUMAN HIT: BF683095.1, EVALUE 5.10e-01; NT HIT: X13607.1, EVALUE 1.20e+00; SWISSPROT HIT: P02704, EVALUE 1.00e+00
attggtgtccgccacagagcccataacatcaccaagatttatgcttgctattctctgatccttctgctgtgcatgctgtgacttaggaattatttgtatgtgggtaatgacaacatttagcctctcacacagaagctcagtaattgtgctaa

SEQ ID NO: 18725 - DNA, 151 bp, Homo sapiens
  MAP TO AC010125.2; EXPRESSED IN HELA, SIGNAL = 1.3; EXPRESSED IN HEART, SIGNAL = 1.6; EXPRESSED IN LUNG, SIGNAL = 1.2; EXPRESSED IN BRAIN, SIGNAL = 1.4; EXPRESSED IN ADULT LIVER, SIGNAL = 1.5; EXPRESSED IN FETAL LIVER, SIGNAL = 1.4; EXPRESSED IN PLACENTA, SIGNAL = 2.4; EXPRESSED IN HBL100, SIGNAL = 1.2; EXPRESSED IN BONE MARROW, SIGNAL = 1.2; NT HIT: AE000736.1, EVALUE 2.90e-01; SWISSPROT HIT: P07207, EVALUE 3.90e+00
tgtcagttccagatcaagccacctcctagaccattgtcaatgtaccttaatgacaagcaactttttgaagcttggctgtctttgcagcatgggttttggagtgagctgttccctagatctggggagagtaagaagtagccctttgtgtatg

SEQ ID NO: 18726 - DNA, 109 bp, Homo sapiens
  MAP TO AC010132.2; EXPRESSED IN FETAL LIVER, SIGNAL = 1.5; EXPRESSED IN ADULT LIVER, SIGNAL = 1.1; EXPRESSED IN HELA, SIGNAL = 2.7; EXPRESSED IN BRAIN, SIGNAL = 0.97; EXPRESSED IN LUNG, SIGNAL = 1.1; EXPRESSED IN BONE MARROW, SIGNAL =   1; EXPRESSED IN BT474, SIGNAL = 4.5; EXPRESSED IN PLACENTA, SIGNAL = 2.2; EXPRESSED IN HEART, SIGNAL = 1.5; EXPRESSED IN HBL100, SIGNAL = 1.9; SWISSPROT HIT: P49722, EVALUE 7.00e-15; EST_HUMAN HIT: AU123268.1, EVALUE 7.00e-55; NT HIT: gi11421227, EVALUE 5.00e-55
ctgagaaaaaacagaaatccattctgtatgatgagcgaagtgtacacaaagtagaaccaattaccaagcatataggtttggtgtacagtggcatgggccccgattacag

SEQ ID NO: 18727 - DNA, 213 bp, Homo sapiens
  MAP TO AC010925.1; EXPRESSED IN PLACENTA, SIGNAL = 2.1; EXPRESSED IN HELA, SIGNAL = 1.2; EXPRESSED IN HBL100, SIGNAL = 1.4; EXPRESSED IN HEART, SIGNAL = 1.2; EXPRESSED IN FETAL LIVER, SIGNAL = 1.9; EXPRESSED IN ADULT LIVER, SIGNAL = 0.95; EXPRESSED IN BT474, SIGNAL = 2.3; NT HIT: U95759.1, EVALUE 2.00e+00; EST_HUMAN HIT: AU133080.1, EVALUE 1.00e-116; SWISSPROT HIT: Q04652, EVALUE 6.00e-10
gagcatttcatggaagtaatcagaaaccaggaatttgtattattaccagccagcgaaattgcaaagctcttggctagtgatgacatgaacattcctaatgaggagacaatattgaatgcacttcttacttgggtccgtcatgatttggaacagagacggaaagatctaagtaaacttttggcttatattaggctacctcttcttgcaccacag

SEQ ID NO: 18728 - DNA, 120 bp, Homo sapiens
  MAP TO AC011235.1; EXPRESSED IN BT474, SIGNAL = 1.3; EXPRESSED IN HBL100, SIGNAL = 1.6; EXPRESSED IN HEART, SIGNAL = 1.6; EXPRESSED IN LUNG, SIGNAL = 0.93; EXPRESSED IN BRAIN, SIGNAL = 1.7; EXPRESSED IN FETAL LIVER, SIGNAL =   2; EXPRESSED IN ADULT LIVER, SIGNAL = 1.1; EXPRESSED IN PLACENTA, SIGNAL = 1.6; EXPRESSED IN HELA, SIGNAL = 1.4; EXPRESSED IN BONE MARROW, SIGNAL = 1.6; EST_HUMAN HIT: AI038626.1, EVALUE 7.00e-05; NT HIT: gi11419946, EVALUE 7.00e-05
tcattcctgagcctacatctagaaattccatggtcatgataattgatgatgatgatgatgatgatgatggtggtggtggtggcagtggcagcagtggtaagctaatgctcacctaatgcc

SEQ ID NO: 18729 - DNA, 156 bp, Homo sapiens
  MAP TO AC011242.1; EXPRESSED IN BONE MARROW, SIGNAL = 3.1; EXPRESSED IN FETAL LIVER, SIGNAL =   4; EXPRESSED IN HBL100, SIGNAL = 2.9; EXPRESSED IN HELA, SIGNAL = 4.1; EXPRESSED IN HEART, SIGNAL = 3.6; EXPRESSED IN BRAIN, SIGNAL = 3.4; EXPRESSED IN LUNG, SIGNAL = 3.3; EXPRESSED IN BT474, SIGNAL = 2.7; EXPRESSED IN ADULT LIVER, SIGNAL = 2.6; EXPRESSED IN PLACENTA, SIGNAL = 3.4; EST_HUMAN HIT: AW629176.1, EVALUE 3.60e-01; SWISSPROT HIT: P47808, EVALUE 1.00e-03
tggctgtcttcgtcttgtctgtttaataagctgacagcaaatttcattctgcagctcaggatgtgtcaggcagatttgcaaagcactctgggctaaagatatgtggtaatcaattgcaggagagtcaactgcagcatttataaaaagctggcaggt

SEQ ID NO: 18730 - DNA, 197 bp, Homo sapiens
  MAP TO AL049652.13; EXPRESSED IN BONE MARROW, SIGNAL = 2.8; EXPRESSED IN FETAL LIVER, SIGNAL = 3.5; EXPRESSED IN HBL100, SIGNAL = 2.6; EXPRESSED IN HELA, SIGNAL = 3.1; EXPRESSED IN HEART, SIGNAL = 3.1; EXPRESSED IN BRAIN, SIGNAL =   3; EXPRESSED IN LUNG, SIGNAL =   2; EXPRESSED IN BT474, SIGNAL = 2.2; EXPRESSED IN ADULT LIVER, SIGNAL = 2.7; EXPRESSED IN PLACENTA, SIGNAL = 3.5; EST_HUMAN HIT: AU121681.1, EVALUE 9.00e-93; SWISSPROT HIT: P53914, EVALUE 9.00e-16; NT HIT: AF224263.1, EVALUE 9.90e-02
tcaccggaagaaaagaatgcgacagctgcagaagaaaataaagaatggaacactgaacataaagcaggacgacccctttgaactcttcatagcagccacaaacattcgctactgctactacaacgagacccacaagatcctgggcaataccttcggcatgtgtgtgctgcaggtgggtggcttcctctaacctgtga

SEQ ID NO: 18731 - DNA, 130 bp, Homo sapiens
  MAP TO AC011331.1; EXPRESSED IN BT474, SIGNAL = 4.7; EXPRESSED IN HEART, SIGNAL = 1.5; EXPRESSED IN LUNG, SIGNAL = 1.2; EST_HUMAN HIT: BE091676.1, EVALUE 3.00e-47; NT HIT: AB007899.1, EVALUE 3.00e-47; SWISSPROT HIT: P46934, EVALUE 1.00e-11
gatagtgaatattacaactctttgaaatggatcctggagaatgaccctactgagctggacctcatgttctgcatagacgaagaaaactttggacaggtacatgtgggtaaccctgggaactcttctttag

SEQ ID NO: 18732 - DNA, 163 bp, Homo sapiens
  MAP TO AL078463.11; EXPRESSED IN BONE MARROW, SIGNAL = 1.5; EXPRESSED IN LUNG, SIGNAL = 1.9; EXPRESSED IN BT474, SIGNAL =   1; EXPRESSED IN ADULT LIVER, SIGNAL = 1.8; EXPRESSED IN HBL100, SIGNAL = 1.8; EXPRESSED IN HELA, SIGNAL = 2.1; EXPRESSED IN PLACENTA, SIGNAL = 2.3; EXPRESSED IN HEART, SIGNAL = 0.92; EXPRESSED IN BRAIN, SIGNAL = 1.5; EST_HUMAN HIT: AW853458.1, EVALUE 2.00e-84; NT HIT: AB007925.1, EVALUE 4.00e-87; SWISSPROT HIT: P98171, EVALUE 8.00e-07
ctttttaaagagtcttcctgagtcctcgctgacttgtacaaatcgaggaatgatattattcaggtagatgtcactcagggtggtatggtccctgctttcccgcttcacctggtttaagaggagattccagcagttgactggagagagaacattctgatccttc

SEQ ID NO: 18733 - DNA, 88 bp, Homo sapiens
  MAP TO AL117378.1; EXPRESSED IN ADULT LIVER, SIGNAL = 1.3; EXPRESSED IN BT474, SIGNAL = 1.2; EXPRESSED IN PLACENTA, SIGNAL = 1.2; EXPRESSED IN HEART, SIGNAL = 0.91; EXPRESSED IN BONE MARROW, SIGNAL = 1.1; EST_HUMAN HIT: AA157030.1, EVALUE 1.00e-42; SWISSPROT HIT: P22413, EVALUE 6.00e-12; NT HIT: M57736.1, EVALUE 1.00e-42
cacacattaagttatagacttcaatgttttcaaaggtgtcagcctcaatgccatgcttgaatccaggtccatagccaacaaagagggc

SEQ ID NO: 18734 - DNA, 157 bp, Homo sapiens
  MAP TO AC011299.1; EXPRESSED IN PLACENTA, SIGNAL = 3.3; EXPRESSED IN BRAIN, SIGNAL = 3.1; EXPRESSED IN BT474, SIGNAL = 2.2; EXPRESSED IN FETAL LIVER, SIGNAL = 2.2; EXPRESSED IN ADULT LIVER, SIGNAL =  11; EXPRESSED IN HEART, SIGNAL = 2.4; EXPRESSED IN HELA, SIGNAL = 3.1; EXPRESSED IN HBL100, SIGNAL = 2.3; EXPRESSED IN LUNG, SIGNAL = 3.9; EXPRESSED IN BONE MARROW, SIGNAL = 3.6; SWISSPROT HIT: P23964, EVALUE 8.70e+00; EST_HUMAN HIT: AA115895.1, EVALUE 3.00e-26; NT HIT: AL163285.2, EVALUE 8.00e-24
ccccacttccccgatgatccaatcacttcccaccaggtccttccctggacacgtgaggattataattcgagatgagatttgggtggagacacagagccaaaccatatcagaggcaatcctctcaaatcctgccactgctgtatcgcctaaatttatg

SEQ ID NO: 18735 - DNA, 161 bp, Homo sapiens
  MAP TO AL117192.1; EXPRESSED IN PLACENTA, SIGNAL = 1.9; EXPRESSED IN BONE MARROW, SIGNAL =   1; EXPRESSED IN BRAIN, SIGNAL = 2.1; EXPRESSED IN BT474, SIGNAL = 2.3; EXPRESSED IN HEART, SIGNAL = 1.1; EXPRESSED IN HELA, SIGNAL = 1.1; EXPRESSED IN HBL100, SIGNAL = 1.3; EXPRESSED IN LUNG, SIGNAL = 1.1; EXPRESSED IN ADULT LIVER, SIGNAL = 1.1; EST_HUMAN HIT: BE732545.1, EVALUE 1.00e-66; NT HIT: gi7657243, EVALUE 7.00e-67; SWISSPROT HIT: P10673, EVALUE 5.00e+00
agctgaaccttagccggccgatcgaggagcagggccccctggacgtcatcatccacaagctgactgacgtcatccttgaagccgaccagaatgatagccagtccctggagctggtgcacaggttccaggtgagtgaggaccatgcagcccttggctgtggc

SEQ ID NO: 18736 - DNA, 208 bp, Homo sapiens
  MAP TO AC011351.1; EXPRESSED IN ADULT LIVER, SIGNAL =  11; EXPRESSED IN BT474, SIGNAL = 4.5; EXPRESSED IN FETAL LIVER, SIGNAL =  22; EXPRESSED IN HELA, SIGNAL =  14; EXPRESSED IN PLACENTA, SIGNAL =  20; EXPRESSED IN HBL100, SIGNAL =   8; EXPRESSED IN HEART, SIGNAL =  17; EXPRESSED IN BONE MARROW, SIGNAL =  15; EXPRESSED IN BRAIN, SIGNAL =  19; EXPRESSED IN LUNG, SIGNAL =  14; SWISSPROT HIT: Q90839, EVALUE 2.80e+00
cttaagaaactgcaccatcaggtgcacaaagctgttggtgctgggaaaggcagacagccctccacctttctcagtagctgccatgaatccattaacaagtcctgttgcttcaatcaaatgtttgctgcccttgaacacaactgcctggctcacattatttcttgccttggcaaacagtcccattctaactggactttctacctcttga

SEQ ID NO: 18737 - DNA, 510 bp, Homo sapiens
  MAP TO AL035457.11; EXPRESSED IN PLACENTA, SIGNAL = 1.2; EXPRESSED IN HEART, SIGNAL = 0.85; EXPRESSED IN BRAIN, SIGNAL = 1.2; EXPRESSED IN BONE MARROW, SIGNAL = 0.9; EXPRESSED IN BT474, SIGNAL = 4.6; EXPRESSED IN FETAL LIVER, SIGNAL = 0.93; EXPRESSED IN ADULT LIVER, SIGNAL = 0.95; NT HIT: U01287.1, EVALUE 1.30e+00
ccagagatgaaaagaaatgcctaaggagctctggctgtttgagctcagagccagcagcatcatcaacacctgcctcagcatctgtatcagcaccaatacctgcttcagcacctgcatcagcatcaacacccgcttcaacatctgcatcaacatctgcaccagcatcactaccagcatcagcatcactaccagcatcagcatctgcacttgcatcaacacatttttcagcacctgcatcaacacctgcttcaacatctgcatcaacatctgcacaagcatcactaccatcagcatcactaccagcatcagcatctgcacctgcatcaacacctttttcagcacctgcttcaacatctgcatcaacatctgcaccaacaccaatacctgcatcagcatcagcgcctgcatcagcattactaccagcatcagcatctgcacctgcaccaacacctttttcagcacctgcatcaacacctgcttcagcatcggtacctgcatcagcatcaacac

SEQ ID NO: 18738 - DNA, 226 bp, Homo sapiens
  MAP TO AL022337.19; EXPRESSED IN BT474, SIGNAL =   1; EXPRESSED IN HEART, SIGNAL = 1.8; EXPRESSED IN LUNG, SIGNAL = 1.2; EXPRESSED IN BRAIN, SIGNAL = 1.9; EXPRESSED IN FETAL LIVER, SIGNAL = 1.5; EXPRESSED IN ADULT LIVER, SIGNAL = 1.5; EXPRESSED IN PLACENTA, SIGNAL =   2; EXPRESSED IN HELA, SIGNAL = 1.5; EXPRESSED IN HBL100, SIGNAL = 1.4; EXPRESSED IN BONE MARROW, SIGNAL = 1.7; EST_HUMAN HIT: BF530962.1, EVALUE 8.00e-01; NT HIT: AJ010045.1, EVALUE 1.80e+00
acttctaggattaagtcataaaaggcattatttttgctcctcttctcccctctcctttcctctatcctcttctctcctccttcatcccctctttctttgtcctctgcttcttcctctcctcttcgtctcttctgttttcttctctcctcctcttgtcctttccctccttcttctccttctttttttctctctcccttccccccgccaacctcaattatttgcactg

SEQ ID NO: 18739 - DNA, 217 bp, Homo sapiens
  MAP TO AL049543.14; EXPRESSED IN BT474, SIGNAL = 2.2; EXPRESSED IN FETAL LIVER, SIGNAL = 1.4; EXPRESSED IN ADULT LIVER, SIGNAL = 0.95; EXPRESSED IN HELA, SIGNAL =   2; EXPRESSED IN PLACENTA, SIGNAL = 1.1; EXPRESSED IN HBL100, SIGNAL = 2.2; EXPRESSED IN HEART, SIGNAL = 2.5; EXPRESSED IN BONE MARROW, SIGNAL = 2.2; NT HIT: U17057.1, EVALUE 5.10e-01; SWISSPROT HIT: Q61553, EVALUE 2.00e+00
aagggcattacaaaggctctctttcgccttttggagaaactgcttcctcttcttcaagatcttttcctggctcgcctcttctcctgttttcaggtctctgttaacaccttggttcctcagatattgcggacagtctaattcgccccgcgacgtgagggagaacccaggagcgggctccggtagagaaagaagcttccggtcaacgaccacatccacc

SEQ ID NO: 18740 - DNA, 195 bp, Homo sapiens
  MAP TO AL035460.12; EXPRESSED IN BONE MARROW, SIGNAL = 4.1; EXPRESSED IN HBL100, SIGNAL = 3.4; EXPRESSED IN HELA, SIGNAL = 4.8; EXPRESSED IN HEART, SIGNAL = 4.4; EXPRESSED IN LUNG, SIGNAL = 3.2; EXPRESSED IN BRAIN, SIGNAL = 4.9; EXPRESSED IN BT474, SIGNAL =   3; EXPRESSED IN ADULT LIVER, SIGNAL = 4.4; EXPRESSED IN FETAL LIVER, SIGNAL = 5.4; EXPRESSED IN PLACENTA, SIGNAL = 5.3; NT HIT: AF079878.1, EVALUE 7.10e+00; EST_HUMAN HIT: BF345263.1, EVALUE 1.10e-02; SWISSPROT HIT: O75385, EVALUE 5.60e-01
ctgggcctggccctcctgccccagacaagatctattggcctggccctgcccagcccctgacatgccagcccctggccatggtgcagactggggaagataaaagcagtagcccagtggggcacacccacctcaacaatgcttgcacagggaggacctggtggctgcaggcagctgcccagagcctgtgtccagttg

SEQ ID NO: 18741 - DNA, 154 bp, Homo sapiens
  MAP TO AL110122.1; EXPRESSED IN PLACENTA, SIGNAL = 4.9; EXPRESSED IN FETAL LIVER, SIGNAL =   2; EXPRESSED IN ADULT LIVER, SIGNAL = 3.4; EXPRESSED IN HEART, SIGNAL = 2.5; EXPRESSED IN HELA, SIGNAL = 2.7; EXPRESSED IN HBL100, SIGNAL = 2.2; EXPRESSED IN BRAIN, SIGNAL = 2.7; EXPRESSED IN LUNG, SIGNAL = 2.1; EXPRESSED IN BONE MARROW, SIGNAL =   3; EXPRESSED IN BT474, SIGNAL = 1.6; EST_HUMAN HIT: AW170262.1, EVALUE 3.60e-01; NT HIT: AL163303.2, EVALUE 1.90e-02
ctcctcctcctcccagtcctctgtccgcccccccacagcctgagcacccacatcataaatggggagcagctggtgtcccagattttgggacccttccctgtccttggcgtctgatgctctatggcttcttggacatttgttttattcacaaaca

SEQ ID NO: 18742 - DNA, 162 bp, Homo sapiens
  MAP TO AL008639.10; EXPRESSED IN BT474, SIGNAL = 1.7; EXPRESSED IN HBL100, SIGNAL = 1.1; EXPRESSED IN BRAIN, SIGNAL = 1.3; EXPRESSED IN ADULT LIVER, SIGNAL = 0.97; EXPRESSED IN FETAL LIVER, SIGNAL = 0.95; EXPRESSED IN PLACENTA, SIGNAL = 1.5; EXPRESSED IN HEART, SIGNAL = 0.91; EXPRESSED IN HELA, SIGNAL = 1.4; EXPRESSED IN BONE MARROW, SIGNAL = 1.1; NT HIT: AB040946.1, EVALUE 1.00e-65; SWISSPROT HIT: P51815, EVALUE 5.00e-08; EST_HUMAN HIT: BF307290.1, EVALUE 2.00e-65
gtaccggccctatttgatgaggtggccatatatttttccgatgaggaatgggaagttttgacggagcaacaaaaggccctctaccgggaagtcatgaggatgaattatgaaactgtcctgtccctgggtaaagctgtgttttcctttgtctcctggaagctc

SEQ ID NO: 18743 - DNA, 227 bp, Homo sapiens
  MAP TO AL121756.2; EXPRESSED IN BONE MARROW, SIGNAL = 4.4; EXPRESSED IN HBL100, SIGNAL = 2.6; EXPRESSED IN HELA, SIGNAL = 7.2; EXPRESSED IN BRAIN, SIGNAL = 4.6; EXPRESSED IN LUNG, SIGNAL = 3.2; EXPRESSED IN BT474, SIGNAL = 2.6; EXPRESSED IN ADULT LIVER, SIGNAL = 4.4; EXPRESSED IN FETAL LIVER, SIGNAL = 6.2; EXPRESSED IN PLACENTA, SIGNAL = 7.1; EXPRESSED IN HEART, SIGNAL = 5.4; EST_HUMAN HIT: BE962117.2, EVALUE 8.10e-01; NT HIT: X60658.1, EVALUE 3.00e-27; SWISSPROT HIT: P10734, EVALUE 5.10e-02
cctatcgtgaagagtgtagctggtgatatcattgacttccccaagtcccgtgccccagccaaggtgccccccaagaaggaccacacatcccaggtgatggtgccactgtacctcttcaacaccacgtttggactcctgcagaccaacggcgccctcgacatggacatcacccctgagctggtgagtgtggtgcccgggggatggggatgggggctccttgccctgct

SEQ ID NO: 18744 - DNA, 299 bp, Homo sapiens
  MAP TO AL079303.2; EXPRESSED IN PLACENTA, SIGNAL =  20; EXPRESSED IN BONE MARROW, SIGNAL =  11; EXPRESSED IN FETAL LIVER, SIGNAL =  11; EXPRESSED IN HBL100, SIGNAL =  28; EXPRESSED IN HELA, SIGNAL =  44; EXPRESSED IN HEART, SIGNAL = 9.2; EXPRESSED IN BRAIN, SIGNAL = 5.5; EXPRESSED IN LUNG, SIGNAL =  21; EXPRESSED IN BT474, SIGNAL =  27; EXPRESSED IN ADULT LIVER, SIGNAL = 9.5; SWISSPROT HIT: P47914, EVALUE 6.00e-26; NT HIT: gi4506628, EVALUE 7.00e-87; EST_HUMAN HIT: AA316723.1, EVALUE 9.00e-93
aagcgggagctgcagcctgggccttggtttgatcctttgccttggcctttggctggcacagcttgagccccttggcaatgcgggcacgggcatgcttcccaagtttggggtgggcaatgtaggcaagtcatttgagcttgcaggtgacacccttcggaatcttggggttaacctccttggcctttacgagggccttgatagcctcggcacatacactcacagccttggcattgctggcctgcatcttctttaggctcttcttgttgtgctcttggcaaagcacatgttcctcaggaact

SEQ ID NO: 18745 - DNA, 207 bp, Homo sapiens
  MAP TO AL121754.3; EXPRESSED IN BT474, SIGNAL = 2.2; EXPRESSED IN PLACENTA, SIGNAL = 4.1; EXPRESSED IN BONE MARROW, SIGNAL = 3.3; EXPRESSED IN BRAIN, SIGNAL = 3.8; EXPRESSED IN FETAL LIVER, SIGNAL = 4.3; EXPRESSED IN ADULT LIVER, SIGNAL = 3.5; EXPRESSED IN HEART, SIGNAL = 3.6; EXPRESSED IN HELA, SIGNAL = 3.6; EXPRESSED IN HBL100, SIGNAL =   3; EXPRESSED IN LUNG, SIGNAL = 2.5; SWISSPROT HIT: O14514, EVALUE 6.50e+00; EST_HUMAN HIT: BF327815.1, EVALUE 2.90e+00
ctttccttcccctcccctacagaagccaggaaagttgaactctctccttccggaaacacgataccctcgatttccaggacatctctagctcctgctttccccccctcctctccagctgctccatcttctcggtcctttcctcctcctcttcttcctcctcctcctccccctgagtagtaagtgctaacgacccgcaggactctcatc

SEQ ID NO: 18746 - DNA, 124 bp, Homo sapiens
  MAP TO AP000403.1; EXPRESSED IN BONE MARROW, SIGNAL = 1.3; EXPRESSED IN BT474, SIGNAL = 1.1; EXPRESSED IN FETAL LIVER, SIGNAL = 1.3; EXPRESSED IN ADULT LIVER, SIGNAL = 1.1; EXPRESSED IN HELA, SIGNAL = 1.2; EXPRESSED IN PLACENTA, SIGNAL = 1.8; EXPRESSED IN HBL100, SIGNAL = 1.1; EXPRESSED IN HEART, SIGNAL = 1.3; EXPRESSED IN BRAIN, SIGNAL = 1.5; NT HIT: D10744.1, EVALUE 2.80e-01; EST_HUMAN HIT: C14997.1, EVALUE 4.10e-01
cacagtttatggtggagtatatcttcttagaaatgatgattatcataaacttctcggtaccttgcttatctgaaaatatattcatattcctcctatatgtgactattttgcaagtagcattctg

SEQ ID NO: 18747 - DNA, 126 bp, Homo sapiens
  MAP TO AL033523.10; EXPRESSED IN ADULT LIVER, SIGNAL = 1.1; EXPRESSED IN FETAL LIVER, SIGNAL = 3.9; EXPRESSED IN HELA, SIGNAL = 3.5; EXPRESSED IN PLACENTA, SIGNAL = 2.3; EXPRESSED IN HEART, SIGNAL =   1; EXPRESSED IN BRAIN, SIGNAL = 1.4; EXPRESSED IN BONE MARROW, SIGNAL =   1; NT HIT: AJ400877.1, EVALUE 5.00e-06; SWISSPROT HIT: P11369, EVALUE 6.00e-03; EST_HUMAN HIT: AI079144.1, EVALUE 2.00e-06
catgtgactgggggtgaaatggtatctcattgtggttttaatttttatttcctggatgactagttttcttgaccgtcttttcgtgttcatattggtcatttgactccttttgcaaagtgtctctac

SEQ ID NO: 18748 - DNA, 210 bp, Homo sapiens
  MAP TO AL078601.10; EXPRESSED IN PLACENTA, SIGNAL = 1.4; EXPRESSED IN HEART, SIGNAL = 1.4; EXPRESSED IN BONE MARROW, SIGNAL = 1.3; EXPRESSED IN BRAIN, SIGNAL = 1.4; EXPRESSED IN FETAL LIVER, SIGNAL = 1.5; EXPRESSED IN ADULT LIVER, SIGNAL = 1.5; EXPRESSED IN HELA, SIGNAL = 1.5; NT HIT: AF202635.1, EVALUE 1.00e-04; EST_HUMAN HIT: AL039363.2, EVALUE 1.00e-26; SWISSPROT HIT: P80868, EVALUE 2.10e+00
gacaaaaaaagattgggggaaagggtttctagatacagatcttggagaaaatcgaaagctaatagatatcagactagaattaaaagatgatttgatggagatgagtgtttccaaacctgtgacagattatgaggaagaagatatagaaggagcaatgccaggaaataaattgacattagacaatctggcagaactgttctgattattcaa

SEQ ID NO: 18749 - DNA, 172 bp, Homo sapiens
  MAP TO AL021578.1; EXPRESSED IN BONE MARROW, SIGNAL = 6.4; EXPRESSED IN BT474, SIGNAL = 7.5; EXPRESSED IN HBL100, SIGNAL = 8.6; EXPRESSED IN LUNG, SIGNAL =   9; EXPRESSED IN BRAIN, SIGNAL = 5.6; EXPRESSED IN ADULT LIVER, SIGNAL =   5; EXPRESSED IN FETAL LIVER, SIGNAL = 4.8; EXPRESSED IN PLACENTA, SIGNAL = 5.3; EXPRESSED IN HEART, SIGNAL = 4.7; EXPRESSED IN HELA, SIGNAL = 6.6; NT HIT: gi4506860, EVALUE 2.00e-92; EST_HUMAN HIT: AA258502.1, EVALUE 2.00e-92; SWISSPROT HIT: P31431, EVALUE 8.00e-26
agggcagggtctgggagccaagtccccaccgaacccaagaaactagaggagaatgaggttatccccaagagaatctcacccgttgaagagagtgaggatgtgtccaacaaggtgtcaatgtccagcactgtgcagggcagcaacatctttgagagaacggaggtcctggcag

SEQ ID NO: 18750 - DNA, 201 bp, Homo sapiens
  MAP TO AL035704.7; EXPRESSED IN BT474, SIGNAL = 1.1; EXPRESSED IN PLACENTA, SIGNAL = 1.3; EXPRESSED IN BONE MARROW, SIGNAL = 1.6; EXPRESSED IN FETAL LIVER, SIGNAL =   1; EXPRESSED IN ADULT LIVER, SIGNAL = 1.1; EXPRESSED IN HEART, SIGNAL =   2; EXPRESSED IN HELA, SIGNAL = 1.4; EXPRESSED IN HBL100, SIGNAL = 1.1; EXPRESSED IN BRAIN, SIGNAL = 1.5; EST_HUMAN HIT: AI421706.1, EVALUE 1.90e+00; NT HIT: Y11344.1, EVALUE 1.60e+00
agtttatgtaaaacatttgaaactgttcctggcctgcaggtgcaagctctagagatgatgatgatgatgatgatgatgatgatgatgatgatgatgatgatgatgaaggtaacgtgggggggatttagcccaatatttgaagccagaaggacggtggcatggtcagacatgtgtcagaagctgacacatggtgacagcttc

SEQ ID NO: 18751 - DNA, 96 bp, Homo sapiens
  MAP TO AP000403.1; EXPRESSED IN PLACENTA, SIGNAL =   3; EXPRESSED IN HEART, SIGNAL = 2.9; EXPRESSED IN BRAIN, SIGNAL = 2.3; EXPRESSED IN BT474, SIGNAL = 1.8; EXPRESSED IN HELA, SIGNAL = 2.7; EXPRESSED IN HBL100, SIGNAL = 1.6; EXPRESSED IN LUNG, SIGNAL =   2; EXPRESSED IN BONE MARROW, SIGNAL = 2.5; EXPRESSED IN ADULT LIVER, SIGNAL = 2.5; EXPRESSED IN FETAL LIVER, SIGNAL = 2.7; SWISSPROT HIT: P52777, EVALUE 1.40e+00; NT HIT: AJ131016.1, EVALUE 3.00e-06; EST_HUMAN HIT: BE141959.1, EVALUE 1.00e-08
aaggatggagtcctcatgaatgggattagtgcccttgctaaagaggcaccaagagctccttttcctcttctgccaagtgagggcaaagtgagaaga

SEQ ID NO: 18752 - DNA, 98 bp, Homo sapiens
  MAP TO AL033539.16; EXPRESSED IN ADULT LIVER, SIGNAL = 1.7; EXPRESSED IN PLACENTA, SIGNAL = 2.7; EXPRESSED IN BONE MARROW, SIGNAL = 2.2; EXPRESSED IN BRAIN, SIGNAL = 2.3; EXPRESSED IN FETAL LIVER, SIGNAL = 3.2; EXPRESSED IN BT474, SIGNAL = 1.4; EXPRESSED IN HEART, SIGNAL =   3; EXPRESSED IN HELA, SIGNAL = 2.5; EXPRESSED IN HBL100, SIGNAL = 1.7; EXPRESSED IN LUNG, SIGNAL = 3.6; NT HIT: AB000489.1, EVALUE 8.20e-01; EST_HUMAN HIT: BF681239.1, EVALUE 1.20e+00
tttccacatctatgaaatggcagtcatcatcatcatcatcatcatcatcatcatcatcatcatcatctttatcatttcgtctcccttttgggatgctg

SEQ ID NO: 18753 - DNA, 184 bp, Homo sapiens
  MAP TO AP000470.1; EXPRESSED IN PLACENTA, SIGNAL = 1.2; EXPRESSED IN HEART, SIGNAL = 1.1; EXPRESSED IN BRAIN, SIGNAL = 1.4; EXPRESSED IN FETAL LIVER, SIGNAL = 0.88; NT HIT: AF056927.1, EVALUE 3.60e-01; SWISSPROT HIT: P03144, EVALUE 2.20e+00
gttagtctggcttacttgcctgttggaggtaacccagatcatcaaaggggtatcgattaggctgtggttgttcttattatttgttcctacgatagttttgattaacctgtcactgctcccaattaggagcatgagaacatattgctcccaagatgtagcaataactctagctccttttaataac

SEQ ID NO: 18754 - DNA, 159 bp, Homo sapiens
  MAP TO AL049697.8; EXPRESSED IN PLACENTA, SIGNAL = 3.1; EXPRESSED IN BRAIN, SIGNAL = 1.9; EXPRESSED IN ADULT LIVER, SIGNAL = 2.2; EXPRESSED IN FETAL LIVER, SIGNAL = 2.5; EXPRESSED IN BT474, SIGNAL = 1.8; EXPRESSED IN HEART, SIGNAL = 3.1; EXPRESSED IN HELA, SIGNAL = 2.9; EXPRESSED IN HBL100, SIGNAL = 1.8; EXPRESSED IN LUNG, SIGNAL = 2.9; EXPRESSED IN BONE MARROW, SIGNAL = 2.3; SWISSPROT HIT: Q05506, EVALUE 1.00e-07; NT HIT: Z97343.1, EVALUE 3.60e-01; EST_HUMAN HIT: AA773032.1, EVALUE 2.00e-84
cttgtaaacccgaatgtactcttcaatgctcaagtcccgaaatttttgccacagtgaaagtgcttgcacatcgcccagttccaatcgttggaagaactcctgtgctgcttttgctacacttttatcatctgctgcttctttattaacttgtacataaac

SEQ ID NO: 18755 - DNA, 156 bp, Homo sapiens
  MAP TO AP000550.1; EXPRESSED IN PLACENTA, SIGNAL =   7; EXPRESSED IN HBL100, SIGNAL = 3.6; EXPRESSED IN HELA, SIGNAL = 5.7; EXPRESSED IN HEART, SIGNAL = 6.6; EXPRESSED IN BRAIN, SIGNAL = 5.8; EXPRESSED IN BONE MARROW, SIGNAL = 5.1; EXPRESSED IN LUNG, SIGNAL = 4.2; EXPRESSED IN ADULT LIVER, SIGNAL = 5.1; EXPRESSED IN BT474, SIGNAL =  15; EXPRESSED IN FETAL LIVER, SIGNAL = 5.6; NT HIT: U07000.1, EVALUE 3.00e-78; EST_HUMAN HIT: AL043116.2, EVALUE 2.00e-80; SWISSPROT HIT: P11274, EVALUE 3.00e-19
ataacaaggacgtgtcagtgatgatgagcgagatggacgtgaacgccatcgcaggcatgctgaagctgtacttccgtgagctgcccgagcccctcttcactgacgagttctaccccaacttcgcagagggcatcggtgagcactggaggccttggc

SEQ ID NO: 18756 - DNA, 187 bp, Homo sapiens
  MAP TO AC009967.1; EXPRESSED IN BT474, SIGNAL = 3.4; EXPRESSED IN FETAL LIVER, SIGNAL = 1.9; EXPRESSED IN ADULT LIVER, SIGNAL = 1.3; EXPRESSED IN HELA, SIGNAL = 5.8; EXPRESSED IN PLACENTA, SIGNAL = 2.8; EXPRESSED IN HBL100, SIGNAL = 2.6; EXPRESSED IN HEART, SIGNAL = 1.6; EXPRESSED IN BRAIN, SIGNAL = 1.8; EXPRESSED IN BONE MARROW, SIGNAL = 1.1; EXPRESSED IN LUNG, SIGNAL = 1.7; EST_HUMAN HIT: BE843070.1, EVALUE 1.00e-101; NT HIT: X97869.1, EVALUE 1.00e-101; SWISSPROT HIT: P05455, EVALUE 7.00e-21
cttttgacttccatttgtttagggattcttgttggtcttctattattttcttcagtgcttctttttccacctctccttctagtacttcccaagtcacttctttgttccttaattgtaggttaccattatttgcatctttggctttacccaatgcttccttggctttttctttaaatagaattatccc

SEQ ID NO: 18757 - DNA, 436 bp, Homo sapiens
  MAP TO AL031685.15; EXPRESSED IN BT474, SIGNAL =  23; EXPRESSED IN ADULT LIVER, SIGNAL = 4.9; EXPRESSED IN FETAL LIVER, SIGNAL = 2.7; EXPRESSED IN HELA, SIGNAL =  28; EXPRESSED IN PLACENTA, SIGNAL =  35; EXPRESSED IN HBL100, SIGNAL =  14; EXPRESSED IN HEART, SIGNAL = 1.1; EXPRESSED IN LUNG, SIGNAL =   7; SWISSPROT HIT: P05783, EVALUE 8.00e-50; NT HIT: gi11434787, EVALUE 0.00e+00; EST_HUMAN HIT: BE743215.1, EVALUE 0.00e+00
ttgactgtaaagtcatcagcagcaagacaggcattgttgatctgcagaacaatgcaggcattgtccacagtatttgtgaagatctgagccctcaggtcctcgatggttttgaagtgatggctccagtctctgacctggggtcccttcttctccaggtgctcccggattttgctctccggcttccagttcttggtctccaggctcctcattctgtccaggtaggaggccagatggtcgttcaggctttgcatggtctccttctcgttctggatgcctcccattcctgccagatccccagccatccccccggccaggtccccggaccccatgccgccccagaagctggtggagtgggactcggagatccgggaaccagagccccgggcacctgcatagacgctaaccatactgctgaccggccgggcgccatagctgg

SEQ ID NO: 18758 - DNA, 202 bp, Homo sapiens
  MAP TO AL022238.1; EXPRESSED IN BT474, SIGNAL = 0.98; EXPRESSED IN FETAL LIVER, SIGNAL = 1.7; EXPRESSED IN HEART, SIGNAL = 1.9; EXPRESSED IN LUNG, SIGNAL = 1.4; EXPRESSED IN BRAIN, SIGNAL = 1.6; EXPRESSED IN ADULT LIVER, SIGNAL = 1.5; EXPRESSED IN PLACENTA, SIGNAL = 1.7; EXPRESSED IN HELA, SIGNAL = 1.7; EXPRESSED IN HBL100, SIGNAL = 1.5; EXPRESSED IN BONE MARROW, SIGNAL = 1.9; EST_HUMAN HIT: BF508896.1, EVALUE 1.00e-110; NT HIT: AB037859.1, EVALUE 3.00e-51; SWISSPROT HIT: P33416, EVALUE 1.10e-01
agaagtcaagagcctcagcccaattctgcttcagcctggcactccctcccctcctgcatctcagctgcctctcacacagggtggctgggtcctcctcaccaatgatggcttccttcaggctggactcaacaggaaggatgttcttctccaccagctccatggggccaggcctctgtgcaatcttctcattgaggtcatcggc

SEQ ID NO: 18759 - DNA, 255 bp, Homo sapiens
  MAP TO AL096887.5; EXPRESSED IN PLACENTA, SIGNAL =   1; EXPRESSED IN HBL100, SIGNAL =   2; EXPRESSED IN HEART, SIGNAL = 0.96; EXPRESSED IN BONE MARROW, SIGNAL = 0.92; EXPRESSED IN ADULT LIVER, SIGNAL = 2.9; EXPRESSED IN BT474, SIGNAL = 1.4; EXPRESSED IN FETAL LIVER, SIGNAL = 1.4; EXPRESSED IN HELA, SIGNAL = 0.95; EST_HUMAN HIT: T28608.1, EVALUE 1.00e-115; NT HIT: gi11420538, EVALUE 0.00e+00; SWISSPROT HIT: P00740, EVALUE 2.00e-46
gtgaacataatattgaggagacagaacatacagagcaaaagcgaaatgtgattcgaattattcctcaccacaactacaatgcagctattaataagtacaaccatgacattgcccttctggaactggacgaacccttagtgctaaacagctacgttacacctatttgcattgctgacaaggaatacacgaacatcttcctcaaatttggatctggctatgtaagtggctggggaagagtcttccacaaagggagat

SEQ ID NO: 18760 - DNA, 338 bp, Homo sapiens
  MAP TO AB020878.1; EXPRESSED IN BONE MARROW, SIGNAL = 4.8; EXPRESSED IN BT474, SIGNAL = 3.8; EXPRESSED IN HBL100, SIGNAL = 5.4; EXPRESSED IN BRAIN, SIGNAL = 4.1; EXPRESSED IN LUNG, SIGNAL = 5.2; EXPRESSED IN ADULT LIVER, SIGNAL = 5.2; EXPRESSED IN FETAL LIVER, SIGNAL = 3.8; EXPRESSED IN PLACENTA, SIGNAL =  58; EXPRESSED IN HEART, SIGNAL = 5.5; EXPRESSED IN HELA, SIGNAL = 6.6; NT HIT: gi11427562, EVALUE 0.00e+00; SWISSPROT HIT: P33128, EVALUE 1.30e+00; EST_HUMAN HIT: AU140831.1, EVALUE 0.00e+00
ccatgaaggatggcagcagccccaaagtggaattcagcaatgcccacggctttctgctggacacgagtctggagcttcttctgtgcggacagacattgtgtgacaacacagaggtcattgccagctacaatcagctctcaagtttccgccagcccaaggtggtgcgctaccgcgtggtcaacctctatgaagatgatcataagaacccgacggtgacgcgcgagcaggctggatcttccagcaccatcagctggctgaggccttcaagcaatacaacatctcctgggagctggacgtgctggaggtgagcaactcctcccttcgccgccgcctcatcc

SEQ ID NO: 18761 - DNA, 225 bp, Homo sapiens
  MAP TO AL035427.17; EXPRESSED IN PLACENTA, SIGNAL = 2.2; EXPRESSED IN BONE MARROW, SIGNAL = 1.6; EXPRESSED IN FETAL LIVER, SIGNAL = 1.7; EXPRESSED IN HEART, SIGNAL = 2.2; EXPRESSED IN HELA, SIGNAL = 1.3; EXPRESSED IN HBL100, SIGNAL = 1.3; EXPRESSED IN BRAIN, SIGNAL =   3; EXPRESSED IN LUNG, SIGNAL = 2.1; EXPRESSED IN BT474, SIGNAL = 1.4; EXPRESSED IN ADULT LIVER, SIGNAL = 1.5; EST_HUMAN HIT: BE879524.1, EVALUE 1.00e-124; SWISSPROT HIT: Q61398, EVALUE 6.50e-02; NT HIT: gi11419715, EVALUE 1.00e-38
agattgagcctagtgcccaggccaagcctgaaaagaaggctggggaagaggttatcgctgggcctgagagagagaatgatgtccctctggtggtcagacccaaggttaggacccaggcaactactggggcaaggcccaaaactgagaccaagtctgtgcctgcggcaaggcccaaaactgaggcccaagcaatgtctggggcaaggcccaaaactgaggtccaag

SEQ ID NO: 18762 - DNA, 424 bp, Homo sapiens
  MAP TO AC006001.2; EXPRESSED IN BRAIN, SIGNAL =   2; EXPRESSED IN BT474, SIGNAL = 1.6; EXPRESSED IN BONE MARROW, SIGNAL = 1.7; EXPRESSED IN LUNG, SIGNAL = 1.1; EXPRESSED IN ADULT LIVER, SIGNAL = 1.9; EXPRESSED IN FETAL LIVER, SIGNAL = 1.6; EXPRESSED IN PLACENTA, SIGNAL = 2.6; EXPRESSED IN HEART, SIGNAL = 1.9; EXPRESSED IN HELA, SIGNAL = 1.7; EXPRESSED IN HBL100, SIGNAL = 1.3; NT HIT: U13757.1, EVALUE 2.30e-01; EST_HUMAN HIT: AA077589.1, EVALUE 0.00e+00; SWISSPROT HIT: P37798, EVALUE 4.10e+00
tggaggaggtgaggcagcaccaggtcatggtgaacctcagagctatttggggggtgtcgattttggtgcaaatgcaataggaagcccttggggaaaggggcggtttaagaaggagaatgagatggggcctgatttacattttctgcaagttattctggctgttgggggtagagaggaggcagggaggcgggaaggaggctgtgctggcctccagggccaagctggtgatggcttgacacaggggtggcaacgagaacagagggaagtggggtagggatttattttggaggtagaattgaagagtcttggtggtggcccgggtgtgggtggtgagggtgagatgatccaaagatgcctccctgttttctggccggagccaccaggtagatgatgatggtgccatttcccgagacggggaagtcac

SEQ ID NO: 18763 - DNA, 160 bp, Homo sapiens
  MAP TO AC009945.1; EXPRESSED IN BT474, SIGNAL = 6.1; EXPRESSED IN PLACENTA, SIGNAL = 5.1; EXPRESSED IN BONE MARROW, SIGNAL =   3; EXPRESSED IN BRAIN, SIGNAL = 2.9; EXPRESSED IN ADULT LIVER, SIGNAL = 3.1; EXPRESSED IN FETAL LIVER, SIGNAL = 3.1; EXPRESSED IN HEART, SIGNAL = 3.6; EXPRESSED IN HELA, SIGNAL = 4.6; EXPRESSED IN HBL100, SIGNAL = 6.8; EXPRESSED IN LUNG, SIGNAL =   4; NT HIT: gi5031668, EVALUE 7.00e-70; EST_HUMAN HIT: BE408105.1, EVALUE 9.00e-70; SWISSPROT HIT: O75956, EVALUE 7.00e-21
gctcccagagcacctacaacgacctgctgtcggtcatagaggagaagggcaaagagatccggcctgcctatgctggcagcaagagcaccatggagcgcctgaagagaggtatcatccatgcccgggccctagtcagagagtgcctggcagagacagagtg

SEQ ID NO: 18764 - DNA, 383 bp, Homo sapiens
  MAP TO AP000550.1; EXPRESSED IN PLACENTA, SIGNAL = 3.8; EXPRESSED IN HELA, SIGNAL =   4; EXPRESSED IN HEART, SIGNAL = 2.3; EXPRESSED IN BRAIN, SIGNAL = 2.4; EXPRESSED IN BT474, SIGNAL = 1.8; EXPRESSED IN HBL100, SIGNAL = 2.5; EXPRESSED IN LUNG, SIGNAL = 3.2; EXPRESSED IN BONE MARROW, SIGNAL = 3.8; EXPRESSED IN ADULT LIVER, SIGNAL = 7.3; EXPRESSED IN FETAL LIVER, SIGNAL = 1.7; EST_HUMAN HIT: AL042278.1, EVALUE 0.00e+00; SWISSPROT HIT: P52591, EVALUE 5.00e-08; NT HIT: gi11417834, EVALUE 0.00e+00
cagctggcagtgggatgaggctggccccctcctccgctttagccccggcaagcctcccgtggagctgtaggagctggagatggcatttcggttggtgcaggagctcgtccaggaggtctgggatgtctggttatatctgatttctgacctctgggcatggaggtctgtctgcagaggcccgggcccgggcacaaagggagagaggcctccattgtcccgcaggggccgaaatgcagacggtgcatccccggtgacctcggggacccttctctgatcaccaggattctcttggactctagggtccttgtcctgctcaggcatccctgccccgctctccttgagggccctcaacactatcttccctggacacaagtctggggaca

SEQ ID NO: 18765 - DNA, 231 bp, Homo sapiens
  MAP TO AC009892.1; EXPRESSED IN PLACENTA, SIGNAL =   2; EXPRESSED IN HEART, SIGNAL = 1.6; EXPRESSED IN BRAIN, SIGNAL = 2.4; EXPRESSED IN BT474, SIGNAL = 1.8; EXPRESSED IN HELA, SIGNAL = 2.8; EXPRESSED IN HBL100, SIGNAL = 2.1; EXPRESSED IN LUNG, SIGNAL = 3.2; EXPRESSED IN BONE MARROW, SIGNAL = 4.8; EXPRESSED IN ADULT LIVER, SIGNAL = 2.1; EXPRESSED IN FETAL LIVER, SIGNAL = 2.8; SWISSPROT HIT: P43631, EVALUE 3.00e-12; EST_HUMAN HIT: AU120192.1, EVALUE 2.00e-91; NT HIT: gi11425611, EVALUE 1.00e-127
cctccagtgtgtttctgatgtcagctacgacagatttgttctgtataaggagggagaacgtgacttcctccagctccctggcccacagccccaggctgggctctcccaggccaacttcaccctgggccctgtgagccgctcctacgggggccagtacagatgctccggtgcatacaacctctcctccgagtggtcggcccccagcgaccccctggacatcctgatcgcagg

SEQ ID NO: 18766 - DNA, 492 bp, Homo sapiens
  MAP TO AC011406.1; EXPRESSED IN ADULT LIVER, SIGNAL = 1.5; EXPRESSED IN PLACENTA, SIGNAL = 1.5; EXPRESSED IN BRAIN, SIGNAL = 1.9; EXPRESSED IN FETAL LIVER, SIGNAL = 1.8; EXPRESSED IN BT474, SIGNAL = 1.3; EXPRESSED IN HEART, SIGNAL = 1.6; EXPRESSED IN HELA, SIGNAL = 2.4; EXPRESSED IN HBL100, SIGNAL = 1.2; EXPRESSED IN LUNG, SIGNAL = 1.1; EXPRESSED IN BONE MARROW, SIGNAL = 1.6; EST_HUMAN HIT: AA044957.1, EVALUE 1.00e-127; SWISSPROT HIT: P16499, EVALUE 6.00e-84; NT HIT: gi11416765, EVALUE 0.00e+00
gttagcaatcttcttagagtgtgcgacatggcccacgatgcccatgtccaaagggaagacgatctcttggtcgggcatcaccaggcagtcctcgaggacagcatccttgtggacattgaaaagcctggtggccagctctgcgatgccattgcgggtccggtacatgaacaggctcatgcggtctgcctgcaggaggaagcacagcttcttcatgacattgaagatgcatttctctgtctgtaaattctcctgaaagtcccgcaggagatcaaagatgatttcgctctcctccatgctgctcggggagtggtagttgctgaagtccacggcagcctccttggccccaaggaggtcggagatgagcttggcccggtagtggaggttgtagtactgtttggcaaagccaatattcgagtccaggaacttctccacctcctctgctgtcacctcgcccatggctgggaatcccactggctactctgtagaaggact

SEQ ID NO: 18767 - DNA, 342 bp, Homo sapiens
  MAP TO AL109613.10; EXPRESSED IN LUNG, SIGNAL = 1.1; EXPRESSED IN ADULT LIVER, SIGNAL = 0.91; EXPRESSED IN PLACENTA, SIGNAL = 2.9; EXPRESSED IN BRAIN, SIGNAL = 0.97; EXPRESSED IN BT474, SIGNAL = 1.8; EXPRESSED IN HEART, SIGNAL = 0.92; EXPRESSED IN HELA, SIGNAL = 2.3; EXPRESSED IN HBL100, SIGNAL = 1.1; NT HIT: gi11426951, EVALUE 0.00e+00; SWISSPROT HIT: P11279, EVALUE 1.70e+00; EST_HUMAN HIT: Z42399.1, EVALUE 0.00e+00
cctgcagtccatgctcagtacgtgctgggcgatgaccttggggtcgttgttggtgaacagttcttttgcacgtttcaacattgctgtttccaggggcttattctcagggggaaggaactttgactcaaactcgttgggcctgaaggaggagacagtctccaggaggggcgtcacaaactcgcccttgtcccactgccccttctccatctgagctgccgcaggttcccaaggtctttccctgtcatcatcatcaaggatcaagtagttgacgccagagttccggggacctggcgcctcattctgcttggctgtgagcagttctgtgtggcttccctgggcaca

SEQ ID NO: 18768 - DNA, 189 bp, Homo sapiens
  MAP TO AC005048.2; EXPRESSED IN HBL100, SIGNAL = 1.6; EXPRESSED IN PLACENTA, SIGNAL = 3.8; EXPRESSED IN HELA, SIGNAL = 2.1; EXPRESSED IN HEART, SIGNAL = 2.1; EXPRESSED IN BRAIN, SIGNAL = 1.6; EXPRESSED IN BONE MARROW, SIGNAL = 1.6; EXPRESSED IN LUNG, SIGNAL = 1.5; EXPRESSED IN ADULT LIVER, SIGNAL = 1.4; EXPRESSED IN BT474, SIGNAL =   3; EXPRESSED IN FETAL LIVER, SIGNAL = 1.6; NT HIT: gi4504950, EVALUE 1.00e-04; EST_HUMAN HIT: H04589.1, EVALUE 7.00e-03; SWISSPROT HIT: P15800, EVALUE 7.00e-21
ctgagatggtcttgagcgggtccctgtagaagaggggtctgcagcggtcgcagtgctgcccctcagtgttgtgctggcagtcttcacacacgcccccgctgaggccaccgcttgccaggtacgtagtcatgtcaaagtgacagcggctggagtggctattacagctgcacgctgaaaggagaagacagt

SEQ ID NO: 18769 - DNA, 458 bp, Homo sapiens; identical to SEQ ID NO: 2024
  MAP TO AL031685.15; EXPRESSED IN PLACENTA, SIGNAL = 2.4; EXPRESSED IN BRAIN, SIGNAL = 1.8; EXPRESSED IN ADULT LIVER, SIGNAL = 1.4; EXPRESSED IN FETAL LIVER, SIGNAL = 2.2; EXPRESSED IN BT474, SIGNAL = 1.1; EXPRESSED IN HEART, SIGNAL = 1.9; EXPRESSED IN HELA, SIGNAL = 2.2; EXPRESSED IN HBL100, SIGNAL = 1.4; EXPRESSED IN LUNG, SIGNAL = 1.2; EXPRESSED IN BONE MARROW, SIGNAL = 1.7; SWISSPROT HIT: P23959, EVALUE 8.20e+00; NT HIT: X55448.1, EVALUE 1.00e-12; EST_HUMAN HIT: AI244247.1, EVALUE 0.00e+00

SEQ ID NO: 18770 - DNA, 394 bp, Homo sapiens
  MAP TO AC009704.2; EXPRESSED IN LUNG, SIGNAL =  19; EXPRESSED IN ADULT LIVER, SIGNAL = 8.8; EXPRESSED IN PLACENTA, SIGNAL =  18; EXPRESSED IN BRAIN, SIGNAL = 5.5; EXPRESSED IN BONE MARROW, SIGNAL = 9.3; EXPRESSED IN FETAL LIVER, SIGNAL = 4.1; EXPRESSED IN BT474, SIGNAL =  81; EXPRESSED IN HEART, SIGNAL =  12; EXPRESSED IN HELA, SIGNAL =  30; EXPRESSED IN HBL100, SIGNAL =  12; SWISSPROT HIT: P35544, EVALUE 5.00e-23; EST_HUMAN HIT: BE781848.1, EVALUE 1.00e-112; NT HIT: U02523.1, EVALUE 1.00e-128
atggtcgcccagatcaaggctcatgtagcctcactggagggcattgccccggaagatcaagtcgtgctcctggcaggtgcaccgctggaggatgaggccactctgggccagtgcggcgtggaggccttgactgccctggaagtagcaggccgcatgcttggaggtaaagtccatggttccctggcccgtgctggaaaagtgagaggtcagactcctaaggtggccaaacaggagaagaagaagaagaagaggaagaagaagacaggtcaggctacgcggcggatgcagtacaaccggcgctttgtcaatgtcgtgcccacctttagcaagaagaagggacccaatgccaactcttaagtcctttgtaattctagctttctctaataaaaaaaaa

SEQ ID NO: 18771 - DNA, 205 bp, Homo sapiens
  MAP TO AL034405.4; EXPRESSED IN HELA, SIGNAL = 1.4; EXPRESSED IN HEART, SIGNAL = 1.1; EXPRESSED IN BONE MARROW, SIGNAL =   1; EXPRESSED IN BRAIN, SIGNAL = 1.2; EXPRESSED IN ADULT LIVER, SIGNAL =   1; EXPRESSED IN FETAL LIVER, SIGNAL = 0.95; EXPRESSED IN PLACENTA, SIGNAL = 1.4; EST_HUMAN HIT: AI638036.1, EVALUE 3.00e-40; NT HIT: gi11420514, EVALUE 2.00e-40; SWISSPROT HIT: P22596, EVALUE 9.50e-01
gatctctatgacccagagtggtggtgttcccaccctcccagtttctgtgggggccaactctgctgtgaataacactgctgagtccaagatggatggctcccagtcaggtatcagtgccaatgtggaaaaaccaggtgctactgagactgttcccacacattggttccctcacttcctggaagaaaacaagattgtggtcagctaa

SEQ ID NO: 18772 - DNA, 141 bp, Homo sapiens
  MAP TO AC009954.1; EXPRESSED IN PLACENTA, SIGNAL =  10; EXPRESSED IN HBL100, SIGNAL = 5.1; EXPRESSED IN HELA, SIGNAL = 8.9; EXPRESSED IN HEART, SIGNAL = 4.3; EXPRESSED IN BRAIN, SIGNAL = 2.7; EXPRESSED IN BONE MARROW, SIGNAL = 2.4; EXPRESSED IN LUNG, SIGNAL = 4.7; EXPRESSED IN ADULT LIVER, SIGNAL = 3.6; EXPRESSED IN BT474, SIGNAL =  11; EXPRESSED IN FETAL LIVER, SIGNAL =   2; EST_HUMAN HIT: BE621845.1, EVALUE 7.00e-74; NT HIT: gi11419066, EVALUE 5.00e-74; SWISSPROT HIT: P20618, EVALUE 7.00e-21
ggtcactatgcagatccggagtgcgtccccagtgtacacatctctctcagccgcagaaatgaagacatctttcaccagccgcatggctctgtccaaggacagcggaacatgctccacattctgcatgttcttaaaaccaac

SEQ ID NO: 18773 - DNA, 477 bp, Homo sapiens
  MAP TO AC008037.3; EXPRESSED IN BT474, SIGNAL =  63; EXPRESSED IN ADULT LIVER, SIGNAL =  27; EXPRESSED IN FETAL LIVER, SIGNAL =  10; EXPRESSED IN HELA, SIGNAL =  66; EXPRESSED IN PLACENTA, SIGNAL =  35; EXPRESSED IN HBL100, SIGNAL =  41; EXPRESSED IN HEART, SIGNAL =  35; EXPRESSED IN BRAIN, SIGNAL = 8.8; EXPRESSED IN BONE MARROW, SIGNAL =  35; EXPRESSED IN LUNG, SIGNAL =  40; SWISSPROT HIT: P19944, EVALUE 6.00e-24; EST_HUMAN HIT: BF197967.1, EVALUE 2.00e-92; NT HIT: gi4506668, EVALUE 1.00e-92
atggcctccatctccgagctcgcctgcatctactcagccctcattctgcacgacaatgaggtgactgtcacagagtataagatcaaggccctcattaaagcagctggtgtaaatgttgaaccttttcggcctggcttgtttgcaaaggccccggccaatgtcaacattaggagcctcatctgcaatgtaggggctggaggacctgctccagcagctggtgctgcaccagcaggaggtgatccacccgcatcaacctccctaagtgctgggataataggcatgagccaccgtggtcagccaagaatgcgcatactctctccattcttcctccatgcgtacgcccatttctgccttggttgcccacctccactgctgctgctccagctgaggagaagaaaatggaagcaaagaaagaagaatttgaggactctgatgatgacatgggctttggtctttctgactaaacctcttttataa

SEQ ID NO: 18774 - DNA, 330 bp, Homo sapiens
  MAP TO AP000507.1; EXPRESSED IN BT474, SIGNAL = 2.4; EXPRESSED IN FETAL LIVER, SIGNAL = 2.7; EXPRESSED IN PLACENTA, SIGNAL = 4.4; EXPRESSED IN HBL100, SIGNAL = 6.3; EXPRESSED IN HELA, SIGNAL = 7.6; EXPRESSED IN HEART, SIGNAL = 2.6; EXPRESSED IN BRAIN, SIGNAL = 3.5; EXPRESSED IN BONE MARROW, SIGNAL = 3.3; EXPRESSED IN LUNG, SIGNAL =   4; EXPRESSED IN ADULT LIVER, SIGNAL = 1.9; NT HIT: AJ250804.1, EVALUE 0.00e+00; EST_HUMAN HIT: BE877225.1, EVALUE 0.00e+00; SWISSPROT HIT: Q30201, EVALUE 9.00e-16
cctctccagggtcaccctaggctcaccagagggcacagggtgagtgctgtgattcccgctgtgttccatgtagcaggtgaacctctgctcctctcctcggcaaatcctggtggccacccaggtctggtaggttccattcccatcaggcaggacatccccccactgctgggtgtcgtggctcaaagataccccatcctgacgccaggtcagtatgatattccggggatagaagctggaagccctgcatgtcacggtgatgttgccctctgaggcctcgctgcgggtgacattcaccatggggggcactggagaagaaagggcagagccagt

SEQ ID NO: 18775 - DNA, 190 bp, Homo sapiens
  MAP TO AL035665.22; EXPRESSED IN BT474, SIGNAL = 1.1; EXPRESSED IN ADULT LIVER, SIGNAL =   1; EXPRESSED IN FETAL LIVER, SIGNAL =   1; EXPRESSED IN HELA, SIGNAL = 0.99; EXPRESSED IN PLACENTA, SIGNAL = 8.1; EXPRESSED IN HBL100, SIGNAL =   1; EXPRESSED IN HEART, SIGNAL = 2.6; EXPRESSED IN BRAIN, SIGNAL = 1.2; EXPRESSED IN LUNG, SIGNAL = 3.4; NT HIT: U24429.1, EVALUE 1.50e+00; EST_HUMAN HIT: AA846225.1, EVALUE 1.00e-72; SWISSPROT HIT: P07287, EVALUE 1.30e+00
ttgaaaaatacttggagcaaaaactgctaactgtgcatccttgctgtatgctggcgctgatattaaatcaggaaatggcactgaacagccgctccgaacacagaaacaggggttgtcaacacagcaaccaaaagcaatctctaacgggcagaggtgaaagggacctggcacagggccaggaggggggctg

SEQ ID NO: 18776 - DNA, 279 bp, Homo sapiens
  MAP TO AP000553.1; EXPRESSED IN BRAIN, SIGNAL = 1.5; EXPRESSED IN BONE MARROW, SIGNAL = 1.9; EXPRESSED IN LUNG, SIGNAL = 1.5; EXPRESSED IN BT474, SIGNAL = 2.1; EXPRESSED IN FETAL LIVER, SIGNAL = 1.8; EXPRESSED IN ADULT LIVER, SIGNAL = 1.8; EXPRESSED IN HELA, SIGNAL = 4.4; EXPRESSED IN PLACENTA, SIGNAL = 2.2; EXPRESSED IN HBL100, SIGNAL = 4.7; EXPRESSED IN HEART, SIGNAL = 1.5; SWISSPROT HIT: P25653, EVALUE 1.20e+00; NT HIT: gi11545742, EVALUE 0.00e+00; EST_HUMAN HIT: BF315325.1, EVALUE 0.00e+00
gaggtgagtgcctttggggaagacggcgagggcgacgacctggacctatggacagtgcgctgctctggacagcactgggagcgtgaggctgctgtgcgcttccagcatgtgggcacctctgtgttcctgtcagtcacgggtgagcagtatggaagccccatccgtgggcagcatgaggtccacggcatgcccagtgccaacacgcacaatacgtggaaggccatggaaggcatcttcatcaagcctagtgtggagccctctgcaggtcacgatgaactc

SEQ ID NO: 18777 - DNA, 105 bp, Homo sapiens
  MAP TO AC010678.1; EXPRESSED IN PLACENTA, SIGNAL = 5.1; EXPRESSED IN HBL100, SIGNAL = 5.5; EXPRESSED IN HEART, SIGNAL = 3.3; EXPRESSED IN BONE MARROW, SIGNAL =   3; EXPRESSED IN BRAIN, SIGNAL = 2.5; EXPRESSED IN LUNG, SIGNAL = 2.8; EXPRESSED IN ADULT LIVER, SIGNAL =  10; EXPRESSED IN BT474, SIGNAL = 6.6; EXPRESSED IN FETAL LIVER, SIGNAL = 3.5; EXPRESSED IN HELA, SIGNAL = 7.8; NT HIT: M97764.1, EVALUE 6.00e-20; EST_HUMAN HIT: AI056770.1, EVALUE 8.00e-32; SWISSPROT HIT: P75497, EVALUE 8.00e-01
tatccagtgcattggcagcatcacaggaccagaagacggtgacccccctgaacccagctttcactatcttgtgtgtgtcttttatttctcgacctgccgatccac

SEQ ID NO: 18778 - DNA, 192 bp, Homo sapiens
  MAP TO AL096775.9; EXPRESSED IN BONE MARROW, SIGNAL = 3.4; EXPRESSED IN FETAL LIVER, SIGNAL = 3.4; EXPRESSED IN HELA, SIGNAL =   4; EXPRESSED IN HEART, SIGNAL =  29; EXPRESSED IN LUNG, SIGNAL = 3.2; EXPRESSED IN BRAIN, SIGNAL = 2.7; EXPRESSED IN BT474, SIGNAL = 2.5; EXPRESSED IN ADULT LIVER, SIGNAL = 3.9; EXPRESSED IN PLACENTA, SIGNAL = 4.1; EXPRESSED IN HBL100, SIGNAL = 2.3; SWISSPROT HIT: Q05713, EVALUE 1.00e-03; NT HIT: gi11427702, EVALUE 2.00e-98; EST_HUMAN HIT: T32631.1, EVALUE 2.00e-96
tcagattttgatctccgtccggaaggtctgctggacgtgttctgtatgcgggtgacgccgtgcccggatagtgaggctgccgtcctcccgcagagccgaggtcaccgacgtcgggtccacgtcctccggcagctggcacttgtgagcgaaggtgttcatgacggtgccgtcagccgccagctggggaagggg

SEQ ID NO: 18779 - DNA, 261 bp, Homo sapiens
  MAP TO AC009312.1; EXPRESSED IN HELA, SIGNAL = 1.1; EXPRESSED IN PLACENTA, SIGNAL = 1.1; EXPRESSED IN HBL100, SIGNAL = 1.4; EXPRESSED IN HEART, SIGNAL = 0.87; EXPRESSED IN BT474, SIGNAL = 1.2; EXPRESSED IN FETAL LIVER, SIGNAL = 1.1; EST_HUMAN HIT: BE745469.1, EVALUE 1.00e-115; NT HIT: gi5803099, EVALUE 2.00e-83; SWISSPROT HIT: P29228, EVALUE 2.40e+00
aaactcaaaatggagatgtatctgaagaaacaatgggaagtagaaaggttaaaaaatcaaaacaaaagcccatgaatgtgggcttatcagaaactcaaaatggaggcatgtctcaagaagcagtgggaaatataaaagttacaaagtctccccagaaatccactgtattaaccaatggagaagcagcaatgcagtcttccaattcagaatcaaaaaagaaaaagaagaaaaagagaaaaatggtgaatgatgctgagcctg

SEQ ID NO: 18780 - DNA, 427 bp, Homo sapiens
  MAP TO AC008116.8; EXPRESSED IN BT474, SIGNAL = 2.7; EXPRESSED IN FETAL LIVER, SIGNAL = 2.3; EXPRESSED IN HEART, SIGNAL = 2.4; EXPRESSED IN LUNG, SIGNAL = 3.3; EXPRESSED IN BRAIN, SIGNAL = 3.1; EXPRESSED IN ADULT LIVER, SIGNAL = 3.4; EXPRESSED IN PLACENTA, SIGNAL = 3.6; EXPRESSED IN HELA, SIGNAL = 4.2; EXPRESSED IN HBL100, SIGNAL = 2.8; EXPRESSED IN BONE MARROW, SIGNAL = 2.4; SWISSPROT HIT: Q93075, EVALUE 1.00e-85; EST_HUMAN HIT: BE697125.1, EVALUE 0.00e+00; NT HIT: gi11434837, EVALUE 0.00e+00
gcctccgcgtccttgtggaggacacgcatccagctccctgccaaagagccacctggagccaagcctagaggagggcttcattgacactcattgtcacctggacatgctctattccaagctatctttccaagggacctttacaaagttcagaaaaatttacagcagctccttccctaaggaatttcagggctgcatctctgacttctgtgatccccgcaccctgacagattgcctatgggaggagctgttgaaagaggatctggtctggggggcctttggctgtcaccctcattttgcacgttactacagtgagagtcaagaaagaaatcttttgcaagccttaaggcaccctaaggctgtggcatttggagaaatgggcttggattactcttacaagtgcaccacgcctgtcccagaacagcacaag

SEQ ID NO: 18781 - DNA, 140 bp, Homo sapiens
  MAP TO AC005488.2; EXPRESSED IN HEART, SIGNAL = 1.2; EXPRESSED IN PLACENTA, SIGNAL = 1.5; EXPRESSED IN BONE MARROW, SIGNAL = 1.3; EXPRESSED IN FETAL LIVER, SIGNAL = 1.4; EXPRESSED IN HELA, SIGNAL = 2.2; EXPRESSED IN HBL100, SIGNAL = 1.3; EXPRESSED IN BRAIN, SIGNAL = 1.4; EXPRESSED IN LUNG, SIGNAL = 1.6; EXPRESSED IN BT474, SIGNAL = 3.2; EXPRESSED IN ADULT LIVER, SIGNAL = 1.7; NT HIT: AB017007.1, EVALUE 1.00e-71; EST_HUMAN HIT: AA403077.1, EVALUE 2.00e-71; SWISSPROT HIT: P54278, EVALUE 1.00e-16
agaacctgctaaggccatcaaacctattgatcggaagtcagtccatcagatttgctctgggccggtggtactgagtctaagcactgcggtgaagaagatagtaggaaacagtctggatgctggtgccactaatattggta

SEQ ID NO: 18782 - DNA, 183 bp, Homo sapiens
  MAP TO AC008080.1; EXPRESSED IN BT474, SIGNAL =   1; EXPRESSED IN HEART, SIGNAL = 1.7; EXPRESSED IN PLACENTA, SIGNAL = 1.9; EXPRESSED IN ADULT LIVER, SIGNAL = 1.2; EXPRESSED IN FETAL LIVER, SIGNAL = 1.6; EXPRESSED IN HELA, SIGNAL = 1.2; EXPRESSED IN HBL100, SIGNAL = 1.2; EXPRESSED IN BRAIN, SIGNAL = 1.8; EXPRESSED IN LUNG, SIGNAL = 1.1; EXPRESSED IN BONE MARROW, SIGNAL = 1.6; SWISSPROT HIT: P15552, EVALUE 1.30e+00; EST_HUMAN HIT: AV682158.1, EVALUE 9.90e+00; NT HIT: AL163278.2, EVALUE 4.00e-04
ctggatgtcaagtcagggatgacagcttgcagcttctgctgatgtttgccctcggagaggagcccccaaaccctgctgtttgtgccgatgtcattcagtgtttgtggagtagcccaggggtctccaaccccgggaccatgtatcggtaccagtctgtggtctgtggcctgttaggaacagcag

SEQ ID NO: 18783 - DNA, 213 bp, Homo sapiens
  MAP TO AC008173.1; EXPRESSED IN BONE MARROW, SIGNAL = 1.8; EXPRESSED IN BT474, SIGNAL = 1.3; EXPRESSED IN HBL100, SIGNAL = 1.6; EXPRESSED IN HEART, SIGNAL = 2.8; EXPRESSED IN BRAIN, SIGNAL = 2.5; EXPRESSED IN LUNG, SIGNAL = 1.2; EXPRESSED IN ADULT LIVER, SIGNAL = 2.4; EXPRESSED IN FETAL LIVER, SIGNAL = 2.1; EXPRESSED IN PLACENTA, SIGNAL =   2; EXPRESSED IN HELA, SIGNAL = 2.4; NT HIT: L77570.1, EVALUE 4.30e-01; EST_HUMAN HIT: R09112.1, EVALUE 3.30e-02; SWISSPROT HIT: Q02792, EVALUE 1.10e+00
agaactaatgttggcaattaaagtaaacatgaataaaaccttcaagaagccctcaacatcccacttccaagtcaccaaacccactattccattagcaatgtgtgagattgtcagttgctctgcaactgtgttattgtcacctgtggtaacaacatatatggtcttgtcagtctttttcacgttagccattctagtacatatgtggaggcatca

SEQ ID NO: 18784 - DNA, 109 bp, Homo sapiens
  MAP TO AC007917.15; EXPRESSED IN HBL100, SIGNAL = 3.3; EXPRESSED IN HELA, SIGNAL = 8.5; EXPRESSED IN HEART, SIGNAL = 7.7; EXPRESSED IN PLACENTA, SIGNAL = 8.4; EXPRESSED IN BRAIN, SIGNAL = 6.5; EXPRESSED IN BONE MARROW, SIGNAL = 8.7; EXPRESSED IN LUNG, SIGNAL = 5.3; EXPRESSED IN BT474, SIGNAL = 3.7; EXPRESSED IN FETAL LIVER, SIGNAL = 8.3; EXPRESSED IN ADULT LIVER, SIGNAL = 6.9; NT HIT: gi11434722, EVALUE 5.00e-55; EST_HUMAN HIT: AA322377.1, EVALUE 1.00e-27; SWISSPROT HIT: P49619, EVALUE 1.00e-15
cttggtgatgctggaccgctggcatctggaagtcatccccagagaggaagtggaaaacggggaccaggtcccatacagcatcatgaacaactatttctccattggtgtg

SEQ ID NO: 18785 - DNA, 258 bp, Homo sapiens
  MAP TO AC008000.7; EXPRESSED IN PLACENTA, SIGNAL = 3.4; EXPRESSED IN HELA, SIGNAL = 2.1; EXPRESSED IN BT474, SIGNAL =   2; EXPRESSED IN HEART, SIGNAL = 2.5; EXPRESSED IN HBL100, SIGNAL =   2; EXPRESSED IN BRAIN, SIGNAL = 3.7; EXPRESSED IN LUNG, SIGNAL = 1.6; EXPRESSED IN BONE MARROW, SIGNAL = 2.4; EXPRESSED IN ADULT LIVER, SIGNAL =   3; EXPRESSED IN FETAL LIVER, SIGNAL = 2.8; NT HIT: L00620.1, EVALUE 0.00e+00; EST_HUMAN HIT: AI885833.1, EVALUE 2.00e-07; SWISSPROT HIT: Q01814, EVALUE 1.00e-28
gatgtgcgacggcccagggtggggcagaggatgaaggagaggcagaggcaggttggatcgagggggccgccattctcctctcagttatctgtgtggtcctggtcacggccttcaatgactggagcaaagagaaacagttccggggcctgcagagccgcatcgagcaggaacagaaatttaccgtggtccgggctggccaggtggtccagatccctgtggctgagatcgtggttggggacatagcccaggtcaaatatg

SEQ ID NO: 18786 - DNA, 165 bp, Homo sapiens
  MAP TO AC009473.2; EXPRESSED IN BRAIN, SIGNAL = 4.9; EXPRESSED IN LUNG, SIGNAL =   4; EXPRESSED IN HEART, SIGNAL = 3.6; EXPRESSED IN PLACENTA, SIGNAL = 6.9; EXPRESSED IN BONE MARROW, SIGNAL = 5.4; EXPRESSED IN ADULT LIVER, SIGNAL = 5.9; EXPRESSED IN BT474, SIGNAL = 3.6; EXPRESSED IN FETAL LIVER, SIGNAL = 2.5; EXPRESSED IN HELA, SIGNAL = 4.1; EXPRESSED IN HBL100, SIGNAL = 3.6; EST_HUMAN HIT: N95649.1, EVALUE 1.00e-29; SWISSPROT HIT: Q24248, EVALUE 3.80e+00; NT HIT: AL163246.2, EVALUE 4.00e-32
catagcaggaatgacctttactccagttcccatcaagtttcttatctccacctgagaccactcaccctggacttcattgtccatatcaccatcagcattttggtcaaagccattcaacaagtctctaggaagttccagactttactacgtcttctagtcttcttc

SEQ ID NO: 18787 - DNA, 119 bp, Homo sapiens
  MAP TO AC010170.3; EXPRESSED IN PLACENTA, SIGNAL = 2.2; EXPRESSED IN HEART, SIGNAL = 2.8; EXPRESSED IN HBL100, SIGNAL = 1.9; EXPRESSED IN HELA, SIGNAL = 2.6; EXPRESSED IN BRAIN, SIGNAL = 2.5; EXPRESSED IN BONE MARROW, SIGNAL = 2.2; EXPRESSED IN LUNG, SIGNAL =   2; EXPRESSED IN ADULT LIVER, SIGNAL = 2.2; EXPRESSED IN BT474, SIGNAL = 1.5; EXPRESSED IN FETAL LIVER, SIGNAL = 3.2; EST_HUMAN HIT: AA630196.1, EVALUE 1.50e+00; SWISSPROT HIT: Q02817, EVALUE 1.00e+00; NT HIT: AF240786.1, EVALUE 4.10e+00
gaacacttggaggcaggacagtagaaagacagggacactcctgtgtgactgttgggaagagcaaactcatagggaagcaaggaggcacttgccagctgggacctgctggtgtcatcatc

SEQ ID NO: 18788 - DNA, 112 bp, Homo sapiens
  MAP TO AL008582.11; EXPRESSED IN FETAL LIVER, SIGNAL = 1.4; EXPRESSED IN PLACENTA, SIGNAL = 1.3; EXPRESSED IN HEART, SIGNAL = 1.5; EXPRESSED IN HELA, SIGNAL = 1.7; EXPRESSED IN BRAIN, SIGNAL = 1.3; EXPRESSED IN BONE MARROW, SIGNAL = 1.1; EXPRESSED IN LUNG, SIGNAL = 1.3; EXPRESSED IN ADULT LIVER, SIGNAL = 1.8; NT HIT: U04811.1, EVALUE 3.80e+00; SWISSPROT HIT: P44470, EVALUE 9.10e+00; EST_HUMAN HIT: AU119257.1, EVALUE 5.60e+00
aaaaatgatggacaaccagaatgagattttctgctctatcagctcaggctctaattttgactgcaagaagcttatggagcagaggattaaagcactggtgctggcttgtctt

SEQ ID NO: 18789 - DNA, 276 bp, Homo sapiens
  MAP TO AC010726.2; EXPRESSED IN PLACENTA, SIGNAL = 1.1; EXPRESSED IN BRAIN, SIGNAL = 1.1; EXPRESSED IN LUNG, SIGNAL = 1.6; EXPRESSED IN HEART, SIGNAL = 0.84; EXPRESSED IN BONE MARROW, SIGNAL =   1; EXPRESSED IN ADULT LIVER, SIGNAL =   2; EXPRESSED IN FETAL LIVER, SIGNAL = 1.2; EXPRESSED IN HELA, SIGNAL = 1.8; EST_HUMAN HIT: AU140604.1, EVALUE 6.00e-64; NT HIT: L41825.1, EVALUE 2.00e-77; SWISSPROT HIT: P10267, EVALUE 1.00e-16
ctgctgcataaaattgttcttactgggcttatgtgccttttcctccactcattcgacctctcacctggatggatgctcctgcagaaatccatactaactatagtgtgtggatgcctggagccacagatgaccattgcctcactcaaccaggagaataagacactgcatttaatgttactatgggttataaataccctcctctttgcctcagacatgcacctggttgtgtctatccagaaactcaagtggaggctgcttatcttccaaagatatgag

SEQ ID NO: 18790 - DNA, 349 bp, Homo sapiens
  MAP TO AL021707.2; EXPRESSED IN HELA, SIGNAL = 1.5; EXPRESSED IN PLACENTA, SIGNAL = 1.2; EXPRESSED IN HEART, SIGNAL = 1.3; EXPRESSED IN HBL100, SIGNAL = 1.7; EXPRESSED IN BRAIN, SIGNAL = 1.4; EXPRESSED IN BONE MARROW, SIGNAL = 2.3; EXPRESSED IN LUNG, SIGNAL =   2; EXPRESSED IN ADULT LIVER, SIGNAL = 0.92; EXPRESSED IN BT474, SIGNAL = 1.6; EXPRESSED IN FETAL LIVER, SIGNAL = 1.3; NT HIT: gi11418127, EVALUE 0.00e+00; SWISSPROT HIT: O00178, EVALUE 1.00e-64; EST_HUMAN HIT: AW510699.1, EVALUE 0.00e+00
ggtagcagtggtgggcaacgtggatgctggcaaaagcacgcttctgggggtcctgacacatggggagctggacaatggccgaggctttgcccgccagaaactcttccgccacaaacatgaaattgaatctggtcgcaccagcagtgtgggcaacgacattctgggctttgacagtgaaggcaatgtagtgaacaagcctgacagccacggcggcagcctggagtggaccaagatctgtgagaagtccacgaaagtcattaccttcatcgacttggctggtcatgagaagtacctgaaaaccactgtcttcggcatgacaggccatctgcctgacttctgcatgctcatg

SEQ ID NO: 18791 - DNA, 115 bp, Homo sapiens
  MAP TO AC010891.1; EXPRESSED IN BT474, SIGNAL = 4.4; EXPRESSED IN FETAL LIVER, SIGNAL =  13; EXPRESSED IN HELA, SIGNAL =  10; EXPRESSED IN PLACENTA, SIGNAL =  10; EXPRESSED IN HBL100, SIGNAL =   7; EXPRESSED IN HEART, SIGNAL = 9.9; EXPRESSED IN BRAIN, SIGNAL =  10; EXPRESSED IN BONE MARROW, SIGNAL = 7.5; EXPRESSED IN LUNG, SIGNAL = 7.9; EXPRESSED IN ADULT LIVER, SIGNAL = 9.4; NT HIT: AF000991.1, EVALUE 8.50e-01
gagaaacctgacaacggagatggcccaaagcattcctgaggttgagactcttaatatcccacagtggatttttgccagcagcctttttcatgataccaacctggctctgcctgta

SEQ ID NO: 18792 - DNA, 145 bp, Homo sapiens
  MAP TO AC011079.1; EXPRESSED IN BRAIN, SIGNAL = 5.8; EXPRESSED IN BONE MARROW, SIGNAL = 5.2; EXPRESSED IN LUNG, SIGNAL =   5; EXPRESSED IN ADULT LIVER, SIGNAL = 8.9; EXPRESSED IN BT474, SIGNAL = 3.5; EXPRESSED IN FETAL LIVER, SIGNAL = 3.7; EXPRESSED IN HELA, SIGNAL = 5.6; EXPRESSED IN HEART, SIGNAL = 5.5; EXPRESSED IN PLACENTA, SIGNAL = 7.1; EXPRESSED IN HBL100, SIGNAL = 4.2; EST_HUMAN HIT: AA077260.1, EVALUE 7.00e-34; NT HIT: AL163227.2, EVALUE 7.00e-39; SWISSPROT HIT: P57059, EVALUE 1.40e+00
ggatgtgagacatggagtcaaaggagagctttaagatttgactgccctgctggatttcagacttgcatggggcttgtagcccctttgttttggccaatttctcccatttgtagtggctgtatttacccaatgcctgtactcccat

SEQ ID NO: 18793 - DNA, 370 bp, Homo sapiens
  MAP TO AL022398.1; EXPRESSED IN ADULT LIVER, SIGNAL = 1.2; EXPRESSED IN BT474, SIGNAL = 1.2; EXPRESSED IN FETAL LIVER, SIGNAL =   1; EXPRESSED IN HELA, SIGNAL = 0.98; EXPRESSED IN PLACENTA, SIGNAL = 1.5; EXPRESSED IN HEART, SIGNAL = 1.2; EXPRESSED IN BRAIN, SIGNAL =   1; EXPRESSED IN BONE MARROW, SIGNAL = 0.99; EST_HUMAN HIT: BF515218.1, EVALUE 1.00e-113; NT HIT: gi5453699, EVALUE 1.00e-113; SWISSPROT HIT: O14896, EVALUE 9.00e-37
ctgggttaatgatcgagccctggggctgagggatgtcacacacttgatatatcttcactgggttcatgggcacctccttggtgccatcatacatcaggttgaattctctgctcttattgagagcacagcgcagctgggccttccatttagctgggtcagggtcatccaccccttcctggtacttccctgtctctacagcccaggcctgagaacaagaaaccacagtgagtcctatcattgcccagagccactgcaaagcatgtgcttaccctttctcatagacacaaacacacacacacacacacacacacacacacacacacacacacaacttttgcatgactgccccatcatcccaaccccgatttac

SEQ ID NO: 18794 - DNA, 440 bp, Homo sapiens
  MAP TO AL021686.4; EXPRESSED IN BT474, SIGNAL = 1.9; EXPRESSED IN HELA, SIGNAL = 4.8; EXPRESSED IN PLACENTA, SIGNAL = 6.8; EXPRESSED IN HBL100, SIGNAL = 3.3; EXPRESSED IN LUNG, SIGNAL = 5.6; EXPRESSED IN BRAIN, SIGNAL = 5.4; EXPRESSED IN HEART, SIGNAL = 6.1; EXPRESSED IN BONE MARROW, SIGNAL = 6.4; EXPRESSED IN ADULT LIVER, SIGNAL = 5.7; EXPRESSED IN FETAL LIVER, SIGNAL = 6.8; EST_HUMAN HIT: BF214513.1, EVALUE 1.60e+00; NT HIT: X76731.1, EVALUE 1.10e+00; SWISSPROT HIT: P31568, EVALUE 4.40e-02
acacttgggatcattcaaggtaaccaccggaaccgctcgcatgcgacctcctggaaaggttgagccacgctgtcttcctcggtgccctcaccacggtcctggaaaggttgagccacgctgtcttcctcggtgccctcaccaccgtcctggaaaggttgagccacgctgtcttcctcggtgccctcaccacggtcctggaaaggttgagccacgctgtcttcctcggtgccctcaccacggtcctggaaacgttaagccacgctgtcttcctcggtgccctcaccaccgttctctgtaaaggtgctcagatgctttccttggggcagatacggggcctggcttgctctcccagagatgcccaggtgtgcagggcctcttcctcctcccctcactctctcctctgccttggtcgtggtccctgcttggttccctggttctgg

SEQ ID NO: 18795 - DNA, 157 bp, Homo sapiens
  MAP TO AC010898.1; EXPRESSED IN PLACENTA, SIGNAL = 1.8; EXPRESSED IN HBL100, SIGNAL = 1.1; EXPRESSED IN HEART, SIGNAL = 1.4; EXPRESSED IN LUNG, SIGNAL = 0.99; EXPRESSED IN BRAIN, SIGNAL = 1.9; EXPRESSED IN BONE MARROW, SIGNAL = 1.2; EXPRESSED IN FETAL LIVER, SIGNAL = 1.3; EXPRESSED IN ADULT LIVER, SIGNAL = 1.1; EXPRESSED IN BT474, SIGNAL = 1.1; EXPRESSED IN HELA, SIGNAL = 1.5; SWISSPROT HIT: P15619, EVALUE 2.90e+00; EST_HUMAN HIT: AW119123.1, EVALUE 3.00e-17
tgtccacctcataggtgatgtaactcctttctctggaatgggccgtgcacaaaggaaggatagtgacatattgcaaggccaggcccacaggcaaggatactcttttggcagagccttgcccaaaggagggcattttgacataactctggacctatca

SEQ ID NO: 18796 - DNA, 441 bp, Homo sapiens
  MAP TO AC011297.1; EXPRESSED IN LUNG, SIGNAL = 1.5; EXPRESSED IN BRAIN, SIGNAL = 2.7; EXPRESSED IN BONE MARROW, SIGNAL = 2.7; EXPRESSED IN FETAL LIVER, SIGNAL = 3.4; EXPRESSED IN ADULT LIVER, SIGNAL = 2.4; EXPRESSED IN BT474, SIGNAL =   2; EXPRESSED IN HELA, SIGNAL = 2.2; EXPRESSED IN HBL100, SIGNAL = 1.8; EXPRESSED IN PLACENTA, SIGNAL = 3.2; EXPRESSED IN HEART, SIGNAL =   3; EST_HUMAN HIT: AI921858.1, EVALUE 2.80e-01; NT HIT: M55419.1, EVALUE 1.00e-123; SWISSPROT HIT: Q99218, EVALUE 4.00e-24
tactcttcctatggttacgagcccatgggtggatggctgcaccaccaaatcatccccgtggtgtcccaacagcaccccctgactcacaccctgcagtctcatcaccacatcccagtggtgccagctcagcagcccagggtccgccagcaagcactgatgcctgttcctggccagcaatccatgactccaacccaacaccatcagccaaacctccctctgcctgcccagcagcccttccagccccagcctgttcagccacagcctcaccagcccatgcagccccagccacctgtgcaacccatgcagcccctgctgccacagccacctctgcctccaatgttccccctgcggcccctgccccccatacttcctgatctgcatctggaagcttggccagcaacagacaagaccaagcaggaggaagtggtgagtacaccttga

SEQ ID NO: 18797 - DNA, 159 bp, Homo sapiens
  MAP TO AL035660.11; EXPRESSED IN HBL100, SIGNAL = 2.4; EXPRESSED IN HELA, SIGNAL = 4.6; EXPRESSED IN PLACENTA, SIGNAL = 4.4; EXPRESSED IN LUNG, SIGNAL = 3.7; EXPRESSED IN BRAIN, SIGNAL = 5.2; EXPRESSED IN BONE MARROW, SIGNAL =   4; EXPRESSED IN FETAL LIVER, SIGNAL = 2.4; EXPRESSED IN ADULT LIVER, SIGNAL =   5; EXPRESSED IN HEART, SIGNAL = 4.4; EXPRESSED IN BT474, SIGNAL = 2.2; NT HIT: AL163303.2, EVALUE 1.00e-37; EST_HUMAN HIT: BE390947.1, EVALUE 4.00e-38; SWISSPROT HIT: Q23256, EVALUE 2.90e+00
ccttgggcagctctgtccctgtggctttgcagggtacagcccccctccaggcttctttcatgggctggcattgtctgtggcttctcaaggtgcacattgcaagctgtcagtggatctaccattctggggtctgcaggatggtggccctcttctcacagc

SEQ ID NO: 18798 - DNA, 262 bp, Homo sapiens
  MAP TO AL109624.1; EXPRESSED IN BT474, SIGNAL = 6.9; EXPRESSED IN HBL100, SIGNAL = 3.4; EXPRESSED IN HELA, SIGNAL = 5.6; EXPRESSED IN HEART, SIGNAL =  19; EXPRESSED IN PLACENTA, SIGNAL = 5.6; EXPRESSED IN LUNG, SIGNAL = 2.9; EXPRESSED IN BRAIN, SIGNAL = 6.7; EXPRESSED IN BONE MARROW, SIGNAL = 3.6; EXPRESSED IN ADULT LIVER, SIGNAL =  10; EXPRESSED IN FETAL LIVER, SIGNAL =   6; EST_HUMAN HIT: BE394616.1, EVALUE 2.00e-05; NT HIT: AL163207.2, EVALUE 6.00e-13
acttccctgctttagaagtcttcctcatgagtactgtgagagtgctgctgtaacaaaataccatagcccagggggtgcttatcaacaacagaagtttatttcccgcagttctggagactgggaaggtcaagatcaaggcgccagcaggtgggtgtctggggtgtgcctgcctcctggttcacagatggctgtctttttactgagtgctcacatggcagaagaaggtgagagagttttctgggatcccttataaaggtgctat

SEQ ID NO: 18799 - DNA, 220 bp, Homo sapiens
  MAP TO AL035698.12; EXPRESSED IN FETAL LIVER, SIGNAL = 1.7; EXPRESSED IN ADULT LIVER, SIGNAL =   1; EXPRESSED IN BT474, SIGNAL = 1.1; EXPRESSED IN HELA, SIGNAL = 1.1; EXPRESSED IN HEART, SIGNAL = 1.2; EXPRESSED IN PLACENTA, SIGNAL = 1.2; EXPRESSED IN BONE MARROW, SIGNAL = 1.4; EXPRESSED IN BRAIN, SIGNAL = 1.5; SWISSPROT HIT: Q13255, EVALUE 4.00e-38; NT HIT: L76631.1, EVALUE 1.00e-121
gcaatgaaagcttagaagaaaactatgtccaggacagtaagatggggtttgtcatcaatgccatctatgccatggcacatgggctgcagaacatgcaccatgccctctgccctggccacgtgggcctctgcgatgccatgaagcccatcgacggcagcaagctgctggacttcctcatcaagtcctcattcattggagtatctggagaggaggtgtggtt

SEQ ID NO: 18800 - DNA, 186 bp, Homo sapiens
  MAP TO AL109799.4; EXPRESSED IN BONE MARROW, SIGNAL = 2.5; EXPRESSED IN LUNG, SIGNAL =   2; EXPRESSED IN FETAL LIVER, SIGNAL = 2.4; EXPRESSED IN ADULT LIVER, SIGNAL = 2.8; EXPRESSED IN BT474, SIGNAL = 2.5; EXPRESSED IN HBL100, SIGNAL = 5.4; EXPRESSED IN HELA, SIGNAL = 2.9; EXPRESSED IN HEART, SIGNAL = 2.6; EXPRESSED IN BRAIN, SIGNAL = 5.2; EXPRESSED IN PLACENTA, SIGNAL = 2.8; NT HIT: gi11420245, EVALUE 2.00e-77; EST_HUMAN HIT: BF034740.1, EVALUE 3.00e-77
ctgagaagcacagcagcaagaactcagagagagctcagaagtcagagcccagggaggggatgaagctccctaaggccaggactgcctactctggtggagcagaggacctagagagggacctgaagaaagagaaacccaagcatgagcacaagtcctcaagcaggagggaggcaagagaagaaaaga

SEQ ID NO: 18801 - DNA, 139 bp, Homo sapiens
  MAP TO AL049593.4; EXPRESSED IN FETAL LIVER, SIGNAL = 6.7; EXPRESSED IN BT474, SIGNAL = 3.3; EXPRESSED IN HBL100, SIGNAL = 4.3; EXPRESSED IN HELA, SIGNAL = 5.6; EXPRESSED IN HEART, SIGNAL = 5.4; EXPRESSED IN PLACENTA, SIGNAL =   6; EXPRESSED IN BONE MARROW, SIGNAL = 6.2; EXPRESSED IN LUNG, SIGNAL =   4; EXPRESSED IN ADULT LIVER, SIGNAL =   6; EXPRESSED IN BRAIN, SIGNAL = 6.1; NT HIT: AF195953.1, EVALUE 8.00e-05; EST_HUMAN HIT: AW874690.1, EVALUE 2.00e-09; SWISSPROT HIT: P27773, EVALUE 3.00e+00
agggagcctgctttgctctttttgcccttctgccatgtgaggacacagcaaaaaggtatcatcttggatgcaggagatgagccctcaccagacgccaaatcttctggtgccatggtcttggaattcccagcctccagaa

SEQ ID NO: 18802 - DNA, 178 bp, Homo sapiens
  MAP TO AL117343.1; EXPRESSED IN FETAL LIVER, SIGNAL = 6.7; EXPRESSED IN ADULT LIVER, SIGNAL = 6.2; EXPRESSED IN BT474, SIGNAL = 3.4; EXPRESSED IN HBL100, SIGNAL = 4.7; EXPRESSED IN HELA, SIGNAL = 7.3; EXPRESSED IN HEART, SIGNAL = 5.9; EXPRESSED IN PLACENTA, SIGNAL = 6.5; EXPRESSED IN LUNG, SIGNAL = 4.7; EXPRESSED IN BRAIN, SIGNAL = 6.9; EXPRESSED IN BONE MARROW, SIGNAL = 5.7; SWISSPROT HIT: P32805, EVALUE 3.30e-01; EST_HUMAN HIT: BE695397.1, EVALUE 2.00e-84; NT HIT: gi8923056, EVALUE 4.00e-81
acgggccgtgctgccagactgggtttgggggactgcaggaggggcttcgggctcgtaggtgtgctggatgagctccgagacctggagcctgcttccgctttgggttctgctttggtattcttttctggtgttcccaaaccaaagcggttctctggaagacctgggtgcagtttaggca

SEQ ID NO: 18803 - DNA, 262 bp, Homo sapiens
  MAP TO AL049648.6; EXPRESSED IN PLACENTA, SIGNAL = 2.8; EXPRESSED IN BONE MARROW, SIGNAL = 2.8; EXPRESSED IN LUNG, SIGNAL = 2.6; EXPRESSED IN BRAIN, SIGNAL = 3.4; EXPRESSED IN FETAL LIVER, SIGNAL = 3.6; EXPRESSED IN ADULT LIVER, SIGNAL = 1.7; EXPRESSED IN BT474, SIGNAL =   2; EXPRESSED IN HBL100, SIGNAL = 2.4; EXPRESSED IN HELA, SIGNAL = 2.5; EXPRESSED IN HEART, SIGNAL = 2.8; NT HIT: AE002247.2, EVALUE 5.40e-01; EST_HUMAN HIT: BF000581.1, EVALUE 3.70e+00; SWISSPROT HIT: O06795, EVALUE 8.10e-01
accacagcctccttccccgtgccctccctctgggattgctgcttgctctgactcatctccaaatagttggcttcttggtttccctgctctgctgcacaggccactatgctgttcctcaaacatgccagacatagtccctcatcagaggttcccacttgaggaagttcctacctcatcagaaggtcctacttcatcagaagttcttatgtcatcagaagttcctatctcatcagaaggtgctaccttatcagaattccctacc

SEQ ID NO: 18804 - DNA, 218 bp, Homo sapiens
  MAP TO AL049698.2; EXPRESSED IN ADULT LIVER, SIGNAL = 1.6; EXPRESSED IN HBL100, SIGNAL =   1; EXPRESSED IN HELA, SIGNAL = 1.4; EXPRESSED IN HEART, SIGNAL = 0.9; EXPRESSED IN PLACENTA, SIGNAL = 1.8; EXPRESSED IN BRAIN, SIGNAL = 0.92; EXPRESSED IN LUNG, SIGNAL = 2.6; EXPRESSED IN BT474, SIGNAL =   2; NT HIT: AB011399.1, EVALUE 1.00e-120; EST_HUMAN HIT: BF701766.1, EVALUE 7.70e-01; SWISSPROT HIT: P55196, EVALUE 9.00e-37
atggatggagtggtcactgtgacgcccagaagtatggacgcagaaacctacgtggaaggccagcgcatctcagaaaccaccatgctgcagagtggcatgaaagtgcagtttggggcgtcccatgtatttaagtttgtggaccccagtcaggatcatgctcttgcaaaaagatctgtggatggaggcctgatggttaagggcccaagacataaacctgg

SEQ ID NO: 18805 - DNA, 139 bp, Homo sapiens
  MAP TO AL049821.6; EXPRESSED IN PLACENTA, SIGNAL = 6.8; EXPRESSED IN BONE MARROW, SIGNAL = 2.2; EXPRESSED IN BRAIN, SIGNAL = 2.3; EXPRESSED IN LUNG, SIGNAL = 3.8; EXPRESSED IN ADULT LIVER, SIGNAL = 5.7; EXPRESSED IN BT474, SIGNAL = 2.3; EXPRESSED IN FETAL LIVER, SIGNAL = 1.4; EXPRESSED IN HBL100, SIGNAL = 2.1; EXPRESSED IN HELA, SIGNAL = 4.8; EXPRESSED IN HEART, SIGNAL = 2.7; EST_HUMAN HIT: R24918.1, EVALUE 2.00e-30; SWISSPROT HIT: Q08318, EVALUE 1.70e+00; NT HIT: AF003528.1, EVALUE 4.00e-40
gttgtggctgtagccaggtcagccttggtacgtggaagtccatgttgctgagcccgtgcgtaacctccatccctgccaccacagccactttgttcatgggcctattgggcgatgacaatggtggctggggaaagaggct

SEQ ID NO: 18806 - DNA, 155 bp, Homo sapiens
  MAP TO AL121572.4; EXPRESSED IN BONE MARROW, SIGNAL = 1.2; EXPRESSED IN LUNG, SIGNAL = 2.1; EXPRESSED IN ADULT LIVER, SIGNAL = 2.6; EXPRESSED IN HELA, SIGNAL = 2.2; EXPRESSED IN PLACENTA, SIGNAL = 8.6; EXPRESSED IN HEART, SIGNAL = 1.3; EXPRESSED IN BRAIN, SIGNAL = 0.92; EST_HUMAN HIT: AU121481.1, EVALUE 1.00e-32; NT HIT: AB026898.1, EVALUE 8.00e-42; SWISSPROT HIT: P52490, EVALUE 6.60e+00
agccccagatgcagtccatggctaagatctaccacggacccctggaccggcctgctagcccatgctctgatgttgatgacattgaaggcacggcttccgaggaaatctcaactgcacgacccctactacaccccaatttagcgggaagcaattag

SEQ ID NO: 18807 - DNA, 99 bp, Homo sapiens
  MAP TO AL049756.16; EXPRESSED IN BRAIN, SIGNAL = 3.8; EXPRESSED IN BONE MARROW, SIGNAL = 3.3; EXPRESSED IN LUNG, SIGNAL = 1.2; EXPRESSED IN BT474, SIGNAL = 2.3; EXPRESSED IN FETAL LIVER, SIGNAL = 3.7; EXPRESSED IN ADULT LIVER, SIGNAL = 1.9; EXPRESSED IN HELA, SIGNAL = 1.6; EXPRESSED IN PLACENTA, SIGNAL = 2.2; EXPRESSED IN HBL100, SIGNAL = 2.2; EXPRESSED IN HEART, SIGNAL =   2; EST_HUMAN HIT: AI272176.1, EVALUE 4.80e+00; NT HIT: AE003964.1, EVALUE 4.50e-02; SWISSPROT HIT: Q00328, EVALUE 5.30e+00
cccagcaagtcacccgggaacctggccaactgcctgcggggcctgctgcccagcttcagatgcctgggaggcagccactgagccatgagaagatgcttc

SEQ ID NO: 18808 - DNA, 85 bp, Homo sapiens
  MAP TO AP000122.1; EXPRESSED IN ADULT LIVER, SIGNAL = 1.7; EXPRESSED IN PLACENTA, SIGNAL = 3.1; EXPRESSED IN HBL100, SIGNAL = 4.1; EXPRESSED IN HELA, SIGNAL = 1.7; EXPRESSED IN BONE MARROW, SIGNAL = 1.7; EXPRESSED IN BT474, SIGNAL = 1.5; EXPRESSED IN FETAL LIVER, SIGNAL = 2.3; EXPRESSED IN HEART, SIGNAL = 2.2; EXPRESSED IN BRAIN, SIGNAL =   2; EXPRESSED IN LUNG, SIGNAL = 2.4; EST_HUMAN HIT: BE895008.1, EVALUE 1.00e-40; SWISSPROT HIT: P53805, EVALUE 3.00e-10; NT HIT: U85266.2, EVALUE 7.00e-41
agtttattctgactcgtttgaagctcttaaaatactgaaaggtgatgtccttgtcatacgtcctaaagagggactcaaatttggc

SEQ ID NO: 18809 - DNA, 143 bp, Homo sapiens
  MAP TO AP000181.1; EXPRESSED IN PLACENTA, SIGNAL = 1.4; EXPRESSED IN HBL100, SIGNAL = 0.92; EXPRESSED IN HEART, SIGNAL =   1; EXPRESSED IN BRAIN, SIGNAL = 1.1; EXPRESSED IN FETAL LIVER, SIGNAL = 1.5; EXPRESSED IN ADULT LIVER, SIGNAL =   1; EXPRESSED IN HELA, SIGNAL =  28; EST_HUMAN HIT: AV732718.1, EVALUE 5.00e-75; NT HIT: gi4507334, EVALUE 3.00e-75; SWISSPROT HIT: Q62910, EVALUE 1.00e-21
ctttgacttgtgactgccctgcagcaaagtggctacagacgaagcaaaggctggttgtatggaagagcattcggattgcaactgctcccttatttccagttgcacctcccattccagtcttcacagtatcaactgcaacatcc

SEQ ID NO: 18810 - DNA, 139 bp, Homo sapiens
  MAP TO NM_007104.1; EXPRESSED IN ADULT LIVER, SIGNAL =  11; EXPRESSED IN PLACENTA, SIGNAL =  13; EXPRESSED IN HBL100, SIGNAL = 7.3; EXPRESSED IN HELA, SIGNAL =  12; EXPRESSED IN BONE MARROW, SIGNAL =  11; EXPRESSED IN BT474, SIGNAL = 5.4; EXPRESSED IN FETAL LIVER, SIGNAL =  13; EXPRESSED IN HEART, SIGNAL =  13; EXPRESSED IN BRAIN, SIGNAL =  11; EXPRESSED IN LUNG, SIGNAL =   9; NT HIT: U07775.1, EVALUE 2.00e-02; EST_HUMAN HIT: BE299286.1, EVALUE 2.00e-02
atcctcataggcctccaggaagggggccaaattcagggccaggaccagggccagtggcttggtgaggcataggctttgctgtatgggccctgtggggagctctggggagttcttattcccctggctcatggccaccatc

SEQ ID NO: 18811 - DNA, 255 bp, Homo sapiens
  MAP TO NM_006994.1; EXPRESSED IN HELA, SIGNAL = 4.6; EXPRESSED IN BONE MARROW, SIGNAL = 3.2; EXPRESSED IN LUNG, SIGNAL =  12; EXPRESSED IN BRAIN, SIGNAL = 2.1; EXPRESSED IN BT474, SIGNAL = 3.2; EXPRESSED IN PLACENTA, SIGNAL = 3.2; EXPRESSED IN HEART, SIGNAL = 2.6; EXPRESSED IN HBL100, SIGNAL = 2.8; EXPRESSED IN ADULT LIVER, SIGNAL = 3.8; EXPRESSED IN FETAL LIVER, SIGNAL = 2.1; NT HIT: U90552.1, EVALUE 0.00e+00; SWISSPROT HIT: P18892, EVALUE 7.00e-15; EST_HUMAN HIT: BE767964.1, EVALUE 0.00e+00
ggattctggactatggggctgactgatgggaataagtatcggactctaactgagcccagaaccaacctgaaacttcctaagccccctaagaaagtgggggtcttcctggactatgagactggagatatctcattctacaatgctgtggatggatcgcatattcatactttcctggacgtctccttctctgaggctctatatcctgttttcagaattttgaccttggagcccacggccctgactatttgtccagcg

SEQ ID NO: 18812 - DNA, 307 bp, Homo sapiens
  MAP TO Z92542.2; EXPRESSED IN FETAL LIVER, SIGNAL = 1.8; EXPRESSED IN ADULT LIVER, SIGNAL = 1.4; EXPRESSED IN PLACENTA, SIGNAL = 1.3; EXPRESSED IN HELA, SIGNAL = 1.2; EXPRESSED IN BONE MARROW, SIGNAL = 1.3; EXPRESSED IN BRAIN, SIGNAL = 1.6; EXPRESSED IN BT474, SIGNAL = 1.5; EXPRESSED IN HEART, SIGNAL = 1.1; EXPRESSED IN HBL100, SIGNAL = 1.4; EXPRESSED IN LUNG, SIGNAL = 1.1; EST_HUMAN HIT: AI884388.1, EVALUE 7.60e-01; SWISSPROT HIT: O15537, EVALUE 3.00e-23; NT HIT: gi11419961, EVALUE 0.00e+00
aaaaaaaaaaaattatctacccagcactgcagttacaattgctttgcgaaatatagccctgtccatctcggtggtgtgtgagggggtcccctacggcccgctctgtgccagtcaccccctggcaggcgccgagctgaggcaggcatcaggcacacttgctgacgcactccagcagctccatccggatggcaatgcggacgtgccagcccagcgggatgaggcggatgaagcgggagatgatggggggccgcagcaggttctgaaccgtggaggtgcggtccgagttgccatagaagacctagagaga

SEQ ID NO: 18813 - DNA, 1118 bp, Homo sapiens
  MAP TO AC007721.7; EXPRESSED IN HEART, SIGNAL = 1.7; EXPRESSED IN LUNG, SIGNAL = 1.3; EXPRESSED IN BRAIN, SIGNAL = 2.4; EXPRESSED IN FETAL LIVER, SIGNAL = 2.1; EXPRESSED IN ADULT LIVER, SIGNAL = 2.1; EXPRESSED IN PLACENTA, SIGNAL = 2.1; EXPRESSED IN HELA, SIGNAL = 1.9; EXPRESSED IN BONE MARROW, SIGNAL =   2; EXPRESSED IN BT474, SIGNAL = 1.3; EXPRESSED IN HBL100, SIGNAL = 1.5; SWISSPROT HIT: P02461, EVALUE 1.00e-17
ccttcctctgtgtccagatcctggacgttggttccttttttaatggagaacacgcatgtgattccaaatggaaaaaggcccgacagcccagccctggccacttgcccctcctggaggcagccagtgtggagatgccagtgtgcctggggcgtggcctcctagagggagtcagtgtggagatgccggtgtgcctggggcgtggcctcctggagggaaccagtgtggagatgtcggtgtgcctggggtgtggcctcctggagggagtcagtgtggagatgcccgtgtgcctggggcatggcctcctggagggaaccagtgtggagatgtcagtgtgcctggggtgtggcctcctggagggagtcagtgtggagatgcccgtgtgcctggggcatggcctcctggagggaaccagtgtggagatgtcagtgtgcctggggcgtggcctcctggagggagtcagtgtggagatgcccgtgtgcctggggcatggcctcctggagggaaccagcgtggagatgccggtgtgcctggggcgtggcctcctagagggagtcagtgtggagatgcccgtgtgcctggggcgtggcctcctggagggaaccagtgtggagatgcccgtgtgcctggggcgtggcctcctagagggagtcagtgtggagatgcccgtgtgcctggggcgtggcctcctggagggaaccagtgtggagatgcccgtgtgcctggggcgtggcctcccggagggagtcagtgtggagatgcccgtgtgcctggggcgtggcctactagagggagtcagtgtggagatgcccgtgtgcctggggcgtggcctcctggagggaaccagtgcggagatgtcggtgtgcctggggcgtggcctcccggagggagtcagtgtggagatgtcggtgtgcctggggcgtggcctcctggagggagccagtgcggagatgcccgtgtgcctggggcggggcctcctggagggaaccagcgtggagatgcccatgtgcctggggcgtggcctcctagagggagtcagtgtggagatgcccgtgtgcctggggcgtggcctcctggagggaaccagtgtggagatgccatgtgcctggggcgtggcctcc

SEQ ID NO: 18814 - DNA, 698 bp, Homo sapiens
  MAP TO AC006509.15; EXPRESSED IN HBL100, SIGNAL = 4.5; EXPRESSED IN HELA, SIGNAL = 8.4; EXPRESSED IN HEART, SIGNAL = 3.1; EXPRESSED IN LUNG, SIGNAL = 3.3; EXPRESSED IN BRAIN, SIGNAL = 3.8; EXPRESSED IN BT474, SIGNAL = 6.5; EXPRESSED IN FETAL LIVER, SIGNAL = 3.8; EXPRESSED IN ADULT LIVER, SIGNAL = 3.7; EXPRESSED IN PLACENTA, SIGNAL = 4.6; EXPRESSED IN BONE MARROW, SIGNAL = 3.9; EST_HUMAN HIT: BF027562.1, EVALUE 0.00e+00; SWISSPROT HIT: P52701, EVALUE 0.00e+00; NT HIT: gi11430746, EVALUE 0.00e+00
ctctacagcagactgccagtccttgtaatttttatcaaagttatagaacagtcgccgcatgcagtccttcaatgatacatccctccgttcttcagcatttatgagattagccaacttcttttcaatagttttggtccagtatcgtttacagcccttcttggtagatttcaactcgtattcttctggcaaattgcgagtggtgaaattctcaggaatttccagctggtaacggttcctaccaatcccccaatagactatggtcctacagccaattctgttgcgctgtttctctaggtattccaggaggctctgttcattttctcttatgtcagcaagagcttggtcataatcagagtcaaagcctgctttgggagtaataagtccagtctttcgagccttttcatggtcaaaggctgtatcccatcggttcaattctacagtcaaatcaggaaaacgaccttcaggattttttgtctgcagagagatgacctgcttaaggattttagacttaaaaccatcagcaacttcttccatgatccctataattttacacattactttgaatccttccagagcagaaagaaaatcaataatcttcttcttgctgtatgtagtttcttcatacattatagccctgctgtctgggtggttctgactcttcaggggagacccaacattatgaattttactgagtagcc

SEQ ID NO: 18815 - DNA, 438 bp, Homo sapiens
  MAP TO NM_006894.1; EXPRESSED IN LUNG, SIGNAL = 7.2; EXPRESSED IN HEART, SIGNAL =   2; NT HIT: gi11428377, EVALUE 0.00e+00; SWISSPROT HIT: Q99518, EVALUE 3.00e-63; EST_HUMAN HIT: AI452615.1, EVALUE 3.00e-69
agccgtaccccaaaaatatcaagagggttcaagattcctcagcaaatgatccttcagaatgtttttcttctgtatgtctcagatacattatgaaggaacctgtactaaatgatgatgtcccaagtcgtctactctgtggagccatcaaggtgaaatctacagtgaaagagctcacagaaacttctgccatctttgaggatggaacagtggaggagaacattgatgtcatcatttttgcaacaggatatagtttctcttttcccttccttgaagattcactcgttaaagtagagaataatatggtctcactgtataaatacatattccccgctcacctggacaagtcaaccctcgcgtgcattggtctcatccagcccctaggttccattttcccaactgctgaacttcaagctcgttgggtgacaagagttttcaaag

SEQ ID NO: 18816 - DNA, 304 bp, Homo sapiens
  MAP TO Z82188.2; EXPRESSED IN HBL100, SIGNAL = 8.6; EXPRESSED IN HELA, SIGNAL = 0.9; EXPRESSED IN PLACENTA, SIGNAL = 1.1; EXPRESSED IN HEART, SIGNAL = 0.91; EXPRESSED IN BRAIN, SIGNAL =   3; EXPRESSED IN BONE MARROW, SIGNAL = 3.6; EXPRESSED IN BT474, SIGNAL = 2.1; EXPRESSED IN FETAL LIVER, SIGNAL = 1.3; EXPRESSED IN ADULT LIVER, SIGNAL = 1.9; NT HIT: gi6678126, EVALUE 4.00e-02; SWISSPROT HIT: P28955, EVALUE 3.20e-02; EST_HUMAN HIT: N24289.1, EVALUE 1.10e+00
aagtgaaaatccgaccccacccaacatttcctgctgcacttatgcagtatccaggcctcctcgccatggaaagcccaggcctgcggcctctctggcttcttctctcccttgccccactgcccctggctgtctggcagttcctggaagtctccaagctcttccctgcctcgagcccctgcccacgttctctctgccccaggcctcagcctgcggtcactttctcagggcagctttcccagcaccccgtgcatctaaagtggatgctgccctgcccatcactggatcaggtgctcatattcctaat

SEQ ID NO: 18817 - DNA, 246 bp, Homo sapiens
  MAP TO Z84718.2; EXPRESSED IN FETAL LIVER, SIGNAL = 0.98; EXPRESSED IN ADULT LIVER, SIGNAL = 1.3; EXPRESSED IN HBL100, SIGNAL = 2.1; EXPRESSED IN HELA, SIGNAL = 4.3; EXPRESSED IN HEART, SIGNAL = 0.99; EXPRESSED IN BRAIN, SIGNAL = 1.1; EXPRESSED IN BT474, SIGNAL = 2.8; EXPRESSED IN PLACENTA, SIGNAL = 1.3; EXPRESSED IN BONE MARROW, SIGNAL = 1.3; NT HIT: AF240786.1, EVALUE 0.00e+00; EST_HUMAN HIT: AW054828.1, EVALUE 9.00e-74; SWISSPROT HIT: P04722, EVALUE 2.70e+00
ggaagagggggaggtgagctttcccaggcacgtcaacctaaggaaggggtcgtggggcccccagcaggggctggaagagctgatcatttggaagaaagggttcattcttgtccacttcctggccctcagctgcagggtgtgctggcaggggttactccccttggggcagctgctcctgcatcagcggaggcacaaggaggtacctgctggtgttcacaaagaggagggggcaggtgccgcgagtga

SEQ ID NO: 18818 - DNA, 1670 bp, Homo sapiens
  MAP TO AP000406.1; EXPRESSED IN BONE MARROW, SIGNAL = 2.9; EXPRESSED IN BRAIN, SIGNAL = 1.3; EXPRESSED IN FETAL LIVER, SIGNAL = 1.3; EXPRESSED IN ADULT LIVER, SIGNAL = 2.6; EXPRESSED IN HBL100, SIGNAL = 3.6; EXPRESSED IN HELA, SIGNAL = 4.2; EXPRESSED IN HEART, SIGNAL = 1.2; EXPRESSED IN LUNG, SIGNAL = 4.3; EXPRESSED IN BT474, SIGNAL = 6.1; EXPRESSED IN PLACENTA, SIGNAL = 3.4; NT HIT: gi11545788, EVALUE 0.00e+00; EST_HUMAN HIT: AW752708.1, EVALUE 0.00e+00; SWISSPROT HIT: P54654, EVALUE 3.00e-01
aggctcaaagattccattcacctaagaaaaatccagaagaccagaccatgccccaaaataggacaatatatgttaccttgaaggtaaaccacaggagaaaccaagatatgaaacttaagctcacacatagtgagaatagtagcttatatatggctctcaacactctccaggctgtcagaaaagagatagaaactcaccaaggccaagaaatgcttgtgcgtggcacagaaggaatcaaagagtacataaaccttggaatgcccctcagttgtttccctgaaggtggccaggtggtcattacattttcccaaagtaaaagtaagcagaaggaagataaccacatatttggcaggcaggacaaagcatcgactgaatgtgtcaaattttacattcatgcaattggaattgggaagtgtaaaagaaggattgttaaatgtgggaagcttcacaaaaaggggcgcaaactctgtgtttatgctttcaaaggagaaaccatcaaggatgcactgtgcaaggatggcagatttctttcctttctggagaatgatgattggaaactcattgaaaacaatgacaccattttagaaagcacccagccagttgatgaattagaaggcagatactttcaggttgaggttgagaaaagaatggtccccagtgcagcagcttctcagaatcctgagtcagagaaaagaaacacctgtgtgttgagagaacaaatcgtggctcagtaccccagtttgaaaagagaaagtgaaaaaatcattgaaaacttcaagaaaaaaatgaaagtaaaaaatggggaaacattatttgaattgcatagaacaacgtttgggaaagtaacaaaaaattcttcttcgattaaagtagtgaaacttcttgtacgtctcagtgactcagttgggtacttattctgggacagtgcaactacgggttacgccacctgctttgtttttaaaggattgttcattttaacttgtcggcatgtaatagatagcattgtgggagacggaatagagccaagtaagtgggcaaccataattggtcaatgtgtaagggtgacatttggttatgaagagctaaaagacaaggaaacaaactacttttttgttgaaccttggtttgagatacataatgaagagcttgactatgctgtcctgaaactgaaggaaaatggacaacaagtacctatggaactatataatggaattactcctgtgccacttagtgggttgatacatattattggccatccatatggagaaaaaaagcagattgatgcttgtgctgtgatccctcagggtcagcgagcaaagaaatgtcaggaacgtgttcagtctaaaaaagcagaaagtccagagtatgtccatatgtatactcaaagaagtttccagaaaatagttcacaaccctgatgtgattacctatgacactgaatttttctttggggcttccggctcccctgtgtttgattcaaaaggttcattggtggccatgcatgctgctggctttgcttatacttaccaaaatgagactcgtagtatcattgagtttggctctaccatggaatccatcctccttgatattaagcaaagacataaaccatggtatgaagaagtatttgtaaatcagcaggatgtagaaatgatgagtgatgaggacttgtga

SEQ ID NO: 18819 - DNA, 847 bp, Homo sapiens
  MAP TO AC007666.12; EXPRESSED IN BT474, SIGNAL = 1.7; EXPRESSED IN HBL100, SIGNAL = 1.2; EXPRESSED IN BONE MARROW, SIGNAL = 1.5; EXPRESSED IN LUNG, SIGNAL = 0.99; EXPRESSED IN ADULT LIVER, SIGNAL = 2.1; EXPRESSED IN FETAL LIVER, SIGNAL = 2.5; EXPRESSED IN PLACENTA, SIGNAL = 1.9; EXPRESSED IN HEART, SIGNAL = 1.1; EXPRESSED IN BRAIN, SIGNAL = 2.3; NT HIT: U86076.1, EVALUE 1.20e-01; EST_HUMAN HIT: BE144286.1, EVALUE 1.00e-106; SWISSPROT HIT: Q15427, EVALUE 2.00e-04
cctccagttggaattaacagcctccgaggacccaggctaggcacaccagaggagaagcaaatgtgcggggggctgacacacctttctaacatgggcccacaccctggatccttgcagcttgggcagataagtggcccaagtcaggatggaagcatgtatgctccagctcagttccagccaggattcattcctccccggcatgggggggctccagcccggccaccagactttcctgaaagctcagaaattcctcccagccatatgtatcgatcgtacaagtacctgaatcgagtacactctgccgtctggaatgggaaccatggtgctacgaaccaaggacccttgggcccagatgagaagccccacctggggccaggaccctctcaccagcctcgcactctcggtcacgtgatggattcccgagtcatgagaccacctgtcccccccaaccagtggactgaacaatcaggcttcctacctcatggagttccttcctcagggtacatgcgaccgccctgcaagtctgccggacatcggttacagccacctccagtgccagcacccagttctttgtttggagcacctgcccaggctcttcggggggtgcagggaggggactccatgatggacagcccagagatgattgcgatgcagcagctctcctcccgcgtctgccccccaggtgtgccttaccacccccaccagcctgcacacccccgtttacctggcccttttccgcaggtagctcacccaatgtcagtcactgtgtcagcccccaagcctgccctgggcaaccctgggagggcaccggagaacagtgaagcacaagagcctgagaatgaccaag

SEQ ID NO: 18820 - DNA, 865 bp, Homo sapiens
  MAP TO AC011460.1; EXPRESSED IN PLACENTA, SIGNAL = 6.5; EXPRESSED IN BONE MARROW, SIGNAL = 4.9; EXPRESSED IN BRAIN, SIGNAL = 6.4; EXPRESSED IN BT474, SIGNAL =  11; EXPRESSED IN FETAL LIVER, SIGNAL = 6.5; EXPRESSED IN HBL100, SIGNAL = 4.6; EXPRESSED IN HELA, SIGNAL = 4.8; EXPRESSED IN HEART, SIGNAL =   2; EXPRESSED IN LUNG, SIGNAL = 2.5; EXPRESSED IN ADULT LIVER, SIGNAL = 2.5; NT HIT: gi11056003, EVALUE 1.00e-23; EST_HUMAN HIT: AI904640.1, EVALUE 0.00e+00; SWISSPROT HIT: P51523, EVALUE 3.00e-64
cagtatgagttcgatgatgtgcagtaagacgcctcttctcaatgaagccttttccacattcactacatatataaggtttttctcctgtatgagttttctgatgtgtagtgagactgaactttgtagagaaggccttcccacatacactgcatccatggggtttctctcctgtatgagttcgttgatgataaatgagccgacacttcttgatgaaggctttcccacattggctacatgtgtaaggtttccctcccatatgagttttctgatgtatattgagctgtgatttcttgaggaaggttttgtcacattcagtgcattcataatgtttcagttctgtatgagttctctgatggtccattagtctggattttctggagaaagctttcccacacatactgcatacatgaggtttttctccagtgtgaactctctgatgatcaataaactgagacaacttgaggaaggctttcccacattcactgcatacatgggcattctctatgttgtgagttctctgttgcttaatgaactgggacttattaataggttttgcaattgcaggaaacttcatttcagtataaaattgtttatggttagcatgaaaaagggatttcccatctctattaaactcagcagagttctttaggccagagctccttttctggttttcaaaacttaaatttgattttaaaggtttttcatgtaagtcaaacgtatcacaatcttgcttcagcaggaaatgacctttgttctgattaacaatatttccaaacatattctgttcatggcactgtttcacactcttctgaatactttgattttgcaagtgatgctgcagaggatcatcaattttcctgatttc

SEQ ID NO: 18821 - DNA, 122 bp, Homo sapiens
  MAP TO AC007026.3; EXPRESSED IN BT474, SIGNAL = 1.2; EXPRESSED IN ADULT LIVER, SIGNAL = 0.96; EXPRESSED IN FETAL LIVER, SIGNAL = 2.4; EXPRESSED IN HBL100, SIGNAL = 2.2; EXPRESSED IN HELA, SIGNAL = 1.2; EXPRESSED IN PLACENTA, SIGNAL = 1.5; EXPRESSED IN HEART, SIGNAL = 1.4; EXPRESSED IN BRAIN, SIGNAL = 2.8; EXPRESSED IN BONE MARROW, SIGNAL = 2.1; EST_HUMAN HIT: AI860275.1, EVALUE 1.10e+00; NT HIT: gi8923056, EVALUE 9.10e-01
tgatccattatgcattttattggtataaattcttcaaatgtcaagcatgagtaattcacaaaacagatgaattggatcctctcatttgtgaagctcagcacttcatctttgtcgtacctctg

SEQ ID NO: 18822 - DNA, 96 bp, Homo sapiens
  MAP TO AC007318.2; EXPRESSED IN BRAIN, SIGNAL = 1.6; EXPRESSED IN BONE MARROW, SIGNAL = 1.5; EXPRESSED IN LUNG, SIGNAL = 1.4; EXPRESSED IN BT474, SIGNAL =   3; EXPRESSED IN FETAL LIVER, SIGNAL = 1.7; EXPRESSED IN ADULT LIVER, SIGNAL = 1.2; EXPRESSED IN HELA, SIGNAL = 2.5; EXPRESSED IN PLACENTA, SIGNAL = 3.4; EXPRESSED IN HBL100, SIGNAL =   2; EXPRESSED IN HEART, SIGNAL = 1.8; NT HIT: gi4758987, EVALUE 4.00e-33; SWISSPROT HIT: Q05974, EVALUE 2.00e-07; EST_HUMAN HIT: AV703503.1, EVALUE 7.00e-33
gtctaactctatagttcttattttgaaatccacaccaattgtgctgatgtagctttctgtatatgtatcatcctgaagggggaaataattaacaat

SEQ ID NO: 18823 - DNA, 105 bp, Homo sapiens
  MAP TO AC007388.3; EXPRESSED IN BRAIN, SIGNAL = 2.9; EXPRESSED IN BONE MARROW, SIGNAL = 3.2; EXPRESSED IN LUNG, SIGNAL = 2.2; EXPRESSED IN BT474, SIGNAL = 1.5; EXPRESSED IN ADULT LIVER, SIGNAL = 4.1; EXPRESSED IN FETAL LIVER, SIGNAL = 2.6; EXPRESSED IN HELA, SIGNAL =   3; EXPRESSED IN PLACENTA, SIGNAL = 3.6; EXPRESSED IN HBL100, SIGNAL = 2.2; EXPRESSED IN HEART, SIGNAL = 3.1; NT HIT: U60822.1, EVALUE 2.00e-05; EST_HUMAN HIT: AV653405.1, EVALUE 6.00e-06
atggctaaaagggcccaagatatgtctcaggccactgctccagagggtacaagccataagcctaggcagcttccatgtggtattaagcctgcaggtgcagagagg

SEQ ID NO: 18824 - DNA, 197 bp, Homo sapiens
  MAP TO AC007378.2; EXPRESSED IN HEART, SIGNAL = 0.93; EXPRESSED IN LUNG, SIGNAL = 1.4; EXPRESSED IN PLACENTA, SIGNAL = 6.2; EXPRESSED IN HBL100, SIGNAL = 1.5; EXPRESSED IN HELA, SIGNAL = 2.7; SWISSPROT HIT: P02452, EVALUE 1.00e-10; EST_HUMAN HIT: BE311675.1, EVALUE 6.00e-16; NT HIT: gi11430555, EVALUE 6.00e-99
atacaaagccagcctgcgtatttaacaatgtggaatattatgatggagacatgtttcgaatggacaactgtcggttctgtcgatgccaagggggcgttgccatctgcttcaccgcccagtgtggtgagataaactgcgagaggtactacgtgcccgaaggagagtgctgcccagtgtgtgaaggtaagaaaaggtgc

SEQ ID NO: 18825 - DNA, 117 bp, Homo sapiens
  MAP TO AC007721.7; EXPRESSED IN HBL100, SIGNAL = 1.2; EXPRESSED IN HELA, SIGNAL = 4.3; EXPRESSED IN HEART, SIGNAL = 1.6; EXPRESSED IN LUNG, SIGNAL = 1.2; EXPRESSED IN BRAIN, SIGNAL = 1.1; EXPRESSED IN BT474, SIGNAL =   3; EXPRESSED IN FETAL LIVER, SIGNAL = 1.9; EXPRESSED IN ADULT LIVER, SIGNAL = 1.2; EXPRESSED IN PLACENTA, SIGNAL = 1.8; EXPRESSED IN BONE MARROW, SIGNAL =   1; SWISSPROT HIT: Q13619, EVALUE 9.00e-06; EST_HUMAN HIT: BF092698.1, EVALUE 1.00e-59; NT HIT: gi11140810, EVALUE 8.00e-60
atggttcagagtaaaaccattgatggaatcctactgctgatcgagcgcgagaggagcggcgaggccgtggaccggagcctgttgcggagcctcctgggcatgctgtctgacctgcag

SEQ ID NO: 18826 - DNA, 116 bp, Homo sapiens
  MAP TO AC009477.2; EXPRESSED IN FETAL LIVER, SIGNAL = 7.1; EXPRESSED IN ADULT LIVER, SIGNAL = 5.8; EXPRESSED IN HBL100, SIGNAL = 5.6; EXPRESSED IN HELA, SIGNAL = 8.6; EXPRESSED IN HEART, SIGNAL = 7.7; EXPRESSED IN BRAIN, SIGNAL = 5.6; EXPRESSED IN LUNG, SIGNAL = 5.6; EXPRESSED IN BONE MARROW, SIGNAL = 6.1; EXPRESSED IN BT474, SIGNAL = 4.6; EXPRESSED IN PLACENTA, SIGNAL = 8.5; NT HIT: AB029035.1, EVALUE 3.00e-59
cagctgtctgcgctgacgaagtggggagcgaggaggacctgtatgatgacctgcacagctccagccaccactacagccaccctggagggggtggggagcagctggctatcaatgag

SEQ ID NO: 18827 - DNA, 299 bp, Homo sapiens
  MAP TO AC009483.2; EXPRESSED IN HBL100, SIGNAL =   2; EXPRESSED IN LUNG, SIGNAL = 1.4; EXPRESSED IN BRAIN, SIGNAL = 1.3; EXPRESSED IN ADULT LIVER, SIGNAL = 1.1; EXPRESSED IN PLACENTA, SIGNAL = 2.2; EXPRESSED IN HEART, SIGNAL =   1; EXPRESSED IN HELA, SIGNAL = 2.1; EXPRESSED IN BONE MARROW, SIGNAL = 1.1; EXPRESSED IN BT474, SIGNAL = 2.7; EST_HUMAN HIT: AU135498.1, EVALUE 3.00e-93; SWISSPROT HIT: P54938, EVALUE 9.20e-02; NT HIT: U40763.1, EVALUE 2.00e-93
tttcttggtttctgtgtttttctttgtttctgtttttactttcttctgtctctgagctccgtgagtctctcctccttctacccctatctctacttcttgatcttcctggtggtgttcttctccctcggctttgtgactgtcctctcctcctgtattcctttcctctgtatctatggtgctccttgcttctgctgcaatctctgtcatggcttcttgatcacactcttctgcttctgtccctacttctgctttgctgttctgttctgctattataactgtgtttaccttcagttatatca

SEQ ID NO: 18828 - DNA, 126 bp, Homo sapiens
  MAP TO AC009486.2; EXPRESSED IN BONE MARROW, SIGNAL = 1.5; EXPRESSED IN FETAL LIVER, SIGNAL = 3.5; EXPRESSED IN HBL100, SIGNAL =   1; EXPRESSED IN HELA, SIGNAL = 1.1; EXPRESSED IN HEART, SIGNAL = 1.5; EXPRESSED IN BRAIN, SIGNAL = 1.4; EXPRESSED IN ADULT LIVER, SIGNAL = 1.2; EXPRESSED IN BT474, SIGNAL = 0.98; EXPRESSED IN PLACENTA, SIGNAL = 1.5; EST_HUMAN HIT: AW511195.1, EVALUE 2.80e-01; SWISSPROT HIT: P47843, EVALUE 5.20e+00; NT HIT: AF081359.1, EVALUE 1.10e+00
ctttgtttcctctatgaaaattcatccctttacccactataatctgactttcatctttaccattctgtccacaactaccttgtgatccacaatcatcctttggtccagtcctactgagatagttgc

SEQ ID NO: 18829 - DNA, 141 bp, Homo sapiens
  MAP TO AC009185.2; EXPRESSED IN BT474, SIGNAL =   2; EXPRESSED IN HBL100, SIGNAL = 1.2; EXPRESSED IN BONE MARROW, SIGNAL = 1.5; EXPRESSED IN LUNG, SIGNAL = 1.7; EXPRESSED IN FETAL LIVER, SIGNAL = 1.2; EXPRESSED IN ADULT LIVER, SIGNAL = 1.4; EXPRESSED IN PLACENTA, SIGNAL = 1.3; EXPRESSED IN HEART, SIGNAL = 1.2; EXPRESSED IN HELA, SIGNAL = 1.2; EXPRESSED IN BRAIN, SIGNAL =   2; NT HIT: AB032994.1, EVALUE 4.00e-74; SWISSPROT HIT: Q05053, EVALUE 1.00e+00; EST_HUMAN HIT: AW500505.1, EVALUE 7.00e-74
ctggtacatgatggaggaaggtggaggctcgatgcatggctgctggtcggggaggggaagctcttcaagcaggtccacgttggacagggcatcttccagggtgacgtgcgtggtcatggctgcagtttctgtattctgcac

SEQ ID NO: 18830 - DNA, 147 bp, Homo sapiens
  MAP TO AC009496.1; EXPRESSED IN FETAL LIVER, SIGNAL = 1.3; EXPRESSED IN ADULT LIVER, SIGNAL = 1.2; EXPRESSED IN HBL100, SIGNAL = 0.94; EXPRESSED IN HELA, SIGNAL = 0.9; EXPRESSED IN PLACENTA, SIGNAL = 1.1; EXPRESSED IN HEART, SIGNAL = 1.2; EXPRESSED IN BRAIN, SIGNAL =   1; EXPRESSED IN BONE MARROW, SIGNAL = 0.99; NT HIT: AL163283.2, EVALUE 1.30e+00; EST_HUMAN HIT: AL046704.1, EVALUE 4.00e-04; SWISSPROT HIT: P49034, EVALUE 1.30e+00
gaaccagactcagatgtgtcaaaactgctgggattattgaactgggaattgaaaacaactatgattaatatactagtggttctaatagaaaaggtgggcaacatggaagaacagatgcatgatgtaagcagagacatggaaacttta

SEQ ID NO: 18831 - DNA, 75 bp, Homo sapiens
  MAP TO AC009226.2; EXPRESSED IN FETAL LIVER, SIGNAL = 1.4; EXPRESSED IN HBL100, SIGNAL =   1; EXPRESSED IN HELA, SIGNAL = 1.1; EXPRESSED IN HEART, SIGNAL = 1.4; EXPRESSED IN LUNG, SIGNAL = 0.95; EXPRESSED IN BONE MARROW, SIGNAL = 0.97; EXPRESSED IN ADULT LIVER, SIGNAL = 0.98; EXPRESSED IN PLACENTA, SIGNAL = 1.7; EXPRESSED IN BRAIN, SIGNAL = 1.2; NT HIT: D63441.1, EVALUE 5.90e-01; EST_HUMAN HIT: AW601530.1, EVALUE 6.00e-01
atttggagacctgctcgcaactctggatggtgtgaatgttcaaagcacaagcttaaagaggtgaaggaagtggag

SEQ ID NO: 18832 - DNA, 154 bp, Homo sapiens
  MAP TO AC009303.1; EXPRESSED IN ADULT LIVER, SIGNAL = 1.2; EXPRESSED IN HEART, SIGNAL = 0.86; EXPRESSED IN BRAIN, SIGNAL = 1.2; EXPRESSED IN BONE MARROW, SIGNAL = 1.1; EST_HUMAN HIT: AV742624.1, EVALUE 5.20e-01; SWISSPROT HIT: P03186, EVALUE 3.00e+00; NT HIT: Z47807.1, EVALUE 3.50e-01
atggaagagaggctttataaggctcctgaggaggttctgttttcttctgagggaagaggcctgccattgataaatgtgcatcaggccaatgcagaagttggacaaggaatgggcaggaagagtgtggggagtgaagctggaggaccaagaccag

SEQ ID NO: 18833 - DNA, 134 bp, Homo sapiens
  MAP TO AC008123.9; EXPRESSED IN ADULT LIVER, SIGNAL = 1.6; EXPRESSED IN BT474, SIGNAL = 5.6; EXPRESSED IN FETAL LIVER, SIGNAL =   1; EXPRESSED IN HBL100, SIGNAL = 4.3; EXPRESSED IN PLACENTA, SIGNAL = 2.3; EXPRESSED IN HELA, SIGNAL = 4.6; EXPRESSED IN HEART, SIGNAL = 1.4; EXPRESSED IN BRAIN, SIGNAL = 1.2; EXPRESSED IN BONE MARROW, SIGNAL = 1.7; EXPRESSED IN LUNG, SIGNAL = 4.6; EST_HUMAN HIT: AA316633.1, EVALUE 1.00e-69; NT HIT: J04977.1, EVALUE 7.00e-70; SWISSPROT HIT: P13010, EVALUE 4.00e-19
aggcacagttgaatgctgttgatgctttgattgactccatgagcttggcaaagaaagatgagaagacagacacccttgaagacttgtttccaaccaccaaaatcccaaatcctcgatttcagagattatttcag

SEQ ID NO: 18834 - DNA, 126 bp, Homo sapiens
  MAP TO AC009487.1; EXPRESSED IN HELA, SIGNAL =   1; EXPRESSED IN HEART, SIGNAL = 0.88; EXPRESSED IN PLACENTA, SIGNAL = 1.2; EXPRESSED IN BONE MARROW, SIGNAL = 0.97; EXPRESSED IN BRAIN, SIGNAL = 1.1; EXPRESSED IN ADULT LIVER, SIGNAL =   1; EXPRESSED IN FETAL LIVER, SIGNAL =   1; NT HIT: AF111168.2, EVALUE 2.40e-01; EST_HUMAN HIT: AA203145.1, EVALUE 1.60e+00
taccacaaaaagagttacaaaaggaggtgagatggtggtggcagaaagcagggaaccaaaatcccagtgagggttagatttggatactctgaactttataatctcacagctgccaaatttcttcat

SEQ ID NO: 18835 - DNA, 194 bp, Homo sapiens
  MAP TO AC008280.2; EXPRESSED IN PLACENTA, SIGNAL = 1.2; EXPRESSED IN BONE MARROW, SIGNAL = 0.91; EXPRESSED IN BRAIN, SIGNAL =   1; EXPRESSED IN FETAL LIVER, SIGNAL = 1.1; EXPRESSED IN HEART, SIGNAL =   1; EXPRESSED IN HELA, SIGNAL = 0.91; EXPRESSED IN HBL100, SIGNAL = 1.2; EXPRESSED IN ADULT LIVER, SIGNAL = 0.99; EST_HUMAN HIT: AA484689.1, EVALUE 1.00e-05; SWISSPROT HIT: P11369, EVALUE 6.00e-14; NT HIT: L10641.1, EVALUE 5.00e-13
acagggaaatgcaaattaaaaccacaaggagataccgcctcacacctgttagaatggctgtgatgaaaaagataaacgatagtgttggcgagggtgtggagaaaagggaacattgcgcattgttggtgggagtgtacattagtataaccattatggaaaactgtatgtaggtttctcaagcaattaaaaataga

SEQ ID NO: 18836 - DNA, 79 bp, Homo sapiens
  MAP TO AC010134.1; EXPRESSED IN BRAIN, SIGNAL =   1; EXPRESSED IN BONE MARROW, SIGNAL = 0.97; EXPRESSED IN ADULT LIVER, SIGNAL = 0.94; EXPRESSED IN HEART, SIGNAL = 0.91; EST_HUMAN HIT: BE966691.2, EVALUE 9.40e-01; NT HIT: AF090444.1, EVALUE 6.30e-01
gagaaaatcatgggacagtcacactcagacaccgacaccacttctgctcacctcatcagcctaacttcaacggtggctg

SEQ ID NO: 18837 - DNA, 218 bp, Homo sapiens
  MAP TO AC009813.2; EXPRESSED IN BONE MARROW, SIGNAL = 7.8; EXPRESSED IN FETAL LIVER, SIGNAL =  29; EXPRESSED IN HBL100, SIGNAL = 6.1; EXPRESSED IN HELA, SIGNAL = 7.5; EXPRESSED IN HEART, SIGNAL = 8.3; EXPRESSED IN LUNG, SIGNAL =  11; EXPRESSED IN BRAIN, SIGNAL = 8.4; EXPRESSED IN BT474, SIGNAL = 3.1; EXPRESSED IN ADULT LIVER, SIGNAL =  10; EXPRESSED IN PLACENTA, SIGNAL = 9.1; NT HIT: AL163268.2, EVALUE 1.00e-13; EST_HUMAN HIT: AW972418.1, EVALUE 9.00e-16; SWISSPROT HIT: P16732, EVALUE 2.10e+00
ataatttacccaatctcgggtatgtctttatcagcagtgtgaaaacagactacacatcccaaatcttcattaatctagcagactccagccccttttctgtggctcagctcctctctcaaactaatgaaagcagaacccaggaaggcgagcattttggcaactacatcaacatggaatgtcacatgactcatagtgtaatcaatgtcagccacaaactc

SEQ ID NO: 18838 - DNA, 105 bp, Homo sapiens
  MAP TO AC009953.2; EXPRESSED IN BT474, SIGNAL = 1.8; EXPRESSED IN HBL100, SIGNAL = 2.4; EXPRESSED IN BONE MARROW, SIGNAL = 4.4; EXPRESSED IN LUNG, SIGNAL = 2.4; EXPRESSED IN ADULT LIVER, SIGNAL = 3.7; EXPRESSED IN FETAL LIVER, SIGNAL = 4.4; EXPRESSED IN PLACENTA, SIGNAL = 3.6; EXPRESSED IN HEART, SIGNAL = 3.8; EXPRESSED IN HELA, SIGNAL = 3.9; EXPRESSED IN BRAIN, SIGNAL = 4.2; NT HIT: AF155728.1, EVALUE 1.90e-01; EST_HUMAN HIT: N39521.1, EVALUE 1.50e-02
cagtccctcttcacacatatccacttcccctttgaccttctgtaacatgagggaaatgtaaaactcctcgccagaagccaaggccatgtccttgaacctcgcagc

SEQ ID NO: 18839 - DNA, 88 bp, Homo sapiens
  MAP TO AC010723.1; EXPRESSED IN BT474, SIGNAL = 1.9; EXPRESSED IN FETAL LIVER, SIGNAL = 1.3; EXPRESSED IN ADULT LIVER, SIGNAL = 2.2; EXPRESSED IN HBL100, SIGNAL = 1.9; EXPRESSED IN HELA, SIGNAL =   2; EXPRESSED IN PLACENTA, SIGNAL = 2.4; EXPRESSED IN HEART, SIGNAL = 1.6; EXPRESSED IN BRAIN, SIGNAL = 1.7; EXPRESSED IN BONE MARROW, SIGNAL = 1.8; EXPRESSED IN LUNG, SIGNAL = 1.3; EST_HUMAN HIT: AW937471.1, EVALUE 4.00e-30; NT HIT: AF223391.1, EVALUE 5.00e-20
tttgtgagttgagctcatttggatttccatttgtaagaccatctgtagcttgatggcctcaatcctggaggaaacaaatttgacaagg

SEQ ID NO: 18840 - DNA, 75 bp, Homo sapiens
  MAP TO AC010739.2; EXPRESSED IN FETAL LIVER, SIGNAL = 5.5; EXPRESSED IN ADULT LIVER, SIGNAL = 1.3; EXPRESSED IN HBL100, SIGNAL = 1.1; EXPRESSED IN PLACENTA, SIGNAL = 2.1; EXPRESSED IN HELA, SIGNAL = 1.5; EXPRESSED IN HEART, SIGNAL = 1.3; EXPRESSED IN BRAIN, SIGNAL = 3.2; EXPRESSED IN BONE MARROW, SIGNAL = 2.4; EST_HUMAN HIT: AA861200.1, EVALUE 2.40e+00; NT HIT: U84436.1, EVALUE 5.90e-01
actgctctggcagaagtgtgtgacgaatggtttgaaaaggggagactccaaactccacaggctagcgccgagcag

SEQ ID NO: 18841 - DNA, 346 bp, Homo sapiens
  MAP TO AC011376.1; EXPRESSED IN PLACENTA, SIGNAL = 1.7; EXPRESSED IN BRAIN, SIGNAL =   1; EXPRESSED IN BT474, SIGNAL = 1.1; EXPRESSED IN FETAL LIVER, SIGNAL = 0.91; EXPRESSED IN HBL100, SIGNAL = 1.8; EXPRESSED IN HELA, SIGNAL = 1.3; EXPRESSED IN HEART, SIGNAL = 0.86; EXPRESSED IN LUNG, SIGNAL = 1.9; EXPRESSED IN BONE MARROW, SIGNAL = 1.1; EST_HUMAN HIT: BE146523.1, EVALUE 1.00e-36; SWISSPROT HIT: Q9ZZY0, EVALUE 1.30e+00; NT HIT: Z99123.1, EVALUE 3.40e+00
tacctgataacagatggcacaaatatcattgtgtttctcaagctgctctttcgtagcaatgggtaacgatttaatcttattcacagcatccctgcggagaagaaagctcttccaccccagctgggcccgaagccacacgttatagtaggaatgaatgaagatgatcattgagcccatcactgtccattctccaaagatggtctctgagacgccataggccaccacacagagggccacaagaaactccagcaggcggtaagtgccattcacatagtagatgacatcatccatgttttccactggctcttttctgaattcctcaaccataaataagacataaataaaa

SEQ ID NO: 18842 - DNA, 78 bp, Homo sapiens
  MAP TO AC010978.1; EXPRESSED IN PLACENTA, SIGNAL = 2.8; EXPRESSED IN BONE MARROW, SIGNAL = 2.4; EXPRESSED IN BRAIN, SIGNAL = 2.5; EXPRESSED IN BT474, SIGNAL = 1.5; EXPRESSED IN FETAL LIVER, SIGNAL =   3; EXPRESSED IN HEART, SIGNAL = 2.8; EXPRESSED IN HELA, SIGNAL = 2.3; EXPRESSED IN HBL100, SIGNAL = 1.5; EXPRESSED IN LUNG, SIGNAL = 1.9; EXPRESSED IN ADULT LIVER, SIGNAL =   2; EST_HUMAN HIT: AA853977.1, EVALUE 9.20e-01; NT HIT: AB018283.2, EVALUE 5.20e-01
gttgaagtgaaggtaggcaggtaggttcttgctgaaaaccttgtagcaggacataccaaatccttttcctttgtgctt

SEQ ID NO: 18843 - DNA, 271 bp, Homo sapiens
  MAP TO AC011004.1; EXPRESSED IN ADULT LIVER, SIGNAL = 2.1; EXPRESSED IN BT474, SIGNAL = 1.1; EXPRESSED IN FETAL LIVER, SIGNAL = 1.6; EXPRESSED IN HBL100, SIGNAL = 1.2; EXPRESSED IN PLACENTA, SIGNAL =   2; EXPRESSED IN HELA, SIGNAL = 1.4; EXPRESSED IN HEART, SIGNAL = 1.6; EXPRESSED IN BRAIN, SIGNAL = 1.7; EXPRESSED IN BONE MARROW, SIGNAL = 1.8; EXPRESSED IN LUNG, SIGNAL = 1.1; SWISSPROT HIT: P22966, EVALUE 1.90e+00
tttctcggtgcaaactttggtgtgagccacacagctgctgcctgctaaatgggaatgtgcacaggactcgaggaatgaagcaatgttgcgtgacaggttcgtgtccaacccctgtgtgcaggctgggcaggggctgggtgcgggctgctgactcaccagctgcagtgaacaggacctgccttgggagacctttcctagtgttggggcagcgtatatcaggctctgtgaccgtcaccatggagatgtgattcttgttgccttttccttttgt

SEQ ID NO: 18844 - DNA, 184 bp, Homo sapiens
  MAP TO AC011406.1; EXPRESSED IN BRAIN, SIGNAL = 5.9; EXPRESSED IN BONE MARROW, SIGNAL =   5; EXPRESSED IN LUNG, SIGNAL = 3.4; EXPRESSED IN BT474, SIGNAL = 5.6; EXPRESSED IN ADULT LIVER, SIGNAL = 9.1; EXPRESSED IN FETAL LIVER, SIGNAL =  11; EXPRESSED IN HBL100, SIGNAL = 3.3; EXPRESSED IN HELA, SIGNAL = 5.5; EXPRESSED IN PLACENTA, SIGNAL = 6.2; EXPRESSED IN HEART, SIGNAL =  14; NT HIT: gi11416765, EVALUE 3.00e-79; EST_HUMAN HIT: AI221148.1, EVALUE 3.00e-79; SWISSPROT HIT: Q28263, EVALUE 5.00e-13
ctgacttggccgactgctgtttctgcttcttctcctcctgcaccttcatcttggcatcgtactcatcagcaagcgccttccactccttgcgattgttggtgatcccgtccaacattggggtgatctcctcgtggaaacgggagaattcctagaagagagagtatgtgcctctggtgcaagggcc

SEQ ID NO: 18845 - DNA, 253 bp, Homo sapiens
  MAP TO AC011073.1; EXPRESSED IN PLACENTA, SIGNAL = 7.2; EXPRESSED IN BRAIN, SIGNAL =   6; EXPRESSED IN BT474, SIGNAL =  10; EXPRESSED IN FETAL LIVER, SIGNAL = 3.7; EXPRESSED IN ADULT LIVER, SIGNAL = 2.7; EXPRESSED IN HEART, SIGNAL = 4.6; EXPRESSED IN HELA, SIGNAL =   7; EXPRESSED IN HBL100, SIGNAL = 8.2; EXPRESSED IN LUNG, SIGNAL = 3.7; EXPRESSED IN BONE MARROW, SIGNAL =   5; EST_HUMAN HIT: AL044177.1, EVALUE 2.40e+00
ctgcttgtgttaggggagctatcgaacacggataatgacataaacgagtcggtgttcatctggggaatctcagacaaagcagcccagaggaaaaccatctctgtcgatgaaggtttgtttcatttgcaacaggaaaagcagcagcaacagcagcagcagcagcgactggagcccgtgcacaggctgggaagaggtaaagggaggctgaggctgccgcatgtgagtagcattttgtgatttctttgcagctggg

SEQ ID NO: 18846 - DNA, 144 bp, Homo sapiens
  MAP TO AC011084.1; EXPRESSED IN ADULT LIVER, SIGNAL = 0.93; EXPRESSED IN BT474, SIGNAL = 1.1; EXPRESSED IN PLACENTA, SIGNAL = 1.6; EXPRESSED IN HBL100, SIGNAL = 1.2; EXPRESSED IN HELA, SIGNAL = 1.1; EXPRESSED IN HEART, SIGNAL = 2.7; EXPRESSED IN LUNG, SIGNAL = 1.7; SWISSPROT HIT: P17082, EVALUE 1.00e-15; NT HIT: gi11436134, EVALUE 4.00e-56; EST_HUMAN HIT: AA459547.1, EVALUE 4.00e-56
ttttgaagaaatctataagtttcaaagacagattctcagagtaaaggatcgtgatgagttcccaatgattttaattggtaataaagcagatctggatcatcaaagacaggtgagaaggaatttcactgttgggaaaccaattgt

SEQ ID NO: 18847 - DNA, 445 bp, Homo sapiens
  MAP TO AC011460.1; EXPRESSED IN BONE MARROW, SIGNAL = 3.8; EXPRESSED IN ADULT LIVER, SIGNAL = 1.2; EXPRESSED IN BT474, SIGNAL =   8; EXPRESSED IN FETAL LIVER, SIGNAL = 2.4; EXPRESSED IN PLACENTA, SIGNAL = 1.9; EXPRESSED IN HBL100, SIGNAL = 3.3; EXPRESSED IN HELA, SIGNAL = 3.9; EXPRESSED IN HEART, SIGNAL = 2.3; EXPRESSED IN BRAIN, SIGNAL = 3.8; SWISSPROT HIT: P51523, EVALUE 5.00e-54; NT HIT: gi11436146, EVALUE 3.00e-10; EST_HUMAN HIT: AL120377.1, EVALUE 2.00e-06
agtgagtattgaggaatgactttacactaaagccttttccacattcactgcagtgatacggtttctctcctgtgtgagttctctgatgtctactgagctcagatctctggatgaaggctttcccacattcattacacccatgcgatttttccccggtatggattttttgatgtaaaatgaggttaaacttaagggggaatgttttcccacactcatcacaaccatagggtttctcttctgtgtgagctctctgatggatcatgagctgtgacttattgctgaagcttttctgacatttgctgcatccatagggtttctctccagtatgagttctttgatggaaagtgagttttgacttatcactaaaacctttttgacatgtatgacactcaaagcatttctctcctgtgtgagttcgttgatgtttattaaggcatgacttatc

SEQ ID NO: 18848 - DNA, 91 bp, Homo sapiens
  MAP TO AC011482.1; EXPRESSED IN HELA, SIGNAL = 1.6; EXPRESSED IN PLACENTA, SIGNAL = 3.1; EXPRESSED IN HBL100, SIGNAL = 2.4; EXPRESSED IN HEART, SIGNAL =   2; EXPRESSED IN BRAIN, SIGNAL = 2.2; EXPRESSED IN BONE MARROW, SIGNAL = 2.6; EXPRESSED IN LUNG, SIGNAL = 3.4; EXPRESSED IN BT474, SIGNAL = 4.4; EXPRESSED IN FETAL LIVER, SIGNAL = 1.7; EXPRESSED IN ADULT LIVER, SIGNAL = 1.7; NT HIT: AF070651.1, EVALUE 2.00e-44; EST_HUMAN HIT: AW248211.1, EVALUE 7.00e-32; SWISSPROT HIT: Q03938, EVALUE 2.00e-10
catccctatataaattctgctgtgcagtgtccaggcaatgccactcctccagagagaattctacagtcacatccctaattgtcagtggtcc

SEQ ID NO: 18849 - DNA, 134 bp, Homo sapiens
  MAP TO AL109919.2; EXPRESSED IN ADULT LIVER, SIGNAL = 1.1; EXPRESSED IN FETAL LIVER, SIGNAL = 1.4; EXPRESSED IN PLACENTA, SIGNAL = 1.1; EXPRESSED IN HELA, SIGNAL =   1; EXPRESSED IN HBL100, SIGNAL =   1; EXPRESSED IN HEART, SIGNAL = 1.2; EXPRESSED IN LUNG, SIGNAL = 1.1; EXPRESSED IN BRAIN, SIGNAL = 3.7; SWISSPROT HIT: Q9S597, EVALUE 3.00e+00; NT HIT: M11844.1, EVALUE 2.60e-01
aggtagagtggccacagctgttctatcccctcctggctacctctcagattaccaagcaaaacccaaatgattctgaagcagtccaaatgcacaaccagatagttaacatccatttccttgttcaaatgccccat

SEQ ID NO: 18850 - DNA, 152 bp, Homo sapiens
  MAP TO AC010971.1; EXPRESSED IN PLACENTA, SIGNAL = 0.95; EXPRESSED IN HEART, SIGNAL = 1.1; EXPRESSED IN BRAIN, SIGNAL = 0.99; EXPRESSED IN BONE MARROW, SIGNAL = 0.98; EXPRESSED IN FETAL LIVER, SIGNAL = 1.2; NT HIT: AL163301.2, EVALUE 2.00e-08; EST_HUMAN HIT: AL040439.1, EVALUE 6.00e-09; SWISSPROT HIT: P08548, EVALUE 1.00e-03
acacctacaaaaacctacagctaacatcatacctaatggtgaaaagctgcatgttttcccctaagatcatcatcaaggaaaggatgccactatctctggtcttactcaacattgtacaagaattccaagtgaatgcaataaggcaaaaaaag

SEQ ID NO: 18851 - DNA, 171 bp, Homo sapiens
  MAP TO AC011002.1; EXPRESSED IN BONE MARROW, SIGNAL =   9; EXPRESSED IN BRAIN, SIGNAL =  12; EXPRESSED IN ADULT LIVER, SIGNAL = 5.5; EXPRESSED IN BT474, SIGNAL = 1.9; EXPRESSED IN FETAL LIVER, SIGNAL =  10; EXPRESSED IN PLACENTA, SIGNAL = 9.5; EXPRESSED IN HELA, SIGNAL = 7.8; EXPRESSED IN HBL100, SIGNAL = 4.5; EXPRESSED IN HEART, SIGNAL =   8; EXPRESSED IN LUNG, SIGNAL =  17; NT HIT: AJ131016.1, EVALUE 1.00e-03; EST_HUMAN HIT: AW418829.1, EVALUE 2.60e-02
ttagatcatgaggatggagccgtcatgaatggaatttgtaaggccccggaaagatccctcacaccttctaccctgtgaggtaatggcaaaatttggctgtatatgaattaggaagcaggtcttcattggacatagaatctgccatgtccttgatcttagatgtctcagcct

SEQ ID NO: 18852 - DNA, 170 bp, Homo sapiens
  MAP TO AC011079.1; EXPRESSED IN HEART, SIGNAL = 1.4; SWISSPROT HIT: O14967, EVALUE 1.00e-16; NT HIT: gi4758003, EVALUE 2.00e-61; EST_HUMAN HIT: AW268611.1, EVALUE 4.00e-47
ctttttcaagcatttcaccatcattttgctttttttcctcttccaggtccattggtttttccagggctgctttctcttccttttcttcttgctctagtactccttttgtttgtggtatacatatgtcggtttttttatactctgtatctttatgttttttctgtggtagt

SEQ ID NO: 18853 - DNA, 167 bp, Homo sapiens
  MAP TO AF188031.1; EXPRESSED IN PLACENTA, SIGNAL = 1.1; EXPRESSED IN HELA, SIGNAL = 1.6; EXPRESSED IN HEART, SIGNAL =   1; EXPRESSED IN BRAIN, SIGNAL = 1.6; EXPRESSED IN BONE MARROW, SIGNAL = 1.5; EXPRESSED IN FETAL LIVER, SIGNAL = 0.87; EXPRESSED IN ADULT LIVER, SIGNAL = 0.97; EXPRESSED IN BT474, SIGNAL = 0.99; EST_HUMAN HIT: T92118.1, EVALUE 2.00e-13; NT HIT: AB033768.1, EVALUE 5.00e-65; SWISSPROT HIT: O88806, EVALUE 6.00e-17
atggccagggcagtgcggaacttcctgaaggcacagcaggtgcaggcacccgtggagctctactcggactggctctctgtgggccatgtggacgagtttctgacctttgtgcctacctctgaccaaaaggtgcgtcccctccctccctgcctgagccacctctgccc

SEQ ID NO: 18854 - DNA, 235 bp, Homo sapiens
  MAP TO AL080245.13; EXPRESSED IN FETAL LIVER, SIGNAL = 3.4; EXPRESSED IN ADULT LIVER, SIGNAL = 2.3; EXPRESSED IN HELA, SIGNAL = 4.1; EXPRESSED IN BRAIN, SIGNAL = 4.2; EXPRESSED IN LUNG, SIGNAL = 2.4; EXPRESSED IN BONE MARROW, SIGNAL = 3.3; EXPRESSED IN BT474, SIGNAL = 1.9; EXPRESSED IN PLACENTA, SIGNAL = 3.6; EXPRESSED IN HEART, SIGNAL = 3.1; EXPRESSED IN HBL100, SIGNAL = 2.4; EST_HUMAN HIT: BF695073.1, EVALUE 2.10e-01; SWISSPROT HIT: P74892, EVALUE 5.40e+00
tgatattcctgattctcttcgtcagctgcaggggactgtccagaatgaatggacctctgtgtatatgacagttctgttcatgagcattcaggttgtttcttgccattttggtattataaataacagcacactgaacatccttgtgtacagacagttgtgcgcattttggaggcatggtttcctggcaggggaactgttaggtcaagggtgtgtccagtgttcaacatttcaatga

SEQ ID NO: 18855 - DNA, 349 bp, Homo sapiens
  MAP TO AP000365.1; EXPRESSED IN PLACENTA, SIGNAL = 1.1; EXPRESSED IN HEART, SIGNAL = 1.2; EXPRESSED IN BRAIN, SIGNAL = 1.1; EXPRESSED IN FETAL LIVER, SIGNAL = 0.97; EXPRESSED IN ADULT LIVER, SIGNAL =   1; SWISSPROT HIT: P50990, EVALUE 2.00e-07; EST_HUMAN HIT: AA069529.1, EVALUE 1.30e+00; NT HIT: gi11526285, EVALUE 0.00e+00
gctggaaataggcatcaatgccgtggtagacggcctgctctgcactccgcagcccctgggtggtggctcccctgagaaccacagtgagggcaggtgtgcctgtacattcccattcaaataccacagccaaaccatctcccagctcctgcctgtaaaccctctggcacttgcctggcctctggggagggagcagacgaggcagcagaggtgtgtccaacacctcactcaggtaaatgatctccatccaagacctagcttgaatcaccacgatgccatacttgtccgccagtgtgagggtctcctcgtcgacctcccccaacaccactgccacattaattcctgcagctgc

SEQ ID NO: 18856 - DNA, 76 bp, Homo sapiens
  MAP TO AL109654.13; EXPRESSED IN HBL100, SIGNAL = 1.4; EXPRESSED IN HELA, SIGNAL = 1.1; EXPRESSED IN HEART, SIGNAL = 2.4; EXPRESSED IN LUNG, SIGNAL = 1.2; EXPRESSED IN BRAIN, SIGNAL = 2.2; EXPRESSED IN BT474, SIGNAL =   1; EXPRESSED IN ADULT LIVER, SIGNAL = 1.9; EXPRESSED IN FETAL LIVER, SIGNAL = 1.3; EXPRESSED IN PLACENTA, SIGNAL = 1.9; EXPRESSED IN BONE MARROW, SIGNAL = 1.7; NT HIT: AL163283.2, EVALUE 8.00e-03; EST_HUMAN HIT: AW872379.1, EVALUE 1.00e-02
gaagataagagaatcctcatcagaaataaacaatgctggcatcctgattcccaacttgcagacttcagaactgtga

SEQ ID NO: 18857 - DNA, 102 bp, Homo sapiens
  MAP TO AL035653.12; EXPRESSED IN BRAIN, SIGNAL = 2.5; EXPRESSED IN BT474, SIGNAL = 1.2; EXPRESSED IN HBL100, SIGNAL = 1.8; EXPRESSED IN HELA, SIGNAL = 2.6; EXPRESSED IN LUNG, SIGNAL = 8.2; EXPRESSED IN BONE MARROW, SIGNAL = 2.3; EXPRESSED IN ADULT LIVER, SIGNAL = 2.7; EXPRESSED IN FETAL LIVER, SIGNAL = 2.9; EXPRESSED IN PLACENTA, SIGNAL = 3.2; EXPRESSED IN HEART, SIGNAL = 2.9; EST_HUMAN HIT: BF203817.1, EVALUE 3.20e-01; SWISSPROT HIT: P38252, EVALUE 5.30e+00; NT HIT: X61033.1, EVALUE 3.40e+00
ttgccaactgtgtctctcccttgctgaggggaatggctgctttccacttggttaggtactcataggatgtgatgccactttcctggatgactttactcaatc

SEQ ID NO: 18858 - DNA, 129 bp, Homo sapiens
  MAP TO AF153342.1; EXPRESSED IN PLACENTA, SIGNAL =   3; EXPRESSED IN BRAIN, SIGNAL = 2.3; EXPRESSED IN BT474, SIGNAL = 1.1; EXPRESSED IN FETAL LIVER, SIGNAL = 1.9; EXPRESSED IN HEART, SIGNAL = 2.7; EXPRESSED IN HELA, SIGNAL = 2.7; EXPRESSED IN HBL100, SIGNAL = 1.9; EXPRESSED IN LUNG, SIGNAL =   2; EXPRESSED IN BONE MARROW, SIGNAL = 2.4; EXPRESSED IN ADULT LIVER, SIGNAL = 2.1; EST_HUMAN HIT: AI590115.1, EVALUE 7.00e-33; NT HIT: U66059.1, EVALUE 2.00e-20; SWISSPROT HIT: Q99081, EVALUE 7.00e+00
atgattcaattacctcccaccaggtccctcccacaacacatgggaattcaaaatgagatctgggtggggatacagtcaaaccatatcaatgttgaaaaacgggaactacttagacacacacaggtagag

SEQ ID NO: 18859 - DNA, 305 bp, Homo sapiens
  MAP TO AL078604.10; EXPRESSED IN ADULT LIVER, SIGNAL = 2.6; EXPRESSED IN BT474, SIGNAL =   1; EXPRESSED IN FETAL LIVER, SIGNAL = 3.2; EXPRESSED IN PLACENTA, SIGNAL = 3.3; EXPRESSED IN HBL100, SIGNAL =  25; EXPRESSED IN HELA, SIGNAL = 2.4; EXPRESSED IN HEART, SIGNAL = 3.9; EXPRESSED IN BONE MARROW, SIGNAL = 3.4; EXPRESSED IN LUNG, SIGNAL = 2.1; EXPRESSED IN BRAIN, SIGNAL =   2; NT HIT: Y13614.1, EVALUE 7.40e-01; SWISSPROT HIT: P50061, EVALUE 1.90e+00; EST_HUMAN HIT: AI817915.1, EVALUE 1.10e+00
ctgttctttcagctttcagtggttcagtttttctccactgtttccaccaaaataccatcaacagtaaggaagaacaatgtggaccaccagaaggctggagtgttttctgaagctgctcctgcttggactttggttggaagtcgtgattgtctgagggttcatgctggcgctcccccagtgaacctagctcacctaccctctgctctggctctagtctctcttcccttcttctaagggaggctactgctgtgctcagtgcggagctgggttcaaggagagctggggctctgaaggagtcgtgggga

SEQ ID NO: 18860 - DNA, 94 bp, Homo sapiens
  MAP TO AL110503.1; EXPRESSED IN PLACENTA, SIGNAL = 1.3; EXPRESSED IN HEART, SIGNAL = 1.3; EXPRESSED IN BRAIN, SIGNAL = 1.7; EXPRESSED IN BONE MARROW, SIGNAL = 1.9; EXPRESSED IN LUNG, SIGNAL = 2.2; EXPRESSED IN BT474, SIGNAL = 0.96; EXPRESSED IN ADULT LIVER, SIGNAL = 1.6; EXPRESSED IN FETAL LIVER, SIGNAL = 1.3; EXPRESSED IN HBL100, SIGNAL = 1.3; EXPRESSED IN HELA, SIGNAL = 1.1; NT HIT: U07563.1, EVALUE 7.00e-04; EST_HUMAN HIT: AA700562.1, EVALUE 3.00e-06; SWISSPROT HIT: Q17848, EVALUE 5.40e+00
tcgataaagctactataaacatccatgtataggtctttgtgtgaacctgtgcaagttttcataccattgggtaaataccaaggagcatgactga

SEQ ID NO: 18861 - DNA, 166 bp, Homo sapiens
  MAP TO AF182108.1; EXPRESSED IN HELA, SIGNAL = 1.2; EXPRESSED IN PLACENTA, SIGNAL = 1.6; EXPRESSED IN HBL100, SIGNAL = 1.2; EXPRESSED IN HEART, SIGNAL = 1.4; EXPRESSED IN BRAIN, SIGNAL = 1.6; EXPRESSED IN BONE MARROW, SIGNAL = 1.7; EXPRESSED IN BT474, SIGNAL = 1.2; EXPRESSED IN FETAL LIVER, SIGNAL = 1.5; EXPRESSED IN ADULT LIVER, SIGNAL = 1.8; SWISSPROT HIT: O69635, EVALUE 2.20e+00; NT HIT: AL163210.2, EVALUE 4.00e-13; EST_HUMAN HIT: H30795.1, EVALUE 1.00e-19
agagctggcccctcctctcactccctcacttatgctctctctcttgttcctgatctcaccaggtgatgtgcttgttcccccttccccttccaccatgattgtaagcatcctgaggtcctcaccagaagcagatgctgaagccatgcttgcacagcctataacacca

SEQ ID NO: 18862 - DNA, 207 bp, Homo sapiens
  MAP TO AC011619.1; EXPRESSED IN ADULT LIVER, SIGNAL = 2.4; EXPRESSED IN BT474, SIGNAL = 1.7; EXPRESSED IN FETAL LIVER, SIGNAL = 4.4; EXPRESSED IN HELA, SIGNAL = 1.9; EXPRESSED IN PLACENTA, SIGNAL = 3.4; EXPRESSED IN HBL100, SIGNAL = 1.9; EXPRESSED IN HEART, SIGNAL = 2.6; EXPRESSED IN BONE MARROW, SIGNAL = 2.9; EXPRESSED IN BRAIN, SIGNAL = 2.7; EXPRESSED IN LUNG, SIGNAL = 1.5
cttcgttgtcttcatcttcctctttgtcttcttttcttcccccctcctttcccctcttcctccttcttcttcttgctcttcttctgttttcctcctccttccccctcctcccccctccctcctccttctcttcttcctccttctcctccttcttcttcctcttcttcatctcctccttctttttcttcttcgtctctttcttcttgt

SEQ ID NO: 18863 - DNA, 159 bp, Homo sapiens
  MAP TO AL096712.14; EXPRESSED IN LUNG, SIGNAL = 2.2; EXPRESSED IN ADULT LIVER, SIGNAL = 0.93; EXPRESSED IN BT474, SIGNAL = 1.9; EXPRESSED IN FETAL LIVER, SIGNAL = 1.5; EXPRESSED IN HELA, SIGNAL = 1.7; EXPRESSED IN PLACENTA, SIGNAL = 1.8; EXPRESSED IN HBL100, SIGNAL = 1.7; EXPRESSED IN HEART, SIGNAL = 0.98; EXPRESSED IN BONE MARROW, SIGNAL = 1.1; EXPRESSED IN BRAIN, SIGNAL = 1.4; SWISSPROT HIT: P47113, EVALUE 4.00e+00; EST_HUMAN HIT: AW864776.1, EVALUE 8.00e-27; NT HIT: AJ400877.1, EVALUE 7.80e-02
caaacactgagaggaggaagttgaccctgcagcggaagcgggaggaatattttggcttcattgaacagtattatgactctcgaaacgaggaacatcaccaggatacctacagacaggtacagtcaccacctgctgcctctttgcttaccagtcatatac

SEQ ID NO: 18864 - DNA, 469 bp, Homo sapiens; identical to SEQ ID NO: 2122
  MAP TO AL121752.1; EXPRESSED IN BONE MARROW, SIGNAL =   1; EXPRESSED IN BRAIN, SIGNAL = 1.4; EXPRESSED IN ADULT LIVER, SIGNAL = 1.1; EXPRESSED IN FETAL LIVER, SIGNAL =   1; EXPRESSED IN PLACENTA, SIGNAL = 1.3; EXPRESSED IN HELA, SIGNAL =   1; EXPRESSED IN HBL100, SIGNAL =   1; EXPRESSED IN HEART, SIGNAL = 1.2; SWISSPROT HIT: P45384, EVALUE 2.40e-01; NT HIT: L24372.1, EVALUE 2.50e-01

SEQ ID NO: 18865 - DNA, 84 bp, Homo sapiens
  MAP TO AL034372.14; EXPRESSED IN FETAL LIVER, SIGNAL = 1.9; EXPRESSED IN HELA, SIGNAL = 1.8; EXPRESSED IN HEART, SIGNAL = 2.6; EXPRESSED IN LUNG, SIGNAL =   1; EXPRESSED IN BRAIN, SIGNAL = 2.5; EXPRESSED IN BT474, SIGNAL =   2; EXPRESSED IN ADULT LIVER, SIGNAL = 1.5; EXPRESSED IN PLACENTA, SIGNAL = 2.2; EXPRESSED IN HBL100, SIGNAL = 1.6; EXPRESSED IN BONE MARROW, SIGNAL = 1.8; EST_HUMAN HIT: AA349381.1, EVALUE 4.00e-40; SWISSPROT HIT: P40123, EVALUE 2.00e-09; NT HIT: gi11418489, EVALUE 3.00e-40
gagctgtcagccgcctggagtcgctgtctgcagagtcccacaggccccctgggaactgcggggaagtcaatggtgtcattgcag

SEQ ID NO: 18866 - DNA, 248 bp, Homo sapiens
  MAP TO AL080286.16; EXPRESSED IN BONE MARROW, SIGNAL = 1.7; EXPRESSED IN LUNG, SIGNAL = 1.4; EXPRESSED IN BRAIN, SIGNAL = 1.2; EXPRESSED IN ADULT LIVER, SIGNAL = 0.93; EXPRESSED IN FETAL LIVER, SIGNAL = 1.2; EXPRESSED IN HELA, SIGNAL = 0.97; EXPRESSED IN PLACENTA, SIGNAL = 1.1; EXPRESSED IN HBL100, SIGNAL = 0.97; EXPRESSED IN HEART, SIGNAL = 1.3; EST_HUMAN HIT: BF370562.1, EVALUE 8.90e-01; NT HIT: AJ243578.1, EVALUE 1.30e-01; SWISSPROT HIT: P52170, EVALUE 1.60e+00
attgagaattactgcacctcacaggcaggaatctctcctccgttgcccttgtcctggtgttgcatgttggaatgcagctctccatggtcaagacctgggaactcagcctcaaattaaatgcaaacagatggatatctctcatctgtgttttactccgactctccaagccatcctggagaataggggagctgcgtctcgggcctgccttgctaatgagcaggatcattttctgtaccctcctcttgcca

SEQ ID NO: 18867 - DNA, 122 bp, Homo sapiens
  MAP TO AF186190.1; EXPRESSED IN BT474, SIGNAL = 5.2; EXPRESSED IN HEART, SIGNAL = 2.7; EXPRESSED IN LUNG, SIGNAL = 2.9; EXPRESSED IN BRAIN, SIGNAL = 3.6; EXPRESSED IN FETAL LIVER, SIGNAL =   2; EXPRESSED IN ADULT LIVER, SIGNAL = 2.1; EXPRESSED IN PLACENTA, SIGNAL = 4.8; EXPRESSED IN HELA, SIGNAL = 4.9; EXPRESSED IN HBL100, SIGNAL = 1.6; EXPRESSED IN BONE MARROW, SIGNAL = 2.7; NT HIT: AF004162.1, EVALUE 9.00e-60; SWISSPROT HIT: Q92597, EVALUE 7.00e-19; EST_HUMAN HIT: AU134522.1, EVALUE 1.00e-59
cctgcggggaaggaggctgcgccgtcctgctggccaggggcgtccacgtggcaaacggcaaagtgctgggtgatctcctgcatgtcctcgtagttgaagagggggttgtagcaggttttgtc

SEQ ID NO: 18868 - DNA, 232 bp, Homo sapiens
  MAP TO AL078639.3; EXPRESSED IN PLACENTA, SIGNAL = 1.4; EXPRESSED IN HBL100, SIGNAL =   1; EXPRESSED IN HEART, SIGNAL = 1.6; EXPRESSED IN BONE MARROW, SIGNAL = 1.4; EXPRESSED IN LUNG, SIGNAL = 4.8; EXPRESSED IN BRAIN, SIGNAL = 1.4; EXPRESSED IN FETAL LIVER, SIGNAL = 1.4; EXPRESSED IN ADULT LIVER, SIGNAL = 1.4; EXPRESSED IN HELA, SIGNAL = 1.3; EST_HUMAN HIT: AA774838.1, EVALUE 5.00e-05; SWISSPROT HIT: P15529, EVALUE 3.20e+00; NT HIT: AF196779.1, EVALUE 9.00e-15
aaacgtaattgccactgtaacagtattaagaggtgagatctttaagaggtggttaggctccaccgtcatgaatagattaatgccattcatgggaatggcatttcatgggaatggattccttacaaaagggcaagtttggcctctctctcctttgccatgggatgacacagcaagaaagcccttgccaattgtcagtccctcagtcttggccttctcatcctccataaccaca

SEQ ID NO: 18869 - DNA, 137 bp, Homo sapiens
  MAP TO AP000474.1; EXPRESSED IN HBL100, SIGNAL = 2.5; EXPRESSED IN HEART, SIGNAL =   4; EXPRESSED IN LUNG, SIGNAL = 2.2; EXPRESSED IN FETAL LIVER, SIGNAL = 4.1; EXPRESSED IN ADULT LIVER, SIGNAL = 3.6; EXPRESSED IN PLACENTA, SIGNAL = 3.4; EXPRESSED IN HELA, SIGNAL = 3.2; EXPRESSED IN BRAIN, SIGNAL = 3.5; EXPRESSED IN BONE MARROW, SIGNAL = 4.4; EXPRESSED IN BT474, SIGNAL = 1.9; SWISSPROT HIT: P35421, EVALUE 1.30e+00; NT HIT: Z36157.1, EVALUE 3.10e-01; EST_HUMAN HIT: BE250008.1, EVALUE 7.90e-02
acaacttggtcacaatcccactggggcccctcgagattcccaaggcatctgtgctagtcaggcagcacaccatcctcagagatctcagtcccagaatccagaaaatccctccttcaagcacctgaggcacagccaag

SEQ ID NO: 18870 - DNA, 127 bp, Homo sapiens
  MAP TO AL035414.18; EXPRESSED IN BONE MARROW, SIGNAL = 1.8; EXPRESSED IN HBL100, SIGNAL = 1.3; EXPRESSED IN HELA, SIGNAL = 1.3; EXPRESSED IN HEART, SIGNAL = 2.4; EXPRESSED IN LUNG, SIGNAL =   2; EXPRESSED IN BRAIN, SIGNAL = 1.7; EXPRESSED IN BT474, SIGNAL = 1.3; EXPRESSED IN ADULT LIVER, SIGNAL = 1.2; EXPRESSED IN FETAL LIVER, SIGNAL = 1.8; EXPRESSED IN PLACENTA, SIGNAL = 1.6; NT HIT: AL161594.2, EVALUE 1.50e-02; SWISSPROT HIT: P57603, EVALUE 5.40e+00
gaaaagtacagcacaccttgccaaagcctgaaacatacataaacataacggctgcaagatgcttttcccccagcaacttccaatatcatttcaaaaatactttagctttacttctgatgcaggcaac

SEQ ID NO: 18871 - DNA, 166 bp, Homo sapiens
  MAP TO AL080312.4; EXPRESSED IN BT474, SIGNAL = 4.8; EXPRESSED IN HBL100, SIGNAL = 2.2; EXPRESSED IN LUNG, SIGNAL = 1.7; EXPRESSED IN BRAIN, SIGNAL = 2.1; EXPRESSED IN ADULT LIVER, SIGNAL = 1.3; EXPRESSED IN FETAL LIVER, SIGNAL = 1.7; EXPRESSED IN PLACENTA, SIGNAL = 8.3; EXPRESSED IN HEART, SIGNAL = 2.5; EXPRESSED IN HELA, SIGNAL = 1.2; EXPRESSED IN BONE MARROW, SIGNAL = 2.4; EST_HUMAN HIT: BE870732.1, EVALUE 8.00e-68; NT HIT: M87509.1, EVALUE 3.80e-01; SWISSPROT HIT: O68040, EVALUE 4.00e-14
gatggcgtcctcaatctctgcggtccccagccggtggccactgatgttgatgacatcatccatccgccctgtgatctggtaatagccgccctcagttcggtaagccccgtctccagtgaagtaatagcctgcaccacagcagggaaattcagcaccaggaaccctg

SEQ ID NO: 18872 - DNA, 102 bp, Homo sapiens
  MAP TO AL031963.11; EXPRESSED IN PLACENTA, SIGNAL =   2; EXPRESSED IN BONE MARROW, SIGNAL = 1.8; EXPRESSED IN FETAL LIVER, SIGNAL = 1.8; EXPRESSED IN HBL100, SIGNAL = 1.3; EXPRESSED IN HELA, SIGNAL = 1.5; EXPRESSED IN HEART, SIGNAL =   2; EXPRESSED IN BRAIN, SIGNAL = 1.8; EXPRESSED IN LUNG, SIGNAL = 1.1; EXPRESSED IN BT474, SIGNAL = 1.1; EXPRESSED IN ADULT LIVER, SIGNAL =   2; NT HIT: AL163213.2, EVALUE 1.20e-02; EST_HUMAN HIT: BE788579.1, EVALUE 8.10e-02
cagacaacacaggataccctacagctaaagaacagcctggagatcgagaccttgggaccagtctcatctttgggaatgtcaccaaggctgctgaaggtctgg

SEQ ID NO: 18873 - DNA, 186 bp, Homo sapiens
  MAP TO AL121756.2; EXPRESSED IN BT474, SIGNAL = 1.3; EXPRESSED IN HBL100, SIGNAL = 1.1; EXPRESSED IN BONE MARROW, SIGNAL = 1.2; EXPRESSED IN ADULT LIVER, SIGNAL = 1.1; EXPRESSED IN FETAL LIVER, SIGNAL = 1.1; EXPRESSED IN PLACENTA, SIGNAL = 1.4; EXPRESSED IN HEART, SIGNAL = 1.2; EXPRESSED IN HELA, SIGNAL = 1.3; EXPRESSED IN BRAIN, SIGNAL = 1.1; NT HIT: X52772.1, EVALUE 6.80e+00; EST_HUMAN HIT: AJ403124.1, EVALUE 3.00e-98; SWISSPROT HIT: P56730, EVALUE 2.90e+00
gctgttctcttcctgctgggcaagcccatcatcctgcccacggatgccaccccttttgtgttgccaaggcatgtgggtaccgagggctccatggccaccgtgggcctctcccagcagctgtttgactctgcgctcctgctgctgcagaaggccggtgccctcaacctggacatcacagggcagctg

SEQ ID NO: 18874 - DNA, 2400 bp, Homo sapiens
  MAP TO AL034396.6; EXPRESSED IN BT474, SIGNAL =   2; EXPRESSED IN PLACENTA, SIGNAL = 1.5; EXPRESSED IN BONE MARROW, SIGNAL = 1.4; EXPRESSED IN BRAIN, SIGNAL = 1.2; EXPRESSED IN FETAL LIVER, SIGNAL = 1.4; EXPRESSED IN ADULT LIVER, SIGNAL =   1; EXPRESSED IN HEART, SIGNAL = 1.6; EXPRESSED IN HELA, SIGNAL = 4.7; EXPRESSED IN HBL100, SIGNAL = 1.2; EXPRESSED IN LUNG, SIGNAL = 0.89; NT HIT: L14787.1, EVALUE 0.00e+00; EST_HUMAN HIT: AL046615.1, EVALUE 0.00e+00; SWISSPROT HIT: P98168, EVALUE 0.00e+00
cactgttttcacaaagggtgctcgaaggagtcagagtatctgtgtccactgttagcttactgctgggtgtcaaagcctgaggctctggactggagtttttcatggccaaagagtccagagatcccaatggccccacacttacacttgagacctcatccatatttaaggagctctgctgaaaaccagtggccgccgttccaaaaaagagagaggtatccagactttgaggagggtcgctggtggccatcaaggacggagggtccacagcctgccctacggaattattattattagcagggaggtgccctgccagagtcgagctcacagaagccacatcaatagtcaagattccagagttcaccaatgctgtgtccagcaatgcagcagaagtactgtcaggtacatcagagaagagagacactatctctgcatcactgagatcattctgtctctggctggtaagttcactgctgggtgtaagagaatttgctgcttctagctgagctaagagatcctggcccaccttatgccttttaaccatgtgcgtcttcatgctgtgcttggatgtgaagagtttattacaagaggagatcgggcaacggcttttccaagtgtccacatcctgcaggtgtttcttggagtgaatgtagaggctactgcgagcagagaacctggcacagcagcctgccacaggacacacgaaaggctttgtgcccaggtgggtaatgctgtggcctttcagatgttcggccctcgtgaaagatttcccacagccttccacagggcacatgaacctccggtcatcgtcgtgcttccttttgtgccttaagagtttggacatgctggtgaagttccagccacagccatcaaagtcacaaaggaaaggtctctcgccggtgtgactccgcaggtgaattttcagcctacaagccttgtcatattgcttgctgcagccagggaaagagcaggaaaacagttcctgttccctgaaatgggcgcggttatgggaaaacagagcactcactgtgataaatgtcttcttgcagccagaaaacgcgcactggtaaggcctctcgggttcgaagtggctgcgctggtgggcgccgagtttggcctgcgtggggaagctctcctcgcacacctcacatttgaacgagttctcctgctcatggcccttcatgtgcgccttgaggttgtacacggtggtgaagctcttgccacagccctccgcagggcagccgaagggccgcagtttatcgtgcgactgcaggtgcctcttgagcttgtaagaggtggtgaaggtccagccgcagccacccagggggcatttgaagggcctctggccctggctgctgctgtgcgtcagcaggtgcatcttcagctggtgcttcttggcgaaggtttgcccgcacagcgcctcggggcacaggtacagcaccacgcctggaccagagcccagcagtccgcgggggcccagggcggcggccaggccctccgcctcctcctggggcgccggagcaggcgcgggttctgcgggctcggctagcaggaggtcggaccgcagctctgggcagtcacccgggtgcgcggcttgcgggaacccagcttggggggcgatcagacacctgggctgctgggcaggagcggcccctggctcccaggcgtgtggtgggggcgtggccagggtgaggacgccgttctcaaagcgcaacagcaggtcctggttgtggatagtgactgtgcccgcgaaggccgcggcggggccgggggcggagatcggggccggagtgggaaccgcggacaggcagtgggggccctgcgcagagcagcccgcggggttcgcgccgctctcgtccccctggagccccgggcccgccttggcctcctccctcaacacaggccctgcggcctgaccggagcccgcggtctccacgtcgccacccaccgggtcaagcagcaccaggaagaagtcgtcgccgccgccgctaggttgatggggcctcggcgcgaacaggcttgggccagggccccgtgatgccgtgctggcctcctcgcgccgccgcccgggcccgccatcttgggggccccggggcagcaggaggcggcgcgtggggacctggccagccggcgagtcagggcctcggtggactcggccgccacccgcggggataccgccgccgccgccgccctgtagtgtcccgcgagccgggagcagcttcgggatttccatctctgcgtccgagaggctcggctggaaccagagccgaggaggaggcgcgatcccgccccctgccgcgggcctgaacacgttcctgaaaggggaaaaaaaaatgtgcaatgcgcagaaactggccctatcagatattaaaatgtattcaacgccacagtgatttaaatatt

SEQ ID NO: 18875 - DNA, 119 bp, Homo sapiens
  MAP TO AL080286.16; EXPRESSED IN PLACENTA, SIGNAL = 3.7; EXPRESSED IN HEART, SIGNAL = 3.1; EXPRESSED IN BRAIN, SIGNAL = 3.3; EXPRESSED IN BT474, SIGNAL = 1.5; EXPRESSED IN HBL100, SIGNAL = 1.7; EXPRESSED IN HELA, SIGNAL =  11; EXPRESSED IN LUNG, SIGNAL = 2.1; EXPRESSED IN BONE MARROW, SIGNAL = 2.7; EXPRESSED IN ADULT LIVER, SIGNAL = 2.2; EXPRESSED IN FETAL LIVER, SIGNAL =   3; NT HIT: AJ289241.1, EVALUE 6.60e-02; EST_HUMAN HIT: AA600755.1, EVALUE 1.10e+00; SWISSPROT HIT: Q07944, EVALUE 3.10e+00
acctggtcataatcgcggtcaaactagtcctaacagtgagccactctgggccatgccctgtgctgatgcagatgcaccaagcacacttagtgaggcaggccctgttattattcccatgg

SEQ ID NO: 18876 - DNA, 143 bp, Homo sapiens
  MAP TO AL031661.16; EXPRESSED IN HELA, SIGNAL = 2.5; EXPRESSED IN HEART, SIGNAL = 2.1; EXPRESSED IN BRAIN, SIGNAL = 1.7; EXPRESSED IN BONE MARROW, SIGNAL = 1.7; EXPRESSED IN ADULT LIVER, SIGNAL = 1.2; EXPRESSED IN BT474, SIGNAL = 1.9; EXPRESSED IN FETAL LIVER, SIGNAL = 1.3; EXPRESSED IN PLACENTA, SIGNAL = 1.7; EXPRESSED IN HBL100, SIGNAL = 2.3; NT HIT: AF100152.1, EVALUE 2.80e-01; EST_HUMAN HIT: BF248490.1, EVALUE 1.20e-01
ctgttgtgatgatgatgatgatgatgatgatgatgatgacagagatgctgctgctgatgatccgtggggatcaccaggatgatgatgggtacaatggtgatgatagagatgattcctataatggactccaactttacgttaag

SEQ ID NO: 18877 - DNA, 80 bp, Homo sapiens
  MAP TO AL109615.8; EXPRESSED IN BT474, SIGNAL = 3.8; EXPRESSED IN ADULT LIVER, SIGNAL = 1.4; EXPRESSED IN HELA, SIGNAL = 9.5; EXPRESSED IN PLACENTA, SIGNAL = 1.7; EXPRESSED IN HBL100, SIGNAL = 5.3; EXPRESSED IN HEART, SIGNAL = 1.4; EXPRESSED IN LUNG, SIGNAL = 2.1; EST_HUMAN HIT: AA932558.1, EVALUE 1.00e-37; SWISSPROT HIT: P34492, EVALUE 9.30e+00
gcaaaagggtggttctcagaactgctccattcacgagtcctgcaaccagaggcctgggctcaactcacacaaagttctga

SEQ ID NO: 18878 - DNA, 86 bp, Homo sapiens
  MAP TO AL109798.8; EXPRESSED IN PLACENTA, SIGNAL = 1.2; EXPRESSED IN HELA, SIGNAL = 1.4; EXPRESSED IN HBL100, SIGNAL = 1.2; EXPRESSED IN HEART, SIGNAL = 1.3; EXPRESSED IN BONE MARROW, SIGNAL =   1; EXPRESSED IN ADULT LIVER, SIGNAL = 0.98; EXPRESSED IN BT474, SIGNAL = 0.99; EXPRESSED IN FETAL LIVER, SIGNAL = 0.9; NT HIT: AE001616.1, EVALUE 5.90e-01; EST_HUMAN HIT: AA478980.1, EVALUE 2.00e-04
gtaaagttccatgagggtaaggaccttgcctgtcttgtttaccactatgttgtgtgtcttatcctgaaaacatgggaggcagtcag

SEQ ID NO: 18879 - DNA, 100 bp, Homo sapiens
  MAP TO AL096867.15; EXPRESSED IN BT474, SIGNAL = 2.5; EXPRESSED IN FETAL LIVER, SIGNAL = 5.3; EXPRESSED IN HEART, SIGNAL = 6.2; EXPRESSED IN LUNG, SIGNAL = 3.7; EXPRESSED IN BRAIN, SIGNAL = 4.5; EXPRESSED IN ADULT LIVER, SIGNAL = 4.9; EXPRESSED IN PLACENTA, SIGNAL = 6.3; EXPRESSED IN HELA, SIGNAL = 5.3; EXPRESSED IN HBL100, SIGNAL = 4.3; EXPRESSED IN BONE MARROW, SIGNAL = 5.8; EST_HUMAN HIT: AV759446.1, EVALUE 4.00e-10; NT HIT: AL163303.2, EVALUE 1.00e-14
ggagaaagtcactgcggatgtgttggaaacaataaaagaactagaattagaagtggaggctgaagatgtgattgaattaatacaatttcatgaaaaagct

SEQ ID NO: 18880 - DNA, 426 bp, Homo sapiens
  MAP TO AL031428.9; EXPRESSED IN PLACENTA, SIGNAL = 1.3; EXPRESSED IN HBL100, SIGNAL = 1.9; EXPRESSED IN HEART, SIGNAL =   1; EXPRESSED IN BONE MARROW, SIGNAL = 0.93; EXPRESSED IN BRAIN, SIGNAL = 1.1; EXPRESSED IN ADULT LIVER, SIGNAL = 0.98; EXPRESSED IN BT474, SIGNAL = 1.3; EXPRESSED IN HELA, SIGNAL = 1.3; NT HIT: AF181259.1, EVALUE 1.00e-127; EST_HUMAN HIT: BE274696.1, EVALUE 0.00e+00; SWISSPROT HIT: O95239, EVALUE 3.00e-03
cgccacttgcggtttaagctacagagtctaagccgccgccttgatgagttggaggaagccacaaaaaacctccagaaagcagaggatgaactcctggatctccaggacaaggtgattcaggcagaaggtagcaactccagcatgttggcggagattgaagtgctgcgccagcgggtgctgagaattgaaggcaaagacgaggaaattaagagagcagaggatctgtgtcgtctgatgaaggagaaacttgaagaggaagaaaacctcacccgggagctgaaatctgagattgagcggcttcagaaacgaatggctgaattagagaagctagaagaggccttcagcaggagtaagaatgactgtacccagctgtgtctgagcctgaatgaggagagaaatctgaccaagaaaatctcctctgagctg

SEQ ID NO: 18881 - DNA, 172 bp, Homo sapiens
  MAP TO AC007318.2; EXPRESSED IN BONE MARROW, SIGNAL = 3.6; EXPRESSED IN FETAL LIVER, SIGNAL = 1.2; EXPRESSED IN HELA, SIGNAL =   6; EXPRESSED IN BRAIN, SIGNAL = 2.3; EXPRESSED IN LUNG, SIGNAL = 3.5; EXPRESSED IN BT474, SIGNAL =  10; EXPRESSED IN ADULT LIVER, SIGNAL = 1.3; EXPRESSED IN PLACENTA, SIGNAL = 3.9; EXPRESSED IN HEART, SIGNAL = 1.7; EXPRESSED IN HBL100, SIGNAL = 8.4; SWISSPROT HIT: O15142, EVALUE 2.00e-27; NT HIT: gi11430616, EVALUE 8.00e-92; EST_HUMAN HIT: AA873440.1, EVALUE 1.00e-91
ttatcgaacagtcacaccaagtttctctagcacacggacacccttttcttggtactcttgtcgggtcatccaaaagttgtctttgtctttcatgatatccgctagaactgcaccacccaggaataccatgtgctttctgcggggtgggtcttcaatgcggatcttaaatttc

SEQ ID NO: 18882 - DNA, 270 bp, Homo sapiens
  MAP TO AL050329.9; EXPRESSED IN ADULT LIVER, SIGNAL =   1; EXPRESSED IN BT474, SIGNAL = 1.2; EXPRESSED IN HBL100, SIGNAL =   1; EXPRESSED IN PLACENTA, SIGNAL = 0.94; EXPRESSED IN HELA, SIGNAL = 1.3; EXPRESSED IN HEART, SIGNAL = 1.1; EXPRESSED IN LUNG, SIGNAL = 0.9; NT HIT: D87685.1, EVALUE 0.00e+00; EST_HUMAN HIT: AW665898.1, EVALUE 0.00e+00; SWISSPROT HIT: Q03309, EVALUE 2.10e-01
catggtgattgtgttgggttaagtctttctcaagcacagcagatgggcgaggaagacaaagaatatgtctgtgtaaaatgttgtgctgaagaagacaaaaagactgaaatactagatccagatactttggaaaaccaagctacagttgaattccatagtggagataaaacaatggagtgtgaaaagcttggattatcaaaacacacaacaaatgatagaaccaaatatatagatgatacagtgaagcacaaggtcaaaattttaaaacgg

SEQ ID NO: 18883 - DNA, 374 bp, Homo sapiens
  MAP TO AL109808.2; EXPRESSED IN BONE MARROW, SIGNAL =  16; EXPRESSED IN HBL100, SIGNAL =  42; EXPRESSED IN HELA, SIGNAL =  78; EXPRESSED IN HEART, SIGNAL =  10; EXPRESSED IN BRAIN, SIGNAL = 7.6; EXPRESSED IN LUNG, SIGNAL =  31; EXPRESSED IN BT474, SIGNAL =  48; EXPRESSED IN ADULT LIVER, SIGNAL = 6.9; EXPRESSED IN FETAL LIVER, SIGNAL =  11; EXPRESSED IN PLACENTA, SIGNAL =  23; NT HIT: AB015610.1, EVALUE 0.00e+00; EST_HUMAN HIT: AV738288.1, EVALUE 0.00e+00; SWISSPROT HIT: P12750, EVALUE 3.00e-63
tcacaacttgtacttggcctcctcaggtgtaatacgatgtacagcaaagtgacccttggtgtcacagatcagacagaaattctctcccatcttgtcaatgctgatgacatccatgaatccagcagggtaggttatatcagtgcggaccttgccatcgatcttaatgaaccgctgcatgcaaatcttctttacttcctctcctgtcagggcatacttaagtctgttccttatgaaaatgatgagggggagacactctctcaacttgtggggactggtggatggatgaggagcaaacacaccagtcaatttatccagcatccaatgctttggagctgctacctgctttagatgcttcttgggaccacgagccatgg

SEQ ID NO: 18884 - DNA, 195 bp, Homo sapiens
  MAP TO AC008123.9; EXPRESSED IN BT474, SIGNAL =  55; EXPRESSED IN BONE MARROW, SIGNAL =   2; EXPRESSED IN LUNG, SIGNAL = 2.8; EXPRESSED IN ADULT LIVER, SIGNAL = 1.8; EXPRESSED IN FETAL LIVER, SIGNAL = 1.4; EXPRESSED IN PLACENTA, SIGNAL = 3.1; EXPRESSED IN HEART, SIGNAL = 1.6; EXPRESSED IN HELA, SIGNAL = 5.9; EXPRESSED IN HBL100, SIGNAL = 5.9; EXPRESSED IN BRAIN, SIGNAL = 1.3; NT HIT: X57500.1, EVALUE 1.00e-105; SWISSPROT HIT: P13010, EVALUE 5.00e-33; EST_HUMAN HIT: AA318369.1, EVALUE 1.00e-105
tgtctgctgcacagagctttacatccccgggagcctctacccccaattcagcagcatatttggaatatgctgaatcctcccgctgaggtgacaacgaaaagtcagattcctctctctaaaataaagaccctttttcctctgattgaagccaagaaaaaggatcaagtgactgctcaggaaattttccaagacaag

SEQ ID NO: 18885 - DNA, 394 bp, Homo sapiens
  MAP TO AC010092.1; EXPRESSED IN PLACENTA, SIGNAL = 2.6; EXPRESSED IN HEART, SIGNAL = 1.4; EXPRESSED IN BRAIN, SIGNAL = 1.4; EXPRESSED IN BONE MARROW, SIGNAL = 1.2; EXPRESSED IN LUNG, SIGNAL = 9.7; EXPRESSED IN BT474, SIGNAL = 2e+02; EXPRESSED IN FETAL LIVER, SIGNAL = 1.1; EXPRESSED IN ADULT LIVER, SIGNAL = 1.3; EXPRESSED IN HBL100, SIGNAL = 3.7; EXPRESSED IN HELA, SIGNAL = 4.5; EST_HUMAN HIT: AA931691.1, EVALUE 0.00e+00; SWISSPROT HIT: Q9Z2N5, EVALUE 6.50e+00; NT HIT: gi11430354, EVALUE 0.00e+00
tgctgggaggatgtatgatctatgccgtttttgtcctaggtctgccacctcttccttccatgcctccccgaaacttacctggcattgcacctctccccctgccatccgagttcctcccgtcattccccttggttccagagagctcttctgcagcaagctcaggagagctgctgtcttccctcccgcccaccagcaacgcaccctccgaccctgccacaactactgcaaaggcagacgctgcctcctcactcactgtggatgtgacgccccccactgccaaggcccccaccaccgttgaggacagagtcggcgactccaccccagtcagcgagaagcctgtttctgcggctgtggatgccaatgcttctgagtcaccttaactttgaaccattct

SEQ ID NO: 18886 - DNA, 218 bp, Homo sapiens
  MAP TO AC010140.1; EXPRESSED IN BT474, SIGNAL =   2; EXPRESSED IN BONE MARROW, SIGNAL = 2.5; EXPRESSED IN LUNG, SIGNAL = 4.1; EXPRESSED IN BRAIN, SIGNAL = 5.1; EXPRESSED IN ADULT LIVER, SIGNAL = 7.7; EXPRESSED IN FETAL LIVER, SIGNAL = 1.9; EXPRESSED IN PLACENTA, SIGNAL = 8.5; EXPRESSED IN HEART, SIGNAL = 2.4; EXPRESSED IN HELA, SIGNAL =  19; EXPRESSED IN HBL100, SIGNAL = 3.4; NT HIT: gi9635487, EVALUE 2.00e-86; SWISSPROT HIT: Q04584, EVALUE 8.10e+00; EST_HUMAN HIT: N66951.1, EVALUE 1.00e-81
cttgactatggctttagctccagccacctttttaagagtaaattgctgggcaggtgggggatggctagtcacagaatgaaactgtaagctggaccaggtgtgaggaggggaggtgataaaaggattattgggtggaggagcggaggctgaggaagaattgggacctagctcggcctggtgaggagcagtctggggaggaggggagaggtcagatgggt

SEQ ID NO: 18887 - DNA, 334 bp, Homo sapiens
  MAP TO AC010872.2; EXPRESSED IN FETAL LIVER, SIGNAL = 7.8; EXPRESSED IN ADULT LIVER, SIGNAL =  30; EXPRESSED IN BT474, SIGNAL = 1.3; EXPRESSED IN HBL100, SIGNAL =   1; EXPRESSED IN HEART, SIGNAL = 0.9; NT HIT: gi11428887, EVALUE 0.00e+00; EST_HUMAN HIT: T87950.1, EVALUE 0.00e+00; SWISSPROT HIT: P04114, EVALUE 1.00e-59
gggggactataaaatcaggtgtctggaaggtagctttctgaagagcctgaagactgacttcaaaggcaggcatggtcccaaggatggtcttgatttcaggaacagtgaacccttgctctaccaatgctttcatacgtttagcccaatcttggatagaatattgctctgcaaagtcagtaaggttcttagcagcaagagtccaccaatcagaaatgtaggtgacaagtgtgctataaacctggcctaccagagacaggtatcgttgaagttcctgctgaatgtccatttgatacattcggtctcgtgtatcttctagggtctctcggaatttggc

SEQ ID NO: 18888 - DNA, 150 bp, Homo sapiens
  MAP TO AL049637.32; EXPRESSED IN PLACENTA, SIGNAL = 1.3; EXPRESSED IN BRAIN, SIGNAL = 1.1; EXPRESSED IN BT474, SIGNAL = 2.6; EXPRESSED IN HEART, SIGNAL = 0.99; EXPRESSED IN HELA, SIGNAL =   4; EXPRESSED IN HBL100, SIGNAL =   2; EXPRESSED IN LUNG, SIGNAL = 3.5; EXPRESSED IN BONE MARROW, SIGNAL = 0.91; NT HIT: gi5901947, EVALUE 2.00e-79; EST_HUMAN HIT: AA862284.1, EVALUE 3.00e-79; SWISSPROT HIT: P54731, EVALUE 3.00e-22
atcaaagacaatctggagcttgttgctggccaggaaacgccgctccaagaactcgccactgggggtccggatccgcagtttgctcacaggctcagcattttcttcctttggctcaggaggcagggcttgctctaaggacagccggatggc

SEQ ID NO: 18889 - DNA, 192 bp, Homo sapiens
  MAP TO AL049629.13; EXPRESSED IN HBL100, SIGNAL = 5.4; EXPRESSED IN HELA, SIGNAL =  24; EXPRESSED IN PLACENTA, SIGNAL =  33; EXPRESSED IN HEART, SIGNAL = 7.2; EXPRESSED IN BRAIN, SIGNAL = 3.7; EXPRESSED IN BONE MARROW, SIGNAL = 2.5; EXPRESSED IN LUNG, SIGNAL = 8.9; EXPRESSED IN BT474, SIGNAL = 7.4; EXPRESSED IN ADULT LIVER, SIGNAL = 3.9; EXPRESSED IN FETAL LIVER, SIGNAL = 2.2; SWISSPROT HIT: P30957, EVALUE 1.70e+00; NT HIT: gi10835164, EVALUE 1.00e-104; EST_HUMAN HIT: AA132975.1, EVALUE 1.00e-104
aaacttcagggatcccgtgttgccatggaggcatgccaaatgttccatatgtgggtgtcagtcagggacaacaagatccttaatgcagagctagaggacttctggcagggaagtggggaagtgttccagatagcagggcatgaaaacttagagaggtacaagtggctgaaaatcgagtttttcctctgtctt

SEQ ID NO: 18890 - DNA, 301 bp, Homo sapiens
  MAP TO AP000507.1; EXPRESSED IN PLACENTA, SIGNAL =  24; EXPRESSED IN HBL100, SIGNAL =  53; EXPRESSED IN HELA, SIGNAL =  47; EXPRESSED IN HEART, SIGNAL =  17; EXPRESSED IN BRAIN, SIGNAL = 5.7; EXPRESSED IN BONE MARROW, SIGNAL =  32; EXPRESSED IN LUNG, SIGNAL =  58; EXPRESSED IN ADULT LIVER, SIGNAL =  15; EXPRESSED IN BT474, SIGNAL =   8; EXPRESSED IN FETAL LIVER, SIGNAL =  11; NT HIT: AJ295278.1, EVALUE 0.00e+00; SWISSPROT HIT: P30487, EVALUE 4.00e-53; EST_HUMAN HIT: BF344434.1, EVALUE 0.00e+00
accccccaaagacacacgtgacccaccaccccatctctgaccatgaggccaccctgaggtgctgggccctgggcttctaccctgcggagatcacactgacctggcagcgggatggcgaggaccaaactcaggacactgagcttgtggagaccagaccagcaggagatagaaccttccagaagtgggcagctgtggtggtgccttctggagaagagcagagatacacatgccatgtacagcatgaggggctgccgaagcccctcaccctgagatggggtaaggagggggatgaggggtcata

SEQ ID NO: 18891 - DNA, 640 bp, Homo sapiens
  MAP TO Z98200.8; EXPRESSED IN BT474, SIGNAL = 1.4e+02; EXPRESSED IN FETAL LIVER, SIGNAL =  20; EXPRESSED IN ADULT LIVER, SIGNAL =  18; EXPRESSED IN HELA, SIGNAL = 1e+02; EXPRESSED IN PLACENTA, SIGNAL =  40; EXPRESSED IN HBL100, SIGNAL =  55; EXPRESSED IN HEART, SIGNAL =  11; EXPRESSED IN BRAIN, SIGNAL =  12; EXPRESSED IN BONE MARROW, SIGNAL =  26; EXPRESSED IN LUNG, SIGNAL =  34; NT HIT: gi11418143, EVALUE 0.00e+00; EST_HUMAN HIT: BE748899.1, EVALUE 0.00e+00; SWISSPROT HIT: P39023, EVALUE 1.00e-103
atgcgcctgcttcctctgcgccagaagaaggcccacctgatggagatccaggtgaacggaggcaccgtggctgagaagctggactgggtctgcgagaggctcgagcagcaggtaaatgtgaaccaagtgtttgggcaggatgagatgatcgacgtcattggggtgaccaagggcaaaggctacaaaggggtcaccagtcgttggcacaccaagaagctgccctgcaagacccaccgaggcctgtgcaaggtggcctgtattggggcatggcatcctgctcgtgtggccttctctgtggcacgtgctggggagaaaggctaccgtcaccgcactgagatcaacaagaagatctataagattggccagggctaccttatcaaggatggcaagctgatcaagaacaatgcctccactgactctgacctgtctgacaagagcaccaatcctctgggtggctttgtccactatggtgaagtgaccaatgaccttgtcatgctgaaaggctgtgtggtgggaaccaagaagcgggtgctcaccctccacgagtccttgctggtgcagatgaaacggcaggctctggagaagattgaccttaagttcattgacaccacctccaagtttggccatggctgcttccaga

SEQ ID NO: 18892 - DNA, 120 bp, Homo sapiens
  MAP TO AC008015.4; EXPRESSED IN BONE MARROW, SIGNAL = 1.5; EXPRESSED IN BRAIN, SIGNAL = 1.4; EXPRESSED IN LUNG, SIGNAL = 1.1; EXPRESSED IN ADULT LIVER, SIGNAL = 1.3; EXPRESSED IN BT474, SIGNAL = 2.3; EXPRESSED IN FETAL LIVER, SIGNAL = 1.5; EXPRESSED IN HELA, SIGNAL = 1.7; EXPRESSED IN PLACENTA, SIGNAL = 1.5; EXPRESSED IN HBL100, SIGNAL = 1.8; EXPRESSED IN HEART, SIGNAL = 1.5; SWISSPROT HIT: Q00961, EVALUE 2.30e+00; EST_HUMAN HIT: AW958935.1, EVALUE 2.00e-61; NT HIT: gi8923739, EVALUE 8.90e-01
gatgatgtcggctgggactgggaccatctgttcactgaggtgtcctcagaggtcctcactgagtgggacccactgcagacggagaaggaggaccctgcggggcaggccaggcacacctga

SEQ ID NO: 18893 - DNA, 219 bp, Homo sapiens
  MAP TO AL121760.1; EXPRESSED IN PLACENTA, SIGNAL = 8.8; EXPRESSED IN HBL100, SIGNAL = 3.2; EXPRESSED IN HELA, SIGNAL =  12; EXPRESSED IN HEART, SIGNAL = 3.8; EXPRESSED IN BRAIN, SIGNAL = 5.4; EXPRESSED IN BONE MARROW, SIGNAL = 6.3; EXPRESSED IN LUNG, SIGNAL = 6.3; EXPRESSED IN ADULT LIVER, SIGNAL =  10; EXPRESSED IN BT474, SIGNAL = 2.8; EXPRESSED IN FETAL LIVER, SIGNAL = 3.1; NT HIT: AF289204.1, EVALUE 7.00e-59; EST_HUMAN HIT: C18895.1, EVALUE 3.00e-64; SWISSPROT HIT: P97427, EVALUE 2.80e+00
gttcccatgctgcccctaatcccgctcgaagcagccctgagaaacatcgtccattatctctccgtaccaccccctaaaaatgtttgctgccccaaaacttcaatactattttatgttatttttcctattgatataagaagacaagaatgtcaggcctctgagcccaagctcagccatcatatcccctgtgacctgcatgaatacatccagatggcctaa

SEQ ID NO: 18894 - DNA, 415 bp, Homo sapiens
  MAP TO AL009030.4; EXPRESSED IN BT474, SIGNAL = 2.9; EXPRESSED IN ADULT LIVER, SIGNAL =  11; EXPRESSED IN FETAL LIVER, SIGNAL = 2.6; EXPRESSED IN HELA, SIGNAL = 7.5; EXPRESSED IN PLACENTA, SIGNAL = 5.6; EXPRESSED IN HBL100, SIGNAL = 4.5; EXPRESSED IN HEART, SIGNAL = 2.3; EXPRESSED IN BRAIN, SIGNAL = 3.6; EXPRESSED IN BONE MARROW, SIGNAL = 6.6; EXPRESSED IN LUNG, SIGNAL = 4.5; SWISSPROT HIT: gi115305, EVALUE 1.60e-01; EST_HUMAN HIT: BF377897.1, EVALUE 0.00e+00; NT HIT: U21556.1, EVALUE 0.00e+00
ctaaagcacccactatggacgcacagcaggacagacccaagtcccaagactgcctgggcctagtggcccccctagcatctgctgcagaggtccccgctacagctcccgtgtctgggaagaagcacagaccaccaggacccctgttctcctcctcagatccccttcctgccaactcttcccactcccgggactcagcccaggtcacctcgatgattcctgcccccttcacagctgcaagcagggatgccggcatgagaagaacaaggtcggctcctgcagctgccgcagcagcccctcccccctccacattgaaccccacgtcggggtcactactcaatgcagtggatggaggcccctcacatttcttggcctcagccacagctgcagcacgtgcccagaggtcagaagtgagata

SEQ ID NO: 18895 - DNA, 300 bp, Homo sapiens
  MAP TO AC010874.1; EXPRESSED IN BONE MARROW, SIGNAL =  11; EXPRESSED IN LUNG, SIGNAL =  18; EXPRESSED IN BT474, SIGNAL =  47; EXPRESSED IN FETAL LIVER, SIGNAL = 5.6; EXPRESSED IN ADULT LIVER, SIGNAL = 7.3; EXPRESSED IN HELA, SIGNAL =  85; EXPRESSED IN PLACENTA, SIGNAL =  17; EXPRESSED IN HBL100, SIGNAL =  38; EXPRESSED IN HEART, SIGNAL = 7.5; EXPRESSED IN BRAIN, SIGNAL =   6; EST_HUMAN HIT: AI185304.1, EVALUE 1.00e-126; SWISSPROT HIT: P47832, EVALUE 2.00e-44; NT HIT: gi11426750, EVALUE 1.00e-127
ttcttccttgtatttgcccttttgctttcctacttggcaagatttggctttccgttcacggatatttttgcggtctttgtccacttttagcctagtgataaccaccttgctggggtgaatgcctacgtggacagttgtgccattagccttttcccactgcacccgttcaatgtatgtagcatatttcttcctgtaaaccttgactactttgccaatttgttgacctttatagtgtcctcgtacaacctgaacttcatcatccttttggatgggcatggatcacccgttatacttctgttt

SEQ ID NO: 18896 - DNA, 189 bp, Homo sapiens
  MAP TO AL109806.7; EXPRESSED IN BONE MARROW, SIGNAL = 1.1; EXPRESSED IN BRAIN, SIGNAL = 1.3; EXPRESSED IN LUNG, SIGNAL =   2; EXPRESSED IN ADULT LIVER, SIGNAL = 1.1; EXPRESSED IN FETAL LIVER, SIGNAL = 1.2; EXPRESSED IN HELA, SIGNAL = 1.6; EXPRESSED IN PLACENTA, SIGNAL = 1.3; EXPRESSED IN HBL100, SIGNAL = 0.98; EXPRESSED IN HEART, SIGNAL = 0.98; NT HIT: AJ243568.1, EVALUE 3.80e-01; SWISSPROT HIT: Q06430, EVALUE 4.00e-18
gaaaatgccagtgtggctctataggaacttctgcctgcctcagcacttgaagtctgtgccgccgctctaagcaggtaaccacaagcgggtctgtcgagggttcgaatttgttggcaaacagagaaggcgactgaatgagccacggcaggtctcctggtccgtatacgcagatgtcttcgacgtagcggc

SEQ ID NO: 18897 - DNA, 78 bp, Homo sapiens
  MAP TO AC008014.5; EXPRESSED IN FETAL LIVER, SIGNAL = 1.3; EXPRESSED IN HELA, SIGNAL = 1.2; EXPRESSED IN HEART, SIGNAL = 1.3; EXPRESSED IN LUNG, SIGNAL = 3.5; EXPRESSED IN BRAIN, SIGNAL = 1.4; EXPRESSED IN BT474, SIGNAL = 1.3; EXPRESSED IN ADULT LIVER, SIGNAL = 1.6; EXPRESSED IN PLACENTA, SIGNAL = 1.8; EXPRESSED IN HBL100, SIGNAL = 1.5; EXPRESSED IN BONE MARROW, SIGNAL = 1.4; EST_HUMAN HIT: BF673761.1, EVALUE 1.00e-36; NT HIT: AB038161.1, EVALUE 2.40e+00
atcatgcatgactgagaaggtcagtgtggctaattctgagcttcaacatcaggaaacccgtagttcttcacactgagc

SEQ ID NO: 18898 - DNA, 459 bp, Homo sapiens
  MAP TO AC007238.3; EXPRESSED IN BT474, SIGNAL = 5.6; EXPRESSED IN FETAL LIVER, SIGNAL = 1.5; EXPRESSED IN HEART, SIGNAL = 1.9; EXPRESSED IN LUNG, SIGNAL = 3.1; EXPRESSED IN BRAIN, SIGNAL = 2.6; EXPRESSED IN ADULT LIVER, SIGNAL =   2; EXPRESSED IN PLACENTA, SIGNAL = 4.6; EXPRESSED IN HELA, SIGNAL =  11; EXPRESSED IN HBL100, SIGNAL = 5.9; EXPRESSED IN BONE MARROW, SIGNAL = 2.9; EST_HUMAN HIT: BE744628.1, EVALUE 1.00e-104; SWISSPROT HIT: Q13123, EVALUE 4.00e-19; NT HIT: gi11416825, EVALUE 1.00e-104
atggaggcccagaccatactgaccacaaatgatattgtcattagcaagcttacccagttgctttcatacctgaggcagggaacccgtaacaagaagcttaagaagaaggataaagggaagctggaagagaagaaacctgctgaggctgacaggagtattttcgaagacattggggattatacaccctccacaatcaagacaccttgggacaaggagcgggagagatatcgggaacgggagcgtgatcaggagacagagaccgtgaccgagagcgagagcgagaacgagatcaggagcgagaacgagatcgggaacgagaacgagatcgggaacgagagtgagagcaggaccgagagagagaagaggaaaagaagagacacagctactttgagaagccaaaagtacatgatgagtccgtggacgttgacaaaggacctgggtcggccaaggagttgatca

SEQ ID NO: 18899 - DNA, 344 bp, Homo sapiens
  MAP TO AL031681.13; EXPRESSED IN BONE MARROW, SIGNAL = 4.5; EXPRESSED IN FETAL LIVER, SIGNAL = 5.1; EXPRESSED IN HELA, SIGNAL = 8.5; EXPRESSED IN BRAIN, SIGNAL = 6.4; EXPRESSED IN LUNG, SIGNAL =  11; EXPRESSED IN BT474, SIGNAL = 2.5; EXPRESSED IN ADULT LIVER, SIGNAL = 6.7; EXPRESSED IN PLACENTA, SIGNAL = 7.6; EXPRESSED IN HEART, SIGNAL = 4.6; EXPRESSED IN HBL100, SIGNAL = 4.2; SWISSPROT HIT: P48498, EVALUE 5.90e-01; NT HIT: X12724.1, EVALUE 9.00e-53; EST_HUMAN HIT: N27177.1, EVALUE 7.00e-54
atggtggaatgtcatcagttaaggcaggaattggccattttcacttcttttgtgattcttcacttgcttcgggccatctggacgtatatacgtgcaggtcacaggggatatgatggcttagcttgggctcagaggcctgacagctgtggcattgtggactttgtcttcgtggtgctcgtggtacgagagagtcagcctgaagtccagtccaggctttccttttccctgctgccttgtgttcaaggaggcaaggcagagcagaaagagctggcctctggtgttatactgagcccatttcaagtcctagctctgccattgctatatcagaacctgggcaaaacagg

SEQ ID NO: 18900 - DNA, 285 bp, Homo sapiens
  MAP TO AL079333.7; EXPRESSED IN PLACENTA, SIGNAL = 3.1; EXPRESSED IN HBL100, SIGNAL = 2.4; EXPRESSED IN HEART, SIGNAL = 1.9; EXPRESSED IN FETAL LIVER, SIGNAL = 1.6; EXPRESSED IN ADULT LIVER, SIGNAL = 1.3; EXPRESSED IN HELA, SIGNAL =   4; EXPRESSED IN BRAIN, SIGNAL = 1.9; EXPRESSED IN LUNG, SIGNAL = 9.7; EXPRESSED IN BONE MARROW, SIGNAL = 1.3; EXPRESSED IN BT474, SIGNAL = 2.2; EST_HUMAN HIT: BE018750.1, EVALUE 0.00e+00; SWISSPROT HIT: P07936, EVALUE 5.50e-01; NT HIT: AF000582.1, EVALUE 6.90e-01
catcacaaacttgtttcttactcttcttatctcttccctaagcctttcaagctcatctactcctcttatcatttcttcagggtccaaatgcctaacgggtgtgtcctctttaaatccctggccaggctgattcggccctcctctggggtttccttctgcttcctggcttacgccttcttcggaaggttgaggatttccttctgcctcctgtggtacatcctccaaagggcgatcttcctcggcctttggcatgttctgtggttttccctcattttcttcacaaga

SEQ ID NO: 18901 - DNA, 325 bp, Homo sapiens
  MAP TO AL079307.2; EXPRESSED IN BT474, SIGNAL =   3; EXPRESSED IN HEART, SIGNAL = 0.92; EXPRESSED IN LUNG, SIGNAL = 1.5; EXPRESSED IN BRAIN, SIGNAL = 1.5; EXPRESSED IN ADULT LIVER, SIGNAL = 1.9; EXPRESSED IN FETAL LIVER, SIGNAL = 0.94; EXPRESSED IN PLACENTA, SIGNAL = 1.7; EXPRESSED IN HELA, SIGNAL =  33; EXPRESSED IN HBL100, SIGNAL = 2.2; EXPRESSED IN BONE MARROW, SIGNAL = 1.6; NT HIT: X87825.1, EVALUE 1.00e-130; EST_HUMAN HIT: AA042813.1, EVALUE 0.00e+00; SWISSPROT HIT: Q95157, EVALUE 2.00e-28
ggccatcacactcaggagtatgtctgtcttccatgcctccaaaaatggcaaagagagacatctgagtcaggcagcctgcataggagatgactctgctgtgagattggatgtccacagtcatcttggggactgtggtggaggtgaaactgatgtcaggcaaggacaggttggagaggaagaagtacatgggggtgtggaggtgggagtcagggctgatggccaggatgatgagcaggttccccagcgccatgaccaggcacgtggacaggaacagcccagtgaggaccggctgccgttctggatcctctgagcttctaggaggagg

SEQ ID NO: 18902 - DNA, 196 bp, Homo sapiens
  MAP TO AC008063.1; EXPRESSED IN PLACENTA, SIGNAL = 3.8; EXPRESSED IN HBL100, SIGNAL = 1.1; EXPRESSED IN HEART, SIGNAL = 1.3; EXPRESSED IN BONE MARROW, SIGNAL = 1.1; EXPRESSED IN FETAL LIVER, SIGNAL = 1.2; EXPRESSED IN HELA, SIGNAL = 1.1; EXPRESSED IN BRAIN, SIGNAL = 0.95; EXPRESSED IN LUNG, SIGNAL = 0.89; EXPRESSED IN ADULT LIVER, SIGNAL = 1.3; NT HIT: U13729.1, EVALUE 1.00e-107; SWISSPROT HIT: P27487, EVALUE 5.00e-33; EST_HUMAN HIT: AU122649.1, EVALUE 1.00e-106
gtatgcaggcccatgtagtcaaaaagcagacactgtcttcagactgaactgggccacttaccttgcaagcacagaaaacattatagtagctagctttgatggcagaggaagtggttaccaaggagataagatcatgcatgcaatcaacagaagactgggaacatttgaagttgaagatcaaattgaagcagccagg

SEQ ID NO: 18903 - DNA, 256 bp, Homo sapiens
  MAP TO AL121778.2; EXPRESSED IN PLACENTA, SIGNAL =  38; EXPRESSED IN HBL100, SIGNAL = 1.3e+02; EXPRESSED IN HEART, SIGNAL =  13; EXPRESSED IN FETAL LIVER, SIGNAL =  19; EXPRESSED IN ADULT LIVER, SIGNAL =  24; EXPRESSED IN HELA, SIGNAL = 1.5e+02; EXPRESSED IN BRAIN, SIGNAL = 8.8; EXPRESSED IN LUNG, SIGNAL =  25; EXPRESSED IN BONE MARROW, SIGNAL =  31; EXPRESSED IN BT474, SIGNAL = 1.7e+02; NT HIT: gi4506718, EVALUE 1.00e-128; SWISSPROT HIT: O18789, EVALUE 1.00e-39; EST_HUMAN HIT: AW973965.1, EVALUE 2.00e-78
atggctggtatcgatgactgctacacctcagcccggggctgcactgccaccctgggcaacttcgccaaggccacctttgatgccatttctaagacctacagctacctgccccccgacctctggaaggagactgtatttaccaagtctccctatgaggaattcactgaccacctcatcaagacccacaccagagtctccgcgcagcggactcaggctccagctgtggctacaacatagggtttttatacaagaaaaa

SEQ ID NO: 18904 - DNA, 157 bp, Homo sapiens
  MAP TO AC010149.1; EXPRESSED IN BT474, SIGNAL =  32; EXPRESSED IN HBL100, SIGNAL =  14; EXPRESSED IN HEART, SIGNAL = 3.4; EXPRESSED IN LUNG, SIGNAL = 7.9; EXPRESSED IN ADULT LIVER, SIGNAL =   5; EXPRESSED IN FETAL LIVER, SIGNAL = 7.8; EXPRESSED IN PLACENTA, SIGNAL = 7.1; EXPRESSED IN HELA, SIGNAL =  29; EXPRESSED IN BRAIN, SIGNAL =   6; EXPRESSED IN BONE MARROW, SIGNAL = 8.8; EST_HUMAN HIT: BF374131.1, EVALUE 3.00e-64; NT HIT: AF056322.1, EVALUE 5.00e-71; SWISSPROT HIT: P07155, EVALUE 8.00e-18
ggttttcattctcttcataatggccttgtccgcctttgccatatcttcaaattttcctttctctttagcaaaaatggtcttccatgtctctgagcacttctttaaaaactctgagaacttgactgaagcatctgggttcttcttcttatgctcctcc

SEQ ID NO: 18905 - DNA, 213 bp, Homo sapiens
  MAP TO AL020996.3; EXPRESSED IN BONE MARROW, SIGNAL = 1.3; EXPRESSED IN BT474, SIGNAL = 3.4; EXPRESSED IN HBL100, SIGNAL = 1.3; EXPRESSED IN HEART, SIGNAL =   3; EXPRESSED IN LUNG, SIGNAL = 1.2; EXPRESSED IN BRAIN, SIGNAL = 1.5; EXPRESSED IN ADULT LIVER, SIGNAL = 1.6; EXPRESSED IN FETAL LIVER, SIGNAL = 1.1; EXPRESSED IN PLACENTA, SIGNAL = 2.9; EXPRESSED IN HELA, SIGNAL = 3.1; EST_HUMAN HIT: AW957699.1, EVALUE 1.00e-117; NT HIT: gi11426820, EVALUE 1.00e-117; SWISSPROT HIT: P33539, EVALUE 1.90e+00
caggatacccatcatgtctgcaaagctgctggccttggacaaagagacgcagtcatcctcttcagacgaactgcaggcagctttgtgttctggtttgcaacattcagggctggcagaacaaagcagggggactgatggaagctcagggacctccacctctgtctcctcggtgatgtcactaatgacaaaggaagttgtagagtggaatgagga

SEQ ID NO: 18906 - DNA, 83 bp, Homo sapiens
  MAP TO AB020871.1; EXPRESSED IN BONE MARROW, SIGNAL = 3.8; EXPRESSED IN HBL100, SIGNAL = 2.8; EXPRESSED IN HELA, SIGNAL =  20; EXPRESSED IN HEART, SIGNAL = 3.2; EXPRESSED IN BRAIN, SIGNAL = 7.2; EXPRESSED IN LUNG, SIGNAL = 4.3; EXPRESSED IN BT474, SIGNAL = 2.8; EXPRESSED IN ADULT LIVER, SIGNAL = 9.8; EXPRESSED IN FETAL LIVER, SIGNAL = 3.6; EXPRESSED IN PLACENTA, SIGNAL =  12; NT HIT: AL163284.2, EVALUE 5.00e-26; EST_HUMAN HIT: AA664377.1, EVALUE 1.00e-30
cctgatcacgcttaatttattgatggcggttccaccaggcctaatcgccacacaccagcaaaggcagtctatgctacagcaca

SEQ ID NO: 18907 - DNA, 166 bp, Homo sapiens
  MAP TO AL033383.24; EXPRESSED IN BT474, SIGNAL = 4.2; EXPRESSED IN PLACENTA, SIGNAL = 2.5; EXPRESSED IN FETAL LIVER, SIGNAL = 1.2; EXPRESSED IN ADULT LIVER, SIGNAL = 1.2; EXPRESSED IN HEART, SIGNAL = 1.1; EXPRESSED IN HELA, SIGNAL =   5; EXPRESSED IN HBL100, SIGNAL =   2; EXPRESSED IN BRAIN, SIGNAL = 1.3; EXPRESSED IN LUNG, SIGNAL = 1.1; EXPRESSED IN BONE MARROW, SIGNAL = 1.2; EST_HUMAN HIT: AA463305.1, EVALUE 7.00e-89; SWISSPROT HIT: Q61136, EVALUE 1.00e-25; NT HIT: AB011108.1, EVALUE 7.00e-89
gttgatgctaattcgtttagctgggtccaacatcagaatctggtccaacaagtcctttagctggtgtactttcttacgttggtcttcaggaagtctctggcacccaatcaagtcagccaacaggtccttagttggattaatggtgctcataacagtaactttctcc

SEQ ID NO: 18908 - DNA, 80 bp, Homo sapiens
  MAP TO AC011004.1; EXPRESSED IN FETAL LIVER, SIGNAL = 1.2; EXPRESSED IN ADULT LIVER, SIGNAL =   2; EXPRESSED IN BT474, SIGNAL = 1.5; EXPRESSED IN PLACENTA, SIGNAL =   1; EXPRESSED IN HBL100, SIGNAL =   1; EXPRESSED IN HEART, SIGNAL = 1.3; EXPRESSED IN BONE MARROW, SIGNAL = 0.98; EXPRESSED IN BRAIN, SIGNAL = 1.1; EST_HUMAN HIT: AI393388.1, EVALUE 2.00e-31; NT HIT: AF064081.1, EVALUE 6.40e-01
tgtgctggtgtcaccactgatggtggcaaagggaagagtgatgctgaggaggaagcaggagaatcctgaaggtcgaaggc

SEQ ID NO: 18909 - DNA, 452 bp, Homo sapiens
  MAP TO AL109748.1; EXPRESSED IN BONE MARROW, SIGNAL = 3.4; EXPRESSED IN BT474, SIGNAL = 3.5; EXPRESSED IN HBL100, SIGNAL = 2.9; EXPRESSED IN BRAIN, SIGNAL = 3.4; EXPRESSED IN LUNG, SIGNAL = 1.2; EXPRESSED IN ADULT LIVER, SIGNAL = 2.5; EXPRESSED IN FETAL LIVER, SIGNAL = 2.9; EXPRESSED IN PLACENTA, SIGNAL = 3.1; EXPRESSED IN HEART, SIGNAL = 2.3; EXPRESSED IN HELA, SIGNAL = 4.2; NT HIT: AL163204.2, EVALUE 0.00e+00; EST_HUMAN HIT: AW131856.1, EVALUE 0.00e+00; SWISSPROT HIT: P31381, EVALUE 5.20e-01
aaaccgggtcctttcttcctcgagaaactgctgtctctgggctgcactcatccggctgagctctgagggccagggcttgttgctctccctgctgcaggcctggcgccggctgccagcctcaagccccagtagctcaggcagggcatccctgagcgggtgcaggtcccccaccaccatcctggccctctacctccgctcctccctgtgcttctgctcagccagttttatggcttcgattttctgcaaccattgctcacgcctcagcttcattttctccttgggcaaaacggtcttggcctctgcacctctcctgatggaagtgacgctccttacgtccagctccagcttttgcaccaaggcactggggtctatcttggtcctggcaaagatgttggtgttgacgaacggaggtataattcttattagtcctgtttttatagatgaagacaatg

SEQ ID NO: 18910 - DNA, 468 bp, Homo sapiens
  MAP TO AL080274.10; EXPRESSED IN PLACENTA, SIGNAL = 3.7; EXPRESSED IN FETAL LIVER, SIGNAL = 0.98; EXPRESSED IN HEART, SIGNAL = 2.6; EXPRESSED IN HELA, SIGNAL =  11; EXPRESSED IN HBL100, SIGNAL = 2.3; EXPRESSED IN BRAIN, SIGNAL = 2.3; EXPRESSED IN LUNG, SIGNAL = 1.5; EXPRESSED IN BT474, SIGNAL = 3.8; NT HIT: gi11421836, EVALUE 0.00e+00; EST_HUMAN HIT: AI834229.1, EVALUE 1.00e-125; SWISSPROT HIT: Q9JWD6, EVALUE 1.30e+00
gacagtcactttgccacactgaacttctgtcatgccttcttgtccaaagtagctgagttcattgccatccagtatcacactggctgtgtagaaggtgtctggctcgatctgcactgggtattcaaaccatacgggaaaggtattgctggacccatctgagaagtacttgctcaagttctgccccaggacaacgccctgccgcttaagttcaatcttggcactgtattctgcagaaccacagctggagccatacagcccaaagccagcaatgaacactcttttatcaactgcaaactggatgctgtcacagcgaccacgatagcgccattggttgcttcgataggcacacgactggaaacggtgacagcgctgggggacaaggcccttacgggctttactcacaaactgaagctcaggctttttggctgcagtataccagaggaagatgtcgttggtctcattgagagt

SEQ ID NO: 18911 - DNA, 193 bp, Homo sapiens
  MAP TO AL034379.8; EXPRESSED IN BT474, SIGNAL = 7.5; EXPRESSED IN PLACENTA, SIGNAL =   3; EXPRESSED IN BONE MARROW, SIGNAL = 2.3; EXPRESSED IN ADULT LIVER, SIGNAL = 1.2; EXPRESSED IN FETAL LIVER, SIGNAL = 2.7; EXPRESSED IN HEART, SIGNAL = 3.1; EXPRESSED IN HELA, SIGNAL = 4.2; EXPRESSED IN HBL100, SIGNAL = 5.2; EXPRESSED IN BRAIN, SIGNAL = 2.8; EXPRESSED IN LUNG, SIGNAL = 3.6; SWISSPROT HIT: P53420, EVALUE 3.30e-01; NT HIT: D85285.1, EVALUE 7.10e+00; EST_HUMAN HIT: BF105898.1, EVALUE 7.00e-81
ggtgactccctgaggaagtagaagaagcagccttctgaggtttcactccctgcacagatccatccagatcctcagggtcctcctggctgggctcattttcctgattgtggaagtctggagaagtgtcactttccgtcccacttcctggctcccctgaaggaaataaaacacaagtttccaaatgcatcatcag

SEQ ID NO: 18912 - DNA, 355 bp, Homo sapiens
  MAP TO AC006946.18; EXPRESSED IN BT474, SIGNAL = 2.3; EXPRESSED IN PLACENTA, SIGNAL = 4.6; EXPRESSED IN BONE MARROW, SIGNAL =   5; EXPRESSED IN BRAIN, SIGNAL = 5.7; EXPRESSED IN ADULT LIVER, SIGNAL = 3.9; EXPRESSED IN FETAL LIVER, SIGNAL = 4.9; EXPRESSED IN HEART, SIGNAL = 5.2; EXPRESSED IN HELA, SIGNAL = 6.4; EXPRESSED IN HBL100, SIGNAL = 2.7; EXPRESSED IN LUNG, SIGNAL = 3.1; EST_HUMAN HIT: BF316383.1, EVALUE 3.00e-35; NT HIT: AB018413.1, EVALUE 2.00e-35; SWISSPROT HIT: P54644, EVALUE 2.00e-08
gcctggaggaaacgctggtttatcctgcggaggggccagactagcagtgacccagatgttctggaatactacaagaatgatggctccaagaagcccctgcgcaccatcaacctgaacctctgtgagcagctggatgttgatgtgactctgaacttcaacaagaaggagattcagaagggctatatgtttgacatcaagaccagtgagcgtaccttttacctggtggctgagaccagggaggacatgaatgagtgggtccagagcatctgtcagatctgtggcttcaggcaggaggaaagcacaggtatgggagcacacacagccctgtctcaggaggggctgagatgaggccctc

SEQ ID NO: 18913 - DNA, 93 bp, Homo sapiens
  MAP TO AC007089.2; EXPRESSED IN PLACENTA, SIGNAL = 1.3; EXPRESSED IN HELA, SIGNAL = 1.3; EXPRESSED IN HEART, SIGNAL =   1; EXPRESSED IN BRAIN, SIGNAL = 1.5; EXPRESSED IN BT474, SIGNAL = 2.7; EXPRESSED IN HBL100, SIGNAL = 5.8; EXPRESSED IN LUNG, SIGNAL = 1.9; EXPRESSED IN BONE MARROW, SIGNAL = 1.4; EXPRESSED IN ADULT LIVER, SIGNAL = 1.3; EXPRESSED IN FETAL LIVER, SIGNAL = 1.1; EST_HUMAN HIT: BE384766.1, EVALUE 3.00e-41; NT HIT: D86962.1, EVALUE 2.00e-41; SWISSPROT HIT: O14978, EVALUE 4.10e+00
tgggagcgctgcaccctctgcctcggggacacctgtggctggatggaccgaggagggcctgaagccgaggctggctgcgggcatgctggccat

SEQ ID NO: 18914 - DNA, 106 bp, Homo sapiens
  MAP TO AC007218.2; EXPRESSED IN ADULT LIVER, SIGNAL = 2.6; EXPRESSED IN PLACENTA, SIGNAL = 3.9; EXPRESSED IN BRAIN, SIGNAL = 2.4; EXPRESSED IN FETAL LIVER, SIGNAL = 1.6; EXPRESSED IN BT474, SIGNAL =   1; EXPRESSED IN HEART, SIGNAL = 1.6; EXPRESSED IN HELA, SIGNAL = 5.1; EXPRESSED IN HBL100, SIGNAL =   2; EXPRESSED IN LUNG, SIGNAL = 2.7; EXPRESSED IN BONE MARROW, SIGNAL = 1.8; SWISSPROT HIT: O75417, EVALUE 4.10e+00; EST_HUMAN HIT: BF333236.1, EVALUE 1.00e-28; NT HIT: AF280107.1, EVALUE 2.00e-05
ggatcctctcggggaactgctctaatgccttcctggaggtctggctcatgaagccgacggttatcagcgtgagattgggatacaggaaaaactctttcccgttcat

SEQ ID NO: 18915 - DNA, 255 bp, Homo sapiens
  MAP TO AC000026.3; EXPRESSED IN PLACENTA, SIGNAL = 2.3; EXPRESSED IN BRAIN, SIGNAL = 1.4; EXPRESSED IN ADULT LIVER, SIGNAL = 1.7; EXPRESSED IN FETAL LIVER, SIGNAL = 1.6; EXPRESSED IN BT474, SIGNAL = 2.4; EXPRESSED IN HEART, SIGNAL =   1; EXPRESSED IN HELA, SIGNAL = 2.3; EXPRESSED IN HBL100, SIGNAL = 2.3; EXPRESSED IN LUNG, SIGNAL =   1; EXPRESSED IN BONE MARROW, SIGNAL = 1.6; NT HIT: U36264.1, EVALUE 0.00e+00; EST_HUMAN HIT: BE144787.1, EVALUE 6.20e-01; SWISSPROT HIT: Q10567, EVALUE 3.00e-22
aaggagcccacatgccagtctccataacttctctctgctcccgccaagacagaagacaagtgacttactgctttgggggccacatatgatcctgacagggtgcccacgccactggtcaggtcaaagaggtcactcaggccactgccgatgggtgctccaagattggctggtactgctgctgttggaggtgccacgaagttggtgcccccaatctggaaagggagggaaagagtcagaggtgggcgtcaagaggca

SEQ ID NO: 18916 - DNA, 77 bp, Homo sapiens
  MAP TO AC006978.2; EXPRESSED IN PLACENTA, SIGNAL = 4.1; EXPRESSED IN HELA, SIGNAL = 5.5; EXPRESSED IN HBL100, SIGNAL =   5; EXPRESSED IN HEART, SIGNAL = 1.6; EXPRESSED IN BONE MARROW, SIGNAL = 1.6; EXPRESSED IN LUNG, SIGNAL = 1.5; EXPRESSED IN BRAIN, SIGNAL = 2.1; EXPRESSED IN ADULT LIVER, SIGNAL = 1.8; EXPRESSED IN BT474, SIGNAL = 5.3; EXPRESSED IN FETAL LIVER, SIGNAL = 1.7; NT HIT: AB015024.1, EVALUE 1.30e-01; EST_HUMAN HIT: AW247772.1, EVALUE 4.00e-36
aattggatgggggaaagccacaaggaacagttctgaactccaggtgcatttgcagctgattttgaatgataagaccc

SEQ ID NO: 18917 - DNA, 179 bp, Homo sapiens
  MAP TO AB020867.1; EXPRESSED IN BT474, SIGNAL = 2.2; EXPRESSED IN FETAL LIVER, SIGNAL = 1.2; EXPRESSED IN PLACENTA, SIGNAL = 1.5; EXPRESSED IN HBL100, SIGNAL = 1.8; EXPRESSED IN HELA, SIGNAL = 2.2; EXPRESSED IN HEART, SIGNAL = 1.1; EXPRESSED IN BRAIN, SIGNAL = 1.1; EXPRESSED IN BONE MARROW, SIGNAL = 1.3; EXPRESSED IN LUNG, SIGNAL = 1.6; NT HIT: gi11427197, EVALUE 1.00e-84; EST_HUMAN HIT: BE163639.1, EVALUE 3.00e-70; SWISSPROT HIT: P43861, EVALUE 3.80e+00
gtaacaccgtgattcacttagatcaagcattagccagaatgagagaatatgagcgtatgaagactgaggctgaaagtaactcaaatatgagatgcatctgcaggattattgaggatggagatggtgctggtgcaggtactacagttaataatttagaaggtatatatttttgttttcgg

SEQ ID NO: 18918 - DNA, 225 bp, Homo sapiens
  MAP TO AC007128.2; EXPRESSED IN BT474, SIGNAL = 2.6; EXPRESSED IN ADULT LIVER, SIGNAL =   5; EXPRESSED IN FETAL LIVER, SIGNAL =   3; EXPRESSED IN HELA, SIGNAL = 4.4; EXPRESSED IN PLACENTA, SIGNAL = 6.2; EXPRESSED IN HBL100, SIGNAL = 3.3; EXPRESSED IN HEART, SIGNAL = 3.5; EXPRESSED IN BRAIN, SIGNAL = 3.7; EXPRESSED IN BONE MARROW, SIGNAL = 4.5; EXPRESSED IN LUNG, SIGNAL = 5.1; EST_HUMAN HIT: AA434554.1, EVALUE 1.00e-44; SWISSPROT HIT: P51617, EVALUE 1.70e+00; NT HIT: AL163246.2, EVALUE 1.00e-32
tcagaggtcttcacagcagcccctctcatcacaggcccagaggccaaggaggaaaaagtggttttgtgggctgggcccagggtgcctcgctgtgtgcagtctagggacttggtgtcctgcatcccagctgctccagccatgactaaaggggccaaggtacagctcagattgttgcttcagagggtacaagcccccagccttggcatcttccatgtggtgttgagc

SEQ ID NO: 18919 - DNA, 91 bp, Homo sapiens
  MAP TO AC007528.5; EXPRESSED IN BONE MARROW, SIGNAL = 2.3; EXPRESSED IN HELA, SIGNAL = 2.6; EXPRESSED IN BRAIN, SIGNAL =   2; EXPRESSED IN LUNG, SIGNAL = 1.6; EXPRESSED IN BT474, SIGNAL = 2.9; EXPRESSED IN ADULT LIVER, SIGNAL = 3.7; EXPRESSED IN FETAL LIVER, SIGNAL = 2.3; EXPRESSED IN PLACENTA, SIGNAL = 3.8; EXPRESSED IN HEART, SIGNAL = 2.4; EXPRESSED IN HBL100, SIGNAL =   9; NT HIT: AF029308.1, EVALUE 6.00e-26; EST_HUMAN HIT: AL079417.1, EVALUE 3.00e-25
gctcttaaaggtggtgcgtctggagttgttttttcttcccggtgggttcgtggtcttgctgacttcagaagtgaagctgcagaccttcgca

SEQ ID NO: 18920 - DNA, 142 bp, Homo sapiens
  MAP TO AC002472.3; EXPRESSED IN HELA, SIGNAL = 4.9; EXPRESSED IN PLACENTA, SIGNAL =   6; EXPRESSED IN HBL100, SIGNAL =   5; EXPRESSED IN HEART, SIGNAL = 6.2; EXPRESSED IN BONE MARROW, SIGNAL = 3.6; EXPRESSED IN LUNG, SIGNAL = 3.5; EXPRESSED IN BRAIN, SIGNAL = 4.4; EXPRESSED IN ADULT LIVER, SIGNAL = 4.4; EXPRESSED IN BT474, SIGNAL = 3.6; EXPRESSED IN FETAL LIVER, SIGNAL = 3.7; EST_HUMAN HIT: AI703080.1, EVALUE 4.00e-54; NT HIT: AB002059.1, EVALUE 1.00e-74; SWISSPROT HIT: O15547, EVALUE 2.00e-17
ttggccacgaggtccccaatgcggaacacgggacagtaggggctgaattgtggttcatagcggcagtgcttaaaataggtggggtcccaggtctccaaggcattggacctgggaggagtgggaaaggtcagatgaggtaggg

SEQ ID NO: 18921 - DNA, 157 bp, Homo sapiens
  MAP TO AC007628.3; EXPRESSED IN BT474, SIGNAL = 5.2; EXPRESSED IN FETAL LIVER, SIGNAL = 1.6; EXPRESSED IN PLACENTA, SIGNAL = 3.1; EXPRESSED IN HELA, SIGNAL = 1.5; EXPRESSED IN HBL100, SIGNAL = 3.6; EXPRESSED IN HEART, SIGNAL = 2.2; EXPRESSED IN LUNG, SIGNAL = 1.3; EXPRESSED IN BONE MARROW, SIGNAL = 2.7; EXPRESSED IN BRAIN, SIGNAL = 1.7; EXPRESSED IN ADULT LIVER, SIGNAL =   2; SWISSPROT HIT: Q91379, EVALUE 5.80e-01; NT HIT: AF051944.1, EVALUE 5.60e+00; EST_HUMAN HIT: R54156.1, EVALUE 9.20e-02
ggaggaggtaaagacaatcccctcgccccttttctttttaatgaaaggagccaatgagaacctgctggaagtaaattcagtgcttctggaaaatgccatattcctgcttcaggaagcccccagcctaccttttttactgcatgggcgccagacacaa

SEQ ID NO: 18922 - DNA, 179 bp, Homo sapiens
  MAP TO AC009493.1; EXPRESSED IN HEART, SIGNAL = 1.3; EXPRESSED IN BONE MARROW, SIGNAL =   1; EXPRESSED IN FETAL LIVER, SIGNAL = 1.3; EXPRESSED IN ADULT LIVER, SIGNAL =   1; SWISSPROT HIT: P47806, EVALUE 3.30e-01; NT HIT: M75967.1, EVALUE 1.00e-96
cgaattggtcccctgcctgtgccttgatttagccattgggctcagccttgctcctcccttccttactcggataggagccactgggatctggagctccagcttccaaattgaagctggcctcaggccaggtgaccttttctttgtaagtttctttcctaagcgtggggttggggggaggc

SEQ ID NO: 18923 - DNA, 293 bp, Homo sapiens
  MAP TO AC009954.1; EXPRESSED IN BT474, SIGNAL =  47; EXPRESSED IN PLACENTA, SIGNAL =  53; EXPRESSED IN HBL100, SIGNAL =  69; EXPRESSED IN HEART, SIGNAL =  27; EXPRESSED IN FETAL LIVER, SIGNAL =  16; EXPRESSED IN ADULT LIVER, SIGNAL =  21; EXPRESSED IN HELA, SIGNAL =  45; EXPRESSED IN BRAIN, SIGNAL =  29; EXPRESSED IN LUNG, SIGNAL =  33; EXPRESSED IN BONE MARROW, SIGNAL =  21; NT HIT: Z22828.1, EVALUE 9.00e-59; SWISSPROT HIT: P53360, EVALUE 4.00e-15; EST_HUMAN HIT: AW409956.1, EVALUE 1.00e-58
ggtgccatgactcccggaatccctatctttagtccaatgatgccttatggcactggactgaccccacagcctattcagaacaccaatagtctgtctattttggaagagcaacaaaggcagcagcagcaacaacaacagcagcagcagcagcagcagcagcagcagcagcaacagcagcagcagcagcagcagcagcagcagcagcagcagcagcaacaggcagtggcagctgcagccgttcagcagtcaacgtcccagcaggcaacacagggaacctcaggccaggcaccaca

SEQ ID NO: 18924 - DNA, 160 bp, Homo sapiens
  MAP TO AF170802.1; EXPRESSED IN PLACENTA, SIGNAL = 2.9; EXPRESSED IN BONE MARROW, SIGNAL = 1.8; EXPRESSED IN HBL100, SIGNAL = 1.4; EXPRESSED IN HELA, SIGNAL = 1.8; EXPRESSED IN HEART, SIGNAL = 2.1; EXPRESSED IN BRAIN, SIGNAL = 1.5; EXPRESSED IN LUNG, SIGNAL = 1.4; EXPRESSED IN BT474, SIGNAL = 1.7; EXPRESSED IN ADULT LIVER, SIGNAL = 1.8; EXPRESSED IN FETAL LIVER, SIGNAL = 2.3; EST_HUMAN HIT: AI159965.1, EVALUE 9.00e-74; NT HIT: U10525.1, EVALUE 2.00e-85; SWISSPROT HIT: P06766, EVALUE 5.00e-23
gttgatacccaaagatcagtattactgtggtgttctctatttcactgggagtgatattttcaataagaatatgagggctcatgccctagaaaagggtttcacaatcaatgagtacaccatccgtcccttgggagtcactggtgagtgtccatgtgtgtat

SEQ ID NO: 18925 - DNA, 213 bp, Homo sapiens
  MAP TO AC010088.2; EXPRESSED IN PLACENTA, SIGNAL = 1.9; EXPRESSED IN BONE MARROW, SIGNAL = 1.5; EXPRESSED IN HEART, SIGNAL = 1.1; EXPRESSED IN HELA, SIGNAL = 2.6; EXPRESSED IN HBL100, SIGNAL = 1.5; EXPRESSED IN LUNG, SIGNAL = 1.1; EXPRESSED IN ADULT LIVER, SIGNAL = 3.9; EXPRESSED IN BT474, SIGNAL = 1.1; SWISSPROT HIT: P26810, EVALUE 3.00e-09; NT HIT: X57147.1, EVALUE 2.00e-52; EST_HUMAN HIT: AW503208.1, EVALUE 1.00e-57
aggatggggatccaatcaagcatgactgccaacaaattatcgtccagacttatgccacacaagataatctcttagaagtccccttaggtaatcctgaccttagcctatatactgatggaagttcatttgtgaagaatgggatacaaagggcaggttatgccatagttagtgatgtaactatacttaaaagtaagtgttttcccctagagacca

SEQ ID NO: 18926 - DNA, 96 bp, Homo sapiens
  MAP TO AF060568.1; EXPRESSED IN ADULT LIVER, SIGNAL = 1.1; EXPRESSED IN HEART, SIGNAL = 2.3; EXPRESSED IN LUNG, SIGNAL = 5.7; NT HIT: AF060568.1, EVALUE 2.00e-47; EST_HUMAN HIT: AA150052.1, EVALUE 8.20e-01; SWISSPROT HIT: Q00998, EVALUE 9.20e+00
gcagatgctcaccctgaagctttggaagtcacggtctcaaaggtgcacgtggaagagctgccaacagtctatttcctgcacacaccaaactcgcag

SEQ ID NO: 18927 - DNA, 324 bp, Homo sapiens
  MAP TO AF146367.1; EXPRESSED IN BRAIN, SIGNAL =   2; EXPRESSED IN BT474, SIGNAL = 3.9; EXPRESSED IN LUNG, SIGNAL = 2.7; EXPRESSED IN BONE MARROW, SIGNAL = 1.9; EXPRESSED IN ADULT LIVER, SIGNAL = 2.6; EXPRESSED IN FETAL LIVER, SIGNAL = 1.9; EXPRESSED IN PLACENTA, SIGNAL = 3.6; EXPRESSED IN HEART, SIGNAL = 2.4; EXPRESSED IN HELA, SIGNAL = 4.1; EXPRESSED IN HBL100, SIGNAL = 7.8; EST_HUMAN HIT: BE387954.1, EVALUE 1.00e-117; SWISSPROT HIT: P15387, EVALUE 4.70e+00; NT HIT: L78810.1, EVALUE 9.00e-87
tcatccctttgtgtccggaattggtgggttcttggtctcactgacgtcaagaatgaagctgcggaccctcgtggtgagtgttacagttcttaaaggcagtgtgtctggagtttgttcgttctgatgttcggacgtgttcagagtttcttccttctggtgggttcgtggtctcactggctcaggagtgaagctgcagaccttcgcggtcagtgttacagctcttaaggtggtgcgtctggagttgttcattcctcccggtgggttcatggtctcgatggcttcaggagtgaagctgcagaccttcgcggtgagtgttacagctcg

SEQ ID NO: 18928 - DNA, 90 bp, Homo sapiens
  MAP TO AC009705.2; EXPRESSED IN PLACENTA, SIGNAL = 1.2; EXPRESSED IN HELA, SIGNAL = 1.9; EXPRESSED IN HEART, SIGNAL = 1.2; EXPRESSED IN BRAIN, SIGNAL = 1.1; EXPRESSED IN BT474, SIGNAL = 1.1; EXPRESSED IN HBL100, SIGNAL = 1.3; EXPRESSED IN LUNG, SIGNAL = 1.1; EXPRESSED IN BONE MARROW, SIGNAL = 0.95; EXPRESSED IN ADULT LIVER, SIGNAL = 2.2; EXPRESSED IN FETAL LIVER, SIGNAL = 1.1; NT HIT: gi5031886, EVALUE 7.00e-44; EST_HUMAN HIT: AW405534.1, EVALUE 8.00e-44; SWISSPROT HIT: Q92540, EVALUE 3.10e+00
ttttggagcaactaccggggcaaactttttgggtggctgttgtgtagacactgaaatgctggggttcccaaaggaatgggtggtctccat

SEQ ID NO: 18929 - DNA, 189 bp, Homo sapiens
  MAP TO AC010104.1; EXPRESSED IN BONE MARROW, SIGNAL = 1.3; EXPRESSED IN ADULT LIVER, SIGNAL = 3.9; EXPRESSED IN BT474, SIGNAL = 1.1; EXPRESSED IN HBL100, SIGNAL = 1.1; EXPRESSED IN HELA, SIGNAL = 2.7; EXPRESSED IN HEART, SIGNAL = 0.93; EXPRESSED IN PLACENTA, SIGNAL = 1.8; NT HIT: X57147.1, EVALUE 8.00e-58; EST_HUMAN HIT: AW503208.1, EVALUE 4.00e-60; SWISSPROT HIT: P10272, EVALUE 7.00e-10
ctatggcataacctgccctttgtatcccattcaccacaaatgaacttccatcagtatataggttaaggtcaggattagctaaggggacttctaaaagatcctctcgggtagcataagtctgggctacaatttgttggcagtcatgctcaattggtttcccaacctctgggagaaaagtggcatggtgga

SEQ ID NO: 18930 - DNA, 90 bp, Homo sapiens
  MAP TO AF186995.1; EXPRESSED IN PLACENTA, SIGNAL = 3.9; EXPRESSED IN HBL100, SIGNAL = 1.7; EXPRESSED IN HELA, SIGNAL = 2.6; EXPRESSED IN HEART, SIGNAL =   2; EXPRESSED IN BONE MARROW, SIGNAL = 1.9; EXPRESSED IN LUNG, SIGNAL = 1.2; EXPRESSED IN BRAIN, SIGNAL = 1.8; EXPRESSED IN ADULT LIVER, SIGNAL = 2.2; EXPRESSED IN BT474, SIGNAL = 1.6; EXPRESSED IN FETAL LIVER, SIGNAL = 1.2; SWISSPROT HIT: P21817, EVALUE 9.50e+00; EST_HUMAN HIT: AA493851.1, EVALUE 5.00e-08
aggcatgaggccctctcctgccctgttcctgcctgacgagcttcccactgtaacaaaaataaaacaattaactgtggatgacaaaattct

SEQ ID NO: 18931 - DNA, 235 bp, Homo sapiens
  MAP TO AC010153.2; EXPRESSED IN HBL100, SIGNAL = 5.1; EXPRESSED IN PLACENTA, SIGNAL = 6.2; EXPRESSED IN HELA, SIGNAL = 4.9; EXPRESSED IN HEART, SIGNAL = 6.3; EXPRESSED IN BRAIN, SIGNAL = 3.8; EXPRESSED IN BONE MARROW, SIGNAL =   5; EXPRESSED IN LUNG, SIGNAL = 3.7; EXPRESSED IN ADULT LIVER, SIGNAL = 5.1; EXPRESSED IN BT474, SIGNAL = 3.7; EXPRESSED IN FETAL LIVER, SIGNAL = 4.5; EST_HUMAN HIT: AI984806.1, EVALUE 3.70e-02; SWISSPROT HIT: Q01336, EVALUE 2.40e+00
tttggatacagtgtttagaaatgatacagttaccaaagaaaatcatgtacaggtgggagagaacagtcatgtaacctatgtgatgggccagaaatacgttacagtcacgcctgtggatattattaagataacacagtcaaatcatgaagatgcttataccaaggatttgtcaaaatctcattttgatgctatacctatgcagaattattaaatcactaaggagctgggtaaaggt

SEQ ID NO: 18932 - DNA, 182 bp, Homo sapiens
  MAP TO AJ239318.3; EXPRESSED IN BT474, SIGNAL = 3.3; EXPRESSED IN ADULT LIVER, SIGNAL = 2.4; EXPRESSED IN FETAL LIVER, SIGNAL = 1.4; EXPRESSED IN HBL100, SIGNAL = 2.4; EXPRESSED IN HELA, SIGNAL = 2.7; EXPRESSED IN PLACENTA, SIGNAL = 2.2; EXPRESSED IN HEART, SIGNAL = 1.5; EXPRESSED IN BRAIN, SIGNAL = 1.5; EXPRESSED IN BONE MARROW, SIGNAL = 1.5; EXPRESSED IN LUNG, SIGNAL = 0.96; NT HIT: AL163202.2, EVALUE 2.00e-98; EST_HUMAN HIT: AW962016.1, EVALUE 4.00e-41; SWISSPROT HIT: P41997, EVALUE 3.00e-05
ctgaattggtcattgtcaatttccaatggccagccactgtgatcctcatcaaggctcttgtctcctttgcaaaatgtcttgaaccaccactgcactgtatgttcgttagcagtttctgggccaaatgcattgttgagtttgcaagttgtctctgctgctttatgacccactttgaactcgaa

SEQ ID NO: 18933 - DNA, 566 bp, Homo sapiens
  MAP TO AL033532.12; EXPRESSED IN PLACENTA, SIGNAL =   1; EXPRESSED IN HBL100, SIGNAL = 0.98; EXPRESSED IN HEART, SIGNAL = 1.3; EXPRESSED IN BONE MARROW, SIGNAL = 1.6; EXPRESSED IN BRAIN, SIGNAL = 1.8; EXPRESSED IN LUNG, SIGNAL = 1.1; EXPRESSED IN ADULT LIVER, SIGNAL = 1.2; EXPRESSED IN FETAL LIVER, SIGNAL = 1.2; NT HIT: AB001523.1, EVALUE 4.00e-16; EST_HUMAN HIT: AU117910.1, EVALUE 3.40e-02; SWISSPROT HIT: P32323, EVALUE 3.00e-05
gctacagcagcttggctcacaggagtgtgtgcagggtgggagtgcacattttgtgctcctaatcaggaaaattcagctgcatgaattcttggcagctctccaaattggcctcggggcttgtgaggactgtgggattcttctgttttaagcactgtaggtgtttatggtggcagtgggggtggtggggatcttctgcttactttttccctgcaatgggaagcctctcctcactctggggagatctaatccaggttgggaagatgggactgcagaggccagctgcctctatgctgccctattcgacttccaatcagccagctgcctctacactgccctattcgacttccaatcagccagctgcgtctacactgccctattcgacttccaatcagccagctgcctctacactgccctattcgtcttccaatcagccagctgcgtctacactgccctattcgacttccaatcagccagctgcctctacactgccctattcgacttccaatcagccagctgcgtctacactgccctattcgacttccaatcagccagctgcctctacactg

SEQ ID NO: 18934 - DNA, 306 bp, Homo sapiens
  MAP TO AL096765.4; EXPRESSED IN HELA, SIGNAL = 5.9; EXPRESSED IN PLACENTA, SIGNAL = 7.9; EXPRESSED IN HBL100, SIGNAL = 8.5; EXPRESSED IN HEART, SIGNAL = 7.6; EXPRESSED IN BONE MARROW, SIGNAL = 7.4; EXPRESSED IN BRAIN, SIGNAL = 5.7; EXPRESSED IN LUNG, SIGNAL = 4.9; EXPRESSED IN ADULT LIVER, SIGNAL = 5.6; EXPRESSED IN BT474, SIGNAL = 6.7; EXPRESSED IN FETAL LIVER, SIGNAL = 6.3; NT HIT: gi4557556, EVALUE 0.00e+00; SWISSPROT HIT: Q09472, EVALUE 7.00e-26; EST_HUMAN HIT: BE931715.1, EVALUE 1.00e-100
cagagagcagcgagaccgcgccagatggcccacgtgcaaatttttcaaaggccaatccaacaccagatgcccccgatgactcccatggcccccatgggtatgaacccacctcccatgaccagaggtcccagtgggcatttggagccagggatgggaccgacagggatgcagcaacagccaccctggagccaaggaggattgcctcagccccagcaactacagtctgggatgccaaggccagccatgatgtcagtggcccagcatggtcaacctttgaacatggctccacaaccaggattgggccag

SEQ ID NO: 18935 - DNA, 364 bp, Homo sapiens
  MAP TO AL096887.5; EXPRESSED IN PLACENTA, SIGNAL = 5.5; EXPRESSED IN HBL100, SIGNAL = 2.3; EXPRESSED IN HEART, SIGNAL =   2; EXPRESSED IN BONE MARROW, SIGNAL = 2.7; EXPRESSED IN HELA, SIGNAL = 4.4; EXPRESSED IN BRAIN, SIGNAL = 1.8; EXPRESSED IN LUNG, SIGNAL = 6.3; EXPRESSED IN BT474, SIGNAL = 1.8; EXPRESSED IN ADULT LIVER, SIGNAL = 5.2; EXPRESSED IN FETAL LIVER, SIGNAL = 1.2; EST_HUMAN HIT: AW340174.1, EVALUE 1.00e-101; NT HIT: AL163246.2, EVALUE 3.00e-87; SWISSPROT HIT: P19028, EVALUE 2.00e-06
ccagaattcacaggcccaggaatcaaggggtggaagtggaagtggcaccactcaccatcacccgtagtgatacactagcaaaatttttgcttcctgttcccacgacattccgttctgctaacctagaagtcttacttctagagggaggaacactgccaccaggagacccaacaacaattccattaaactggaagttaagattgccacgtggacactttgggctccccctacctttaagtcaacaagctaagaagggagtttcagtgttggctggggtgactgacctggactatcaagatgaattcagtctactactccacaacagaggtaaggaagagtatgcatggaatacaggagatccatt

SEQ ID NO: 18936 - DNA, 494 bp, Homo sapiens
  MAP TO AL031687.14; EXPRESSED IN HELA, SIGNAL = 1.1; EXPRESSED IN PLACENTA, SIGNAL = 1.1; EXPRESSED IN HEART, SIGNAL = 1.5; EXPRESSED IN BONE MARROW, SIGNAL = 1.2; EXPRESSED IN LUNG, SIGNAL = 6.9; EXPRESSED IN BRAIN, SIGNAL = 1.4; EXPRESSED IN ADULT LIVER, SIGNAL = 1.3; EXPRESSED IN FETAL LIVER, SIGNAL = 2.8; SWISSPROT HIT: P55285, EVALUE 4.00e-20; NT HIT: gi9506476, EVALUE 1.00e-100; EST_HUMAN HIT: H49319.1, EVALUE 1.80e+00
ggcaagactgtcctcgaggatcctcagtttctccacccgtaacccaccgggttggtctgggtcagttctgcaatgcagcccaaacatccctgccgcccctgctgagacaacgtgtgaccttgggccaaccccgcctgccttggcctccctcgtgaaggcctcagtgtccaccagaccccacccactaaccggccctctgctccctcccgcagcgcctggacttcgaatcccagcccgtgcacaccgtgatcctggaggccctcaacaagttcgtggacccccgcttcgccgacctgggcacgttccgcgaccaggcgatcgtgcgcgtggccgtgaccgacgtggacgagccccccgagttccggccgccctccggcctcctggaggtgcaggaggacgcgcaggtgggctccctggtcggcgtggtgacggcgcgggaccccgacgccgccaaccggcccgtccggtgagacccccgcccggggccgacgcct

SEQ ID NO: 18937 - DNA, 164 bp, Homo sapiens
  MAP TO AL033378.6; EXPRESSED IN PLACENTA, SIGNAL = 2.4; EXPRESSED IN HEART, SIGNAL = 2.1; EXPRESSED IN BRAIN, SIGNAL =   1; EXPRESSED IN BONE MARROW, SIGNAL = 1.2; EXPRESSED IN FETAL LIVER, SIGNAL = 1.1; EXPRESSED IN ADULT LIVER, SIGNAL =   1; SWISSPROT HIT: P18798, EVALUE 5.00e+00; EST_HUMAN HIT: AI498235.1, EVALUE 1.50e+00
aaatcacaaaccatggcaaccaagtccttcttttccatgatcattttttggacgctagacaagatagatgcggcacaatttatacgaagaaaaatgcaatataaaatccaggtcatccaaggtgtgtgtgtgtgtgtgtgtgtgtgtgtgtgtgtgtgtgtgtg

SEQ ID NO: 18938 - DNA, 147 bp, Homo sapiens
  MAP TO AL034378.2; EXPRESSED IN BT474, SIGNAL = 1.3; EXPRESSED IN HBL100, SIGNAL = 1.3; EXPRESSED IN HEART, SIGNAL = 2.2; EXPRESSED IN LUNG, SIGNAL = 3.2; EXPRESSED IN ADULT LIVER, SIGNAL = 2.3; EXPRESSED IN FETAL LIVER, SIGNAL = 2.5; EXPRESSED IN PLACENTA, SIGNAL = 2.2; EXPRESSED IN HELA, SIGNAL = 2.1; EXPRESSED IN BRAIN, SIGNAL = 1.8; EXPRESSED IN BONE MARROW, SIGNAL =   2; NT HIT: AJ131018.1, EVALUE 1.10e+00; EST_HUMAN HIT: BE276199.1, EVALUE 1.30e-01; SWISSPROT HIT: P03400, EVALUE 5.10e+00
attgatgacaacatcactctccatcattcaattcgggagatccctaccaggggcatcttggccacctccgaggccatattgggctggaacctccattatctgtgtagtcaggtgtttgcatttaaaacaaaggaggaattagagtaa

SEQ ID NO: 18939 - DNA, 84 bp, Homo sapiens
  MAP TO AL096770.14; EXPRESSED IN BONE MARROW, SIGNAL = 1.4; EXPRESSED IN BRAIN, SIGNAL = 1.5; EXPRESSED IN BT474, SIGNAL = 2.6; EXPRESSED IN HBL100, SIGNAL = 1.9; EXPRESSED IN HEART, SIGNAL = 1.6; EXPRESSED IN LUNG, SIGNAL = 1.1; EXPRESSED IN ADULT LIVER, SIGNAL = 1.5; EXPRESSED IN FETAL LIVER, SIGNAL = 1.7; EXPRESSED IN PLACENTA, SIGNAL = 1.7; EXPRESSED IN HELA, SIGNAL = 1.9; EST_HUMAN HIT: AW276906.1, EVALUE 9.00e-19; NT HIT: gi11440342, EVALUE 8.00e-19; SWISSPROT HIT: P26196, EVALUE 2.00e-07
gaaataaaacctattccaagcaacattgacaagagcctgcatgtggcagaattccacagcaaggctgtagaaaatgagaagcct

SEQ ID NO: 18940 - DNA, 268 bp, Homo sapiens
  MAP TO AL035448.28; EXPRESSED IN BONE MARROW, SIGNAL = 1.3; EXPRESSED IN BT474, SIGNAL = 1.8; EXPRESSED IN HBL100, SIGNAL = 1.9; EXPRESSED IN HEART, SIGNAL = 1.4; EXPRESSED IN BRAIN, SIGNAL =   2; EXPRESSED IN ADULT LIVER, SIGNAL = 1.2; EXPRESSED IN FETAL LIVER, SIGNAL = 1.1; EXPRESSED IN PLACENTA, SIGNAL = 2.6; EXPRESSED IN HELA, SIGNAL =  11; SWISSPROT HIT: Q05193, EVALUE 8.50e-01; NT HIT: gi11421836, EVALUE 0.00e+00; EST_HUMAN HIT: AA903912.1, EVALUE 2.00e-81
ctctctctaatggtgggataaagaccctgccagtttggggccgggataaggttgttgttactgagattctgctggtggtactgctggacgctggtgctgctggagttggctggctttttacgggggaatatatcagcagccatcttcttctttttagtcttcaaggtaattatttcataacaaactggtggcaacttgctgctgttgctactgctgctgctggtatttgctttctttgagcttttcttggacctgttctttaccgtct

SEQ ID NO: 18941 - DNA, 412 bp, Homo sapiens
  MAP TO AL035588.21; EXPRESSED IN BT474, SIGNAL = 1.6; EXPRESSED IN ADULT LIVER, SIGNAL = 1.7; EXPRESSED IN HEART, SIGNAL = 1.7; EXPRESSED IN PLACENTA, SIGNAL = 2.1; EXPRESSED IN BONE MARROW, SIGNAL = 1.7; EXPRESSED IN FETAL LIVER, SIGNAL = 1.6; EXPRESSED IN HELA, SIGNAL = 1.9; EXPRESSED IN HBL100, SIGNAL = 1.4; EXPRESSED IN BRAIN, SIGNAL = 2.5; EXPRESSED IN LUNG, SIGNAL = 1.1; SWISSPROT HIT: P34576, EVALUE 6.80e+00; EST_HUMAN HIT: BE410556.1, EVALUE 4.00e-03
agggacacaaacatgtgcaccgcaggccagttggccattgtgtctgtcatttgcctatgtatcctcagacacattccttgccctttgtctgatctgctctgccctgccctgccctacagggatgatggcccttgcagcctctgtttctcgggctcttatttcagctggcttccatctgagttcagccagtggggccactggagggagttcacaagctagaaggaagggagaagccagggaatttgtctccctttctctgccttgggtgggctctccagaagcagctgtctcctctgtggctccagcttccccaggccgccttccacaatcacagattctgctaggcagccccctcaccactgtggttttagctctttccacatggttctggcttctgggctctggtaacacc

SEQ ID NO: 18942 - DNA, 152 bp, Homo sapiens
  MAP TO AL109623.8; EXPRESSED IN ADULT LIVER, SIGNAL =   1; EXPRESSED IN BT474, SIGNAL =   1; EXPRESSED IN HEART, SIGNAL = 0.99; EXPRESSED IN PLACENTA, SIGNAL =   1; EXPRESSED IN BONE MARROW, SIGNAL = 1.2; EXPRESSED IN BRAIN, SIGNAL = 1.2; NT HIT: U58105.1, EVALUE 5.40e+00; SWISSPROT HIT: Q92794, EVALUE 2.30e+00
ttatgctgtctctcaattgcctggacttggtctggtggggtctggggctttctgctttccttcttacattcagatttatcatacaacatcgggcctggagaaatgatgtcagaattagcccagaaagtctggagtgtaggctgactgtgctt

SEQ ID NO: 18943 - DNA, 219 bp, Homo sapiens
  MAP TO AP000344.1; EXPRESSED IN BONE MARROW, SIGNAL = 1.4; EXPRESSED IN BRAIN, SIGNAL = 0.9; EXPRESSED IN LUNG, SIGNAL = 1.6; EXPRESSED IN FETAL LIVER, SIGNAL = 2.1; EXPRESSED IN ADULT LIVER, SIGNAL = 1.1; EXPRESSED IN BT474, SIGNAL = 1.5; EXPRESSED IN HEART, SIGNAL = 1.1; EXPRESSED IN PLACENTA, SIGNAL = 1.8; EXPRESSED IN HBL100, SIGNAL =   1; EXPRESSED IN HELA, SIGNAL = 1.1; NT HIT: AF087138.1, EVALUE 5.20e-01; SWISSPROT HIT: Q64176, EVALUE 1.60e-02; EST_HUMAN HIT: H19861.1, EVALUE 7.70e-01
aacatggatctccttggccatcaacctcgctgggctgtcgtcctgaagcggggtgctcagagactcacctctatgatactgagctgtgatcagcttagggatcacaaagaacacatctccaagcaagtccagaagactgtctcggatttcagtcagggagtgcttgtcatggaagtattcaccagccacaaggtgcaaataattgggcaggatgtgctg

SEQ ID NO: 18944 - DNA, 817 bp, Homo sapiens
  MAP TO AC006466.3; EXPRESSED IN PLACENTA, SIGNAL = 0.97; EXPRESSED IN HELA, SIGNAL = 0.91; EXPRESSED IN BRAIN, SIGNAL = 1.2; EXPRESSED IN BONE MARROW, SIGNAL =   1; EXPRESSED IN FETAL LIVER, SIGNAL = 0.97; EXPRESSED IN ADULT LIVER, SIGNAL = 0.92; EXPRESSED IN HBL100, SIGNAL =   1; EXPRESSED IN HEART, SIGNAL =   1; NT HIT: gi11420971, EVALUE 2.00e-03; EST_HUMAN HIT: T08815.1, EVALUE 2.00e-03; SWISSPROT HIT: P11636, EVALUE 3.30e+00
agcctgttgtgatgactgtggctgtgtaggatattggagagactggagatgtgggagcacggatctccctcctcctctcaaatgcctctgcttgtttctgttctggaggtctccagtgtccccagcttatagtcctgatgccttctgggtcccccagagcccctctttaatgtttggggttgggaaggaggaggaagtgatcagcaagacccaaggagagcagcccctgacttttctcaccccgctgctcacctctgacttttctctctctctctttctctctgtttcagtctgggagaccgaaaccattggtaagaggaaccttggtgaggatagaccgctgtctttctgtccatccagcaggagcccagcctcaggagatcccaggctccggctgctgggattggggtgggggtggagtaagaggctcactgggtatcaggttctttcctccttccttcctcccctctccccgaccttggccattctggaggtcggggggcacaggaagatgcacaacacaagcacgacctcaggtccctcacaggcttgtttgggaggacaggacttaccaatggaggggctaagaaacaagctcacgcatgagtgtagctgcatatatgtgcatatgcccagacctgaacatgtgcatcagtccatgcagatattgacatccctgacagctaagaagccggaatgcacagtgagcaagagaacagaagagcaaatgatgcagcatgcaggcagaatagtgaagaagtcaggggaggcttccaggaagaggtggcatgtcagctggaccttgggaaaggagttt

SEQ ID NO: 18945 - DNA, 200 bp, Homo sapiens
  MAP TO AP000350.1; EXPRESSED IN PLACENTA, SIGNAL = 3.6; EXPRESSED IN BONE MARROW, SIGNAL = 2.6; EXPRESSED IN HEART, SIGNAL =   2; EXPRESSED IN HELA, SIGNAL = 2.9; EXPRESSED IN HBL100, SIGNAL = 4.3; EXPRESSED IN BRAIN, SIGNAL = 1.9; EXPRESSED IN LUNG, SIGNAL = 1.5; EXPRESSED IN BT474, SIGNAL = 3.7; EXPRESSED IN ADULT LIVER, SIGNAL = 1.8; EXPRESSED IN FETAL LIVER, SIGNAL = 2.1; EST_HUMAN HIT: BE559843.1, EVALUE 1.00e-76; NT HIT: Y17123.1, EVALUE 1.00e-109; SWISSPROT HIT: Q9Z0H3, EVALUE 2.00e-21
tgttttcagaaatcctctgtgacgatctggatttgaacccgctgacgtttgtgccagccatcgcctctgccatcagacagcagatcgagtcctaccccacggacagcatcctggaggaccagtcagaccagcgcgtcatcatcaaggtaggtgacttctcacccagcactggagccttcctggccctcagggtgggtgtc

SEQ ID NO: 18946 - DNA, 150 bp, Homo sapiens
  MAP TO AP000512.1; EXPRESSED IN FETAL LIVER, SIGNAL = 0.89; EXPRESSED IN ADULT LIVER, SIGNAL = 1.1; EXPRESSED IN PLACENTA, SIGNAL = 1.2; EXPRESSED IN BT474, SIGNAL = 1.3; EXPRESSED IN HEART, SIGNAL = 1.3; EXPRESSED IN HELA, SIGNAL = 2.3; EXPRESSED IN HBL100, SIGNAL = 1.7; EXPRESSED IN BRAIN, SIGNAL =   1; EXPRESSED IN LUNG, SIGNAL = 0.97; EXPRESSED IN BONE MARROW, SIGNAL = 1.3; NT HIT: AB011149.1, EVALUE 1.00e-68; EST_HUMAN HIT: AI281313.1, EVALUE 2.00e-68; SWISSPROT HIT: O60231, EVALUE 5.00e-20
gctgccatgctctctgtcaacaactccatcttctaccgaccaaaggacaaggtcgtccatgctgacaatgcccgtgtcaacttctttctccctggcggtgaccacctggttctgctaaatgtttacacacaggtcactgggcttgggtga

SEQ ID NO: 18947 - DNA, 636 bp, Homo sapiens
  MAP TO AL034550.12; EXPRESSED IN HEART, SIGNAL = 1.1; EXPRESSED IN PLACENTA, SIGNAL = 3.4; EXPRESSED IN HBL100, SIGNAL = 6.1; EXPRESSED IN HELA, SIGNAL =  17; EXPRESSED IN BRAIN, SIGNAL = 1.7; EXPRESSED IN BONE MARROW, SIGNAL = 2.3; EXPRESSED IN LUNG, SIGNAL = 6.6; EXPRESSED IN ADULT LIVER, SIGNAL = 1.9; EXPRESSED IN BT474, SIGNAL = 4.5; EXPRESSED IN FETAL LIVER, SIGNAL = 1.1; SWISSPROT HIT: Q90267, EVALUE 6.00e-03; EST_HUMAN HIT: BE895281.1, EVALUE 0.00e+00; NT HIT: AB023195.1, EVALUE 0.00e+00
cctttagttgtgaagatcagaaggaagtccgtgctatgtcacaggacagtaattcaaatgctgctccaggaaagagcccaggagatcttactacctcgagaacacctcgtttctcatctccaaatgtgatctcctttggtccagagcagacaggtcgggccctgggtgatcagagcaatgttacaggccaagggaagaagctttttggctctgggaatgtggctgcaacccttcagcgccccaggcctgcggacccgatgcctcttcctgctgagatccctccagtttttcccagtgggaagttgggaccaagcacaaactccatgtctggtggggtacagactccaagggaagactgggctccaaagccacatgcctttgttggcagcgtcaagaatgagaagacttttgtggggggtcctcttaaggcaaatgccgagaacaggaaagctactgggcatagtcccctggaactggtgggtcacttggaagggatgccctttgtcatggacttgcccttctggaaattaccccgagagccagggaaggggctcagtgagcctctggagccttcttctctcccctcccaactcagcatcaagcaggcattttatgggaagctttctaaactccaac

SEQ ID NO: 18948 - DNA, 128 bp, Homo sapiens
  MAP TO AP000346.1; EXPRESSED IN BT474, SIGNAL =   1; EXPRESSED IN HBL100, SIGNAL = 0.98; EXPRESSED IN HEART, SIGNAL = 0.9; EXPRESSED IN PLACENTA, SIGNAL = 1.5; EXPRESSED IN HELA, SIGNAL = 1.9; EXPRESSED IN BRAIN, SIGNAL =   1; EXPRESSED IN LUNG, SIGNAL = 6.6; EXPRESSED IN ADULT LIVER, SIGNAL = 1.5; NT HIT: AB007961.1, EVALUE 6.20e-02; EST_HUMAN HIT: BE395061.1, EVALUE 6.00e-58; SWISSPROT HIT: P10265, EVALUE 2.00e-05
ggacaacaacccctacagaaaataccaccacttcagggagtcagccaattacaacaatccaacagctgtcccgcgccacagcaggcagcaccgcagtagatttatgttccacccaaatggtcttttta

SEQ ID NO: 18949 - DNA, 985 bp, Homo sapiens
  MAP TO AP000427.1; EXPRESSED IN HBL100, SIGNAL = 1.5; EXPRESSED IN HELA, SIGNAL = 2.3; EXPRESSED IN BRAIN, SIGNAL = 1.9; EXPRESSED IN LUNG, SIGNAL = 1.9; EXPRESSED IN HEART, SIGNAL = 2.2; EXPRESSED IN PLACENTA, SIGNAL = 2.8; EXPRESSED IN BONE MARROW, SIGNAL = 2.3; EXPRESSED IN ADULT LIVER, SIGNAL = 2.3; EXPRESSED IN BT474, SIGNAL = 1.1; EXPRESSED IN FETAL LIVER, SIGNAL = 2.2; EST_HUMAN HIT: N55162.1, EVALUE 6.40e-01; SWISSPROT HIT: P51805, EVALUE 1.90e+00; NT HIT: AJ277469.1, EVALUE 6.30e-01
ctctgcttgggataattcctctgagaaatggagtatcctccagggcatatgtaaaaagcaaaggtggataagcaattgtattaacaaagattttaacatcgaccattccagtggtcccagcgggagtgcggcagtagacttcattggggttgatggaaataatttgacaaggttcatccccaatagtgactgtagtgttgcctggatagaagccatttcctgtgatcaccagtgtagttccaccaccaatgcttccagaagttggtgatagagatgctactggggggctgctgacagtcaggtttcccagagccaagcctttacttcccaccacaacactaacagaatgatgtccaactgggagaggagtcacaagagcagtgatgttgttttcattaacctctattgctctgaactgttgatttccaatgaaaacagcaatgtcctccaaaacagtccccaaaccttctccttcaataagaacttttacagatcctatgacagagtttgggaagactcctgttatgtaaggagtgatgctttctaagtatgaaaaggtgcagtttccctggcactgggcaggcactccatgtattagaagatctacatccacaagctgttgggcagcaggggatgtttcacattcaatggccgtataattcactgatagaactttacatgggaaatgacccataaggacttttacacctgcagaagaaacggcaaatccagagccttttatggtcacgcttgtcattcctgtagttgatcctgcatttggcaacaccaggtcaatgtttggcaaaagtacaaatcgcctatcaaattcattggacaacgtattgatagcagtgcccaggttgtagacagtcaaagtgacagtttccctgataccaacatccattgagttttgagggtcaatatgacatgtaattgaatcctcactactttcttctacgacacaggggtagctaccaattgtaac

SEQ ID NO: 18950 - DNA, 1093 bp, Homo sapiens
  MAP TO AP000512.1; EXPRESSED IN BRAIN, SIGNAL = 1.3; EXPRESSED IN BONE MARROW, SIGNAL = 1.6; EXPRESSED IN LUNG, SIGNAL = 1.7; EXPRESSED IN ADULT LIVER, SIGNAL = 1.3; EXPRESSED IN HEART, SIGNAL = 0.87; EXPRESSED IN BT474, SIGNAL = 2.4; EXPRESSED IN HELA, SIGNAL = 6.4; EXPRESSED IN PLACENTA, SIGNAL = 1.5; EXPRESSED IN HBL100, SIGNAL = 2.4; SWISSPROT HIT: P08666, EVALUE 1.40e-01; NT HIT: gi11419108, EVALUE 0.00e+00; EST_HUMAN HIT: BE905563.1, EVALUE 0.00e+00
tgatgaagaggggcattccccggtcctgggcggccttgggccgccttttgccttcaatttgaacagtgacacagatgtggaagaaggtcagcaaccagccacagaggaggcctcctcagctgccagaagaggtgccactgtagaggcaaagcagtctgaagctaaagttgtaactgaaatccagcttgaaaaggatcagcctttagtgaaggagagggacaatgatacaaaagtcaagaggggtgcagggaatggggtggttccagctggggtgattctggagaggagccaacctcctggagaggacagtgacacagatgtggatgatgacagcaggcctcctggaaggccagctgaggtccatttggaaagggctcagccttttggcttcatcgacagcgacactgatgcggaagaagagaggatcccagcaaccccagttgtcattcctatgaagaagaggaagatcttccatggagtaggtacaaggggccctggagcaccaggcctggcccatctgcaggagagccaggctggtagtgatacagatgtggaagaaggcaaggccccacaggctgtccctctggagaaaagccaagcttccatggttatcaacagcgatacagatgacgaggaagaagtctcagcagcgctgactttggcacatctgaaagagagccagcctgctatatggaacagagatgcagaagaggacatgccccaacgtgtggtccttctgcagcgaagccaaaccaccactgagagagacagtgacacagacgtggaggaggaagagctcccagtggaaaatagagaagctgtcctcaaggatcacacaaagattagagcccttgttagagcacattcagaaaaggaccaacctccttttggggacagtgatgacagtgtggaagcagataagagctcacctgggatccacctggagagaagccaagcctccaccacagtggacatcaacacacaagtggagaaggaagtcccgccagggtcagccattatacatataaagaagcatcaggtgtctgtggaggggacaaatcaaacagatgtgaaagcagttgggggaccagca

SEQ ID NO: 18951 - DNA, 114 bp, Homo sapiens
  MAP TO AP000515.1; EXPRESSED IN BRAIN, SIGNAL = 1.4; EXPRESSED IN BONE MARROW, SIGNAL = 1.6; EXPRESSED IN ADULT LIVER, SIGNAL = 1.1; EXPRESSED IN FETAL LIVER, SIGNAL = 1.8; EXPRESSED IN HELA, SIGNAL = 1.1; EXPRESSED IN HEART, SIGNAL = 0.87; SWISSPROT HIT: Q04561, EVALUE 4.00e+00; NT HIT: AF055066.1, EVALUE 3.00e-03
atttctgtaacgtaaagcacttgtgaaaataaaggaccagtcatcaccttgatgattctagagatggggacccgattcccagaagtcataggtcagaagggaaagactgctgag

SEQ ID NO: 18952 - DNA, 618 bp, Homo sapiens
  MAP TO AC007919.18; EXPRESSED IN HELA, SIGNAL = 3.5; EXPRESSED IN PLACENTA, SIGNAL = 1.8; EXPRESSED IN HBL100, SIGNAL = 3.6; EXPRESSED IN BRAIN, SIGNAL = 2.3; EXPRESSED IN LUNG, SIGNAL = 1.1; EXPRESSED IN HEART, SIGNAL = 1.4; EXPRESSED IN BONE MARROW, SIGNAL = 1.5; EXPRESSED IN ADULT LIVER, SIGNAL =   1; EXPRESSED IN BT474, SIGNAL = 2.9; EXPRESSED IN FETAL LIVER, SIGNAL = 1.3; NT HIT: AB037784.1, EVALUE 0.00e+00; EST_HUMAN HIT: BE154994.1, EVALUE 0.00e+00; SWISSPROT HIT: P22760, EVALUE 6.00e-39
agaagttggtgggccagctagtgaaaatcatacatccgtgaaagccatcctcaaagtgatccagggtcacctccacaccggcactctccaaacgcttggcatacatgatgccatcgtctctgaggacatcatgctcacacgtcagaatgtaggtctttgggaggagctgcagcactgcctggtctgcaatgagtggggcggagcgggcatccagcaactgaggaagctcctggacaatcctggcattgcctgtggtctgtacaacaggcttgtagttctttgtgaaggatgcaggcaagagggatgtccagtttagacgggccctgacagcagcagcctcttccacatcaagtgaagtgtgattgttaacgatcattgcctgcacaaagtcatagttgcctttgaagtagtccacccaatacttcaccatgacatagcggggcaggattggggtgttcacattttgctgataagatggtgtgttaaaatctaaagcttgaagaactggataaattaaagcttgtagtttgagcttattttttaggctggcatcttgagtaaactagagaagaggaagcaaatacattatttcattttgcatgccttcttttataggaa

SEQ ID NO: 18953 - DNA, 185 bp, Homo sapiens
  MAP TO AP000550.1; EXPRESSED IN BT474, SIGNAL =   3; EXPRESSED IN HELA, SIGNAL = 1.4; EXPRESSED IN PLACENTA, SIGNAL = 2.5; EXPRESSED IN HEART, SIGNAL = 0.85; EXPRESSED IN HBL100, SIGNAL = 2.4; NT HIT: gi4504626, EVALUE 2.00e-95; EST_HUMAN HIT: BE171984.1, EVALUE 6.00e-96; SWISSPROT HIT: Q62786, EVALUE 1.00e-04
gcattcatattccccggcatcccgggcctgaagatctgtgatgtgcaatagggttgggttcccctggactctttctatgaagatcttccctccgcggacgcgctgggtgtagatggcataggggaaggaagagtccatggtgctgacgatctgcacctctcgctctggcgacgaaggcaggtaaa

SEQ ID NO: 18954 - DNA, 164 bp, Homo sapiens
  MAP TO AC007848.11; EXPRESSED IN PLACENTA, SIGNAL = 2.6; EXPRESSED IN HBL100, SIGNAL = 1.4; EXPRESSED IN HEART, SIGNAL = 2.4; EXPRESSED IN LUNG, SIGNAL = 1.8; EXPRESSED IN BRAIN, SIGNAL = 2.1; EXPRESSED IN BONE MARROW, SIGNAL = 2.8; EXPRESSED IN ADULT LIVER, SIGNAL = 2.3; EXPRESSED IN FETAL LIVER, SIGNAL = 2.1; EXPRESSED IN BT474, SIGNAL = 1.4; EXPRESSED IN HELA, SIGNAL = 1.9; EST_HUMAN HIT: BE168660.1, EVALUE 9.70e-02; SWISSPROT HIT: Q12397, EVALUE 3.80e+00
gaaagactgaaagggaaactgagtggccagactccggccctgacgcagccttgggaagagatgttgctgtggcccccacgcacaactgggactttaatgactgagaccagcctaaccctggatttgctgtccttgcaccccatcacctccattgtagttgttat

SEQ ID NO: 18955 - DNA, 127 bp, Homo sapiens
  MAP TO AC007898.1; EXPRESSED IN BT474, SIGNAL = 1.8; EXPRESSED IN HELA, SIGNAL = 1.7; EXPRESSED IN PLACENTA, SIGNAL = 2.3; EXPRESSED IN HBL100, SIGNAL = 1.9; EXPRESSED IN LUNG, SIGNAL = 1.8; EXPRESSED IN BRAIN, SIGNAL = 2.3; EXPRESSED IN HEART, SIGNAL =   2; EXPRESSED IN BONE MARROW, SIGNAL = 2.2; EXPRESSED IN ADULT LIVER, SIGNAL = 1.9; EXPRESSED IN FETAL LIVER, SIGNAL = 1.8; NT HIT: AE004095.1, EVALUE 2.80e-01
acatggtgtttcccaacactttaaatccctttatatgatcagcaaagatcgtggttatgactacatggaggttgccactgctctgggtaaaggtcaagctctccttccatgcagcaagtgcaaacat

SEQ ID NO: 18956 - DNA, 109 bp, Homo sapiens
  MAP TO AC006205.7; EXPRESSED IN BONE MARROW, SIGNAL = 7.4; EXPRESSED IN FETAL LIVER, SIGNAL = 6.8; EXPRESSED IN ADULT LIVER, SIGNAL = 6.3; EXPRESSED IN BT474, SIGNAL = 4.5; EXPRESSED IN HELA, SIGNAL = 6.5; EXPRESSED IN HBL100, SIGNAL = 8.8; EXPRESSED IN BRAIN, SIGNAL = 5.7; EXPRESSED IN PLACENTA, SIGNAL =   9; EXPRESSED IN HEART, SIGNAL = 5.2; EXPRESSED IN LUNG, SIGNAL = 5.1; EST_HUMAN HIT: AA425784.1, EVALUE 1.40e+00
aagaagaagaagaagcagcagcagcaacagcagcagcatcaccaacttatcagggaagggggcaaattatttatcaaataaattacaaatagcttaaataaaagtaaaa

SEQ ID NO: 18957 - DNA, 108 bp, Homo sapiens
  MAP TO AC008012.8; EXPRESSED IN BT474, SIGNAL = 1.1; EXPRESSED IN HELA, SIGNAL = 2.3; EXPRESSED IN PLACENTA, SIGNAL = 4.1; EXPRESSED IN HBL100, SIGNAL = 1.5; EXPRESSED IN LUNG, SIGNAL = 1.6; EXPRESSED IN BRAIN, SIGNAL = 2.4; EXPRESSED IN BONE MARROW, SIGNAL = 2.4; EXPRESSED IN ADULT LIVER, SIGNAL = 2.4; EXPRESSED IN HEART, SIGNAL = 2.3; EXPRESSED IN FETAL LIVER, SIGNAL = 5.5; NT HIT: D31814.1, EVALUE 9.20e-01; SWISSPROT HIT: P47513, EVALUE 9.10e+00; EST_HUMAN HIT: BF239059.1, EVALUE 1.40e+00
gtgaagcacaaatcctcctggcagatgggaagaatgccacctgtgccagcaatggcaacaacttcagatacaaaggatctgaatgtcaggaggaagtcacagggtagg

SEQ ID NO: 18958 - DNA, 394 bp, Homo sapiens
  MAP TO AC006391.7; EXPRESSED IN FETAL LIVER, SIGNAL = 1.7; EXPRESSED IN ADULT LIVER, SIGNAL = 1.8; EXPRESSED IN BT474, SIGNAL = 1.1; EXPRESSED IN HELA, SIGNAL = 1.4; EXPRESSED IN PLACENTA, SIGNAL = 1.6; EXPRESSED IN HBL100, SIGNAL = 1.6; EXPRESSED IN BRAIN, SIGNAL = 2.2; EXPRESSED IN HEART, SIGNAL = 1.2; EXPRESSED IN BONE MARROW, SIGNAL = 3.1; NT HIT: U48231.1, EVALUE 2.00e-04; EST_HUMAN HIT: AA831901.1, EVALUE 6.00e-06
caaaggtccttatagaagggaggcaggagagtcagagtcagagagggagatgggtaggtggaagcacagagagagagaaaagaagaataggaaggaaggaaggaagaagggaaggaaggaaggaaagaaggagaaggaggaggagaaggagaaggaggaggagaagaagaagaagaaaaagaaaaagaagaagaaggagaaggaagaagaagaagaagaaggaggaggaggaagaggaggaggaggggaagaagaagaaggaggggaagatgaaggagaaggaggggaaggggaaggagaaggagaagaggaagaggaagaagaagaagaaagaggaagaagaagaagaagaaagcgggaagaggaggagaaggtgtagaggagaaggaggaga

SEQ ID NO: 18959 - DNA, 86 bp, Homo sapiens
  MAP TO AC007878.2; EXPRESSED IN FETAL LIVER, SIGNAL = 1.5; EXPRESSED IN BT474, SIGNAL = 1.2; EXPRESSED IN HBL100, SIGNAL = 1.2; EXPRESSED IN HELA, SIGNAL = 2.1; EXPRESSED IN HEART, SIGNAL = 1.4; EXPRESSED IN PLACENTA, SIGNAL = 1.5; EXPRESSED IN LUNG, SIGNAL = 1.7; EXPRESSED IN BRAIN, SIGNAL = 1.4; EXPRESSED IN BONE MARROW, SIGNAL = 1.9; EXPRESSED IN ADULT LIVER, SIGNAL = 1.6; EST_HUMAN HIT: AV731382.1, EVALUE 2.00e-05; NT HIT: AF202635.1, EVALUE 3.00e-06
tttgtccttattgtctggcactgatttggaagcacttatctccatcaaatcatcatcttttaattcctccgatgtggtatctatct

SEQ ID NO: 18960 - DNA, 101 bp, Homo sapiens
  MAP TO AC007922.1; EXPRESSED IN PLACENTA, SIGNAL = 5.5; EXPRESSED IN BONE MARROW, SIGNAL = 4.4; EXPRESSED IN LUNG, SIGNAL = 3.4; EXPRESSED IN FETAL LIVER, SIGNAL = 3.8; EXPRESSED IN ADULT LIVER, SIGNAL = 5.6; EXPRESSED IN BT474, SIGNAL = 6.1; EXPRESSED IN HBL100, SIGNAL =  16; EXPRESSED IN HELA, SIGNAL = 5.7; EXPRESSED IN HEART, SIGNAL = 4.1; EXPRESSED IN BRAIN, SIGNAL = 3.3; NT HIT: L78810.1, EVALUE 3.00e-22; EST_HUMAN HIT: AA399066.1, EVALUE 2.00e-36; SWISSPROT HIT: P49844, EVALUE 5.50e+00
  unsure 99
aggcggcgcgtctggagttgtttgttcctcccggtgggctcgtggtctccctggcttcaggagtgaagctgcagaccttcgcagtgagtgttacagctnca

SEQ ID NO: 18961 - DNA, 166 bp, Homo sapiens
  MAP TO AC006452.2; EXPRESSED IN HBL100, SIGNAL = 1.1; EXPRESSED IN HEART, SIGNAL = 1.1; EXPRESSED IN PLACENTA, SIGNAL = 1.6; EXPRESSED IN BONE MARROW, SIGNAL = 1.1; EXPRESSED IN BRAIN, SIGNAL = 1.5; EXPRESSED IN ADULT LIVER, SIGNAL = 1.9; EXPRESSED IN BT474, SIGNAL = 3.3; SWISSPROT HIT: P46040, EVALUE 3.40e-01; NT HIT: AB033103.1, EVALUE 2.00e-86; EST_HUMAN HIT: BE781192.1, EVALUE 3.00e-86
ctacgctttcagaacgatcccctctccgtgctgaagcaggtcaagaaactcgagcaggctttgaaggatgggtcggcagggctggatccccagttaccagggacttgttactccccacactgccctcctgacaaggcagaggcagggtccacccttcctgagaacc

SEQ ID NO: 18962 - DNA, 181 bp, Homo sapiens
  MAP TO AC006977.3; EXPRESSED IN FETAL LIVER, SIGNAL = 1.1; EXPRESSED IN ADULT LIVER, SIGNAL = 1.6; EXPRESSED IN HBL100, SIGNAL = 0.97; EXPRESSED IN HELA, SIGNAL = 1.2; EXPRESSED IN HEART, SIGNAL =   1; EXPRESSED IN PLACENTA, SIGNAL = 2.3; EXPRESSED IN BRAIN, SIGNAL =   1; NT HIT: AB002321.1, EVALUE 3.60e-01; SWISSPROT HIT: Q02368, EVALUE 5.70e-01; EST_HUMAN HIT: AW167100.1, EVALUE 4.30e-01
aagaagaggagatagctctgggagaaaaggtggcccagaaaccagctctgagcctcatggctgcaggcaaggtctgcaggttcctggtcctgattgcaggccatttgctgccttgagtggtggttacacaaggccagccctgggggtatcacccagaacacctagtacacgaatttcagtt

SEQ ID NO: 18963 - DNA, 117 bp, Homo sapiens
  MAP TO AC009310.1; EXPRESSED IN PLACENTA, SIGNAL = 1.3; EXPRESSED IN BONE MARROW, SIGNAL =   1; EXPRESSED IN BRAIN, SIGNAL = 0.96; EXPRESSED IN ADULT LIVER, SIGNAL = 1.2; EXPRESSED IN FETAL LIVER, SIGNAL = 1.1; EXPRESSED IN HELA, SIGNAL = 0.95; EXPRESSED IN HEART, SIGNAL =   1; SWISSPROT HIT: Q00037, EVALUE 4.10e+00; NT HIT: gi4503210, EVALUE 8.60e-01
gtggaggattctttttatactcctgggaagcagtttggtagaagaatcctgaatgcaatagcatccaagagggaaagtacccatctgtctgatgcagctgctatagttctagagttg

SEQ ID NO: 18964 - DNA, 215 bp, Homo sapiens
  MAP TO AC009413.1; EXPRESSED IN PLACENTA, SIGNAL = 4.9; EXPRESSED IN BONE MARROW, SIGNAL = 3.1; EXPRESSED IN LUNG, SIGNAL = 3.6; EXPRESSED IN BRAIN, SIGNAL = 2.3; EXPRESSED IN BT474, SIGNAL = 1.7; EXPRESSED IN FETAL LIVER, SIGNAL = 2.4; EXPRESSED IN HEART, SIGNAL = 3.2; EXPRESSED IN HELA, SIGNAL = 2.5; EXPRESSED IN HBL100, SIGNAL = 2.6; EXPRESSED IN ADULT LIVER, SIGNAL = 4.2; NT HIT: AB038498.1, EVALUE 2.00e+00; SWISSPROT HIT: P22989, EVALUE 2.00e+00
tgcacatagtgcgaatgagacagaagtgtgggatgaaacagatgaggaggatggagcagcacatgtgtgggtgaggcagaaacaaggcagaagggctttgaatgtggcagatccatcagatacacccctgaagcctgcagacaggatggtctctgggaggatgtgctcgaagaaaatgactggctctgaaagtgagtggtgttaggaggattctt

SEQ ID NO: 18965 - DNA, 114 bp, Homo sapiens
  MAP TO AC009421.1; EXPRESSED IN BONE MARROW, SIGNAL = 1.5; EXPRESSED IN LUNG, SIGNAL = 1.4; EXPRESSED IN BT474, SIGNAL = 1.7; EXPRESSED IN ADULT LIVER, SIGNAL = 3.1; EXPRESSED IN HELA, SIGNAL = 3.3; EXPRESSED IN PLACENTA, SIGNAL = 2.9; EXPRESSED IN HBL100, SIGNAL = 1.6; EXPRESSED IN HEART, SIGNAL = 1.3; EXPRESSED IN BRAIN, SIGNAL = 1.3; NT HIT: AL163209.2, EVALUE 6.00e-30; EST_HUMAN HIT: AA984295.1, EVALUE 1.00e-27; SWISSPROT HIT: P04323, EVALUE 1.20e-01
  unsure 87
atcaaggacttaaaagatgcaggagtggtgattcccaccacatccccgttcaactctcctatttggcctgtgcagaagacagacggnctcttggagaatgacagtggattatca

SEQ ID NO: 18966 - DNA, 90 bp, Homo sapiens
  MAP TO AC009440.1; EXPRESSED IN HELA, SIGNAL = 1.5; EXPRESSED IN PLACENTA, SIGNAL = 2.1; EXPRESSED IN HBL100, SIGNAL = 1.3; EXPRESSED IN HEART, SIGNAL = 1.9; EXPRESSED IN BONE MARROW, SIGNAL = 2.2; EXPRESSED IN BRAIN, SIGNAL = 1.8; EXPRESSED IN LUNG, SIGNAL = 1.4; EXPRESSED IN ADULT LIVER, SIGNAL = 2.1; EXPRESSED IN BT474, SIGNAL = 1.1; EXPRESSED IN FETAL LIVER, SIGNAL =   2; NT HIT: L36824.1, EVALUE 7.40e-01; EST_HUMAN HIT: BE067458.1, EVALUE 2.80e-01
gcaaagattcctacccaagcttcctcatctgtgaacagaacaggaaggcctcggtaaataggtacatgttgacaagcaacaacctactca

SEQ ID NO: 18967 - DNA, 85 bp, Homo sapiens
  MAP TO AC009415.1; EXPRESSED IN LUNG, SIGNAL = 1.3; EXPRESSED IN BRAIN, SIGNAL = 1.2; EXPRESSED IN ADULT LIVER, SIGNAL = 1.6; EXPRESSED IN PLACENTA, SIGNAL = 1.5; EXPRESSED IN HBL100, SIGNAL = 0.99; EXPRESSED IN HELA, SIGNAL =   2; EXPRESSED IN BONE MARROW, SIGNAL = 1.5; EXPRESSED IN BT474, SIGNAL =   1; EXPRESSED IN FETAL LIVER, SIGNAL = 1.2; EXPRESSED IN HEART, SIGNAL = 1.1; NT HIT: AL163201.2, EVALUE 3.00e-21; EST_HUMAN HIT: AW995263.1, EVALUE 4.00e-21
caacaccatccaggaaaacatgacttcaccaaataaactaaataaggcaccagagagcaatcctgaagaaacagagatatgtgat

SEQ ID NO: 18968 - DNA, 92 bp, Homo sapiens
  MAP TO AC009476.2; EXPRESSED IN FETAL LIVER, SIGNAL =  14; EXPRESSED IN ADULT LIVER, SIGNAL = 3.8; EXPRESSED IN HELA, SIGNAL = 4.1; EXPRESSED IN BONE MARROW, SIGNAL = 6.1; EXPRESSED IN LUNG, SIGNAL = 2.1; EXPRESSED IN BRAIN, SIGNAL = 7.5; EXPRESSED IN BT474, SIGNAL = 1.5; EXPRESSED IN PLACENTA, SIGNAL =   7; EXPRESSED IN HEART, SIGNAL = 3.2; EXPRESSED IN HBL100, SIGNAL = 2.8; NT HIT: AF201960.1, EVALUE 2.60e+00; EST_HUMAN HIT: AW959567.1, EVALUE 7.80e-01
ggtgttagatttggtgttctctgaaggtggcattgttctttcattcagaaatctggaaaggatggttcttatacttgaaacacatgtgtcag

SEQ ID NO: 18969 - DNA, 299 bp, Homo sapiens
  MAP TO AC010106.1; EXPRESSED IN FETAL LIVER, SIGNAL =   1; EXPRESSED IN HBL100, SIGNAL = 1.1; EXPRESSED IN HELA, SIGNAL = 1.5; EXPRESSED IN HEART, SIGNAL = 0.93; EXPRESSED IN BONE MARROW, SIGNAL = 1.6; EXPRESSED IN ADULT LIVER, SIGNAL = 1.9; EXPRESSED IN PLACENTA, SIGNAL = 1.9; EXPRESSED IN BRAIN, SIGNAL = 1.5; NT HIT: AF224669.1, EVALUE 2.00e-59; EST_HUMAN HIT: AW340174.1, EVALUE 1.00e-51; SWISSPROT HIT: P19028, EVALUE 5.00e-04
tagaatcttgatagtctgagtcaatcatcccagccaacactgtacctcccttcttaggctgttggtgtaaaggtaggagaagtgcaaagtgtccaggtggcaatcttaatttccagtttaattgaatcattgctatgtttcctggtggcagcattcctccctctgaaactaagacctctaggccagcagaacataatgtcacagaaacaggaagcaaatatgttgttagtgggtcactaggggtgatggtgagtgttgccacttccaattccactccttgattcctggacccatgattc

SEQ ID NO: 18970 - DNA, 183 bp, Homo sapiens
  MAP TO AC010879.1; EXPRESSED IN HELA, SIGNAL = 1.4; EXPRESSED IN HEART, SIGNAL = 0.95; EXPRESSED IN PLACENTA, SIGNAL = 0.97; EXPRESSED IN BONE MARROW, SIGNAL = 0.9; EXPRESSED IN ADULT LIVER, SIGNAL =   1; EXPRESSED IN FETAL LIVER, SIGNAL = 0.98; NT HIT: AF053357.1, EVALUE 1.40e+00; SWISSPROT HIT: Q04966, EVALUE 8.70e+00
atgagagctcaggaaaaagataagggctgcagagaaaaccttaatcatcgtaaggaagacctatgcaactttgaacagaatgacactagaaatatggacagaaaactccatttatatgagccatcagaggcaaatgagaaatatgccattgcacaatgaaagaaaggtgatcattgctacaaa

SEQ ID NO: 18971 - DNA, 102 bp, Homo sapiens; identical to SEQ ID NO: 17920
  MAP TO AC010092.1; EXPRESSED IN PLACENTA, SIGNAL = 1.5; EXPRESSED IN BONE MARROW, SIGNAL = 1.5; EXPRESSED IN LUNG, SIGNAL = 1.1; EXPRESSED IN BRAIN, SIGNAL = 1.6; EXPRESSED IN FETAL LIVER, SIGNAL = 2.6; EXPRESSED IN BT474, SIGNAL = 1.2; EXPRESSED IN HEART, SIGNAL = 1.5; EXPRESSED IN HELA, SIGNAL = 1.4; EXPRESSED IN HBL100, SIGNAL = 1.1; EXPRESSED IN ADULT LIVER, SIGNAL = 1.5; EST_HUMAN HIT: AW794740.1, EVALUE 4.00e-03; SWISSPROT HIT: Q11131, EVALUE 1.10e+00; NT HIT: AB026493.1, EVALUE 5.50e-02

SEQ ID NO: 18972 - DNA, 218 bp, Homo sapiens
  MAP TO AC010102.1; EXPRESSED IN BRAIN, SIGNAL = 2.9; EXPRESSED IN BONE MARROW, SIGNAL =   3; EXPRESSED IN LUNG, SIGNAL = 1.1; EXPRESSED IN BT474, SIGNAL = 2.1; EXPRESSED IN ADULT LIVER, SIGNAL = 2.3; EXPRESSED IN FETAL LIVER, SIGNAL =   2; EXPRESSED IN HELA, SIGNAL =   2; EXPRESSED IN PLACENTA, SIGNAL = 2.5; EXPRESSED IN HBL100, SIGNAL = 4.8; EXPRESSED IN HEART, SIGNAL = 2.3
gggagaggaggaggaaggagaaaggagaaggaggacaaagaggaggaggaggaagagaaggagaaaaggagaaggaggaagaaaaagaaggagaaggaggaggagaaaaggaaaaagagaagggggaagaaggagaaggagaaaaaggagggcaaggagaaagagaaagggaagaaggaggaggaggatggggagtaggagggggaggaggaagagga

SEQ ID NO: 18973 - DNA, 115 bp, Homo sapiens
  MAP TO AC010898.1; EXPRESSED IN PLACENTA, SIGNAL = 1.2; EXPRESSED IN HEART, SIGNAL = 1.1; EXPRESSED IN ADULT LIVER, SIGNAL = 0.98; SWISSPROT HIT: Q45358, EVALUE 9.30e+00; NT HIT: AF003528.1, EVALUE 3.00e-16; EST_HUMAN HIT: AA928194.1, EVALUE 5.00e-21
agtggttgtacctggtattgatgactaccttcttctactaccctttctatattccctttggtttcagcaagcacctgagcatattttgagattggccagagtgagacagtatcac

SEQ ID NO: 18974 - DNA, 237 bp, Homo sapiens
  MAP TO AC010903.1; EXPRESSED IN ADULT LIVER, SIGNAL = 4.9; EXPRESSED IN BT474, SIGNAL = 1.8; EXPRESSED IN FETAL LIVER, SIGNAL = 1.6; EXPRESSED IN PLACENTA, SIGNAL = 5.3; EXPRESSED IN HELA, SIGNAL = 4.3; EXPRESSED IN HBL100, SIGNAL = 2.1; EXPRESSED IN HEART, SIGNAL = 1.9; EXPRESSED IN BONE MARROW, SIGNAL = 1.8; EXPRESSED IN LUNG, SIGNAL = 1.4; EXPRESSED IN BRAIN, SIGNAL = 1.8; EST_HUMAN HIT: BF508546.1, EVALUE 3.00e-62; SWISSPROT HIT: P19028, EVALUE 3.00e-05; NT HIT: X89211.1, EVALUE 4.00e-66
tttcatcttgacagtccaggtcaatcaccccagccaacactgtaactctcttcttagcctgttgacttaaaggtatgaggagcccaaagtgtccaggtggcaatcttaacttccagtttaatggaatcgttgttgtacctcctggtggcagcattcctccctctggaactaagacatctacaccagcagaatgtaatgctgcaggaacatggagcaaaaattttgctgttgtatcac

SEQ ID NO: 18975 - DNA, 105 bp, Homo sapiens
  MAP TO AC010966.1; EXPRESSED IN HEART, SIGNAL = 4.6; EXPRESSED IN BRAIN, SIGNAL = 3.4; EXPRESSED IN BONE MARROW, SIGNAL = 3.3; EXPRESSED IN LUNG, SIGNAL = 2.7; EXPRESSED IN BT474, SIGNAL = 2.8; EXPRESSED IN ADULT LIVER, SIGNAL = 4.2; EXPRESSED IN FETAL LIVER, SIGNAL = 4.6; EXPRESSED IN HELA, SIGNAL = 4.2; EXPRESSED IN PLACENTA, SIGNAL = 4.9; EXPRESSED IN HBL100, SIGNAL = 3.9; NT HIT: gi5802995, EVALUE 2.30e-01; EST_HUMAN HIT: AW978516.1, EVALUE 1.00e-46
  unsure 61
  unsure 104
gaccgtgctcacacaagaagccatcatcactgtgaaggggattagccttggtagttatttnggaaagtttaatggccaatacgatatcatccaatgcaaagaang

SEQ ID NO: 18976 - DNA, 198 bp, Homo sapiens
  MAP TO AL049691.17; EXPRESSED IN BRAIN, SIGNAL = 1.2; EXPRESSED IN BONE MARROW, SIGNAL = 1.3; EXPRESSED IN ADULT LIVER, SIGNAL = 1.3; EXPRESSED IN BT474, SIGNAL = 1.2; EXPRESSED IN FETAL LIVER, SIGNAL = 1.1; EXPRESSED IN PLACENTA, SIGNAL = 0.97; EXPRESSED IN HBL100, SIGNAL = 4.5; EXPRESSED IN HELA, SIGNAL = 1.1; EXPRESSED IN HEART, SIGNAL = 1.5; NT HIT: AF226857.1, EVALUE 7.30e+00
catcatcttccttgcctcctcttcctccttttttccttcttctccttgttctcctcttccatctccatccttctcctcctccttgtccttcccctcctccttctcctcctcttcaacatcatcatcatcatcatcatcatcatcatcatcatcacaacaaacacttacttgctgttcgctatgttcaaggtcatatgt

SEQ ID NO: 18977 - DNA, 111 bp, Homo sapiens
  MAP TO AC011289.1; EXPRESSED IN HEART, SIGNAL = 4.4e+02; EXPRESSED IN LUNG, SIGNAL =  44; EXPRESSED IN BRAIN, SIGNAL = 1.6e+02; EXPRESSED IN BT474, SIGNAL = 1.7e+02; EXPRESSED IN ADULT LIVER, SIGNAL = 2.5e+02; EXPRESSED IN PLACENTA, SIGNAL =  64; EXPRESSED IN HBL100, SIGNAL =  57; EXPRESSED IN BONE MARROW, SIGNAL =  90; EXPRESSED IN FETAL LIVER, SIGNAL = 1.2e+02; EXPRESSED IN HELA, SIGNAL =  92; NT HIT: gi11418965, EVALUE 6.10e-02; SWISSPROT HIT: P10191, EVALUE 5.30e+00
caatgtctgtttcctcaaggttttgaaaatggtgcacagaagggcctgctttttgctgaaatcatgcacatggatagtgggaacacttgcattcttaacaatcacctggta

SEQ ID NO: 18978 - DNA, 226 bp, Homo sapiens
  MAP TO AC011348.1; EXPRESSED IN BONE MARROW, SIGNAL = 1.2; EXPRESSED IN BRAIN, SIGNAL = 1.2; EXPRESSED IN FETAL LIVER, SIGNAL = 1.1; EXPRESSED IN ADULT LIVER, SIGNAL = 0.98; EXPRESSED IN HEART, SIGNAL =   1; NT HIT: AL163213.2, EVALUE 1.20e-01; EST_HUMAN HIT: AA194596.1, EVALUE 8.00e-01; SWISSPROT HIT: P81265, EVALUE 5.60e-01
gggcaaatgtggatttgattgctcgattcagtctggagccacaactggacttggatgttatttcttgggggcccatggaaatgttttttttggcttgcgagcccttgtcctgcttgtcggccctgaggacaaaggcttcctcttggaagattctgggccagtgcagggtaccgcacaggtgaatccgaccagaccagcaatcaaggagactggcaagggacatccg

SEQ ID NO: 18979 - DNA, 225 bp, Homo sapiens
  MAP TO AL121572.4; EXPRESSED IN FETAL LIVER, SIGNAL = 2.4; EXPRESSED IN HELA, SIGNAL = 2.3; EXPRESSED IN LUNG, SIGNAL = 5.8; EXPRESSED IN BRAIN, SIGNAL = 2.9; EXPRESSED IN BT474, SIGNAL = 2.1; EXPRESSED IN ADULT LIVER, SIGNAL = 2.3; EXPRESSED IN PLACENTA, SIGNAL = 3.5; EXPRESSED IN HEART, SIGNAL = 2.4; EXPRESSED IN HBL100, SIGNAL = 3.2; EXPRESSED IN BONE MARROW, SIGNAL = 2.5; EST_HUMAN HIT: BE794306.1, EVALUE 1.00e-85; SWISSPROT HIT: P26372, EVALUE 1.90e-01
ggagcggcgcgccatgtacaccatcatcaacgggcccagcaagttggtcgcgcagcgccgcacaggtctcacgcagcagcaggtgaagggccagctccaggagctcctgaaaagccggcagcccgcgccgccgaccttgcagccccagcgggcgcagcccttcgcgcagccgctgggaccctggcccctgtcgagtgcagggccaaggcttgtgttcaatcgtgt

SEQ ID NO: 18980 - DNA, 141 bp, Homo sapiens; identical to SEQ ID NO: 18112
  MAP TO AC011343.1; EXPRESSED IN PLACENTA, SIGNAL = 1.1; EXPRESSED IN BONE MARROW, SIGNAL = 2.6; EXPRESSED IN FETAL LIVER, SIGNAL = 1.7; EXPRESSED IN ADULT LIVER, SIGNAL = 1.8; EXPRESSED IN HBL100, SIGNAL = 0.94; EXPRESSED IN HELA, SIGNAL = 1.2; EXPRESSED IN HEART, SIGNAL = 1.1; EXPRESSED IN BRAIN, SIGNAL = 1.8; SWISSPROT HIT: P31370, EVALUE 3.90e+00; EST_HUMAN HIT: AV746822.1, EVALUE 2.00e-03; NT HIT: M99149.1, EVALUE 3.00e-07

SEQ ID NO: 18981 - DNA, 126 bp, Homo sapiens
  MAP TO AC011364.1; EXPRESSED IN BT474, SIGNAL = 1.2; EXPRESSED IN HBL100, SIGNAL = 1.1; EXPRESSED IN HEART, SIGNAL = 0.9; NT HIT: AE004890.1, EVALUE 7.10e-02; SWISSPROT HIT: P05508, EVALUE 1.30e+00
aggcaaagtgaacattttaatcatttgaatccaggtccacttgattcccaagctggtgctctcagctctctggctctcctgtgttctcagcatcagcgacagctgcagtttattgggcatacattg

SEQ ID NO: 18982 - DNA, 382 bp, Homo sapiens
  MAP TO AL078582.7; EXPRESSED IN PLACENTA, SIGNAL = 3.6; EXPRESSED IN BRAIN, SIGNAL = 3.5; EXPRESSED IN BT474, SIGNAL = 1.6; EXPRESSED IN FETAL LIVER, SIGNAL = 3.4; EXPRESSED IN ADULT LIVER, SIGNAL = 2.5; EXPRESSED IN HEART, SIGNAL = 3.5; EXPRESSED IN HELA, SIGNAL = 2.9; EXPRESSED IN HBL100, SIGNAL = 2.8; EXPRESSED IN LUNG, SIGNAL = 1.8; EXPRESSED IN BONE MARROW, SIGNAL = 5.5; SWISSPROT HIT: P11369, EVALUE 4.00e-09; EST_HUMAN HIT: AA205247.1, EVALUE 1.00e-34; NT HIT: D16473.1, EVALUE 5.00e-33
aaaatcctctgtgctcctcctattcattcctccctccaccccattcctggcaactactgatctttttactgtctccacagttttgccttctccagaatgtcatatacttggaatcataaggtttgtagccttttcagattggcttctttcactcagtgatatgcatttaaggttcttccatgtctttttatggcttgatagctcatttctttttatcattgaatactactactccattgtctggattatacacactttatttatacattcacctactgaaggatgtgttggttgcatccaagttttggcaattatgaatgaagttgctgtaaacacccatgtgcaggtaattgtgttgatatgcatttttaatgcttttgga

SEQ ID NO: 18983 - DNA, 208 bp, Homo sapiens
  MAP TO AL049794.13; EXPRESSED IN PLACENTA, SIGNAL = 1.4; EXPRESSED IN BONE MARROW, SIGNAL = 0.96; EXPRESSED IN BRAIN, SIGNAL = 1.2; EXPRESSED IN BT474, SIGNAL = 1.1; EXPRESSED IN FETAL LIVER, SIGNAL = 1.6; EXPRESSED IN HEART, SIGNAL = 1.2; EXPRESSED IN HELA, SIGNAL = 0.97; EXPRESSED IN HBL100, SIGNAL =   1; EXPRESSED IN LUNG, SIGNAL =   1; EXPRESSED IN ADULT LIVER, SIGNAL = 1.2; EST_HUMAN HIT: AW812104.1, EVALUE 1.30e-01; SWISSPROT HIT: O07684, EVALUE 4.80e+00
ggatttcagggagaagattggcttgcagtccgtaaaggagaaccagcacagcaaatggtcatggcaggaaagggagaagagcatcctgaaggaggtggtgggggttagtgtcaaatattgccaggatgatgagaataagatggtgtccttggtcttgaagacaaggctagttgataaccttcccaacagtacttttaaggagagtcaa

SEQ ID NO: 18984 - DNA, 229 bp, Homo sapiens
  MAP TO AL109953.6; EXPRESSED IN BONE MARROW, SIGNAL = 1.9; EXPRESSED IN LUNG, SIGNAL = 1.5; EXPRESSED IN ADULT LIVER, SIGNAL = 2.5; EXPRESSED IN BT474, SIGNAL = 3.5; EXPRESSED IN FETAL LIVER, SIGNAL =  21; EXPRESSED IN PLACENTA, SIGNAL = 2.2; EXPRESSED IN HBL100, SIGNAL = 3.7; EXPRESSED IN HELA, SIGNAL = 3.4; EXPRESSED IN HEART, SIGNAL =   2; EXPRESSED IN BRAIN, SIGNAL = 2.4; EST_HUMAN HIT: AI817324.1, EVALUE 6.00e-45; SWISSPROT HIT: P12207, EVALUE 2.30e+00
gcacccagaagatccaagacattgaggccaagcagaacattgaagagaagatggtagctcccagctacaccagctttagcatttaccgtcccattacaaaagaaaaaagctctctgaggtgggcaggaaagaaatttgaggagatcccaactgcacacattagagcatcctacaacaacacacagatccaggtaatctctgccactaatcagccccttgcccatacttc

SEQ ID NO: 18985 - DNA, 307 bp, Homo sapiens
  MAP TO AL117192.1; EXPRESSED IN HEART, SIGNAL = 5.1; EXPRESSED IN LUNG, SIGNAL = 4.8; EXPRESSED IN BRAIN, SIGNAL = 5.1; EXPRESSED IN ADULT LIVER, SIGNAL = 4.1; EXPRESSED IN PLACENTA, SIGNAL = 6.8; EXPRESSED IN HBL100, SIGNAL = 5.8; EXPRESSED IN HELA, SIGNAL = 6.3; EXPRESSED IN BONE MARROW, SIGNAL = 6.4; EXPRESSED IN BT474, SIGNAL = 4.2; EXPRESSED IN FETAL LIVER, SIGNAL = 4.5; NT HIT: AF109907.1, EVALUE 1.60e-01; SWISSPROT HIT: Q62751, EVALUE 1.90e+00; EST_HUMAN HIT: BF208802.1, EVALUE 7.10e-02
aactttctggttatggcaggactttaggaacttgcttcttggggaatcgaggttgttggtgcctttgctctgcacgagtttcccagtgaaaaatgagccccgacaggttgttttattttcccgagaggctgtggtggtgcatgtgggattccaccaccagaggggatgcagttttccgctgccacctcctggtccttccattgcactgaggccctggaggctggagaccaggccttccagcttggtgccacccttgcccacggtggtgcacctggtggtgaacacgtgggtgtggggagagccctgt

SEQ ID NO: 18986 - DNA, 400 bp, Homo sapiens
  MAP TO AL035662.21; EXPRESSED IN HBL100, SIGNAL = 7.1; EXPRESSED IN HEART, SIGNAL = 3.9; EXPRESSED IN LUNG, SIGNAL = 3.3; EXPRESSED IN FETAL LIVER, SIGNAL = 4.1; EXPRESSED IN ADULT LIVER, SIGNAL = 5.9; EXPRESSED IN PLACENTA, SIGNAL = 6.4; EXPRESSED IN HELA, SIGNAL = 7.2; EXPRESSED IN BRAIN, SIGNAL = 6.4; EXPRESSED IN BONE MARROW, SIGNAL = 8.1; EXPRESSED IN BT474, SIGNAL = 4.9; NT HIT: Z32521.1, EVALUE 3.00e-03; EST_HUMAN HIT: BE069630.1, EVALUE 1.00e+00
caaaccacaggatttctgcaaggatacttaaaataatgaatgtagatgctccacgtgcatgctgtgtgctctgtggtgagggggtggggatggcagtggtgatgacagtgttgttgggggccagggatgtgatggtaatattggtgattatgatgggggtaatagtagtaataggtgggctggtgattgtggttgtggtgactatggaagagatggtggtggtattggtgatggtgatattggtgatggtgatggggttggtggtggtggtgagggtagtgatggtgatggctttagtattatttatggtagagatgatgggggtaccgagctcgaatgtggttctggtggtggtggtgctaattctaatggtgatggtagtgatggtgatgacctgatg

SEQ ID NO: 18987 - DNA, 95 bp, Homo sapiens
  MAP TO AL121766.1; EXPRESSED IN BONE MARROW, SIGNAL = 1.3; EXPRESSED IN LUNG, SIGNAL = 4.8; EXPRESSED IN FETAL LIVER, SIGNAL =   1; EXPRESSED IN ADULT LIVER, SIGNAL = 1.6; EXPRESSED IN HBL100, SIGNAL = 0.92; EXPRESSED IN PLACENTA, SIGNAL = 1.1; EXPRESSED IN HEART, SIGNAL = 1.1; EXPRESSED IN BRAIN, SIGNAL = 1.1; EST_HUMAN HIT: AW803395.1, EVALUE 8.10e-01; NT HIT: U46858.1, EVALUE 3.00e-03; SWISSPROT HIT: P07202, EVALUE 2.40e+00
caacttctgcacagagtccatgatgggaagaatgccagcagaaacatccaacttccaggggtaacagtggtggattcaaaggaagggtccagtac

SEQ ID NO: 18988 - DNA, 163 bp, Homo sapiens
  MAP TO AF191252.1; EXPRESSED IN PLACENTA, SIGNAL = 3.3; EXPRESSED IN BONE MARROW, SIGNAL = 3.1; EXPRESSED IN BRAIN, SIGNAL = 1.8; EXPRESSED IN FETAL LIVER, SIGNAL = 2.3; EXPRESSED IN ADULT LIVER, SIGNAL = 2.5; EXPRESSED IN HEART, SIGNAL = 2.7; EXPRESSED IN HELA, SIGNAL =   2; EXPRESSED IN HBL100, SIGNAL =   2; EXPRESSED IN LUNG, SIGNAL = 2.2; EST_HUMAN HIT: BF063211.1, EVALUE 7.00e-87; NT HIT: L11910.1, EVALUE 9.50e-02; SWISSPROT HIT: Q12558, EVALUE 1.70e+00
ctgagtaattccacacatgcacccactgctgtccaatgcagtgcttgctcagcagggagcacctcttggccaagcgtattggcagcccttctaccgtgaccagcgtcagggacgtctctaggcgccttttcagaatagctggcaacatagggagacccagtct

SEQ ID NO: 18989 - DNA, 456 bp, Homo sapiens; identical to SEQ ID NO: 2251
  MAP TO Z98200.8; EXPRESSED IN ADULT LIVER, SIGNAL = 1.8; EXPRESSED IN BT474, SIGNAL = 1.1; EXPRESSED IN PLACENTA, SIGNAL = 1.5; EXPRESSED IN HELA, SIGNAL = 1.6; EXPRESSED IN HEART, SIGNAL = 1.1; EXPRESSED IN BONE MARROW, SIGNAL = 1.6; EXPRESSED IN LUNG, SIGNAL = 0.99; EXPRESSED IN BRAIN, SIGNAL = 1.3; EST_HUMAN HIT: AW183691.1, EVALUE 4.00e-28; NT HIT: U01317.1, EVALUE 2.00e-73; SWISSPROT HIT: P27918, EVALUE 9.10e-01

SEQ ID NO: 18990 - DNA, 77 bp, Homo sapiens
  MAP TO AL035448.28; EXPRESSED IN LUNG, SIGNAL = 1.3; EXPRESSED IN BRAIN, SIGNAL = 1.2; EXPRESSED IN BT474, SIGNAL = 1.2; EXPRESSED IN FETAL LIVER, SIGNAL = 0.88; EXPRESSED IN PLACENTA, SIGNAL = 1.2; EXPRESSED IN HELA, SIGNAL = 3.9; EXPRESSED IN HBL100, SIGNAL = 2.1; EXPRESSED IN HEART, SIGNAL = 0.89; EST_HUMAN HIT: H09247.1, EVALUE 4.00e-36; NT HIT: gi11421836, EVALUE 4.00e-36
cggatttcatctttgtcctctgcaagttctccgtaaaacatcgcatggaacacagagctcccaacagctaaaacata

SEQ ID NO: 18991 - DNA, 359 bp, Homo sapiens
  MAP TO Z97832.10; EXPRESSED IN BONE MARROW, SIGNAL =   4; EXPRESSED IN FETAL LIVER, SIGNAL = 3.8; EXPRESSED IN HELA, SIGNAL = 4.5; EXPRESSED IN BRAIN, SIGNAL =   4; EXPRESSED IN LUNG, SIGNAL = 2.4; EXPRESSED IN BT474, SIGNAL = 3.1; EXPRESSED IN ADULT LIVER, SIGNAL = 4.3; EXPRESSED IN PLACENTA, SIGNAL = 4.3; EXPRESSED IN HEART, SIGNAL = 4.2; EXPRESSED IN HBL100, SIGNAL = 3.3; SWISSPROT HIT: P49256, EVALUE 1.10e+00; NT HIT: gi11545748, EVALUE 0.00e+00; EST_HUMAN HIT: BE280697.1, EVALUE 1.00e-130
gctctgggagccagatagagcactccctggtgttggtgctggcaacaccacctgctgcagctaccaggccttccttctcctgctccaggtggaatacctgctgaaaaaggtactcagcagcatgagcttggaggtgagcttgggtgagctggaggagcttctggcccaggaggcccaggtggcccagaccaccggggggctcagcgtctggcagttcctggagctcttcaattcgggccgctgcctgcggggcgtgggccgggacaccctcagcatggccatccacgaggtctaccaggagctcatccaagatgtcctgaagcaggtcaggcaagctgggaactaggggaagcacacaa

SEQ ID NO: 18992 - DNA, 438 bp, Homo sapiens
  MAP TO AL049713.19; EXPRESSED IN HBL100, SIGNAL = 2.3; EXPRESSED IN HEART, SIGNAL = 2.5; EXPRESSED IN LUNG, SIGNAL = 3.4; EXPRESSED IN FETAL LIVER, SIGNAL = 2.1; EXPRESSED IN ADULT LIVER, SIGNAL = 2.5; EXPRESSED IN PLACENTA, SIGNAL = 2.7; EXPRESSED IN HELA, SIGNAL = 3.2; EXPRESSED IN BRAIN, SIGNAL = 1.9; EXPRESSED IN BONE MARROW, SIGNAL = 2.1; EXPRESSED IN BT474, SIGNAL = 2.3; NT HIT: Z83320.1, EVALUE 5.90e-02; EST_HUMAN HIT: AI076404.1, EVALUE 0.00e+00; SWISSPROT HIT: P47035, EVALUE 1.10e+00
ataattatgaatctaaattgtaaaactttacctgttttcttctttttatcagaagtagcatccaaagtagttaagggagtagagacgcttttataagcatcttgactatatccaggatcatcttcatcagaagaaaatgaagataaatgttccaagtttttaagttcattatcaactttatctgatggactgttaccgccagtttcagacactaaaggtgtgggtgttgtagatgaaggcttgggaagtggtgggggacaaaatgtacgaaccatctgggtccctggccgtctagtcctgttaggcattcgtacagcaagagtggaaaactgctgcttgggcccggatttcagaaaatctaagaaagaagcaataaatcctgttttgacttccggttgtttttcctccacctctttgatcttctgtctcattttttct

SEQ ID NO: 18993 - DNA, 164 bp, Homo sapiens
  MAP TO AC005948.6; EXPRESSED IN BONE MARROW, SIGNAL = 7.8; EXPRESSED IN HBL100, SIGNAL =  31; EXPRESSED IN HELA, SIGNAL =  11; EXPRESSED IN HEART, SIGNAL = 5.1; EXPRESSED IN LUNG, SIGNAL = 5.4; EXPRESSED IN BRAIN, SIGNAL = 6.7; EXPRESSED IN BT474, SIGNAL =  15; EXPRESSED IN ADULT LIVER, SIGNAL =  13; EXPRESSED IN FETAL LIVER, SIGNAL = 4.1; EXPRESSED IN PLACENTA, SIGNAL =  11; EST_HUMAN HIT: AW168135.1, EVALUE 1.00e-75; NT HIT: AL163249.2, EVALUE 2.00e-52; SWISSPROT HIT: P11827, EVALUE 1.70e+00
ctggaaggtctgcagcttcactcctgagccagcgagaccacgaaccccaccagaaggaagaaactccgaacacatccgaacatcagaaggaacaaactccagacgcgccatcttaagagctgtaacactcacggcgagggtccacggcttcattcttgaagtca

SEQ ID NO: 18994 - DNA, 665 bp, Homo sapiens
  MAP TO AL096678.8; EXPRESSED IN BRAIN, SIGNAL = 2.3; EXPRESSED IN BONE MARROW, SIGNAL = 1.4; EXPRESSED IN LUNG, SIGNAL = 1.5; EXPRESSED IN BT474, SIGNAL = 3.6; EXPRESSED IN FETAL LIVER, SIGNAL = 1.8; EXPRESSED IN ADULT LIVER, SIGNAL = 1.9; EXPRESSED IN HBL100, SIGNAL = 3.8; EXPRESSED IN HELA, SIGNAL = 3.6; EXPRESSED IN PLACENTA, SIGNAL =   3; EXPRESSED IN HEART, SIGNAL = 2.2; EST_HUMAN HIT: AA429001.1, EVALUE 0.00e+00; NT HIT: AE001022.1, EVALUE 1.70e+00; SWISSPROT HIT: P28925, EVALUE 1.30e-01
actctcccttgcataacacgtgggagcgcaggtaaaggagagcattcatcagcagctgctcccgagtgggacaggctttctggcccttgccttccagctcctttcctcctgagcgcttgaggattagcttcccaaggcctcgtagaacctcctcagacttcaccgagcacaaagtgtctgcatgagcatagtaagtcgggaaggtggggcccaccgatgggaaagccagcaaggctgtggccagggtccccagcctgtctgcaccaaccatactgctgtggagtgaggtgtggagctcagaggccaccagcctcatgccatgttgtaactgcaatatggatgcctgcagtgggctcacggcatctggatagaaggtgtactcctctgacagccgcttccggaactggtggtgtgactgctgccaagaggcctcctcctttagaaggctctgggctacttgggcagaccgtggcccatctatgtggagggcctgcagaagccgtgtgagcagatcctgaacagcaggggccttggcgatgctggtgacgtagtggtggatctcctgaaccagggactcgtaggcaggcagctggggtctaaaggcctgtttcttcaacaggtgacaggttaaattatccagccgatccatcctttggcgaagcagc

SEQ ID NO: 18995 - DNA, 190 bp, Homo sapiens
  MAP TO AC005095.2; EXPRESSED IN PLACENTA, SIGNAL = 1.9; EXPRESSED IN BRAIN, SIGNAL = 1.1; EXPRESSED IN FETAL LIVER, SIGNAL =   1; EXPRESSED IN HEART, SIGNAL = 1.6; EXPRESSED IN HELA, SIGNAL = 2.3; EXPRESSED IN HBL100, SIGNAL = 2.2; EXPRESSED IN LUNG, SIGNAL = 1.2; EXPRESSED IN BONE MARROW, SIGNAL = 0.93; EXPRESSED IN ADULT LIVER, SIGNAL = 0.99; EXPRESSED IN BT474, SIGNAL = 4.9; EST_HUMAN HIT: AU134991.1, EVALUE 1.00e-103; NT HIT: gi5803184, EVALUE 1.00e-103; SWISSPROT HIT: P20488, EVALUE 8.00e-07
actatccagatacagactcgtgtagccaacataaagcagaagggcagcaatgcagtacaggaacacaaagactgcaaaggtaacatagaattgtgcagaagaagagtaatcgcctatgaggacgtaatctttccaatttacatcacatatgtttacacctggaggtggctgaaatgatgcctcattcaac

SEQ ID NO: 18996 - DNA, 525 bp, Homo sapiens
  MAP TO AL008723.8; EXPRESSED IN PLACENTA, SIGNAL = 1.8; EXPRESSED IN BRAIN, SIGNAL = 1.8; EXPRESSED IN BT474, SIGNAL =   3; EXPRESSED IN FETAL LIVER, SIGNAL = 3.6; EXPRESSED IN HEART, SIGNAL = 2.2; EXPRESSED IN HELA, SIGNAL = 3.2; EXPRESSED IN HBL100, SIGNAL = 3.7; EXPRESSED IN LUNG, SIGNAL = 1.5; EXPRESSED IN BONE MARROW, SIGNAL = 2.2; EXPRESSED IN ADULT LIVER, SIGNAL = 1.1; NT HIT: AJ010230.1, EVALUE 0.00e+00; SWISSPROT HIT: P14373, EVALUE 6.00e-25; EST_HUMAN HIT: BF347039.1, EVALUE 0.00e+00
acttgcggtctacgaagaggaaagtcagcggcaccgtggtggcagagaggcggcctccatccctcaaactcacagtccagaatccaagctctgtggtcagctggatcctccctttgcggtgaacagattctctgcagactcccaggtcccattctgtgcttgttcccacgtccacctcccagcagtggcggccacaggtaaagcgaggggagcccaggatgcaaacggacacgtcaaatctctcggcaaggtcttgccgattctgtctgatgcgcccacttcggacgctcctgaggtcgtcagaaatgaggaggaagttgttggctgtgttggcatccaaggtcatatccactgtgaaaaggaaaaaaagttgctcagcaaatggacagaaaccaaccctatgcctctcttctacttcaaaggcccaaatatctcttgactttagtttctttaattctcttcttcccccaaaatccaaacttcatgaggtaacttccctgactagttcaaattctcataggtatg

SEQ ID NO: 18997 - DNA, 212 bp, Homo sapiens
  MAP TO AL096700.6; EXPRESSED IN BRAIN, SIGNAL = 1.9; EXPRESSED IN BONE MARROW, SIGNAL = 1.9; EXPRESSED IN LUNG, SIGNAL = 0.94; EXPRESSED IN ADULT LIVER, SIGNAL = 1.8; EXPRESSED IN BT474, SIGNAL = 1.1; EXPRESSED IN FETAL LIVER, SIGNAL = 1.9; EXPRESSED IN HBL100, SIGNAL = 1.2; EXPRESSED IN PLACENTA, SIGNAL = 1.8; EXPRESSED IN HELA, SIGNAL = 1.8; EXPRESSED IN HEART, SIGNAL = 1.9; NT HIT: gi11419957, EVALUE 1.00e-116; EST_HUMAN HIT: D44816.1, EVALUE 1.00e-116; SWISSPROT HIT: P40421, EVALUE 8.00e-04
gcctgatctccgtggaagaatttcgtgccatgtggaaactttttagttctcactacaatgttcacattgatgattcccaagtcaataagcttgccaacataatggacttgaacaaagatggaagcattgactttaatgagtttttaaaggctttctatgtagtgcatagatatgaagacttgatgaaacctgatgtcaccaaccttggctaa

SEQ ID NO: 18998 - DNA, 160 bp, Homo sapiens
  MAP TO AC011506.1; EXPRESSED IN HELA, SIGNAL = 8.6; EXPRESSED IN PLACENTA, SIGNAL = 7.3; EXPRESSED IN HBL100, SIGNAL = 6.1; EXPRESSED IN HEART, SIGNAL = 7.1; EXPRESSED IN BRAIN, SIGNAL = 6.4; EXPRESSED IN BONE MARROW, SIGNAL = 7.5; EXPRESSED IN LUNG, SIGNAL = 7.5; EXPRESSED IN BT474, SIGNAL = 4.2; EXPRESSED IN ADULT LIVER, SIGNAL = 7.6; EXPRESSED IN FETAL LIVER, SIGNAL = 7.6; EST_HUMAN HIT: BE888016.1, EVALUE 2.00e-25; NT HIT: X87344.1, EVALUE 1.00e-07
tcttcattaagtggaagtggatcattatcaaggtcttcatccttgtcatcttcacaatgagtaggctgaccagaagaaggaaggggaggggttggtctttctgtctcaggggtggcagaggcagaagaaaatgcacatctaagtggataagtgtaaccat

SEQ ID NO: 18999 - DNA, 189 bp, Homo sapiens
  MAP TO AC010724.1; EXPRESSED IN BONE MARROW, SIGNAL = 1.4; EXPRESSED IN LUNG, SIGNAL = 1.6; EXPRESSED IN BRAIN, SIGNAL = 1.9; EXPRESSED IN ADULT LIVER, SIGNAL = 1.5; EXPRESSED IN BT474, SIGNAL = 4.1; EXPRESSED IN FETAL LIVER, SIGNAL = 1.3; EXPRESSED IN PLACENTA, SIGNAL = 1.9; EXPRESSED IN HELA, SIGNAL = 4.5; EXPRESSED IN HBL100, SIGNAL = 3.4; EXPRESSED IN HEART, SIGNAL = 1.3; SWISSPROT HIT: Q08379, EVALUE 1.00e-18; EST_HUMAN HIT: AI124669.1, EVALUE 1.00e-102; NT HIT: AF248953.1, EVALUE 1.00e-37
ctgcagcttctccatggccccctgcagggcccggtgggtctccccaaacacagactcacccccactctctggggctggggccgctacctctggctttttctgggacgaggccactgggtgagccaggggctggcagcacaccctttgttcctcctgggcattggctccagcggagttgaaaaatgccac

SEQ ID NO: 19000 - DNA, 109 bp, Homo sapiens
  MAP TO AL034423.15; EXPRESSED IN PLACENTA, SIGNAL =   3; EXPRESSED IN HBL100, SIGNAL = 4.5; EXPRESSED IN HELA, SIGNAL = 7.3; EXPRESSED IN HEART, SIGNAL = 1.3; EXPRESSED IN BRAIN, SIGNAL = 2.3; EXPRESSED IN BONE MARROW, SIGNAL = 2.1; EXPRESSED IN LUNG, SIGNAL = 3.7; EXPRESSED IN ADULT LIVER, SIGNAL = 2.3; EXPRESSED IN BT474, SIGNAL = 7.7; EXPRESSED IN FETAL LIVER, SIGNAL = 1.6; NT HIT: U97279.1, EVALUE 5.00e-55; EST_HUMAN HIT: AU124576.1, EVALUE 7.00e-55
gaattcatatagcatcaaagttgtcctgcaagagcttcggcgcctaatgatgtctaaagaaaatatgaaactccctcagccgcccgaaggacagtgttacagcaattaa

SEQ ID NO: 19001 - DNA, 373 bp, Homo sapiens
  MAP TO AL035685.13; EXPRESSED IN FETAL LIVER, SIGNAL = 3.1; EXPRESSED IN HEART, SIGNAL = 1.2; EXPRESSED IN BRAIN, SIGNAL = 1.5; EXPRESSED IN BONE MARROW, SIGNAL = 1.1; EXPRESSED IN LUNG, SIGNAL = 2.6; EXPRESSED IN BT474, SIGNAL =   1; EXPRESSED IN ADULT LIVER, SIGNAL = 2.7; NT HIT: L02840.1, EVALUE 0.00e+00; EST_HUMAN HIT: AA625212.1, EVALUE 2.00e-57; SWISSPROT HIT: Q14721, EVALUE 6.00e-68
ggagctttcaaagtggtttttctccgatcttgtccccgtgctgaacttcggactggtgctcccagggaggcttttgggggggctggagtccacactgtagagcagctgtccctcatcatctgtgtctgcgtcaatgtactggtggacacccgcctcaaagttgaacgctattgctgtgtgtttctcaggagaccgggggggtgtcttagcacttgctgtggtgtagatggaggactctgggctcagcacagccttgtccaaaagcgtggcacactccagtccagcgacagcagccgcagcactcccccggttcctgagagggtcatggtacatccctagaacggggaggagtggactggggtcaccctccatg

SEQ ID NO: 19002 - DNA, 346 bp, Homo sapiens
  MAP TO NM_006894.1; EXPRESSED IN BONE MARROW, SIGNAL = 1.6; EXPRESSED IN HELA, SIGNAL = 1.8; EXPRESSED IN LUNG, SIGNAL = 1.2; EXPRESSED IN BRAIN, SIGNAL = 1.4; EXPRESSED IN BT474, SIGNAL = 1.2; EXPRESSED IN ADULT LIVER, SIGNAL =   7; EXPRESSED IN FETAL LIVER, SIGNAL = 1.6; EXPRESSED IN PLACENTA, SIGNAL = 2.3; EXPRESSED IN HEART, SIGNAL =   2; EXPRESSED IN HBL100, SIGNAL =   1; EST_HUMAN HIT: AI052149.1, EVALUE 0.00e+00; SWISSPROT HIT: P31513, EVALUE 4.00e-61; NT HIT: gi11432290, EVALUE 0.00e+00
aaagagcctgtatttaacgatgagctcccagcaagcattctgtgtggcattgtgtccgtaaagcctaacgtgaaggaattcacagagacctcggccatttttgaggatgggaccatatttgagggcattgactgtgtaatctttgcaacagggtatagttttgcctaccccttccttgatgagtctatcatcaaaagcagaaacaatgagatcattttatttaaaggagtatttcctcctctacttgagaagtcaaccatagcagtgattggctttgtccagtcccttggggctgccattcccacagttgacctccagtcccgctgggcagcacaagtaataaagg

SEQ ID NO: 19003 - DNA, 150 bp, Homo sapiens
  MAP TO AL033383.24; EXPRESSED IN PLACENTA, SIGNAL = 1.1; EXPRESSED IN HELA, SIGNAL = 3.2; EXPRESSED IN HBL100, SIGNAL = 2.6; EXPRESSED IN HEART, SIGNAL = 1.5; EXPRESSED IN ADULT LIVER, SIGNAL = 2.4; EXPRESSED IN BT474, SIGNAL = 6.4; EXPRESSED IN FETAL LIVER, SIGNAL = 2.4; EST_HUMAN HIT: BE888742.1, EVALUE 3.00e-79; NT HIT: AF244138.1, EVALUE 2.00e-79; SWISSPROT HIT: O75521, EVALUE 2.00e-22
ttgagtccttcattggaatcctctagtcaggtggagcctggaacagacaggaaatcaactgggtttgaaactctggtggtgacctccgaagatggcatcacaaagatcatgttcaaccggcccaaaaagaaaaatgccataaacactgag

SEQ ID NO: 19004 - DNA, 222 bp, Homo sapiens
  MAP TO AC005043.2; EXPRESSED IN FETAL LIVER, SIGNAL = 3.7; EXPRESSED IN HELA, SIGNAL = 2.2; EXPRESSED IN HEART, SIGNAL = 2.3; EXPRESSED IN LUNG, SIGNAL = 1.7; EXPRESSED IN BRAIN, SIGNAL = 1.8; EXPRESSED IN BT474, SIGNAL = 1.6; EXPRESSED IN ADULT LIVER, SIGNAL =   4; EXPRESSED IN PLACENTA, SIGNAL =   2; EXPRESSED IN HBL100, SIGNAL = 2.3; EXPRESSED IN BONE MARROW, SIGNAL = 2.7; SWISSPROT HIT: P71551, EVALUE 1.10e-01; NT HIT: U27268.1, EVALUE 1.30e-01
tgggagaaggcagagggcgttctaggcaggctgaaggaactgcttcatcaaaggcttgaaggcatgaaacagcaatcccaggacttggtgggcagtaaggaagaggaaggaatcaagattgactcccacatttctggcctggtagaccaggtagatggtaatagctttcactgcaatttgggagcccaggagaagaagcagtttgaagaggagatgttgaaa

SEQ ID NO: 19005 - DNA, 223 bp, Homo sapiens
  MAP TO AL035553.10; EXPRESSED IN BONE MARROW, SIGNAL = 3.1; EXPRESSED IN FETAL LIVER, SIGNAL = 5.6; EXPRESSED IN HELA, SIGNAL = 3.7; EXPRESSED IN BRAIN, SIGNAL = 3.6; EXPRESSED IN LUNG, SIGNAL = 2.9; EXPRESSED IN BT474, SIGNAL = 1.6; EXPRESSED IN ADULT LIVER, SIGNAL = 3.1; EXPRESSED IN PLACENTA, SIGNAL = 4.2; EXPRESSED IN HEART, SIGNAL = 4.5; EXPRESSED IN HBL100, SIGNAL = 2.8; EST_HUMAN HIT: AI634847.1, EVALUE 1.00e-122; SWISSPROT HIT: P51151, EVALUE 1.00e-33; NT HIT: gi11421991, EVALUE 1.00e-122
aataagggtaatccccattctccatgcaccaggtttgtgcctcctcagtagtcacttgcctatcctctttgtctaccttgttacccagaactacaaaggggaaatgctcagggtccttcacatccgcatagtaaataaattctttctgccagttaccaagattctcgaagctctgccgatcatccacgctgaaggtcaagaggcagcagtctgctcccctgta

SEQ ID NO: 19006 - DNA, 166 bp, Homo sapiens
  MAP TO AC009945.1; EXPRESSED IN PLACENTA, SIGNAL =  16; EXPRESSED IN HBL100, SIGNAL =  54; EXPRESSED IN HEART, SIGNAL =  10; EXPRESSED IN FETAL LIVER, SIGNAL =  11; EXPRESSED IN ADULT LIVER, SIGNAL = 8.3; EXPRESSED IN HELA, SIGNAL =  45; EXPRESSED IN BRAIN, SIGNAL =  12; EXPRESSED IN LUNG, SIGNAL =  33; EXPRESSED IN BONE MARROW, SIGNAL = 7.9; EXPRESSED IN BT474, SIGNAL =  89; NT HIT: X73685.1, EVALUE 2.00e-70; EST_HUMAN HIT: BE388260.1, EVALUE 6.00e-74; SWISSPROT HIT: P08109, EVALUE 1.00e-23
gtttatgaaggtgagcgtgccatgtccaaggataacaacctgcttggcaagtttgaattcacgggcatacctcctgaaccccaaggtgttcctcagattgaagtcacttttgacattgatgccaatggtatcctcagtgtctctgctgtggacaaaagtacaggaa

SEQ ID NO: 19007 - DNA, 195 bp, Homo sapiens
  MAP TO AP000351.2; EXPRESSED IN HBL100, SIGNAL =  10; EXPRESSED IN HEART, SIGNAL = 8.4; EXPRESSED IN LUNG, SIGNAL =   5; EXPRESSED IN FETAL LIVER, SIGNAL = 3.4; EXPRESSED IN ADULT LIVER, SIGNAL = 4.3; EXPRESSED IN PLACENTA, SIGNAL = 3.6; EXPRESSED IN HELA, SIGNAL = 7.3; EXPRESSED IN BRAIN, SIGNAL = 2.9; EXPRESSED IN BONE MARROW, SIGNAL = 3.9; EXPRESSED IN BT474, SIGNAL =  12; SWISSPROT HIT: P30711, EVALUE 5.00e-33; EST_HUMAN HIT: AI281103.1, EVALUE 1.00e-106; NT HIT: gi4504184, EVALUE 1.00e-106
tcaccggatcatggccagcacccagggcatcagcttctgctttatggtggggtctgcaggtgggaagtccttggccttcagaatgacctcatgggcctcctggaagaggtcctcccccactgctgcctccacgcgctgccgccatgtggccagcttgggtcggccttcgaagacttggcagccagcacccacggg

SEQ ID NO: 19008 - DNA, 180 bp, Homo sapiens
  MAP TO AC009963.2; EXPRESSED IN BONE MARROW, SIGNAL = 3.3; EXPRESSED IN HELA, SIGNAL =  20; EXPRESSED IN HEART, SIGNAL = 2.2; EXPRESSED IN LUNG, SIGNAL = 5.1; EXPRESSED IN BRAIN, SIGNAL = 2.1; EXPRESSED IN BT474, SIGNAL =  22; EXPRESSED IN ADULT LIVER, SIGNAL = 2.5; EXPRESSED IN FETAL LIVER, SIGNAL =   3; EXPRESSED IN PLACENTA, SIGNAL = 5.1; EXPRESSED IN HBL100, SIGNAL =  21; NT HIT: AF107405.1, EVALUE 4.00e-78; SWISSPROT HIT: P23152, EVALUE 4.00e-28; EST_HUMAN HIT: BF665625.1, EVALUE 7.00e-78
tcggggatcttcaaattcaacaaaagcaaagccgcgagggtttctagcaacccacacgctttggagtggtccatactagccaaaagcccgttccagttcggtcttgttgccattgtttccaagattgcctacataaaccttacagtccaatggacaggaatcacgatgcatttcgacatc

SEQ ID NO: 19009 - DNA, 447 bp, Homo sapiens
  MAP TO AP000501.1; EXPRESSED IN BONE MARROW, SIGNAL = 1.8; EXPRESSED IN FETAL LIVER, SIGNAL = 1.2; EXPRESSED IN HELA, SIGNAL =   4; EXPRESSED IN BRAIN, SIGNAL = 1.2; EXPRESSED IN LUNG, SIGNAL = 6.3; EXPRESSED IN BT474, SIGNAL = 2.9; EXPRESSED IN ADULT LIVER, SIGNAL = 2.3; EXPRESSED IN PLACENTA, SIGNAL = 2.4; EXPRESSED IN HEART, SIGNAL =   1; EXPRESSED IN HBL100, SIGNAL = 2.8; NT HIT: AF172640.1, EVALUE 4.00e-03; EST_HUMAN HIT: BE676095.1, EVALUE 0.00e+00
tgaaatccaaaccaggaaagaaggacaaggagcgaggagaaattgaggttgacatccagtttatgagaaacaacatgactgccagcatgtttgacctttctatgaaagacaagtctcggaatccatttggaaagctgaaggacaagatcaaggggaagaataaggacagtgggtcagacaccgcctccgccatcatccctagcacgacaccttcggtcgacagtgatgatgagtctgtggttaaagacaagaaaaagaaatcaaagatcaagaccttactttccaagtcaaatttgcagaagacgcctctttcccagtccatgtctgtcctgccgacttcaaagccagaaaaagtgctgcttcgtcccggagactttcagtcccagtgggatgaagatgacaatgaggatgagtcctcctcggcctcggatggtgagtttctgcctc

SEQ ID NO: 19010 - DNA, 153 bp, Homo sapiens
  MAP TO AC009787.1; EXPRESSED IN PLACENTA, SIGNAL = 9.4; EXPRESSED IN HBL100, SIGNAL =   8; EXPRESSED IN HEART, SIGNAL = 3.6; EXPRESSED IN FETAL LIVER, SIGNAL = 4.2; EXPRESSED IN ADULT LIVER, SIGNAL = 7.9; EXPRESSED IN HELA, SIGNAL =  30; EXPRESSED IN BRAIN, SIGNAL = 5.3; EXPRESSED IN LUNG, SIGNAL = 7.5; EXPRESSED IN BONE MARROW, SIGNAL = 5.5; EXPRESSED IN BT474, SIGNAL = 4.8; SWISSPROT HIT: P27046, EVALUE 8.70e+00; NT HIT: AJ133269.1, EVALUE 4.00e-53; EST_HUMAN HIT: AA054010.1, EVALUE 2.00e-70
agagttactggcagctcggcgtccgtgatggtctcgggggcttccgaggcgatcgggcagtgtcagtcttcagctgctaagccaagatctgggaaggagtcagtcagagagccttgggccagagttccaggggctctgggagtggctgccagg

SEQ ID NO: 19011 - DNA, 236 bp, Homo sapiens
  MAP TO AC011297.1; EXPRESSED IN BT474, SIGNAL = 1.5; EXPRESSED IN HBL100, SIGNAL = 0.98; EXPRESSED IN HEART, SIGNAL = 0.88; EXPRESSED IN LUNG, SIGNAL = 1.6; EXPRESSED IN ADULT LIVER, SIGNAL = 2.8; EXPRESSED IN PLACENTA, SIGNAL = 1.3; EXPRESSED IN HELA, SIGNAL = 3.6; EXPRESSED IN BRAIN, SIGNAL = 1.5; EXPRESSED IN BONE MARROW, SIGNAL = 1.2; EST_HUMAN HIT: AI817415.1, EVALUE 6.00e-75; SWISSPROT HIT: P10266, EVALUE 1.00e-09; NT HIT: AF023261.1, EVALUE 1.00e-32
tcaccagaagaaaatcagcttcctgtttggatacccactagacatttgaagttctacaatgaacccatcagagatgcaaatgaaggtgcctccatagagacagaaaacctgcaatcgagcatcatcacctcgccaggtgaagaaaatggtgatatcaaaagaacagatgaagttgccatccaccaagaaagcggagccgccgacctgggcccagctaaagaagctgacacagttag

SEQ ID NO: 19012 - DNA, 245 bp, Homo sapiens
  MAP TO AL096700.6; EXPRESSED IN BT474, SIGNAL =  11; EXPRESSED IN HBL100, SIGNAL =  16; EXPRESSED IN HEART, SIGNAL =  10; EXPRESSED IN LUNG, SIGNAL = 9.1; EXPRESSED IN BRAIN, SIGNAL = 4.7; EXPRESSED IN ADULT LIVER, SIGNAL = 5.7; EXPRESSED IN FETAL LIVER, SIGNAL = 5.9; EXPRESSED IN PLACENTA, SIGNAL = 5.5; EXPRESSED IN HELA, SIGNAL = 8.5; EXPRESSED IN BONE MARROW, SIGNAL = 5.2; NT HIT: AF044571.1, EVALUE 0.00e+00; EST_HUMAN HIT: AW134983.1, EVALUE 0.00e+00; SWISSPROT HIT: P46019, EVALUE 1.00e-32
atgaccccgcatgagatcaagtttgctgtccatgtcgaatcggtgctgaaccgcgtgccgcagcccgagtaccggcagctgctggtggaagccatcatggtgctgacgctgctctcggacacggagatgaccagcatcgggggcatcatccacgtggaccagatcgtgcagatggccagtcagctgttcttgcaggaccaggtgggggtgccagggagctgggttggctggcatttatctctgtt

SEQ ID NO: 19013 - DNA, 245 bp, Homo sapiens
  MAP TO AL050336.7; EXPRESSED IN BONE MARROW, SIGNAL = 2.1; EXPRESSED IN HBL100, SIGNAL = 1.8; EXPRESSED IN HELA, SIGNAL = 2.1; EXPRESSED IN HEART, SIGNAL = 2.7; EXPRESSED IN BRAIN, SIGNAL = 1.9; EXPRESSED IN LUNG, SIGNAL = 1.6; EXPRESSED IN BT474, SIGNAL = 1.9; EXPRESSED IN ADULT LIVER, SIGNAL = 2.4; EXPRESSED IN FETAL LIVER, SIGNAL = 2.9; EXPRESSED IN PLACENTA, SIGNAL = 2.6; SWISSPROT HIT: P75856, EVALUE 4.70e+00; NT HIT: AF170046.1, EVALUE 5.90e-01; EST_HUMAN HIT: AI625542.1, EVALUE 0.00e+00
tcatgcagcgaaggcaccagtctccctctgtaaccttggtccttccctaaagtatgtagtcattggtgcagaatgtacagctgtgaaggtgactgtttctctaaaggctttggtgatgtaagcctgaagccaagcaggaggaaagcaattaaacatcaccttgattaagttataatgtaccaagagagttgcacgttgggcttggtgactgctttcttcaggaaggaggaatttgcactgagagt

SEQ ID NO: 19014 - DNA, 121 bp, Homo sapiens
  MAP TO AL034384.1; EXPRESSED IN BONE MARROW, SIGNAL = 1.3; EXPRESSED IN HBL100, SIGNAL = 1.3; EXPRESSED IN HELA, SIGNAL = 2.1; EXPRESSED IN BRAIN, SIGNAL = 1.1; EXPRESSED IN LUNG, SIGNAL = 4.4; EXPRESSED IN BT474, SIGNAL =   1; EXPRESSED IN ADULT LIVER, SIGNAL = 1.4; EXPRESSED IN FETAL LIVER, SIGNAL = 1.5; EXPRESSED IN PLACENTA, SIGNAL = 1.5; EXPRESSED IN HEART, SIGNAL = 1.8; SWISSPROT HIT: P80440, EVALUE 3.10e+00; NT HIT: AB007976.1, EVALUE 1.00e-03; EST_HUMAN HIT: AI286021.1, EVALUE 2.00e-05
ggctaccatattgaacagcacagctctagagcattctattctttctgggatgattcagcatcaactcaggaagttctgttggatggtgatgcttacagagattctgtttcttacaaaatct

SEQ ID NO: 19015 - DNA, 110 bp, Homo sapiens
  MAP TO AL009030.4; EXPRESSED IN BT474, SIGNAL = 4.5; EXPRESSED IN HBL100, SIGNAL = 6.4; EXPRESSED IN LUNG, SIGNAL = 2.7; EXPRESSED IN BONE MARROW, SIGNAL =   4; EXPRESSED IN ADULT LIVER, SIGNAL = 7.8; EXPRESSED IN FETAL LIVER, SIGNAL = 2.6; EXPRESSED IN PLACENTA, SIGNAL = 4.7; EXPRESSED IN HEART, SIGNAL = 2.3; EXPRESSED IN HELA, SIGNAL = 8.1; EXPRESSED IN BRAIN, SIGNAL = 2.5; NT HIT: gi5803174, EVALUE 1.00e-55; EST_HUMAN HIT: BE260701.1, EVALUE 1.00e-55; SWISSPROT HIT: P08236, EVALUE 7.00e-10
catcaggtacggccaccagaggttggcacccagcaccttcagctggccctgggtcccagcctggttgtccacgactttgttttctgcattcaaaagacacacttccaact

SEQ ID NO: 19016 - DNA, 275 bp, Homo sapiens
  MAP TO AL121716.1; EXPRESSED IN BT474, SIGNAL = 8.3; EXPRESSED IN BONE MARROW, SIGNAL = 2.6; EXPRESSED IN LUNG, SIGNAL = 1.7; EXPRESSED IN BRAIN, SIGNAL = 1.1; EXPRESSED IN ADULT LIVER, SIGNAL = 1.4; EXPRESSED IN FETAL LIVER, SIGNAL = 2.8; EXPRESSED IN PLACENTA, SIGNAL = 2.2; EXPRESSED IN HEART, SIGNAL = 2.3; EXPRESSED IN HELA, SIGNAL = 4.7; EXPRESSED IN HBL100, SIGNAL = 8.7; EST_HUMAN HIT: BE044185.1, EVALUE 9.90e-01; SWISSPROT HIT: Q9Y3R5, EVALUE 2.00e-09; NT HIT: X92428.1, EVALUE 5.70e-01
actgtgagcatgtgcagcctccacagtggctccagactctgatgaatgcttgcagccaagcaagtgatttcagtgttcagagtgttgctatttcactagttatggacctggtgggactgacacagtctgtggccatggtcactggggaaaacatcaacagtgtagagcctgcacaacccttaagtccaaaccagggaagagtagctgtggttattagacctcccctcactcagggcaatctgaggtacatagctgagaagactgaatttttcaag

SEQ ID NO: 19017 - DNA, 106 bp, Homo sapiens
  MAP TO AL109801.5; EXPRESSED IN BRAIN, SIGNAL = 2.8; EXPRESSED IN BT474, SIGNAL =  17; EXPRESSED IN HBL100, SIGNAL =  20; EXPRESSED IN LUNG, SIGNAL = 4.3; EXPRESSED IN BONE MARROW, SIGNAL = 6.1; EXPRESSED IN ADULT LIVER, SIGNAL = 3.6; EXPRESSED IN FETAL LIVER, SIGNAL = 5.2; EXPRESSED IN PLACENTA, SIGNAL = 6.3; EXPRESSED IN HEART, SIGNAL =   3; EXPRESSED IN HELA, SIGNAL =  44; NT HIT: U78027.1, EVALUE 2.00e-53; SWISSPROT HIT: P09896, EVALUE 3.00e-16; EST_HUMAN HIT: BE275763.1, EVALUE 4.00e-53
gttaacgtccctaaaacccgccggactttctgtaagaagtgtggcaagcaccaaccccataaagtgacacagtacaagaagggcaaggattctctgtacgcccagg

SEQ ID NO: 19018 - DNA, 352 bp, Homo sapiens
  MAP TO AC009962.1; EXPRESSED IN BONE MARROW, SIGNAL = 1.8; EXPRESSED IN LUNG, SIGNAL = 1.7; EXPRESSED IN BRAIN, SIGNAL = 1.9; EXPRESSED IN ADULT LIVER, SIGNAL = 2.4; EXPRESSED IN BT474, SIGNAL = 2.3; EXPRESSED IN FETAL LIVER, SIGNAL = 1.7; EXPRESSED IN PLACENTA, SIGNAL = 3.8; EXPRESSED IN HBL100, SIGNAL = 3.5; EXPRESSED IN HELA, SIGNAL = 7.7; EXPRESSED IN HEART, SIGNAL = 1.8; NT HIT: gi11429870, EVALUE 0.00e+00; EST_HUMAN HIT: AI688110.1, EVALUE 0.00e+00; SWISSPROT HIT: P28290, EVALUE 2.00e-55
aatgaatgaaacacagattttacccacctcccgtatgacttgctgcaactcatcttgctccacatttttatgcatttcctcagcagctggcattgatgggagttttccatgcccttcttccacttcagatttaggtcctacaacttctggggctccttcagctgcatcaacttcctcagaactttccaaatctggaggtgtctgcacagagcctgttctagaaggagctgttggcgttagagccaccgatgctcggaacactttcttccttgccactaatggggttttggatttgcccactgaggcagtagaaggtactccagttcttctgttagcatgagagggaccagaa

SEQ ID NO: 19019 - DNA, 327 bp, Homo sapiens
  MAP TO AP000359.1; EXPRESSED IN HBL100, SIGNAL = 1.9; EXPRESSED IN HELA, SIGNAL =  13; EXPRESSED IN PLACENTA, SIGNAL = 4.2; EXPRESSED IN HEART, SIGNAL = 3.8; EXPRESSED IN BRAIN, SIGNAL = 1.7; EXPRESSED IN BONE MARROW, SIGNAL = 1.6; EXPRESSED IN LUNG, SIGNAL = 3.9; EXPRESSED IN BT474, SIGNAL =  20; EXPRESSED IN ADULT LIVER, SIGNAL = 1.7; EXPRESSED IN FETAL LIVER, SIGNAL = 0.98; SWISSPROT HIT: P04006, EVALUE 1.00e-40; NT HIT: U09770.1, EVALUE 1.00e-94; EST_HUMAN HIT: AW951729.1, EVALUE 1.00e-118
gctacaagggagccctgggcatctgggggcgaggcctggcatttgcctggacagtggcccaggaagcggccaagaatggagtctcccccacccaagtttacttgaaagtgtggctctcgggtccaccccgcccaaagcctttaggcccaaacatggcggcgtagcaggggtggttgccgtagggtttgccttcatgctcagcgtggcccccggaagtcagcgtcttcccacatttctcacacttcaggcagggccgatgccagtccttgcctagagaggtcaccctctcggcgaagtacaccttgtcgcacgcggggcacttgggca

SEQ ID NO: 19020 - DNA, 199 bp, Homo sapiens
  MAP TO AC007115.1; EXPRESSED IN BT474, SIGNAL = 1.1; EXPRESSED IN FETAL LIVER, SIGNAL = 1.9; EXPRESSED IN ADULT LIVER, SIGNAL = 3.1; EXPRESSED IN HEART, SIGNAL = 7.4; EXPRESSED IN PLACENTA, SIGNAL =  12; EXPRESSED IN LUNG, SIGNAL = 7.4; EST_HUMAN HIT: AI686040.1, EVALUE 1.00e-108; NT HIT: gi11435936, EVALUE 1.00e-108; SWISSPROT HIT: P07585, EVALUE 2.00e-35
atcatcctccttctgcttgcacaagtttcctgggctggaccgtttcaacagagaggcttatttgactttatgctagaagatgaggcttctgggataggcccagaagttcctgatgaccgcgacttcgagccctccctaggcccagtgtgccccttccgctgtcaatgccatcttcgagtggtccagtgttctgatttgg

SEQ ID NO: 19021 - DNA, 497 bp, Homo sapiens; identical to SEQ ID NO: 2283
  MAP TO AC005227.2; EXPRESSED IN BONE MARROW, SIGNAL = 3.4; EXPRESSED IN LUNG, SIGNAL = 6.9; EXPRESSED IN BT474, SIGNAL = 1.8; EXPRESSED IN FETAL LIVER, SIGNAL = 2.2; EXPRESSED IN ADULT LIVER, SIGNAL = 4.2; EXPRESSED IN HELA, SIGNAL = 3.3; EXPRESSED IN PLACENTA, SIGNAL = 2.6; EXPRESSED IN HBL100, SIGNAL = 1.7; EXPRESSED IN HEART, SIGNAL = 2.4; EXPRESSED IN BRAIN, SIGNAL = 1.5; NT HIT: AF003528.1, EVALUE 7.00e-27; SWISSPROT HIT: O02466, EVALUE 6.80e+00; EST_HUMAN HIT: AA584483.1, EVALUE 1.00e-19

SEQ ID NO: 19022 - DNA, 327 bp, Homo sapiens
  MAP TO AC008173.1; EXPRESSED IN BONE MARROW, SIGNAL = 1.7; EXPRESSED IN HELA, SIGNAL = 5.3; EXPRESSED IN BRAIN, SIGNAL = 1.5; EXPRESSED IN LUNG, SIGNAL = 3.2; EXPRESSED IN BT474, SIGNAL = 1.5; EXPRESSED IN ADULT LIVER, SIGNAL = 4.8; EXPRESSED IN FETAL LIVER, SIGNAL = 1.1; EXPRESSED IN PLACENTA, SIGNAL = 4.1; EXPRESSED IN HEART, SIGNAL = 1.2; EXPRESSED IN HBL100, SIGNAL = 2.1; NT HIT: AL163246.2, EVALUE 3.00e-80; EST_HUMAN HIT: AW340174.1, EVALUE 5.00e-79; SWISSPROT HIT: P33459, EVALUE 2.00e-03
ccatgattcatgggtccaggaatcaaggggaggaagtggaagtggcaccactcaccatcaaccctactaatccactaagaaaatttttgctacctgttcctgcaacattgcattctgctggcctagaggtattagttccagagggaggaacactgccaccaggagacacaacaacgaatccattaaactggaagttaagattgccacctggacactttgggctcctcctacatttaagacaaaagactaagaagggagttacagtgttggatggggtgattgacccagactatcaagatgaaatcagtctattactccataacagag

SEQ ID NO: 19023 - DNA, 175 bp, Homo sapiens
  MAP TO AC009402.2; EXPRESSED IN PLACENTA, SIGNAL = 9.4; EXPRESSED IN HELA, SIGNAL = 9.7; EXPRESSED IN HBL100, SIGNAL =   8; EXPRESSED IN HEART, SIGNAL = 9.4; EXPRESSED IN LUNG, SIGNAL = 9.5; EXPRESSED IN BONE MARROW, SIGNAL = 8.8; EXPRESSED IN BRAIN, SIGNAL = 6.9; EXPRESSED IN ADULT LIVER, SIGNAL =  10; EXPRESSED IN BT474, SIGNAL = 5.5; EXPRESSED IN FETAL LIVER, SIGNAL = 7.8; EST_HUMAN HIT: BE144412.1, EVALUE 9.40e+00; NT HIT: U67922.1, EVALUE 1.40e+00
atttctgaaaaggacaaaggtggtttacctaaactttttgctgcctccacacacgctcacactcacattcacacacattcacactcacatggaggtaatgagaaacatattctttctggggctactgattttaacccagacctctttgttatacttgcctgttggtaaatggctc

SEQ ID NO: 19024 - DNA, 84 bp, Homo sapiens
  MAP TO AC009474.1; EXPRESSED IN BONE MARROW, SIGNAL = 2.4; EXPRESSED IN BT474, SIGNAL = 1.4; EXPRESSED IN HBL100, SIGNAL = 2.1; EXPRESSED IN BRAIN, SIGNAL = 2.1; EXPRESSED IN LUNG, SIGNAL = 1.8; EXPRESSED IN ADULT LIVER, SIGNAL = 4.3; EXPRESSED IN FETAL LIVER, SIGNAL = 1.9; EXPRESSED IN PLACENTA, SIGNAL = 3.2; EXPRESSED IN HEART, SIGNAL = 1.5; EXPRESSED IN HELA, SIGNAL = 3.5; NT HIT: U79410.1, EVALUE 1.00e-17; EST_HUMAN HIT: AA614201.1, EVALUE 1.00e-14
cctcatcaaccaacctctgccagctttgaaattttcttccgcagtgtcctcacctctctcagccttcacagaattgaagagagt

SEQ ID NO: 19025 - DNA, 126 bp, Homo sapiens
  MAP TO AL008582.11; EXPRESSED IN PLACENTA, SIGNAL =   1; EXPRESSED IN FETAL LIVER, SIGNAL = 1.1; EXPRESSED IN HEART, SIGNAL =   1; EXPRESSED IN HELA, SIGNAL = 3.5; EXPRESSED IN HBL100, SIGNAL = 3.5; EXPRESSED IN BRAIN, SIGNAL = 0.91; EXPRESSED IN ADULT LIVER, SIGNAL = 1.1; EXPRESSED IN BT474, SIGNAL = 2.4; EST_HUMAN HIT: AI623538.1, EVALUE 6.00e-65; NT HIT: AJ251973.1, EVALUE 4.40e+00
atttcttgttctgatagcttcccaccacacaccaaaggttcctcaaggacagctgccaccagagctgctgcaagaacatgtttttcactgggcgtcgcttcacagtcagttcctcaagcagaagac

SEQ ID NO: 19026 - DNA, 196 bp, Homo sapiens
  MAP TO AC010684.1; EXPRESSED IN BT474, SIGNAL = 5.5; EXPRESSED IN PLACENTA, SIGNAL = 1.1; EXPRESSED IN BONE MARROW, SIGNAL = 1.3; EXPRESSED IN ADULT LIVER, SIGNAL = 1.2; EXPRESSED IN FETAL LIVER, SIGNAL = 1.6; EXPRESSED IN HEART, SIGNAL =   1; EXPRESSED IN HELA, SIGNAL =   6; EXPRESSED IN HBL100, SIGNAL = 5.1; EXPRESSED IN BRAIN, SIGNAL = 1.3; EXPRESSED IN LUNG, SIGNAL = 1.9; EST_HUMAN HIT: BF096255.1, EVALUE 2.00e-93; NT HIT: gi11464974, EVALUE 1.00e-93; SWISSPROT HIT: P25358, EVALUE 5.00e-04
agtggccgcaggggacccagttcatcacaaaccaccagatgttcagcatcgaggcatggtggtagacgtgcaggaccgtgatctggtggttgttcttgcgcaggatgaagaagaaagtgtccataaattctatgagtttggagaagtagtaccaccagaggacacggataatctaagaggaaagggtcaaagattt

SEQ ID NO: 19027 - DNA, 1095 bp, Homo sapiens
  MAP TO AC010680.2; EXPRESSED IN HEART, SIGNAL = 4.3; EXPRESSED IN LUNG, SIGNAL = 1.2; NT HIT: AF058332.1, EVALUE 0.00e+00; SWISSPROT HIT: P11799, EVALUE 3.00e-06; EST_HUMAN HIT: AA247925.1, EVALUE 2.00e-38
tctttttactacagtgagtttggctgaagttgctgtttttccgctgtcattcaaggcctcacagacatactctccttgatggtcttcggtatttactttgtcgatgactagcgtatatgtattttgatcttgtaaacacttgaacttttcatctgaaggcaccagtttattctcaaaataccaattcacctctttagcatttgttatggatgttgtgaggtgtacaatatcaccttcctcagaaacagtgtccactaaaggtgtatgtatcatggggccatcctctttgattaagccaccctcagcttcctgtatctttactgtagcaacctcctcagtaccactttcagaggaagactcctctttttcctctgatggtttcagactctcatcttgtttttcgtcagagacaacagctgaagcaacccctttagtgacaggtgtggcatccaaatatttaaccctactttgcacgttaaaataactgacctcttcagttgagatcagatatttagattcaacttctggttcagtaatgggttcaaccttctgtgaacctgaaaaagaatccatttcttcttgcaaacttgttttggctccttgctgaattctaggaccctcagctgttaggatgtctatttcctcatatataatagcacacaaagcatccctaagttccattttcaggttagccatttgaggatcaacatcttcaataatgatggttacttcttctgttacagactttgccgaagtaacaaggtacatgcacatgatgtgtctgggctcttgggtgatgtttacagcctcgacctccaccttttcaatatttcttagccactcagagaaaagacctggctgctcgctggccacggctgcttgcaaagcccggcagatttgaattttcaggtttaatctctgctcttctggaataccagaaagcaagctttccttagaaagaaggtcccttccctgtacctcctgcactttctttattgccacgggctctcttttagactcaatgatttggtctgggggcatcaccacgttgtcagaatgctcttctttgagcagtacctgcttttcttcaagtgc

SEQ ID NO: 19028 - DNA, 242 bp, Homo sapiens
  MAP TO AC010722.1; EXPRESSED IN HBL100, SIGNAL = 1.5; EXPRESSED IN HELA, SIGNAL = 2.5; EXPRESSED IN HEART, SIGNAL = 2.2; EXPRESSED IN ADULT LIVER, SIGNAL = 2.9; EXPRESSED IN PLACENTA, SIGNAL = 2.2; EXPRESSED IN BRAIN, SIGNAL = 1.9; EXPRESSED IN LUNG, SIGNAL = 1.5; EXPRESSED IN BONE MARROW, SIGNAL = 2.5; EXPRESSED IN FETAL LIVER, SIGNAL = 2.1; EXPRESSED IN BT474, SIGNAL = 0.98; NT HIT: AL163201.2, EVALUE 3.00e-27; SWISSPROT HIT: P50533, EVALUE 3.00e-03; EST_HUMAN HIT: AA601366.1, EVALUE 1.00e-27
aactcaaagaaattcaagataatgtggagaaggaattcaaaattctatcagagaaatttaacaaagagattgaaataactaagaataatgaagcagaaattctgaagttaaataataaaatagatacactgaagaatgtgtcagagccttttaatggcagaatgaatctagcaaaagaaaaagttagtgagcttgaagacagggtatttgaaaatacacagaggagacaaaagaacaaagaa

SEQ ID NO: 19029 - DNA, 513 bp, Homo sapiens
  MAP TO AC010874.1; EXPRESSED IN BT474, SIGNAL = 1.3; EXPRESSED IN ADULT LIVER, SIGNAL = 3.7; EXPRESSED IN FETAL LIVER, SIGNAL = 0.97; EXPRESSED IN HELA, SIGNAL = 4.2; EXPRESSED IN PLACENTA, SIGNAL = 2.9; EXPRESSED IN HBL100, SIGNAL = 1.4; EXPRESSED IN HEART, SIGNAL = 1.5; EXPRESSED IN BRAIN, SIGNAL = 1.4; EXPRESSED IN BONE MARROW, SIGNAL = 1.7; EXPRESSED IN LUNG, SIGNAL = 3.1; NT HIT: AL163209.2, EVALUE 2.00e-89; EST_HUMAN HIT: AI436093.1, EVALUE 3.00e-69; SWISSPROT HIT: P70213, EVALUE 2.00e-31
tggatattaaaggcgtgcaataatggtggaaggaacatagaattggatcaggctgaatttattgatttgggcccactaagcaggggctttgcattcaatgttgcagtttggggaattaaaaaaggttccaatagtttatttgcttggttagctaaaatgtggattaaaagatggcatattgtgaatgagctggaaatgcctgatcttccttggtttaatgtggaggaagggatccaaaggcttggtgagatttggatgcaggagtggattagtaaatttagacctactcatcctagctgggagggttcagaagatatacccttgaccaatattttgttaaatagatttgtgaggacagtacctgcatccttgaagagctctgttattgctcttctctgtatgccagatcttgcagtaggaaccacagtcactcaactacaaaatgggaataattggatcccgaggtggcagaggccaagtggcagcactcaaacgtcaaaggcaaggtgggca

SEQ ID NO: 19030 - DNA, 306 bp, Homo sapiens
  MAP TO AC011302.1; EXPRESSED IN BRAIN, SIGNAL = 2.7; EXPRESSED IN BONE MARROW, SIGNAL = 3.3; EXPRESSED IN LUNG, SIGNAL = 2.7; EXPRESSED IN BT474, SIGNAL = 3.1; EXPRESSED IN FETAL LIVER, SIGNAL = 3.3; EXPRESSED IN ADULT LIVER, SIGNAL = 3.8; EXPRESSED IN HELA, SIGNAL = 2.5; EXPRESSED IN PLACENTA, SIGNAL = 3.1; EXPRESSED IN HBL100, SIGNAL = 2.6; EXPRESSED IN HEART, SIGNAL =   4; SWISSPROT HIT: P35969, EVALUE 6.00e-08; NT HIT: AF245505.1, EVALUE 1.00e-127; EST_HUMAN HIT: AW937782.1, EVALUE 1.00e-100
tgccaacaggaccctggtggtgaaatcaatgacagacaaagacgccggagattacctgtgtgtagctcgaaataaggttggtgatgactgcgtggtgctcaaggtggatgtgatgatgaaaccggccaagattgaacacaaggaggagaacgaccacaaagtcttctacaggggtgacctgaaagtggactgtgtggccactggacttcccaatcccgagatctcctggagcctcctggatgggagtctggtgaactccttcatgcagtcagatgacagtggtggacgcaccaagcactatgtggt

SEQ ID NO: 19031 - DNA, 103 bp, Homo sapiens
  MAP TO AC011425.1; EXPRESSED IN BONE MARROW, SIGNAL = 0.93; EXPRESSED IN BT474, SIGNAL = 0.99; EXPRESSED IN ADULT LIVER, SIGNAL =   1; EXPRESSED IN HELA, SIGNAL = 0.93; EXPRESSED IN PLACENTA, SIGNAL = 0.97; EXPRESSED IN HBL100, SIGNAL = 0.97; EXPRESSED IN HEART, SIGNAL = 0.97; EXPRESSED IN BRAIN, SIGNAL = 0.96; NT HIT: AB011106.1, EVALUE 7.40e-01; EST_HUMAN HIT: AA255915.1, EVALUE 1.30e+00
ccttggtggtgatgagttgcaactgaaggagacccatttcctgaccacactgagccaatgtttttatttgtctggttctttctctagcctggtcctgctccat

SEQ ID NO: 19032 - DNA, 122 bp, Homo sapiens
  MAP TO AL109855.6; EXPRESSED IN HELA, SIGNAL =   1; EXPRESSED IN PLACENTA, SIGNAL = 3.1; EXPRESSED IN HBL100, SIGNAL = 2.4; EXPRESSED IN HEART, SIGNAL = 1.5; EXPRESSED IN BONE MARROW, SIGNAL = 1.1; EXPRESSED IN LUNG, SIGNAL = 1.8; EXPRESSED IN BRAIN, SIGNAL = 1.3; EXPRESSED IN FETAL LIVER, SIGNAL = 1.5; EXPRESSED IN ADULT LIVER, SIGNAL = 1.7; NT HIT: M68840.1, EVALUE 9.00e-63; SWISSPROT HIT: P21397, EVALUE 1.00e-08; EST_HUMAN HIT: AU139923.1, EVALUE 1.00e-62
agacgctcactgacattcactttgtaagtctctatgcccagctccttagacaagcgtaagattctgttttgggttggtcccacataagctccaccaacatctacgtaatcaacatgctcatt

SEQ ID NO: 19033 - DNA, 122 bp, Homo sapiens
  MAP TO AL118516.6; EXPRESSED IN PLACENTA, SIGNAL = 2.2; EXPRESSED IN HBL100, SIGNAL = 1.1; EXPRESSED IN HEART, SIGNAL = 1.5; EXPRESSED IN BONE MARROW, SIGNAL = 1.5; EXPRESSED IN FETAL LIVER, SIGNAL = 2.1; EXPRESSED IN HELA, SIGNAL = 1.3; EXPRESSED IN BRAIN, SIGNAL = 1.5; EXPRESSED IN LUNG, SIGNAL = 0.99; EXPRESSED IN ADULT LIVER, SIGNAL = 1.6; EST_HUMAN HIT: C18159.1, EVALUE 9.00e-63; NT HIT: AB021125.1, EVALUE 2.70e-01
gaccatgggctttggggtggcgcatgtcaggtcctgtccgggcttcgacatttactaacacagtgacctgggcagtgtcttcatctgtagaatggggtaatgtcagaggcctccatagtgtt

SEQ ID NO: 19034 - DNA, 176 bp, Homo sapiens
  MAP TO AL121748.1; EXPRESSED IN BT474, SIGNAL = 1.1; EXPRESSED IN HBL100, SIGNAL = 1.8; EXPRESSED IN HEART, SIGNAL = 2.3; EXPRESSED IN LUNG, SIGNAL = 3.4; EXPRESSED IN ADULT LIVER, SIGNAL = 2.7; EXPRESSED IN FETAL LIVER, SIGNAL = 3.1; EXPRESSED IN PLACENTA, SIGNAL = 2.6; EXPRESSED IN HELA, SIGNAL = 2.2; EXPRESSED IN BRAIN, SIGNAL = 2.7; EXPRESSED IN BONE MARROW, SIGNAL = 2.8; EST_HUMAN HIT: AA167539.1, EVALUE 2.00e-24; SWISSPROT HIT: P39188, EVALUE 3.00e-10; NT HIT: AL163249.2, EVALUE 3.00e-14
agacaggatctcattatgttgcccaggctggcctcgaactcctgggctcaagtgatcctccaggcttagcttcccaagtagctggaactagaggtgtgcaccacgctgcctggctcaagacttatatttctgaaacacctgttgtctccagaactgaacacagtgcctggcacaaa

SEQ ID NO: 19035 - DNA, 107 bp, Homo sapiens
  MAP TO AL035668.15; EXPRESSED IN BONE MARROW, SIGNAL = 1.9; EXPRESSED IN BRAIN, SIGNAL = 1.6; EXPRESSED IN BT474, SIGNAL =   1; EXPRESSED IN LUNG, SIGNAL = 1.6; EXPRESSED IN ADULT LIVER, SIGNAL = 1.7; EXPRESSED IN FETAL LIVER, SIGNAL = 1.6; EXPRESSED IN PLACENTA, SIGNAL = 1.9; EXPRESSED IN HEART, SIGNAL = 1.7; EXPRESSED IN HELA, SIGNAL = 1.7; EXPRESSED IN HBL100, SIGNAL = 1.2; NT HIT: X82877.1, EVALUE 2.00e-01
aaacaaaggctttattctgaatcttttcccgactgataaccagtctgtcattctaagtgggaagggtgggggtggcagggcattgaagagaggggaggagagtacag

SEQ ID NO: 19036 - DNA, 357 bp, Homo sapiens
  MAP TO AL049634.8; EXPRESSED IN PLACENTA, SIGNAL =   3; EXPRESSED IN HELA, SIGNAL = 2.4; EXPRESSED IN HEART, SIGNAL = 2.9; EXPRESSED IN BRAIN, SIGNAL = 3.2; EXPRESSED IN BT474, SIGNAL = 1.8; EXPRESSED IN HBL100, SIGNAL = 2.3; EXPRESSED IN LUNG, SIGNAL = 2.6; EXPRESSED IN BONE MARROW, SIGNAL = 3.8; EXPRESSED IN ADULT LIVER, SIGNAL = 3.1; EXPRESSED IN FETAL LIVER, SIGNAL = 2.8; NT HIT: gi5174678, EVALUE 0.00e+00; EST_HUMAN HIT: AI357578.1, EVALUE 0.00e+00; SWISSPROT HIT: P06311, EVALUE 8.00e-05
cgcgcacagacagctcagtgcctgctccagacttaaactccacgtcgtcagggctccctttccggaacttcacacagtagtaggtgccggcgtctgctggggtgatgttactgatgctgatggaaaagtccaggttgtttctctttgtgagttctgaaacagttgttacccgtgggaagtggccttctttctgattgtagattaattcccggcctgctccagctcctctaaaccacatgatgggccccacagggatcagggacgtcatagcacagcgcagagtggccgactctccagctgcaactgatacggacttttcaggctgaatcacctgtagctcgtcctcacctgccactc

SEQ ID NO: 19037 - DNA, 179 bp, Homo sapiens
  MAP TO AP000122.1; EXPRESSED IN ADULT LIVER, SIGNAL = 2.8; EXPRESSED IN PLACENTA, SIGNAL = 2.7; EXPRESSED IN BRAIN, SIGNAL = 2.1; EXPRESSED IN FETAL LIVER, SIGNAL = 2.3; EXPRESSED IN BT474, SIGNAL = 1.4; EXPRESSED IN HEART, SIGNAL = 2.5; EXPRESSED IN HELA, SIGNAL = 2.3; EXPRESSED IN HBL100, SIGNAL = 1.9; EXPRESSED IN LUNG, SIGNAL = 1.9; EXPRESSED IN BONE MARROW, SIGNAL = 3.2; EST_HUMAN HIT: AV704678.1, EVALUE 6.20e-01; NT HIT: Z49657.1, EVALUE 2.70e-02; SWISSPROT HIT: P16794, EVALUE 2.90e+00
atggtggctgccgaggtggtgaataccgaggatcccaaaatgaaaaattacggagggaaacttagaaaagtagtactctctcacagccagagtggtgctggtgaccctccagtccaggctaaaacaggtaagcaaaatatttgccttgtttttaatatacatcaagcaaaacaaggttt

SEQ ID NO: 19038 - DNA, 274 bp, Homo sapiens
  MAP TO AP000313.1; EXPRESSED IN PLACENTA, SIGNAL = 4.5; EXPRESSED IN HBL100, SIGNAL = 3.4; EXPRESSED IN HELA, SIGNAL = 4.1; EXPRESSED IN HEART, SIGNAL = 3.8; EXPRESSED IN BONE MARROW, SIGNAL = 4.3; EXPRESSED IN LUNG, SIGNAL = 3.8; EXPRESSED IN BRAIN, SIGNAL = 4.8; EXPRESSED IN ADULT LIVER, SIGNAL = 4.5; EXPRESSED IN BT474, SIGNAL = 2.8; EXPRESSED IN FETAL LIVER, SIGNAL = 6.6; NT HIT: AL163280.2, EVALUE 4.00e-08; EST_HUMAN HIT: BE222239.1, EVALUE 3.00e-09; SWISSPROT HIT: P37246, EVALUE 2.50e+00
ggggaaatgtggacacacagacgctggagatgtgcatgcacagaggaaagaccctgccgaggagagaggcctcaggaggaaccagccctgttgtcaccttgatcttggactttgtatctttagaaccatgaggaagtatatgttgtttaagcggctgggtctgtggcctttgttatggtcgcctgagcagattagcgcaccagcgaggaggaagaggcctccggggaagagcatgagctctagggtcagactccctctgccatttatcaactga

SEQ ID NO: 19039 - DNA, 451 bp, Homo sapiens
  MAP TO NM_007104.1; EXPRESSED IN BONE MARROW, SIGNAL = 1.9; EXPRESSED IN LUNG, SIGNAL = 1.7; EXPRESSED IN PLACENTA, SIGNAL = 3.6; EXPRESSED IN BRAIN, SIGNAL = 2.4; EXPRESSED IN ADULT LIVER, SIGNAL = 2.7; EXPRESSED IN FETAL LIVER, SIGNAL = 1.9; EXPRESSED IN BT474, SIGNAL =   3; EXPRESSED IN HEART, SIGNAL = 1.8; EXPRESSED IN HELA, SIGNAL = 3.9; EXPRESSED IN HBL100, SIGNAL =   4; EST_HUMAN HIT: AU131142.1, EVALUE 0.00e+00; NT HIT: AF246302.1, EVALUE 0.00e+00; SWISSPROT HIT: Q03181, EVALUE 3.00e-81
gtgatccacgacatcgagacattgtggcaggcagagaaggggctggtgtggaagcagttggtgaatggcctgcctccctacaaggagatcagcgtgcacgtcttctaccgctgccagtgcaccacagtggagaccgtgcgggagctcactgagttcgccaagagcatccccagcttcagcagcctcttcctcaacgaccaggttacccttctcaagtatggcgtgcacgaggccatcttcgccatgctggcctctatcgtcaacaaggacgggctgctggtagccaacggcagtggctttgtcacccgtgagttcctgcgcagcctccgcaaacccttcagtgatatcattgagcctaagtttgaatttgctgtcaagttcaacgccctggaacttgatgacagtgacctggccctattcattgcggccatcattctgtgtggaggtgagt

SEQ ID NO: 19040 - DNA, 537 bp, Homo sapiens
  MAP TO AL031669.12; EXPRESSED IN LUNG, SIGNAL =  13; EXPRESSED IN ADULT LIVER, SIGNAL = 7.5; EXPRESSED IN PLACENTA, SIGNAL = 9.8; EXPRESSED IN BRAIN, SIGNAL = 4.3; EXPRESSED IN BONE MARROW, SIGNAL = 8.7; EXPRESSED IN FETAL LIVER, SIGNAL =   9; EXPRESSED IN BT474, SIGNAL =  70; EXPRESSED IN HEART, SIGNAL = 5.7; EXPRESSED IN HELA, SIGNAL =  65; EXPRESSED IN HBL100, SIGNAL =  48; NT HIT: gi11432187, EVALUE 0.00e+00; EST_HUMAN HIT: BE794026.1, EVALUE 0.00e+00; SWISSPROT HIT: P30050, EVALUE 2.00e-72
ctgaatcggattcatctgacacaagctgcctccaccatgctgctgaagtttgaccccaatgagattagagtcgtatacctgaggtgcaccgggggtgaagtcgatgccatgtctgcactggctcccaggataagacccctgggtctgtctcccaaaaaggttgatgatgacattgccaaggcaactagtgactggaagggtctaaggattacagtgaaactgacgattcagaacagacaggcccagattgaggtggtaccttctgcctctgccctaatcatcaaagccctcaaggaaccaccaatagacagaaagaaacagaaaaacattaaacacagtggaattatcacttttgatgagattgtcaacactgctcgacagatgcagcaccaatctttagccagagaactctctggaactattaaagagctcctggggactgactactgcccagtctgtgtctgcaatgttgatggccaccaccctcatgacatcatggatggcatcaacagtgttgtggtggaatgcccaactagt

SEQ ID NO: 19041 - DNA, 3953 bp, Homo sapiens
  MAP TO AP000511.1; EXPRESSED IN BT474, SIGNAL =   1; EXPRESSED IN FETAL LIVER, SIGNAL = 0.98; EXPRESSED IN HBL100, SIGNAL = 2.4; EXPRESSED IN HEART, SIGNAL = 0.98; EXPRESSED IN BRAIN, SIGNAL = 1.5; EXPRESSED IN BONE MARROW, SIGNAL = 1.2; EXPRESSED IN LUNG, SIGNAL = 1.5; EXPRESSED IN ADULT LIVER, SIGNAL = 1.1; EST_HUMAN HIT: AW867076.1, EVALUE 0.00e+00; SWISSPROT HIT: Q02817, EVALUE 5.00e-63; NT HIT: AE001609.1, EVALUE 6.50e-01
caagaagatcaggccaaggaacaccaggaggagaatcacagccaccaggaccacaataactatggcccatgcagggaatgaatcattctctcccatctgtccagcgtggatacctttctgtgagccatctttattgaggtatggatggctctcgtttcctgtggcttctgatgtgatagaactcagcttcgttctagatgtaatgagggtgaaagaaccagtgggcacctgatgagtaacttcagttttatttagatgagaagaggtagtagtgagagatttgtctcctgtgaccttgactgaaggttttatagtctttgtgactgctgctgttttttctgggttttctgtggactttactggggcttttatggtctcagtggtcagtgtggtgttccccaggttttctgtaggcttttctgggactggtgtgtttttccctttggtgcatatggtcttctctgagtatagcgtaggcttttctggggttcttgtggttttctctgtggttgacgtggtcttttctgggtgttctgtggacttttctgtgacttgtgtcatcttctcatgggccaatgtggtcctttttgcatgttttataggctctgctggggctggtgtgatcacattggctgatgtagccctatctctatgttctgtagactctgctgcagatgaggtgatcttgtcattgggtgatgtggtcctttctccatgttctgtaggctttgctagggatggtgtgatcttctcattggccgacgtagtttttgctccatgttctgtaggcccttctggggatagtgtgatcttctcattggccaatgtagtcttttctccatgttctgtaggctttactggggatggtgtggtgttctcattggccgatggggtcatttcttcgtgttctgtaggctttgctggagatggtatggtcttctcattggctgatggtgtcctttctccatgttctgtaggctctgctggggatggtgtggtcttctcattggctgtcctttctccatgttctgtagactctgttggggatgttgtggtgttctcattggccagtggggtcctttctccattttctgtaggctctgctgaggatggtgtggtgtcctcattgactgtcgtttctccatgttctgtaggctttgctggggatggtgtggccttctcattggctatcctttctccatgttctgtaggctctgctcgggatggtgtggtgatctcattggccagtggggtcctttctccatgttctgtaggctctgctgaggatggtgtggtcttctcattggtaaatggggtcctttctccattttctgtaggctctgctggggatagtgtggtcttctcattggccaatggggtcatttcttcatgttctgtaggctctgctggggatagtgtggtgttctcattggctgtccattctctattttctgtaggctctgctgggaatggtgtggtcttctcattggctgtgctttctctattttctgtaggctctgctgggaattgtgtggtcttctcattggctgtcctttctctattttctgtaggctctgctggggatgatgtggtgttctcattggccagtggagtcctttctgcgtgttctgtaggctctgctgaggatgatgtggtcttctcattggcaaatggggtcctttttccattttctgtaggctctgctagagatggtgtggtcttctcattggccaatggagtcctgtctccattttctgtaggctgtgctggggatggtgtggtgttctcattggctgtcctttctctattttctgtaggctctgctgggaatggtgtggtcttctcattggctgtcctttctctattttctgtaggctctgctggggatagtgtggtgttctcattggccagtggggtcctttctccgtgttctgtaggctctgctggggatgatgtggttttctcattggcaaatggggtcctttgtccattttctgtaggctctgctggggatgatgtggtcttctcattggctgtcctttctctattttctgtaggctctgctgggaatagtgtggtcttctcgttggctgtcatttctctattttctgtaggccctgctggggatggtgtggtgttctcattggctgtcctttctctattttctgtaggctctgccggggatggtgtggtgttctcattggccagtggagtcctttcttcgtgttctgtaggctctgctgaggatgatgtggtcttctcattggcaaatggggtcctttgtccattttctgtaggctctgctagagatggcgtggtcttctcattggccaaaggagtcctgtctccattttctgtaggctctgctggggatggtgtggtcttctcattggctgtcctttctctattttctgtaggctctgctggggatggtgtggtgttctcattggccagtggggtcctttctccgtgttctgtaggctctgctgaggatgatgtggttttctcattggcaaatggggtcctttgtccattttctgtaggctctgctggggatggtgtggtcttctcattggctgttgtttctctattttctgtaggctctactggggatagtgtggtcttctcgttggctgtcgtttctctgttttctgtaggccctgctggggatggtgtggtgttctcattggctgtcctttctctattttctgtaggctctgctggggatggtgtggtgttctcgttggccagtggggtcctttctccatgttctgtagactctgctgaggatgatgtggttttgtcattggcaaatggggtcctttctccatgttctgtaggctctgctggggatggtgtagtgttctcattggctgtcctttctccatgttctgtaggctctgctggggatggtgtggtgttctcattggctgtcctttctccatgttctgtaggctctgctgggaatagtgtggtattctcattggctgtcatttctctattttctgtaggccctgctgggaatggtgcggtgttctcattggctgtcctttctctattttctgtaggctctgctggggatagtgtggtgttctcattggctgtcctttctctattttctgtaggctctgctggggatggtgtgttgttctcattggctgtccttcctccatgttctgtaggctctgctagagattgtgtgagctcattggctgatatggtctcttgtatgttttttgtagtttttgtcaggagcttgtctgaggcaactgttgttctggaatcttcagttttttctgactcttctggggttcctgtggtcttgtatgttgtttttgaggctgctgtgattttttctggaaaagatgtgcttttttgcttggtctgtgaattgcctgagttgtggaaggaagttgtagtcttatgtgagctggtacttgtcttatccaaagtactcatggacttttccaaaggtcttccagttttatctgattttcttgttaccgttgatttgcctgttgtggacttacgacagtttattttgctcttgggtgctggcgttatatgtttttttccagcggattctttatgtgtggtagtggagtcagcaggatcaacagagcgctggttccggatcattgggtctttcccttggttgctggagttttcttcagaagtgggaggagcctcatgattatctgtagagcttttgtggtctatagttttggagttgcctgtaggcttgtcagttggcttagaatggcgtgtggtgttgcagtggcgtttttgctcatggatttctgtagatttagggagctctggaggtctttgtcctgaatgcagaacaatgtgatcaaaagggatactataaacaaggcctggagtgaggggaaatatgtgatcggatgttgagagttccccagttttctgatattcttggaatgtagtagcac

SEQ ID NO: 19042 - DNA, 754 bp, Homo sapiens
  MAP TO AL050329.9; EXPRESSED IN BRAIN, SIGNAL =   3; EXPRESSED IN BONE MARROW, SIGNAL = 3.7; EXPRESSED IN LUNG, SIGNAL =   6; EXPRESSED IN BT474, SIGNAL = 6.5; EXPRESSED IN FETAL LIVER, SIGNAL = 5.1; EXPRESSED IN ADULT LIVER, SIGNAL = 3.8; EXPRESSED IN HELA, SIGNAL =  18; EXPRESSED IN PLACENTA, SIGNAL =   4; EXPRESSED IN HBL100, SIGNAL =   5; EXPRESSED IN HEART, SIGNAL =   2; SWISSPROT HIT: P41512, EVALUE 7.00e-02; EST_HUMAN HIT: AI925684.1, EVALUE 0.00e+00; NT HIT: gi11419140, EVALUE 0.00e+00
aggccacagcagcccaaccttcagcatctcaagtctagcccacctggatttccatttccagggcctcctaattttcccccacaaagcatgtttggatttccaccacatttgccacctccattacttccccctccaggctttggctttgctcaaaatcccatggttccctggccacctgttgttcatctcccaggtcagccacagcgtatgatgggtcctctctcacaagcatcaaggtatataggcccgcagaatttttaccaggttaaagacattcggaggccagaaaggcgccatagtgacccttggggtaggcaagaccaacagcaactggataggccatttaataggggtaaaggggaccgccagagattttatagtgattcacaccatttgaaaagagagcgacatgaaaaggaatgggagcaagaatctgaaaggcatagacgcagagacagaagccaagacaaggacagagacagaaaaagcagggaggaagggcacaaagataaagagagggcacggttatcacatggtgatcgaggaacagatggaaaagcaagcagagatagtaggaatgtagacaagaagccagataaacctaaaagtgaagactatgagaaggacaaagaacgagagaaaagtaaacacagagaaggagaaaaggacagggataggtaccacaaagatagggaccacactgacagaactaaaagcaaaaggtaaaatttgcaggctgcttcaggattacatt

SEQ ID NO: 19043 - DNA, 306 bp, Homo sapiens
  MAP TO Z98044.10; EXPRESSED IN PLACENTA, SIGNAL = 1.4; EXPRESSED IN HBL100, SIGNAL =   2; EXPRESSED IN HEART, SIGNAL = 1.4; EXPRESSED IN BONE MARROW, SIGNAL = 2.3; EXPRESSED IN BRAIN, SIGNAL =   2; EXPRESSED IN LUNG, SIGNAL = 2.6; EXPRESSED IN ADULT LIVER, SIGNAL = 2.4; EXPRESSED IN BT474, SIGNAL = 1.5; EXPRESSED IN FETAL LIVER, SIGNAL = 1.7; EXPRESSED IN HELA, SIGNAL = 1.6; NT HIT: gi11423093, EVALUE 0.00e+00; EST_HUMAN HIT: AW503925.1, EVALUE 0.00e+00; SWISSPROT HIT: O95479, EVALUE 6.00e-46
ctgcgaaggtcggcgtcaggctgtggaagctgtctggcttctgcagctctctgcgcacctgctcactgtaagactggtactggcccacgacggcactgcccctctgcaggccccgcagcgcctggaagacctgaagcttgtgccgcagcacagcctccgcactgctgacattgtggggcagctccatggccacgagggtgaggacctccgtcagatggttctggaggacgtcgcgaatgacaccgtactcctcatagaagctggtgcggcctggtggagggaggtggagaagtggggaggatctaa

SEQ ID NO: 19044 - DNA, 772 bp, Homo sapiens
  MAP TO AL031963.11; EXPRESSED IN BONE MARROW, SIGNAL = 6.3; EXPRESSED IN LUNG, SIGNAL =   6; EXPRESSED IN BT474, SIGNAL = 2.4; EXPRESSED IN ADULT LIVER, SIGNAL = 8.4; EXPRESSED IN FETAL LIVER, SIGNAL = 3.3; EXPRESSED IN HELA, SIGNAL =  18; EXPRESSED IN PLACENTA, SIGNAL = 7.1; EXPRESSED IN HBL100, SIGNAL = 4.1; EXPRESSED IN HEART, SIGNAL = 2.3; EXPRESSED IN BRAIN, SIGNAL = 5.2; EST_HUMAN HIT: AW846943.1, EVALUE 1.00e-124; SWISSPROT HIT: P03341, EVALUE 3.00e-22; NT HIT: AF280107.1, EVALUE 0.00e+00
tgatggaggaagtcttgtaagaatgcttgactgctgtggcttaggtgtgtgcggcttaggcattttgaagttcttgtgtgctggaggtgtggctgggttttgtctcacggcagaggcaagtaattgtaactcagaaatgcgttgccgtctggctgcctcctctctattattgtacaccttgaaggcaaggttgattaattcctgttgtggggtttgagggccagattctaatttttgaagttttttcctaatgtcaggagcggattgggtgataaaatgcatattaagaataaggcggccttctggcccttctgggtctagggcggtaaagtgtgtaagggttgctacaaagcaggccatgaactgggctgggttttcatctttaccttgggtagtttctttaagcttgtcataattaacagctttgtaagctgcctttttaagcccttcaactaggcaggaaatcatgtaatctcgcctagctatacctggggaatctgcctgatagttccattggggatcctcttggggaactgctctgatgccttcctggaggtctggctcatgaagccggtggttatcagcgtgagagtggactagagaaaaaactctttccctttcatctggggagagggtagaagtcaggatgacatttaggtcactccaggttaaattgtaggacagagttagatatcggaattcctgtatatgtttagtggggtctgatgagaaacagcctaaacgctgactgatctgtgaggtctgatagaga

SEQ ID NO: 19045 - DNA, 839 bp, Homo sapiens
  MAP TO AF162757.1; EXPRESSED IN BONE MARROW, SIGNAL =  13; EXPRESSED IN FETAL LIVER, SIGNAL =  10; EXPRESSED IN HELA, SIGNAL =  16; EXPRESSED IN HEART, SIGNAL = 7.6; EXPRESSED IN BRAIN, SIGNAL =   8; EXPRESSED IN LUNG, SIGNAL = 6.3; EXPRESSED IN BT474, SIGNAL =  19; EXPRESSED IN ADULT LIVER, SIGNAL = 7.6; EXPRESSED IN PLACENTA, SIGNAL =  11; EXPRESSED IN HBL100, SIGNAL =  21; NT HIT: gi11422105, EVALUE 0.00e+00; EST_HUMAN HIT: AU118082.1, EVALUE 0.00e+00; SWISSPROT HIT: P49321, EVALUE 2.00e-91
cttctcctctggctcgtccccacccacatctactggcttgactgttgggtctaaagactctgctgctacctccactgcagtgccctgcttttctagaatcaccacaggctgctcttctgaaacttcttttggcttctcctctatgctcacaattacctctctgtgcttctcccaacctcctttttctctgcactctttttggacatcagtttcagaaactgatttttcttcctcaacatctggtacttcctgttctggcttcccagaagtgacctcagcttcatttggtccttctggtgctcctcctccttttgccccttcagagatttcagttaaccaacctagagtcaagtcaactttttcctgtggctcctctgcagattcacttatatccatatcttctcttccacccttctccatttcacagtcctgttctttatcagtttcaggctttgcgaaagacttgtcttctgtttttttggcttcttctttttctcccatggagtcataaacctgttctctcaactctttccttgcttcctcatctatgctatcattattttctaccagagattcatcttctgttttttctccttcttcctcttccacatgcacaccatccaaggtgtttcccaatacaccattctcgattctctccactttatctgcagatgtagaaggagcaggaacatcttcaattttgttggcagaaaccagctccgcagcgatggcggcagtggctgtggactccgtggccatcgttcccttgaggtggcaaaccagtgaatggaatagagcctgtgagaaaaacaggcaatatgggatgccagagactcact

SEQ ID NO: 19046 - DNA, 151 bp, Homo sapiens
  MAP TO Z98752.9; EXPRESSED IN BT474, SIGNAL = 1.3; EXPRESSED IN HBL100, SIGNAL = 1.2; EXPRESSED IN HEART, SIGNAL = 0.92; EXPRESSED IN ADULT LIVER, SIGNAL = 1.5; EXPRESSED IN FETAL LIVER, SIGNAL = 1.1; EXPRESSED IN HELA, SIGNAL =   1; EXPRESSED IN BRAIN, SIGNAL =   2; EXPRESSED IN BONE MARROW, SIGNAL = 1.9; NT HIT: U89358.1, EVALUE 5.00e-80; EST_HUMAN HIT: BE394474.1, EVALUE 6.00e-80; SWISSPROT HIT: P20668, EVALUE 3.00e+00
cgctcctggaacagctgagggcagccatcattagaggaaccaagatctggacccgcggcttggtgaggcccgcacgcctggcactgacaggtgctatcatcctctggggggtcctgattgggatcttctggaggattctgggggtggtcct

SEQ ID NO: 19047 - DNA, 339 bp, Homo sapiens
  MAP TO AC007028.2; EXPRESSED IN BT474, SIGNAL = 2.9; EXPRESSED IN PLACENTA, SIGNAL = 1.8; EXPRESSED IN ADULT LIVER, SIGNAL = 1.7; EXPRESSED IN FETAL LIVER, SIGNAL =   2; EXPRESSED IN HEART, SIGNAL = 1.7; EXPRESSED IN HELA, SIGNAL =   2; EXPRESSED IN HBL100, SIGNAL = 3.8; EXPRESSED IN BRAIN, SIGNAL =   3; EXPRESSED IN LUNG, SIGNAL = 0.98; EXPRESSED IN BONE MARROW, SIGNAL = 2.7; EST_HUMAN HIT: BE144398.1, EVALUE 6.00e-08; NT HIT: AF280107.1, EVALUE 2.00e-04; SWISSPROT HIT: P02251, EVALUE 8.60e-02
tcaggcggctccagctgctctaatcagggcagtgggctcggactctgtgctcttggaggtcaaggaacaggaaggagccctgccttccccgggcgtggctgcagccacccaaaccgcggctgaagacacgggcctctcgctccatgaagccggcagaagccctgccccgcaaaccgcgggctgcagcctcaggcgtccctgcactcttggggtccccaggaaaagccctctgctcttgcatgctccgaaatgcctgctcccacttcttggcttcttcctgcttttggcgcctgctctgatcttggagcaaagtctgggcagagccccagggaccatgaa

SEQ ID NO: 19048 - DNA, 94 bp, Homo sapiens
  MAP TO AC007218.2; EXPRESSED IN PLACENTA, SIGNAL = 0.98; EXPRESSED IN HELA, SIGNAL = 1.1; EXPRESSED IN HEART, SIGNAL =   1; EXPRESSED IN BONE MARROW, SIGNAL = 0.97; EXPRESSED IN BT474, SIGNAL = 0.99; EXPRESSED IN HBL100, SIGNAL = 0.96; EXPRESSED IN BRAIN, SIGNAL = 1.2; EXPRESSED IN LUNG, SIGNAL =   1; EXPRESSED IN ADULT LIVER, SIGNAL = 0.98; EXPRESSED IN FETAL LIVER, SIGNAL = 1.1; NT HIT: U50991.1, EVALUE 1.70e-01; EST_HUMAN HIT: AL134071.1, EVALUE 5.10e-02
atggggtgtggagctgaacatacactccttgttggtgctgattgagagttatttctctttgcatctgtgtcaaagggaatcaggaaagaggctt

SEQ ID NO: 19049 - DNA, 247 bp, Homo sapiens
  MAP TO AC007318.2; EXPRESSED IN BRAIN, SIGNAL = 9.5; EXPRESSED IN BT474, SIGNAL =   5; EXPRESSED IN LUNG, SIGNAL =  11; EXPRESSED IN BONE MARROW, SIGNAL = 9.3; EXPRESSED IN ADULT LIVER, SIGNAL =  13; EXPRESSED IN FETAL LIVER, SIGNAL = 6.9; EXPRESSED IN PLACENTA, SIGNAL =  10; EXPRESSED IN HEART, SIGNAL =   9; EXPRESSED IN HELA, SIGNAL =  11; EXPRESSED IN HBL100, SIGNAL = 7.6; NT HIT: AL163210.2, EVALUE 9.00e-37; EST_HUMAN HIT: AW898344.1, EVALUE 1.00e-48; SWISSPROT HIT: P08587, EVALUE 3.60e+00
agaggactcagaagaggacaggaaaatgtgggaaagtttggaactccctagagacttgttgaatggctttgaccaaaatgctgataatgatatgaacaatgaaatttgggctgaggtggtctcacacagagatgaagaacttgttgggaactggagtgatatggtttggctgtgtccctattcatatctcaacttgaattctatctcccagcattcccacgtgttgtgggacggacccagggcgagg

SEQ ID NO: 19050 - DNA, 174 bp, Homo sapiens
  MAP TO AC007089.2; EXPRESSED IN PLACENTA, SIGNAL = 2.6; EXPRESSED IN HBL100, SIGNAL =   2; EXPRESSED IN HELA, SIGNAL = 2.3; EXPRESSED IN HEART, SIGNAL = 2.9; EXPRESSED IN BONE MARROW, SIGNAL = 2.5; EXPRESSED IN LUNG, SIGNAL = 1.6; EXPRESSED IN BRAIN, SIGNAL = 3.3; EXPRESSED IN ADULT LIVER, SIGNAL =   3; EXPRESSED IN BT474, SIGNAL = 1.5; EXPRESSED IN FETAL LIVER, SIGNAL = 2.8; NT HIT: AF217490.1, EVALUE 4.00e-01; EST_HUMAN HIT: AA490021.1, EVALUE 2.60e-02; SWISSPROT HIT: P49612, EVALUE 6.50e+00
ggtgacttcttttctggaagcagggacacaggtctctggaccaggatcagcagacacagccatgcctttagtcccagaaagatttggtggatcacatgctagctgccatatgaatcccaccaccatccccagcagctcctggagcagcacctccaacagaactgaaagaggctc

SEQ ID NO: 19051 - DNA, 139 bp, Homo sapiens
  MAP TO AC007283.3; EXPRESSED IN HBL100, SIGNAL = 6.3; EXPRESSED IN HELA, SIGNAL = 7.6; EXPRESSED IN HEART, SIGNAL = 8.8; EXPRESSED IN LUNG, SIGNAL = 4.9; EXPRESSED IN ADULT LIVER, SIGNAL = 6.9; EXPRESSED IN PLACENTA, SIGNAL = 7.1; EXPRESSED IN BRAIN, SIGNAL =  10; EXPRESSED IN BONE MARROW, SIGNAL = 9.4; EXPRESSED IN FETAL LIVER, SIGNAL = 7.4; EXPRESSED IN BT474, SIGNAL = 3.7; SWISSPROT HIT: O64214, EVALUE 3.00e+00; NT HIT: X03249.1, EVALUE 4.90e+00
ctctcaatccctgcatcttgctttgcacctgctctctattcccaaatcttcctgtgtctgtttccttcttatcatttagtctcacctgaaatattacctccaccaagaaactaccattatcctgttttgatttgttcat

SEQ ID NO: 19052 - DNA, 205 bp, Homo sapiens
  MAP TO AC007375.4; EXPRESSED IN ADULT LIVER, SIGNAL =   3; EXPRESSED IN BT474, SIGNAL = 2.4; EXPRESSED IN FETAL LIVER, SIGNAL = 7.3; EXPRESSED IN PLACENTA, SIGNAL = 4.5; EXPRESSED IN HBL100, SIGNAL =   2; EXPRESSED IN HELA, SIGNAL = 2.2; EXPRESSED IN HEART, SIGNAL = 2.9; EXPRESSED IN BRAIN, SIGNAL = 4.5; EXPRESSED IN BONE MARROW, SIGNAL = 3.1; EXPRESSED IN LUNG, SIGNAL = 1.9; SWISSPROT HIT: Q13164, EVALUE 4.20e-01; EST_HUMAN HIT: BF325904.1, EVALUE 7.20e-01; NT HIT: gi6754241, EVALUE 2.60e-02
catctacatcgtgttccagtaccacctcatcatctttgtgctcatcatctgtatcccctccctgggcatcattttgcccatcaactatactggatctgttctgggtaggcaaagctcagctggccctggggcagcagctggacctgagaggcagccaggcaagccagtcagggctggggttgagggtctagacatctattttaat

SEQ ID NO: 19053 - DNA, 192 bp, Homo sapiens
  MAP TO AC007378.2; EXPRESSED IN BRAIN, SIGNAL = 1.4; EXPRESSED IN BONE MARROW, SIGNAL =   1; EXPRESSED IN LUNG, SIGNAL = 1.5; EXPRESSED IN BT474, SIGNAL = 1.1; EXPRESSED IN FETAL LIVER, SIGNAL = 0.89; EXPRESSED IN ADULT LIVER, SIGNAL =   2; EXPRESSED IN HELA, SIGNAL =  11; EXPRESSED IN PLACENTA, SIGNAL = 9.7; EXPRESSED IN HBL100, SIGNAL = 3.6; EXPRESSED IN HEART, SIGNAL = 1.2; EST_HUMAN HIT: BF334221.1, EVALUE 1.00e-104; SWISSPROT HIT: P35442, EVALUE 1.00e-12; NT HIT: gi11430555, EVALUE 1.00e-104
agctcagtactccctccatttgccacgcccctggaggagaatactttgtggaaggagaaacgtggaacattgactcctgtactcagtgcacctgccacagcggacgggtgctgtgtgagacagaggtgtgcccaccgctgctctgccagaacccctcacgcacccaggattcctgctgcccacagtgtacag

SEQ ID NO: 19054 - DNA, 120 bp, Homo sapiens
  MAP TO AC007599.1; EXPRESSED IN BT474, SIGNAL = 0.96; EXPRESSED IN FETAL LIVER, SIGNAL = 1.1; EXPRESSED IN PLACENTA, SIGNAL = 1.5; EXPRESSED IN HELA, SIGNAL = 1.6; EXPRESSED IN HBL100, SIGNAL = 1.2; EXPRESSED IN HEART, SIGNAL = 1.2; EXPRESSED IN BONE MARROW, SIGNAL = 1.6; EXPRESSED IN BRAIN, SIGNAL = 1.3; EXPRESSED IN ADULT LIVER, SIGNAL = 2.2; NT HIT: AL163208.2, EVALUE 1.00e-12; EST_HUMAN HIT: AI884398.1, EVALUE 3.00e-07
ttttgctccagtccactgggctcattccacttggctcatgctaccaggctggatcccatgcctgccaaggatgagccagatgtggagtggtgaggggtgtatgagcaagtgtagggtctg

SEQ ID NO: 19055 - DNA, 153 bp, Homo sapiens
  MAP TO AC007721.7; EXPRESSED IN HELA, SIGNAL =  11; EXPRESSED IN PLACENTA, SIGNAL = 1.7; EXPRESSED IN HBL100, SIGNAL = 1.5; EXPRESSED IN HEART, SIGNAL = 1.7; EXPRESSED IN BONE MARROW, SIGNAL = 1.6; EXPRESSED IN BRAIN, SIGNAL = 1.2; EXPRESSED IN LUNG, SIGNAL = 1.2; EXPRESSED IN ADULT LIVER, SIGNAL = 1.6; EXPRESSED IN BT474, SIGNAL = 4.3; EXPRESSED IN FETAL LIVER, SIGNAL = 1.7; EST_HUMAN HIT: BE142985.1, EVALUE 4.00e-81; SWISSPROT HIT: Q13619, EVALUE 8.00e-24; NT HIT: AB012193.1, EVALUE 4.00e-81
acgctgcagtccctggcctgtggcaaagcacgtgtgctgattaaaagtcccaaaggaaaggaagtggaagatggagacaagttcatttttaatggagagttcaagcacaagttgtttagaataaagatcaatcaaattcagatgaaggaaact

SEQ ID NO: 19056 - DNA, 178 bp, Homo sapiens
  MAP TO AC009492.1; EXPRESSED IN PLACENTA, SIGNAL = 1.5; EXPRESSED IN HBL100, SIGNAL = 1.4; EXPRESSED IN BONE MARROW, SIGNAL = 1.7; EXPRESSED IN FETAL LIVER, SIGNAL = 1.3; EXPRESSED IN HELA, SIGNAL = 2.4; EXPRESSED IN HEART, SIGNAL =   1; EXPRESSED IN BRAIN, SIGNAL = 2.6; EXPRESSED IN LUNG, SIGNAL = 5.3; EXPRESSED IN BT474, SIGNAL = 0.98; EXPRESSED IN ADULT LIVER, SIGNAL =   2; EST_HUMAN HIT: AI141067.1, EVALUE 1.70e+00; NT HIT: AY008257.1, EVALUE 6.40e+00
gtgggtgatgatgaagatggtgttgatggtgaagatgatgatggtggtgatgatggtgatggtgatgatgatgatgatgacaatggtgatgatgatggtggtgatgatgatgatgatgttggtgatggtgataatgattcctcaattttcctaactctactttttggttggattctca

SEQ ID NO: 19057 - DNA, 122 bp, Homo sapiens
  MAP TO AC009185.2; EXPRESSED IN PLACENTA, SIGNAL = 2.6; EXPRESSED IN HBL100, SIGNAL = 5.1; EXPRESSED IN HEART, SIGNAL = 2.2; EXPRESSED IN BONE MARROW, SIGNAL = 2.5; EXPRESSED IN FETAL LIVER, SIGNAL = 2.5; EXPRESSED IN HELA, SIGNAL = 4.3; EXPRESSED IN BRAIN, SIGNAL = 2.1; EXPRESSED IN LUNG, SIGNAL = 2.9; EXPRESSED IN BT474, SIGNAL =  19; EXPRESSED IN ADULT LIVER, SIGNAL = 1.8; EST_HUMAN HIT: AA354109.1, EVALUE 9.00e-63; SWISSPROT HIT: Q08881, EVALUE 2.00e-17; NT HIT: L10717.1, EVALUE 9.00e-63
tgtggaggccagccggggcttgtacaaccgaaatccggtactgatgtcttccaccacctctgagttgcttcggttttcatacgggattttgccttcactgaaaacttcccacatcagcacac

SEQ ID NO: 19058 - DNA, 163 bp, Homo sapiens
  MAP TO AC009294.6; EXPRESSED IN PLACENTA, SIGNAL = 0.93; EXPRESSED IN HEART, SIGNAL =   1; EXPRESSED IN LUNG, SIGNAL = 7.1; EXPRESSED IN BRAIN, SIGNAL = 1.1; EXPRESSED IN BONE MARROW, SIGNAL = 1.1; EXPRESSED IN FETAL LIVER, SIGNAL = 1.1; NT HIT: D90915.1, EVALUE 8.00e-02; EST_HUMAN HIT: AW883630.1, EVALUE 3.80e-01; SWISSPROT HIT: P54678, EVALUE 6.60e+00
catcagtggattggttttactcttgtaaacagtgatgagtccctttttgcattggttgccagaatagtaaaagctacacatgttgccagactgtgctccatagagcatcatagacataggggctgggtggatggggtggctctggacctgctgaagaaggaag

SEQ ID NO: 19059 - DNA, 337 bp, Homo sapiens
  MAP TO AC008123.9; EXPRESSED IN BT474, SIGNAL =   8; EXPRESSED IN ADULT LIVER, SIGNAL = 5.2; EXPRESSED IN HEART, SIGNAL =   3; EXPRESSED IN PLACENTA, SIGNAL = 5.2; EXPRESSED IN BONE MARROW, SIGNAL =   4; EXPRESSED IN FETAL LIVER, SIGNAL = 3.4; EXPRESSED IN HELA, SIGNAL =  13; EXPRESSED IN HBL100, SIGNAL =  10; EXPRESSED IN BRAIN, SIGNAL = 3.8; EXPRESSED IN LUNG, SIGNAL = 4.5; EST_HUMAN HIT: AU130689.1, EVALUE 6.00e-58; NT HIT: Y16641.1, EVALUE 8.00e-50; SWISSPROT HIT: P04929, EVALUE 5.00e-06
ttcattgtaaccatcatatccttcaccactatccccatacccgccattgtggttttcatatcctggttcaccatctccatagcccccactactgctgtaggcaggcccaccaccattgttgcccaccgtcacctccacatccattatatccaccattacaccctccataaccacctctgctgccaccacctctacttctaccaccagagcctcctctttcaccaaagtttccaccacagccaaaattacttgcaccacttccagagtttcctccacaacccataaagttgtcagatccacctccatcacctctgtgatcctgcagactgcatctctt

SEQ ID NO: 19060 - DNA, 141 bp, Homo sapiens
  MAP TO AC009532.2; EXPRESSED IN FETAL LIVER, SIGNAL = 1.3; EXPRESSED IN ADULT LIVER, SIGNAL = 1.1; EXPRESSED IN HEART, SIGNAL = 0.88; EXPRESSED IN PLACENTA, SIGNAL = 2.2; EXPRESSED IN BONE MARROW, SIGNAL = 0.93; EXPRESSED IN LUNG, SIGNAL = 0.89; EST_HUMAN HIT: H78909.1, EVALUE 1.00e-65; SWISSPROT HIT: P29746, EVALUE 7.70e-01; NT HIT: gi11438448, EVALUE 3.00e-69
  unsure 103
cagaaggaaatgatcgaaaccaaagtagtaaaggaggagaaggccaatgatagcaaccctaatgaggaatcaaagaaaactgataaaaacccagaagagtccnaagagtccaagcaaaactaccgtgcgatgcctggaagc

SEQ ID NO: 19061 - DNA, 234 bp, Homo sapiens
  MAP TO AC010165.1; EXPRESSED IN HBL100, SIGNAL = 3.2; EXPRESSED IN HELA, SIGNAL =   2; EXPRESSED IN BRAIN, SIGNAL = 4.8; EXPRESSED IN LUNG, SIGNAL = 4.4; EXPRESSED IN HEART, SIGNAL = 2.9; EXPRESSED IN PLACENTA, SIGNAL = 2.6; EXPRESSED IN BONE MARROW, SIGNAL = 2.6; EXPRESSED IN ADULT LIVER, SIGNAL = 1.5; EXPRESSED IN BT474, SIGNAL = 2.8; EXPRESSED IN FETAL LIVER, SIGNAL = 2.2; NT HIT: gi8923147, EVALUE 1.40e-01; EST_HUMAN HIT: AA722072.1, EVALUE 9.00e-04
gctattttagtgttagtgtattttgtgtagcccaagaaagttcctcctcctcctcctccttctcctcctcctcctcctcctcctcctcctccttcttcttcttcttcttcttcttcttcttcttcttcttcttcttcttcttcttctcctcctcctcctcctccttcttcttctttctcttcttcttcttctccttccaatgtagccaagggaagccaaaaggttagatacccc

SEQ ID NO: 19062 - DNA, 290 bp, Homo sapiens
  MAP TO AC009896.2; EXPRESSED IN BT474, SIGNAL = 4.3; EXPRESSED IN PLACENTA, SIGNAL =   1; EXPRESSED IN HEART, SIGNAL = 0.96; EXPRESSED IN HBL100, SIGNAL = 1.5; EXPRESSED IN HELA, SIGNAL =   4; EXPRESSED IN BRAIN, SIGNAL = 0.91; EXPRESSED IN LUNG, SIGNAL = 1.8; EST_HUMAN HIT: BE814424.1, EVALUE 0.00e+00; NT HIT: gi11434475, EVALUE 0.00e+00; SWISSPROT HIT: P39953, EVALUE 1.00e-06
gttcgtaaagtgtatcagacagatggactaaaaggattttataggggcatgtctgcttcatatgctggtatatcagagactgttatccattttgttatttatgaaagtataaaacaaaaactactggaatataagactgcttctacaatggaaaatgatgaagagtctgtgaaagaagcatcagattttgtgggaatgatgctagctgctgccacctcaaaaacttgtgccacaactatagcatatccacatggtaagaagagttatctattaaatcagaaatattttcc

SEQ ID NO: 19063 - DNA, 158 bp, Homo sapiens
  MAP TO AC009946.1; EXPRESSED IN BONE MARROW, SIGNAL = 2.2; EXPRESSED IN LUNG, SIGNAL = 3.8; EXPRESSED IN ADULT LIVER, SIGNAL = 1.5; EXPRESSED IN FETAL LIVER, SIGNAL = 1.7; EXPRESSED IN BT474, SIGNAL =   1; EXPRESSED IN HELA, SIGNAL = 0.96; EXPRESSED IN PLACENTA, SIGNAL = 2.9; EXPRESSED IN HEART, SIGNAL = 1.3; EXPRESSED IN HBL100, SIGNAL =   1; EXPRESSED IN BRAIN, SIGNAL = 1.8; NT HIT: AL163208.2, EVALUE 4.00e-13; EST_HUMAN HIT: AW797168.1, EVALUE 4.00e-16; SWISSPROT HIT: P50746, EVALUE 1.30e+00
acagcttgcatcctcgtgctctgcaatccactgtatgagcgtagaatgagaagacagctgtctgcaaagaagagtgtcctcatcagactctagatcagctggcaccttgatcttggacttctcagcctccataactgtgaaaaataaatgttatttga

SEQ ID NO: 19064 - DNA, 77 bp, Homo sapiens
  MAP TO AC009787.1; EXPRESSED IN HEART, SIGNAL =   3; EXPRESSED IN PLACENTA, SIGNAL = 3.3; EXPRESSED IN HBL100, SIGNAL = 2.8; EXPRESSED IN BRAIN, SIGNAL = 3.3; EXPRESSED IN BONE MARROW, SIGNAL = 3.9; EXPRESSED IN LUNG, SIGNAL = 3.5; EXPRESSED IN ADULT LIVER, SIGNAL = 2.8; EXPRESSED IN BT474, SIGNAL = 1.8; EXPRESSED IN FETAL LIVER, SIGNAL = 3.7; EXPRESSED IN HELA, SIGNAL = 2.9; NT HIT: AE001016.1, EVALUE 1.30e-01
tctttggtggcccctgtgccgtcatcagaatctgccccttttgagtgatttttcattattcggcagctctcttcatt

SEQ ID NO: 19065 - DNA, 102 bp, Homo sapiens
  MAP TO AC010135.1; EXPRESSED IN BT474, SIGNAL = 1.8; EXPRESSED IN FETAL LIVER, SIGNAL = 3.3; EXPRESSED IN HELA, SIGNAL =   5; EXPRESSED IN PLACENTA, SIGNAL = 3.7; EXPRESSED IN HBL100, SIGNAL = 2.2; EXPRESSED IN BRAIN, SIGNAL = 3.6; EXPRESSED IN LUNG, SIGNAL = 2.2; EXPRESSED IN HEART, SIGNAL = 3.3; EXPRESSED IN BONE MARROW, SIGNAL = 3.9; EXPRESSED IN ADULT LIVER, SIGNAL = 5.5; EST_HUMAN HIT: AW014945.1, EVALUE 3.20e-01; NT HIT: gi11427090, EVALUE 2.20e-01
tcccatgagcttcagattgtcttccactagcagctgcctgaggcaattttgggaagctctttccagcaaaatcagcagctcttggtgacaataggtggccat

SEQ ID NO: 19066 - DNA, 429 bp, Homo sapiens
  MAP TO AC010141.1; EXPRESSED IN ADULT LIVER, SIGNAL = 0.94; EXPRESSED IN FETAL LIVER, SIGNAL = 0.93; EXPRESSED IN HEART, SIGNAL = 0.94; EXPRESSED IN LUNG, SIGNAL = 1.3; EXPRESSED IN BRAIN, SIGNAL = 1.1; SWISSPROT HIT: P10263, EVALUE 1.00e-07; NT HIT: gi11435187, EVALUE 4.20e+00; EST_HUMAN HIT: BE272638.1, EVALUE 6.90e-02
agcttccctttaccatagtcaatggtaggccgtgaaacaatgggagtggcaagccatgtctcagtctccctttccaaaaattcataaggctgaggtggaggtggctgttctgcaccttcctctaaaggcgcagtagggggaactgtttctttcataagtttttggaggttagtatgtacaccttcccatttctcccccttttttaaactagactgtgatggttgactgtgctgattatcagactcctgattattaaacttttttatgtcaccctgaaacttctcctcctccttctcagtgtggaagggctccagtgctgttttaattgctgaccacacagaccaagtggagaagggactatcgtggccctcttgttgtgctccttttaagtctggtccgatcttgtcccagtcttttacattcatggtt

SEQ ID NO: 19067 - DNA, 260 bp, Homo sapiens
  MAP TO AC009884.2; EXPRESSED IN HBL100, SIGNAL = 1.3e+02; EXPRESSED IN HEART, SIGNAL = 0.85; EXPRESSED IN LUNG, SIGNAL = 0.93; EXPRESSED IN BRAIN, SIGNAL = 1.4; EXPRESSED IN BONE MARROW, SIGNAL = 1.6; EXPRESSED IN ADULT LIVER, SIGNAL = 1.4; EXPRESSED IN FETAL LIVER, SIGNAL = 1.3; EXPRESSED IN HELA, SIGNAL =   1; SWISSPROT HIT: P03186, EVALUE 1.10e+00; EST_HUMAN HIT: BF002171.1, EVALUE 2.40e-01
gcagcaatcccagccccagggcccagagcaccttcctctgggagtccagcctcaggactgtgctctgcctgcccctactgcacaggcctcagagccacccacctcaactctggttcagccacagtcagaagcaagtaagatgctgtgctacactgatgagctctacgaatctgcttttcgttttcaggacctttccatttggctcctgcttatcaatatttatcactttcattgattgttctctatttattaatcttatt

SEQ ID NO: 19068 - DNA, 84 bp, Homo sapiens
  MAP TO AC010680.2; EXPRESSED IN HEART, SIGNAL = 2.3; NT HIT: AJ277892.1, EVALUE 2.00e-40; EST_HUMAN HIT: AA194551.1, EVALUE 1.70e-01
tgcctgaagctgctcaagaagttgtcccagaaaagaaaattcccaaggcaccaatcaaaaaaccagaagcccccgcagttacag

SEQ ID NO: 19069 - DNA, 237 bp, Homo sapiens
  MAP TO AC011406.1; EXPRESSED IN BONE MARROW, SIGNAL = 1.2; EXPRESSED IN FETAL LIVER, SIGNAL = 1.3; EXPRESSED IN HBL100, SIGNAL = 0.94; EXPRESSED IN HEART, SIGNAL =   1; NT HIT: M26061.1, EVALUE 2.00e-56; EST_HUMAN HIT: W29086.1, EVALUE 9.00e-37; SWISSPROT HIT: P16499, EVALUE 2.00e-16
ctcataatacatctgtattccacattttaccagctccagttctgttaggggtaagtcactgaagtgaaatttattaatttcgtatttatctgcatctggcagctccgcttgctgtataaggaatagagtcaggtgattaggaaacatgaagtgtttctgggtgcccacctcctgtccagccctgtccccatcctgggtctgctggaaggatcagaacagagtgatggggaacatgct

SEQ ID NO: 19070 - DNA, 163 bp, Homo sapiens
  MAP TO AC011460.1; EXPRESSED IN FETAL LIVER, SIGNAL = 2.8; EXPRESSED IN BT474, SIGNAL = 2.5; EXPRESSED IN HBL100, SIGNAL = 1.3; EXPRESSED IN HELA, SIGNAL = 1.4; EXPRESSED IN HEART, SIGNAL = 0.98; EXPRESSED IN PLACENTA, SIGNAL = 1.2; EXPRESSED IN LUNG, SIGNAL = 1.1; EXPRESSED IN BRAIN, SIGNAL = 1.1; EXPRESSED IN BONE MARROW, SIGNAL = 1.2; SWISSPROT HIT: P51523, EVALUE 2.00e-11; NT HIT: AF309561.1, EVALUE 2.00e-67; EST_HUMAN HIT: AU135269.1, EVALUE 8.00e-65
ccactgccaccaggttgctgtagttctccaacatcacatcccggtacaggtccttctgagcagcgcccaggagttgccactcctcccaagtgaagtccacagccacatcctccagtgttatggattcctgtaataacagtcctgtttaataaagtgatgtctt

SEQ ID NO: 19071 - DNA, 212 bp, Homo sapiens
  MAP TO AC011482.1; EXPRESSED IN HEART, SIGNAL = 0.96; EXPRESSED IN PLACENTA, SIGNAL = 0.96; EXPRESSED IN BONE MARROW, SIGNAL = 1.3; EXPRESSED IN LUNG, SIGNAL = 5.5; EXPRESSED IN BRAIN, SIGNAL = 0.91; EXPRESSED IN FETAL LIVER, SIGNAL =   1; EXPRESSED IN ADULT LIVER, SIGNAL =   1; NT HIT: AL163202.2, EVALUE 2.00e-06; EST_HUMAN HIT: AA621761.1, EVALUE 2.00e-16; SWISSPROT HIT: Q60688, EVALUE 1.10e+00
aaaaaaaaaagccattttttcctccttctcctctggaattcttgctcagatgaaattttctgcacaaattacacctgcatctcgagaatatgcctttaaaggtgtcagcaccacccatttacctgctaccaccacacccactggcaggaccaagacctgcagaaacattccatccatttctgtcctttatactagtagagattcaggaacaa

SEQ ID NO: 19072 - DNA, 152 bp, Homo sapiens
  MAP TO AC011192.1; EXPRESSED IN HEART, SIGNAL = 1.4; EXPRESSED IN PLACENTA, SIGNAL = 1.6; EXPRESSED IN BRAIN, SIGNAL = 1.2; EXPRESSED IN BONE MARROW, SIGNAL = 1.1; EXPRESSED IN LUNG, SIGNAL = 7.5; EXPRESSED IN FETAL LIVER, SIGNAL = 9.7; EXPRESSED IN ADULT LIVER, SIGNAL = 0.91; EST_HUMAN HIT: BE153572.1, EVALUE 8.90e-02; SWISSPROT HIT: P46468, EVALUE 5.10e+00; NT HIT: AF200832.1, EVALUE 2.90e-01
ggttggtttatgggcagttcttgttcttgtcccagttgatatttgttttatcaagtcaggaactatttttgtcatcattgttaatcttcctcttgccagatctgttttggccgagggcatgcacttgaggtatgttagaagaatggagtgca

SEQ ID NO: 19073 - DNA, 106 bp, Homo sapiens
  MAP TO AL117356.1; EXPRESSED IN BT474, SIGNAL = 1.1; EXPRESSED IN HBL100, SIGNAL = 1.2; EXPRESSED IN HELA, SIGNAL = 1.8; EXPRESSED IN PLACENTA, SIGNAL =   1; EXPRESSED IN BONE MARROW, SIGNAL = 1.9; EXPRESSED IN LUNG, SIGNAL = 7.4; EXPRESSED IN ADULT LIVER, SIGNAL = 1.7; EXPRESSED IN FETAL LIVER, SIGNAL = 1.5; EXPRESSED IN HEART, SIGNAL = 1.4; EXPRESSED IN BRAIN, SIGNAL = 1.5; EST_HUMAN HIT: BE177993.1, EVALUE 2.00e-08; NT HIT: U79410.1, EVALUE 9.00e-10; SWISSPROT HIT: P48083, EVALUE 9.10e+00
accagccacatcattcccttaagcctgagcaaggctctaactcttttcaattctgtgaaggctgagaaaggtaaggaagctgcaagagaaagtttgatgctagcag

SEQ ID NO: 19074 - DNA, 171 bp, Homo sapiens
  MAP TO AC011201.1; EXPRESSED IN FETAL LIVER, SIGNAL = 3.3; EXPRESSED IN BT474, SIGNAL = 2.5; EXPRESSED IN HBL100, SIGNAL = 4.7; EXPRESSED IN HELA, SIGNAL = 3.4; EXPRESSED IN HEART, SIGNAL = 3.6; EXPRESSED IN PLACENTA, SIGNAL = 4.2; EXPRESSED IN LUNG, SIGNAL = 7.2; EXPRESSED IN BONE MARROW, SIGNAL =   7; EXPRESSED IN ADULT LIVER, SIGNAL = 4.1; EXPRESSED IN BRAIN, SIGNAL = 3.4; NT HIT: AF247123.1, EVALUE 1.30e+00; SWISSPROT HIT: P49765, EVALUE 4.40e-01
gtgtcagtgcaggtgccgtaagcagagccatcctttccaggtgacactgcatggcatggctgctaaccctgaaacttgcattcttgaaaaacttccctgggtccaacttgtttttcagtcttttgcctcttttgcatagaaggagtgaactatgggcagctgggttacttc

SEQ ID NO: 19075 - DNA, 184 bp, Homo sapiens
  MAP TO AC011474.1; EXPRESSED IN HBL100, SIGNAL = 2.6; EXPRESSED IN HELA, SIGNAL =   2; EXPRESSED IN HEART, SIGNAL = 2.4; EXPRESSED IN PLACENTA, SIGNAL = 2.8; EXPRESSED IN BONE MARROW, SIGNAL = 3.6; EXPRESSED IN BRAIN, SIGNAL = 2.7; EXPRESSED IN LUNG, SIGNAL = 1.1; EXPRESSED IN ADULT LIVER, SIGNAL = 2.4; EXPRESSED IN BT474, SIGNAL = 1.9; EXPRESSED IN FETAL LIVER, SIGNAL = 2.5; NT HIT: X76725.1, EVALUE 3.60e-01; EST_HUMAN HIT: BE958922.1, EVALUE 2.50e+00; SWISSPROT HIT: Q62130, EVALUE 3.00e+00
aaagctggagaggagtcatggggacgggcagacatctccactcaagtagctgaaggcttgccataatcagaagagtcaacctgctgcgtgtggccccagagagatgggactgattgtgggaggtgagtttgggagtgtttagcagctgcagatatttgggaatgagaggggtcatctgagagac

SEQ ID NO: 19076 - DNA, 153 bp, Homo sapiens
  MAP TO AL096869.1; EXPRESSED IN ADULT LIVER, SIGNAL = 1.1; EXPRESSED IN BT474, SIGNAL = 1.4; EXPRESSED IN FETAL LIVER, SIGNAL =   1; EXPRESSED IN PLACENTA, SIGNAL = 1.1; EXPRESSED IN HBL100, SIGNAL = 1.3; EXPRESSED IN HELA, SIGNAL = 1.1; EXPRESSED IN HEART, SIGNAL = 2.8; EXPRESSED IN BRAIN, SIGNAL =   3; EXPRESSED IN BONE MARROW, SIGNAL = 0.95; NT HIT: AF052058.1, EVALUE 3.00e-01; EST_HUMAN HIT: AA348335.1, EVALUE 3.00e-57; SWISSPROT HIT: P31629, EVALUE 3.00e+00
actactgttttccaaagtgaagttgcagtcactctgccgaggcccggacgaggcactgctgacttgtaagcacatgctgcagatatggaaatcctgctacaacctcaccaaccccaggtaagaggccagcagggcctgctttgcgtggctttt

SEQ ID NO: 19077 - DNA, 222 bp, Homo sapiens
  MAP TO AF166112.1; EXPRESSED IN ADULT LIVER, SIGNAL = 2.1; EXPRESSED IN BT474, SIGNAL = 1.4; EXPRESSED IN FETAL LIVER, SIGNAL = 1.8; EXPRESSED IN PLACENTA, SIGNAL = 1.7; EXPRESSED IN HELA, SIGNAL = 1.6; EXPRESSED IN HBL100, SIGNAL = 1.9; EXPRESSED IN HEART, SIGNAL = 2.1; EXPRESSED IN BONE MARROW, SIGNAL = 2.5; EXPRESSED IN LUNG, SIGNAL = 1.3; EXPRESSED IN BRAIN, SIGNAL = 2.1; NT HIT: S66304.1, EVALUE 2.10e+00; EST_HUMAN HIT: T57160.1, EVALUE 3.40e-02; SWISSPROT HIT: Q02465, EVALUE 8.10e+00
agcagagtgacatcattgacagcacctgccactggaggctgttcaacctgctcgtgggggccgtgtacatcctctgctacctcagcttctgggacagcccttctagaaataggatggtcacgttctacatggcaagtggcacttttctttatcctaacttttacagtgtatacagcaagtggggtgtgtgtgggtgtgtgtggggggtgtgtgtgtgtgtgc

SEQ ID NO: 19078 - DNA, 162 bp, Homo sapiens
  MAP TO AL096869.1; EXPRESSED IN ADULT LIVER, SIGNAL = 7.3; EXPRESSED IN BT474, SIGNAL = 4.1; EXPRESSED IN FETAL LIVER, SIGNAL = 8.3; EXPRESSED IN PLACENTA, SIGNAL = 9.4; EXPRESSED IN HELA, SIGNAL = 8.2; EXPRESSED IN HBL100, SIGNAL = 5.7; EXPRESSED IN HEART, SIGNAL = 8.1; EXPRESSED IN LUNG, SIGNAL = 4.8; EXPRESSED IN BONE MARROW, SIGNAL = 6.6; EXPRESSED IN BRAIN, SIGNAL = 8.4; SWISSPROT HIT: Q12948, EVALUE 4.40e-01; NT HIT: AB048299.1, EVALUE 2.00e-58; EST_HUMAN HIT: BE618392.1, EVALUE 1.00e-85
atcccagaggctctggggtatgtccgccaagctcttcagcttcaaggtgacgatgccaactccctgcacctccttgccctcctgctgtcagcacagaagcattaccatgacgctctgaacatcatcgacatggccctgagtgaatacccagaaaatttcatg

SEQ ID NO: 19079 - DNA, 295 bp, Homo sapiens
  MAP TO AF182108.1; EXPRESSED IN HEART, SIGNAL = 4.5; EXPRESSED IN LUNG, SIGNAL = 6.1; EXPRESSED IN BRAIN, SIGNAL = 4.4; EXPRESSED IN BT474, SIGNAL = 2.1; EXPRESSED IN ADULT LIVER, SIGNAL = 7.1; EXPRESSED IN PLACENTA, SIGNAL = 6.3; EXPRESSED IN HBL100, SIGNAL = 3.5; EXPRESSED IN BONE MARROW, SIGNAL = 5.9; EXPRESSED IN FETAL LIVER, SIGNAL =   5; EXPRESSED IN HELA, SIGNAL = 6.5; NT HIT: gi6678076, EVALUE 6.10e-01; EST_HUMAN HIT: Z21109.1, EVALUE 7.30e-01; SWISSPROT HIT: P38443, EVALUE 5.10e+00
gataggtcatgaaacatgcagcctccatcacagcaatgatctgagctgcatgtgtactgtaaatatatttctaatactttttccagtggcttctatagcaatgctctgcagtgtgacattggtgggcaatctagctttcatttcaagtttgcctactgtccaggtgtccactgaacataagccagtcccaactactaaaaaacaaacaaacaaaaaacacctaacaacaacaacaaaaaaactaatccaccctgttcctaaaaaccaccacatcatgttgctaaagagtatcttt

SEQ ID NO: 19080 - DNA, 83 bp, Homo sapiens
  MAP TO AL050317.9; EXPRESSED IN HELA, SIGNAL = 2.3; EXPRESSED IN HEART, SIGNAL = 3.3; EXPRESSED IN LUNG, SIGNAL = 3.3; EXPRESSED IN BRAIN, SIGNAL = 2.5; EXPRESSED IN BT474, SIGNAL = 1.4; EXPRESSED IN ADULT LIVER, SIGNAL = 2.3; EXPRESSED IN PLACENTA, SIGNAL = 2.6; EXPRESSED IN HBL100, SIGNAL = 1.8; EXPRESSED IN BONE MARROW, SIGNAL = 2.9; EXPRESSED IN FETAL LIVER, SIGNAL = 3.8; EST_HUMAN HIT: BF690255.1, EVALUE 1.00e+00; NT HIT: AL161559.2, EVALUE 9.00e-03
ctactttggacgtagtaaaggctcagtgagatcatcattgtcattcctcttatcaccaagggcacccaggggttggggaggca

SEQ ID NO: 19081 - DNA, 171 bp, Homo sapiens
  MAP TO AL035407.15; EXPRESSED IN HEART, SIGNAL = 2.9; EXPRESSED IN LUNG, SIGNAL = 2.4; EXPRESSED IN BRAIN, SIGNAL = 3.3; EXPRESSED IN FETAL LIVER, SIGNAL = 2.5; EXPRESSED IN ADULT LIVER, SIGNAL = 3.2; EXPRESSED IN PLACENTA, SIGNAL = 2.6; EXPRESSED IN HELA, SIGNAL = 2.3; EXPRESSED IN HBL100, SIGNAL = 1.8; EXPRESSED IN BONE MARROW, SIGNAL = 2.9; EXPRESSED IN BT474, SIGNAL = 1.4; EST_HUMAN HIT: BF331063.1, EVALUE 5.90e-01; NT HIT: AE000652.1, EVALUE 8.50e-02; SWISSPROT HIT: P34980, EVALUE 2.20e+00
ggatcagcccctgtgaggaaagctgcatcagcatctaataccctcaaagatgatcattctgaaaagaaatatcttgaagggcttctgcatcatcaaacatttcaccacatgcaaaaagagtttgaaaaaattgagttttcctggctcataattggacagtacagtctggag

SEQ ID NO: 19082 - DNA, 218 bp, Homo sapiens
  MAP TO AL035661.16; EXPRESSED IN FETAL LIVER, SIGNAL =  22; EXPRESSED IN ADULT LIVER, SIGNAL = 7.2; EXPRESSED IN HELA, SIGNAL = 3.6; EXPRESSED IN BRAIN, SIGNAL = 8.3; EXPRESSED IN LUNG, SIGNAL = 3.4; EXPRESSED IN BONE MARROW, SIGNAL = 5.8; EXPRESSED IN BT474, SIGNAL = 3.4; EXPRESSED IN PLACENTA, SIGNAL =  18; EXPRESSED IN HEART, SIGNAL = 4.8; EXPRESSED IN HBL100, SIGNAL = 3.1; EST_HUMAN HIT: AA776574.1, EVALUE 6.00e-84; SWISSPROT HIT: P36333, EVALUE 4.00e-08; NT HIT: X00269.1, EVALUE 2.00e+00
ctgctccagcgggacgtccagatcccccatgtggaccttgttgtctgtcctgtgagccaccaggacatgctgcacggtggggcagtgcttcacagcctcatccactattttcttcagctccaccacgcgcccaccccggagtccttggttgaaggtgataaccaccttgcacttggctaacagagacaacacagacatttctgatcagtctcctcccg

SEQ ID NO: 19083 - DNA, 173 bp, Homo sapiens
  MAP TO AJ239326.3; EXPRESSED IN HEART, SIGNAL = 0.84; EXPRESSED IN BRAIN, SIGNAL = 1.6; EXPRESSED IN BT474, SIGNAL = 1.3; NT HIT: AL163301.2, EVALUE 4.00e-93; SWISSPROT HIT: P11218, EVALUE 2.20e+00; EST_HUMAN HIT: AV683199.1, EVALUE 6.00e-01
gccgggctcacctgcgccaccgcctgcagcctttgcttcctgactcagcctaactcccaatgtcagaataaatgcaggagagggcagtttggtgataaaaggagaggaactatacttggaaatgatatttttctgcatatttagaaccaaaaaccccactggttcattgatct

SEQ ID NO: 19084 - DNA, 100 bp, Homo sapiens
  MAP TO AL035448.28; EXPRESSED IN BT474, SIGNAL =   1; EXPRESSED IN HBL100, SIGNAL = 1.7; EXPRESSED IN BRAIN, SIGNAL = 0.97; EXPRESSED IN FETAL LIVER, SIGNAL = 0.92; EXPRESSED IN ADULT LIVER, SIGNAL = 0.93; EXPRESSED IN PLACENTA, SIGNAL = 1.5; EXPRESSED IN HEART, SIGNAL = 1.1; EXPRESSED IN HELA, SIGNAL = 0.99; EXPRESSED IN BONE MARROW, SIGNAL =   1; NT HIT: U29185.1, EVALUE 7.00e-04; EST_HUMAN HIT: AA047634.1, EVALUE 2.20e-01
cccagagattctgattctgcaaatcttgagcagcctgagattctgcagttctatgaagcttccaggtagtgtcaatgctggtgctaggctgaccatagta

SEQ ID NO: 19085 - DNA, 138 bp, Homo sapiens
  MAP TO AF130418.2; EXPRESSED IN BT474, SIGNAL = 2.3; EXPRESSED IN HBL100, SIGNAL = 2.6; EXPRESSED IN BONE MARROW, SIGNAL = 2.9; EXPRESSED IN LUNG, SIGNAL =   2; EXPRESSED IN ADULT LIVER, SIGNAL = 5.5; EXPRESSED IN FETAL LIVER, SIGNAL = 2.8; EXPRESSED IN PLACENTA, SIGNAL = 3.5; EXPRESSED IN HEART, SIGNAL = 2.6; EXPRESSED IN HELA, SIGNAL = 3.5; EXPRESSED IN BRAIN, SIGNAL = 3.1; EST_HUMAN HIT: H97330.1, EVALUE 1.00e-46; SWISSPROT HIT: P55806, EVALUE 3.00e+00; NT HIT: AL163280.2, EVALUE 3.00e-41
atggctgaggaggcttcagaatcatggcaggaggtgaaaggcacttcttacatggtggcggcaagagaaaatgaggaagaagcaaaagtggaaacacctgataaacccattggatctcgtgagacttattcactgtca

SEQ ID NO: 19086 - DNA, 175 bp, Homo sapiens
  MAP TO AL079341.9; EXPRESSED IN BT474, SIGNAL =   2; EXPRESSED IN FETAL LIVER, SIGNAL = 2.6; EXPRESSED IN PLACENTA, SIGNAL = 2.5; EXPRESSED IN HBL100, SIGNAL = 1.6; EXPRESSED IN HELA, SIGNAL = 2.4; EXPRESSED IN HEART, SIGNAL = 2.8; EXPRESSED IN BONE MARROW, SIGNAL =   2; EXPRESSED IN LUNG, SIGNAL = 2.4; EXPRESSED IN BRAIN, SIGNAL = 2.6; EXPRESSED IN ADULT LIVER, SIGNAL = 2.5; NT HIT: D90909.1, EVALUE 3.40e-01; EST_HUMAN HIT: BE314822.1, EVALUE 1.60e+00; SWISSPROT HIT: P56090, EVALUE 2.90e+00
gggcaggaaaacgtttcttttccaccacgaatgtgacgtcgccatattcttccccaatcaacaaggcaccaatatgttcagacaaaatgtgcacatgatcaatttcccccactgcagtaaaggggcgaagagggtggctgttactcatcttgtggaatagacgatagtcgttgtt

SEQ ID NO: 19087 - DNA, 118 bp, Homo sapiens
  MAP TO AL096703.14; EXPRESSED IN ADULT LIVER, SIGNAL = 0.91; EXPRESSED IN BT474, SIGNAL =   1; EXPRESSED IN FETAL LIVER, SIGNAL = 1.1; EXPRESSED IN PLACENTA, SIGNAL = 0.98; EXPRESSED IN HEART, SIGNAL = 1.1; EXPRESSED IN BRAIN, SIGNAL = 1.1; EXPRESSED IN BONE MARROW, SIGNAL = 0.91; EXPRESSED IN LUNG, SIGNAL = 1.6; EST_HUMAN HIT: BE274110.1, EVALUE 6.00e+00; SWISSPROT HIT: Q04710, EVALUE 3.20e+00; NT HIT: L32832.1, EVALUE 1.00e+00
ttcacgaattgccccgaaagctcttaggtgagggccacaggtaggccttcctcttttaggaaacctaatattgtataaatcagtgtagcctggccggcggttcatcccatggcagcag

SEQ ID NO: 19088 - DNA, 242 bp, Homo sapiens
  MAP TO AL034429.1; EXPRESSED IN ADULT LIVER, SIGNAL = 5.5; EXPRESSED IN PLACENTA, SIGNAL = 7.2; EXPRESSED IN BONE MARROW, SIGNAL = 8.2; EXPRESSED IN LUNG, SIGNAL = 8.8; EXPRESSED IN BRAIN, SIGNAL = 6.3; EXPRESSED IN FETAL LIVER, SIGNAL = 5.6; EXPRESSED IN BT474, SIGNAL = 2.8; EXPRESSED IN HEART, SIGNAL = 6.2; EXPRESSED IN HELA, SIGNAL = 5.3; EXPRESSED IN HBL100, SIGNAL = 4.2; EST_HUMAN HIT: BF677538.1, EVALUE 2.20e-01; NT HIT: Z94053.1, EVALUE 1.90e+00
ctctgtttcaaaaaaaccaacaaaccaaaagaagaagaatcaagaagaagagaagaaggaggaggaagaggaggaggagaaggaggagaagaaggagaaggagaaggagaaggaggaggagaaggagaagaaggaagagaaggagaagaagaaagaaggaagaggaggaggaggaggaggaagaaaaagaagaaaagaagaaggaggaagagctttatttatgtatgccaggccaacttctt

SEQ ID NO: 19089 - DNA, 169 bp, Homo sapiens
  MAP TO AP000459.2; EXPRESSED IN HEART, SIGNAL = 4.7; EXPRESSED IN LUNG, SIGNAL = 3.2; EXPRESSED IN BRAIN, SIGNAL = 4.6; EXPRESSED IN ADULT LIVER, SIGNAL = 4.6; EXPRESSED IN PLACENTA, SIGNAL = 6.2; EXPRESSED IN HBL100, SIGNAL = 2.7; EXPRESSED IN HELA, SIGNAL = 4.4; EXPRESSED IN BONE MARROW, SIGNAL = 4.4; EXPRESSED IN BT474, SIGNAL = 2.6; EXPRESSED IN FETAL LIVER, SIGNAL = 5.4; NT HIT: gi11433323, EVALUE 3.90e-01; SWISSPROT HIT: P47254, EVALUE 6.50e+00; EST_HUMAN HIT: BE728973.1, EVALUE 5.80e-01
gaaagttcacagaaagttgagcctttctccaagcaattgtgttcgacaggacaacttaggaatcaaattagaaaggctgcaccttgccataaccatgtgtcatctggtgctgccttttctggacagcacacacccacacaaaatgctggagattctcatactggcagtt

SEQ ID NO: 19090 - DNA, 174 bp, Homo sapiens
  MAP TO AL109653.9; EXPRESSED IN HELA, SIGNAL = 4.4; EXPRESSED IN LUNG, SIGNAL = 2.3; EXPRESSED IN BRAIN, SIGNAL = 4.2; EXPRESSED IN BT474, SIGNAL = 2.8; EXPRESSED IN ADULT LIVER, SIGNAL = 6.4; EXPRESSED IN FETAL LIVER, SIGNAL =   3; EXPRESSED IN PLACENTA, SIGNAL = 5.2; EXPRESSED IN HEART, SIGNAL = 3.3; EXPRESSED IN HBL100, SIGNAL = 3.4; EXPRESSED IN BONE MARROW, SIGNAL = 3.6; SWISSPROT HIT: O00566, EVALUE 5.70e-01; NT HIT: AL163227.2, EVALUE 4.00e-44; EST_HUMAN HIT: BE276179.1, EVALUE 1.00e-53
ttcccaacaatttcctcatctccatctgtgaccacctcagcctggacttcattgtccatatcactatcagcattttggtcaaagccattcaacaagtctccaggaatttccaaactttcccacatcttcttgtcttctgtgccctccaaactgttccaacctctgcctgttaca

SEQ ID NO: 19091 - DNA, 459 bp, Homo sapiens; identical to SEQ ID NO: 2357
  MAP TO AL034375.23; EXPRESSED IN LUNG, SIGNAL = 7.2; EXPRESSED IN BONE MARROW, SIGNAL =  14; EXPRESSED IN BRAIN, SIGNAL =  16; EXPRESSED IN ADULT LIVER, SIGNAL = 9.2; EXPRESSED IN BT474, SIGNAL = 2.2; EXPRESSED IN FETAL LIVER, SIGNAL =  13; EXPRESSED IN PLACENTA, SIGNAL =  11; EXPRESSED IN HELA, SIGNAL = 5.8; EXPRESSED IN HBL100, SIGNAL = 6.6; EXPRESSED IN HEART, SIGNAL = 8.3; NT HIT: AE000675.1, EVALUE 2.50e-01

SEQ ID NO: 19092 - DNA, 101 bp, Homo sapiens
  MAP TO AL110502.1; EXPRESSED IN HELA, SIGNAL =  32; EXPRESSED IN HEART, SIGNAL = 6.4; EXPRESSED IN LUNG, SIGNAL = 9.4; EXPRESSED IN BRAIN, SIGNAL = 3.6; EXPRESSED IN BT474, SIGNAL =  24; EXPRESSED IN ADULT LIVER, SIGNAL = 3.4; EXPRESSED IN FETAL LIVER, SIGNAL = 5.9; EXPRESSED IN PLACENTA, SIGNAL = 6.4; EXPRESSED IN HBL100, SIGNAL =  18; EXPRESSED IN BONE MARROW, SIGNAL = 5.3; EST_HUMAN HIT: W01787.1, EVALUE 3.00e-13; NT HIT: AJ277546.2, EVALUE 4.00e-12; SWISSPROT HIT: P29316, EVALUE 1.00e-08
accacatcagtgtcatagagcttctttacaacctgtttgatctggtacttgttgattttgacatccacaagtgtgttgttgtcttctatcttcttcatggc

SEQ ID NO: 19093 - DNA, 195 bp, Homo sapiens
  MAP TO AL078645.18; EXPRESSED IN LUNG, SIGNAL = 5.5; EXPRESSED IN FETAL LIVER, SIGNAL = 2.1; EXPRESSED IN ADULT LIVER, SIGNAL = 2.2; EXPRESSED IN PLACENTA, SIGNAL = 1.6; EXPRESSED IN HEART, SIGNAL = 2.5; EXPRESSED IN HELA, SIGNAL = 2.1; EXPRESSED IN HBL100, SIGNAL = 1.7; EXPRESSED IN BRAIN, SIGNAL =   2; EXPRESSED IN BONE MARROW, SIGNAL = 3.2; EXPRESSED IN BT474, SIGNAL = 1.4; NT HIT: AJ131402.1, EVALUE 1.50e+00; EST_HUMAN HIT: AW961306.1, EVALUE 1.80e+00
gaagaagagaaaaaaagaaagaagaaagaagaagaagaagaagaagaagaagaagaagaagaagaagaagaagaagaagaagaagaagaagacgacgacgacaatactaacagcccaactccagatgcttatcaagtcaatccagatgtaccgtgccctagtgaggtgaagagaagcactaccttagaaagagag

SEQ ID NO: 19094 - DNA, 209 bp, Homo sapiens
  MAP TO AC009640.2; EXPRESSED IN BT474, SIGNAL = 8.1; EXPRESSED IN BONE MARROW, SIGNAL = 1.9; EXPRESSED IN LUNG, SIGNAL = 3.3; EXPRESSED IN FETAL LIVER, SIGNAL =   2; EXPRESSED IN ADULT LIVER, SIGNAL = 3.8; EXPRESSED IN PLACENTA, SIGNAL = 2.8; EXPRESSED IN HEART, SIGNAL = 2.1; EXPRESSED IN HELA, SIGNAL =  13; EXPRESSED IN HBL100, SIGNAL = 9.6; EXPRESSED IN BRAIN, SIGNAL = 2.5; EST_HUMAN HIT: BE253928.1, EVALUE 1.00e-76; SWISSPROT HIT: P19388, EVALUE 7.00e-29; NT HIT: gi11433043, EVALUE 8.00e-77
cgcgctggtggcccacaatgatgaccccaccgacaagatgtttgtgttctttccagaggagcccaaggtgggcatcaagaccctcaacgtgtactgccggcgcatgcagcaggagaacatcacgcgggtcctcatcatggtgcagcagggcatgacgccctccgccaagtagtgcctggtccacatggctcccaagtacatcctggagc

SEQ ID NO: 19095 - DNA, 136 bp, Homo sapiens
  MAP TO AL049692.11; EXPRESSED IN HELA, SIGNAL = 3.6; EXPRESSED IN PLACENTA, SIGNAL = 4.2; EXPRESSED IN HBL100, SIGNAL = 2.8; EXPRESSED IN HEART, SIGNAL = 3.9; EXPRESSED IN BRAIN, SIGNAL = 2.9; EXPRESSED IN BONE MARROW, SIGNAL = 3.6; EXPRESSED IN LUNG, SIGNAL = 2.7; EXPRESSED IN BT474, SIGNAL = 2.2; EXPRESSED IN FETAL LIVER, SIGNAL = 2.7; EXPRESSED IN ADULT LIVER, SIGNAL = 4.3; SWISSPROT HIT: Q05043, EVALUE 8.90e+00; EST_HUMAN HIT: AW898344.1, EVALUE 2.00e-42; NT HIT: AL163227.2, EVALUE 8.00e-39
atggctttgaccaaaatgctgataatgatgtggacaatgtaatccaggctgaagtagtctcagatggaaatgaggaacttgttgggaactggagaaaaggtgactcttgttatgctttagcaaagagactggtggc

SEQ ID NO: 19096 - DNA, 84 bp, Homo sapiens
  MAP TO AL050317.9; EXPRESSED IN BT474, SIGNAL = 8.2; EXPRESSED IN FETAL LIVER, SIGNAL = 4.2; EXPRESSED IN ADULT LIVER, SIGNAL =  12; EXPRESSED IN HELA, SIGNAL =  13; EXPRESSED IN PLACENTA, SIGNAL = 7.9; EXPRESSED IN HBL100, SIGNAL =  23; EXPRESSED IN HEART, SIGNAL = 5.1; EXPRESSED IN BRAIN, SIGNAL = 4.6; EXPRESSED IN BONE MARROW, SIGNAL =   6; EXPRESSED IN LUNG, SIGNAL = 8.1; NT HIT: AL163208.2, EVALUE 8.00e-31; EST_HUMAN HIT: AA599754.1, EVALUE 1.00e-30
ccacgagcccaccgggaggaacgaacaactccagacgcgctaccataagagctgtaacactaaccgcgaaggtctgcagcttca

SEQ ID NO: 19097 - DNA, 275 bp, Homo sapiens
  MAP TO AC011121.1; EXPRESSED IN HEART, SIGNAL = 1.3; EXPRESSED IN LUNG, SIGNAL = 1.6; EXPRESSED IN BRAIN, SIGNAL = 1.1; EXPRESSED IN ADULT LIVER, SIGNAL = 1.6; EXPRESSED IN PLACENTA, SIGNAL = 1.1; EXPRESSED IN HELA, SIGNAL = 1.8; EXPRESSED IN HBL100, SIGNAL = 0.99; EXPRESSED IN BONE MARROW, SIGNAL = 1.1; EXPRESSED IN FETAL LIVER, SIGNAL = 4.3; EST_HUMAN HIT: AU119582.1, EVALUE 0.00e+00; NT HIT: U52111.2, EVALUE 1.40e-01; SWISSPROT HIT: Q01030, EVALUE 7.00e-03
gcggtttcttttctggtaagagatattttgaattgtctgaggttttcttcttaaattcaaccatagccacctgatcaccaggctgttcttggcagttggtacccacgatgctatcaaaggtggtgatgatgtcattgacttctgaggtgtcctcctctctgtatcggtccctgctgggatccttctgatgggctctctgctcttctttcttgtttttgcagaatatttggttgagcatgttgaaccgtctctccttcttctggggccgactgctc

SEQ ID NO: 19098 - DNA, 152 bp, Homo sapiens
  MAP TO AL110504.1; EXPRESSED IN PLACENTA, SIGNAL = 0.94; EXPRESSED IN HEART, SIGNAL = 1.2; EXPRESSED IN LUNG, SIGNAL =   4; EXPRESSED IN BONE MARROW, SIGNAL = 0.96; SWISSPROT HIT: P34545, EVALUE 5.10e+00; NT HIT: M22893.1, EVALUE 8.70e-02; EST_HUMAN HIT: AA702415.1, EVALUE 9.00e-76
tatcctggcctccggaaaccctcgtcccctccagcgtcactaggtgtatgcattcgaagtagcacatttgaggattatttggggaatctggataacgttagagaaagatctctaaggtcagatgcttggggaggggtgtaccccacagcaat

SEQ ID NO: 19099 - DNA, 258 bp, Homo sapiens
  MAP TO AL121753.1; EXPRESSED IN BT474, SIGNAL =   3; EXPRESSED IN HELA, SIGNAL =   1; EXPRESSED IN HEART, SIGNAL =   1; EXPRESSED IN ADULT LIVER, SIGNAL = 1.3; SWISSPROT HIT: P78985, EVALUE 9.10e-02; NT HIT: AP001508.1, EVALUE 2.50e+00
tgtggtcttgagtaaacacaactcagagattccagttccagtggcagctagagacagccaccagatgggtcatcagtggccggttactaatacatcagatatccctagtagagccaagctccactcctgggaaaacctgaggttgagagtgggtgtaattatggtgggggaatgggaaaacagaagaaagttggtatggaaaacactgatgagcatgaaggtgagaataagctttaaggttactggcttgaagcaaag

SEQ ID NO: 19100 - DNA, 260 bp, Homo sapiens
  MAP TO AC007308.13; EXPRESSED IN BONE MARROW, SIGNAL = 4.4; EXPRESSED IN HBL100, SIGNAL = 3.3; EXPRESSED IN HELA, SIGNAL = 3.8; EXPRESSED IN HEART, SIGNAL = 3.6; EXPRESSED IN LUNG, SIGNAL = 2.3; EXPRESSED IN BRAIN, SIGNAL = 3.7; EXPRESSED IN BT474, SIGNAL = 3.3; EXPRESSED IN ADULT LIVER, SIGNAL = 4.5; EXPRESSED IN FETAL LIVER, SIGNAL = 3.3; EXPRESSED IN PLACENTA, SIGNAL = 4.6; NT HIT: AF012872.1, EVALUE 0.00e+00; EST_HUMAN HIT: AI042035.1, EVALUE 0.00e+00; SWISSPROT HIT: P49152, EVALUE 2.40e+00
ctgagagatgctggacacactgctggttttcctcttcagggtaccctcctgacagacagtcagcagattgctggggaggatggagcggaagtcattaaaggaacgccttcgaacaccttcaagctcttccaggacacggagggaatgaggagggattttgggaaagagctttgagaggagagactcttccatgttgctgtaacgcccaaatgctcgcgagattcctatcaggcatgggatagcatacttgcaaaggtatt

SEQ ID NO: 19101 - DNA, 133 bp, Homo sapiens
  MAP TO AP000040.1; EXPRESSED IN BT474, SIGNAL =   4; EXPRESSED IN BONE MARROW, SIGNAL = 5.3; EXPRESSED IN LUNG, SIGNAL =   6; EXPRESSED IN ADULT LIVER, SIGNAL =  10; EXPRESSED IN FETAL LIVER, SIGNAL = 5.4; EXPRESSED IN PLACENTA, SIGNAL = 5.6; EXPRESSED IN HEART, SIGNAL = 6.2; EXPRESSED IN HELA, SIGNAL = 5.9; EXPRESSED IN HBL100, SIGNAL =   5; EXPRESSED IN BRAIN, SIGNAL = 5.6; NT HIT: AB035346.1, EVALUE 6.00e-36; EST_HUMAN HIT: H71889.1, EVALUE 1.00e-31
cttttgtctgacttatttaccacaatctgttttatcagcaaggtctttgtgacctgcctcttgtgctgacctcctatgtcatcctgtgacttagaatgcctgacctcctgggaatgcagcccagaaggtctca

SEQ ID NO: 19102 - DNA, 105 bp, Homo sapiens
  MAP TO AB020867.1; EXPRESSED IN LUNG, SIGNAL = 1.3; EXPRESSED IN FETAL LIVER, SIGNAL = 0.97; EXPRESSED IN HBL100, SIGNAL = 1.2; EXPRESSED IN HEART, SIGNAL = 1.4; EST_HUMAN HIT: AA731948.1, EVALUE 2.00e-08; NT HIT: AL163284.2, EVALUE 1.00e-05; SWISSPROT HIT: P08547, EVALUE 5.00e-04
cttcaaaaaaaaaaaaaaacaattttacatcttccttttcaatctggatgccttttacttctttatcttgcctggttgcactggctgaaacaaccagtacaatgt

SEQ ID NO: 19103 - DNA, 394 bp, Homo sapiens
  MAP TO AL117352.3; EXPRESSED IN HELA, SIGNAL = 1.7; EXPRESSED IN HEART, SIGNAL = 0.98; EXPRESSED IN FETAL LIVER, SIGNAL = 1.3; EXPRESSED IN BT474, SIGNAL =   1; EST_HUMAN HIT: AW303998.1, EVALUE 0.00e+00; SWISSPROT HIT: O94759, EVALUE 7.50e-01; NT HIT: AF032669.1, EVALUE 2.00e-57
actgctgggtgaacctaagttacacagtggttgctttcaccaaacagaccatgggcttcttggaagaggccctgaagctgtatttcccagagctgcacatggtacttttggagagcctggtggaaatcattttggttgctgttcagcatgtggattatagtcttcgatgtgagcaggatccagagaagaaagcttttatcagacagaatgcatcctttttatatgaaacagtcctccctgtggtggagaaaaggtttgaagaaggtgtggggaaacctgccaagcaactccaagatctgaggaatgcatctagacttattcgtgtgaatcctgaaagtacaacatcagtggtctaatgcttgggtctgtttatatgtgtatatatgcagagaga

SEQ ID NO: 19104 - DNA, 255 bp, Homo sapiens
  MAP TO AC011457.1; EXPRESSED IN BT474, SIGNAL = 2.5; EXPRESSED IN PLACENTA, SIGNAL = 1.2; EXPRESSED IN BONE MARROW, SIGNAL = 2.9; EXPRESSED IN BRAIN, SIGNAL =   2; EXPRESSED IN FETAL LIVER, SIGNAL = 2.2; EXPRESSED IN ADULT LIVER, SIGNAL = 2.7; EXPRESSED IN HEART, SIGNAL = 7.4; EXPRESSED IN HELA, SIGNAL = 2.7; EXPRESSED IN HBL100, SIGNAL = 1.1; EXPRESSED IN LUNG, SIGNAL = 3.1; EST_HUMAN HIT: AA626621.1, EVALUE 4.00e-33; NT HIT: D14547.1, EVALUE 1.00e-26
atattttgtatgttacatatattacatgctgattcttacaataagggaagctagagaaaagaaaatgttattaagaaagagaaaatatgtttactcttcattaagtggaagtggatcattatcaaggtcttcatccttgtcatcttcacaatgagtaggctgaccagaagaaggaaggggaggggttggtctttctgtctcaggggtggcagaggcagaagaaaatgcacatctaagtggataagtgtaaccatg

SEQ ID NO: 19105 - DNA, 394 bp, Homo sapiens
  MAP TO AL079333.7; EXPRESSED IN PLACENTA, SIGNAL = 1.3; EXPRESSED IN HEART, SIGNAL =   2; EXPRESSED IN BRAIN, SIGNAL = 4.4; EXPRESSED IN BT474, SIGNAL = 3.3; EXPRESSED IN HBL100, SIGNAL = 4.1; EXPRESSED IN HELA, SIGNAL = 1.5; EXPRESSED IN LUNG, SIGNAL = 3.5; EXPRESSED IN BONE MARROW, SIGNAL = 1.2; EXPRESSED IN ADULT LIVER, SIGNAL = 1.2; EXPRESSED IN FETAL LIVER, SIGNAL = 1.3; NT HIT: AF301601.1, EVALUE 2.50e-01; SWISSPROT HIT: Q01033, EVALUE 2.00e-10; EST_HUMAN HIT: BE895605.1, EVALUE 0.00e+00
ctttcttgtaagtcctcctgagagtccttgggggaatcgtccgtccccctgtcggtttttctttttgctttccggggcacataatcttcagccgggcgcttttcggcggcccgcggctggctctctggcttggcctgggaggctggcttgccctcactttgtggcttgtcctcaccttcagacttgccctgcttttcctggtttccctcatcttccagttgtccctcatcacctggctctccctcatcctctcgctttccctcgcattctgtcttcccctccatgtccggcttttcttcctcgtctgactttccttcatcttctgtacttccctcatcctctggctttccctcactttctaggtttctttcattctctggctttccttcatttt

SEQ ID NO: 19106 - DNA, 163 bp, Homo sapiens
  MAP TO AC011242.1; EXPRESSED IN PLACENTA, SIGNAL = 0.99; EXPRESSED IN BRAIN, SIGNAL =   1; EXPRESSED IN BT474, SIGNAL = 1.5; EXPRESSED IN FETAL LIVER, SIGNAL = 2.6; EXPRESSED IN HEART, SIGNAL = 1.1; EXPRESSED IN HELA, SIGNAL = 1.7; EXPRESSED IN HBL100, SIGNAL = 1.2; EXPRESSED IN LUNG, SIGNAL = 1.9; SWISSPROT HIT: Q57776, EVALUE 3.00e+00; NT HIT: gi7706299, EVALUE 4.00e-87; EST_HUMAN HIT: AI908482.1, EVALUE 4.00e-87
ccagatcttctgtctcatttcagaaactgctttagcatttgtctttcccagtttcattatcactttgtctacatggctttttgtggcttgcaagagattttccatggtgggccagagatcattaggttttgaaagatccagaacgagaacaagagaaaacgtc

SEQ ID NO: 19107 - DNA, 143 bp, Homo sapiens
  MAP TO AC007308.13; EXPRESSED IN PLACENTA, SIGNAL = 4.4; EXPRESSED IN BONE MARROW, SIGNAL = 5.1; EXPRESSED IN BRAIN, SIGNAL = 5.9; EXPRESSED IN FETAL LIVER, SIGNAL = 3.1; EXPRESSED IN BT474, SIGNAL = 2.1; EXPRESSED IN HEART, SIGNAL = 3.7; EXPRESSED IN HELA, SIGNAL = 5.1; EXPRESSED IN HBL100, SIGNAL = 3.6; EXPRESSED IN LUNG, SIGNAL = 4.7; EXPRESSED IN ADULT LIVER, SIGNAL = 2.7; NT HIT: gi11417805, EVALUE 3.00e-75; SWISSPROT HIT: O95721, EVALUE 5.00e-20; EST_HUMAN HIT: H94517.1, EVALUE 5.00e-75
atgagctgtccatgggactgggtcgtctgaaggacatagccctggggatgcagacagaaattgaggagcaagatgacattcttgaccggctgacaaccaaagtggacaagttagatgtcaacataaaaagcacagaaagaaaa

SEQ ID NO: 19108 - DNA, 107 bp, Homo sapiens
  MAP TO AC008173.1; EXPRESSED IN ADULT LIVER, SIGNAL = 4.7; EXPRESSED IN BT474, SIGNAL = 2.5; EXPRESSED IN FETAL LIVER, SIGNAL = 1.7; EXPRESSED IN PLACENTA, SIGNAL =   3; EXPRESSED IN HBL100, SIGNAL = 2.1; EXPRESSED IN HELA, SIGNAL = 4.8; EXPRESSED IN HEART, SIGNAL = 2.2; EXPRESSED IN BONE MARROW, SIGNAL = 2.4; EXPRESSED IN LUNG, SIGNAL = 6.3; EXPRESSED IN BRAIN, SIGNAL = 2.1; NT HIT: gi7525012, EVALUE 9.10e-01; EST_HUMAN HIT: AA702794.1, EVALUE 4.00e-37; SWISSPROT HIT: P12036, EVALUE 4.70e-01
tttttcacactggtgatgaggaggaacaagagtatagtgaagtaacagaagacgttacagagcatgtttatttaccagctaaagctaaagtggcaaaggaagaagag

SEQ ID NO: 19109 - DNA, 119 bp, Homo sapiens
  MAP TO AL109984.5; EXPRESSED IN HBL100, SIGNAL = 4.9; EXPRESSED IN HELA, SIGNAL =  24; EXPRESSED IN PLACENTA, SIGNAL = 3.6; EXPRESSED IN HEART, SIGNAL = 2.2; EXPRESSED IN BRAIN, SIGNAL = 2.2; EXPRESSED IN BONE MARROW, SIGNAL = 3.3; EXPRESSED IN LUNG, SIGNAL =  12; EXPRESSED IN BT474, SIGNAL =  14; EXPRESSED IN ADULT LIVER, SIGNAL = 4.1; EXPRESSED IN FETAL LIVER, SIGNAL = 2.4; EST_HUMAN HIT: BF376430.1, EVALUE 3.00e-42; SWISSPROT HIT: P30040, EVALUE 4.00e-08; NT HIT: gi11436462, EVALUE 2.00e-42
tgacgggaagaaggaggagctccagaagagcttaaacatcctaactgccttccagaagaagggggctgagaacgaggagttgtaaaaaggctctctatggttttccagggtttggtagg

SEQ ID NO: 19110 - DNA, 177 bp, Homo sapiens
  MAP TO AC008115.3; EXPRESSED IN ADULT LIVER, SIGNAL = 1.2; EXPRESSED IN PLACENTA, SIGNAL = 1.5; EXPRESSED IN BONE MARROW, SIGNAL = 1.4; EXPRESSED IN BRAIN, SIGNAL = 2.2; EXPRESSED IN FETAL LIVER, SIGNAL = 1.2; EXPRESSED IN BT474, SIGNAL = 1.5; EXPRESSED IN HEART, SIGNAL = 1.3; EXPRESSED IN HELA, SIGNAL = 1.1; EXPRESSED IN HBL100, SIGNAL = 1.6; EXPRESSED IN LUNG, SIGNAL = 1.6; EST_HUMAN HIT: AI653213.1, EVALUE 3.00e-95; SWISSPROT HIT: Q15760, EVALUE 3.00e-29; NT HIT: gi11435905, EVALUE 2.00e-95
cttctcatcagcgttgccagcacgcctttcgtcctgctccagttcaccactggaaggtggacgctgggtagtgcaacgtgcaaggttgtgcgatattttcaatatctcactccaggtgtccagatctacgttctcctctccatctgcatagaccggttctacaccatcgtctatcct

SEQ ID NO: 19111 - DNA, 141 bp, Homo sapiens
  MAP TO AL035553.10; EXPRESSED IN BT474, SIGNAL = 7.2; EXPRESSED IN FETAL LIVER, SIGNAL = 0.89; EXPRESSED IN ADULT LIVER, SIGNAL = 0.91; EXPRESSED IN PLACENTA, SIGNAL = 1.2; EXPRESSED IN HEART, SIGNAL = 0.99; EXPRESSED IN BRAIN, SIGNAL =  27; EXPRESSED IN BONE MARROW, SIGNAL = 0.91; SWISSPROT HIT: P04116, EVALUE 4.00e-21; EST_HUMAN HIT: AV723893.1, EVALUE 7.00e-74; NT HIT: AJ006976.1, EVALUE 4.00e-74
tggggccctcctgctggctgagggcttctacaccaccggcgcagtcaggcagatctttggcgactacaagaccaccatctgcggcaagggcctgagcgcaacggtaacagggggccagaaggggaggggttccagaggcca

SEQ ID NO: 19112 - DNA, 227 bp, Homo sapiens
  MAP TO AL049597.17; EXPRESSED IN LUNG, SIGNAL =  11; EXPRESSED IN ADULT LIVER, SIGNAL =  14; EXPRESSED IN BT474, SIGNAL =  65; EXPRESSED IN FETAL LIVER, SIGNAL = 7.5; EXPRESSED IN HELA, SIGNAL = 1.1e+02; EXPRESSED IN PLACENTA, SIGNAL =  12; EXPRESSED IN HBL100, SIGNAL =  12; EXPRESSED IN HEART, SIGNAL = 7.2; EXPRESSED IN BONE MARROW, SIGNAL = 9.4; EXPRESSED IN BRAIN, SIGNAL =   5; NT HIT: gi4506616, EVALUE 1.00e-106; EST_HUMAN HIT: BE206694.1, EVALUE 1.00e-108; SWISSPROT HIT: P24049, EVALUE 3.00e-23
ttacttccgggccataagtttttgtttcttcagtttcttctgggatatctttttcttctgggcaacctccttttctggtttaggaacaatctgttccttttcagtaaggatcatctcaatgtgccagggagagctcatgtatgagttaatccgaccatgagctctgtaggtccggcggagcatcttaggtgctttgttcacttggatatactcaatgaccagagaat

SEQ ID NO: 19113 - DNA, 110 bp, Homo sapiens
  MAP TO AC009944.2; EXPRESSED IN FETAL LIVER, SIGNAL = 4.5; EXPRESSED IN HELA, SIGNAL =  38; EXPRESSED IN PLACENTA, SIGNAL = 5.3; EXPRESSED IN HBL100, SIGNAL =  18; EXPRESSED IN HEART, SIGNAL = 6.4; EXPRESSED IN BRAIN, SIGNAL = 6.1; EXPRESSED IN BONE MARROW, SIGNAL = 2.9; EXPRESSED IN LUNG, SIGNAL =  11; EXPRESSED IN BT474, SIGNAL =  24; EXPRESSED IN ADULT LIVER, SIGNAL = 4.2; NT HIT: J04988.1, EVALUE 2.00e-08; EST_HUMAN HIT: BE256510.1, EVALUE 2.00e-08; SWISSPROT HIT: P34058, EVALUE 1.00e-04
ctggcatcaaatcatcaaagctgtccatgatccacacatgatggacacagagttgttcattttcctcttgttctaaaaaaggtcaaagggagcctgatgagggatgaaca

SEQ ID NO: 19114 - DNA, 151 bp, Homo sapiens
  MAP TO AL109935.13; EXPRESSED IN HBL100, SIGNAL = 8.7; EXPRESSED IN HEART, SIGNAL =   4; EXPRESSED IN LUNG, SIGNAL = 7.2; EXPRESSED IN BONE MARROW, SIGNAL = 6.4; EXPRESSED IN BRAIN, SIGNAL = 1.7; EXPRESSED IN ADULT LIVER, SIGNAL = 3.3; EXPRESSED IN BT474, SIGNAL = 1.9; EXPRESSED IN FETAL LIVER, SIGNAL = 2.6; EXPRESSED IN PLACENTA, SIGNAL = 3.5; EXPRESSED IN HELA, SIGNAL = 7.1; NT HIT: AB037855.1, EVALUE 5.00e-80; EST_HUMAN HIT: AL046038.2, EVALUE 6.00e-80; SWISSPROT HIT: O94666, EVALUE 8.70e+00
agtggagcaattggaacgcctgaagcaggaattgccagagcttaagagctgtttgtgtcccactgttagccgctttgttccctcatctttgtgtggggagtctgatatccatgtggatgccaacggcattgataacgtggagaatgcttag

SEQ ID NO: 19115 - DNA, 165 bp, Homo sapiens
  MAP TO AL096702.3; EXPRESSED IN BONE MARROW, SIGNAL = 1.4; EXPRESSED IN BT474, SIGNAL = 2.2; EXPRESSED IN FETAL LIVER, SIGNAL = 0.95; EXPRESSED IN ADULT LIVER, SIGNAL = 1.4; EXPRESSED IN HELA, SIGNAL =   4; EXPRESSED IN PLACENTA, SIGNAL = 1.4; EXPRESSED IN HBL100, SIGNAL = 2.3; EXPRESSED IN HEART, SIGNAL = 1.2; EXPRESSED IN BRAIN, SIGNAL = 1.3; NT HIT: gi4758795, EVALUE 2.00e-67; SWISSPROT HIT: Q9Y295, EVALUE 2.00e-20; EST_HUMAN HIT: AI311409.1, EVALUE 3.00e-67
accaaatctccattgaggaattggatatcatctataaggtgcctcactgtgtacccatctctgcccatcaccgctggaattttgatgacctattggaaaagatctgggactatctgaaactagtgagaatgtaagtctttgtggatagggtaatgttgctatagg

SEQ ID NO: 19116 - DNA, 273 bp, Homo sapiens
  MAP TO AL035411.25; EXPRESSED IN PLACENTA, SIGNAL = 2.2; EXPRESSED IN HELA, SIGNAL =  30; EXPRESSED IN HBL100, SIGNAL = 3.4; EXPRESSED IN HEART, SIGNAL = 1.7; EXPRESSED IN LUNG, SIGNAL = 1.4; EXPRESSED IN BONE MARROW, SIGNAL = 1.8; EXPRESSED IN BRAIN, SIGNAL = 0.98; EXPRESSED IN ADULT LIVER, SIGNAL = 2.9; EXPRESSED IN BT474, SIGNAL =   5; EXPRESSED IN FETAL LIVER, SIGNAL = 1.2; EST_HUMAN HIT: AB005622.1, EVALUE 0.00e+00; NT HIT: AF056332.1, EVALUE 0.00e+00; SWISSPROT HIT: P54819, EVALUE 2.00e-42
aggaacggccactcttggggtgatcagccttcctgtgattcttcggatcagcagagagtctgggatgctgaattcaatcacagaatcaagcttctctttcctcttctccatgaggtcatcgagcatttctgcctgcctcacagtccgagggaagccatccagaagaaaaccatttttgcacaagggggtctccaaattcttctcaatgagctccactaccatttcatcactcaccagtttcccagcatccatagttgccttcagcttttttcc

SEQ ID NO: 19117 - DNA, 166 bp, Homo sapiens
  MAP TO AP000553.1; EXPRESSED IN BT474, SIGNAL = 3.3; EXPRESSED IN FETAL LIVER, SIGNAL = 1.4; EXPRESSED IN HEART, SIGNAL =   2; EXPRESSED IN LUNG, SIGNAL = 1.9; EXPRESSED IN BRAIN, SIGNAL = 1.1; EXPRESSED IN ADULT LIVER, SIGNAL = 1.4; EXPRESSED IN PLACENTA, SIGNAL = 1.6; EXPRESSED IN HELA, SIGNAL = 7.8; EXPRESSED IN HBL100, SIGNAL =   5; EXPRESSED IN BONE MARROW, SIGNAL = 0.99; EST_HUMAN HIT: AA307510.1, EVALUE 1.00e-88; SWISSPROT HIT: P51966, EVALUE 7.00e-17; NT HIT: gi11417818, EVALUE 7.00e-89
ggagccttcagaatcgaaatcaactttccagcagagtacccattcaaaccaccgaagatcacatttaaaacaaagatctatcacccaaacatcgacgaaaaggggcaggtctgtctgccagtaattagtgccgaaaactggaagccagcaaccaaaaccgaccaag

SEQ ID NO: 19118 - DNA, 358 bp, Homo sapiens
  MAP TO AC006346.1; EXPRESSED IN FETAL LIVER, SIGNAL = 1.1; EXPRESSED IN HELA, SIGNAL = 2.1; EXPRESSED IN HEART, SIGNAL = 2.8; EXPRESSED IN LUNG, SIGNAL = 2.2; EXPRESSED IN BRAIN, SIGNAL =   1; EXPRESSED IN BT474, SIGNAL = 2.8; EXPRESSED IN HBL100, SIGNAL = 1.7; EXPRESSED IN BONE MARROW, SIGNAL =   1; NT HIT: gi6671590, EVALUE 2.00e-22; EST_HUMAN HIT: AV743874.1, EVALUE 2.00e-18; SWISSPROT HIT: Q06055, EVALUE 1.00e-25
agctcccttgccccagtctttcacccctgaaaatgtacacctgtgccaagtgtgttcccacctttctctgtttgagagcacctgtcaggtgctaagcccaccactctctgcagtagttctcaagcaaccagagacactaacagacgagagcttcagcagtttggcagccccacatcccccgacctcacttaaccctagtcacagcttccaaaccagcaccacttcaagggatattggcatagcagccaagttcattggggctaggacttccaaagtcaggacagctggctctggggctaaaattgcagctgtgtttgggagcctcaccattgattatgccaagaaccctgtctgaagc

SEQ ID NO: 19119 - DNA, 267 bp, Homo sapiens
  MAP TO AC007218.2; EXPRESSED IN BT474, SIGNAL = 5.9; EXPRESSED IN HBL100, SIGNAL = 5.5; EXPRESSED IN HEART, SIGNAL = 5.6; EXPRESSED IN LUNG, SIGNAL = 5.1; EXPRESSED IN FETAL LIVER, SIGNAL = 8.3; EXPRESSED IN ADULT LIVER, SIGNAL = 5.8; EXPRESSED IN PLACENTA, SIGNAL =   6; EXPRESSED IN HELA, SIGNAL = 4.9; EXPRESSED IN BRAIN, SIGNAL = 4.5; EXPRESSED IN BONE MARROW, SIGNAL = 5.4; EST_HUMAN HIT: AW893633.1, EVALUE 0.00e+00; SWISSPROT HIT: Q00959, EVALUE 3.00e-43; NT HIT: gi6006002, EVALUE 0.00e+00
cctgctgatggagaagagcaacccaggccggtcggagcacacgcccgtgaaacagaagcgcagcttccagtagaagaggtgctcccagatgaaggtgatgaggctaagggccatggcggcagccagcatgtagaatacgcccgccatgttgtcaatgtccagctggctgctcatcacctcgttcttctcgttgtggcagatcccagtgagccacagggtctccagctcctccatctcacctggacagatcacaacattcacaggcag

SEQ ID NO: 19120 - DNA, 192 bp, Homo sapiens
  MAP TO AC007318.2; EXPRESSED IN BONE MARROW, SIGNAL = 2.4; EXPRESSED IN HBL100, SIGNAL =   6; EXPRESSED IN HELA, SIGNAL = 7.2; EXPRESSED IN HEART, SIGNAL = 1.5; EXPRESSED IN BRAIN, SIGNAL = 1.7; EXPRESSED IN LUNG, SIGNAL = 8.3; EXPRESSED IN BT474, SIGNAL = 7.5; EXPRESSED IN ADULT LIVER, SIGNAL = 1.7; EXPRESSED IN FETAL LIVER, SIGNAL = 1.3; EXPRESSED IN PLACENTA, SIGNAL =   2; NT HIT: gi5031570, EVALUE 1.00e-104; EST_HUMAN HIT: AW505192.1, EVALUE 1.00e-104; SWISSPROT HIT: O15142, EVALUE 2.00e-34
agtgaattacgatcaatgttagaagttaactaccctatggaaaatggcatagtacgaaattgggatgacatgaaacacctgtgggactacacatttggaccagagaaacttaatatagataccagaaattgtaaaatcttactcacagaacctcctatgaacccaaccaaaaacagagagaagattgtagag

SEQ ID NO: 19121 - DNA, 185 bp, Homo sapiens
  MAP TO AC007458.13; EXPRESSED IN PLACENTA, SIGNAL = 1.4; EXPRESSED IN FETAL LIVER, SIGNAL = 0.87; EXPRESSED IN ADULT LIVER, SIGNAL =   1; EXPRESSED IN HEART, SIGNAL = 1.1; EXPRESSED IN HELA, SIGNAL = 0.99; EXPRESSED IN BRAIN, SIGNAL = 1.3; EXPRESSED IN LUNG, SIGNAL = 9.6; EXPRESSED IN BT474, SIGNAL =   1; NT HIT: X62468.1, EVALUE 1.00e-100; EST_HUMAN HIT: T29780.1, EVALUE 3.00e-88; SWISSPROT HIT: P01579, EVALUE 1.00e-29
cgaataattagtcagcttttcgaagtcatctcgtttctttttgttgctattgaaaaacttgacattcatgtcttccttgatggtctccacactcttttggatgctctggtcatctttaaagtttttaaaaagtttgaagtaaaaggagacaatttggctctgcattatttttctgtcactctcct

SEQ ID NO: 19122 - DNA, 533 bp, Homo sapiens
  MAP TO AC006391.7; EXPRESSED IN PLACENTA, SIGNAL =   2; EXPRESSED IN BONE MARROW, SIGNAL = 2.2; EXPRESSED IN FETAL LIVER, SIGNAL = 1.9; EXPRESSED IN HEART, SIGNAL = 2.5; EXPRESSED IN HELA, SIGNAL = 1.6; EXPRESSED IN HBL100, SIGNAL = 1.6; EXPRESSED IN BRAIN, SIGNAL = 2.1; EXPRESSED IN LUNG, SIGNAL = 3.5; EXPRESSED IN BT474, SIGNAL = 1.6; EXPRESSED IN ADULT LIVER, SIGNAL = 1.8; NT HIT: gi11437057, EVALUE 0.00e+00; EST_HUMAN HIT: BE718747.1, EVALUE 1.30e-01; SWISSPROT HIT: P32238, EVALUE 2.00e-75
tcactggggtggcaccgaggcactcatatggctgtacgagaacctggacagagaggctcctgtggtcccgccttcctcctcctcccccacctctcccctcgcccctgggggaccaggattggggcagcaggggaaggtggccatgaagccgaggcggaagcgtttgttcatgaagcagtagatgatggggttgacgcaggaggaggtgtaggacaggaggaggatgaaggaaatgggggttcctgagaggcggcgctctgcggaggcggtgtcgtaggcccgccaggcgttggcgctgaagatgggcatccagcacaggaagaagaggaccacgatgacgatgagcatgcggatcacccttttcttggccatcaggttggctgcggagctgttactccggatgcggttggccctgctgctgctgccggtggacagctgccggagctccagcttcctcgggggcctggtcttttgcaggtaacacccatcgctgtcctcatatttgccgctgctggtggtgctaggtttccttt

SEQ ID NO: 19123 - DNA, 213 bp, Homo sapiens
  MAP TO AC007158.5; EXPRESSED IN BT474, SIGNAL = 3.5; EXPRESSED IN PLACENTA, SIGNAL = 4.6; EXPRESSED IN BONE MARROW, SIGNAL = 5.7; EXPRESSED IN BRAIN, SIGNAL =   4; EXPRESSED IN ADULT LIVER, SIGNAL = 5.9; EXPRESSED IN FETAL LIVER, SIGNAL = 3.5; EXPRESSED IN HEART, SIGNAL = 4.4; EXPRESSED IN HELA, SIGNAL = 4.8; EXPRESSED IN HBL100, SIGNAL =   4; EXPRESSED IN LUNG, SIGNAL = 3.3; EST_HUMAN HIT: AI434323.1, EVALUE 2.00e-23; SWISSPROT HIT: Q9ZDK2, EVALUE 3.30e+00; NT HIT: AL163227.2, EVALUE 7.00e-25
cttggtgattaacatttgcctcctcattacttacacaaatttctgcagctagcttgatgttctcctcccaaaatgggtttttcttttctacttcatcgtcaggctgcaaaattttcctaacttttatgctttgtttcctcttgaatgctttgacacttagaaatttcttctgccagatactctgaatcatctctctcaaggtcaaagttccac

SEQ ID NO: 19124 - DNA, 183 bp, Homo sapiens
  MAP TO AC007241.2; EXPRESSED IN BRAIN, SIGNAL =  14; EXPRESSED IN BT474, SIGNAL =  25; EXPRESSED IN HBL100, SIGNAL =  26; EXPRESSED IN LUNG, SIGNAL =   5; EXPRESSED IN BONE MARROW, SIGNAL =  11; EXPRESSED IN ADULT LIVER, SIGNAL = 6.2; EXPRESSED IN FETAL LIVER, SIGNAL = 9.7; EXPRESSED IN PLACENTA, SIGNAL = 7.7; EXPRESSED IN HEART, SIGNAL = 8.8; EXPRESSED IN HELA, SIGNAL =  20; EST_HUMAN HIT: AA629908.1, EVALUE 1.00e-45; NT HIT: U83668.1, EVALUE 4.00e-38; SWISSPROT HIT: O04386, EVALUE 3.00e-22
agcattgttatccaggaaatcttcaagcatgtctcagaagagattacagcaatgttcaagtgcaaggtcttcctccactggtacacgggcgagggcttggatgagatggagttcactgaggctgagagcaacatgaatgacctggtgtctgaaaattagcagtaccaggatgccaaggctgag

SEQ ID NO: 19125 - DNA, 90 bp, Homo sapiens
  MAP TO AC007425.16; EXPRESSED IN ADULT LIVER, SIGNAL = 1.6; EXPRESSED IN PLACENTA, SIGNAL =   1; EXPRESSED IN LUNG, SIGNAL =   2; EXPRESSED IN BRAIN, SIGNAL = 1.4; EXPRESSED IN BT474, SIGNAL = 0.97; EXPRESSED IN FETAL LIVER, SIGNAL =   1; EXPRESSED IN HEART, SIGNAL = 1.2; EXPRESSED IN HELA, SIGNAL = 1.2; EXPRESSED IN HBL100, SIGNAL = 1.1; EXPRESSED IN BONE MARROW, SIGNAL = 1.7; EST_HUMAN HIT: AW172350.1, EVALUE 1.20e-02; NT HIT: X03638.1, EVALUE 1.90e-01
gctggtgagaatccccagacagccccgagggtgactcctcccgctccttgcagaatctgtagcctggtgttcattgtgctggctcaaggg

SEQ ID NO: 19126 - DNA, 147 bp, Homo sapiens
  MAP TO AB026898.1; EXPRESSED IN ADULT LIVER, SIGNAL = 1.9; EXPRESSED IN PLACENTA, SIGNAL = 1.2; EXPRESSED IN BONE MARROW, SIGNAL = 1.7; EXPRESSED IN BRAIN, SIGNAL = 1.3; EXPRESSED IN FETAL LIVER, SIGNAL = 0.99; EXPRESSED IN BT474, SIGNAL = 1.3; EXPRESSED IN HEART, SIGNAL = 1.2; EXPRESSED IN HELA, SIGNAL = 2.8; EXPRESSED IN HBL100, SIGNAL = 1.3; EXPRESSED IN LUNG, SIGNAL = 0.88; NT HIT: AB029024.1, EVALUE 1.00e-77; SWISSPROT HIT: P50448, EVALUE 4.50e-01; EST_HUMAN HIT: AW503792.1, EVALUE 2.00e-77
ctctttccaacaactgatcctgtgggtactttgctccaagttccagaacagatctctgctcatctacctcagccagctgggcagattgctacacagccaactcaagtctctctcccacccaccgcagagccagcaaaaacagctcag

SEQ ID NO: 19127 - DNA, 279 bp, Homo sapiens
  MAP TO AC007528.5; EXPRESSED IN BONE MARROW, SIGNAL = 1.5; EXPRESSED IN BRAIN, SIGNAL = 1.1; EXPRESSED IN ADULT LIVER, SIGNAL = 1.7; EXPRESSED IN BT474, SIGNAL = 6.1; EXPRESSED IN PLACENTA, SIGNAL = 1.1; EXPRESSED IN HBL100, SIGNAL = 4.7; EXPRESSED IN HELA, SIGNAL = 6.9; EXPRESSED IN HEART, SIGNAL = 0.85; NT HIT: gi11437455, EVALUE 1.00e-128; EST_HUMAN HIT: AU133211.1, EVALUE 1.00e-125; SWISSPROT HIT: P32558, EVALUE 4.00e-03
ttgttgaagacttcagaagtgatgccagctgctttcttcattaatttgagctccccatcctcccttacagcgactgtatatgccacaactgcactgatatctattttgtcaaagccttctttgttgaggcagtcattccagctcttcatgaactctccagggaatttgtctttgctgaacactccaatcttcttgccattcttgctttctttaatggcttcaatcattttgtcaaagctattcttactactttcattcttttctcatatcagcagtctg

SEQ ID NO: 19128 - DNA, 105 bp, Homo sapiens
  MAP TO AC007628.3; EXPRESSED IN HBL100, SIGNAL = 1.6; EXPRESSED IN HELA, SIGNAL = 1.6; EXPRESSED IN PLACENTA, SIGNAL = 1.9; EXPRESSED IN HEART, SIGNAL = 1.6; EXPRESSED IN BRAIN, SIGNAL = 2.7; EXPRESSED IN BONE MARROW, SIGNAL = 2.8; EXPRESSED IN LUNG, SIGNAL = 1.2; EXPRESSED IN BT474, SIGNAL = 1.4; EXPRESSED IN ADULT LIVER, SIGNAL = 1.9; EXPRESSED IN FETAL LIVER, SIGNAL =   2; SWISSPROT HIT: Q15532, EVALUE 5.30e+00
gctggcacatggggcaagtagaacctttgggattcatttgggtaaccccctaagggtgcctgaccacctctgcaagggccatgccattgttcatccccaggagag

SEQ ID NO: 19129 - DNA, 157 bp, Homo sapiens
  MAP TO AC009488.1; EXPRESSED IN PLACENTA, SIGNAL = 2.6; EXPRESSED IN BRAIN, SIGNAL = 2.2; EXPRESSED IN ADULT LIVER, SIGNAL = 2.2; EXPRESSED IN FETAL LIVER, SIGNAL = 2.4; EXPRESSED IN BT474, SIGNAL = 1.3; EXPRESSED IN HEART, SIGNAL = 2.6; EXPRESSED IN HELA, SIGNAL = 2.5; EXPRESSED IN HBL100, SIGNAL = 1.9; EXPRESSED IN LUNG, SIGNAL = 3.6; EXPRESSED IN BONE MARROW, SIGNAL = 2.3; EST_HUMAN HIT: AW868923.1, EVALUE 2.30e-02; SWISSPROT HIT: Q28983, EVALUE 2.00e-17; NT HIT: gi10048476, EVALUE 6.00e-09
ggatggagccaccatgggcatccttgcagccacactgacttctggggacacacttgtcttcactcagcacatagccgggctgacaaatgcagccctcagcgcaggcagaggggactttggcgccctcacaccggccatccaggtcccagcaggaggg

SEQ ID NO: 19130 - DNA, 339 bp, Homo sapiens
  MAP TO AC009892.1; EXPRESSED IN BONE MARROW, SIGNAL = 3.4; EXPRESSED IN BRAIN, SIGNAL = 1.9; EXPRESSED IN LUNG, SIGNAL = 3.4; EXPRESSED IN ADULT LIVER, SIGNAL = 2.3; EXPRESSED IN BT474, SIGNAL =   1; EXPRESSED IN FETAL LIVER, SIGNAL = 3.2; EXPRESSED IN HELA, SIGNAL = 2.3; EXPRESSED IN PLACENTA, SIGNAL = 2.4; EXPRESSED IN HBL100, SIGNAL = 1.3; EXPRESSED IN HEART, SIGNAL = 2.3; EST_HUMAN HIT: AI540048.1, EVALUE 9.00e-82; NT HIT: AF106275.1, EVALUE 0.00e+00; SWISSPROT HIT: P43626, EVALUE 2.00e-11
gacagttctatgacagaccctctctctcggtgcagccggtccccacagtagccccaggaaagaacgtgaccctgctgtgtcagtcacgggggcagttccacactttccttctgaccaaggagggggcaggccatcccccactgcatctgagatcagagcaccaagctcagcagaaccaggctgaattccgcatgggtcctgtgacctcagcccacgtggggacctacagatgctacagctcactcagctccaacccctacctgctgtctctccccagtgaccccctggagctcgtggtctcaggtgagggccctgatcttgtcctctccgagctcaaag

SEQ ID NO: 19131 - DNA, 85 bp, Homo sapiens
  MAP TO AF159227.2; EXPRESSED IN HBL100, SIGNAL =   1; EXPRESSED IN HEART, SIGNAL = 1.4; EXPRESSED IN BONE MARROW, SIGNAL = 1.1; EXPRESSED IN BRAIN, SIGNAL = 1.1; EXPRESSED IN ADULT LIVER, SIGNAL = 1.5; EXPRESSED IN FETAL LIVER, SIGNAL = 1.2; EXPRESSED IN PLACENTA, SIGNAL = 1.3; EXPRESSED IN HELA, SIGNAL = 1.5; EST_HUMAN HIT: N62412.1, EVALUE 7.00e-01
caatgaagtctgtaagatcgtagcaagagtcacagggaatggtaacgtctgcagtcccatctactttgccgaattctgaagacac

SEQ ID NO: 19132 - DNA, 190 bp, Homo sapiens
  MAP TO AF060568.1; EXPRESSED IN PLACENTA, SIGNAL = 1.8; EXPRESSED IN HELA, SIGNAL = 1.7; EXPRESSED IN HBL100, SIGNAL = 1.6; EXPRESSED IN HEART, SIGNAL = 2.2; EXPRESSED IN LUNG, SIGNAL = 4.3; EXPRESSED IN BONE MARROW, SIGNAL = 1.7; EXPRESSED IN BRAIN, SIGNAL = 1.3; EXPRESSED IN ADULT LIVER, SIGNAL = 1.9; EXPRESSED IN BT474, SIGNAL = 1.1; EXPRESSED IN FETAL LIVER, SIGNAL = 1.9; NT HIT: AF060568.1, EVALUE 1.00e-103; SWISSPROT HIT: Q05516, EVALUE 4.00e-31; EST_HUMAN HIT: AA845269.1, EVALUE 5.00e-91
gcgaccacccctacgagtgtgagttctgtggcagctgcttccgggatgagagcacactcaagagccacaaacgcatccacacgggtgagaaaccctacgagtgcaatggctgtggcaagaagttcagcctcaagcatcagctggagacgcactatagggtgcacacaggtaccgaaggccagggaggggc

SEQ ID NO: 19133 - DNA, 508 bp, Homo sapiens
  MAP TO AF165423.1; EXPRESSED IN PLACENTA, SIGNAL = 0.96; EXPRESSED IN HBL100, SIGNAL = 0.95; EXPRESSED IN HEART, SIGNAL = 0.98; EXPRESSED IN BRAIN, SIGNAL = 1.2; EXPRESSED IN BONE MARROW, SIGNAL = 1.1; EXPRESSED IN BT474, SIGNAL = 1.5; EXPRESSED IN ADULT LIVER, SIGNAL = 1.5; EXPRESSED IN HELA, SIGNAL = 2.4; EST_HUMAN HIT: BF345274.1, EVALUE 0.00e+00; NT HIT: X87825.1, EVALUE 5.00e-52; SWISSPROT HIT: Q95157, EVALUE 2.00e-33
acacaatccaactgtgcagctgggaatccaacaggctaaggaaaaaggacaccaaaacgaagaagacacagaggtgaggattcacgatgactgggtagtgcagagggtgacagatggctacaaagcagtcataggccatcacagtcaggagcatgccttctatacatgcaaaaaggaccaagaaagacatctgcgtcaggcagcctgcatgagagatgactctgctatgcgactgcatgtccacaatcatcttgggaactgtggccgaggtgaaaccgatgtcagcccagcacaggttggagaggaagaagtatatgggggtgtggaggggggagtcagagcggacagccaggatgctgagcaggttcctcagcaccgtgaccagatacatggacagggacagggacagcaaagcgaggacggctgcagttctggatcctctgagagtcccaggaggaggaattctcagacacctgtgagattccgtggctctctgtgtcttggacac

SEQ ID NO: 19134 - DNA, 214 bp, Homo sapiens
  MAP TO AL078621.19; EXPRESSED IN HELA, SIGNAL = 0.91; EXPRESSED IN HEART, SIGNAL = 0.94; EXPRESSED IN LUNG, SIGNAL = 2.7; EST_HUMAN HIT: BE906712.1, EVALUE 2.00e-07; NT HIT: gi11429761, EVALUE 1.00e-07; SWISSPROT HIT: P11992, EVALUE 1.70e-01
ggtgaaaaagtctgggacaagggagagatggagacgccatctgaccaccttgcctgttctgcttacagactcatggagagatttctcatggatggcttgtatccttcaaggtttgaagtactccttgttcctgtgggtcttcccacgctcatgtatcagtgtcccactgcccacccctttgtaccagcagcccaggaacaggaaggaggattgg

SEQ ID NO: 19135 - DNA, 80 bp, Homo sapiens
  MAP TO AL034422.18; EXPRESSED IN BT474, SIGNAL = 3.2; EXPRESSED IN ADULT LIVER, SIGNAL = 1.5; EXPRESSED IN PLACENTA, SIGNAL = 4.6; EXPRESSED IN BRAIN, SIGNAL = 0.99; EXPRESSED IN FETAL LIVER, SIGNAL = 1.9; EXPRESSED IN HEART, SIGNAL = 1.8; EXPRESSED IN HELA, SIGNAL = 9.2; EXPRESSED IN HBL100, SIGNAL = 4.1; EXPRESSED IN LUNG, SIGNAL = 7.3; EXPRESSED IN BONE MARROW, SIGNAL = 1.2; EST_HUMAN HIT: BE740349.1, EVALUE 1.00e-37; SWISSPROT HIT: P04844, EVALUE 2.00e-07; NT HIT: AJ237740.1, EVALUE 5.00e-38
ctggaagcaacagatttagcatgttctagtttaacagtggcctgagtcagaggctgagacagaacattggtgacttgcaa

SEQ ID NO: 19136 - DNA, 207 bp, Homo sapiens
  MAP TO AL035553.10; EXPRESSED IN LUNG, SIGNAL = 1.4; EXPRESSED IN BT474, SIGNAL = 4.7; EXPRESSED IN HEART, SIGNAL = 0.96; EXPRESSED IN BRAIN, SIGNAL =  26; NT HIT: AJ006976.1, EVALUE 1.00e-113; EST_HUMAN HIT: R54031.1, EVALUE 2.00e-92; SWISSPROT HIT: P06905, EVALUE 1.00e-29
tttgtgggcatcacctatgccctgaccgttgtgtggctcctggtgtttgcctgctctgctgtgcctgtgtacatttacttcaacacctggaccacctgccagtctattgccttccccagcaagacctctgccagtataggcagtctctgtgctgatgccagaatgtatggtgagttagggtacgggtgctttggctctcctacccac

SEQ ID NO: 19137 - DNA, 119 bp, Homo sapiens
  MAP TO AL096887.5; EXPRESSED IN BONE MARROW, SIGNAL =   4; EXPRESSED IN LUNG, SIGNAL = 2.6; EXPRESSED IN BRAIN, SIGNAL = 4.1; EXPRESSED IN ADULT LIVER, SIGNAL = 3.9; EXPRESSED IN BT474, SIGNAL = 2.2; EXPRESSED IN FETAL LIVER, SIGNAL = 3.8; EXPRESSED IN PLACENTA, SIGNAL = 4.4; EXPRESSED IN HBL100, SIGNAL = 2.8; EXPRESSED IN HELA, SIGNAL = 3.3; EXPRESSED IN HEART, SIGNAL = 3.5; EST_HUMAN HIT: AI310858.1, EVALUE 2.70e-01; SWISSPROT HIT: Q04844, EVALUE 9.00e+00; NT HIT: Z47740.1, EVALUE 4.10e+00
tagaggcggaaaaagaggagatgattctgccagtagaaagggagtcactgaacgtgtttgagacaaagagaagggagaacagcagcttcacaaggacattggtgggaaagagaaacgtt

SEQ ID NO: 19138 - DNA, 243 bp, Homo sapiens
  MAP TO AL033378.6; EXPRESSED IN HBL100, SIGNAL =   2; EXPRESSED IN HELA, SIGNAL = 2.5; EXPRESSED IN HEART, SIGNAL = 4.5; EXPRESSED IN ADULT LIVER, SIGNAL = 2.9; EXPRESSED IN PLACENTA, SIGNAL = 3.1; EXPRESSED IN BRAIN, SIGNAL = 2.8; EXPRESSED IN LUNG, SIGNAL = 3.3; EXPRESSED IN BONE MARROW, SIGNAL =   3; EXPRESSED IN FETAL LIVER, SIGNAL = 2.8; EXPRESSED IN BT474, SIGNAL = 2.1; EST_HUMAN HIT: AA323135.1, EVALUE 8.00e-59; SWISSPROT HIT: P29355, EVALUE 2.30e-01; NT HIT: AB018333.1, EVALUE 1.00e-116
ttttaggttaatccgatccaggagatcctccacagacttgggctggggtggtcgtcctttccgacgcctcctggtggggcgtttgggtttctcctcgtcttcactgagcacgtccacgtagatgaacttgaacgtgccgactttgttgttcagcaggcccatccaggtccccatgggtggcttgctgattatatcgatgatatctcctttctgtggcccagggagcaaagatctttccattag

SEQ ID NO: 19139 - DNA, 234 bp, Homo sapiens
  MAP TO AL034380.21; EXPRESSED IN BT474, SIGNAL = 1.7; EXPRESSED IN ADULT LIVER, SIGNAL = 1.4; EXPRESSED IN HELA, SIGNAL = 2.2; EXPRESSED IN PLACENTA, SIGNAL = 0.98; EXPRESSED IN HBL100, SIGNAL = 1.3; EXPRESSED IN HEART, SIGNAL = 0.85; EXPRESSED IN BONE MARROW, SIGNAL = 1.3; NT HIT: AB024069.1, EVALUE 1.00e-124; SWISSPROT HIT: O35625, EVALUE 1.40e+00; EST_HUMAN HIT: AU140888.1, EVALUE 1.00e-116
ctgagtcaatccaccaatctccttcacagacacatagaggcgatagaggtccagaggtttcctacccacagcaggcagatttgtcatgcccatggccttctcctcagtgaaggccagataacggtccacccacatcttcctctcaggctcaccacccagctcatacaacttggtgatcttctcattggttgtagtagaagaactggatttctggaaggttcaggtcaaaattca

SEQ ID NO: 19140 - DNA, 425 bp, Homo sapiens
  MAP TO AL034485.5; EXPRESSED IN BONE MARROW, SIGNAL = 2.9; EXPRESSED IN BRAIN, SIGNAL = 1.8; EXPRESSED IN LUNG, SIGNAL =   1; EXPRESSED IN ADULT LIVER, SIGNAL = 1.7; EXPRESSED IN BT474, SIGNAL = 4.3; EXPRESSED IN FETAL LIVER, SIGNAL = 1.7; EXPRESSED IN HELA, SIGNAL =  28; EXPRESSED IN PLACENTA, SIGNAL = 1.9; EXPRESSED IN HBL100, SIGNAL = 4.4; EXPRESSED IN HEART, SIGNAL = 1.4; NT HIT: gi10800137, EVALUE 2.00e-14; SWISSPROT HIT: P35069, EVALUE 4.00e-22; EST_HUMAN HIT: AI827900.1, EVALUE 4.00e-62
ttgcttttggtgtacctgagggcggcattcgtgccctgggcctcggcgagcttgcccatcttccccggcagcagcagtcgcacggccatctggatgtcccgggaggtgatggtcacgcgcttggtgtaatgggccagctgaccagcctcggtggcgatgcggtccaatatgtcatggatcatagaatccatgacactcacggcctcctgggaaaggctgaggccctggtgaacctgcttcagcacccgggggaaatagggggtgaagctgtccccgaagctgtccccacggcggttggcgtggcgcctgcgggagcctcggcaccctcgcctcttctgcttctgggccttcgtggagttggcctctttgggctcctggatgctctggccttcctccgaggttgtctcagaggaagcctcagccat

SEQ ID NO: 19141 - DNA, 278 bp, Homo sapiens
  MAP TO AL096771.8; EXPRESSED IN BT474, SIGNAL = 2.4; EXPRESSED IN ADULT LIVER, SIGNAL = 4.1; EXPRESSED IN FETAL LIVER, SIGNAL = 3.1; EXPRESSED IN HELA, SIGNAL = 4.9; EXPRESSED IN PLACENTA, SIGNAL = 3.6; EXPRESSED IN HBL100, SIGNAL =   7; EXPRESSED IN HEART, SIGNAL = 3.9; EXPRESSED IN BRAIN, SIGNAL = 4.5; EXPRESSED IN BONE MARROW, SIGNAL = 3.4; EXPRESSED IN LUNG, SIGNAL =   2; EST_HUMAN HIT: AA236233.1, EVALUE 1.10e-02; SWISSPROT HIT: Q99715, EVALUE 1.00e-48; NT HIT: gi11418424, EVALUE 0.00e+00
aacgtggttctcctcaagatttagttactaaagacatcactgacacatcaattggggcttattggacatctgctccaggaatggttcgcggttacagggtctcatggaaatcactttatgatgatgttgacactggagagaaaaatctgcctgaagatgcaattcatacgatgatagaaaatctgcagccagagaccaaatacagaatttcagtatttgccacttacagcagtggagaaggagaacctttgactggagatgccacaactgaatgtagg

SEQ ID NO: 19142 - DNA, 187 bp, Homo sapiens
  MAP TO AL035458.32; EXPRESSED IN BRAIN, SIGNAL = 1.7; EXPRESSED IN BONE MARROW, SIGNAL = 2.4; EXPRESSED IN LUNG, SIGNAL =   1; EXPRESSED IN BT474, SIGNAL = 1.2; EXPRESSED IN FETAL LIVER, SIGNAL = 1.7; EXPRESSED IN ADULT LIVER, SIGNAL =   3; EXPRESSED IN HELA, SIGNAL = 3.5; EXPRESSED IN PLACENTA, SIGNAL = 1.6; EXPRESSED IN HBL100, SIGNAL = 1.3; EXPRESSED IN HEART, SIGNAL = 1.6; NT HIT: AF003529.1, EVALUE 4.00e-13; EST_HUMAN HIT: AA309073.1, EVALUE 2.00e-03; SWISSPROT HIT: Q39676, EVALUE 4.30e-01
aatagacatagagagaaggtcatctctctccccttacccttgtcctcagtgcactgttgtggacttgacagtggctgttcccaacagggctggggagcatgggcttacagaaaccacttcttgggcttctccggcagcttcaccttcactgaaggtgaataccctgaaggaaagtgctttttgtgat

SEQ ID NO: 19143 - DNA, 101 bp, Homo sapiens
  MAP TO AL096862.14; EXPRESSED IN PLACENTA, SIGNAL =   2; EXPRESSED IN HBL100, SIGNAL = 1.3; EXPRESSED IN HEART, SIGNAL = 1.5; EXPRESSED IN BONE MARROW, SIGNAL = 1.9; EXPRESSED IN BRAIN, SIGNAL = 1.3; EXPRESSED IN ADULT LIVER, SIGNAL = 1.5; EXPRESSED IN FETAL LIVER, SIGNAL = 1.4; EXPRESSED IN HELA, SIGNAL = 2.2; EST_HUMAN HIT: AV682822.1, EVALUE 1.30e+00; NT HIT: AB009605.1, EVALUE 7.20e-01
caacagtgccatttgaacagctgcaggaatggatctctgaagcaaacagctgggccacataatatgtctcagactgagctcctttggcctcaaattggggc

SEQ ID NO: 19144 - DNA, 227 bp, Homo sapiens
  MAP TO AP000513.1; EXPRESSED IN BT474, SIGNAL = 1.4; EXPRESSED IN PLACENTA, SIGNAL = 2.2; EXPRESSED IN HBL100, SIGNAL = 1.9; EXPRESSED IN HEART, SIGNAL = 2.6; EXPRESSED IN FETAL LIVER, SIGNAL = 1.6; EXPRESSED IN ADULT LIVER, SIGNAL = 2.4; EXPRESSED IN HELA, SIGNAL = 2.3; EXPRESSED IN BRAIN, SIGNAL =   2; EXPRESSED IN LUNG, SIGNAL =  12; EXPRESSED IN BONE MARROW, SIGNAL = 2.4; SWISSPROT HIT: Q64739, EVALUE 2.60e-01; NT HIT: Y08128.1, EVALUE 5.40e-01; EST_HUMAN HIT: BF347728.1, EVALUE 1.00e-30
cagcgggcgtgggatcgactgcagcagcacgagagtgtcgagttgccctcagagagggagcagggggccctgtgaggaaggaagcggcggggcccctcagtgaggggccggcaggaccaagagtccagctctttcctttccctcaccccgactacgtgaccaacaaaatgcaaaaacttacgatgttgatgggcaaagaagccttcaaagatcacaaagttgttcac

SEQ ID NO: 19145 - DNA, 673 bp, Homo sapiens
  MAP TO Z92542.2; EXPRESSED IN BT474, SIGNAL = 1.1; EXPRESSED IN HEART, SIGNAL = 0.87; EXPRESSED IN LUNG, SIGNAL = 9.9; EXPRESSED IN BONE MARROW, SIGNAL = 1.3; EXPRESSED IN BRAIN, SIGNAL = 1.2; NT HIT: gi11419959, EVALUE 0.00e+00; SWISSPROT HIT: O76039, EVALUE 1.00e-127; EST_HUMAN HIT: BE831003.1, EVALUE 0.00e+00
aaaccaagccggcaaaagtactgctttgcagtctcaccacagatctaacagcaaggacatccagaacctgagtgtaggcctgccccgggctgacgaaggtctccctgccaatgaaagcttcctaaatggaaaccttgctggagctagtcttagtccactgcacaccaaaacctaccaagcaagcagccagcctgggtctaccagcaaagatctcaccaacaacaacataccacaccttcttagcccaaaagaagccaagtcaaaaacagagtttgattttaatattgacccaaagccttcagaaggcccagggacaaagtacctcaagtcaaacagcagatctcagcagaaccgccactcattcatggaaagctctcaaagcaaagctgggacactgcagcccaatgaaaagcagagtcggcatagctatattgacacaattccccagtcctctaggagtccctcctacaggaccaaggccaaaagccatggggcactgagtgactccaagtctgtgagcaacctttctgaagccagggcccaaattgcggagcccagtaccagtaggtacttcccatctagctgcttagacttgaattctcccaccagcccaacccccaccagacacagtgacacgagaactttgctcagcccttctggaagaaataaccga

SEQ ID NO: 19146 - DNA, 174 bp, Homo sapiens
  MAP TO AP000521.1; EXPRESSED IN BONE MARROW, SIGNAL = 9.5; EXPRESSED IN BT474, SIGNAL = 1.5; EXPRESSED IN HBL100, SIGNAL =  13; EXPRESSED IN HEART, SIGNAL = 4.2; EXPRESSED IN BRAIN, SIGNAL = 1.7; EXPRESSED IN LUNG, SIGNAL =  11; EXPRESSED IN ADULT LIVER, SIGNAL =   4; EXPRESSED IN FETAL LIVER, SIGNAL = 2.7; EXPRESSED IN PLACENTA, SIGNAL = 3.1; EXPRESSED IN HELA, SIGNAL =  12; EST_HUMAN HIT: BE785789.1, EVALUE 3.00e-24; SWISSPROT HIT: Q9Y3F1, EVALUE 5.00e+00; NT HIT: AF055066.1, EVALUE 1.00e-93
agaaggaaactcagagctcacccctttcctacctgggatcttattcctccacatcacagcagcgaccacagctacagtgaatacagcaacgagaagaaccaggccagcaatgatgcccacaacggggatgatgggctgggaagacagctctaagaaaggaggtgaacgtgaggg

SEQ ID NO: 19147 - DNA, 138 bp, Homo sapiens
  MAP TO AP000346.1; EXPRESSED IN PLACENTA, SIGNAL = 0.99; EXPRESSED IN BONE MARROW, SIGNAL = 1.4; EXPRESSED IN FETAL LIVER, SIGNAL = 1.1; EXPRESSED IN HEART, SIGNAL = 1.1; EXPRESSED IN HELA, SIGNAL = 1.5; EXPRESSED IN HBL100, SIGNAL = 1.1; EXPRESSED IN BRAIN, SIGNAL = 2.2; EXPRESSED IN LUNG, SIGNAL = 2.4; EXPRESSED IN BT474, SIGNAL = 0.98; EXPRESSED IN ADULT LIVER, SIGNAL = 1.2; NT HIT: gi11417836, EVALUE 2.00e-14; EST_HUMAN HIT: AW665217.1, EVALUE 2.00e-14; SWISSPROT HIT: P04280, EVALUE 1.20e-01
gtgtgcctgaaggccaccaaggccctcaccatgctgccagaggcccctgagggctgcaaggtcctgcaggcccatatgcacaccttccgtgtcctggaggaggactctgacagcaaggcttatgagggcgaggcctta

SEQ ID NO: 19148 - DNA, 177 bp, Homo sapiens
  MAP TO AP000351.2; EXPRESSED IN BONE MARROW, SIGNAL = 3.4; EXPRESSED IN BRAIN, SIGNAL = 3.3; EXPRESSED IN BT474, SIGNAL = 1.8; EXPRESSED IN LUNG, SIGNAL = 3.1; EXPRESSED IN ADULT LIVER, SIGNAL = 3.9; EXPRESSED IN FETAL LIVER, SIGNAL = 4.2; EXPRESSED IN PLACENTA, SIGNAL = 3.6; EXPRESSED IN HEART, SIGNAL =  17; EXPRESSED IN HELA, SIGNAL = 3.7; EXPRESSED IN HBL100, SIGNAL = 2.8; NT HIT: AF240786.1, EVALUE 2.00e-95; EST_HUMAN HIT: H55341.1, EVALUE 5.00e-93; SWISSPROT HIT: P20135, EVALUE 1.00e-12
ctgcatcatctccaccacggccaccaggtcagccagtgagatttggttcccggtgatgaacatcttatcctgcagaaaatactcctcaaagagctgcaggctgttcttcacctcttccactgcatgctccatcttctcagctgaaacttcctcccctgttatctttgggatcagcaa

SEQ ID NO: 19149 - DNA, 1161 bp, Homo sapiens
  MAP TO AP000511.1; EXPRESSED IN BT474, SIGNAL = 1.7; EXPRESSED IN ADULT LIVER, SIGNAL = 2.3; EXPRESSED IN PLACENTA, SIGNAL = 1.7; EXPRESSED IN BRAIN, SIGNAL = 2.4; EXPRESSED IN FETAL LIVER, SIGNAL = 1.8; EXPRESSED IN HEART, SIGNAL = 2.1; EXPRESSED IN HELA, SIGNAL = 1.5; EXPRESSED IN HBL100, SIGNAL = 1.5; EXPRESSED IN BONE MARROW, SIGNAL = 2.7; SWISSPROT HIT: P04929, EVALUE 2.00e-06
gcagtggttcctgaggttatgatggaagccagagtgatctcagagcctgtggtggtttcaggcgctttgataaagactgcagtaggcacagatactatcttggagagagtggtgctcttggaggctatggtagagtccatggtgggcacagacttggtcacggagtctatagtattctgatagagtgtggtggaggctgtggtggacacagacgctgtagtggtcttagcaggcattacggtggctgtggagaacccagactgtgtggttgtcacaggagctttggtggagaccacagcagtctcagaacctgtggtcatggctgtggtcatggctgtagtcacttcagtggcagaggtggaagctctggtggtctcagagcctgtgctgctttcagaggctgtagcgaagactgtggtgggcacagatgatactgtgtggtgtccggtgttctcagagcctgtggtagaggttgtggtgggcacagatgctgtggtggtctcagcaggtgttggaggggctgtagagggcgcagactctacagttgtcccagaggcttttgtggagattgcagtggtcgcagagtctgtggtggaggctgtggggatctcagagcctgcggtgattttagaggttgtggtgaagactgtggtgggcagagatgttatcgtagaggtcgtggcggtcttggaagctgtggtcatggttttagaggctgtgttgggagctgtggaaggtgtagatgttatcacagagggtgtgttgttcttggggactgtggcggacacagatgctgtggtggtgtcagtaggtgttttggtggctgtgtggggcacagactctgcagctatcacagaggtttgagtggagactgtggtgtcctcggaggctgtgatggcagcaatggtagtttcagacatggtggcctcacaggctgttgtgttcttagagcctgaggtggaagctgtggtgggcacaggtgttactgtggaagatgtggtggtgttagagaccgtggtgaaggccagggtggactcaagggccaggatagaggctgtcactggctcagacactgcagtggagaacctgatggtctcataagctgtggaggagactgggatggctgcagagctcatggtgatctcagaggctgtgctggag

SEQ ID NO: 19150 - DNA, 674 bp, Homo sapiens
  MAP TO AL121652.1; EXPRESSED IN PLACENTA, SIGNAL =  28; EXPRESSED IN HELA, SIGNAL = 1.3e+02; EXPRESSED IN HEART, SIGNAL = 2.3; EXPRESSED IN BRAIN, SIGNAL =   3; EXPRESSED IN BT474, SIGNAL =  38; EXPRESSED IN HBL100, SIGNAL =  17; EXPRESSED IN LUNG, SIGNAL =   6; EXPRESSED IN BONE MARROW, SIGNAL = 3.7; EXPRESSED IN ADULT LIVER, SIGNAL =  13; EXPRESSED IN FETAL LIVER, SIGNAL = 4.2; NT HIT: gi11434787, EVALUE 0.00e+00; EST_HUMAN HIT: BF569144.1, EVALUE 0.00e+00; SWISSPROT HIT: P05783, EVALUE 4.00e-80
tcagacaccactttgccatccactatctggcgggtctatctggcgggtggtggtcttttggatggtttgcatggagttgctgcagtccagggtatcaccaagattgaagtccttgccatcttccagcaggcggcggtaggtggcgatcgcagcctccagcttgaccttgatgttcagcagggcctggtactcctgggcctggcactgtccctctgcccaggtttgtgccagctctgactccaggtgtagcaggatcccattgagctgctccatctgcagggcatagcgggccactacctccctcaggctgttctccaaactggccttcagatttctcatggagtctaggttgatctccaagaactggactgtacgtgtcagctctgtgagcatcgccttagcagctccaacctcggtggactgtgtggtgaccactgtggtgctctcctcaatctgctgagacctgttattgtccagctcctctctgttcttctgagccacctcgtcatattgggcccagatgtctgccatgatcttggcgaagtcctgagatatgggggcatctaccaccacagtcaacccagagctggcaatctgggcttgtaggccttttacttcctcttcatggttcttcttcataagagcagctcctccttgaaagcctggatctctgt

SEQ ID NO: 19151 - DNA, 132 bp, Homo sapiens
  MAP TO AC004019.11; EXPRESSED IN LUNG, SIGNAL = 4.9; EXPRESSED IN ADULT LIVER, SIGNAL = 4.1; EXPRESSED IN PLACENTA, SIGNAL =   5; EXPRESSED IN BRAIN, SIGNAL = 7.6; EXPRESSED IN BONE MARROW, SIGNAL =   6; EXPRESSED IN FETAL LIVER, SIGNAL = 6.6; EXPRESSED IN BT474, SIGNAL =  19; EXPRESSED IN HEART, SIGNAL =  17; EXPRESSED IN HELA, SIGNAL =  12; EXPRESSED IN HBL100, SIGNAL =  26; EST_HUMAN HIT: BE005077.1, EVALUE 3.00e-07; SWISSPROT HIT: P24170, EVALUE 1.00e+00; NT HIT: Y12851.1, EVALUE 4.00e-06
cctgtatggattttgcccactcttgacatttcctgtaagtggaatcacacagccccactttgtgcctgtatggatttgcccactctggacatttcctgtaagtggaatcacacagccccactttgtgcctgt

SEQ ID NO: 19152 - DNA, 101 bp, Homo sapiens
  MAP TO AC007728.1; EXPRESSED IN PLACENTA, SIGNAL = 3.2; EXPRESSED IN HBL100, SIGNAL = 2.7; EXPRESSED IN HELA, SIGNAL = 2.3; EXPRESSED IN HEART, SIGNAL = 4.1; EXPRESSED IN BONE MARROW, SIGNAL = 4.7; EXPRESSED IN LUNG, SIGNAL = 5.5; EXPRESSED IN BRAIN, SIGNAL = 4.2; EXPRESSED IN ADULT LIVER, SIGNAL = 3.4; EXPRESSED IN BT474, SIGNAL = 3.1; EXPRESSED IN FETAL LIVER, SIGNAL = 4.7; EST_HUMAN HIT: BF246744.1, EVALUE 8.00e-02; SWISSPROT HIT: P37399, EVALUE 4.10e+00; NT HIT: X06826.2, EVALUE 2.20e-01
cagcacacagacctacacgtactccatgtttcttccccttagacttgatttcttctaccaccaagcatgagggtgagacccagtctccctctgctcctctg

SEQ ID NO: 19153 - DNA, 201 bp, Homo sapiens
  MAP TO AC004902.2; EXPRESSED IN HELA, SIGNAL = 1.8; EXPRESSED IN HEART, SIGNAL = 0.96; EXPRESSED IN BRAIN, SIGNAL = 0.95; EXPRESSED IN LUNG, SIGNAL = 0.99; EXPRESSED IN FETAL LIVER, SIGNAL = 1.1; NT HIT: AF117653.1, EVALUE 2.00e-15; EST_HUMAN HIT: AA174078.1, EVALUE 9.00e-18; SWISSPROT HIT: P42889, EVALUE 1.60e+00
tcactatgtccctgtggccagagcctagacaagagttacatcacctgggtgatcagtgcagagataagtcacaatgtctatcacaatgtctccagtaggcagagcctagacaagagttacatcacctgggtgatcacatcagagatatgtcacaatgccccctgtgggcagatcccagacaagagttgcatcacctcggtg

SEQ ID NO: 19154 - DNA, 143 bp, Homo sapiens
  MAP TO AC007749.2; EXPRESSED IN BT474, SIGNAL = 1.4; EXPRESSED IN ADULT LIVER, SIGNAL = 2.5; EXPRESSED IN FETAL LIVER, SIGNAL = 2.4; EXPRESSED IN HBL100, SIGNAL = 2.1; EXPRESSED IN HELA, SIGNAL = 2.1; EXPRESSED IN PLACENTA, SIGNAL =   3; EXPRESSED IN HEART, SIGNAL = 2.9; EXPRESSED IN BRAIN, SIGNAL =   2; EXPRESSED IN BONE MARROW, SIGNAL = 2.2; EXPRESSED IN LUNG, SIGNAL = 4.8; SWISSPROT HIT: O60488, EVALUE 5.10e+00; EST_HUMAN HIT: AV734021.1, EVALUE 4.80e-01
tgctcacaattatagtgtacatggatttcttaatgtgtgctttatcttccccctcccatcggaatataaactccttgagagcaaggatgatattttcccctgctgttttctcagtaccaagaagagtgcctggcacgtagtag

SEQ ID NO: 19155 - DNA, 476 bp, Homo sapiens; identical to SEQ ID NO: 2424
  MAP TO AC005082.2; EXPRESSED IN BONE MARROW, SIGNAL = 0.99; EXPRESSED IN LUNG, SIGNAL =  11; EXPRESSED IN BT474, SIGNAL = 2.3; EXPRESSED IN FETAL LIVER, SIGNAL = 2.1; EXPRESSED IN HBL100, SIGNAL = 3.5; EXPRESSED IN HELA, SIGNAL = 1.5; EXPRESSED IN HEART, SIGNAL = 2.7; EXPRESSED IN BRAIN, SIGNAL = 1.6; NT HIT: Y12996.1, EVALUE 2.60e-01; EST_HUMAN HIT: BF329972.1, EVALUE 4.50e-01; SWISSPROT HIT: P40601, EVALUE 6.40e+00

SEQ ID NO: 19156 - DNA, 211 bp, Homo sapiens
  MAP TO AC006369.3; EXPRESSED IN PLACENTA, SIGNAL = 3.2; EXPRESSED IN HBL100, SIGNAL = 2.8; EXPRESSED IN HEART, SIGNAL = 3.7; EXPRESSED IN BONE MARROW, SIGNAL = 2.8; EXPRESSED IN BRAIN, SIGNAL =   3; EXPRESSED IN LUNG, SIGNAL = 5.8; EXPRESSED IN ADULT LIVER, SIGNAL = 5.6; EXPRESSED IN BT474, SIGNAL = 2.7; EXPRESSED IN FETAL LIVER, SIGNAL = 2.4; EXPRESSED IN HELA, SIGNAL = 7.1; NT HIT: AJ223364.1, EVALUE 4.00e-66; EST_HUMAN HIT: AL040766.1, EVALUE 2.00e-49; SWISSPROT HIT: P39661, EVALUE 6.30e+00
ggacgagagactgagaaaagaaataagacacagagacaaagtatagagaaagaacagtgggcccaggagactggcgttcagcatacggaggacctgcactggccccggtctctgagttccctcagttattattattttcactatctcagcaacgggaatgcagcaggagaacagggtgatagttgggagaaggtcagcaagaaaacatgtg

SEQ ID NO: 19157 - DNA, 222 bp, Homo sapiens
  MAP TO AC007898.1; EXPRESSED IN ADULT LIVER, SIGNAL = 1.4; EXPRESSED IN FETAL LIVER, SIGNAL = 1.4; EXPRESSED IN PLACENTA, SIGNAL =   1; EXPRESSED IN HEART, SIGNAL = 0.97; EXPRESSED IN LUNG, SIGNAL = 1.3; EXPRESSED IN BONE MARROW, SIGNAL = 1.1; EXPRESSED IN BRAIN, SIGNAL = 1.4; SWISSPROT HIT: P30706, EVALUE 1.40e-01
  unsure 72
caagctgttaccaggacagctgtgtctcaggggagagaaagctctgggtctcccactgcaggggcagggatngccctattgctgacagtcccctcaaaagcccagcacctctgaggtcacagaccaaaaacaagctgaagacccattatgagagaaaacagtgcctgactccaaggccgctgatgggaaagccaagatctttctgcttttgtttgtttaaac

SEQ ID NO: 19158 - DNA, 195 bp, Homo sapiens
  MAP TO AC009474.1; EXPRESSED IN PLACENTA, SIGNAL = 2.2; EXPRESSED IN HBL100, SIGNAL = 1.7; EXPRESSED IN HELA, SIGNAL = 1.9; EXPRESSED IN HEART, SIGNAL = 2.1; EXPRESSED IN BT474, SIGNAL = 2.1; EXPRESSED IN BRAIN, SIGNAL = 2.1; EXPRESSED IN LUNG, SIGNAL = 1.6; EXPRESSED IN BONE MARROW, SIGNAL = 2.3; EXPRESSED IN ADULT LIVER, SIGNAL =   2; EXPRESSED IN FETAL LIVER, SIGNAL = 2.5; EST_HUMAN HIT: AA229054.1, EVALUE 1.00e-27; NT HIT: AF223391.1, EVALUE 4.00e-20; SWISSPROT HIT: P11369, EVALUE 3.30e-01
atctatgttgctgcaaaggacattgatgcagttggaggccattatcttaagcaaattaatgcagaaacagaaaatcaaataccacatgttctcacttataagtggaagctaagcattgcgtatatatggacaaaaagaggggaaccacagacacagggcctacttcagggtggagagagggaggaagttgaggat

SEQ ID NO: 19159 - DNA, 273 bp, Homo sapiens
  MAP TO AC010850.2; EXPRESSED IN PLACENTA, SIGNAL = 4.2; EXPRESSED IN HBL100, SIGNAL = 2.5; EXPRESSED IN HEART, SIGNAL = 2.7; EXPRESSED IN BONE MARROW, SIGNAL = 2.1; EXPRESSED IN HELA, SIGNAL = 2.9; EXPRESSED IN BRAIN, SIGNAL = 3.3; EXPRESSED IN LUNG, SIGNAL = 3.6; EXPRESSED IN BT474, SIGNAL = 4.5; EXPRESSED IN ADULT LIVER, SIGNAL = 2.9; EXPRESSED IN FETAL LIVER, SIGNAL = 2.9; SWISSPROT HIT: P53631, EVALUE 3.30e+00; NT HIT: U52111.2, EVALUE 2.60e+00; EST_HUMAN HIT: AW466922.1, EVALUE 0.00e+00
cggcagagcaaacataggcgctttcagaataccctagtagtcctacataaatctggtttgctggagatcactttgaaaaccaaggagttgattcgtcagaatcaggcaactcaggtagaactagaccagctaaaggagcaaacccagctgtttatagaagccaccaagagcagggcccctcaggcttgggccaagctgcaggcatctttaacacctgggtccagtaatacaggcagtgacctagaagcattctctgatcacccagccatatag

SEQ ID NO: 19160 - DNA, 141 bp, Homo sapiens
  MAP TO AC010877.1; EXPRESSED IN ADULT LIVER, SIGNAL = 3.1; EXPRESSED IN BT474, SIGNAL = 1.6; EXPRESSED IN FETAL LIVER, SIGNAL = 6.7; EXPRESSED IN PLACENTA, SIGNAL = 2.3; EXPRESSED IN HELA, SIGNAL = 2.6; EXPRESSED IN HBL100, SIGNAL =   2; EXPRESSED IN HEART, SIGNAL = 2.6; EXPRESSED IN LUNG, SIGNAL = 1.7; EXPRESSED IN BONE MARROW, SIGNAL = 2.1; EXPRESSED IN BRAIN, SIGNAL = 2.5; NT HIT: AL163210.2, EVALUE 3.00e-13; EST_HUMAN HIT: BE144999.1, EVALUE 6.00e-12
ttgctgatgagatctcagatggaaatgatgaacttactgggaactggagcaaaagtcacccttgttactctgcagcagagaacctggctgtgtttccattgccctaggcttggtgggaagctgaacttaacggtgatgacc

SEQ ID NO: 19161 - DNA, 291 bp, Homo sapiens
  MAP TO AC010754.1; EXPRESSED IN BONE MARROW, SIGNAL =   3; EXPRESSED IN BRAIN, SIGNAL =   3; EXPRESSED IN BT474, SIGNAL = 2.1; EXPRESSED IN HBL100, SIGNAL = 2.1; EXPRESSED IN HEART, SIGNAL = 3.4; EXPRESSED IN LUNG, SIGNAL =   3; EXPRESSED IN ADULT LIVER, SIGNAL = 3.3; EXPRESSED IN FETAL LIVER, SIGNAL = 2.9; EXPRESSED IN PLACENTA, SIGNAL =   3; EXPRESSED IN HELA, SIGNAL = 5.9; EST_HUMAN HIT: AW501010.1, EVALUE 0.00e+00; SWISSPROT HIT: P36114, EVALUE 4.40e-01; NT HIT: U22818.1, EVALUE 1.80e-01
  unsure 20
gcggtctccaggaaaacccnagcaggttgatgattttgagcaggtttgggggcaccatggatatgcaaaggtgaaaaaggccatatccaaagctaacagcacctttcagtctgttcagagactcctcagacaccccttcagccacaatgtgattatcatttgcagcatcagaagtcaaggactcttcagttagcttcttctgatacagctcctgaagggcattgatgtccagatagcatttattgtaaatcttccaggctttcctaaggatccacccacctttgatataag

SEQ ID NO: 19162 - DNA, 186 bp, Homo sapiens
  MAP TO AC010966.1; EXPRESSED IN LUNG, SIGNAL = 9.7; EXPRESSED IN BT474, SIGNAL = 4.2; EXPRESSED IN PLACENTA, SIGNAL =  13; EXPRESSED IN BRAIN, SIGNAL =  12; EXPRESSED IN BONE MARROW, SIGNAL =  13; EXPRESSED IN ADULT LIVER, SIGNAL =  10; EXPRESSED IN FETAL LIVER, SIGNAL =  15; EXPRESSED IN HEART, SIGNAL = 9.8; EXPRESSED IN HELA, SIGNAL = 8.5; EXPRESSED IN HBL100, SIGNAL = 5.9; NT HIT: AF217796.1, EVALUE 1.70e+00; SWISSPROT HIT: P14866, EVALUE 1.30e+00; EST_HUMAN HIT: AW836450.1, EVALUE 4.40e-01
  unsure 44
gtgcatggtccctttggtggcttccacagcaccctgcacccacntggccacggcccttctaacacggtgctggatgacatgctcctacactgtcctccttactctcttgagttctgtgaaggcagagatcatgttcatctcattcaccatcgtaccgacagtgagaaaggcagtaagagtagcact

SEQ ID NO: 19163 - DNA, 100 bp, Homo sapiens
  MAP TO AL109658.1; EXPRESSED IN FETAL LIVER, SIGNAL =   1; EXPRESSED IN BT474, SIGNAL = 1.9; EXPRESSED IN HBL100, SIGNAL = 1.3; EXPRESSED IN PLACENTA, SIGNAL = 1.1; EXPRESSED IN HELA, SIGNAL = 1.4; EXPRESSED IN HEART, SIGNAL = 1.4; EXPRESSED IN LUNG, SIGNAL = 4.7; SWISSPROT HIT: Q06644, EVALUE 7.00e+00; EST_HUMAN HIT: BF663082.1, EVALUE 1.00e-49; NT HIT: gi11422182, EVALUE 1.00e-49
gacaggtgaacttggatatggaggaccatcgggacgaggactttgtgaagcccaaaggagccttcaaagccttcactggcgagggtcagaaactgggcag

SEQ ID NO: 19164 - DNA, 133 bp, Homo sapiens
  MAP TO AC011282.1; EXPRESSED IN FETAL LIVER, SIGNAL = 1.6; EXPRESSED IN ADULT LIVER, SIGNAL = 1.7; EXPRESSED IN PLACENTA, SIGNAL = 1.9; EXPRESSED IN HEART, SIGNAL = 1.9; EXPRESSED IN BRAIN, SIGNAL = 1.4; EXPRESSED IN BT474, SIGNAL = 1.1; EXPRESSED IN HELA, SIGNAL = 1.4; EXPRESSED IN HBL100, SIGNAL = 1.1; EXPRESSED IN LUNG, SIGNAL = 1.4; EXPRESSED IN BONE MARROW, SIGNAL = 1.5; EST_HUMAN HIT: AU140358.1, EVALUE 6.00e-22; SWISSPROT HIT: Q00341, EVALUE 3.00e+00; NT HIT: AL163227.2, EVALUE 4.00e-16
aagaaaaacccattatcagaggagaaattcaagctggctgcagaaatttgcataagtaacgaggaaccatatgttatccaagataatggggaaaatgcctctagggcatgtcagaggtcttcatgtgacccct

SEQ ID NO: 19165 - DNA, 450 bp, Homo sapiens
  MAP TO AL109752.4; EXPRESSED IN ADULT LIVER, SIGNAL = 1.1; EXPRESSED IN BT474, SIGNAL = 1.1; EXPRESSED IN FETAL LIVER, SIGNAL = 0.97; EXPRESSED IN HBL100, SIGNAL =   1; EXPRESSED IN HEART, SIGNAL = 0.93; EXPRESSED IN BRAIN, SIGNAL = 1.1; EXPRESSED IN LUNG, SIGNAL = 2.7; SWISSPROT HIT: Q02225, EVALUE 1.00e-04; NT HIT: AF198349.1, EVALUE 1.00e-73; EST_HUMAN HIT: AA909203.1, EVALUE 3.00e-16
cagcggcgccggcgtcccggggggcttattccgggccgaacccctgtactcgactcccagagagccccctcgtcttactcctaatatgatcaatagtttcgtggttaataaccacagcaacagtgccggaggcggcggcaggggcaacaccaacaccaacgagtgccgcatggtcgacatgcacgggatgaaggtggcttcgttcctgatggacggccaggaactgatctgcctgccgcaagtctttgatctttttctcaagcacctggtgggaggcttgcacactgtgtacaccaagctgaagagactggatatatcccccgtggtgtgtactgttgagcaggtccggatcctccgcgggctgggggccatccagcccggggtaaaccgctgcaaactcatcaccaggaaagacttcgaaactttgttcaccgattgcaccaatgccag

SEQ ID NO: 19166 - DNA, 254 bp, Homo sapiens
  MAP TO AC011301.1; EXPRESSED IN PLACENTA, SIGNAL = 1.1; EXPRESSED IN HBL100, SIGNAL =   1; EXPRESSED IN HEART, SIGNAL = 1.4; EXPRESSED IN BRAIN, SIGNAL = 1.2; EXPRESSED IN BONE MARROW, SIGNAL = 1.4; EXPRESSED IN BT474, SIGNAL =   1; EXPRESSED IN ADULT LIVER, SIGNAL = 1.6; EXPRESSED IN FETAL LIVER, SIGNAL = 1.2; SWISSPROT HIT: P48355, EVALUE 1.00e+00
cgggaggccccgctggtccagctgaatagacagctgctggcctttcttgagcatggggaggacgagtcgcaaacatgttttagaaaaaaacaagttaacggcagcttgagagagggcatggagggggcaggcagtgcagttgggagcaagctgggaggagactggcagtcgcctaagaagaaagggcttgggcagtggcctcaacagcatctgtggcttagtcccatcgtcagccaattcgggaacataattgt

SEQ ID NO: 19167 - DNA, 211 bp, Homo sapiens
  MAP TO AL049652.13; EXPRESSED IN PLACENTA, SIGNAL =   1; EXPRESSED IN HBL100, SIGNAL = 1.7; EXPRESSED IN HELA, SIGNAL = 3.1; EXPRESSED IN BONE MARROW, SIGNAL =   2; EXPRESSED IN BT474, SIGNAL = 1.7; EXPRESSED IN HEART, SIGNAL = 0.89; EXPRESSED IN BRAIN, SIGNAL = 1.7; EXPRESSED IN LUNG, SIGNAL = 3.3; EXPRESSED IN ADULT LIVER, SIGNAL = 1.1; EXPRESSED IN FETAL LIVER, SIGNAL =   1; SWISSPROT HIT: P53914, EVALUE 7.00e-12; EST_HUMAN HIT: BE252982.1, EVALUE 2.00e-93
ccctgagccgggaggagctggaagcactcttcctcccctatgacctgaagcggctggagatgtattcacggaatatggtggactatcacctcatcatggacatgatcccggccatctctcgcatctatttcctgaaccagctgggggacctggccctgtctgcggctcagtcggtatgctatctgttgcttgcgtggaggagaagcgagga

SEQ ID NO: 19168 - DNA, 157 bp, Homo sapiens
  MAP TO AL117349.1; EXPRESSED IN BONE MARROW, SIGNAL = 1.6; EXPRESSED IN LUNG, SIGNAL = 1.3; EXPRESSED IN BRAIN, SIGNAL = 1.4; EXPRESSED IN FETAL LIVER, SIGNAL = 3.3; EXPRESSED IN ADULT LIVER, SIGNAL = 1.8; EXPRESSED IN HELA, SIGNAL = 1.2; EXPRESSED IN PLACENTA, SIGNAL = 2.7; EXPRESSED IN HBL100, SIGNAL = 0.95; EXPRESSED IN HEART, SIGNAL = 1.6; EST_HUMAN HIT: AA167546.1, EVALUE 5.30e-01; SWISSPROT HIT: Q02385, EVALUE 2.90e+00; NT HIT: X76263.1, EVALUE 1.40e+00
ggctgctgatttgcaagcctgacttggtttacgtggagggaaatgacaggaacacttacaagacactttgccagagccccaggcattctgtcccatggggcatctccagttccgtggccctgaccagctgcttccactcttgtgaataccaggctcc

SEQ ID NO: 19169 - DNA, 290 bp, Homo sapiens
  MAP TO AL117186.1; EXPRESSED IN LUNG, SIGNAL = 2.6; EXPRESSED IN BRAIN, SIGNAL = 2.3; EXPRESSED IN BT474, SIGNAL = 1.6; EXPRESSED IN ADULT LIVER, SIGNAL = 2.8; EXPRESSED IN HEART, SIGNAL = 2.5; EXPRESSED IN PLACENTA, SIGNAL = 2.3; EXPRESSED IN BONE MARROW, SIGNAL = 4.3; EXPRESSED IN FETAL LIVER, SIGNAL = 2.8; EXPRESSED IN HELA, SIGNAL = 1.6; EXPRESSED IN HBL100, SIGNAL = 2.1; SWISSPROT HIT: P22544, EVALUE 9.80e-01; EST_HUMAN HIT: BE410618.1, EVALUE 4.10e+00; NT HIT: AF302503.1, EVALUE 1.80e-01
gcctctcccgtcgccattttgggcatcttgtcctggtccctgcccctctgcctcaggtggaattcccaggacacatggccaggggggctctttcacctctgacgctttggccgtgtgtgatcctacaggcaaatcttctacaggaagaagaagggagccatgaagatttctcccagctcctgaggaactttgggcagtggttgcaggtggaaaactccaagctggttagaatcatcgcaatgagaacttctacagctgaggacttgaggaccagaaaatcgaagctgcag

SEQ ID NO: 19170 - DNA, 169 bp, Homo sapiens
  MAP TO AL079351.1; EXPRESSED IN FETAL LIVER, SIGNAL = 0.97; EXPRESSED IN ADULT LIVER, SIGNAL = 1.1; EXPRESSED IN HEART, SIGNAL =   1; EXPRESSED IN PLACENTA, SIGNAL =   1; EXPRESSED IN BRAIN, SIGNAL = 1.1; EXPRESSED IN BONE MARROW, SIGNAL = 1.2; EXPRESSED IN LUNG, SIGNAL = 3.6; EST_HUMAN HIT: AW451365.1, EVALUE 1.00e-01; SWISSPROT HIT: Q12325, EVALUE 6.50e+00
agcctgaggctggcctctcagggaggcggacgattaggaaggggttagggaatgaaacaacaacatcagtgggcaggaaggacatcagcctcttctggagcaactctgcctgaaagtgcagcaggtggtccagactggggtgtggaggaaggaggagaggtcacgaaga

SEQ ID NO: 19171 - DNA, 84 bp, Homo sapiens
  MAP TO AL035691.17; EXPRESSED IN FETAL LIVER, SIGNAL = 2.6; EXPRESSED IN ADULT LIVER, SIGNAL = 1.6; EXPRESSED IN PLACENTA, SIGNAL = 1.8; EXPRESSED IN HELA, SIGNAL = 1.1; EXPRESSED IN BT474, SIGNAL =   1; EXPRESSED IN HEART, SIGNAL = 1.3; EXPRESSED IN HBL100, SIGNAL = 1.1; EXPRESSED IN BRAIN, SIGNAL = 2.4; EXPRESSED IN LUNG, SIGNAL = 2.5; EXPRESSED IN BONE MARROW, SIGNAL = 2.1; EST_HUMAN HIT: AW875475.1, EVALUE 4.40e-02
cacagggacatccctagagaaagttcgcattgagtcacaggtgaaaatgtacgagcacttcgtggatgactcgctcgatccgac

SEQ ID NO: 19172 - DNA, 245 bp, Homo sapiens
  MAP TO AF186193.1; EXPRESSED IN ADULT LIVER, SIGNAL = 5.1; EXPRESSED IN BT474, SIGNAL =  23; EXPRESSED IN FETAL LIVER, SIGNAL = 5.5; EXPRESSED IN HBL100, SIGNAL =  20; EXPRESSED IN HEART, SIGNAL =  11; EXPRESSED IN PLACENTA, SIGNAL = 7.4; EXPRESSED IN HELA, SIGNAL =  22; EXPRESSED IN BRAIN, SIGNAL = 5.2; EXPRESSED IN BONE MARROW, SIGNAL = 8.1; EXPRESSED IN LUNG, SIGNAL = 7.1; SWISSPROT HIT: P25120, EVALUE 7.00e-37; EST_HUMAN HIT: BF316170.1, EVALUE 1.00e-122; NT HIT: gi4506662, EVALUE 1.00e-122
cccagctcaacattggcaatgtgctccctgtgggcaccatgcctgagggtacaatcgtgtgctgcctggaggagaagcctggagaccgtggcaagctggcccgggcatcagggaactatgccaccgttatctcccacaaccctgagaccaagaagacccgtgtgaagctgccctccggctccaagaaggttatctcctcagccaacagagctgtggttggtgagtatcaggcagcagttgaatgc

SEQ ID NO: 19173 - DNA, 80 bp, Homo sapiens
  MAP TO AL050342.29; EXPRESSED IN BONE MARROW, SIGNAL = 5.4; EXPRESSED IN LUNG, SIGNAL = 1.3; EXPRESSED IN ADULT LIVER, SIGNAL = 2.4; EXPRESSED IN BT474, SIGNAL = 2.3; EXPRESSED IN FETAL LIVER, SIGNAL = 2.3; EXPRESSED IN PLACENTA, SIGNAL = 2.4; EXPRESSED IN HBL100, SIGNAL = 2.4; EXPRESSED IN HEART, SIGNAL = 2.4; EXPRESSED IN HELA, SIGNAL = 2.5; EXPRESSED IN BRAIN, SIGNAL = 4.5; NT HIT: AJ009610.1, EVALUE 4.10e-02; EST_HUMAN HIT: AW994227.1, EVALUE 2.00e-04
atttgctccttataaggacatcagtcattgaattaggactcaccctaatccagtgtgacctcatcttacctttagcacaa

SEQ ID NO: 19174 - DNA, 91 bp, Homo sapiens
  MAP TO AP000403.1; EXPRESSED IN HEART, SIGNAL = 2.2; EXPRESSED IN PLACENTA, SIGNAL = 2.7; EXPRESSED IN HBL100, SIGNAL = 1.2; EXPRESSED IN BRAIN, SIGNAL = 1.4; EXPRESSED IN BONE MARROW, SIGNAL = 1.2; EXPRESSED IN LUNG, SIGNAL = 2.2; EXPRESSED IN ADULT LIVER, SIGNAL = 1.8; EXPRESSED IN FETAL LIVER, SIGNAL = 1.1; EXPRESSED IN HELA, SIGNAL = 1.3; NT HIT: AF295779.1, EVALUE 1.90e-01; EST_HUMAN HIT: BE719358.1, EVALUE 2.80e-01
aaaaataagaacaaagatattttgatccacagggaaaagaccctggagaatgcattactcccagaagatggttccttttttaggccagagg

SEQ ID NO: 19175 - DNA, 467 bp, Homo sapiens
  MAP TO AL035705.14; EXPRESSED IN HEART, SIGNAL = 2.1; EXPRESSED IN BRAIN, SIGNAL = 0.91; EXPRESSED IN LUNG, SIGNAL = 8.7; EXPRESSED IN FETAL LIVER, SIGNAL = 1.5; EXPRESSED IN HELA, SIGNAL = 1.8; SWISSPROT HIT: Q09137, EVALUE 5.00e-89; NT HIT: gi11427345, EVALUE 0.00e+00; EST_HUMAN HIT: AI732856.1, EVALUE 1.00e-111
cttcagccataatgtcatacggtttgctctgacttcggattccaagatgccacttggcttttttcacagctaaagatttgggcttagtcgtattcagtgcatccaatggacatcttgctttggggctgtctgctataagaggtggcatcctttctggatgaggtttcaggcctgggggaatatgcatggcactatcatccataaaagaaccagatggaggactagaggcgaggtagaactcactggcttggttcattattctccgattgtcaatgataagatgataagccactgcaagctggtcttgagggtcaccactatataaactgttcattacttctgattctgtacattcaaatttttcacacacttctttcacagcctcatcatcaatgacgttagcatcataggaagggtcttcaggaaataagtaactgggcaaatcttgtttaaaccattcatgctct

SEQ ID NO: 19176 - DNA, 195 bp, Homo sapiens
  MAP TO AL110504.1; EXPRESSED IN LUNG, SIGNAL = 1.4; EXPRESSED IN BRAIN, SIGNAL = 2.3; EXPRESSED IN BONE MARROW, SIGNAL =   2; EXPRESSED IN ADULT LIVER, SIGNAL = 2.3; EXPRESSED IN BT474, SIGNAL = 3.7; EXPRESSED IN FETAL LIVER, SIGNAL = 1.7; EXPRESSED IN HELA, SIGNAL = 4.4; EXPRESSED IN PLACENTA, SIGNAL = 1.7; EXPRESSED IN HEART, SIGNAL = 1.6; EXPRESSED IN HBL100, SIGNAL = 2.9; EST_HUMAN HIT: AW842840.1, EVALUE 2.00e-38; NT HIT: AF270831.1, EVALUE 1.00e-38; SWISSPROT HIT: P30056, EVALUE 2.20e+00
cacggctcgcttaacctgtcggggagaactgggctgcggagagggtttcttgggctgttgggctggctgctgctgctgggctggttgctgggggtccttctgctggggctgggatggttcggagctttgagacggctgtgactgctgtacttgcggcacttgtggtgtaggctgaagagatgggggctgttgcag

SEQ ID NO: 19177 - DNA, 112 bp, Homo sapiens
  MAP TO AL008718.23; EXPRESSED IN BRAIN, SIGNAL = 1.1; EXPRESSED IN BONE MARROW, SIGNAL = 1.1; EXPRESSED IN ADULT LIVER, SIGNAL =   2; EXPRESSED IN BT474, SIGNAL = 1.1; EXPRESSED IN FETAL LIVER, SIGNAL = 1.5; EXPRESSED IN HELA, SIGNAL =   1; EXPRESSED IN PLACENTA, SIGNAL =   1; EXPRESSED IN HEART, SIGNAL = 1.3; EXPRESSED IN LUNG, SIGNAL = 4.3; NT HIT: U80821.1, EVALUE 8.20e-01; EST_HUMAN HIT: AA251987.1, EVALUE 2.50e-01
attcttattggagtcaataggggcctggcgcaccatgttgtcagctccacgagggcagtgctggttttcccgctatgtcctcggctccttacacagcgggtgttcagcagat

SEQ ID NO: 19178 - DNA, 113 bp, Homo sapiens
  MAP TO AL035705.14; EXPRESSED IN PLACENTA, SIGNAL = 3.2; EXPRESSED IN HBL100, SIGNAL = 1.9; EXPRESSED IN HEART, SIGNAL = 3.1; EXPRESSED IN LUNG, SIGNAL = 7.8; EXPRESSED IN BRAIN, SIGNAL = 2.5; EXPRESSED IN BONE MARROW, SIGNAL = 2.1; EXPRESSED IN ADULT LIVER, SIGNAL = 3.3; EXPRESSED IN BT474, SIGNAL = 1.3; EXPRESSED IN FETAL LIVER, SIGNAL = 2.7; EXPRESSED IN HELA, SIGNAL = 2.4; NT HIT: AJ276408.1, EVALUE 5.30e-02; SWISSPROT HIT: Q13202, EVALUE 6.90e+00
ctctctgaccatggagagtcaggtgaagtcatccagggtgatgcaactggatcagcagcaccagggcttgacctggtcagcctggatccagagcacagcctctcaactatcac

SEQ ID NO: 19179 - DNA, 216 bp, Homo sapiens
  MAP TO AL033532.12; EXPRESSED IN FETAL LIVER, SIGNAL =   1; EXPRESSED IN HEART, SIGNAL = 1.1; EXPRESSED IN LUNG, SIGNAL = 4.8; EXPRESSED IN BONE MARROW, SIGNAL = 0.99; EXPRESSED IN ADULT LIVER, SIGNAL = 1.3; EST_HUMAN HIT: BE538310.1, EVALUE 1.20e-02; SWISSPROT HIT: P06646, EVALUE 1.20e+00; NT HIT: AF298181.1, EVALUE 3.30e-02
gttgaaagtgagaagagaggagctgaggaaggcaaactgtgctgtgatgaatatgatgatgcagtcagctcagctgctggtaaggattggtgccaccacgtcttcatctgcccatctatctccttctcccatccaccctgtcccattctcctcaacccccagggcaaacactgctgcaaccctaacttgtatcccttttcccatgataactccaaa

SEQ ID NO: 19180 - DNA, 225 bp, Homo sapiens
  MAP TO AL031658.10; EXPRESSED IN PLACENTA, SIGNAL = 1.2; EXPRESSED IN HBL100, SIGNAL = 1.2; EXPRESSED IN HEART, SIGNAL = 1.4; EXPRESSED IN LUNG, SIGNAL = 3.5; EXPRESSED IN BRAIN, SIGNAL = 1.8; EXPRESSED IN BONE MARROW, SIGNAL = 2.2; EXPRESSED IN FETAL LIVER, SIGNAL = 1.5; EXPRESSED IN ADULT LIVER, SIGNAL = 1.4; EXPRESSED IN BT474, SIGNAL = 1.2; EXPRESSED IN HELA, SIGNAL = 1.3; EST_HUMAN HIT: BF346221.1, EVALUE 8.00e-38; NT HIT: gi11068134, EVALUE 1.40e-01; SWISSPROT HIT: P17953, EVALUE 1.70e+00
ctgacccggaagaactacatggtgaagaacctgaagcggttccggaagcagctggagcgtgaggcaggaaagctggaggcagccaagtgtgacttcttccccaaaacctttgagatgccttgcgagtaccacctgtttgtagaggagtttcgcaaaaacccaggaatcacctggatcatgaagcctgtgagtgcccagtgccaggggctgggtgggagggaatga

SEQ ID NO: 19181 - DNA, 165 bp, Homo sapiens
  MAP TO AF172274.1; EXPRESSED IN BT474, SIGNAL = 4.8; EXPRESSED IN HBL100, SIGNAL = 3.1; EXPRESSED IN HELA, SIGNAL =  15; EXPRESSED IN PLACENTA, SIGNAL = 1.5; EXPRESSED IN HEART, SIGNAL = 1.8; EXPRESSED IN LUNG, SIGNAL = 1.1; EXPRESSED IN BRAIN, SIGNAL =   2; EXPRESSED IN BONE MARROW, SIGNAL =   2; EXPRESSED IN ADULT LIVER, SIGNAL = 1.5; EXPRESSED IN FETAL LIVER, SIGNAL = 1.1; SWISSPROT HIT: Q13360, EVALUE 3.00e-16; NT HIT: AB046808.1, EVALUE 4.00e-50; EST_HUMAN HIT: BF346194.1, EVALUE 3.00e-52
tccccggttagttttcacgtggctcctgaaggaataatgttcgctgaaggctttcccgtagacaaggcattcatagggcttctccccggtgtggatccttctgtgcacgttcaggttggagctgacgctgaaggctttcccacagtgatcgcattcctacggttt

SEQ ID NO: 19182 - DNA, 455 bp, Homo sapiens; identical to SEQ ID NO: 2451
  MAP TO AL118508.6; EXPRESSED IN BONE MARROW, SIGNAL = 4.8; EXPRESSED IN FETAL LIVER, SIGNAL = 3.8; EXPRESSED IN ADULT LIVER, SIGNAL = 5.2; EXPRESSED IN BT474, SIGNAL =   2; EXPRESSED IN HBL100, SIGNAL = 3.1; EXPRESSED IN HELA, SIGNAL = 3.4; EXPRESSED IN HEART, SIGNAL =   4; EXPRESSED IN PLACENTA, SIGNAL = 4.1; EXPRESSED IN BRAIN, SIGNAL = 3.7; EXPRESSED IN LUNG, SIGNAL = 2.7; NT HIT: U22376.1, EVALUE 8.00e-08; SWISSPROT HIT: P39188, EVALUE 1.60e-02; EST_HUMAN HIT: AW861568.1, EVALUE 1.00e-13

SEQ ID NO: 19183 - DNA, 94 bp, Homo sapiens
  MAP TO AL079307.2; EXPRESSED IN BONE MARROW, SIGNAL = 1.9; EXPRESSED IN FETAL LIVER, SIGNAL = 2.7; EXPRESSED IN ADULT LIVER, SIGNAL = 1.4; EXPRESSED IN HELA, SIGNAL = 0.91; EXPRESSED IN HEART, SIGNAL = 0.87; EXPRESSED IN PLACENTA, SIGNAL = 0.97; EXPRESSED IN BRAIN, SIGNAL = 1.3; EST_HUMAN HIT: BE566007.1, EVALUE 1.10e+00; SWISSPROT HIT: Q9ZL98, EVALUE 9.50e+00; NT HIT: X91488.1, EVALUE 3.10e+00
tgaaactggtggaaacagggccagctgttttcgacagatatcctctctttgaggaaaaatggcttgatcttttgtccaaggaagttagaaaact

SEQ ID NO: 19184 - DNA, 452 bp, Homo sapiens; identical to SEQ ID NO: 2453
  MAP TO AL034372.14; EXPRESSED IN HBL100, SIGNAL = 1.4; EXPRESSED IN HEART, SIGNAL = 0.94; EXPRESSED IN PLACENTA, SIGNAL = 1.1; EXPRESSED IN BONE MARROW, SIGNAL = 1.2; EXPRESSED IN LUNG, SIGNAL = 0.99; EXPRESSED IN ADULT LIVER, SIGNAL = 1.3; SWISSPROT HIT: P56498, EVALUE 5.90e+00; EST_HUMAN HIT: BE154699.1, EVALUE 7.00e-09; NT HIT: AL163218.2, EVALUE 7.00e-05

SEQ ID NO: 19185 - DNA, 427 bp, Homo sapiens; identical to SEQ ID NO: 2454
  MAP TO AL049765.16; EXPRESSED IN PLACENTA, SIGNAL = 3.1; EXPRESSED IN BONE MARROW, SIGNAL =   2; EXPRESSED IN LUNG, SIGNAL = 1.6; EXPRESSED IN BRAIN, SIGNAL = 2.2; EXPRESSED IN FETAL LIVER, SIGNAL = 4.1; EXPRESSED IN ADULT LIVER, SIGNAL = 3.5; EXPRESSED IN BT474, SIGNAL = 1.5; EXPRESSED IN HEART, SIGNAL = 2.2; EXPRESSED IN HELA, SIGNAL = 1.6; EXPRESSED IN HBL100, SIGNAL = 1.5; EST_HUMAN HIT: AW469195.1, EVALUE 1.00e-40; SWISSPROT HIT: P08547, EVALUE 1.00e-04; NT HIT: AJ271735.1, EVALUE 7.00e-39

SEQ ID NO: 19186 - DNA, 263 bp, Homo sapiens
  MAP TO AP000181.1; EXPRESSED IN LUNG, SIGNAL = 3.7; EXPRESSED IN ADULT LIVER, SIGNAL = 1.4; EXPRESSED IN BT474, SIGNAL = 2.1; EXPRESSED IN PLACENTA, SIGNAL = 0.96; EXPRESSED IN HBL100, SIGNAL = 1.5; EXPRESSED IN HELA, SIGNAL = 3.2; EXPRESSED IN HEART, SIGNAL = 1.1; EXPRESSED IN BRAIN, SIGNAL = 0.99; NT HIT: X87825.1, EVALUE 1.00e-103; EST_HUMAN HIT: AA042813.1, EVALUE 1.00e-125; SWISSPROT HIT: Q95157, EVALUE 7.00e-21
tgtgcctggtcacggtgctgtggaacctgctcagcatcctggccgtcagccctgactcccacctccacacccccatgcacttcttcctctgcaacctgtccttgcctgacatcggtttcacctccaccacggtccccaagatgatcgtggacatccaatctcacagcagagtcatctcctatgcaggctgcctgactcagatgtctctctctgccatttttggaggcatggaagagagacatgctcctgagtgtgatggccta

SEQ ID NO: 19187 - DNA, 359 bp, Homo sapiens
  MAP TO AC011082.1; EXPRESSED IN HELA, SIGNAL =   4; EXPRESSED IN PLACENTA, SIGNAL = 2.2; EXPRESSED IN HBL100, SIGNAL = 1.5; EXPRESSED IN HEART, SIGNAL = 1.6; EXPRESSED IN BONE MARROW, SIGNAL = 1.1; EXPRESSED IN LUNG, SIGNAL = 3.4; EXPRESSED IN BT474, SIGNAL =   1; EXPRESSED IN ADULT LIVER, SIGNAL = 3.1; EST_HUMAN HIT: AA714294.1, EVALUE 4.00e-86; SWISSPROT HIT: P48628, EVALUE 1.40e+00; NT HIT: AL163209.2, EVALUE 4.00e-86
ggtcctccagttaatgtaggggcttatggagttcaggtaattaatggatttttagctcaggtccaacttacagtgggtccagtgggttcccagaccgattctgtggtagtttccccagtgccagaatgcataattgtcatagacatacttagcagctggcagaacccccacattgactccctgactggtagcatgagggctattatggtgggaaaggccaaatggaagccattagagctgtctctacctagaaaaatagtaaatcaaaaacaatatcgcatccctggagggattgtggagattagtgccaccgtcaagagcttgaaagatgcaggggcggtgattcccaccacattccc

SEQ ID NO: 19188 - DNA, 926 bp, Homo sapiens
  MAP TO AF172272.1; EXPRESSED IN BT474, SIGNAL = 1.9; EXPRESSED IN FETAL LIVER, SIGNAL = 1.8; EXPRESSED IN HELA, SIGNAL = 2.3; EXPRESSED IN PLACENTA, SIGNAL =   2; EXPRESSED IN HBL100, SIGNAL = 2.1; EXPRESSED IN HEART, SIGNAL = 2.3; EXPRESSED IN BONE MARROW, SIGNAL = 2.5; EXPRESSED IN BRAIN, SIGNAL = 1.7; EXPRESSED IN LUNG, SIGNAL = 2.3; EXPRESSED IN ADULT LIVER, SIGNAL = 2.3; EST_HUMAN HIT: AW813853.1, EVALUE 0.00e+00; SWISSPROT HIT: P20811, EVALUE 1.30e+00
gtcatctcagcatcttgactatccatctcttcaagctcctccacggaatttcccctttgtgcttttgaccttgtggcaaaggctgctcccagtgcatctgctacacagccatcagttgtttctgtattcaaattttcagtaccaccagttaaaggaaaagattcaggcaaaccagtctgaagactcccagactttgcagaagaactcacaacttctgttttcctttgaggaagatcagatggtgactgctctgtactttgatcccgaaggtgcctgtccattgaagcctgaatagaagaaaccatttcctgcaatttttttcgctgggcctcaaccaaatcaggatcaagctgcctgccgtctctcattgttactactccaggagctattcgaataagctcactattactagaagaagctgtgaatacagaaggctctgttttagtggaactattactaaagtctgtccctgtattatgctttcttacaactgaagtttccctagctcttggatcaaggtgtgggttaccagatgcagttcctaaagaatgcccttttccctgaaaggcagttacgttatgaagttgctcagatttctttttcactactccaccactacctagttttaatagcccatgtgagggacttgattccctacttcttgtagtagcctctgctcgaacctgacttacagcctctttaactaaatcttcaacatcaggaccaatggggaaatgtcctgcagcatccacacacaattccagtctatcttcagaagcattatagacaaaggttttgccaggcaaatgtggaaaagtacaatgcttgccatcagccatacctaaaaaggggaaaagatatttaacatattaaaatcttaaggtattaataaaagtgtagtcaagacaattatagttaaaataatg

SEQ ID NO: 19189 - DNA, 151 bp, Homo sapiens
  MAP TO AL034422.18; EXPRESSED IN BT474, SIGNAL = 2.7; EXPRESSED IN ADULT LIVER, SIGNAL = 1.3; EXPRESSED IN HELA, SIGNAL = 1.2; EXPRESSED IN BONE MARROW, SIGNAL = 1.1; EXPRESSED IN LUNG, SIGNAL = 1.6; EXPRESSED IN BRAIN, SIGNAL = 0.97; EXPRESSED IN FETAL LIVER, SIGNAL = 0.9; EXPRESSED IN HEART, SIGNAL = 0.87; EXPRESSED IN HBL100, SIGNAL = 1.2; EXPRESSED IN PLACENTA, SIGNAL = 4.2; NT HIT: AL161550.2, EVALUE 1.90e-02
ggcttctcttctggcccaggatggggtctgttttgtttttcctctgccctttcgggttcaagttcttctgcaacttcctctggctcccctccaatctcaagttcttcagactctgctcaaatgcagttccccaggtcaaggtcccagaatc

SEQ ID NO: 19190 - DNA, 174 bp, Homo sapiens
  MAP TO AC005043.2; EXPRESSED IN HELA, SIGNAL = 2.6; EXPRESSED IN PLACENTA, SIGNAL = 1.3; EXPRESSED IN HBL100, SIGNAL = 1.3; EXPRESSED IN HEART, SIGNAL = 1.1; EXPRESSED IN BRAIN, SIGNAL = 0.96; EXPRESSED IN BT474, SIGNAL = 1.1; EXPRESSED IN ADULT LIVER, SIGNAL = 0.97; NT HIT: AL137200.1, EVALUE 1.00e-93; SWISSPROT HIT: P43694, EVALUE 3.80e+00; EST_HUMAN HIT: BE562335.1, EVALUE 2.00e-93
attgaacctggcaaaggggtagtccttgccctcctccgctgcacgtcgccagtggaagaacattgctccgtccttgcgggccgggttggtgaatggcatccacttccaaggccgcaccttcttggagcccaacttggccttcactgtacggtatccctggccagtgtcactggg

SEQ ID NO: 19191 - DNA, 205 bp, Homo sapiens
  MAP TO AL080317.11; EXPRESSED IN FETAL LIVER, SIGNAL = 1.8; EXPRESSED IN ADULT LIVER, SIGNAL =   2; EXPRESSED IN HELA, SIGNAL = 3.2; EXPRESSED IN BRAIN, SIGNAL = 1.1; EXPRESSED IN LUNG, SIGNAL = 7.6; EXPRESSED IN BONE MARROW, SIGNAL = 1.3; EXPRESSED IN BT474, SIGNAL = 1.7; EXPRESSED IN PLACENTA, SIGNAL = 2.8; EXPRESSED IN HEART, SIGNAL = 2.4; EXPRESSED IN HBL100, SIGNAL = 1.3; NT HIT: AF004713.1, EVALUE 1.00e-112; EST_HUMAN HIT: BE866859.1, EVALUE 1.00e-112; SWISSPROT HIT: O60673, EVALUE 6.00e-34
aagtgagaagattcttgccaagggtggaaggatttgcttggtaatatagtaagtagcattcagtctcagagttgggtcctgcaggacttccactgggcgccttacaagctggataagtggtactccgggggtcccataaatgatgacgtatggcactcgctccccaacctgaggctcagagcgccggtcataagtcagcattttc

SEQ ID NO: 19192 - DNA, 134 bp, Homo sapiens
  MAP TO AC007671.5; EXPRESSED IN FETAL LIVER, SIGNAL = 1.4; EXPRESSED IN ADULT LIVER, SIGNAL =   1; EXPRESSED IN HELA, SIGNAL = 1.7; EXPRESSED IN BRAIN, SIGNAL = 1.2; EXPRESSED IN BONE MARROW, SIGNAL = 1.2; EXPRESSED IN BT474, SIGNAL = 2.1; EXPRESSED IN HEART, SIGNAL = 0.99; EXPRESSED IN HBL100, SIGNAL = 1.1; EST_HUMAN HIT: BE729942.1, EVALUE 1.00e-69; SWISSPROT HIT: P42415, EVALUE 8.90e+00; NT HIT: gi8923899, EVALUE 6.00e-70
ctgcaagtaacccatctctatcaaatgtcttttagcaaaataaaatgagccattttcatataattctccatcccagtcttgtcgacgaggccgtttagctggatttaaattcagaggttcggtcacttcacgaa

SEQ ID NO: 19193 - DNA, 610 bp, Homo sapiens
  MAP TO AL080243.21; EXPRESSED IN BONE MARROW, SIGNAL =  12; EXPRESSED IN FETAL LIVER, SIGNAL = 9.7; EXPRESSED IN HBL100, SIGNAL =  28; EXPRESSED IN HELA, SIGNAL =  70; EXPRESSED IN HEART, SIGNAL =  16; EXPRESSED IN BRAIN, SIGNAL = 5.2; EXPRESSED IN LUNG, SIGNAL =  25; EXPRESSED IN BT474, SIGNAL =  55; EXPRESSED IN ADULT LIVER, SIGNAL =  15; EXPRESSED IN PLACENTA, SIGNAL = 7.3; EST_HUMAN HIT: BE795542.1, EVALUE 0.00e+00; NT HIT: gi11424380, EVALUE 0.00e+00; SWISSPROT HIT: P29314, EVALUE 8.00e-90
gcgcagacgggttaggggagccaacatgccagtggcccggagctgggtttgtcgcaaaacttacgtgaccccgcggagatcctttgagaaatctcgtctcgaccaagagctgaagctgatcgaagagtatgggctccggaataaacgtgaggtctggagggtcaaatttaccctggccaagatccgcaaggccgcccgggaactgctgacgcttgatcagaaggacccacggcgtctgttcgaaggcaatgccctgctgtggcggctggtctgcattggggtgctggatgagggcaagatgaagctggattacatcctgggcctgaagatagaggatttcttagagagacgcctacagacccaggtcttcaagctgggcttggccaagtccatccaccacgctcgcgtgctgatccgccagcgccatttcagggtccgcaagcaggtggtgaacatcccgtccttcattgtccgcctggattcccagaagcacatcgacttctctctgtgctctccctatgggggtggccgcccgggccgcgtgaagaggaagaatgccaagaagggccagggtggggctggggctggagaccacaaggaggaggattaa

SEQ ID NO: 19194 - DNA, 285 bp, Homo sapiens
  MAP TO AC004955.2; EXPRESSED IN BONE MARROW, SIGNAL = 1.4; EXPRESSED IN HBL100, SIGNAL = 1.3; EXPRESSED IN HELA, SIGNAL = 2.6; EXPRESSED IN LUNG, SIGNAL = 1.9; EXPRESSED IN BRAIN, SIGNAL = 1.5; EXPRESSED IN BT474, SIGNAL = 2.1; EXPRESSED IN ADULT LIVER, SIGNAL = 1.8; EXPRESSED IN FETAL LIVER, SIGNAL = 1.3; EXPRESSED IN PLACENTA, SIGNAL = 1.4; EXPRESSED IN HEART, SIGNAL = 1.8; EST_HUMAN HIT: BF509482.1, EVALUE 0.00e+00; NT HIT: gi11526087, EVALUE 5.00e-11; SWISSPROT HIT: Q00798, EVALUE 1.20e+00
agcacaaatcatgttgtcagtgtgaggtccaagaacagatgatgtggaatctgatgatgtgcctgtttcatgagtagctgtattctgagaagtgtcctcctctgagtgatataatttgagccgaatatgccatgctaaactgcatacagctgaaactgtcttgaactgatgaacaacattccttggaataaaataaatgtcattatcatatagctgaatcctggcatagcgaatgccttccctcctcagttgattcagttttgcatcatcaacccattggacaca

SEQ ID NO: 19195 - DNA, 79 bp, Homo sapiens
  MAP TO AC009961.2; EXPRESSED IN BONE MARROW, SIGNAL = 1.7; EXPRESSED IN LUNG, SIGNAL = 9.1; EXPRESSED IN BT474, SIGNAL = 4.6; EXPRESSED IN ADULT LIVER, SIGNAL = 1.7; EXPRESSED IN HBL100, SIGNAL = 1.2; EXPRESSED IN HELA, SIGNAL = 4.7; EXPRESSED IN PLACENTA, SIGNAL = 1.5; EXPRESSED IN HEART, SIGNAL = 1.7; NT HIT: AL161509.2, EVALUE 1.30e-01; EST_HUMAN HIT: AW961150.1, EVALUE 3.00e-37
aagctgatggtacattactacgggactgtgaagctgtcaagattcttggagaaacgtaagaattttcagaattcaatga

SEQ ID NO: 19196 - DNA, 177 bp, Homo sapiens
  MAP TO AL033531.7; EXPRESSED IN PLACENTA, SIGNAL = 1.3; EXPRESSED IN BRAIN, SIGNAL = 1.8; EXPRESSED IN FETAL LIVER, SIGNAL = 1.1; EXPRESSED IN HBL100, SIGNAL = 1.8; EXPRESSED IN HELA, SIGNAL =  11; EXPRESSED IN HEART, SIGNAL = 2.5; EXPRESSED IN LUNG, SIGNAL = 0.9; EXPRESSED IN BONE MARROW, SIGNAL = 1.2; EXPRESSED IN ADULT LIVER, SIGNAL = 2.6; EXPRESSED IN BT474, SIGNAL = 2.7; EST_HUMAN HIT: BE552172.1, EVALUE 3.00e-95; NT HIT: gi4758423, EVALUE 2.00e-95; SWISSPROT HIT: P23434, EVALUE 5.00e-28
ataaaggagaatagagttcactagcagctttcacactttccaaagcaccaaactcatcttgtttgttcaattttgtcccaacttcagggagactacaataaacaacatctcccaacgcttcctgtgcaaaattgctgattcccactgttccaatgccattttctgttgttacccatt

SEQ ID NO: 19197 - DNA, 294 bp, Homo sapiens
  MAP TO AL121577.1; EXPRESSED IN BT474, SIGNAL = 1.2; EXPRESSED IN BONE MARROW, SIGNAL = 2.3; EXPRESSED IN LUNG, SIGNAL = 1.6; EXPRESSED IN BRAIN, SIGNAL = 1.8; EXPRESSED IN ADULT LIVER, SIGNAL = 2.4; EXPRESSED IN FETAL LIVER, SIGNAL = 1.5; EXPRESSED IN PLACENTA, SIGNAL = 2.2; EXPRESSED IN HEART, SIGNAL = 2.2; EXPRESSED IN HELA, SIGNAL =   2; EXPRESSED IN HBL100, SIGNAL = 3.3; NT HIT: gi10835266, EVALUE 0.00e+00; EST_HUMAN HIT: AI697050.1, EVALUE 0.00e+00; SWISSPROT HIT: P51811, EVALUE 5.00e-44
gttttgaagtcttctgcatctactttcagtcaggcaacaatgaagagccttatgtcagtatcaccaagaagaggcaaatgccaaaaaatggcctctcagaggagattgagaaggaggtgggccaggcagaaggcaaactaatcacccaccgatcagcgttcagccgggcgtcggtgatccaggctttcttgggctcagccccccagctgaccctacagctgtacataagtgtcatgcagcaggacgtcactgttggaagaagtacgtgtattttttatttctgcctgcatttgg

SEQ ID NO: 19198 - DNA, 192 bp, Homo sapiens
  MAP TO AP000553.1; EXPRESSED IN BRAIN, SIGNAL =   2; EXPRESSED IN BT474, SIGNAL = 1.4; EXPRESSED IN HBL100, SIGNAL = 1.7; EXPRESSED IN HELA, SIGNAL = 1.6; EXPRESSED IN BONE MARROW, SIGNAL = 2.2; EXPRESSED IN ADULT LIVER, SIGNAL = 2.4; EXPRESSED IN FETAL LIVER, SIGNAL = 1.8; EXPRESSED IN PLACENTA, SIGNAL =   2; EXPRESSED IN HEART, SIGNAL =   2; EST_HUMAN HIT: AA215687.1, EVALUE 2.60e+00; SWISSPROT HIT: P05892, EVALUE 2.20e+00; NT HIT: Z31596.1, EVALUE 1.80e+00
agcaacaggacgtgcgccaagttttcctggtggcaccaccccagcctggcctgtgacaaggggcctgcagagagtcaggcacaccggattttctttcaggccaaacagaagagcaagggtttccccaaattcgagagcacggggctgggaagaagagccaagcgccagcagtgtcctcacacctgctcctcc

SEQ ID NO: 19199 - DNA, 334 bp, Homo sapiens
  MAP TO AF165145.1; EXPRESSED IN PLACENTA, SIGNAL = 5.2; EXPRESSED IN BONE MARROW, SIGNAL = 4.6; EXPRESSED IN BRAIN, SIGNAL = 3.3; EXPRESSED IN BT474, SIGNAL = 2.3; EXPRESSED IN FETAL LIVER, SIGNAL = 3.6; EXPRESSED IN HEART, SIGNAL = 5.6; EXPRESSED IN HELA, SIGNAL = 3.6; EXPRESSED IN HBL100, SIGNAL = 3.2; EXPRESSED IN LUNG, SIGNAL = 3.2; EXPRESSED IN ADULT LIVER, SIGNAL =   5; NT HIT: gi11427201, EVALUE 0.00e+00; EST_HUMAN HIT: AA461374.1, EVALUE 0.00e+00; SWISSPROT HIT: P52583, EVALUE 5.00e-08
ccgccacgtaaagcagctggtacttgacggagatctgagatctgcccccggcctccgccctgcagtaaaccacaccctggtgctcggaatgaggttgcaaatacacaaagccccgcttcatgtcataaacaatgtccgttccattggctgggatctccttggctgggaattccctgtggagcgtgactttggccgacagcacggtcacccgacaaggaaccacagcctgtctgtccgggttcaagtagacaacatcgaagtagctgggagaaggtacaaagagttctcctttctctgcaaagggaaggaagacacaggcttattcactccggag

SEQ ID NO: 19200 - DNA, 110 bp, Homo sapiens
  MAP TO AP000519.1; EXPRESSED IN ADULT LIVER, SIGNAL =  26; EXPRESSED IN BT474, SIGNAL = 9.5; EXPRESSED IN FETAL LIVER, SIGNAL =  10; EXPRESSED IN PLACENTA, SIGNAL =  20; EXPRESSED IN HBL100, SIGNAL =  64; EXPRESSED IN HELA, SIGNAL =  79; EXPRESSED IN HEART, SIGNAL =  33; EXPRESSED IN BONE MARROW, SIGNAL =  52; EXPRESSED IN LUNG, SIGNAL =  87; EXPRESSED IN BRAIN, SIGNAL =   9; NT HIT: X13111.1, EVALUE 1.00e-55; SWISSPROT HIT: P04439, EVALUE 1.10e-02; EST_HUMAN HIT: AA593928.1, EVALUE 2.00e-55
cttcctcctccacatcacggcagcgaccacagctccagtgatcacagctccaaggagaaccaggccagcaatgatgcccacgatggggatggtgggctgggaagacagct

SEQ ID NO: 19201 - DNA, 487 bp, Homo sapiens
  MAP TO AP000514.1; EXPRESSED IN PLACENTA, SIGNAL = 1.1; EXPRESSED IN BRAIN, SIGNAL = 1.3; EXPRESSED IN FETAL LIVER, SIGNAL = 0.89; EXPRESSED IN BT474, SIGNAL = 1.6; EXPRESSED IN HEART, SIGNAL =   2; EXPRESSED IN HELA, SIGNAL = 2.4; EXPRESSED IN HBL100, SIGNAL =   1; EXPRESSED IN LUNG, SIGNAL = 0.93; EXPRESSED IN ADULT LIVER, SIGNAL = 0.91; EST_HUMAN HIT: BE910378.1, EVALUE 0.00e+00; NT HIT: AF058953.1, EVALUE 0.00e+00; SWISSPROT HIT: P53588, EVALUE 5.00e-44
ctctccatgaagttttattatatccattgtggccatagccaaaccagcaccatttactaggcagcctatacttccatcgaggccagtgtagttgagatctgccttagcagcatctttgttcctttcatcttcctgggtccagtcctgtagatcaaacattttcttttggcgataggctgaattagagtcaaaattgatctttgcatccttacacaatgcagctccatctgaatcttccaccattgaatttatttctatcatggttgcatcgtatttcagaaaaaggctgtaaagcttgatcatgttttctgctgctgaagccacaatattagatggaaatcccatcttctgtgcaagctggagagcttattcctctttgataccttctacaatatcaataggtactttaattattgcttcaggagtctcagcagcaacatcttcaatgttggccccactatgtaaacttcctattaatacaagacct

SEQ ID NO: 19202 - DNA, 383 bp, Homo sapiens
  MAP TO AC007981.24; EXPRESSED IN HELA, SIGNAL = 6.8; EXPRESSED IN PLACENTA, SIGNAL = 2.4; EXPRESSED IN HBL100, SIGNAL = 2.4; EXPRESSED IN HEART, SIGNAL =   2; EXPRESSED IN BRAIN, SIGNAL =   2; EXPRESSED IN BONE MARROW, SIGNAL = 3.6; EXPRESSED IN LUNG, SIGNAL = 7.9; EXPRESSED IN BT474, SIGNAL = 1.5; EXPRESSED IN FETAL LIVER, SIGNAL = 3.1; EXPRESSED IN ADULT LIVER, SIGNAL = 8.6; EST_HUMAN HIT: AL042278.1, EVALUE 0.00e+00; SWISSPROT HIT: P52591, EVALUE 2.00e-08; NT HIT: gi11417834, EVALUE 0.00e+00
gaactgagggtcagctggcagtgggatgaggctggccccctcctccgctttagccccggcaagcctcccgtggagctgtaggagctggagatggcatttcggttggtgcaggagctcgtccaggagatctgggatgtctggttatatctgatttctgacctctgggcatggaggtctgtctgcagaggcccgggcccgggcacaaagggagagaggcctctattgtcccgcaggggccgaaatgcagacggtgcatccccggtgacctcggggacccttctctgatcaccaggattctcttggactctagggtccttgtcctgctcaggcatccctgccccgctctccttgagggccctcaacactatcttccctggacacaa

SEQ ID NO: 19203 - DNA, 272 bp, Homo sapiens
  MAP TO AC009948.2; EXPRESSED IN ADULT LIVER, SIGNAL = 1.2; EXPRESSED IN BT474, SIGNAL = 5.5; EXPRESSED IN FETAL LIVER, SIGNAL = 3.6; EXPRESSED IN HBL100, SIGNAL = 0.91; EXPRESSED IN HEART, SIGNAL =  56; NT HIT: gi4507720, EVALUE 0.00e+00; SWISSPROT HIT: P16419, EVALUE 7.00e-09; EST_HUMAN HIT: BE150865.1, EVALUE 0.00e+00
ttccatctgatatcagcattgatgaaggcaaagttctaacagtagcctgtgctttcacgggtgagcctaccccagaagtaacatggtcctgtggtggaagaaaaatccacagtcaagaacaggggaggttccacattgaaaacacagatgacctgacaaccctgatcatcatggacgtacagaaacaagatggtggactttataccctgagtttagggaatgaatttggatctgactctgccactgtgaatatacatattcgatccatttaa

SEQ ID NO: 19204 - DNA, 325 bp, Homo sapiens
  MAP TO AP000427.1; EXPRESSED IN LUNG, SIGNAL = 0.89; EXPRESSED IN BRAIN, SIGNAL =   2; EXPRESSED IN ADULT LIVER, SIGNAL = 1.8; EXPRESSED IN BT474, SIGNAL = 3.2; EXPRESSED IN FETAL LIVER, SIGNAL = 1.2; EXPRESSED IN HELA, SIGNAL = 2.2; EXPRESSED IN HEART, SIGNAL = 1.1; NT HIT: gi11424711, EVALUE 0.00e+00; EST_HUMAN HIT: AA349755.1, EVALUE 0.00e+00; SWISSPROT HIT: Q14203, EVALUE 4.00e-03
ggcacagttcgtccctcagagagccactgtgtgccatctccatgctctgaaggagagactccagcttcttgttttggatgtttatgtccacaaaatatttctgaatgcctttatctttatcagccaagctgctccgcatggtttcgatgacctgtttgagctgtttaatctctttcctggcttctttgagtgccaactgggcctctacccggtgacactcctcctcaatccagtcctctcgcatgcgggccagctgggacttaagctccacgatttcactttccctagagtgccaagacaagcatggttaattaaaaaaaaaaaa

SEQ ID NO: 19205 - DNA, 340 bp, Homo sapiens
  MAP TO AC008040.7; EXPRESSED IN HEART, SIGNAL = 3.2; EXPRESSED IN BRAIN, SIGNAL = 2.2; EXPRESSED IN BONE MARROW, SIGNAL = 2.5; EXPRESSED IN LUNG, SIGNAL = 3.8; EXPRESSED IN ADULT LIVER, SIGNAL = 4.1; EXPRESSED IN BT474, SIGNAL =  11; EXPRESSED IN FETAL LIVER, SIGNAL =   3; EXPRESSED IN PLACENTA, SIGNAL = 3.1; EXPRESSED IN HBL100, SIGNAL =   3; EXPRESSED IN HELA, SIGNAL = 8.8; EST_HUMAN HIT: AW601763.1, EVALUE 0.00e+00; SWISSPROT HIT: P54729, EVALUE 3.80e+00; NT HIT: U93239.1, EVALUE 0.00e+00
tcctcttcacaatccccatctgtttgctgttccagttcctcttttgttatcatttcaaaatcatttccatttccactactgtgctgggatcgatcatcttccctcctgtcactgtccgtgtctgaatgccgttctccccccgagccttctgttccatgatttcctggtcctactttcccctcctcatcttcctttttctcactgtctgacttttcctcactgtcggacttctgttgctttttggtttcagacttctcatctttctttaagtctgcttttggtcctttgtattcatgtgtgtacagaggcctgaaggagtcaatgaagcccacatcagcag

SEQ ID NO: 19206 - DNA, 258 bp, Homo sapiens
  MAP TO AL034343.17; EXPRESSED IN HELA, SIGNAL = 1.2; EXPRESSED IN PLACENTA, SIGNAL = 1.7; EXPRESSED IN HBL100, SIGNAL = 1.4; EXPRESSED IN HEART, SIGNAL = 1.3; EXPRESSED IN BRAIN, SIGNAL = 2.2; EXPRESSED IN BONE MARROW, SIGNAL = 1.8; EXPRESSED IN BT474, SIGNAL = 1.3; EXPRESSED IN ADULT LIVER, SIGNAL = 1.8; EXPRESSED IN FETAL LIVER, SIGNAL = 1.6; EST_HUMAN HIT: T75472.1, EVALUE 2.30e-01; NT HIT: gi4504650, EVALUE 4.00e-02; SWISSPROT HIT: P24916, EVALUE 2.00e-22
tgtcacttgggaccccaaccggtacccctcggaagttgtacaggcccagtgtaggaacttgggctgcatcaatgctcaaggaaaggaagacatctccatgaattccgttcccatccagcaagagaccctggtcgtccggaggaagcaccaaggctgctctgtttctttccagttggagaaggtgctggtgactgttggctgcacctgcgtcacccctgtcatccaccatgtgcagtaagaggtgcatatccactcagc

SEQ ID NO: 19207 - DNA, 152 bp, Homo sapiens
  MAP TO AL079341.9; EXPRESSED IN BT474, SIGNAL = 6.4; EXPRESSED IN FETAL LIVER, SIGNAL = 6.4; EXPRESSED IN ADULT LIVER, SIGNAL = 3.7; EXPRESSED IN HELA, SIGNAL =  17; EXPRESSED IN PLACENTA, SIGNAL = 3.9; EXPRESSED IN HBL100, SIGNAL = 4.1; EXPRESSED IN HEART, SIGNAL = 3.9; EXPRESSED IN BRAIN, SIGNAL = 3.1; EXPRESSED IN BONE MARROW, SIGNAL = 1.6; EXPRESSED IN LUNG, SIGNAL = 4.4; EST_HUMAN HIT: BF690696.1, EVALUE 1.00e-44; NT HIT: gi5174718, EVALUE 8.00e-45
gtcggcatttggcttaacagatgatcaggtttcagggcaacccagtgctcctgcagaagactgttcaggaacatctgacagcattgccgcctcctcctcagtagcagctcacccaccaggagttcagccacagcaaccaccatatacagaag

SEQ ID NO: 19208 - DNA, 129 bp, Homo sapiens
  MAP TO AC007878.2; EXPRESSED IN LUNG, SIGNAL = 5.6; EXPRESSED IN ADULT LIVER, SIGNAL = 2.3; EXPRESSED IN BT474, SIGNAL = 1.3; EXPRESSED IN FETAL LIVER, SIGNAL = 1.9; EXPRESSED IN HELA, SIGNAL = 2.8; EXPRESSED IN PLACENTA, SIGNAL = 1.3; EXPRESSED IN HBL100, SIGNAL = 1.9; EXPRESSED IN HEART, SIGNAL = 1.8; EXPRESSED IN BONE MARROW, SIGNAL =   2; EXPRESSED IN BRAIN, SIGNAL = 1.8; SWISSPROT HIT: P27235, EVALUE 1.30e+00; NT HIT: X86470.1, EVALUE 1.10e+00; EST_HUMAN HIT: AI927030.1, EVALUE 2.00e-64
tgccgacctttgatcatccgacctttgatcatccgacctttgatcatctgacctttgatcatctgacctttgatcatccgacctttgatcatctgacctttgatcatctgcgtgcaggactgctcccta

SEQ ID NO: 19209 - DNA, 112 bp, Homo sapiens
  MAP TO AP000470.1; EXPRESSED IN HBL100, SIGNAL = 1.4; EXPRESSED IN HEART, SIGNAL = 1.2; EXPRESSED IN LUNG, SIGNAL = 5.3; EXPRESSED IN BONE MARROW, SIGNAL = 2.2; EXPRESSED IN BRAIN, SIGNAL = 1.2; EXPRESSED IN ADULT LIVER, SIGNAL = 3.9; EXPRESSED IN FETAL LIVER, SIGNAL =   1; EXPRESSED IN PLACENTA, SIGNAL = 1.6; EXPRESSED IN HELA, SIGNAL = 2.4; NT HIT: AL163209.2, EVALUE 2.00e-14; SWISSPROT HIT: P55859, EVALUE 6.90e+00; EST_HUMAN HIT: AA928672.1, EVALUE 7.00e-12
caatctcggacagggtttggtaatggaaaaacaagcagactgttatggtttggctctgtgtccttactgaaatttcgtgttgaattgtaatcctcagtgttggaggaggggc

SEQ ID NO: 19210 - DNA, 131 bp, Homo sapiens
  MAP TO AC004913.2; EXPRESSED IN PLACENTA, SIGNAL =   1; EXPRESSED IN HBL100, SIGNAL = 1.2; EXPRESSED IN HELA, SIGNAL = 3.9; EXPRESSED IN HEART, SIGNAL =   1; EXPRESSED IN LUNG, SIGNAL = 3.1; EXPRESSED IN BONE MARROW, SIGNAL = 0.94; EXPRESSED IN ADULT LIVER, SIGNAL = 1.3; EXPRESSED IN BT474, SIGNAL = 1.3; SWISSPROT HIT: P31129, EVALUE 3.50e-01; EST_HUMAN HIT: AI400966.1, EVALUE 6.00e-64; NT HIT: gi11421388, EVALUE 4.00e-68
ctcttttgtttgagggccataaggatcttcctgtctttcatcttttgaactactagctacaaaatgtacaggctcaaaacgaggtctcgcatggaatttggaaccggcttgctttttaggaggattttgac

SEQ ID NO: 19211 - DNA, 524 bp, Homo sapiens
  MAP TO AL035458.32; EXPRESSED IN FETAL LIVER, SIGNAL = 1.3; EXPRESSED IN HELA, SIGNAL =  15; EXPRESSED IN HEART, SIGNAL = 1.6; EXPRESSED IN LUNG, SIGNAL = 2.8; EXPRESSED IN BRAIN, SIGNAL = 1.4; EXPRESSED IN BT474, SIGNAL =  11; EXPRESSED IN ADULT LIVER, SIGNAL = 1.5; EXPRESSED IN PLACENTA, SIGNAL = 1.7; EXPRESSED IN HBL100, SIGNAL = 2.2; EXPRESSED IN BONE MARROW, SIGNAL = 1.5; NT HIT: gi8051635, EVALUE 0.00e+00; EST_HUMAN HIT: BE886490.1, EVALUE 0.00e+00; SWISSPROT HIT: P33307, EVALUE 3.30e+00
agccttaatgaggaatctgttgactccactaatggagaagtttaaaattctgttagaaaatttgatgctggcacaagatgaagaaaggcaagcctctctagcagactgtctcaaccatgctgttggatttgcaagtcgaactagtaaagctttcagcaacaagcagactgtgaaacagtgtggctgttccgaagtttatctggactgtttacagacattcttgctggccctcagttgtcccttacaaaagggtattctcagaagtggagtctgtactttccttcatcgaatgattatttgcctggaggaagaagtttttccgttcatcccatctgcttcagaacatatactcaaagattgtgaagcaaaagacctccaggagttcattcctcttatcaaccagattacggccaaattcaaggtacaagtatccccgtttttacaacagatgttcatgcccctgcttcatgcaatttttgaagtgctactctggcccgcagaagaaaatgaccagtctgctgctt

SEQ ID NO: 19212 - DNA, 218 bp, Homo sapiens
  MAP TO AC010854.1; EXPRESSED IN BONE MARROW, SIGNAL = 1.1; EXPRESSED IN LUNG, SIGNAL =  10; EXPRESSED IN BRAIN, SIGNAL = 5.2; EXPRESSED IN ADULT LIVER, SIGNAL =   1; EXPRESSED IN BT474, SIGNAL = 1.2; EXPRESSED IN HEART, SIGNAL = 0.84; NT HIT: gi4755124, EVALUE 1.00e-120; EST_HUMAN HIT: N51694.1, EVALUE 1.00e-118; SWISSPROT HIT: P55087, EVALUE 4.00e-37
caatgatggcccccaggcactgggctgcgatgtagaagacagacttggcgatgctgatcttcctggtgcacaccatggccacagtcactgcagggttgatgtggccaccgctgatatggccaaagcactgcaccatggttgcaatgctgagtccaaagcaaagggagatgagaaccatgtcgaccggtaaaggcttttctgttccaccccagttgatg

SEQ ID NO: 19213 - DNA, 203 bp, Homo sapiens
  MAP TO AC007728.1; EXPRESSED IN BT474, SIGNAL = 4.9; EXPRESSED IN HEART, SIGNAL =   3; EXPRESSED IN LUNG, SIGNAL = 2.7; EXPRESSED IN BRAIN, SIGNAL = 2.1; EXPRESSED IN FETAL LIVER, SIGNAL = 1.2; EXPRESSED IN ADULT LIVER, SIGNAL = 4.9; EXPRESSED IN PLACENTA, SIGNAL = 2.4; EXPRESSED IN HELA, SIGNAL = 8.7; EXPRESSED IN HBL100, SIGNAL = 2.9; EXPRESSED IN BONE MARROW, SIGNAL = 3.1; NT HIT: AL163246.2, EVALUE 2.00e-64; EST_HUMAN HIT: AI675772.1, EVALUE 1.00e-60; SWISSPROT HIT: P41997, EVALUE 1.00e-10
ctgacctctagccaactgactaccatttcttcaagaatcttgacaactttctgcaggaaaaatgcttccacaaccaggaggatgcagaaaatgctttccaagagtttgttgaatcccgaagcatgaatttttatgctacaggaataaacaaacttatttcttattggcaaaaatgtgttgattttaatggttcctattttgat

SEQ ID NO: 19214 - DNA, 99 bp, Homo sapiens
  MAP TO AL121658.1; EXPRESSED IN BT474, SIGNAL = 2.9; EXPRESSED IN ADULT LIVER, SIGNAL = 1.3; EXPRESSED IN HELA, SIGNAL = 3.3; EXPRESSED IN HBL100, SIGNAL =   2; EXPRESSED IN HEART, SIGNAL = 1.5; EXPRESSED IN LUNG, SIGNAL =   1; EXPRESSED IN BONE MARROW, SIGNAL = 0.95; EST_HUMAN HIT: BE880626.1, EVALUE 3.00e-44; SWISSPROT HIT: P44586, EVALUE 4.70e-01; NT HIT: AJ404962.1, EVALUE 8.30e-01
ggtagagctggacagacagggatttgtatatgtttttatcaaccaagagaaagaggtcaactaagatatgtggaacaaaaagtaggaattacttttaaa

SEQ ID NO: 19215 - DNA, 284 bp, Homo sapiens
  MAP TO AL035413.19; EXPRESSED IN HBL100, SIGNAL = 4.1; EXPRESSED IN HEART, SIGNAL = 4.4; EXPRESSED IN LUNG, SIGNAL = 3.2; EXPRESSED IN FETAL LIVER, SIGNAL = 4.8; EXPRESSED IN ADULT LIVER, SIGNAL = 6.5; EXPRESSED IN PLACENTA, SIGNAL =  13; EXPRESSED IN HELA, SIGNAL = 5.8; EXPRESSED IN BRAIN, SIGNAL = 5.2; EXPRESSED IN BONE MARROW, SIGNAL = 6.2; EXPRESSED IN BT474, SIGNAL =   3; NT HIT: gi11422498, EVALUE 0.00e+00; EST_HUMAN HIT: BE875511.1, EVALUE 0.00e+00; SWISSPROT HIT: Q03350, EVALUE 1.20e+00
gggaaggtagatgcagcaaagcagagaatggagatcaagcccaggcccacgctggcctcgtcccagccgtcctgggcacattcacccaacacatcccatatccactggatggagccactggggcagctggagaagttgcgggagcccagtttcttccagaccatggctgtggaggaggggcccccggccaggcagggctgcaccggagggagggcgctggtgttctgaggccagcaagggttctacagggaggaagggaggaggctttcagcactgggaggtcc

SEQ ID NO: 19216 - DNA, 197 bp, Homo sapiens
  MAP TO AC007308.13; EXPRESSED IN BONE MARROW, SIGNAL = 1.1; EXPRESSED IN FETAL LIVER, SIGNAL = 5.5; EXPRESSED IN HBL100, SIGNAL = 1.6; EXPRESSED IN HELA, SIGNAL = 2.6; EXPRESSED IN HEART, SIGNAL = 0.86; EXPRESSED IN BRAIN, SIGNAL = 1.2; EXPRESSED IN LUNG, SIGNAL =   3; EXPRESSED IN BT474, SIGNAL = 1.5; EXPRESSED IN ADULT LIVER, SIGNAL = 1.5; NT HIT: gi4759153, EVALUE 1.00e-107; SWISSPROT HIT: O95721, EVALUE 3.00e-32; EST_HUMAN HIT: BE732460.1, EVALUE 1.00e-107
gagctcgcccgtcagcgaggagtcctggagcgcacagagaagatggtggacaagatggaccaagatttgaagatcagccagaaacacatcaatagcattaagagcgtgtttggggggctggtcaattacttcaaatccaaaccagtagagaccccacctgaacagaatggcaccctcacctcccagcccaacaacag

SEQ ID NO: 19217 - DNA, 282 bp, Homo sapiens
  MAP TO AC011307.1; EXPRESSED IN ADULT LIVER, SIGNAL = 1.5; EXPRESSED IN BT474, SIGNAL = 1.4; EXPRESSED IN HBL100, SIGNAL =   1; EXPRESSED IN PLACENTA, SIGNAL = 1.1; EXPRESSED IN HEART, SIGNAL = 0.97; EXPRESSED IN LUNG, SIGNAL = 0.91; EXPRESSED IN BRAIN, SIGNAL = 1.2; EXPRESSED IN BONE MARROW, SIGNAL = 1.1; NT HIT: AF245505.1, EVALUE 0.00e+00; EST_HUMAN HIT: AW888221.1, EVALUE 0.00e+00; SWISSPROT HIT: P70211, EVALUE 1.00e-06
cccatggagaaacccatcttccacgacccgatcagcgagaagatcacggccatggcgggccacaccatcagcctcaactgctctgccgcggggaccctgacacccagcctggtgtgggtccttcccaatggcaccgatctgcagagtggacagcagctgcagcgcttctaccacaaggctgacggcatgctacacattagcggtctctcctcggtggacgccggggcctaccgctgcgtggcccgcaatgccgcggcgacacggagaggctggtctccctga

SEQ ID NO: 19218 - DNA, 390 bp, Homo sapiens
  MAP TO AC002992.1; EXPRESSED IN LUNG, SIGNAL =  12; EXPRESSED IN BRAIN, SIGNAL = 0.9; EXPRESSED IN BONE MARROW, SIGNAL = 2.2; EXPRESSED IN BT474, SIGNAL = 1.8; EXPRESSED IN FETAL LIVER, SIGNAL = 1.8; EXPRESSED IN ADULT LIVER, SIGNAL =   2; EXPRESSED IN HBL100, SIGNAL = 1.7; EXPRESSED IN PLACENTA, SIGNAL = 1.9; EXPRESSED IN HEART, SIGNAL = 1.2; NT HIT: gi4502238, EVALUE 1.00e-52; SWISSPROT HIT: P51689, EVALUE 4.00e-15; EST_HUMAN HIT: BE393688.1, EVALUE 1.00e-52
gtagcacgattctggaaatgttgctgtggctgtttttgggaagctgaggctgccccagtgtgcatgtgtgtgtgcagatggctgtgcatattcatatacctatgcacaaatacatccaggtatatgtatagactgggcagtttccggcaaaatcctaatgatgccttttacttacaggtgggaagggcataggaggatgggaagatgggatccatgtgcccgggattttccactggcccagggtgctcctggctggctgagtgattggagagcccacgagcctgatggacgtgttccctcctgtggtccagctggcaggcggcaaggtgccccaggacaggtacgtggcaataaggctgcgtgttccctattttttttaaattgttctta

SEQ ID NO: 19219 - DNA, 106 bp, Homo sapiens
  MAP TO AC007666.12; EXPRESSED IN PLACENTA, SIGNAL =  13; EXPRESSED IN BONE MARROW, SIGNAL =  11; EXPRESSED IN FETAL LIVER, SIGNAL =  12; EXPRESSED IN HBL100, SIGNAL = 7.5; EXPRESSED IN HELA, SIGNAL =  12; EXPRESSED IN HEART, SIGNAL =  11; EXPRESSED IN BRAIN, SIGNAL = 8.7; EXPRESSED IN LUNG, SIGNAL =  18; EXPRESSED IN BT474, SIGNAL =   5; EXPRESSED IN ADULT LIVER, SIGNAL =  10; NT HIT: gi4502316, EVALUE 2.00e-53; SWISSPROT HIT: P36543, EVALUE 1.80e-02; EST_HUMAN HIT: AI205151.1, EVALUE 4.00e-53
attttcttctgctgctcaatctgtttctctttcttctcataatattccataatctttagtctttgggtttgcacaagccgacctttctctatgttgaactcttctt

SEQ ID NO: 19220 - DNA, 126 bp, Homo sapiens
  MAP TO AC004970.2; EXPRESSED IN BT474, SIGNAL = 1.7; EXPRESSED IN HBL100, SIGNAL = 2.1; EXPRESSED IN BONE MARROW, SIGNAL = 2.4; EXPRESSED IN LUNG, SIGNAL = 2.1; EXPRESSED IN ADULT LIVER, SIGNAL = 1.9; EXPRESSED IN FETAL LIVER, SIGNAL =   3; EXPRESSED IN PLACENTA, SIGNAL = 3.1; EXPRESSED IN HEART, SIGNAL = 1.6; EXPRESSED IN HELA, SIGNAL = 1.6; EXPRESSED IN BRAIN, SIGNAL = 2.5; NT HIT: Z36534.1, EVALUE 2.40e-01; EST_HUMAN HIT: AW819964.1, EVALUE 1.10e+00
ccaccaccaccaccaccatcatcatcatcatcatcattttaatcttatggttaatgtatctttatgatcaacatttctctgttttctgcaactttatctttgagatgtccattttgctcagaccac

SEQ ID NO: 19221 - DNA, 123 bp, Homo sapiens
  MAP TO AC006323.3; EXPRESSED IN BRAIN, SIGNAL = 1.2; EXPRESSED IN BONE MARROW, SIGNAL =   1; EXPRESSED IN LUNG, SIGNAL = 3.9; EXPRESSED IN ADULT LIVER, SIGNAL =   1; EXPRESSED IN BT474, SIGNAL = 2.5; EXPRESSED IN FETAL LIVER, SIGNAL = 0.88; EXPRESSED IN HBL100, SIGNAL = 1.5; EXPRESSED IN PLACENTA, SIGNAL = 1.3; EXPRESSED IN HELA, SIGNAL = 2.5; EXPRESSED IN HEART, SIGNAL = 1.3; NT HIT: gi11420159, EVALUE 3.00e-53; EST_HUMAN HIT: AW163175.1, EVALUE 2.00e-54; SWISSPROT HIT: Q13616, EVALUE 6.00e-14
ctgaatcagtagtttgcggtcttcctcgatgtttttgtgtgtggtttcttgttcctgcttctgttcggttttcattggcacattgatgttaacccttaatttcttactatcaagaaaaatgag

SEQ ID NO: 19222 - DNA, 165 bp, Homo sapiens
  MAP TO AC009474.1; EXPRESSED IN BONE MARROW, SIGNAL = 2.3; EXPRESSED IN HELA, SIGNAL = 2.2; EXPRESSED IN LUNG, SIGNAL = 1.6; EXPRESSED IN BRAIN, SIGNAL =   2; EXPRESSED IN BT474, SIGNAL = 1.3; EXPRESSED IN ADULT LIVER, SIGNAL = 2.8; EXPRESSED IN FETAL LIVER, SIGNAL = 2.2; EXPRESSED IN PLACENTA, SIGNAL = 2.8; EXPRESSED IN HEART, SIGNAL = 2.9; EXPRESSED IN HBL100, SIGNAL = 2.6; SWISSPROT HIT: P25621, EVALUE 2.20e+00; NT HIT: gi11418370, EVALUE 1.50e+00
ccaaaacaaaagtttcagtccctgtcctcagaagcttccagaccaatgaacaacatgaacaccaaaaggcaggtacaacacagtgtagctaatgctgtgagcactggatgggtacagagggcgtcatccagctcagcctagagttcaggacagacttctcagagg

SEQ ID NO: 19223 - DNA, 909 bp, Homo sapiens
  MAP TO AL008723.8; EXPRESSED IN PLACENTA, SIGNAL = 1.9; EXPRESSED IN HELA, SIGNAL = 1.6; EXPRESSED IN HBL100, SIGNAL = 2.2; EXPRESSED IN HEART, SIGNAL = 2.3; EXPRESSED IN LUNG, SIGNAL = 9.3; EXPRESSED IN BONE MARROW, SIGNAL =   3; EXPRESSED IN BRAIN, SIGNAL = 1.7; EXPRESSED IN ADULT LIVER, SIGNAL = 2.3; EXPRESSED IN BT474, SIGNAL = 3.3; EXPRESSED IN FETAL LIVER, SIGNAL =   2; SWISSPROT HIT: P48038, EVALUE 1.50e-01; NT HIT: gi11417846, EVALUE 1.00e-35
atgggtaaggatagagaatgggatggggactccaaaactggagtatttgaaattttactgagaaaagggccgggactagaccaaaaagtcctcaacaaagaaggctcaacaacaaagacaagaggcagaaccagcctttgtcccccatgcctagccctgggaaagccggctatgggcaggagggagctggaagctgaggatgtctctgagggtgagggactgcaaaggggtgggggcggtggtggccagagagatgccagagagcaaatggcacccatggcttctttacctttggacatcttcagcatcttcggcgtcttcgggaggctgaggtactgcatgagttgggccttcttagctttcaaatccaatttggcaggctttgcagtggtggatgctggtgctgtggctgccacagtctcaggaatctcacactcatggcagggtcccacatctggcctgcagcagtcacagttgaggcccccgctggggcccaggcagcaagtcagtttgctccccattgggcacctaaacacacaaaaaagtccaagaggcacaaggacagaatgtagtcggagctcctcctccttctacggccagctaccgactgaaggctgctggccctggccgttgcctagtaaccacaaaacctcctatgtcacctggttgccaggaaacaaccaagtcaggctagtggctcacaatggccgaccccacagacccaccaaatgcctcacaatgcccatccctgctgctgcccaccttgtggccaccctgtccctctgtggtgactgcattattcatcctgggctgcctgagctttccagtcctgagaaaagtgcaggggttggaggttgttattggaagtcaccctgggcaatgaactcaatagaaaaccctggttactaa

SEQ ID NO: 19224 - DNA, 433 bp, Homo sapiens
  MAP TO AC010684.1; EXPRESSED IN BT474, SIGNAL = 8.6; EXPRESSED IN FETAL LIVER, SIGNAL = 3.8; EXPRESSED IN HEART, SIGNAL = 4.3; EXPRESSED IN LUNG, SIGNAL =  13; EXPRESSED IN BRAIN, SIGNAL = 3.7; EXPRESSED IN ADULT LIVER, SIGNAL = 3.2; EXPRESSED IN PLACENTA, SIGNAL = 3.7; EXPRESSED IN HELA, SIGNAL = 6.4; EXPRESSED IN HBL100, SIGNAL = 9.4; EXPRESSED IN BONE MARROW, SIGNAL = 3.4; NT HIT: gi11426146, EVALUE 6.00e-24; EST_HUMAN HIT: AI191496.1, EVALUE 4.00e-25; SWISSPROT HIT: P17008, EVALUE 2.00e-25
gagacatgccatctaaggactcgttggctgcagtctgtgcagatcttcacatacaaggagatggccatagctgtggtgctctgcagatgtggcagtggcttcatcaggatgaacgaggggcccctggagatgatcaggctgctcacactgcaatacaagctactggaattaggtctgcttctggacaaggaacagcttgctggaatggacatccatgttcgtgtgaagggtagtggtcatgtggttcagatttatgctgtccttcagtacatctccaaagccctggtaccctgttacccaaaatatgtagatgaggcttccgaggagatcaaagacaccctcaccagaccttgctggtggttcacccctgttgctatgaatccaagaaatttgcaggccctggtgcctgtgctcactaccagaaatcatagca

SEQ ID NO: 19225 - DNA, 165 bp, Homo sapiens
  MAP TO AL021807.1; EXPRESSED IN PLACENTA, SIGNAL = 1.9; EXPRESSED IN HBL100, SIGNAL = 1.3; EXPRESSED IN HEART, SIGNAL = 2.2; EXPRESSED IN FETAL LIVER, SIGNAL = 2.2; EXPRESSED IN ADULT LIVER, SIGNAL =   2; EXPRESSED IN HELA, SIGNAL = 1.9; EXPRESSED IN BRAIN, SIGNAL = 1.7; EXPRESSED IN LUNG, SIGNAL = 1.6; EXPRESSED IN BONE MARROW, SIGNAL = 1.7; EXPRESSED IN BT474, SIGNAL = 1.6; EST_HUMAN HIT: AI470367.1, EVALUE 3.00e-08; SWISSPROT HIT: Q36664, EVALUE 6.80e+00; NT HIT: K00216.1, EVALUE 2.00e-08
cgcagagtactaaccactatacgatcacggcacgccaccagaggccgctgcttgtggggctcttcctttgcttatttcccagaaacgtctgtttttgtcatctaaagaatggtgcagtctttcgtccttatttacacacctacccagtttacttccttatccact

SEQ ID NO: 19226 - DNA, 88 bp, Homo sapiens
  MAP TO AC011086.1; EXPRESSED IN BONE MARROW, SIGNAL = 1.9; EXPRESSED IN HELA, SIGNAL = 2.1; EXPRESSED IN HEART, SIGNAL =   2; EXPRESSED IN LUNG, SIGNAL =   7; EXPRESSED IN BRAIN, SIGNAL = 1.6; EXPRESSED IN BT474, SIGNAL =   1; EXPRESSED IN ADULT LIVER, SIGNAL = 1.8; EXPRESSED IN FETAL LIVER, SIGNAL = 5.2; EXPRESSED IN PLACENTA, SIGNAL = 1.4; EXPRESSED IN HBL100, SIGNAL = 1.3; NT HIT: gi5174458, EVALUE 1.00e-42; SWISSPROT HIT: P28067, EVALUE 2.00e-03; EST_HUMAN HIT: AV759433.1, EVALUE 2.00e-42
agaagtggtaacatctgtagcagcgcagctccttggttctgttcatgacccataccttcttgccacacagtaggtaggagctaccaac

SEQ ID NO: 19227 - DNA, 103 bp, Homo sapiens
  MAP TO AC011307.1; EXPRESSED IN BT474, SIGNAL = 1.3; EXPRESSED IN HBL100, SIGNAL = 2.2; EXPRESSED IN HEART, SIGNAL = 3.8; EXPRESSED IN LUNG, SIGNAL = 9.3; EXPRESSED IN BRAIN, SIGNAL = 4.1; EXPRESSED IN ADULT LIVER, SIGNAL = 7.3; EXPRESSED IN FETAL LIVER, SIGNAL = 1.9; EXPRESSED IN PLACENTA, SIGNAL = 4.8; EXPRESSED IN HELA, SIGNAL =  17; EXPRESSED IN BONE MARROW, SIGNAL = 2.4; NT HIT: AL163210.2, EVALUE 4.00e-33; EST_HUMAN HIT: AA157730.1, EVALUE 3.00e-31; SWISSPROT HIT: P21414, EVALUE 4.00e-04
ttatggaggtattgtgaagggaggtattgaggataggagaatatatgggtttggcaccatggggtggataggcaaaataatttggttgataaggtgcagatct

SEQ ID NO: 19228 - DNA, 403 bp, Homo sapiens
  MAP TO AL021392.5; EXPRESSED IN BONE MARROW, SIGNAL = 8.2; EXPRESSED IN BT474, SIGNAL = 4.2; EXPRESSED IN HBL100, SIGNAL = 5.1; EXPRESSED IN LUNG, SIGNAL = 7.9; EXPRESSED IN BRAIN, SIGNAL = 8.9; EXPRESSED IN ADULT LIVER, SIGNAL =  12; EXPRESSED IN FETAL LIVER, SIGNAL =  11; EXPRESSED IN PLACENTA, SIGNAL =  12; EXPRESSED IN HEART, SIGNAL = 9.7; EXPRESSED IN HELA, SIGNAL = 9.8; NT HIT: AF072758.1, EVALUE 1.00e+00; EST_HUMAN HIT: R21349.1, EVALUE 3.70e-01; SWISSPROT HIT: P80646, EVALUE 5.00e+00
gctcattctgggagttacatccttggctgccaacatggctctcaccttgctccagaggagtactttggagagaattcagggtgtacattttctggctaagccatggaatggggcctggcccctgctgcttactcctcagctctcatgcctgtttccaagcttcagggtcctgcagcagtcccccttcctggtgacctcatgggttcctctgagggcagccagtgagatgctgcgactcagtgcagccggaatgcacagcagaaagagtgagggggcacctgtgtgtgtgctggtgcactggggtgtgttgagggtgttggtagtgggaagagccctagaattgttcaagccagtcatctggattggacgttacctagaaaactcccagatttcctctccgttt

SEQ ID NO: 19229 - DNA, 148 bp, Homo sapiens
  MAP TO AC010876.1; EXPRESSED IN BT474, SIGNAL = 1.1; EXPRESSED IN PLACENTA, SIGNAL =   3; EXPRESSED IN BONE MARROW, SIGNAL = 3.1; EXPRESSED IN FETAL LIVER, SIGNAL = 2.8; EXPRESSED IN ADULT LIVER, SIGNAL = 2.2; EXPRESSED IN HEART, SIGNAL = 2.5; EXPRESSED IN HELA, SIGNAL = 1.5; EXPRESSED IN HBL100, SIGNAL = 1.5; EXPRESSED IN BRAIN, SIGNAL = 1.9; EXPRESSED IN LUNG, SIGNAL = 1.5; EST_HUMAN HIT: AA021158.1, EVALUE 2.00e+00; NT HIT: AL161565.2, EVALUE 2.80e-01
caacaacaaccacaaccacaaccaccaccaccaccaccaccaccaccaccaccaccaccaccatgaactccaaggggtaggagtaactcttttgaagaccacaaccatagcccaaagtcaagtcctatattaaaatcagtaaaacaca

SEQ ID NO: 19230 - DNA, 261 bp, Homo sapiens
  MAP TO AC010905.1; EXPRESSED IN BT474, SIGNAL = 1.3; EXPRESSED IN HBL100, SIGNAL = 1.2; EXPRESSED IN LUNG, SIGNAL = 2.2; EXPRESSED IN BONE MARROW, SIGNAL = 2.2; EXPRESSED IN ADULT LIVER, SIGNAL = 4.5; EXPRESSED IN PLACENTA, SIGNAL =   3; EXPRESSED IN HEART, SIGNAL =   3; EXPRESSED IN HELA, SIGNAL = 3.7; EXPRESSED IN BRAIN, SIGNAL = 1.7; EST_HUMAN HIT: AW262358.1, EVALUE 3.00e-40; NT HIT: AL163246.2, EVALUE 6.00e-47; SWISSPROT HIT: P19028, EVALUE 1.00e-05
gtgacccactaacaacatatttgcttcctgtttctgtgacattatgttctgctggcctagaggtcttagtttcagagggaggaatgctgccaccaggaaacatagcaatgattcaattaaactggaaattaagattgccacctggacactttgcacttctcctacctttacaccaacagcctaagaagggaggtacagtgttggctgggatgattgactcagactatcaagattctatcagtctactactctgcaacagag

SEQ ID NO: 19231 - DNA, 528 bp, Homo sapiens
  MAP TO AL031281.6; EXPRESSED IN ADULT LIVER, SIGNAL = 3.6; EXPRESSED IN PLACENTA, SIGNAL = 3.3; EXPRESSED IN BRAIN, SIGNAL = 2.8; EXPRESSED IN BT474, SIGNAL = 1.6; EXPRESSED IN FETAL LIVER, SIGNAL = 2.8; EXPRESSED IN HEART, SIGNAL = 2.5; EXPRESSED IN HELA, SIGNAL = 2.8; EXPRESSED IN HBL100, SIGNAL = 1.9; EXPRESSED IN LUNG, SIGNAL = 2.1; EXPRESSED IN BONE MARROW, SIGNAL =   3; NT HIT: AY002955.1, EVALUE 8.40e-02; EST_HUMAN HIT: BE299890.1, EVALUE 3.40e-01; SWISSPROT HIT: P53727, EVALUE 2.50e+00
gaaacacaactgccctccctggcagcaaaagggggctgagagaaaccaagagccggaagtcctcctaaatggcccagggaaaaggtgaaccttccactgacttacccattctgggcacctagactcagaactctggaagaagggggaggtcatctggtataacagtcccaatggctgccctcaaaagttctctgcttgtacctatttcaaacaacctaaacagccctgaaatcgaccaattttctccaagcatcatcccacacacagacatttcactattccctgacagtctaactttaattctgcttgtagggatggaatatatctgtctaaaacagaggatgtcttggtctgcaagttccccaacaacagaatctacaaggcttgactcatgacccaatttaagtaaaaaataaaaataaataaaacagacaaggagaacgaagactgatacttggctgaaggttaactgaaaggcaatttcatgacagtcaagcagactggggtctagggaattggcagcaatta

SEQ ID NO: 19232 - DNA, 101 bp, Homo sapiens
  MAP TO AC011448.1; EXPRESSED IN ADULT LIVER, SIGNAL = 3.9; EXPRESSED IN PLACENTA, SIGNAL = 1.8; EXPRESSED IN BONE MARROW, SIGNAL = 2.6; EXPRESSED IN BRAIN, SIGNAL = 1.7; EXPRESSED IN FETAL LIVER, SIGNAL = 0.97; EXPRESSED IN BT474, SIGNAL = 1.2; EXPRESSED IN HEART, SIGNAL = 2.2; EXPRESSED IN HELA, SIGNAL = 1.7; EXPRESSED IN HBL100, SIGNAL = 1.7; EXPRESSED IN LUNG, SIGNAL = 1.6; EST_HUMAN HIT: BE966735.2, EVALUE 1.30e+00; NT HIT: AE000882.1, EVALUE 3.40e+00; SWISSPROT HIT: P19532, EVALUE 2.40e+00
ggtcctgatcctgcaccctgtggtacccacgggccgcctcttgaagggcaatcccatgagccggggtcctggcgtgcttctcgatttaacccacagttctc

SEQ ID NO: 19233 - DNA, 347 bp, Homo sapiens
  MAP TO AL031673.16; EXPRESSED IN BONE MARROW, SIGNAL = 1.3; EXPRESSED IN BRAIN, SIGNAL = 1.2; EXPRESSED IN ADULT LIVER, SIGNAL = 1.5; EXPRESSED IN BT474, SIGNAL = 1.2; EXPRESSED IN FETAL LIVER, SIGNAL = 0.9; EXPRESSED IN PLACENTA, SIGNAL = 1.8; EXPRESSED IN HBL100, SIGNAL = 1.9; EXPRESSED IN HELA, SIGNAL = 1.7; EXPRESSED IN HEART, SIGNAL = 1.3; EST_HUMAN HIT: BE536921.1, EVALUE 0.00e+00; SWISSPROT HIT: P33999, EVALUE 1.00e-08
agccaatagaaaattggctgaagaatgttatttcctttggaaatctacacgtttacagcatatgacactagcagaagacgtcaaagccatgcttactgaacttcgaaaggaggtccgcctacttctattaacgaatggggacagacagacccagagggagaagattgaggcttgtgcctgtcagtcctattttgacgctgttgttgtaggtggagagcagagagaggagaaaccagcaccgtccatattttattactgctgcaatcttctcggagtacaacctggggactgtgtgatggtcggtgacacattagaaaccgacatccaaggaggcctcaatgcaggat

SEQ ID NO: 19234 - DNA, 274 bp, Homo sapiens; identical to SEQ ID NO: 19038
  MAP TO AP000050.1; EXPRESSED IN BONE MARROW, SIGNAL = 1.4; EXPRESSED IN BRAIN, SIGNAL = 1.2; EXPRESSED IN LUNG, SIGNAL = 5.1; EXPRESSED IN ADULT LIVER, SIGNAL = 1.7; EXPRESSED IN FETAL LIVER, SIGNAL = 0.95; EXPRESSED IN HELA, SIGNAL = 0.91; EXPRESSED IN PLACENTA, SIGNAL = 1.1; EXPRESSED IN HBL100, SIGNAL =   1; EXPRESSED IN HEART, SIGNAL = 1.3; SWISSPROT HIT: P37246, EVALUE 2.50e+00; NT HIT: AL163280.2, EVALUE 4.00e-08; EST_HUMAN HIT: BE222239.1, EVALUE 3.00e-09

SEQ ID NO: 19235 - DNA, 110 bp, Homo sapiens
  MAP TO AL109823.6; EXPRESSED IN PLACENTA, SIGNAL = 5.5; EXPRESSED IN HELA, SIGNAL = 5.2; EXPRESSED IN HBL100, SIGNAL = 3.1; EXPRESSED IN HEART, SIGNAL = 4.7; EXPRESSED IN LUNG, SIGNAL = 7.9; EXPRESSED IN BONE MARROW, SIGNAL = 4.6; EXPRESSED IN BRAIN, SIGNAL = 4.2; EXPRESSED IN ADULT LIVER, SIGNAL = 5.2; EXPRESSED IN BT474, SIGNAL =   2; EXPRESSED IN FETAL LIVER, SIGNAL = 4.6; NT HIT: AB007866.2, EVALUE 1.00e-55; SWISSPROT HIT: P34446, EVALUE 6.90e+00; EST_HUMAN HIT: BF095716.1, EVALUE 2.00e-55
gatgcagcgttccatcacgtccatggctatttggatctgcaatggcagtggtggctccacatctggacgggtgtcattctcatccactttgggagggactgactgttcct

SEQ ID NO: 19236 - DNA, 189 bp, Homo sapiens
  MAP TO AP000313.1; EXPRESSED IN BONE MARROW, SIGNAL = 2.8; EXPRESSED IN HBL100, SIGNAL = 1.8; EXPRESSED IN HELA, SIGNAL = 1.8; EXPRESSED IN HEART, SIGNAL = 2.2; EXPRESSED IN BRAIN, SIGNAL = 2.8; EXPRESSED IN LUNG, SIGNAL = 1.6; EXPRESSED IN BT474, SIGNAL = 1.4; EXPRESSED IN ADULT LIVER, SIGNAL = 2.7; EXPRESSED IN FETAL LIVER, SIGNAL = 4.1; EXPRESSED IN PLACENTA, SIGNAL = 2.4; NT HIT: AF114487.1, EVALUE 5.00e-90; EST_HUMAN HIT: AW367884.1, EVALUE 4.50e-01; SWISSPROT HIT: P18588, EVALUE 1.30e-02
atcctggaaaacacccctgaaaaccacccggaccacagccacttgaagcacgccctggagaaggcggaagagctctgttcccaggtgaacgaaggggtgcgggagaaggagaactctgaccggctggagtggatccaggcccacgtgcagtgtgaaggcctgtctgaggtagccaaccttggggctggg

SEQ ID NO: 19237 - DNA, 678 bp, Homo sapiens
  MAP TO AC011307.1; EXPRESSED IN BONE MARROW, SIGNAL = 3.2; EXPRESSED IN BT474, SIGNAL =  11; EXPRESSED IN HBL100, SIGNAL = 3.8; EXPRESSED IN BRAIN, SIGNAL =   3; EXPRESSED IN LUNG, SIGNAL =   3; EXPRESSED IN ADULT LIVER, SIGNAL =  17; EXPRESSED IN FETAL LIVER, SIGNAL = 9.3; EXPRESSED IN PLACENTA, SIGNAL = 3.7; EXPRESSED IN HEART, SIGNAL = 3.8; EXPRESSED IN HELA, SIGNAL =  56; NT HIT: gi4557336, EVALUE 0.00e+00; EST_HUMAN HIT: AU143277.1, EVALUE 0.00e+00; SWISSPROT HIT: P09034, EVALUE 1.00e-60
ctcctcttgctctgtcacctgcttctgttgcacggggcgcaagtggtttactgcaccgtgaagacagatttcagatgcagggaactcgcacctccaatcccagatgctatgtccagcaaaggatccatggttctggcccacagtggtggcctggacacctcctgcatgcttgtgtggctgaaggaacaaggacatgttgtcattgcctacctggccaacattggccagaaggaagacttcgagaaagacaggaagaaggcatgcaagcttggggccaaaaaggtgttcattgaggaagtcagcagggagtttgtggaggagttcatctggccggccatccagtccagcgccctgtatgaggactactacctcctgggcacctctctggctaggctctgcatcgcccacaaacaagtggaaattacccagcaggaggggcccaagtacgtatcctatggcatcatgggaaaggagaacgatcaggtccagtttgagctcacctgctcactggcccccagattaaggtcattgctccctggaggatgcccgagttctactactggctcaatggctgcaatgatctgatggaatacacaaagcaacatcggattcccatcccagtcactctcaagaacccgtggatcatggacgagaacctcatgtgtatcagctatgagg

SEQ ID NO: 19238 - DNA, 1000 bp, Homo sapiens
  MAP TO AC007688.15; EXPRESSED IN PLACENTA, SIGNAL = 1.2; EXPRESSED IN HELA, SIGNAL =  35; EXPRESSED IN HEART, SIGNAL = 1.2; EXPRESSED IN BRAIN, SIGNAL = 1.8; EXPRESSED IN BT474, SIGNAL = 1.8; EXPRESSED IN HBL100, SIGNAL = 3.9; EXPRESSED IN LUNG, SIGNAL =  31; EXPRESSED IN BONE MARROW, SIGNAL = 1.5; EXPRESSED IN ADULT LIVER, SIGNAL = 1.2; EXPRESSED IN FETAL LIVER, SIGNAL = 0.9; EST_HUMAN HIT: BE292896.1, EVALUE 0.00e+00; NT HIT: gi11435925, EVALUE 0.00e+00; SWISSPROT HIT: P22815, EVALUE 8.00e-06
gccaggctgcatctgtaccttgagtgatttcctcttgagagtaggctctgttctccacaccatagctcttcttcacgagttgaggtttacagaaagcatcctcaacaggataatccatggggtttcgttgctttgtgagcagccaaaactcgggactaacataagccaacaggaacacccagccattggcagccaaggcggagctgaggatggtgtcatcccacctgcggtcaaagtcaggaagcatgagcagggtgatccaggccacccagatggcaatggagaggagcatcgtgaggtagatgtgggccccatgtctcttccagcccgtgaaggaaccacagaaggtgaaggaggacatgaggaaggtcagcgccatcaagaagaggacgtaggtgagcaggaggacaaagtcttcattgcgacgaggagcggaaagctcagaaaagacattgacgttggtcctattcatggtcaggacaatatattcaatagcgataacatcctggactaggctgaagcccacggccagacccagaatcaccaacagggaaaggggcttcctcccccggacgagcttggtcagactgacagcatgagccagcaggcaggagaagcagatggaaaagaggatcccaaagaggaagaagcgtgtgggccctgtgctcccgtccagtccgatgatgaaggcgaaggtgaggccaaagatgcccaacacacccaggaggaagagaaactgagtaggcagcatttttcgcctgttggagtcctgcaccttgcagacgaggatcgggagagtgagcatgaaggccaccgaggtcacaaccccggctgtggccaccgtttctaggacgatgccccaagcttcagccttatcacaaagtctgtagtacttggatttcaggccattgcggcaaccatcagggactgttgtagccattctggacctgcagaaaaggaatgttggagtggggagaaggtattgaatctcctaacacag

SEQ ID NO: 19239 - DNA, 289 bp, Homo sapiens
  MAP TO Z82188.2; EXPRESSED IN HBL100, SIGNAL = 0.93; EXPRESSED IN PLACENTA, SIGNAL =   1; EXPRESSED IN HELA, SIGNAL = 1.3; EXPRESSED IN HEART, SIGNAL = 0.99; EXPRESSED IN BRAIN, SIGNAL = 1.1; EXPRESSED IN BONE MARROW, SIGNAL = 1.4; EXPRESSED IN LUNG, SIGNAL = 4.3; EXPRESSED IN ADULT LIVER, SIGNAL = 1.2; NT HIT: U91328.1, EVALUE 3.00e-15; SWISSPROT HIT: P23468, EVALUE 1.70e+00; EST_HUMAN HIT: BF223041.1, EVALUE 0.00e+00
ccaaagtcagccaattggggctgtagtctatttcctttgggttgagggtgttttctggtatcgtcccttcgtggttcactagaaaaaatggtactggaaaggggtcccaatccagacccaaagagagggttcctggactcgcacaagaaagaatttgaggtgagtccacagagtgaagtcaaagcaagtttacagagaagtaaagaaacaaaagaatggctactccatagacagaccacccctgagcgctgctggttggctgtttttatggttatttcttgattatatg

SEQ ID NO: 19240 - DNA, 241 bp, Homo sapiens
  MAP TO Z97055.1; EXPRESSED IN HBL100, SIGNAL = 9.2; EXPRESSED IN HELA, SIGNAL =  13; EXPRESSED IN HEART, SIGNAL =  17; EXPRESSED IN ADULT LIVER, SIGNAL =  21; EXPRESSED IN PLACENTA, SIGNAL =  20; EXPRESSED IN BRAIN, SIGNAL =  24; EXPRESSED IN LUNG, SIGNAL =  14; EXPRESSED IN BONE MARROW, SIGNAL =  22; EXPRESSED IN FETAL LIVER, SIGNAL =  13; EXPRESSED IN BT474, SIGNAL = 5.2; EST_HUMAN HIT: AW999822.1, EVALUE 9.00e-04; NT HIT: AF078545.2, EVALUE 2.00e-09; SWISSPROT HIT: P08547, EVALUE 7.00e-10
aatggaaaaatatcccatgttcatggataagatggcaatactctccaaactgatctatagcttcaacccaatgtttatcaaaatcccaactgcctttcttgaagaaattgacaagttggtattgaaattcatatacaaatgcaagggacccagaatagccaaaatgatcatgaaaaataaaaataagatcatgaaaaataaaaataaagttggaggatttatacttcccgatttcaaaact

SEQ ID NO: 19241 - DNA, 1075 bp, Homo sapiens
  MAP TO AL078472.1; EXPRESSED IN BONE MARROW, SIGNAL =  27; EXPRESSED IN LUNG, SIGNAL =  19; EXPRESSED IN BT474, SIGNAL =  34; EXPRESSED IN FETAL LIVER, SIGNAL = 7.1; EXPRESSED IN ADULT LIVER, SIGNAL =  28; EXPRESSED IN HELA, SIGNAL =  43; EXPRESSED IN PLACENTA, SIGNAL =  20; EXPRESSED IN HBL100, SIGNAL =  25; EXPRESSED IN HEART, SIGNAL =  18; EXPRESSED IN BRAIN, SIGNAL =  21; EST_HUMAN HIT: AV739739.1, EVALUE 1.00e+00; NT HIT: AL163201.2, EVALUE 2.00e-19
gacagtatctggaaatacccaaagacaagatctctaaagaagtcattggctagtggtggatcagtgcagtgtggtggtggtggtgatggtggtgatggtggtggtagtggtagtggtggtgatgctggtggtggtggtggtgatggtggtggtggtgatagtggtggtggtgatggtggtggtggtggtggtagtggtgatggtggtggtggtggtgatggtggtgatggtggtggtggtgatggtggtggtggtggtgatggtgatggtggtggtggtgatggtggtgatggtagtggtgatggtggtggtggtggtgatggtggtgatggtgatggtggtggtggtgatggtggtgatggtagtggtggtagtggtactggtggtggtggtgatggtggtggtgctggtgatggtggtagtggtggtggtggtagtggtgatggtggtggtggtggtggtagtggtagtggtgatggtgatgatggtggtggtggtggtggtcgtggttttagtggtgatggtggtggtggtggtggtggtggtagtggtggtgatgctggtggtggtggtggtagtggtgatggtggtggtggtgatggtggtggtggtgatggtggtggtggtgatggtggtggtggtggtggtagtggtgatggtggtggtggtgatggtggtggtggtgatggtggtggtggtgatggtggtggtggtgatggtggtggtagtggtggtagtggtgatggtggtagtggtgatggtggtggtggtgatggtggtggtggtggtggtggtagtggtgatggtggtagtggtcatggtggtggtggtggtggtcatggttttagtggtgatggtggtggtggtggtggtagtggtggtggtggttgtggtagtggtggtggtggtggtggtagtggtgatggtggtggtggtagtggtagtggtgatggtggtggtggtggtggtcgtggttttagtggtgatggtggtggtggtggtggtggtggtactggtggtgttatgcacataggggataaaacagcagaggcattaagcttgagtattctatagt

SEQ ID NO: 19242 - DNA, 550 bp, Homo sapiens
  MAP TO AC011307.1; EXPRESSED IN PLACENTA, SIGNAL = 8.3; EXPRESSED IN HELA, SIGNAL = 8.3; EXPRESSED IN HBL100, SIGNAL =   6; EXPRESSED IN HEART, SIGNAL = 7.6; EXPRESSED IN BONE MARROW, SIGNAL = 8.6; EXPRESSED IN LUNG, SIGNAL = 7.9; EXPRESSED IN BRAIN, SIGNAL = 7.9; EXPRESSED IN ADULT LIVER, SIGNAL = 9.4; EXPRESSED IN BT474, SIGNAL = 4.8; EXPRESSED IN FETAL LIVER, SIGNAL = 8.6; EST_HUMAN HIT: AW937782.1, EVALUE 0.00e+00; SWISSPROT HIT: O35136, EVALUE 9.00e-12; NT HIT: AF245505.1, EVALUE 0.00e+00
ttttgatagtagaatcaaggtgtttgccaacaggaccctggtggtgaaatcaatgacagacaaagacgccggagattacctgtgtgtagctcgaaataaggttggtgatgactgcgtggtgctcaaggtggatgtgatgatgaaaccggccaagattgaacacaaggaggagaacgaccacaaagtcttctacaggggtgacctgaaagtggactgtgtggccactggacttcccaatcccgagatctcctggagcctcctggatgggagtctggtgaactccttcatgcagtcagatgacagtggtggacgcaccaagcactatgtggtcttcaacaatgggacactctacttcagtgaagtggggatgagggaggaaggagactacacctgctttgctgaaaatcaggttgggaaggatgagatgagagtcagagtcaagatggtgacacctgccaccatctggaacaagacttacttggcagttcaggtaccctatggagatgtggtcactgtaacctgtgaggccaaaggagaacccatgcccaag

SEQ ID NO: 19243 - DNA, 186 bp, Homo sapiens
  MAP TO AL031283.15; EXPRESSED IN BRAIN, SIGNAL = 5.5; EXPRESSED IN BONE MARROW, SIGNAL = 5.5; EXPRESSED IN LUNG, SIGNAL = 3.4; EXPRESSED IN BT474, SIGNAL = 4.5; EXPRESSED IN FETAL LIVER, SIGNAL = 4.1; EXPRESSED IN ADULT LIVER, SIGNAL = 4.7; EXPRESSED IN HELA, SIGNAL = 8.4; EXPRESSED IN PLACENTA, SIGNAL = 5.7; EXPRESSED IN HBL100, SIGNAL = 4.8; EXPRESSED IN HEART, SIGNAL = 4.1; NT HIT: AF038391.1, EVALUE 2.80e-02; EST_HUMAN HIT: AW410192.1, EVALUE 7.00e-78; SWISSPROT HIT: P55007, EVALUE 8.50e-02
ctcccggaagctcagcttgctgtcaaagtcctcatccacctccttgatcatgtttttcaggcccaggtgggtctgaggggccccaagtttctccatcatgagttttagctccatcaggtcgatgaagccgtcccgcccggcatcatacctgcagatgcaaaaagagaggacatcttggcactggct

SEQ ID NO: 19244 - DNA, 169 bp, Homo sapiens
  MAP TO AC007028.2; EXPRESSED IN ADULT LIVER, SIGNAL =   1; EXPRESSED IN BT474, SIGNAL = 0.95; EXPRESSED IN FETAL LIVER, SIGNAL = 1.5; EXPRESSED IN HBL100, SIGNAL =   1; EXPRESSED IN HELA, SIGNAL = 1.7; EXPRESSED IN HEART, SIGNAL = 0.84; EXPRESSED IN LUNG, SIGNAL =  18; EST_HUMAN HIT: BE814995.1, EVALUE 1.00e-26; SWISSPROT HIT: P35763, EVALUE 8.80e+00
atcggccctcacacttgctgttattcgtgaacacaaagatatagtcattcttcttctgcagcaaatattgatatgttttctcgagatgtgtgtggaaagactgcagaagattatgcctctgaggctgggaattcagtgtaagtctttacataaaaaggctagtgaacac

SEQ ID NO: 19245 - DNA, 176 bp, Homo sapiens
  MAP TO AC007378.2; EXPRESSED IN PLACENTA, SIGNAL = 6.1; EXPRESSED IN HBL100, SIGNAL = 2.6; EXPRESSED IN HEART, SIGNAL = 2.3; EXPRESSED IN FETAL LIVER, SIGNAL = 1.5; EXPRESSED IN ADULT LIVER, SIGNAL = 1.8; EXPRESSED IN HELA, SIGNAL = 9.1; EXPRESSED IN BRAIN, SIGNAL = 1.5; EXPRESSED IN LUNG, SIGNAL = 3.3; EXPRESSED IN BONE MARROW, SIGNAL = 1.3; EXPRESSED IN BT474, SIGNAL = 1.3; NT HIT: gi10092638, EVALUE 8.00e-92; SWISSPROT HIT: P35440, EVALUE 2.00e-13; EST_HUMAN HIT: BF334188.1, EVALUE 6.00e-72
tgtgccacttcagtgggaaggcctatgccgacgaggagcggtgggaccttgacagctgcacccactgctactgcctgcagggccagaccctctgctcgaccgtcagctgcccccctctgccctgtgttgagcccatcaacgtggaaggaagttgctgcccaatgtgtccaggtatc

SEQ ID NO: 19246 - DNA, 130 bp, Homo sapiens
  MAP TO AC007250.2; EXPRESSED IN PLACENTA, SIGNAL = 0.97; EXPRESSED IN ADULT LIVER, SIGNAL = 1.3; EXPRESSED IN FETAL LIVER, SIGNAL = 0.98; EXPRESSED IN HEART, SIGNAL = 0.98; EXPRESSED IN HELA, SIGNAL =   1; EXPRESSED IN BRAIN, SIGNAL =   1; EXPRESSED IN LUNG, SIGNAL = 1.3; EXPRESSED IN BONE MARROW, SIGNAL = 0.95; NT HIT: AJ006345.1, EVALUE 1.60e-02; EST_HUMAN HIT: AW135751.1, EVALUE 1.20e+00
ttctttctctttttttttctcttcctcctcctcctcctcttctttctcttcttctttaaaaaaagtaatgatgaggttgttagatttgctagacatagtagtgatacagaagggcggcagggaagtgctg

SEQ ID NO: 19247 - DNA, 486 bp, Homo sapiens
  MAP TO AC007308.13; EXPRESSED IN BONE MARROW, SIGNAL = 1.9; EXPRESSED IN BT474, SIGNAL = 1.2; EXPRESSED IN HBL100, SIGNAL = 4.2; EXPRESSED IN BRAIN, SIGNAL = 1.7; EXPRESSED IN LUNG, SIGNAL = 0.97; EXPRESSED IN ADULT LIVER, SIGNAL = 2.4; EXPRESSED IN FETAL LIVER, SIGNAL = 1.3; EXPRESSED IN PLACENTA, SIGNAL = 1.8; EXPRESSED IN HEART, SIGNAL = 2.7; EXPRESSED IN HELA, SIGNAL = 1.7; EST_HUMAN HIT: BE714930.1, EVALUE 1.20e-01; SWISSPROT HIT: P06719, EVALUE 2.00e-06; NT HIT: AF105150.1, EVALUE 6.60e-02
cttcgagtctgtaggggggctctgattcccccctggcttgcgccaaccgcatgtggagaaggggaagatgcctggggttggggagcaggaggccaggccagagggcagcagctgggatgctgggacttgtcagatcctggataaacctcaaaggtgaaggtgatgggatgtgctgagagtcatctgtgggatgtgcataagagggagtcaaagacgtctgagcagacagaaggacctcgctggcatctacagtgaagggaagggccatgctggcatctacagtgaagggagggaccttgctggcatctacagtaaagggagggacctcgctggcatctacagtgaatggagggacctcgctggcatctacagtgaatggagggacctcgctggcatctacagtgaagggaagggtcacactggcatctacagtaaagggagggacctcactggcatctacagtgatgagagggacctcgctgacat

SEQ ID NO: 19248 - DNA, 181 bp, Homo sapiens
  MAP TO AC007638.1; EXPRESSED IN PLACENTA, SIGNAL = 1.3; EXPRESSED IN HEART, SIGNAL = 1.2; EXPRESSED IN BRAIN, SIGNAL = 1.2; EXPRESSED IN BONE MARROW, SIGNAL = 0.93; EXPRESSED IN LUNG, SIGNAL = 0.9; EXPRESSED IN FETAL LIVER, SIGNAL = 1.1; EXPRESSED IN ADULT LIVER, SIGNAL = 1.2; SWISSPROT HIT: O35604, EVALUE 2.90e+00; EST_HUMAN HIT: AW821909.1, EVALUE 1.10e-01; NT HIT: X00412.1, EVALUE 4.20e-01
  unsure 18
gcattagaggtggggaangcatctgatacctgggtgtcacctggtaccattgtgctggcctctacctgatgctcaggtatggttacctggggtgcagcttacctgtctctctcctttgccatggtgctgatgccatcaatatctgcctgctggctgtctttgtctttaatggagatacagg

SEQ ID NO: 19249 - DNA, 193 bp, Homo sapiens
  MAP TO AC009481.1; EXPRESSED IN HELA, SIGNAL = 2.4; EXPRESSED IN PLACENTA, SIGNAL = 1.6; EXPRESSED IN HEART, SIGNAL = 1.2; EXPRESSED IN BONE MARROW, SIGNAL = 1.4; EXPRESSED IN BRAIN, SIGNAL = 1.2; EXPRESSED IN ADULT LIVER, SIGNAL = 1.9; EXPRESSED IN FETAL LIVER, SIGNAL = 1.2; EST_HUMAN HIT: AV704878.1, EVALUE 4.30e-02; SWISSPROT HIT: Q9ZLW0, EVALUE 2.20e+00
gattccctctattccctctgtctgcttggatctccttcccctctgtcagcttgttcatttcggctggctcgcagtgcatgatctgcttacttccagagaggacctgaggaagctccactcctatagcaacagggctatgcagttcatttggcaactcatcatgtactgcctcgtgatcaatattctgttgcca

SEQ ID NO: 19250 - DNA, 518 bp, Homo sapiens
  MAP TO AC008132.19; EXPRESSED IN LUNG, SIGNAL = 3.4; EXPRESSED IN BRAIN, SIGNAL = 0.96; EXPRESSED IN ADULT LIVER, SIGNAL = 1.4; EXPRESSED IN FETAL LIVER, SIGNAL = 0.97; EXPRESSED IN PLACENTA, SIGNAL = 1.2; EXPRESSED IN HEART, SIGNAL = 0.92; SWISSPROT HIT: P18899, EVALUE 2.00e-05; NT HIT: AE004762.1, EVALUE 3.30e-01; EST_HUMAN HIT: AL110383.1, EVALUE 3.00e-54
ctccccatgaggacaccgtacacaacatcactaacgaggatgcctcacacgatatcactaacgaggacgctgtccacggcatcgctaacgaggccgccgcccagggcatcgccaacgaggacgccgcccagggcatcgccaacgaggacgccgcccacggaatcgccagcgaggacgccgcccagggcatcgccaacgaggtcgccgcccagggcatcgccaacgaggacgccgcccagggcatcgccaacgaggacgccgtccatggcatcgccaacgaggacgctgcccacggcattgctaacgaggatgccgtgcacggcatcgctaatgaggactccgtatacgacatcgctaatgaggatgccatatatgacatcgctaatgacaccgtacaaggcacgctaacgaggatgctgtacacgacatcgctaatgaggacaccatacaaggcatcggtaatgaggacgttgtatatgacatcgctaacaaggacactctacaagccgtcgctaaca

SEQ ID NO: 19251 - DNA, 114 bp, Homo sapiens
  MAP TO AC008280.2; EXPRESSED IN PLACENTA, SIGNAL = 1.3; EXPRESSED IN HBL100, SIGNAL = 2.3; EXPRESSED IN HEART, SIGNAL = 1.9; EXPRESSED IN ADULT LIVER, SIGNAL = 1.1; EXPRESSED IN HELA, SIGNAL = 3.2; EXPRESSED IN BRAIN, SIGNAL = 0.92; EXPRESSED IN LUNG, SIGNAL = 0.99; EXPRESSED IN BONE MARROW, SIGNAL = 2.1; EXPRESSED IN BT474, SIGNAL = 2.3; EST_HUMAN HIT: AA345375.1, EVALUE 3.00e-20; SWISSPROT HIT: O09167, EVALUE 3.00e-04; NT HIT: U14967.1, EVALUE 8.00e-20
ggcctcgagaaaacacagccggacccggcttggttctgggaacaaatctgtaagaaaggtgatattgtagacatcaagggagtgggcactgttcaaataggaatgccccccaag

SEQ ID NO: 19252 - DNA, 189 bp, Homo sapiens
  MAP TO AC009496.1; EXPRESSED IN ADULT LIVER, SIGNAL = 1.2; EXPRESSED IN BT474, SIGNAL = 3.7; EXPRESSED IN FETAL LIVER, SIGNAL = 1.9; EXPRESSED IN PLACENTA, SIGNAL = 1.8; EXPRESSED IN HELA, SIGNAL = 3.4; EXPRESSED IN HBL100, SIGNAL = 3.4; EXPRESSED IN HEART, SIGNAL = 2.4; EXPRESSED IN LUNG, SIGNAL = 5.4; EXPRESSED IN BONE MARROW, SIGNAL = 2.3; EXPRESSED IN BRAIN, SIGNAL = 1.6; EST_HUMAN HIT: AV705479.1, EVALUE 2.60e+00; NT HIT: AF214117.1, EVALUE 3.80e-01; SWISSPROT HIT: P55465, EVALUE 5.60e-01
aagagatgggtggaaggtcagaaaccttcagaacaagtacatgatgtggagctcagcatgggtgtccaagccttcctggtggaatatcttggaggatacatcttctactttgctcagggctggccaaaatgtcttaaaacccagccgggactaattgccttgttgttggtggtggtaaggggcttcttt

SEQ ID NO: 19253 - DNA, 259 bp, Homo sapiens
  MAP TO AC009226.2; EXPRESSED IN BONE MARROW, SIGNAL = 1.3; EXPRESSED IN ADULT LIVER, SIGNAL =   2; EXPRESSED IN FETAL LIVER, SIGNAL = 1.9; EXPRESSED IN PLACENTA, SIGNAL = 1.7; EXPRESSED IN HBL100, SIGNAL = 0.95; EXPRESSED IN HELA, SIGNAL = 0.94; EXPRESSED IN HEART, SIGNAL = 1.2; EXPRESSED IN BRAIN, SIGNAL = 1.6; SWISSPROT HIT: Q02336, EVALUE 5.20e+00; EST_HUMAN HIT: AA311850.1, EVALUE 2.40e-01; NT HIT: AF044300.1, EVALUE 1.30e-01
gccttaccaaaatatagtaaatgaagaaacatttattcttgaaaatctactaaaactaaaaagtacaagtgttagtaatattcgaaccaagaccaacatacttccttccctctcccagctcaggaaggtggagatttcactccaaactgcagctgaaaacaaagggcttcttctccctcctgctaccagtctgagggctattttcctgggaggagtagggcatttggtatttctcatctttactccagctttctgttgc

SEQ ID NO: 19254 - DNA, 126 bp, Homo sapiens
  MAP TO AC009308.3; EXPRESSED IN PLACENTA, SIGNAL =   2; EXPRESSED IN HBL100, SIGNAL = 1.6; EXPRESSED IN BONE MARROW, SIGNAL = 1.8; EXPRESSED IN HELA, SIGNAL = 1.4; EXPRESSED IN HEART, SIGNAL = 1.9; EXPRESSED IN BRAIN, SIGNAL =   2; EXPRESSED IN LUNG, SIGNAL = 1.7; EXPRESSED IN BT474, SIGNAL = 1.1; EXPRESSED IN ADULT LIVER, SIGNAL =   2; EXPRESSED IN FETAL LIVER, SIGNAL = 1.6; SWISSPROT HIT: Q9ZLD9, EVALUE 5.40e+00; NT HIT: U52111.2, EVALUE 4.00e-03
ctgttcatgttcctcctcaatggaggagccccgttcatcccatttaggctccaacacctgctgttggccatggccacaccctgccctccacacagacgctccagatgcttgccttgcttggcccat

SEQ ID NO: 19255 - DNA, 176 bp, Homo sapiens
  MAP TO AC010134.1; EXPRESSED IN BONE MARROW, SIGNAL = 5.5; EXPRESSED IN BRAIN, SIGNAL = 3.7; EXPRESSED IN BT474, SIGNAL = 2.5; EXPRESSED IN HBL100, SIGNAL = 3.1; EXPRESSED IN HEART, SIGNAL = 6.1; EXPRESSED IN LUNG, SIGNAL =  16; EXPRESSED IN ADULT LIVER, SIGNAL = 7.5; EXPRESSED IN FETAL LIVER, SIGNAL = 4.2; EXPRESSED IN PLACENTA, SIGNAL = 6.8; EXPRESSED IN HELA, SIGNAL = 4.7; NT HIT: AL163280.2, EVALUE 1.00e-07; SWISSPROT HIT: P08547, EVALUE 8.00e-07; EST_HUMAN HIT: AI866582.1, EVALUE 4.00e-05
ttccacagccttgggcagttgcgcccaagcttctgcacagcaaagcagacaatcaacagagtgaaaagacaaaatcagaagaaaatatttgcaaactacatattagacaaggggttaacgtcagaaacatacaaggaactcaaacaactcaactgcagaaaacaaataatccaatt

SEQ ID NO: 19256 - DNA, 107 bp, Homo sapiens
  MAP TO AC009857.1; EXPRESSED IN BT474, SIGNAL = 2.6; EXPRESSED IN ADULT LIVER, SIGNAL = 6.2; EXPRESSED IN PLACENTA, SIGNAL = 6.4; EXPRESSED IN BONE MARROW, SIGNAL = 4.1; EXPRESSED IN FETAL LIVER, SIGNAL = 6.8; EXPRESSED IN HEART, SIGNAL = 4.1; EXPRESSED IN HELA, SIGNAL = 2.7; EXPRESSED IN HBL100, SIGNAL = 3.2; EXPRESSED IN BRAIN, SIGNAL = 4.5; EXPRESSED IN LUNG, SIGNAL = 2.2; EST_HUMAN HIT: BE927117.1, EVALUE 3.40e-01; NT HIT: AL163249.2, EVALUE 5.90e-02
cctggcgggatgtgtgacaggagtatggctcgcctgttcagttgctgacactgctcaaagccctgatgggaggcggggcatgcagatggatagatacaggagctcag

SEQ ID NO: 19257 - DNA, 91 bp, Homo sapiens
  MAP TO AC009813.2; EXPRESSED IN ADULT LIVER, SIGNAL = 1.6; EXPRESSED IN PLACENTA, SIGNAL = 0.94; EXPRESSED IN HEART, SIGNAL = 1.1; NT HIT: gi11321594, EVALUE 2.00e-44; EST_HUMAN HIT: BE394987.1, EVALUE 1.10e+00; SWISSPROT HIT: Q13797, EVALUE 1.00e-11
gttggtgtgaacacggcacttaaacacagccccaggagacttcactgaagggctgtatttggaatctgcctttggtgcgcccacaaggacc

SEQ ID NO: 19258 - DNA, 307 bp, Homo sapiens
  MAP TO AC009955.1; EXPRESSED IN PLACENTA, SIGNAL = 1.1; EXPRESSED IN HBL100, SIGNAL = 1.3; EXPRESSED IN HELA, SIGNAL = 1.4; EXPRESSED IN HEART, SIGNAL =   1; EXPRESSED IN BT474, SIGNAL = 1.4; NT HIT: U51473.1, EVALUE 4.10e-02; EST_HUMAN HIT: BF344378.1, EVALUE 1.00e-121; SWISSPROT HIT: P35917, EVALUE 1.00e-03
agccccgcctccggttcacacggcccctgcaggacgtggagggccgtgagcacgggattgccgtgctggaatgtaaagtacccaactcccgcatccccacggcctggttccgtgaggaccagcggctgctgccctgccgcaagtacgagcagatcgaagagggcactgtccggcgcctcatcatccacaggctgaaggcagacgatgatggtatctacctgtgcgagatgcggggccgggtgcgcaccgtggccaacgtcacagtcaaaggtcagctggcccgtggggaagaggctgaggcggaggc

SEQ ID NO: 19259 - DNA, 114 bp, Homo sapiens
  MAP TO AC010968.1; EXPRESSED IN ADULT LIVER, SIGNAL = 1.3; EXPRESSED IN BT474, SIGNAL =   1; EXPRESSED IN FETAL LIVER, SIGNAL = 1.1; EXPRESSED IN HELA, SIGNAL = 1.1; EXPRESSED IN HEART, SIGNAL = 0.97; EXPRESSED IN LUNG, SIGNAL =  17; NT HIT: gi11429681, EVALUE 5.00e-58; EST_HUMAN HIT: R31173.1, EVALUE 8.00e-54
ttagaaaaggtagatatttctagtacagagggttatgatttgttcatcacacagctcaaagatggtttaaaaaatacatctcatgagactgcagcaaaccacaaagttgctaag

SEQ ID NO: 19260 - DNA, 116 bp, Homo sapiens
  MAP TO AC010985.1; EXPRESSED IN PLACENTA, SIGNAL = 1.1; EXPRESSED IN HEART, SIGNAL =   1; EXPRESSED IN LUNG, SIGNAL = 2.6; EXPRESSED IN FETAL LIVER, SIGNAL =   1; EXPRESSED IN ADULT LIVER, SIGNAL = 0.95; NT HIT: AL163278.2, EVALUE 3.40e+00; EST_HUMAN HIT: AW303433.1, EVALUE 4.10e+00
ctattataattggaacagttgtcaggatcacagagcattggctaactattttgcaaatcagtgtggacttcttgcagaggagaatgcatgaaacttggagtcttaaaatgttgatg

SEQ ID NO: 19261 - DNA, 85 bp, Homo sapiens
  MAP TO AC011074.1; EXPRESSED IN HEART, SIGNAL = 0.91; EXPRESSED IN LUNG, SIGNAL = 1.9; EXPRESSED IN BRAIN, SIGNAL = 0.92; EXPRESSED IN ADULT LIVER, SIGNAL = 0.96; EXPRESSED IN FETAL LIVER, SIGNAL = 0.93; EXPRESSED IN PLACENTA, SIGNAL = 0.97; EXPRESSED IN HBL100, SIGNAL =   1; EST_HUMAN HIT: AI765769.1, EVALUE 1.80e-01; NT HIT: AB018261.1, EVALUE 3.70e-02
aatacatttaacaaagtaagtgcaaacttatactctggaaaccacaacaaaaaattgtttaaagaaatcacagaaggcctaagtg

SEQ ID NO: 19262 - DNA, 305 bp, Homo sapiens
  MAP TO AC011416.1; EXPRESSED IN PLACENTA, SIGNAL = 3.6; EXPRESSED IN HBL100, SIGNAL = 1.8; EXPRESSED IN HEART, SIGNAL = 3.9; EXPRESSED IN BONE MARROW, SIGNAL = 2.7; EXPRESSED IN HELA, SIGNAL = 2.4; EXPRESSED IN BRAIN, SIGNAL = 3.5; EXPRESSED IN LUNG, SIGNAL = 2.8; EXPRESSED IN BT474, SIGNAL =  35; EXPRESSED IN ADULT LIVER, SIGNAL = 3.6; EXPRESSED IN FETAL LIVER, SIGNAL = 2.8; SWISSPROT HIT: P05156, EVALUE 9.40e+00; NT HIT: U67539.1, EVALUE 7.40e-01; EST_HUMAN HIT: BF129635.1, EVALUE 1.10e+00
ttacttcatagattctttaaatttttcttcttcttcttcttcttcttcttcttcttcttcttcttcttcttcttcttcttcttcttcttcttcttcttcttcttcttcttcttcttcttcttcttcttcttcttcttcttcttcttcttcttcttcttcttcttcttcttcttcttcttcttcttcttcttctctctctttctctcgctctctctcccccaccccccaaccacacacacactttgctgtcttttggaataataatactttctgtgagtttttttttctcctctaatggtctcatt

SEQ ID NO: 19263 - DNA, 181 bp, Homo sapiens
  MAP TO AC011474.1; EXPRESSED IN PLACENTA, SIGNAL = 4.9; EXPRESSED IN HELA, SIGNAL = 5.1; EXPRESSED IN HEART, SIGNAL = 4.6; EXPRESSED IN BONE MARROW, SIGNAL =   4; EXPRESSED IN BT474, SIGNAL = 4.1; EXPRESSED IN HBL100, SIGNAL = 3.1; EXPRESSED IN BRAIN, SIGNAL = 4.6; EXPRESSED IN LUNG, SIGNAL = 9.2; EXPRESSED IN ADULT LIVER, SIGNAL = 5.7; EXPRESSED IN FETAL LIVER, SIGNAL = 4.1; NT HIT: AB003670.1, EVALUE 3.60e-01; EST_HUMAN HIT: AW137782.1, EVALUE 2.00e-03; SWISSPROT HIT: Q28295, EVALUE 9.80e-01
atggcttggtggtcggcagtgcaatgaccacaaccatgttggcttttattactcacaacaccggggatcgttcccagagcagtgcttttctaaacactggagaaagcagggcttgcattgggctggggagctgagtcattgcatgcagaggcggagtcaaggcgatcgtagatcatgcttc

SEQ ID NO: 19264 - DNA, 151 bp, Homo sapiens
  MAP TO AC011199.1; EXPRESSED IN LUNG, SIGNAL = 1.5; EXPRESSED IN BRAIN, SIGNAL = 1.3; EXPRESSED IN BT474, SIGNAL =   1; EXPRESSED IN PLACENTA, SIGNAL = 0.96; EXPRESSED IN BONE MARROW, SIGNAL = 0.99; EXPRESSED IN ADULT LIVER, SIGNAL = 0.98; EXPRESSED IN FETAL LIVER, SIGNAL =   1; EXPRESSED IN HEART, SIGNAL = 0.93; SWISSPROT HIT: Q9Z8F3, EVALUE 5.10e+00; EST_HUMAN HIT: AW806537.1, EVALUE 5.10e-01; NT HIT: AF127244.1, EVALUE 3.40e-01
gcatggatgtggggagactgctgactattgcagaagcctgaaaagaggtgatgcctatggttggtgttcacggactcatcctccaactctgagggttttgcctgattatcctccctacacaggaggagaagggctcagcccagctgcaggc

SEQ ID NO: 19265 - DNA, 200 bp, Homo sapiens
  MAP TO AL009050.9; EXPRESSED IN BT474, SIGNAL = 2.2; EXPRESSED IN FETAL LIVER, SIGNAL = 1.8; EXPRESSED IN HBL100, SIGNAL = 2.4; EXPRESSED IN HELA, SIGNAL = 1.7; EXPRESSED IN HEART, SIGNAL = 2.4; EXPRESSED IN ADULT LIVER, SIGNAL = 1.6; EXPRESSED IN PLACENTA, SIGNAL = 2.2; EXPRESSED IN BRAIN, SIGNAL = 3.2; EXPRESSED IN LUNG, SIGNAL =  15; EXPRESSED IN BONE MARROW, SIGNAL = 1.9; NT HIT: AF003529.1, EVALUE 8.00e-09; EST_HUMAN HIT: AW852001.1, EVALUE 1.00e-10; SWISSPROT HIT: P08547, EVALUE 3.00e-09
attgtttgaggaaccactgtatggtttttccatagcagctgcacaattttacattcctaccaacagtgcaaatgggttccagtttctccacattttctccaacatttgttattctcctcctcctcctccctcctcctcctcctcctgctcctcctcctcctcctcctcctcctctgctgactgatcagggtgatggttgc

SEQ ID NO: 19266 - DNA, 144 bp, Homo sapiens
  MAP TO AL035665.22; EXPRESSED IN BONE MARROW, SIGNAL = 2.2; EXPRESSED IN LUNG, SIGNAL = 0.89; EXPRESSED IN ADULT LIVER, SIGNAL = 6.7; EXPRESSED IN BT474, SIGNAL =   1; EXPRESSED IN FETAL LIVER, SIGNAL =  10; EXPRESSED IN PLACENTA, SIGNAL =  15; EXPRESSED IN HBL100, SIGNAL = 1.9; EXPRESSED IN HELA, SIGNAL = 4.6; EXPRESSED IN HEART, SIGNAL =   3; EXPRESSED IN BRAIN, SIGNAL = 2.4; NT HIT: M13792.1, EVALUE 2.00e-05; EST_HUMAN HIT: AI685151.1, EVALUE 3.00e-04; SWISSPROT HIT: Q05118, EVALUE 1.70e+00
agaacgagtgtttggccagggaaggcatctctgaggaggtgacactggacagtatcctgcaaacctgcaggcattttgcaggagaagatggaggaacagcattccaggtggatggaccggcagaggcaaaggcctgtaggcctg

SEQ ID NO: 19267 - DNA, 172 bp, Homo sapiens
  MAP TO AF165424.1; EXPRESSED IN HEART, SIGNAL = 2.7; EXPRESSED IN BRAIN, SIGNAL = 1.1; EXPRESSED IN BONE MARROW, SIGNAL = 1.8; EXPRESSED IN LUNG, SIGNAL = 2.2; EXPRESSED IN ADULT LIVER, SIGNAL = 2.8; EXPRESSED IN FETAL LIVER, SIGNAL = 1.9; EXPRESSED IN HELA, SIGNAL = 1.9; EXPRESSED IN PLACENTA, SIGNAL = 2.4; EXPRESSED IN HBL100, SIGNAL = 1.5; EST_HUMAN HIT: AW516809.1, EVALUE 2.00e-19; NT HIT: U50871.1, EVALUE 1.00e-22; SWISSPROT HIT: P28263, EVALUE 3.80e+00
aaaagtggaacaactcaaagcaaggggtatgggagttgctttcaggtcacaggtagatttcaaatttttctgattagcaattggttgaaagatttatcgatagaaagaaatgtttggattatgataaggggttgtggagaccaaagttttatcatgcagatgaagcctccag

SEQ ID NO: 19268 - DNA, 284 bp, Homo sapiens
  MAP TO AL121587.4; EXPRESSED IN HBL100, SIGNAL = 0.91; EXPRESSED IN HEART, SIGNAL =   1; EXPRESSED IN BRAIN, SIGNAL = 2.2; EXPRESSED IN BONE MARROW, SIGNAL =   1; EXPRESSED IN LUNG, SIGNAL = 1.2; EXPRESSED IN ADULT LIVER, SIGNAL = 1.3; SWISSPROT HIT: P02840, EVALUE 6.30e-02; EST_HUMAN HIT: BE296613.1, EVALUE 0.00e+00; NT HIT: J04569.1, EVALUE 4.40e-02
cgtgggcagctggcccgacagcaggtggctgtcctgtgctagcatgttggacaccatgatggctgggaggtccatggcctgataggagtaggcagggagcagaccgttgggggtgaggccgtggcacagcgagtggtagctggcttcgtggtcccccaggtgcaggagggatggctccgggaggttgggaggtgttatcggggggatctcatagtcttcgttgttctcgctctggccgttgtaggtctaaaacatcaaaaagacatgtcggtgggggtcagtgc

SEQ ID NO: 19269 - DNA, 196 bp, Homo sapiens
  MAP TO AL049553.14; EXPRESSED IN FETAL LIVER, SIGNAL = 0.9; EXPRESSED IN HBL100, SIGNAL = 0.99; EXPRESSED IN HEART, SIGNAL = 1.1; EXPRESSED IN LUNG, SIGNAL = 1.1; EXPRESSED IN ADULT LIVER, SIGNAL = 1.4; EXPRESSED IN PLACENTA, SIGNAL = 1.1; EXPRESSED IN BRAIN, SIGNAL = 0.97; EXPRESSED IN BONE MARROW, SIGNAL = 0.97; EST_HUMAN HIT: AA402242.1, EVALUE 3.00e-02; SWISSPROT HIT: P00506, EVALUE 3.70e+00; NT HIT: AL161545.2, EVALUE 1.80e+00
catcaccattccttctcaaggaaaggcccgacctgcaggaaaaatggctgcagtgtgtgaaaggggcagccaagaggccaccattgacccaccctcaacaccatcaccattggcaccaccagcatatgccacggtatataaccacggcaacctggcgacgacagtcatcctgtcatcactccctgtggggctcact

SEQ ID NO: 19270 - DNA, 75 bp, Homo sapiens
  MAP TO AL121763.1; EXPRESSED IN ADULT LIVER, SIGNAL = 2.7; EXPRESSED IN BT474, SIGNAL = 1.8; EXPRESSED IN FETAL LIVER, SIGNAL = 1.6; EXPRESSED IN HELA, SIGNAL = 2.1; EXPRESSED IN PLACENTA, SIGNAL = 2.8; EXPRESSED IN HBL100, SIGNAL = 1.8; EXPRESSED IN HEART, SIGNAL = 3.5; EXPRESSED IN BONE MARROW, SIGNAL = 2.2; EXPRESSED IN LUNG, SIGNAL = 1.7; EXPRESSED IN BRAIN, SIGNAL = 4.8; EST_HUMAN HIT: AW979285.1, EVALUE 2.20e-01
aagcgtaaaaacaaggatgacaatgtcaaagacagaggtgattgggagaaggggagatcaacaatgtcttcctca

SEQ ID NO: 19271 - DNA, 75 bp, Homo sapiens
  MAP TO AL080246.13; EXPRESSED IN BT474, SIGNAL = 1.4; EXPRESSED IN PLACENTA, SIGNAL = 1.6; EXPRESSED IN HBL100, SIGNAL = 1.4; EXPRESSED IN HEART, SIGNAL = 2.4; EXPRESSED IN ADULT LIVER, SIGNAL = 1.9; EXPRESSED IN FETAL LIVER, SIGNAL = 1.3; EXPRESSED IN HELA, SIGNAL = 1.7; EXPRESSED IN BRAIN, SIGNAL =   2; EXPRESSED IN LUNG, SIGNAL = 0.89; EXPRESSED IN BONE MARROW, SIGNAL = 2.5; NT HIT: M68520.1, EVALUE 5.90e-01; EST_HUMAN HIT: BE618258.1, EVALUE 2.20e-01
gcatactccatcctgtgctcctgccagcgcttcccaagcgtcactctggccacacgcccctggagcgggggcctg

SEQ ID NO: 19272 - DNA, 111 bp, Homo sapiens
  MAP TO AL035455.28; EXPRESSED IN BT474, SIGNAL = 1.1; EXPRESSED IN FETAL LIVER, SIGNAL = 1.3; EXPRESSED IN ADULT LIVER, SIGNAL = 1.4; EXPRESSED IN PLACENTA, SIGNAL = 1.6; EXPRESSED IN HEART, SIGNAL = 1.4; EXPRESSED IN BONE MARROW, SIGNAL = 1.1; EXPRESSED IN HELA, SIGNAL = 1.1; EXPRESSED IN HBL100, SIGNAL = 1.1; EXPRESSED IN BRAIN, SIGNAL = 1.2; EXPRESSED IN LUNG, SIGNAL =  12; NT HIT: Z35331.1, EVALUE 4.00e-03; EST_HUMAN HIT: AI655241.1, EVALUE 6.00e-05
gatgaccaaatccagggttgtatccttctttggggtactcggaaaagaaaacaagaagaagaagagaatgtagtctatgtagtctactcagaaatactaaaacaaaaacct

SEQ ID NO: 19273 - DNA, 388 bp, Homo sapiens
  MAP TO AL109759.1; EXPRESSED IN LUNG, SIGNAL = 1.1; EXPRESSED IN BRAIN, SIGNAL = 1.2; EXPRESSED IN ADULT LIVER, SIGNAL = 1.4; EXPRESSED IN HELA, SIGNAL = 0.99; EXPRESSED IN HEART, SIGNAL =   1; NT HIT: AJ271735.1, EVALUE 4.00e-55; EST_HUMAN HIT: BE018794.1, EVALUE 1.00e-37; SWISSPROT HIT: P08548, EVALUE 9.00e-12
aaacattaaaaaaactgaaataatatcaaacatcttctctaaccacaatagaagaaaactagaaattaataacaggaggaattctggaaactacacaaacacaccaaaattaaacaatatgctcctgaatgaccagggggtcgatgaagaaattaagaagaaaactgaaaaacttcttgaaacaaatgataatggaaacacaacattgactacaggatacagcaaaagtagtactaagagggaagtttatagcggtaagagcctacagcaaaaaagaagaaaaactcaaacaaacaacctaacaatgcatcttaaagaactagaaaagaaagagcaaaccaaacccaaaattagtagaagaaacaataaagatcagagcagaaatgaa

SEQ ID NO: 19274 - DNA, 194 bp, Homo sapiens
  MAP TO Z98044.10; EXPRESSED IN HBL100, SIGNAL = 1.4; EXPRESSED IN HELA, SIGNAL = 1.2; EXPRESSED IN HEART, SIGNAL =   2; EXPRESSED IN LUNG, SIGNAL = 0.89; EXPRESSED IN BT474, SIGNAL = 2.2; EXPRESSED IN PLACENTA, SIGNAL = 1.8; EXPRESSED IN BRAIN, SIGNAL = 1.5; EXPRESSED IN BONE MARROW, SIGNAL =   2; EXPRESSED IN ADULT LIVER, SIGNAL =   2; EXPRESSED IN FETAL LIVER, SIGNAL = 1.4; EST_HUMAN HIT: AW996556.1, EVALUE 1.20e-01; SWISSPROT HIT: P48633, EVALUE 1.60e+00; NT HIT: AF052294.1, EVALUE 1.80e+00
tagccaagggagaggcctgctggttgagggctgcagagcaaatgccactgttggcccccagcactctgtccctgcccactggtctctggttccctacggggaggtcaagggagacaggaacttcacaaatgggtcccggggaagagcagatgactccagtggggcttgtgaaaggaactacacaggatgaaatg

SEQ ID NO: 19275 - DNA, 375 bp, Homo sapiens
  MAP TO Z97985.4; EXPRESSED IN BT474, SIGNAL =   2; EXPRESSED IN FETAL LIVER, SIGNAL = 2.4; EXPRESSED IN HBL100, SIGNAL =   3; EXPRESSED IN HELA, SIGNAL = 2.8; EXPRESSED IN HEART, SIGNAL = 4.2; EXPRESSED IN ADULT LIVER, SIGNAL = 3.1; EXPRESSED IN PLACENTA, SIGNAL =   4; EXPRESSED IN BRAIN, SIGNAL = 2.2; EXPRESSED IN LUNG, SIGNAL =   3; EXPRESSED IN BONE MARROW, SIGNAL = 2.9; NT HIT: V00705.1, EVALUE 2.30e-01; EST_HUMAN HIT: AV708201.1, EVALUE 6.00e-43
gaagttagaggtgaggggagtggataggagggttagactggagataaaggcatgcagtatgaactcttttttaagaaagcagattttatggaatatagacatgtgaccctcttccgcccttttggacctctcatgaaagtgaagagcaagatgattgacatcattagatcaattattattaatatcattatgccacttgctgaaagaactgaagcacttgtacagtttatgcagaacttcagggaggtttgtattcatcaagacaagattcatctcacagtagtgtattttggtaacgaaggactgtctaaagtcaagtctagcctagaatttgtcacaagtgagtctaattttcacaattacactgtggtccat

SEQ ID NO: 19276 - DNA, 102 bp, Homo sapiens
  MAP TO AF165926.1; EXPRESSED IN PLACENTA, SIGNAL =  10; EXPRESSED IN HBL100, SIGNAL =   6; EXPRESSED IN HEART, SIGNAL =  11; EXPRESSED IN BRAIN, SIGNAL = 8.7; EXPRESSED IN BONE MARROW, SIGNAL = 7.7; EXPRESSED IN LUNG, SIGNAL = 6.3; EXPRESSED IN BT474, SIGNAL =   5; EXPRESSED IN ADULT LIVER, SIGNAL =  11; EXPRESSED IN FETAL LIVER, SIGNAL = 9.1; EXPRESSED IN HELA, SIGNAL =   9; NT HIT: AJ007558.1, EVALUE 5.00e-51; EST_HUMAN HIT: BE535319.1, EVALUE 9.00e-51; SWISSPROT HIT: O75694, EVALUE 5.00e-14
actttgaactgggatgtgggcttcgtaatacagacaatgaatgaaattggagtaccattacctagactactagaagtttatgatcagttgttcaaatcacgg

SEQ ID NO: 19277 - DNA, 101 bp, Homo sapiens
  MAP TO AL024507.7; EXPRESSED IN BONE MARROW, SIGNAL = 0.98; EXPRESSED IN BT474, SIGNAL = 2.4; EXPRESSED IN ADULT LIVER, SIGNAL = 2.6; EXPRESSED IN HELA, SIGNAL = 5.5; EXPRESSED IN PLACENTA, SIGNAL = 1.8; EXPRESSED IN HBL100, SIGNAL = 1.5; EXPRESSED IN HEART, SIGNAL = 1.4; EXPRESSED IN LUNG, SIGNAL = 3.9; EST_HUMAN HIT: AI365631.1, EVALUE 5.00e-31; NT HIT: gi11419051, EVALUE 3.00e-31
aatcaaaaaaaaagaaacctttaaaaaaaaaacctacacctgtgctattaccacagtcaaagcaacagaaacaaaagcaggcaaatggagtcgttgggaat

SEQ ID NO: 19278 - DNA, 234 bp, Homo sapiens
  MAP TO AC009955.1; EXPRESSED IN FETAL LIVER, SIGNAL = 1.1; EXPRESSED IN ADULT LIVER, SIGNAL = 2.4; EXPRESSED IN PLACENTA, SIGNAL = 2.3; EXPRESSED IN HELA, SIGNAL = 2.4; EXPRESSED IN BONE MARROW, SIGNAL = 1.2; EXPRESSED IN BT474, SIGNAL = 1.7; EXPRESSED IN HEART, SIGNAL = 1.7; EXPRESSED IN HBL100, SIGNAL = 1.7; EXPRESSED IN BRAIN, SIGNAL = 1.3; EXPRESSED IN LUNG, SIGNAL = 2.6; NT HIT: gi11430191, EVALUE 1.00e-125; EST_HUMAN HIT: BF312530.1, EVALUE 1.00e-123; SWISSPROT HIT: P05111, EVALUE 2.00e-36
ggatggcttgggagacatcctcctcttcctcgggctcagagcccctgtgtgtgaagccccccagggcatgtcttcggggcagccgcctgactccagggtccccaccttccctggtcaccgcggggggccccaaggcatccaagaacagggccctcaccttggccagaacaagttcccgggccagctccagcccctggcagctgtgcccacctgtggggtcagcagcaagaagag

SEQ ID NO: 19279 - DNA, 240 bp, Homo sapiens
  MAP TO AC009963.2; EXPRESSED IN LUNG, SIGNAL = 3.3; EXPRESSED IN BRAIN, SIGNAL = 1.5; EXPRESSED IN BT474, SIGNAL = 3.1; EXPRESSED IN ADULT LIVER, SIGNAL = 3.5; EXPRESSED IN HEART, SIGNAL = 2.2; EXPRESSED IN PLACENTA, SIGNAL = 4.6; EXPRESSED IN BONE MARROW, SIGNAL = 1.4; EXPRESSED IN HELA, SIGNAL = 6.2; EXPRESSED IN HBL100, SIGNAL = 2.8; SWISSPROT HIT: P49792, EVALUE 8.00e-40; NT HIT: gi11428555, EVALUE 1.00e-125; EST_HUMAN HIT: AA757230.1, EVALUE 1.00e-125
ttttttgccaaactgaaatccttctcctgaagttgattttgcaacatctgcaaatgtaaaagtgctacttgtttggccaaaaatcacaccacggccattcttctggccactaatatcctgagcctggaagccagtatcattttcaagaggcttttcactttccttttcttgatttcctggttccgaaatgccaaatttaaatccatcagcagacacagggatggaaaatccttctttggt

SEQ ID NO: 19280 - DNA, 311 bp, Homo sapiens
  MAP TO AL033529.13; EXPRESSED IN HBL100, SIGNAL = 1.9; EXPRESSED IN HELA, SIGNAL = 3.3; EXPRESSED IN BRAIN, SIGNAL = 2.5; EXPRESSED IN LUNG, SIGNAL = 1.8; EXPRESSED IN BT474, SIGNAL = 1.8; EXPRESSED IN HEART, SIGNAL = 3.8; EXPRESSED IN PLACENTA, SIGNAL = 2.3; EXPRESSED IN BONE MARROW, SIGNAL = 2.4; EXPRESSED IN ADULT LIVER, SIGNAL = 3.2; EXPRESSED IN FETAL LIVER, SIGNAL = 3.1; NT HIT: X92676.1, EVALUE 7.60e-01; EST_HUMAN HIT: BF513835.1, EVALUE 0.00e+00; SWISSPROT HIT: Q05004, EVALUE 5.90e+00
cttcactatcatcaacctgttggatgaccagatcaccagacccatcttctacaatctccacataggatctattctcatcttcactcaagtgccatctggaatccttatctccatctgatggggacataagatgttgttcagcttccaagtcaatggggaggctgtctatgccaaattctgcaagacactcattacacagtctgtagcgcctggttccctcctgtaccacttgccctgttagatctgtcacatgacgtttacattttctgcagatgagtttacatgcctggtgaatctgtgtagagatttaa

SEQ ID NO: 19281 - DNA, 228 bp, Homo sapiens
  MAP TO AL096817.12; EXPRESSED IN BT474, SIGNAL =  11; EXPRESSED IN HEART, SIGNAL = 2.5; EXPRESSED IN LUNG, SIGNAL =  17; EST_HUMAN HIT: AI732966.1, EVALUE 1.00e-125; SWISSPROT HIT: P27236, EVALUE 5.10e+00; NT HIT: gi11467282, EVALUE 2.10e+00
caaagccgtggaggaaattgtgaatactggtgtcacagttattaaggatgagaagaccagtgtggcccgactgatgagggaaaaagaacatgaaatgagcatcctctatggcatagctcagaggcagaggcaagaagaggtacaggaagtgcttcaagaagcagagaaaacacatcaggccactcttggcaatatgatggataaactggctaacacccagggggagct

SEQ ID NO: 19282 - DNA, 136 bp, Homo sapiens
  MAP TO AL121588.6; EXPRESSED IN HELA, SIGNAL = 2.1; EXPRESSED IN HEART, SIGNAL = 1.8; EXPRESSED IN PLACENTA, SIGNAL = 2.2; EXPRESSED IN HBL100, SIGNAL = 1.7; EXPRESSED IN BRAIN, SIGNAL = 1.7; EXPRESSED IN BONE MARROW, SIGNAL = 1.4; EXPRESSED IN LUNG, SIGNAL = 2.7; EXPRESSED IN ADULT LIVER, SIGNAL = 3.6; EXPRESSED IN BT474, SIGNAL =   1; EXPRESSED IN FETAL LIVER, SIGNAL = 1.3; NT HIT: AL163227.2, EVALUE 9.00e-48; EST_HUMAN HIT: AL119158.1, EVALUE 1.00e-49; SWISSPROT HIT: O19132, EVALUE 6.80e+00
ctgagaccccctcagcctggaccttaatgttcatatcactatcagcatttttgtcaaagccattcaacaagtctctaggaggttccaaactttcccacattttcctgtcgtcttctgagccctccaaactattcca

SEQ ID NO: 19283 - DNA, 207 bp, Homo sapiens
  MAP TO AC009963.2; EXPRESSED IN LUNG, SIGNAL = 4.6; EXPRESSED IN ADULT LIVER, SIGNAL = 1.7; EXPRESSED IN BT474, SIGNAL = 1.4; EXPRESSED IN HELA, SIGNAL = 1.2; EXPRESSED IN PLACENTA, SIGNAL = 1.9; EXPRESSED IN HEART, SIGNAL = 1.2; EXPRESSED IN HBL100, SIGNAL =   1; EST_HUMAN HIT: AI635520.1, EVALUE 1.00e-106; SWISSPROT HIT: P49792, EVALUE 5.00e-35; NT HIT: U64675.2, EVALUE 1.00e-106
attccactctaaacttgaacgcaaagctatgttcctctctgcctcatggcagcgggccacagcatccttcaatcttttagttgagcgatacaactccactagccggatgttcacatggacgtcatcaggtcttacataaagttctgactgaatcaagtcaaaaagtttattccatccatcttcaccttcacaatctagaagctgttc

SEQ ID NO: 19284 - DNA, 171 bp, Homo sapiens
  MAP TO AC009506.2; EXPRESSED IN BRAIN, SIGNAL = 0.94; EXPRESSED IN BONE MARROW, SIGNAL =   3; EXPRESSED IN LUNG, SIGNAL =   4; EXPRESSED IN ADULT LIVER, SIGNAL =   2; EXPRESSED IN BT474, SIGNAL = 7.7; EXPRESSED IN HELA, SIGNAL =  12; EXPRESSED IN PLACENTA, SIGNAL = 2.2; EXPRESSED IN HEART, SIGNAL = 1.1; EXPRESSED IN HBL100, SIGNAL =   4; NT HIT: gi5453596, EVALUE 5.00e-68; EST_HUMAN HIT: AI557280.1, EVALUE 2.00e-74; SWISSPROT HIT: P47753, EVALUE 2.00e-23
tgcccatcgatagtttttagcataaacagtacagaagccgttggaataatggtctttcacataggctcttaaagcactgtcacaggattctctccaagacttcagacctccatctacttgttttggctgggggtcacttgcttttttctataagtgatcaaatgtaaagga

SEQ ID NO: 19285 - DNA, 195 bp, Homo sapiens
  MAP TO AL034548.24; EXPRESSED IN PLACENTA, SIGNAL =   2; EXPRESSED IN HBL100, SIGNAL = 1.5; EXPRESSED IN HEART, SIGNAL = 1.9; EXPRESSED IN BRAIN, SIGNAL = 1.8; EXPRESSED IN BONE MARROW, SIGNAL = 1.8; EXPRESSED IN LUNG, SIGNAL = 5.5; EXPRESSED IN ADULT LIVER, SIGNAL = 2.1; EXPRESSED IN FETAL LIVER, SIGNAL = 1.5; EXPRESSED IN BT474, SIGNAL = 1.3; EXPRESSED IN HELA, SIGNAL = 1.2; SWISSPROT HIT: P34688, EVALUE 2.50e-01; EST_HUMAN HIT: BE260201.1, EVALUE 1.00e-106
atcagcctgtcctcggggaccctgcttctgctgctgggtgtggcggctctgaccactggctatgcagtgccccccaagctggagggcatcggtgagggtgagttcctggtgttggatcagcgggcagccgactacaaccaggccctgggcacctgtcgcctggcaggcacagcgctctgtgtggcagctggagtt

SEQ ID NO: 19286 - DNA, 332 bp, Homo sapiens
  MAP TO AL033531.7; EXPRESSED IN HELA, SIGNAL = 1.8; EXPRESSED IN HBL100, SIGNAL = 1.3; EXPRESSED IN HEART, SIGNAL = 2.8; EXPRESSED IN LUNG, SIGNAL = 0.99; EXPRESSED IN BRAIN, SIGNAL = 1.4; EXPRESSED IN BONE MARROW, SIGNAL =   1; EXPRESSED IN ADULT LIVER, SIGNAL = 1.7; EXPRESSED IN BT474, SIGNAL = 1.9; EST_HUMAN HIT: BF672818.1, EVALUE 0.00e+00; SWISSPROT HIT: P55060, EVALUE 2.80e+00; NT HIT: gi11425522, EVALUE 0.00e+00
cacaatcagataagttcacagccaagccattggattccaactcaggagaaagaaatgacctcaatcttgatcgctcttgtggggttccagaagaatctgcttcatctgaaaaagccaaggaaccagaaacttcagatcagactagcactgagagtgctaccaatgaaaataacaccaatcctgagcctcagttccaaacagaagccactgggccttcagctcatgaagaaacatccaccagggactctgctcttcaggacacagatgacagtgatgatgacccagtcctgatcccaggtgcaaggtatcgagcaggacctggtgataggttg

SEQ ID NO: 19287 - DNA, 147 bp, Homo sapiens
  MAP TO AC009550.2; EXPRESSED IN ADULT LIVER, SIGNAL = 3.4; EXPRESSED IN BT474, SIGNAL = 1.2; EXPRESSED IN HELA, SIGNAL = 3.2; EXPRESSED IN HEART, SIGNAL = 1.9; EXPRESSED IN PLACENTA, SIGNAL = 2.8; EXPRESSED IN HBL100, SIGNAL = 1.6; EXPRESSED IN LUNG, SIGNAL = 8.2; EXPRESSED IN BONE MARROW, SIGNAL = 1.1; NT HIT: AL163246.2, EVALUE 3.00e-32; SWISSPROT HIT: P34804, EVALUE 2.30e+00; EST_HUMAN HIT: AI216352.1, EVALUE 5.00e-32
  unsure 43
  unsure 51
  unsure 59
  unsure 109
ctgccactgacacctcaagcaccattggatctgctgggtcatnatggcccnaagtggcnagagcagcttgcacagcagcctggacctgttgcagagccttctccttttnctggaccacattcaaaactggcagcctttcgggtcact

SEQ ID NO: 19288 - DNA, 307 bp, Homo sapiens
  MAP TO AL096712.14; EXPRESSED IN HELA, SIGNAL = 2.7; EXPRESSED IN HBL100, SIGNAL = 1.1; EXPRESSED IN HEART, SIGNAL = 1.2; EXPRESSED IN LUNG, SIGNAL =  20; EXPRESSED IN BT474, SIGNAL = 1.2; NT HIT: gi11418597, EVALUE 0.00e+00; SWISSPROT HIT: P55203, EVALUE 2.40e+00; EST_HUMAN HIT: BE616695.1, EVALUE 0.00e+00
actctttcgacatgtagtgaggcagagtctacgaagtaccctgaagcagttgggtgccgtgaatcctggtggtgcttcagccaatgatggcagcagggctggccaccgtggaaggcaagtgactgagggcttcctaactcaagtctctgtcccacaagacttctcagttgaccttcagagcagcggagtcacggctagagagaatcctccagaccatctcaggctcgcactacctggcagtctttcaaatgcccttagagcacggtcttcagaacaatctctttgctttggagaaaaagaagagaaa

SEQ ID NO: 19289 - DNA, 173 bp, Homo sapiens
  MAP TO Z95114.19; EXPRESSED IN LUNG, SIGNAL = 3.6; EXPRESSED IN BONE MARROW, SIGNAL = 1.1; EXPRESSED IN FETAL LIVER, SIGNAL = 1.4; EXPRESSED IN ADULT LIVER, SIGNAL = 2.2; EXPRESSED IN HEART, SIGNAL = 2.2; EXPRESSED IN PLACENTA, SIGNAL = 1.2; EXPRESSED IN HBL100, SIGNAL =   1; EST_HUMAN HIT: BE939489.1, EVALUE 8.00e-93; SWISSPROT HIT: O95236, EVALUE 1.00e-25; NT HIT: gi11418041, EVALUE 5.00e-93
tcgtatacaaggttgaccacatccagtgcaaggaagatgcctgaagtggtcgcactcaggatccgggctcctctgctcactgcccgggtggtgcctgcaatcgttctctctgcttgaccaccacttccagctgagattcgccaggtggtcacagggagtcgggccctggctct

SEQ ID NO: 19290 - DNA, 312 bp, Homo sapiens
  MAP TO AL109954.10; EXPRESSED IN PLACENTA, SIGNAL = 2.1; EXPRESSED IN HEART, SIGNAL = 1.8; EXPRESSED IN LUNG, SIGNAL = 1.5; EXPRESSED IN BONE MARROW, SIGNAL = 1.2; EXPRESSED IN FETAL LIVER, SIGNAL = 1.7; EXPRESSED IN ADULT LIVER, SIGNAL = 2.9; EXPRESSED IN BT474, SIGNAL = 2.9; EXPRESSED IN HELA, SIGNAL = 3.5; EXPRESSED IN HBL100, SIGNAL = 1.4; EXPRESSED IN BRAIN, SIGNAL = 0.99; SWISSPROT HIT: P25236, EVALUE 5.00e-01; NT HIT: AB014607.1, EVALUE 3.00e-98; EST_HUMAN HIT: BE064386.1, EVALUE 3.00e-83
attgttctctgtgtcagcccttactgaaggaatactcatggcagtggtgataaccgctatcatagctaccataaaattactcgttgtgactggttgtcccgctttcctcaggttttcttccaccatctgtgacagcttcttgatctgtccccagatgggtggctgtgttcgacaggtgttgcttgtgacagttggagtcctccacagagtcagtcttgacatggctgcaactggggggtcctcaggatcctcccggagtctcttcctcagcatctggctcatgataaggtttcaggtgtcttgatagtatcc

SEQ ID NO: 19291 - DNA, 327 bp, Homo sapiens
  MAP TO AC010748.1; EXPRESSED IN PLACENTA, SIGNAL =  21; EXPRESSED IN HBL100, SIGNAL =  16; EXPRESSED IN HEART, SIGNAL = 2.8; EXPRESSED IN LUNG, SIGNAL = 7.6; EXPRESSED IN BRAIN, SIGNAL =   3; EXPRESSED IN BONE MARROW, SIGNAL = 2.2; EXPRESSED IN FETAL LIVER, SIGNAL = 5.3; EXPRESSED IN ADULT LIVER, SIGNAL = 7.2; EXPRESSED IN BT474, SIGNAL =  49; EXPRESSED IN HELA, SIGNAL =  40; NT HIT: X12881.1, EVALUE 1.00e-127; SWISSPROT HIT: P05783, EVALUE 2.00e-43; EST_HUMAN HIT: BE535276.1, EVALUE 1.00e-125
gacaagctggctcggaagaacagagaggagctggacaagtactggtctcagcagattgaggagagcaccacggtggtcaccacgcagtccgtcaaggttggagctgctgagacgacactcacggagctgagatatacagtccagtccttggagactgacctggactcaatgagaaatctgaaggccagcttggagaacagcctgagggaggtggaggcccgctacaccctgcagatggagcagctcaacgggatcctgctttacctggagtcagagctggcacagacccgggcagaggggtagcgccaggccgaggagtatgaggcc

SEQ ID NO: 19292 - DNA, 111 bp, Homo sapiens
  MAP TO AL079342.17; EXPRESSED IN FETAL LIVER, SIGNAL = 2.1; EXPRESSED IN BT474, SIGNAL = 5.9; EXPRESSED IN HELA, SIGNAL = 1.6; EXPRESSED IN PLACENTA, SIGNAL = 2.3; EXPRESSED IN HBL100, SIGNAL = 3.5; EXPRESSED IN LUNG, SIGNAL = 2.7; EXPRESSED IN BRAIN, SIGNAL = 1.3; EXPRESSED IN BONE MARROW, SIGNAL =   2; EXPRESSED IN ADULT LIVER, SIGNAL = 1.1; EXPRESSED IN HEART, SIGNAL = 3.3; SWISSPROT HIT: P35181, EVALUE 1.80e-02; NT HIT: gi5901933, EVALUE 2.00e-44; EST_HUMAN HIT: BF671561.1, EVALUE 4.00e-44
gaatgaattcataaatagccatcttgttctcagtgtcattaactccaaccacaacgaagagagatgcatactgccgatatatcagcttaaaatccttataattcaatgaaa

SEQ ID NO: 19293 - DNA, 144 bp, Homo sapiens
  MAP TO AC010732.1; EXPRESSED IN PLACENTA, SIGNAL = 3.4; EXPRESSED IN HEART, SIGNAL = 1.3; EXPRESSED IN LUNG, SIGNAL = 8.4; EXPRESSED IN BONE MARROW, SIGNAL = 4.8; EXPRESSED IN FETAL LIVER, SIGNAL = 1.9; EXPRESSED IN ADULT LIVER, SIGNAL = 2.4; EXPRESSED IN BT474, SIGNAL = 3.1; EXPRESSED IN HELA, SIGNAL =   9; EXPRESSED IN HBL100, SIGNAL =  15; EXPRESSED IN BRAIN, SIGNAL = 1.7; EST_HUMAN HIT: BE017962.1, EVALUE 2.00e-55; NT HIT: L54057.1, EVALUE 1.00e-55; SWISSPROT HIT: Q58900, EVALUE 3.00e+00
ttactccgtctgggcgtcgtagttggctccccccgccttcttcagctcgctcttgatgaaatcttcctccagctccttccgatcactgatcacaaactccttagcgaaattctgcaagaacaaaggaaaacacagcgttcctat

SEQ ID NO: 19294 - DNA, 361 bp, Homo sapiens
  MAP TO AC005412.5; EXPRESSED IN BT474, SIGNAL = 4.1; EXPRESSED IN HBL100, SIGNAL = 2.2; EXPRESSED IN HELA, SIGNAL =   4; EXPRESSED IN PLACENTA, SIGNAL = 2.1; EXPRESSED IN HEART, SIGNAL = 1.3; EXPRESSED IN LUNG, SIGNAL =  13; EXPRESSED IN ADULT LIVER, SIGNAL = 1.2; SWISSPROT HIT: Q09735, EVALUE 2.20e+00; NT HIT: AB037742.1, EVALUE 0.00e+00; EST_HUMAN HIT: H71229.1, EVALUE 0.00e+00
ggtgctgaaataattccctcaggaactgagcatcctgtgtttcccaaggcttacgagctggagaaacggactagtcctcaagttctgggtagcattctaaaatctgggactactagtgagagtggagccttatccttggaacccagtcatataggtgacctgcagaaagcagacaccagtagtcaaggtgctttagtgtttctctcaaaggactacgagatagaaagtcaaaatcctctggcctctcctacgaacactttgttaggctctgccaaagaacagagataccagagaggcctagaaaggaatgatagctggggttcttttgacctgagggctgctattgtatatcacactaaag

SEQ ID NO: 19295 - DNA, 341 bp, Homo sapiens
  MAP TO AC008000.7; EXPRESSED IN BONE MARROW, SIGNAL = 1.1; EXPRESSED IN FETAL LIVER, SIGNAL = 1.2; EXPRESSED IN ADULT LIVER, SIGNAL = 1.5; EXPRESSED IN BT474, SIGNAL = 0.95; EXPRESSED IN HEART, SIGNAL = 0.97; EXPRESSED IN LUNG, SIGNAL =  16; EXPRESSED IN BRAIN, SIGNAL = 2.1; EST_HUMAN HIT: AI571737.1, EVALUE 0.00e+00; NT HIT: L00620.1, EVALUE 1.00e-118; SWISSPROT HIT: Q01814, EVALUE 2.00e-34
gcttggtgatgtcagccatcacggtgatcatcctggtgctctacttcactgtggacaccttcgtggtcaacaagaagccgtggctgcctgagtgcacgcccgtctacgtgcagtactttgtcaagttcttcatcattggcgtgacggtgctggtggtcgccgtgcccgaggggctccctctggccgtcaccatctcgttggcctattcggtgaaggtgagaggggaggagagcaggaccagccggctgatgcagctgcagctgagggcctgggggaatcactggggctggtgctggggttgggagatgaacgaagaagccccatagaccccctaggagctt

SEQ ID NO: 19296 - DNA, 427 bp, Homo sapiens
  MAP TO AL033520.8; EXPRESSED IN FETAL LIVER, SIGNAL = 2.1; EXPRESSED IN BT474, SIGNAL = 2.8; EXPRESSED IN HBL100, SIGNAL = 2.4; EXPRESSED IN HELA, SIGNAL = 2.8; EXPRESSED IN HEART, SIGNAL = 2.3; EXPRESSED IN PLACENTA, SIGNAL = 2.5; EXPRESSED IN BRAIN, SIGNAL = 2.2; EXPRESSED IN LUNG, SIGNAL =   4; EXPRESSED IN BONE MARROW, SIGNAL = 2.6; EXPRESSED IN ADULT LIVER, SIGNAL = 2.7; NT HIT: gi11418534, EVALUE 0.00e+00; EST_HUMAN HIT: AA310876.1, EVALUE 0.00e+00; SWISSPROT HIT: Q15544, EVALUE 7.00e-28
atgacccctcaggagagcggtaggggtgatgtcatcgctgcgcgacgacaggaagtaagatcctggcctgtgcagctcgggtttccgagcttctgcctcaggcatctccgcgatctcctctcccctccaatcctatccgtgatggacgatgcccacgagtcgccctccgacaaaggtggagagacaggggagtcggatgagacggccgctgtgcccggggacccgggggctaccgacaccgatggaatcccagaggaaactgacggagacgcagatgtggacttgaaagaagctgcagcggaggaaggcgaggtaggaagagatgtactgatgaggctgaaggaatacccagagattgtgttactggctgctcgccgggcttctggttagtccctaacaagttacgagaactcgaactcaccagaat

SEQ ID NO: 19297 - DNA, 187 bp, Homo sapiens
  MAP TO AC000026.3; EXPRESSED IN HBL100, SIGNAL = 6.7; EXPRESSED IN PLACENTA, SIGNAL = 4.6; EXPRESSED IN LUNG, SIGNAL = 5.9; EXPRESSED IN BRAIN, SIGNAL = 2.8; EXPRESSED IN BONE MARROW, SIGNAL = 5.3; EXPRESSED IN ADULT LIVER, SIGNAL = 5.4; EXPRESSED IN FETAL LIVER, SIGNAL =  11; EXPRESSED IN BT474, SIGNAL = 5.3; EXPRESSED IN HEART, SIGNAL = 4.4; EXPRESSED IN HELA, SIGNAL = 6.7; EST_HUMAN HIT: AU131762.1, EVALUE 2.00e-75; NT HIT: X72993.1, EVALUE 1.00e-101
ccaggggtatggcactggtgcttatgataccaccactgctacagtcaccaccacccaggcctcctatgcagctcagtctgcatatggcactcagcctgcttatccagcctatgggcagcagccagcagccactgcacctacaaggtaaggccatggtgtccttaatgcgtcagtcttatgttggagg

SEQ ID NO: 19298 - DNA, 667 bp, Homo sapiens
  MAP TO AL022238.1; EXPRESSED IN FETAL LIVER, SIGNAL = 6.9; EXPRESSED IN BT474, SIGNAL = 3.6; EXPRESSED IN HBL100, SIGNAL = 5.1; EXPRESSED IN HELA, SIGNAL = 6.3; EXPRESSED IN HEART, SIGNAL = 5.8; EXPRESSED IN PLACENTA, SIGNAL = 8.5; EXPRESSED IN BRAIN, SIGNAL = 4.9; EXPRESSED IN LUNG, SIGNAL = 4.3; EXPRESSED IN BONE MARROW, SIGNAL = 7.8; EXPRESSED IN ADULT LIVER, SIGNAL = 5.1; NT HIT: AB037859.1, EVALUE 0.00e+00; EST_HUMAN HIT: BE311634.1, EVALUE 0.00e+00; SWISSPROT HIT: Q06418, EVALUE 1.30e-01
ggaaaaagcaggggctgtgattgtcaagactcacaaccatgtggagaggccgaatcacgcaggagagccacgcattggagtaccctggctcccagccccttccccaccccgtcttgagccagagagctacaagcaggaatcccagtgcagctgcaaatcatggccatcgaggaagtctgtggagaagaggctgggggctgtggtgctgaggggggctaggctcagcacgggaccacctgacgacagctccagccagtccatgctgtccaggtggccatcagccaggtccaggcccatggtgctgctgggctcaggaacaaagtgcaattccgaggtgtccatgggtgacggggggtggtccaggatggcagtgctgctcagcatctggctatggaggtcgtcaatgagggaaaggggctctggcccgtcatgcccactggtcagcaggggcagccccgtgctgctctccaggaagtcctccaggcgtccagggagggagggtgagcctggaggaggtggggcagcctgggggagctcagcagaaggtgatggctgtgctgccaggggggacccacagactgtcttcggggatggcttctccttccctggcagggatggcggctccttgaaatctgctgaaatttctgccaatcaatcaagagagtaa

SEQ ID NO: 19299 - DNA, 703 bp, Homo sapiens
  MAP TO AP000504.1; EXPRESSED IN BONE MARROW, SIGNAL = 1.3; EXPRESSED IN FETAL LIVER, SIGNAL = 0.99; EXPRESSED IN ADULT LIVER, SIGNAL =   1; EXPRESSED IN BT474, SIGNAL = 1.4; EXPRESSED IN HEART, SIGNAL =   1; EXPRESSED IN HELA, SIGNAL = 2.3; EXPRESSED IN HBL100, SIGNAL = 1.4; EXPRESSED IN PLACENTA, SIGNAL = 1.2; EXPRESSED IN BRAIN, SIGNAL =   1; NT HIT: AF129756.1, EVALUE 0.00e+00; SWISSPROT HIT: Q13625, EVALUE 2.20e-02; EST_HUMAN HIT: BE795445.1, EVALUE 0.00e+00
cagggtcaccacgagcttggcttacttgtctcatccttcccttgcctggtatcattttctcagttctcccaaaagccatgtcccggcccttgctcatcaccttcaccccagccactgaccccagcgacctctggaaggatgggcagcagcagccacagcccgagaagccagagtccaccctggatggggctgcagcccgagctttctatgaggccctgattggggatgagagcagcgctcctgactcccagagatctcagactgaacctgccagagaaagaaagagaaagaaaagaagaataatgaaggcaccagcagcagaagcagtggcagaaggagcatcaggaagacatggacaagggagatcccttgaggctgaggataagatgactcaccggatactgagggcagcccaggagggggacctgccagaacttaggagactgctggaaccgcatgaggcaggaggagctggggggaatatcaacgcccgggatgccttctggtggaccccactgatgtgtgctgctcgagcgggccagggggcagctgtgagctatctcctgggccgtggggctgcctgggtgggggtctgtgagctgagtggcagggatgcggctcagctcgctgaagaagctggcttccctgaggtagcccgcatggtcagggagagccatggagagacaaggagcccggaaaaccg

SEQ ID NO: 19300 - DNA, 145 bp, Homo sapiens
  MAP TO AL031768.9; EXPRESSED IN PLACENTA, SIGNAL = 2.6; EXPRESSED IN BONE MARROW, SIGNAL = 3.9; EXPRESSED IN LUNG, SIGNAL = 1.9; EXPRESSED IN FETAL LIVER, SIGNAL = 1.5; EXPRESSED IN ADULT LIVER, SIGNAL = 3.7; EXPRESSED IN BT474, SIGNAL = 1.6; EXPRESSED IN HEART, SIGNAL = 2.5; EXPRESSED IN HELA, SIGNAL = 3.1; EXPRESSED IN HBL100, SIGNAL = 2.3; EXPRESSED IN BRAIN, SIGNAL = 2.5; NT HIT: AJ271735.1, EVALUE 3.00e-20; EST_HUMAN HIT: AA748468.1, EVALUE 1.00e-59; SWISSPROT HIT: P27922, EVALUE 2.60e-01
agactggatcgtgaggtttaaggaaagaagccatcttcataacataaaagtgcaaggtgaagcagcaagtgctgatggagaagctccagcaaattgtccagaagacgtagctcagatcactgatgaaggtgattacactaaacaa

SEQ ID NO: 19301 - DNA, 178 bp, Homo sapiens
  MAP TO AC011406.1; EXPRESSED IN FETAL LIVER, SIGNAL = 0.91; EXPRESSED IN ADULT LIVER, SIGNAL = 1.5; EXPRESSED IN BT474, SIGNAL = 2.6; EXPRESSED IN HBL100, SIGNAL = 2.2; EXPRESSED IN HELA, SIGNAL = 6.4; EXPRESSED IN HEART, SIGNAL = 2.3; EXPRESSED IN PLACENTA, SIGNAL = 1.7; EXPRESSED IN BRAIN, SIGNAL = 1.4; EXPRESSED IN BONE MARROW, SIGNAL = 1.2; EXPRESSED IN LUNG, SIGNAL = 5.9; NT HIT: gi11416767, EVALUE 5.00e-96; EST_HUMAN HIT: BE887213.1, EVALUE 9.00e-71; SWISSPROT HIT: O08717, EVALUE 1.70e+00
aataaggtcaagatctgctggtcttgaaaatgaaacatcctcattatttcctgctacaacaatcctctctggaacttgcattattatcacgctagcatttggaactcctttttggaatccctgttccaggttggcgtttggcggtgctacttttaacttttctgggaccctcattcgc

SEQ ID NO: 19302 - DNA, 397 bp, Homo sapiens
  MAP TO AP000516.1; EXPRESSED IN LUNG, SIGNAL = 3.5; EXPRESSED IN FETAL LIVER, SIGNAL = 1.2; EXPRESSED IN ADULT LIVER, SIGNAL = 0.92; EXPRESSED IN HBL100, SIGNAL = 1.3; EXPRESSED IN HELA, SIGNAL =   1; EXPRESSED IN HEART, SIGNAL = 1.1; EXPRESSED IN BRAIN, SIGNAL = 2.5; EST_HUMAN HIT: BE293328.1, EVALUE 0.00e+00; SWISSPROT HIT: P14373, EVALUE 1.00e-24; NT HIT: gi11419098, EVALUE 0.00e+00
gccgcttctccctttttacccacactgacatcgtgtgtctgcttccccaccttgtactcctgtgtagcatcgtccagtggcacaacggtgtgagcccggtgggtgtgggaaattgcacatatcaagcatacagcctcctggtcctcataacagaaaaggctgagggcctcatggtgttgggggcagaggctctcatcccggatcttccgcttgacggcctggagctgcttggcaatttccaccatactgcctagttgccgattaggtcggagactgcggtagcgggatgtctttcgacagacaggacaagggaagtccctctctaggtcctcccaccagcgggtgatgcaagctttgcagaagttgtgcccacactcaatgatgacaggttccttca

SEQ ID NO: 19303 - DNA, 203 bp, Homo sapiens
  MAP TO AL117354.2; EXPRESSED IN BT474, SIGNAL = 1.9; EXPRESSED IN HBL100, SIGNAL = 1.3; EXPRESSED IN HELA, SIGNAL = 2.7; EXPRESSED IN HEART, SIGNAL = 0.86; EXPRESSED IN PLACENTA, SIGNAL =   1; EXPRESSED IN LUNG, SIGNAL = 2.1; EXPRESSED IN BONE MARROW, SIGNAL =   1; EXPRESSED IN ADULT LIVER, SIGNAL =   1; EST_HUMAN HIT: N32770.1, EVALUE 1.00e-103; SWISSPROT HIT: Q10341, EVALUE 5.50e-01; NT HIT: gi11426921, EVALUE 9.00e-89
agttcatcaaactgataatcttctttgccttcatcatcttttacaatttctgagttctgagtctggagtgctcttcttggaagacgacctcttcttctccgcaaatgtggtattgcagcaggccaagatcttcctgtacgcgttctttttctggagtcagataatctatgtaacagagaaggccagaattgtctactgagctt

SEQ ID NO: 19304 - DNA, 263 bp, Homo sapiens
  MAP TO AC006205.7; EXPRESSED IN BT474, SIGNAL =   1; EXPRESSED IN HEART, SIGNAL = 0.96; EXPRESSED IN BONE MARROW, SIGNAL = 1.1; EXPRESSED IN BRAIN, SIGNAL = 1.1; EXPRESSED IN LUNG, SIGNAL =   4; EXPRESSED IN ADULT LIVER, SIGNAL =   1; NT HIT: gi11436398, EVALUE 1.00e-126; EST_HUMAN HIT: AA450131.1, EVALUE 1.00e-127; SWISSPROT HIT: Q92982, EVALUE 2.00e-13
caatgaccacgagcaggacaccgatgaccacctgcaggagcagagagaggctgatgagggtgaccagggtggtgtagtagtgagaggatggtccctgctccagcaccgccttcagccgcatggcgttggacatgaacagggccacgtccagcatgctctccgccacgctcttcttggtggcgtaatggttcaggttgatgggctggctcctggggtcggagcttccaggctgtaggggagaaagcacagacttaccaagggga

SEQ ID NO: 19305 - DNA, 85 bp, Homo sapiens
  MAP TO AC009961.2; EXPRESSED IN PLACENTA, SIGNAL = 1.8; EXPRESSED IN BONE MARROW, SIGNAL = 1.5; EXPRESSED IN LUNG, SIGNAL = 2.1; EXPRESSED IN BRAIN, SIGNAL = 0.93; EXPRESSED IN ADULT LIVER, SIGNAL = 1.7; EXPRESSED IN BT474, SIGNAL = 5.1; EXPRESSED IN HEART, SIGNAL = 1.9; EXPRESSED IN HELA, SIGNAL = 4.4; EXPRESSED IN HBL100, SIGNAL = 1.4; EST_HUMAN HIT: BF036881.1, EVALUE 1.00e-40; NT HIT: gi10181209, EVALUE 3.00e-15
ctctcttttattttctgcaatctttctggatctcttgaaggcgcacttttagttttatcacttttaccatcagctgaattccaac

SEQ ID NO: 19306 - DNA, 201 bp, Homo sapiens
  MAP TO AL096773.6; EXPRESSED IN FETAL LIVER, SIGNAL = 2.9; EXPRESSED IN ADULT LIVER, SIGNAL = 3.6; EXPRESSED IN BT474, SIGNAL = 4.9; EXPRESSED IN HBL100, SIGNAL = 4.1; EXPRESSED IN HELA, SIGNAL = 3.5; EXPRESSED IN HEART, SIGNAL = 3.9; EXPRESSED IN PLACENTA, SIGNAL =  19; EXPRESSED IN BRAIN, SIGNAL =   4; EXPRESSED IN BONE MARROW, SIGNAL = 3.4; EXPRESSED IN LUNG, SIGNAL = 4.6; EST_HUMAN HIT: AI022328.1, EVALUE 1.00e-109; SWISSPROT HIT: P10567, EVALUE 2.10e+00
atgagctgcaccatcgagaagatcctgacagacgccaagacgctgctggagaggctacgggagcacgatgcggccgccgagtcgctggtggatcagtcggcggcgctgcaccggcgggtagcagctatgcgggaggcggggacagcgcttccggaccaggtcaggcagagggtaggagtccagtgctctcggattctgggc

SEQ ID NO: 19307 - DNA, 201 bp, Homo sapiens
  MAP TO AL096814.10; EXPRESSED IN BRAIN, SIGNAL = 2.1; EXPRESSED IN BT474, SIGNAL =   2; EXPRESSED IN HBL100, SIGNAL = 2.4; EXPRESSED IN HELA, SIGNAL = 2.2; EXPRESSED IN PLACENTA, SIGNAL = 2.7; EXPRESSED IN LUNG, SIGNAL = 1.8; EXPRESSED IN BONE MARROW, SIGNAL = 1.8; EXPRESSED IN ADULT LIVER, SIGNAL = 3.2; EXPRESSED IN FETAL LIVER, SIGNAL =   2; EXPRESSED IN HEART, SIGNAL = 2.8; EST_HUMAN HIT: BE937608.1, EVALUE 1.00e-108; NT HIT: gi11417666, EVALUE 1.00e-109; SWISSPROT HIT: P43080, EVALUE 1.00e-35
atgggcaacgtgatggagggaaagtcagtggaggagctgagcagcaccgagtgccaccagtggtacaagaagttcatgactgagtgcccctctggccaactcaccctctatgagttccgccagttcttcggcctcaagaacctgagcccgtcggccagccagtacgtggaacagatgtttgagacttttgacttcaacaag

SEQ ID NO: 19308 - DNA, 172 bp, Homo sapiens
  MAP TO AF189001.1; EXPRESSED IN BRAIN, SIGNAL = 1.3; EXPRESSED IN BT474, SIGNAL =   1; EXPRESSED IN HEART, SIGNAL = 0.88; EXPRESSED IN HELA, SIGNAL = 1.3; EXPRESSED IN HBL100, SIGNAL =   1; EXPRESSED IN LUNG, SIGNAL = 1.6; EXPRESSED IN BONE MARROW, SIGNAL = 1.1; EXPRESSED IN ADULT LIVER, SIGNAL = 1.5; EST_HUMAN HIT: AI908757.1, EVALUE 3.00e-54; NT HIT: AE004064.1, EVALUE 3.40e-01; SWISSPROT HIT: Q04995, EVALUE 2.60e-01
acacggtcacacagttcgtaggatccagcagtgtgcttacgacgtcacgtattacggttcttgttcttggcaaccctgtggggttaagcactgtcagcatcgccatttcacacctgggaaaactgaggcaaaggccccacagttccagagtgagggtcaagtccacagcccc

SEQ ID NO: 19309 - DNA, 128 bp, Homo sapiens
  MAP TO AC010724.1; EXPRESSED IN HBL100, SIGNAL = 2.1; EXPRESSED IN HELA, SIGNAL = 2.4; EXPRESSED IN HEART, SIGNAL = 1.4; EXPRESSED IN PLACENTA, SIGNAL = 1.5; EXPRESSED IN BONE MARROW, SIGNAL = 1.5; EXPRESSED IN BRAIN, SIGNAL = 1.7; EXPRESSED IN LUNG, SIGNAL = 1.6; EXPRESSED IN ADULT LIVER, SIGNAL = 2.2; EXPRESSED IN BT474, SIGNAL = 1.8; EXPRESSED IN FETAL LIVER, SIGNAL = 1.1; NT HIT: AF266285.1, EVALUE 1.00e-21; EST_HUMAN HIT: AI860513.1, EVALUE 6.00e-28; SWISSPROT HIT: P18748, EVALUE 6.80e+00
aacaacgagaacaagagcacactgcagttggagcagcaagtaaaggagctggagaagtcgggtgagctgaaagagactgtaacctccgacccatccaagaagatgtgggaggcgggcaccagcctctg

SEQ ID NO: 19310 - DNA, 537 bp, Homo sapiens
  MAP TO AL080285.6; EXPRESSED IN ADULT LIVER, SIGNAL = 4.1; EXPRESSED IN PLACENTA, SIGNAL = 2.8; EXPRESSED IN BONE MARROW, SIGNAL = 8.2; EXPRESSED IN LUNG, SIGNAL = 4.3; EXPRESSED IN BRAIN, SIGNAL = 4.9; EXPRESSED IN FETAL LIVER, SIGNAL =   6; EXPRESSED IN BT474, SIGNAL =  13; EXPRESSED IN HEART, SIGNAL =  10; EXPRESSED IN HELA, SIGNAL =  12; EXPRESSED IN HBL100, SIGNAL = 6.4; NT HIT: gi11525954, EVALUE 0.00e+00; EST_HUMAN HIT: BE792472.1, EVALUE 0.00e+00; SWISSPROT HIT: P32119, EVALUE 5.00e-76
aattttccttgctgtcacccacgttgagcttaatcgtgtcagtgccaggcttccagccagcgggacaaacttccgcgtgctcttctgcgtactggaaggcctggaccagccgcagagcctcatccacggagcgtcccacaggcaaatcattaacagtgatctggaaaggacacccttgccatcactgataaagcggcccctgtaggcaatgcccgcatctgttttcagcacggcgtaatcctcagacaagccactggccacctcagcaagcagggggatgttcagggggcccaagtctccctccctctgggggttgttgatccaagccaggtgggtgaactgagagtccactgagatgcccagcacttcgcagcccagcttgcggaagtcctcggcatggtcgctgaacgcgatgatctccgtggggcacacaaaagtgaagtgcagagggtagaaaaagaggaccacgtatttctctttgtagtcctacagcttcacttctttgaaagcgctatccatccaccacggcggtggcct

SEQ ID NO: 19311 - DNA, 439 bp, Homo sapiens
  MAP TO AL109924.6; EXPRESSED IN BONE MARROW, SIGNAL = 1.7; EXPRESSED IN LUNG, SIGNAL = 2.4; EXPRESSED IN ADULT LIVER, SIGNAL = 2.1; EXPRESSED IN BT474, SIGNAL = 1.2; EXPRESSED IN FETAL LIVER, SIGNAL = 1.8; EXPRESSED IN HBL100, SIGNAL =   2; EXPRESSED IN HELA, SIGNAL = 2.5; EXPRESSED IN HEART, SIGNAL = 2.7; EXPRESSED IN PLACENTA, SIGNAL =   2; EXPRESSED IN BRAIN, SIGNAL = 2.2; SWISSPROT HIT: O96615, EVALUE 4.00e-04; NT HIT: AF223563.1, EVALUE 9.30e-01
ggttggagctgccctagccagtgtgacggttggagctgccctagccagtgtgacggttggagctgccctagccagtgtgacggttggtgctgccctagccagtgtgacggttggagctgccctagccagtgtgacggttggtgctgccctagccagtgtgacggttggtgctgtggcttcaaacccaggacagccactgtccatgcccacaaatgtccctcccaccagcagcccctgcaccactatcacatgcatgctcacgctcatacagctcccaccgccagcccttgggcttgctttcctggaggcaatcacaactagacaactagacctagacgtgatgctgaagcccccacagccaccgtggatttccccaacagcttttggcactgagggccacgcaatggccagtgtcatagatcccagctgcctgagtcgc

SEQ ID NO: 19312 - DNA, 129 bp, Homo sapiens
  MAP TO AB020872.1; EXPRESSED IN HEART, SIGNAL = 1.7; EXPRESSED IN BRAIN, SIGNAL = 1.8; EXPRESSED IN BONE MARROW, SIGNAL = 2.3; EXPRESSED IN LUNG, SIGNAL = 3.2; EXPRESSED IN ADULT LIVER, SIGNAL = 2.4; EXPRESSED IN BT474, SIGNAL = 1.1; EXPRESSED IN FETAL LIVER, SIGNAL = 1.6; EXPRESSED IN PLACENTA, SIGNAL = 1.9; EXPRESSED IN HBL100, SIGNAL = 1.4; EXPRESSED IN HELA, SIGNAL = 1.5; EST_HUMAN HIT: BE391030.1, EVALUE 4.00e-32; NT HIT: AL163227.2, EVALUE 2.00e-30; SWISSPROT HIT: Q57809, EVALUE 2.30e+00
accatctcagcctggactttattgcccatatcactatcagcattttggtcaaagacatccaacaagtctctaggaaattccaaagtttcccatatcttcatgtcttcttctgagccctccaaactgttc

SEQ ID NO: 19313 - DNA, 129 bp, Homo sapiens
  MAP TO AB020877.1; EXPRESSED IN BT474, SIGNAL = 1.8; EXPRESSED IN FETAL LIVER, SIGNAL = 1.1; EXPRESSED IN ADULT LIVER, SIGNAL = 1.6; EXPRESSED IN HELA, SIGNAL = 1.8; EXPRESSED IN PLACENTA, SIGNAL = 1.5; EXPRESSED IN HBL100, SIGNAL = 1.5; EXPRESSED IN HEART, SIGNAL = 2.4; EXPRESSED IN BRAIN, SIGNAL = 0.9; EXPRESSED IN BONE MARROW, SIGNAL = 1.3; EXPRESSED IN LUNG, SIGNAL =  14; EST_HUMAN HIT: AW891920.1, EVALUE 4.50e+00; NT HIT: AE001562.1, EVALUE 3.80e+00
tatcagatcttgtccagaatattgatgatgatgatgatgatgatgatgatgatgatgatgatgatgataatgatggtcatggtcaacatttgtaatagtcttacaatgtagaagtattatgctatgcat

SEQ ID NO: 19314 - DNA, 103 bp, Homo sapiens
  MAP TO AC007358.2; EXPRESSED IN LUNG, SIGNAL =  12; EXPRESSED IN ADULT LIVER, SIGNAL = 1.7; EXPRESSED IN FETAL LIVER, SIGNAL = 1.4; EXPRESSED IN HELA, SIGNAL = 1.3; EXPRESSED IN PLACENTA, SIGNAL = 1.7; EXPRESSED IN HBL100, SIGNAL = 1.1; EXPRESSED IN HEART, SIGNAL = 2.3; EXPRESSED IN BONE MARROW, SIGNAL = 1.2; EXPRESSED IN BRAIN, SIGNAL = 1.4; SWISSPROT HIT: P24206, EVALUE 3.60e-01
gcaacaaccactacaatcaaatgaagacctcggaagccaaggctgtgcagctgttgcacaaagttcctcgaaagtccctcttgccttccatcctccccatgtt

SEQ ID NO: 19315 - DNA, 114 bp, Homo sapiens
  MAP TO AC000026.3; EXPRESSED IN FETAL LIVER, SIGNAL = 1.7; EXPRESSED IN HELA, SIGNAL = 1.7; EXPRESSED IN HEART, SIGNAL = 2.7; EXPRESSED IN LUNG, SIGNAL = 1.2; EXPRESSED IN BRAIN, SIGNAL = 1.7; EXPRESSED IN BT474, SIGNAL =   2; EXPRESSED IN ADULT LIVER, SIGNAL =   2; EXPRESSED IN PLACENTA, SIGNAL = 2.1; EXPRESSED IN HBL100, SIGNAL = 2.2; EXPRESSED IN BONE MARROW, SIGNAL =   2; SWISSPROT HIT: P52303, EVALUE 6.00e-05; NT HIT: U36251.1, EVALUE 4.00e-58; EST_HUMAN HIT: AW160866.1, EVALUE 8.00e-54
tgcacacctgacatctttgcccacggtcatcgatgcaatcactttcttcactgcctccttcttcttctccttcttgtcactgttgagctctgccttcagctcgaagatctcccc

SEQ ID NO: 19316 - DNA, 112 bp, Homo sapiens
  MAP TO AL121714.1; EXPRESSED IN LUNG, SIGNAL = 0.94; EXPRESSED IN BRAIN, SIGNAL = 1.7; EXPRESSED IN BT474, SIGNAL = 6.5; EXPRESSED IN HELA, SIGNAL = 1.9; EXPRESSED IN PLACENTA, SIGNAL = 0.97; EXPRESSED IN HBL100, SIGNAL = 0.97; EXPRESSED IN HEART, SIGNAL =   2; NT HIT: gi7657592, EVALUE 7.00e-57; EST_HUMAN HIT: AI150647.1, EVALUE 1.00e-56
actttatcaagatccatagccatagtagtaaggttcatcagggcggaatccatatgctgtggcagggcgtccaagaatgccaactggttggccaaagccatccattccaagg

SEQ ID NO: 19317 - DNA, 257 bp, Homo sapiens
  MAP TO AC007038.3; EXPRESSED IN LUNG, SIGNAL = 1.9; EXPRESSED IN HEART, SIGNAL = 1.1; EST_HUMAN HIT: AA356279.1, EVALUE 1.60e-01; SWISSPROT HIT: O02722, EVALUE 6.80e+00; NT HIT: AJ243727.1, EVALUE 9.00e-03
ccttgtgatgtttttctttccacttccgtcttccaaattctgcccctcagatagcccatggctggagcagcctgaggtgcagctgctgctgcagacagtcatcaatgtactcctcccaccgcggatcatcagcacatccaggagcaagaacttcatgttagagagctccccagcccactgctccacccctggggatgcggggaaagacttgcgcagggaagggctggctgagtccaccagccaagcagcatacttgg

SEQ ID NO: 19318 - DNA, 107 bp, Homo sapiens
  MAP TO AB020874.1; EXPRESSED IN HELA, SIGNAL = 1.6; EXPRESSED IN HEART, SIGNAL = 1.1; EXPRESSED IN LUNG, SIGNAL = 2.7; EXPRESSED IN BRAIN, SIGNAL = 1.4; EXPRESSED IN BT474, SIGNAL = 2.9; EXPRESSED IN ADULT LIVER, SIGNAL = 1.3; EXPRESSED IN FETAL LIVER, SIGNAL = 1.1; EXPRESSED IN PLACENTA, SIGNAL = 3.6; EXPRESSED IN HBL100, SIGNAL = 2.3; EXPRESSED IN BONE MARROW, SIGNAL =   1; EST_HUMAN HIT: AA927664.1, EVALUE 1.30e+00; NT HIT: M35599.1, EVALUE 3.10e+00
ggagttgactgccttaggtttcggtttaaaacccatctctgagtggaaccctgtgggaagatttgtgggactgctgtaatctgttagttgaggagaatcaggaccaa

SEQ ID NO: 19319 - DNA, 366 bp, Homo sapiens
  MAP TO AC007283.3; EXPRESSED IN BONE MARROW, SIGNAL = 2.7; EXPRESSED IN FETAL LIVER, SIGNAL = 1.7; EXPRESSED IN HELA, SIGNAL = 3.6; EXPRESSED IN BRAIN, SIGNAL = 1.5; EXPRESSED IN LUNG, SIGNAL = 5.2; EXPRESSED IN BT474, SIGNAL = 3.6; EXPRESSED IN ADULT LIVER, SIGNAL = 2.4; EXPRESSED IN PLACENTA, SIGNAL = 2.5; EXPRESSED IN HEART, SIGNAL = 2.5; EXPRESSED IN HBL100, SIGNAL = 2.7; NT HIT: gi11419297, EVALUE 0.00e+00; EST_HUMAN HIT: BE621247.1, EVALUE 1.00e-119; SWISSPROT HIT: P20839, EVALUE 1.00e-55
gaggcccccggcgagtgcttcttctcagacggaatgcagctcaagaagtaccagggcatgggctcactggatgccatggagaagagcagcagcagccagaaacaatacttcaacgacggggataaggcgaagatcacgcaggatgtcttgggctccatccaggacaaagggtccattcagaagttcgtgccctacctcatagtgggcatccagcatggctgccaggatatcggggcccacagcctgtctgtccttcggtccatgatgtactcaggggagctcaagtttgagaagcagaccatgtcagcccagatcgacggtggcatccatggcctgcactcttacgagaagtggctgtactgagga

SEQ ID NO: 19320 - DNA, 132 bp, Homo sapiens
  MAP TO AC007538.5; EXPRESSED IN BONE MARROW, SIGNAL = 0.94; EXPRESSED IN ADULT LIVER, SIGNAL = 1.7; EXPRESSED IN HBL100, SIGNAL =   1; EXPRESSED IN PLACENTA, SIGNAL =   1; EXPRESSED IN HEART, SIGNAL = 0.97; EXPRESSED IN LUNG, SIGNAL = 2.6; NT HIT: AJ277662.1, EVALUE 1.20e+00; SWISSPROT HIT: P09644, EVALUE 4.00e+00; EST_HUMAN HIT: BF105554.1, EVALUE 1.70e+00
cttctagtctcctgctagttcctcttatgaacagaaccaacagggagccagctggcataagagtctgaaaaatgtggtgtgtgagtcccagccccaggatcacagaacagagtagagaaagtgggtttgagg

SEQ ID NO: 19321 - DNA, 131 bp, Homo sapiens
  MAP TO AC007628.3; EXPRESSED IN HBL100, SIGNAL = 0.95; EXPRESSED IN HELA, SIGNAL =   1; EXPRESSED IN HEART, SIGNAL = 0.9; EXPRESSED IN BONE MARROW, SIGNAL =   1; EXPRESSED IN BRAIN, SIGNAL = 1.2; EXPRESSED IN FETAL LIVER, SIGNAL = 1.2; EXPRESSED IN ADULT LIVER, SIGNAL = 1.3; NT HIT: AE004871.1, EVALUE 1.10e+00; SWISSPROT HIT: gi6225307, EVALUE 4.00e+00
atgtacacctgtatcagccacccatactctgttcccaccagcagcatgggtttcaagagcacaaggagcctttcaagagcacagtccagctggtggtcttcagattgtcggtgcatgagtagcagcagcag

SEQ ID NO: 19322 - DNA, 270 bp, Homo sapiens
  MAP TO AC009488.1; EXPRESSED IN BT474, SIGNAL = 1.7; EXPRESSED IN LUNG, SIGNAL =  19; EXPRESSED IN FETAL LIVER, SIGNAL = 2.4; EXPRESSED IN ADULT LIVER, SIGNAL = 2.6; EXPRESSED IN PLACENTA, SIGNAL = 2.6; EXPRESSED IN HEART, SIGNAL = 2.9; EXPRESSED IN HELA, SIGNAL = 2.7; EXPRESSED IN HBL100, SIGNAL = 2.3; EXPRESSED IN BRAIN, SIGNAL =   2; EXPRESSED IN BONE MARROW, SIGNAL = 2.3; EST_HUMAN HIT: AA147143.1, EVALUE 1.70e-01; NT HIT: U40024.1, EVALUE 2.00e-06; SWISSPROT HIT: Q28983, EVALUE 2.00e-21
gcacacggtggcccttctgcagggtgacctgggcatcgtagatgtcaatgtagacctcatgaaggcggaaagcctcagttccaccttcctccttctcatgcttggcactgatcttgaagaagggcaaggccatggcggggtggcacactttcaccaggacaagagtgcaggcgtccgggatagaatggttactaccatcaaagctcacgtagtgggactcccctgggagctgacacactcccacacctgggaggacagagagacagctgg

SEQ ID NO: 19323 - DNA, 221 bp, Homo sapiens
  MAP TO AC009743.1; EXPRESSED IN LUNG, SIGNAL =   2; EXPRESSED IN ADULT LIVER, SIGNAL =   1; EXPRESSED IN HEART, SIGNAL = 1.3; NT HIT: AF195953.1, EVALUE 1.00e-04; SWISSPROT HIT: O84645, EVALUE 2.10e+00; EST_HUMAN HIT: AV748575.1, EVALUE 2.00e-04
gtggggtgctcctttgtgtcttcgatgagcaggaggatgtacttcacttcaaatctgaactgagtcgtggaaaggtaattatgaaacacaggttctctgtgacagctgaggccaaagaggaattgtttcagcagcactatccaatagaaccacacactgtccaacacactagccatgaggcacatgtggctattgagcacttgaagcctggtgagtgcaaa

SEQ ID NO: 19324 - DNA, 268 bp, Homo sapiens
  MAP TO AF166490.1; EXPRESSED IN BONE MARROW, SIGNAL = 5.5; EXPRESSED IN LUNG, SIGNAL = 4.5; EXPRESSED IN BRAIN, SIGNAL = 3.8; EXPRESSED IN ADULT LIVER, SIGNAL = 3.6; EXPRESSED IN BT474, SIGNAL = 9.4; EXPRESSED IN FETAL LIVER, SIGNAL = 2.3; EXPRESSED IN PLACENTA, SIGNAL = 3.6; EXPRESSED IN HELA, SIGNAL = 6.1; EXPRESSED IN HBL100, SIGNAL = 4.6; EXPRESSED IN HEART, SIGNAL =   3; NT HIT: X51760.1, EVALUE 1.00e-07; SWISSPROT HIT: P52742, EVALUE 1.00e-22; EST_HUMAN HIT: N89399.1, EVALUE 5.00e-88
catccatatggcttctctccagtgtgagttctctcatgttttcgaagatcagagcaatgagtaaaggctttcccacatagatgacatccgtgtggtttctctccagtgtgaatcatctcatgtcgcctaagattagaatttttgctaaaggttttcccacacacacgacattccaatgttatctctctagtgtgagtcacactgtgtggtctaagggcagagttttggataaaggcataatcaaatagatgacttccatatgatttac

SEQ ID NO: 19325 - DNA, 135 bp, Homo sapiens
  MAP TO AC010085.1; EXPRESSED IN PLACENTA, SIGNAL = 1.4; EXPRESSED IN HBL100, SIGNAL = 1.5; EXPRESSED IN HELA, SIGNAL = 1.2; EXPRESSED IN HEART, SIGNAL = 1.4; EXPRESSED IN BRAIN, SIGNAL =   1; EXPRESSED IN BONE MARROW, SIGNAL = 1.2; EXPRESSED IN LUNG, SIGNAL = 1.4; EXPRESSED IN ADULT LIVER, SIGNAL =  44; SWISSPROT HIT: P20828, EVALUE 6.80e+00; EST_HUMAN HIT: BE869136.1, EVALUE 2.90e-02; NT HIT: gi7657495, EVALUE 1.70e-02
tggcagggcataatcgtggggaagaaataggtctgacatcagtttatgacggtacagagccagagaaagaagcaacccaggtccaatcattcagcagaatcatctctcaaggtgccctggggcctcatgcagagg

SEQ ID NO: 19326 - DNA, 493 bp, Homo sapiens
  MAP TO AL031848.11; EXPRESSED IN BT474, SIGNAL = 1.4; EXPRESSED IN FETAL LIVER, SIGNAL = 1.5; EXPRESSED IN PLACENTA, SIGNAL = 1.7; EXPRESSED IN HBL100, SIGNAL = 1.4; EXPRESSED IN HEART, SIGNAL = 1.2; EXPRESSED IN BRAIN, SIGNAL =   1; EXPRESSED IN BONE MARROW, SIGNAL = 1.3; EXPRESSED IN ADULT LIVER, SIGNAL = 1.1; NT HIT: U91316.1, EVALUE 6.00e-61; SWISSPROT HIT: O00154, EVALUE 2.00e-17; EST_HUMAN HIT: N39397.1, EVALUE 2.00e-61
aaggtcttcaccatcagcccttccctgccagggcagtccagggacatgtggcttcagggggagaaagtgcccctctgccctccttctctctcatggaaacagcatctcagggccccttccgtggcctagcaggtggcaccccaccctgacgaacacaccacctaggaagagcccaaacattgggaaggttctctttcctccgggagccattgagccctttggggaccttctcccctccttggattgtcactgttgcacaaatggcatcctctccagaggcctcatcctgcttctcctctgccctaggatcatgcggccagatgatgccaacgtggccggcaatgtccacggggggaccatcctgaagatgatcgaggaggcaggcgccatcatcagcacccggcattgcaacagccagaacggggtaagggtctgggccccatacctctgggccctggaggccgcaccagtgtgagttcaggacaggagttcc

SEQ ID NO: 19327 - DNA, 196 bp, Homo sapiens
  MAP TO AL080278.7; EXPRESSED IN PLACENTA, SIGNAL = 3.3; EXPRESSED IN HBL100, SIGNAL = 2.9; EXPRESSED IN HEART, SIGNAL = 3.5; EXPRESSED IN FETAL LIVER, SIGNAL = 3.8; EXPRESSED IN ADULT LIVER, SIGNAL = 3.5; EXPRESSED IN HELA, SIGNAL = 3.2; EXPRESSED IN BRAIN, SIGNAL = 3.3; EXPRESSED IN LUNG, SIGNAL = 4.5; EXPRESSED IN BONE MARROW, SIGNAL = 3.6; EXPRESSED IN BT474, SIGNAL = 2.1; NT HIT: AB033019.1, EVALUE 3.90e-01; SWISSPROT HIT: P38137, EVALUE 4.90e+00
gtcctttaagacccaggacacacttcttcaggaccccagccttctctcggtgtctgagggcacagtttctttatccctgccacttaccatgcccacccttaaccaatttattcctagtctcagcttaaatatcacttccctggggaagtccacttttctagacttcaccaattatgtgagggccctatttacgatt

SEQ ID NO: 19328 - DNA, 388 bp, Homo sapiens
  MAP TO AL034431.13; EXPRESSED IN HBL100, SIGNAL = 1.1; EXPRESSED IN HEART, SIGNAL = 1.5; EXPRESSED IN LUNG, SIGNAL = 4.4; EXPRESSED IN FETAL LIVER, SIGNAL = 1.8; EXPRESSED IN ADULT LIVER, SIGNAL = 1.3; EXPRESSED IN PLACENTA, SIGNAL = 1.8; EXPRESSED IN HELA, SIGNAL = 0.99; EXPRESSED IN BRAIN, SIGNAL = 1.5; EXPRESSED IN BONE MARROW, SIGNAL = 1.4; EXPRESSED IN BT474, SIGNAL = 1.4; SWISSPROT HIT: P10686, EVALUE 6.20e+00; NT HIT: AF190472.2, EVALUE 8.10e-01; EST_HUMAN HIT: AA484872.1, EVALUE 1.60e-02
ttaggcaaatgctctctttaacaagcaagcatgggacgatgccctctctgtgcacagccatatgctgggctctgaagggacaagacactgtaggggagaaagacagaaaagaggaggacttaggatctgtgtaaacccagggagacttaagccctcgtgacacattattaataagtatacgttattatggctcttcagtggaagaagttggggcttaaagagattacatggcttgcccaaagtctctgtagccgtaatcccctgtactgtaaccactgttcccaaggtctgcccaataatgtgatagcagcaacagcacacagacccactccctctggtcattgccagcttcctcctgcctgtagaaggaccagaagtactggtgagc

SEQ ID NO: 19329 - DNA, 384 bp, Homo sapiens
  MAP TO AL035071.17; EXPRESSED IN BONE MARROW, SIGNAL = 6.3; EXPRESSED IN HELA, SIGNAL = 3.6; EXPRESSED IN HEART, SIGNAL = 4.1; EXPRESSED IN LUNG, SIGNAL = 8.4; EXPRESSED IN BRAIN, SIGNAL = 3.7; EXPRESSED IN BT474, SIGNAL = 2.3; EXPRESSED IN ADULT LIVER, SIGNAL = 5.4; EXPRESSED IN FETAL LIVER, SIGNAL = 4.1; EXPRESSED IN PLACENTA, SIGNAL = 5.1; EXPRESSED IN HBL100, SIGNAL = 3.5; NT HIT: AF156487.1, EVALUE 1.00e-74; EST_HUMAN HIT: BE279495.1, EVALUE 2.00e-73; SWISSPROT HIT: P39188, EVALUE 3.00e-06
aattcttttgtggaaatggagtcttgctgtgttgcccgggctggtatccaactcctggcctcaagcgatccccctgcctcggtctcccaaagtactgagaattacaggcatgaaccacggtgtctggctacatcttgcattttatggcaagctttttgttgccctcagggacagtggagtggacaggacttggcccaggatggcctctcctcactgggatttcttcatgtgggttttcttccaggatgggaaggagtttggaataggggacctcgtgtggggaaagatcaagggcttctcctggtggcccgccatggtggtgtcttggaaggccacctccaagcgacaggctatgtctggcatgcggtgggtccagtggtttgg

SEQ ID NO: 19330 - DNA, 479 bp, Homo sapiens; identical to SEQ ID NO: 2608
  MAP TO AL035422.12; EXPRESSED IN PLACENTA, SIGNAL = 1.2; EXPRESSED IN HEART, SIGNAL = 1.1; EXPRESSED IN BONE MARROW, SIGNAL = 1.3; EXPRESSED IN LUNG, SIGNAL = 2.1; EXPRESSED IN BRAIN, SIGNAL = 1.3; EXPRESSED IN FETAL LIVER, SIGNAL = 1.7; EXPRESSED IN ADULT LIVER, SIGNAL = 1.1; NT HIT: U78027.1, EVALUE 0.00e+00; EST_HUMAN HIT: AU139787.1, EVALUE 4.50e-01; SWISSPROT HIT: P36040, EVALUE 2.90e+00

SEQ ID NO: 19331 - DNA, 252 bp, Homo sapiens
  MAP TO AL096814.10; EXPRESSED IN BT474, SIGNAL = 3.8; EXPRESSED IN HBL100, SIGNAL =   4; EXPRESSED IN HEART, SIGNAL = 5.2; EXPRESSED IN LUNG, SIGNAL = 4.9; EXPRESSED IN FETAL LIVER, SIGNAL =   7; EXPRESSED IN ADULT LIVER, SIGNAL = 5.5; EXPRESSED IN PLACENTA, SIGNAL = 5.7; EXPRESSED IN HELA, SIGNAL = 4.3; EXPRESSED IN BRAIN, SIGNAL = 6.5; EXPRESSED IN BONE MARROW, SIGNAL =   6; SWISSPROT HIT: Q9UMX6, EVALUE 1.00e-36; EST_HUMAN HIT: H65065.1, EVALUE 2.30e-01; NT HIT: AF173227.1, EVALUE 0.00e+00
cccattcttgtcgaaggctcggaacatgccctctacatactgggaggcctcctcatcgtctgtgaccttgaagaagcgcttaaactcatgcataaagagtgtgccgctggggcactccatcacaaacttcttgtaccactcctggagctccgccacatctatctcgccagctgcctccgcctcctcccagctaaactcctgccccatgctagccctgaggagcatcagggagcaagggtctgtatctcctcc

SEQ ID NO: 19332 - DNA, 341 bp, Homo sapiens
  MAP TO AL035562.14; EXPRESSED IN FETAL LIVER, SIGNAL = 1.2; EXPRESSED IN ADULT LIVER, SIGNAL = 2.1; EXPRESSED IN PLACENTA, SIGNAL = 1.7; EXPRESSED IN HELA, SIGNAL = 1.2; EXPRESSED IN HEART, SIGNAL = 1.5; EXPRESSED IN LUNG, SIGNAL = 1.6; EXPRESSED IN BRAIN, SIGNAL = 1.5; EXPRESSED IN BONE MARROW, SIGNAL = 1.4; SWISSPROT HIT: P08547, EVALUE 4.00e-37; NT HIT: AL163248.2, EVALUE 5.00e-73; EST_HUMAN HIT: AV730761.1, EVALUE 1.00e-80
tggttggtggatggagtgttctgtatatatctattaagtccatttgttccagagtatagtttaaatccattatttctctattgactttctgtcctgatgatctgtctagtgctgtcagtggaatattgaagtcccccactattattgtgttgctgtctatctcatttctcaggtctattagtaattgttatataaatttgggaactccagtgttaggtgcatttatgcttaggattgtgatgttttcctgttggacaaggccttttatcaatatgtaatgtccctctttgtcttttttagctgctcttgctttaaagtctgatttgactgatataagaata

SEQ ID NO: 19333 - DNA, 269 bp, Homo sapiens
  MAP TO AL096887.5; EXPRESSED IN BONE MARROW, SIGNAL = 1.9; EXPRESSED IN HBL100, SIGNAL = 1.2; EXPRESSED IN HELA, SIGNAL = 2.7; EXPRESSED IN HEART, SIGNAL =   2; EXPRESSED IN BRAIN, SIGNAL = 1.9; EXPRESSED IN ADULT LIVER, SIGNAL = 3.5; EXPRESSED IN FETAL LIVER, SIGNAL = 1.4; EXPRESSED IN BT474, SIGNAL = 1.1; EXPRESSED IN PLACENTA, SIGNAL = 2.7; NT HIT: X87344.1, EVALUE 5.00e-26; EST_HUMAN HIT: AA016131.1, EVALUE 3.00e-49; SWISSPROT HIT: P16521, EVALUE 3.80e-01
agaactaggttgaggctgagatggctgacatgacagaagtagaattcaggatatggataggaacgaacttcattcagcaaaaggattacattgtaatgcaatgcaaggaagctaaaaatcatgataaaacattgcaagagctgacagacaaaatagccagtatagaaaggaatgcagtcaacctgatagagctgaaaagcacactgcaagaacttcagaatgcaatcacatgtattaatagcagaatagataaagcagaggaaggaatt

SEQ ID NO: 19334 - DNA, 99 bp, Homo sapiens
  MAP TO AL078591.15; EXPRESSED IN PLACENTA, SIGNAL =   8; EXPRESSED IN FETAL LIVER, SIGNAL = 6.6; EXPRESSED IN ADULT LIVER, SIGNAL = 9.7; EXPRESSED IN HEART, SIGNAL = 8.4; EXPRESSED IN HELA, SIGNAL =   9; EXPRESSED IN HBL100, SIGNAL = 7.4; EXPRESSED IN BRAIN, SIGNAL = 6.5; EXPRESSED IN LUNG, SIGNAL = 6.2; EXPRESSED IN BONE MARROW, SIGNAL = 7.8; EXPRESSED IN BT474, SIGNAL = 5.8; EST_HUMAN HIT: AV730056.1, EVALUE 7.00e-33; SWISSPROT HIT: P10323, EVALUE 9.20e+00; NT HIT: AB014607.1, EVALUE 5.00e-11
cgggggctcgaatccaggtcgaagggtcaccggagcgacggttggagaacgtggaactaagctggaggacactcgagtactcttaaagccaaccccgtg

SEQ ID NO: 19335 - DNA, 244 bp, Homo sapiens
  MAP TO AL033383.24; EXPRESSED IN LUNG, SIGNAL = 2.1; EXPRESSED IN BONE MARROW, SIGNAL = 1.1e+02; EXPRESSED IN BT474, SIGNAL = 1.6; EXPRESSED IN FETAL LIVER, SIGNAL = 2.2; EXPRESSED IN ADULT LIVER, SIGNAL = 1.1; EXPRESSED IN HBL100, SIGNAL = 1.3; EXPRESSED IN HELA, SIGNAL = 1.9; EXPRESSED IN PLACENTA, SIGNAL = 1.1; EXPRESSED IN HEART, SIGNAL = 1.2; NT HIT: AB011108.1, EVALUE 0.00e+00; EST_HUMAN HIT: AF074687.1, EVALUE 0.00e+00
cttggagaagaaagtcgtctcctctctggttctcgtcgttttctttctaaggatcggctcttggctcttctcccaggagacagtgtccgcgagggggatttgctctgcttagatcttctatcattcaaaagtggagacctgcttcttcttgatttatcacgtggttttggagacaaacttcttcttttaggactacgaccaggtcttctgctgggtgacctattttctttcccagatgaagcat

SEQ ID NO: 19336 - DNA, 179 bp, Homo sapiens
  MAP TO AL080247.3; EXPRESSED IN PLACENTA, SIGNAL = 0.99; EXPRESSED IN BONE MARROW, SIGNAL =   1; EXPRESSED IN FETAL LIVER, SIGNAL = 1.2; EXPRESSED IN HEART, SIGNAL = 1.1; EXPRESSED IN HBL100, SIGNAL = 0.92; EXPRESSED IN BRAIN, SIGNAL = 1.1; EXPRESSED IN LUNG, SIGNAL = 3.5; EXPRESSED IN ADULT LIVER, SIGNAL = 1.1; NT HIT: AL161494.2, EVALUE 2.00e-05; EST_HUMAN HIT: AW378309.1, EVALUE 1.10e-01; SWISSPROT HIT: P23249, EVALUE 3.00e-09
ctgtaaaacagcctctattattgtcactgtctttccagtaccaggaggtccaaagagaatatacgggaggggacggcagtcaccactcagaatccttttaactgctaacttctgattttcatttagcactgggttgaaaaactccatctttcttgctttaggggtctgaatttcatcta

SEQ ID NO: 19337 - DNA, 121 bp, Homo sapiens
  MAP TO AL034384.1; EXPRESSED IN BT474, SIGNAL =   1; EXPRESSED IN PLACENTA, SIGNAL = 0.98; EXPRESSED IN BONE MARROW, SIGNAL = 1.3; EXPRESSED IN FETAL LIVER, SIGNAL = 1.2; EXPRESSED IN ADULT LIVER, SIGNAL = 1.3; EXPRESSED IN HEART, SIGNAL =   1; EXPRESSED IN HBL100, SIGNAL = 0.92; EXPRESSED IN BRAIN, SIGNAL = 1.6; EXPRESSED IN LUNG, SIGNAL = 3.2; SWISSPROT HIT: P45789, EVALUE 6.00e-01; NT HIT: X02158.1, EVALUE 2.70e-01
agtcaacatgaaggaggagcaaaggcctgagagtgtgaactctgtcattggtttggcagccacccaggatgcccctggccaggaggtggctgggcaactctgggctcacagacagccattg

SEQ ID NO: 19338 - DNA, 311 bp, Homo sapiens
  MAP TO AL096678.8; EXPRESSED IN BT474, SIGNAL = 1.1; EXPRESSED IN BONE MARROW, SIGNAL = 1.2; EXPRESSED IN LUNG, SIGNAL = 1.7; EXPRESSED IN ADULT LIVER, SIGNAL = 1.4; EXPRESSED IN PLACENTA, SIGNAL = 0.96; EXPRESSED IN HEART, SIGNAL = 0.98; EXPRESSED IN HELA, SIGNAL = 2.1; EXPRESSED IN HBL100, SIGNAL = 1.9; EXPRESSED IN BRAIN, SIGNAL = 1.2; NT HIT: AB002299.1, EVALUE 0.00e+00; SWISSPROT HIT: P25386, EVALUE 7.60e-02; EST_HUMAN HIT: AU133385.1, EVALUE 0.00e+00
ctggggctggaaaccttggtcagcagggccattctctccaccttcttcatcggcttccttgtctttttcctccacagactgctgctgctcctcagagtgttcttcaggatgctgagcagcatctccatcttggtcatcagctcctgtgtccatttcctcttccccttctgccttgtcatcttcactggggccttcctcaggctcctgtggactctgactttcgttctggtcggtctcggtctctcctctttcctcagcttcatgacctgcttcttctggtttttcttttatctccaaaggattctcttctg

SEQ ID NO: 19339 - DNA, 307 bp, Homo sapiens
  MAP TO AL096710.8; EXPRESSED IN HEART, SIGNAL = 1.4; EXPRESSED IN BRAIN, SIGNAL = 1.1; EXPRESSED IN BONE MARROW, SIGNAL = 0.92; EXPRESSED IN LUNG, SIGNAL = 1.9; EXPRESSED IN BT474, SIGNAL = 1.1; EXPRESSED IN ADULT LIVER, SIGNAL = 1.6; EXPRESSED IN HBL100, SIGNAL = 1.7; EXPRESSED IN HELA, SIGNAL = 0.92; NT HIT: M69225.1, EVALUE 0.00e+00; EST_HUMAN HIT: BE895865.1, EVALUE 2.80e-01; SWISSPROT HIT: Q03001, EVALUE 6.00e-33
tttcatattgatttcttcttctgttaaattttgatccagcaaagaagactttagaaggggttttcggatctgcatcaacttcaaagtttgcaatgaatttggctctactcctgaactgaaatttggaactaatcctgatgggaaaccaggtgtataagctggagtgacagatggagtcaggcgggaagtcatccctgatgacaggccagaagtcatactagaagaggttagggaaggtgttaaactctgggtcagccctgaggtcagactagggtgtaaggtctgtgcaaatcctgagtttaaactt

SEQ ID NO: 19340 - DNA, 117 bp, Homo sapiens
  MAP TO AL109624.1; EXPRESSED IN ADULT LIVER, SIGNAL = 7.6; EXPRESSED IN PLACENTA, SIGNAL = 7.3; EXPRESSED IN BRAIN, SIGNAL = 6.8; EXPRESSED IN BT474, SIGNAL = 3.7; EXPRESSED IN FETAL LIVER, SIGNAL = 6.1; EXPRESSED IN HEART, SIGNAL = 8.2; EXPRESSED IN HELA, SIGNAL = 5.5; EXPRESSED IN HBL100, SIGNAL = 4.8; EXPRESSED IN LUNG, SIGNAL = 4.1; EXPRESSED IN BONE MARROW, SIGNAL = 8.2; NT HIT: X97869.1, EVALUE 5.50e-02; EST_HUMAN HIT: AW881935.1, EVALUE 1.00e+00
ggccctggttcatggggaagttctggacacagaggagattcctttagaaattgagagccaagttaaccctgtggtgtaagctcaggaagaggtcagaggagcaaaaacggctaggcc

SEQ ID NO: 19341 - DNA, 4656 bp, Homo sapiens
  MAP TO AL050341.18; EXPRESSED IN PLACENTA, SIGNAL = 1.1; EXPRESSED IN HBL100, SIGNAL = 2.2; EXPRESSED IN HELA, SIGNAL =   3; EXPRESSED IN HEART, SIGNAL = 1.2; EXPRESSED IN BRAIN, SIGNAL = 2.2; EXPRESSED IN BONE MARROW, SIGNAL = 1.3; EXPRESSED IN LUNG, SIGNAL = 4.5; EXPRESSED IN ADULT LIVER, SIGNAL =   1; EXPRESSED IN BT474, SIGNAL = 3.8; EXPRESSED IN FETAL LIVER, SIGNAL =   1; EST_HUMAN HIT: AU130403.1, EVALUE 0.00e+00; NT HIT: U22377.1, EVALUE 0.00e+00; SWISSPROT HIT: Q06730, EVALUE 6.00e-15
gcacaagatgctggtcttggggtgtcaattttactgtgtgtcagagctcttcaactcagatcaagtgaagatgaggaaatgaaggcatcagtttgtaaaacaattgcctgtcttttaccagaagatttagaagttagacgagcctgtcagcttacagaattcttaattgaacccagtttggatggatttaatatgttagaagaactatatttgcaaccagatcaaaaatttgatgaagaaaatgcaccggttccaaattctcttcgatgtgagctcttactagctttaaaagcccactggccttttgatcctgagttttgggactggaaaactttaaaacgacactgccaccaacttttaggacaagaagcctcagattctgatgatgatttaagtggctatgaaatgtccattaatgacacagatgttttagagtcatttctcagtgactatgatgagggtaaagaagataaacaatatagaagaagagatttgacagatcagcataaggagaaaagagacaaaaaacctattggctcttctgaaagatatcagaggtggcttcagtacaagtttttctgtttgttatgtaagcgggaatgtatagaggctagaattcttcatcattctaagatgcatatggaagatggaatttacacctgtccagtttgtattaaaaaatttaagagaaaagaaatgtttgttcctcatgtgatggagcatgttaaaatgccaccaagcagaagggaccgctctaaaaagaaattactgttaaaaggctctcaaaagggtatttgtcctaagagcccctctgcaatcccagagcaaaaccattcattgaatgaccaagccaaaggagagtctcatgaatatgtcacattcagcaaattagaagattgccacctgcaagacagagatttgtatccatgtcccggtacagactgttcccgtgtgtttaagcaatttaaatacttaagtgtgcatcttaaagctgaacaccaaaataatgatgaaaatgccaagcactacttggatatgaaaaatagaagagagaagtgtacttactgtcgacgacattttatgtctgcttttcaccttcgagagcacgaacaagtgcattgtgggcctcagccttatatgtgtgtatctatagattgctatgctaggtttggatcagtaaatgaactacttaaccataaacaaaagcatgacgatctgcgttacaaatgtgaattaaatggctgtaatattgttttcagtgacttgggacagctttaccaccatgaagcacaacactttagggatgcatcttacacatgcaacttccttggctgtaaaaagttctattactccaaaattgaataccagaatcacctctcaatgcataatgttgaaaattcaaatggagacataaagaaatcagtgaaacttgaggagtctgcaacaggtgaaaagcaagattgtattaatcagccccatctacttaaccaaactgataaatcacatttacctgaagatcttttctgtgcagaatcagctaattctcaaatagatacagaaactgcagaaaacctgaaagaaaacagtgacagtaattctagtgatcagttaagtcatagctcttcagcttcaatgaatgaagagctaattgacacactagatcactctgaaactatgcaggatgtattgttatctaatgagaaagtctttgggccctccagtttaaaagaaaaatgttccagtatggcagtttgttttgacgggactaagtttacctgtggttttgatggctgtggttccacatacaaaaatgcaagaggaatgcagaaacatttacggaaggttcatccataccatttcaagcccaaaaagataaagacgaaagatctgtttccctctttgggtaatgaacataatcagacaactgaaaagttggatgcagaacctaaaccctgctcagatacaaacagtgactccccagatgaaggtctagatcacaatattcacattaaatgtaaacgagaacatcaaggttattcctcagaatcctccatttgtgcttctaaaaggccctgtacagaggataccatgttggaacttctgttacgcttgaaacatttaagcttgaaaaactcaataacacatggatctttctcagggtcattgcaggggtacccatccagtggtgctaagtctcttcagtcagtttcatctatctcagaccttaattttcagaatcaagatgaaaacatgccaagtcagtaccttgcacagttggcggctaagccgtttttctgtgagcttcaaggatgcaaatatgaatttgtgaccagagaggctctgttaatgcattatcttaaaaagcataattattcaaaagaaaaagtccttcagttaaccatgttccaacatcggtattccccatttcagtgtcatatttgccaaaggtcatttacaagaaaaacacaccttaggattcattataaaaataaacatcaaattggcagtgacagagcaactcacaaactattagataatgaaaagtgtgatcatgaaggcccatgttcagtagataggttgaaaggtgattgttctgcagaacttggaggtgatcccagtagtaactctgagaaaccacactgtcatcctaaaaaggatgaatgtagttctgaaacagatttggaatcatcttgtgaagaaacagaaagtaaaacatctgacatttcatcaccaataggcagccatagagaagaacaagaaggaagagagggcagaggtagcaggcgaactgttgctaaaggaaatctgtgttatattttgaataaataccacaaaccattccattgtattcataaaacttgcaactcctcattcaccaatctaaaaggcttaattcgccattacagaactgtacatcagtacaacaaagaacagttatgtttggagaaagacaaagcaagaaccaaaagggaacttgtcaaatgtaaaaagatatttgcttgcaaatataaggaatgtaataaacgcttcctgtgttccaaagctcttgctaagcactgtagtgattctcataacctagaccatattgaagagcctaaagtactttccgaagctggatctgcagcaaggttttcttgtaaccagcctcagtgccctgctgttttttatacattcaacaagttgaagcaccacttgatggaacagcataatattgaaggggaaatacattcagattatgaaattcattgtgatcttaatggctgtggccagattttcacccatcgcagtaattactcacaacatgtatattaccgacataaagactattatgatgatttgtttagaagccagaaagtagcaaatgagagactactaaggagtgaaaaggtatgtcaaacagctgatactcaggggcatgaacatcagaccaccaggagatcatttaatgctaagtctaaaaaatgtggcttaatcaaagaaaagaaagccccaataagttttaaaaccagagctgaggccctccatatgtgtgtggagcactctgagcacacacagtacccctgcatggttcaaggatgcttatctgtggtgaagttggagagcagcattgtgaggcattacaaacgcactcatcagatgagtagtgcctatttagagcaacagatggagaatcttgttgtttgcgttaagtacggtaccaaaattaaggaggaacccccttctgaagcagatccctgtataaagaaagaagaaaatagaagctgtgaatcagagcgcacagaacacagccattccccgggtgacagtagtgcacccatccagaacactgattgctgtcattcaagtgaaagggatggaggtcagaaagggtgcatagaaagcagctcagtatttgatgcagatactctgctctacaggggaactttgaaatgtaatcatagttccaaaaccacttccctagaacagtgtaatatagttcagcctcctcctccttgtaaaatagaaaattccatacctaatcccaatgggactgaaagtgggacttatttcacaagtttccagctgcctttaccaaggatcaaagaatcagaaactaggcagcatagttcagggcaagaaaacactgtaaaaaatccaacccatgtcccaaaagagaattttaggaaacattcacagccccggtcatttgatttgaagacttacaaacctatgggatttgaatcttcatttctgaaatttattcaggaaagtgaagagaaagaagatgattttgatgattgggagccttcagagcacttaacattaagtaattcttcacagtccagtaatgatttaacagggaatgttgtggcaaataatatggtgaatgacagtgaacctgaagttgacatacctcattcttccagtgactctacaattcatgagaacctgactgcaatcccacctttaatagtagctgaaacaacaacagttccttccttggaaaacctgagggttgtattggacaaagcattaacagactgtggagagcttgccttaaaacagcttcattatcttcggccagtggtggttcttgaaagatctaagttttccacaccaattttagacttatttccaacaaaaaagacagatgagctttgtgtaggaagttcataa

SEQ ID NO: 19342 - DNA, 283 bp, Homo sapiens
  MAP TO AP000509.1; EXPRESSED IN BONE MARROW, SIGNAL = 1.2; EXPRESSED IN LUNG, SIGNAL = 4.9; EXPRESSED IN ADULT LIVER, SIGNAL = 2.2; EXPRESSED IN BT474, SIGNAL = 4.7; EXPRESSED IN FETAL LIVER, SIGNAL = 1.1; EXPRESSED IN HELA, SIGNAL = 1.7; EXPRESSED IN PLACENTA, SIGNAL = 1.2; EXPRESSED IN HBL100, SIGNAL = 1.2; EXPRESSED IN HEART, SIGNAL = 1.6; NT HIT: X55900.1, EVALUE 1.10e-02; EST_HUMAN HIT: BE883690.1, EVALUE 1.00e-83; SWISSPROT HIT: P10265, EVALUE 2.00e-31
cactggccgtctgcgtggccagttcaacacactcaacttaaaacagttggagttggtaaagcccctgaagtatatcaaagccattatattttgcattgtgaaggtcccgatggacaacctgggactattcaaccaattataacttccgtacctataaatttatgggggagagatttattacaacaatggggagcacaagttctacttccagagcaattatatagccctcaaagtcaacatatgatgcatgaaatggggcatgtccctggtatgggactaggaa

SEQ ID NO: 19343 - DNA, 226 bp, Homo sapiens
  MAP TO AP000513.1; EXPRESSED IN PLACENTA, SIGNAL = 0.99; EXPRESSED IN HBL100, SIGNAL = 1.1; EXPRESSED IN HELA, SIGNAL =   2; EXPRESSED IN HEART, SIGNAL = 0.86; EXPRESSED IN BRAIN, SIGNAL = 0.92; EXPRESSED IN BONE MARROW, SIGNAL =   1; EXPRESSED IN LUNG, SIGNAL = 2.1; EXPRESSED IN BT474, SIGNAL = 1.8; SWISSPROT HIT: Q9R1R0, EVALUE 8.40e+00; EST_HUMAN HIT: AI808694.1, EVALUE 6.00e-94; NT HIT: gi4506008, EVALUE 4.00e-94
agaaagataagaagaaacgtaaagatgaaggaaaaagtcgaactacccttcctgagcgacctttgacagaggtgaaggctgagacccgggctgaggaggccccagagaagaagagggagaagcccaagtctcttcgcaccacagcacccagtcatgccaagttccgttccactggtaagactggcggctggcctctggagggttcatgggcatgtgcacacccaga

SEQ ID NO: 19344 - DNA, 504 bp, Homo sapiens
  MAP TO AP000346.1; EXPRESSED IN PLACENTA, SIGNAL = 1.7; EXPRESSED IN HELA, SIGNAL = 1.6; EXPRESSED IN HBL100, SIGNAL = 1.4; EXPRESSED IN HEART, SIGNAL = 1.3; EXPRESSED IN BONE MARROW, SIGNAL = 2.1; EXPRESSED IN BRAIN, SIGNAL = 1.7; EXPRESSED IN ADULT LIVER, SIGNAL = 1.4; EXPRESSED IN BT474, SIGNAL = 1.4; EXPRESSED IN FETAL LIVER, SIGNAL = 1.2; EST_HUMAN HIT: AW887015.1, EVALUE 0.00e+00; SWISSPROT HIT: O49160, EVALUE 1.20e-01
gtcatggccaacaaggccctcctcatggtcatgtccaaggtccttctgctgtacctggtgtctctgctggatgtgacacagagctggcccctccttccagtgactcttttccccttgaggtctgactcccctttcctcttccccggcatctgtttctccacggcccatgcctggctgctgactccccagacccccacccagacctctttcttggccgtctttacactctgtgacccccactattgcccacatggtgaggctggagtctatctcagctccaaaccctctcagctcctcaactgcctactgaccttgcccagtgggctacccaacaggagtctcaaactaatcacttccagagatgaccaccttcccccagcccaactcattttctgtcttcatctcatcacaatgaccatgggcggtctcaaccccacagccagaaacctggagtccctggattcagtcacctcgcctcccacactgaaatggcttctgtgtact

SEQ ID NO: 19345 - DNA, 172 bp, Homo sapiens
  MAP TO AP000352.2; EXPRESSED IN FETAL LIVER, SIGNAL =  21; EXPRESSED IN HELA, SIGNAL =  25; EXPRESSED IN HEART, SIGNAL =  38; EXPRESSED IN LUNG, SIGNAL =  15; EXPRESSED IN BRAIN, SIGNAL =  19; EXPRESSED IN BT474, SIGNAL =  14; EXPRESSED IN ADULT LIVER, SIGNAL =  35; EXPRESSED IN PLACENTA, SIGNAL =  22; EXPRESSED IN HBL100, SIGNAL =  16; EXPRESSED IN BONE MARROW, SIGNAL =  21; EST_HUMAN HIT: BF084115.1, EVALUE 2.00e-74; NT HIT: gi11417862, EVALUE 2.00e-92; SWISSPROT HIT: Q9Y6J0, EVALUE 4.00e-30
ctggactccacagatgtcaacctctggtataagattggacatgtggccctgaggctcatccggatccccctggctcgccatgcttttgaggaagggctgcggtgcaatcctgaccactggccctgtttggataacctaatcactgtcctgtacaccctcagtgattacacaa

SEQ ID NO: 19346 - DNA, 170 bp, Homo sapiens
  MAP TO AP000356.1; EXPRESSED IN HEART, SIGNAL = 0.99; EXPRESSED IN HELA, SIGNAL = 4.5; EXPRESSED IN PLACENTA, SIGNAL = 8.5; EXPRESSED IN BRAIN, SIGNAL = 4.4; EXPRESSED IN LUNG, SIGNAL = 1.7; EXPRESSED IN BONE MARROW, SIGNAL = 3.9; EXPRESSED IN ADULT LIVER, SIGNAL = 2.4; EXPRESSED IN FETAL LIVER, SIGNAL = 9.3; EST_HUMAN HIT: W55897.1, EVALUE 5.00e-87; SWISSPROT HIT: Q03248, EVALUE 1.00e-28; NT HIT: AF169555.1, EVALUE 3.00e-91
tcaacttactacatggagggaaacctgggccaccccgtgttccagacgcagttcggaaggatcgcggtgaacatttgctacgggcggcaccaccccctcaactggcttatgtacagcatcaacggggctgagatcatcttcaacccctcggccacgataggagcactcag

SEQ ID NO: 19347 - DNA, 137 bp, Homo sapiens
  MAP TO AP000497.1; EXPRESSED IN BT474, SIGNAL = 1.4; EXPRESSED IN FETAL LIVER, SIGNAL = 2.1; EXPRESSED IN HEART, SIGNAL = 2.6; EXPRESSED IN LUNG, SIGNAL = 5.7; EXPRESSED IN BRAIN, SIGNAL = 1.8; EXPRESSED IN ADULT LIVER, SIGNAL = 2.4; EXPRESSED IN PLACENTA, SIGNAL = 2.3; EXPRESSED IN HELA, SIGNAL = 1.8; EXPRESSED IN HBL100, SIGNAL = 1.5; EXPRESSED IN BONE MARROW, SIGNAL = 2.6; EST_HUMAN HIT: BE931845.1, EVALUE 2.00e-46; NT HIT: AB026898.1, EVALUE 3.00e-53; SWISSPROT HIT: P53242, EVALUE 8.80e+00
ttttcctcctaacactcgatatggaggcaagtctcttgtttttcctccaaagaagccagcaccgataggagaattccagagtacagagccagaaccgaggtatgtttttttttggcttgaaatttcagaaaacctgg

SEQ ID NO: 19348 - DNA, 1114 bp, Homo sapiens
  MAP TO AL109928.5; EXPRESSED IN BONE MARROW, SIGNAL = 1.1; EXPRESSED IN BT474, SIGNAL =   2; EXPRESSED IN ADULT LIVER, SIGNAL = 0.9; EXPRESSED IN HELA, SIGNAL = 1.4; EXPRESSED IN HBL100, SIGNAL =   1; EXPRESSED IN HEART, SIGNAL =   1; EXPRESSED IN LUNG, SIGNAL = 1.2; EXPRESSED IN BRAIN, SIGNAL = 1.2; EST_HUMAN HIT: BF000018.1, EVALUE 0.00e+00; SWISSPROT HIT: Q29052, EVALUE 2.80e+00
aaagaattcttcaggaaaaaggcagagtaaatcccaagtaccccacgcttcttcccagccgagaagcagcctcacagctgtcacccagcctactgaagaaaaacttaaagaaagcatttccccggaagcaagacgcaaaaggaatccactcggttccaggtgtcagggggcctcagggaataaactgtttcttgattttcagtcaatgaaaattattaaagagaatgctgatgaggacagtgcaagtgatctctctgattcggaaagaattcccattcctccttctcccctcacacctccagatctcaatcttcgagctgaagaaattgatccagtttactttgatcttcaccctggtcagggccatacaaaacctgaatactattatcctaatttccttccatcccctttcagctcctgggacctacgagatatggccctgcttctgaacgcagagaacaaaacggaagccgtgccccgagtgggaggacttcttgggaagtatatcgatagacttattcagcttgagtggctgcaagtccagactgtacagtgtgaaaaagcaaaggggggcaaagcaaggccccccactgcccctgggacctcaggggcactgaaaagccctgggagaagtaagctaattgctagtgctctgtccaagccactacctcaccaggaaggggcttcaaagtcaggcccttcccgaaagaaagcttttcaccatgaagaaatccacccatcacattatgcatttgagacttcccctagacccattgatgtgcttggtggtaccaggttttgttctcagaggcaaacccttgaaatgaggacagaagaaaagaaaaagaaatcaagtaagagtacgaagctgcagcgctgggatctgtccggcagtggaagcagctctaaggtggaaaccagcggtcacattcgagttcccaaacaggcagctgtgattctggactcagcagattcctgtaaggcctccaaaacacaagcacatgcacatcctaggaaaaagggaaaggcagagagctgtggtcatgccactgtatcgagtgagaaaaaactgaaaacaaacggagtaaagcaaaacacatataaactaaaataa

SEQ ID NO: 19349 - DNA, 757 bp, Homo sapiens
  MAP TO AL034380.21; EXPRESSED IN PLACENTA, SIGNAL = 4.8; EXPRESSED IN HBL100, SIGNAL = 5.2; EXPRESSED IN HEART, SIGNAL = 3.3; EXPRESSED IN BONE MARROW, SIGNAL = 5.4; EXPRESSED IN FETAL LIVER, SIGNAL = 3.4; EXPRESSED IN HELA, SIGNAL =  14; EXPRESSED IN BRAIN, SIGNAL = 4.4; EXPRESSED IN LUNG, SIGNAL = 5.7; EXPRESSED IN BT474, SIGNAL = 4.5; EXPRESSED IN ADULT LIVER, SIGNAL = 4.8; SWISSPROT HIT: P55455, EVALUE 2.30e+00; NT HIT: AF231056.1, EVALUE 0.00e+00; EST_HUMAN HIT: BE383165.1, EVALUE 0.00e+00
tgtggggttcgtcctctaggatcttgatgttccggtggctctgtgctgggctaatgccaaatggaaacttgctgctctccttgatggcctctgaactcttagctccatcctcggtcaaggtgctagaccgagtagacaacatgtcatccatagtggctgtgatccgtttttctggaggtccatcaggtgggggcccctcctggtctgttgtccctggtgtaccctctgctgttgtcacatgcttccgaggggctggtgggcagggtgcgtgaggccgggaaggcagcagctctgtcttgctctcgaagtgggtctggatatgctcagtggtgtcccccccaccaatccgccagtgcagcaggccactgtcaaactcctgcacacgcccaagcttatctgagcagtccaccacaaatggatcattcttctgtacgatctttactggaagcttgtcaaacttactgatcagcttctcctcactattctctgaagctggcttgtccttgcctgaaaaggctatctcctcatcattttcaactacttcctcttcttcttcctcttctagtttaggacctagaagttcttcttcttcttccccaccctccatgggagctggactagacaccttgctgaacctcccaggatccagtagcgttctctgtcctgggtcacccacctcatactcctttaaaatgccaaagatctcaatcaggcatcgtcggaaatattctacaaggagctctagcaaccctgggag

SEQ ID NO: 19350 - DNA, 952 bp, Homo sapiens
  MAP TO AP000552.1; EXPRESSED IN PLACENTA, SIGNAL = 2.8; EXPRESSED IN HBL100, SIGNAL = 8.3; EXPRESSED IN HEART, SIGNAL = 2.7; EXPRESSED IN FETAL LIVER, SIGNAL = 2.2; EXPRESSED IN ADULT LIVER, SIGNAL = 3.3; EXPRESSED IN HELA, SIGNAL = 2.6; EXPRESSED IN BRAIN, SIGNAL = 2.6; EXPRESSED IN LUNG, SIGNAL = 1.9; EXPRESSED IN BONE MARROW, SIGNAL =   3; EXPRESSED IN BT474, SIGNAL = 2.2; NT HIT: gi11427757, EVALUE 0.00e+00; SWISSPROT HIT: Q69154, EVALUE 3.00e-02; EST_HUMAN HIT: BE531263.1, EVALUE 0.00e+00
caggcggaggcagtagatgtaagcgggaactggctcacagcagtgcccaactgccctgtgttccccaaaacttgtacctggctcaggtggtgtggccctggcagccaggtgggatccagcaaggaccagggctctgcctccccagtcagcatgagcagagcagactcctttgagcagagcatcagggcagaaatagaacagtttctgaatgagaaaagacagcatgagacccaaaaatgtgatgggtcagtggagaagaaaccagacacacatgaaaattcggcgaagtcactctcgaaatcccaccaagagccggctacaaaggtggtgcaccggcagggcctgatgggcgtccagaaggagttcgccttctgcagacctcccccggttagcaaagacaaacgtgcagcccagaagcctcaggtccaaggtcacgaccacgaccacgcaggagaaggagggcagcacaaagccagcaacccccaccgcccttcagaagcagtacagaataaaagtgggattaaaaggaacgccagcaccgcaaggaggggaaagcgagtcacgagcgccgtacaggcgcccgaggcgtccgactccagcagcgacgacggcattgaggaggccatccagctgtaccaggtgcagaaaacacacaaggaggccgacggggacccgccccagagggtccagctccaagaggaaagagcacctgcccctcccgcacacagcacaagcagcgccacaaaaagtgccttgccagagacccacaggaaaacacccagcaagaagaagccagtgcccaccaagaccacggaccctggtccaggggatctggacgctgaccattcccccaagatcccaaaggaaaccaaagctccacctccaacgagcccggcttccaggagcaagtttgtggaatggtcctcttgccaggcagacacctccgctgagc

SEQ ID NO: 19351 - DNA, 258 bp, Homo sapiens
  MAP TO AC004019.11; EXPRESSED IN BONE MARROW, SIGNAL = 2.5; EXPRESSED IN BT474, SIGNAL = 2.8; EXPRESSED IN HBL100, SIGNAL =   3; EXPRESSED IN HEART, SIGNAL = 4.2; EXPRESSED IN LUNG, SIGNAL = 8.5; EXPRESSED IN BRAIN, SIGNAL = 2.9; EXPRESSED IN ADULT LIVER, SIGNAL = 3.4; EXPRESSED IN FETAL LIVER, SIGNAL = 2.7; EXPRESSED IN PLACENTA, SIGNAL = 3.7; EXPRESSED IN HELA, SIGNAL = 2.6; SWISSPROT HIT: P22105, EVALUE 2.70e-01; EST_HUMAN HIT: BF372962.1, EVALUE 3.00e-13
atgaagaattttggattcgagaggatgaaaagcgggagaaaagacggagtcgggctgggcgaagtggtgggagccatgtttggacccgctccagggacccagaagggtccagcaggaaacagcagcccatggagaatggaggaaagtcgttgccccccacacgccgagcgccctcttctggggacgatcagagcagcagctccacacagcccccgcgggaggtgggcacttccaatggccgaggtttttctcatcccc

SEQ ID NO: 19352 - DNA, 143 bp, Homo sapiens
  MAP TO AC005948.6; EXPRESSED IN PLACENTA, SIGNAL = 1.2; EXPRESSED IN HEART, SIGNAL = 1.4; EXPRESSED IN LUNG, SIGNAL = 3.6; EXPRESSED IN BRAIN, SIGNAL = 0.97; EXPRESSED IN BONE MARROW, SIGNAL = 1.3; EXPRESSED IN BT474, SIGNAL = 1.2; EXPRESSED IN FETAL LIVER, SIGNAL = 1.2; EXPRESSED IN ADULT LIVER, SIGNAL = 1.1; EXPRESSED IN HBL100, SIGNAL = 1.4; SWISSPROT HIT: O14074, EVALUE 3.90e+00
atcaagagagactctatcaaagacttactgaaatccaaagatatgtctattgcatttatttatcagatgagccataatgccaaagaagagatgaagttagtgcagaatgacttctttatcagcaatccacacaaattcctggt

SEQ ID NO: 19353 - DNA, 87 bp, Homo sapiens
  MAP TO AC006369.3; EXPRESSED IN BRAIN, SIGNAL =   1; EXPRESSED IN LUNG, SIGNAL = 6.4; EXPRESSED IN FETAL LIVER, SIGNAL = 1.1; EXPRESSED IN ADULT LIVER, SIGNAL =   1; EXPRESSED IN BT474, SIGNAL = 2.7; EXPRESSED IN HBL100, SIGNAL = 0.93; EXPRESSED IN PLACENTA, SIGNAL = 0.97; EXPRESSED IN HEART, SIGNAL = 2.7; NT HIT: L11433.1, EVALUE 9.40e+00
cccagccatcatcaccaccatcactgccactaccatcatcactgtcttcattatcatcatcattatgatcatcacagttcacatgta

SEQ ID NO: 19354 - DNA, 213 bp, Homo sapiens
  MAP TO AC006146.2; EXPRESSED IN PLACENTA, SIGNAL = 2.1; EXPRESSED IN BRAIN, SIGNAL = 3.3; EXPRESSED IN ADULT LIVER, SIGNAL = 1.6; EXPRESSED IN FETAL LIVER, SIGNAL = 2.4; EXPRESSED IN BT474, SIGNAL = 2.1; EXPRESSED IN HEART, SIGNAL = 1.7; EXPRESSED IN HELA, SIGNAL = 2.3; EXPRESSED IN HBL100, SIGNAL = 2.1; EXPRESSED IN LUNG, SIGNAL = 5.1; EXPRESSED IN BONE MARROW, SIGNAL = 2.4; EST_HUMAN HIT: BF509614.1, EVALUE 1.00e-30; NT HIT: U49517.1, EVALUE 2.00e+00
acttcccaaaagttcccaagggtgcctcttcccagaagagagtccccaagtgaagagaggctggagcccaagagggaggtgaaggagcccaggaaggagggggaggaggaggtgccagagatccaagagaaggaggagcaggaagaggggcgagagcgcagcaggcgggcagcggcagtcaaagccacgcagacactacaggccaatgagtcg

SEQ ID NO: 19355 - DNA, 178 bp, Homo sapiens
  MAP TO AC006452.2; EXPRESSED IN BONE MARROW, SIGNAL = 1.8; EXPRESSED IN BRAIN, SIGNAL = 2.2; EXPRESSED IN LUNG, SIGNAL = 4.8; EXPRESSED IN ADULT LIVER, SIGNAL = 1.9; EXPRESSED IN BT474, SIGNAL = 1.4; EXPRESSED IN FETAL LIVER, SIGNAL = 1.5; EXPRESSED IN HELA, SIGNAL = 1.4; EXPRESSED IN PLACENTA, SIGNAL = 1.7; EXPRESSED IN HBL100, SIGNAL = 1.4; EXPRESSED IN HEART, SIGNAL = 1.6; NT HIT: AF091216.1, EVALUE 6.40e+00; EST_HUMAN HIT: AA219077.1, EVALUE 1.70e+00
atgacagtgcttctcagaggtcccagtctagtgaggaaattcaaggaggaaaggcaaaacaacaacaacaacacaacaacaacaacaacaaacttaatgatactggaaaagcgcctggcacagagaggcccctcaacaccaacacagggagggaacaggtgggacgccagggctgcag

SEQ ID NO: 19356 - DNA, 157 bp, Homo sapiens
  MAP TO AC006977.3; EXPRESSED IN BT474, SIGNAL =   1; EXPRESSED IN FETAL LIVER, SIGNAL = 1.1; EXPRESSED IN PLACENTA, SIGNAL = 1.4; EXPRESSED IN HBL100, SIGNAL = 1.7; EXPRESSED IN HELA, SIGNAL = 1.1; EXPRESSED IN HEART, SIGNAL = 1.4; EXPRESSED IN BRAIN, SIGNAL = 1.2; EXPRESSED IN BONE MARROW, SIGNAL = 1.2; EXPRESSED IN LUNG, SIGNAL = 1.3; EXPRESSED IN ADULT LIVER, SIGNAL = 1.6; NT HIT: AL163283.2, EVALUE 7.70e-02; EST_HUMAN HIT: AW006478.1, EVALUE 8.00e-61; SWISSPROT HIT: P36286, EVALUE 2.20e+00
aggacagtgaagctagtaaagagaagtcatttgcccaaggggaccccactactgttggcagagctgggtgcaaacgcaggcttgtgaagccaggacccatgcattcaaagaccatgccaggtgcccccactgcacacctcatccccacataccagtg

SEQ ID NO: 19357 - DNA, 135 bp, Homo sapiens
  MAP TO AC009546.2; EXPRESSED IN PLACENTA, SIGNAL = 3.4; EXPRESSED IN HBL100, SIGNAL = 2.3; EXPRESSED IN HEART, SIGNAL = 3.7; EXPRESSED IN BONE MARROW, SIGNAL =   3; EXPRESSED IN BRAIN, SIGNAL = 2.9; EXPRESSED IN LUNG, SIGNAL =  12; EXPRESSED IN ADULT LIVER, SIGNAL = 3.7; EXPRESSED IN BT474, SIGNAL = 1.4; EXPRESSED IN FETAL LIVER, SIGNAL = 2.4; EXPRESSED IN HELA, SIGNAL = 3.3; EST_HUMAN HIT: AW392374.1, EVALUE 7.00e+00; NT HIT: gi9628002, EVALUE 4.70e+00; SWISSPROT HIT: P53177, EVALUE 5.90e-01
  unsure 35
  unsure 64
  unsure 97
ttgtttcactttgtttcttgagatgctcacctttnaccacagtcctgagttccctttccctccnagcttctggtcggagttggccaatgagagactnctggtataagattggatggctcctggagagggtattta

SEQ ID NO: 19358 - DNA, 216 bp, Homo sapiens
  MAP TO AC009403.1; EXPRESSED IN PLACENTA, SIGNAL = 5.8; EXPRESSED IN HELA, SIGNAL = 5.6; EXPRESSED IN HBL100, SIGNAL = 2.9; EXPRESSED IN HEART, SIGNAL = 6.6; EXPRESSED IN LUNG, SIGNAL =  15; EXPRESSED IN BONE MARROW, SIGNAL = 5.9; EXPRESSED IN BRAIN, SIGNAL = 4.8; EXPRESSED IN ADULT LIVER, SIGNAL = 7.9; EXPRESSED IN BT474, SIGNAL = 2.6; EXPRESSED IN FETAL LIVER, SIGNAL = 4.7; NT HIT: M13792.1, EVALUE 2.00e+00; EST_HUMAN HIT: AA132611.1, EVALUE 4.90e-02; SWISSPROT HIT: P07378, EVALUE 1.40e-01
ttggcttcagtagcagaagtggagcctccctgttctgggggcctgaagtctatcatcaagacgggcagggctgcgtcccctctgaaacctggaggggtggatctgtgcctgactcttccagctctagcgttgctggtggtcctgggccttccttggcttgtagacaccaacgcagtctctgcctctgtcatcacgtggccttctcccatgttgtga

SEQ ID NO: 19359 - DNA, 298 bp, Homo sapiens
  MAP TO AC009408.2; EXPRESSED IN BONE MARROW, SIGNAL = 1.5; EXPRESSED IN FETAL LIVER, SIGNAL = 1.4; EXPRESSED IN HELA, SIGNAL = 1.5; EXPRESSED IN HEART, SIGNAL = 1.9; EXPRESSED IN LUNG, SIGNAL = 7.6; EXPRESSED IN BRAIN, SIGNAL = 1.6; EXPRESSED IN BT474, SIGNAL =   1; EXPRESSED IN ADULT LIVER, SIGNAL = 2.5; EXPRESSED IN PLACENTA, SIGNAL = 1.7; EXPRESSED IN HBL100, SIGNAL = 1.1; NT HIT: AL163213.2, EVALUE 6.00e-17; EST_HUMAN HIT: AW820194.1, EVALUE 1.00e-24; SWISSPROT HIT: P08547, EVALUE 2.00e-16
aaacacaccataccaaaacatatgggacacaacaaaagtagtaccgatagggaagtttatagccataaacacctacatcaagaaagtcaaaaaatgtcaaataaacaaactaatgatatacctcaaggaactagaaaagcaagaacaaaacaaatccaaaattagtacgatgaaagaaataataaagattagagcagaaataaatgaaattgagactaaaataatataaaagattaacataacaaaagttagttttaaaaaaaggtaaacaaaattgacaagcctttagctagattaa

SEQ ID NO: 19360 - DNA, 84 bp, Homo sapiens
  MAP TO AC009598.2; EXPRESSED IN BONE MARROW, SIGNAL = 1.3; EXPRESSED IN HELA, SIGNAL = 1.3; EXPRESSED IN BRAIN, SIGNAL = 0.99; EXPRESSED IN LUNG, SIGNAL = 9.2; EXPRESSED IN BT474, SIGNAL = 2.3; EXPRESSED IN ADULT LIVER, SIGNAL =   2; EXPRESSED IN FETAL LIVER, SIGNAL = 1.3; EXPRESSED IN PLACENTA, SIGNAL = 1.4; EXPRESSED IN HEART, SIGNAL = 1.2; EXPRESSED IN HBL100, SIGNAL = 1.2; NT HIT: D90917.1, EVALUE 6.80e-01
caaatcttaatagcaaagacaatgtccactctgacaactggagcactgtaattatattgagcaatggttgtgtgctctccatta

SEQ ID NO: 19361 - DNA, 249 bp, Homo sapiens
  MAP TO AC009413.1; EXPRESSED IN HEART, SIGNAL = 0.95; EXPRESSED IN BONE MARROW, SIGNAL = 1.5; EXPRESSED IN LUNG, SIGNAL = 3.6; EXPRESSED IN BRAIN, SIGNAL = 0.95; EXPRESSED IN BT474, SIGNAL = 1.1; EXPRESSED IN FETAL LIVER, SIGNAL = 0.88; NT HIT: AL163283.2, EVALUE 2.00e-04; EST_HUMAN HIT: AV752896.1, EVALUE 2.00e-07; SWISSPROT HIT: P08548, EVALUE 2.00e-14
gatgagtcctctattatagttggagatttcaacaccactatgccagtaattgacagatccagcaggcagaaaatcagtaaggacatagttgaactgaacaccaccatcagtcaaatgaatctaattgacattttagaaaatacttcatacaacaacagcagaatacatatgtttccgacgcacacagggaacattcacaaggtagaccgcgttttgaatcataaaaaaaccttgaccaatttaaaagaa

SEQ ID NO: 19362 - DNA, 108 bp, Homo sapiens
  MAP TO AC009651.2; EXPRESSED IN BONE MARROW, SIGNAL = 1.2; EXPRESSED IN FETAL LIVER, SIGNAL = 1.1; EXPRESSED IN HELA, SIGNAL = 1.2; EXPRESSED IN HEART, SIGNAL = 1.6; EXPRESSED IN BRAIN, SIGNAL = 1.1; EXPRESSED IN LUNG, SIGNAL =   6; EXPRESSED IN ADULT LIVER, SIGNAL = 1.5; EXPRESSED IN BT474, SIGNAL = 1.1; EXPRESSED IN PLACENTA, SIGNAL = 1.2; EST_HUMAN HIT: AW968848.1, EVALUE 6.00e-02; NT HIT: AF288812.1, EVALUE 3.70e+00
ggaaatgttacaatcactgacagaacaagcagacacaaaattcaaaaaatctgtaagaaaatagaaaatttgaacaatataatcaaccaccttaacgtaattgacata

SEQ ID NO: 19363 - DNA, 175 bp, Homo sapiens
  MAP TO AC009440.1; EXPRESSED IN HEART, SIGNAL = 1.5; EXPRESSED IN LUNG, SIGNAL = 6.3; EST_HUMAN HIT: BF574119.1, EVALUE 6.00e-01; SWISSPROT HIT: P32997, EVALUE 1.30e+00; NT HIT: AF081020.1, EVALUE 4.10e-01
ctttgtgggaactgacatttgtactgattggcttgtaggtagtagtataaacaaaatggataatataagaatctctaccactgcaaactcagatataattgagggaagagagaaaatatttccagtatgtgtagaagccaaaattggagcacaattccaacatagaccttcagac

SEQ ID NO: 19364 - DNA, 91 bp, Homo sapiens
  MAP TO AC009411.1; EXPRESSED IN HBL100, SIGNAL = 1.1; EXPRESSED IN HEART, SIGNAL = 0.97; EXPRESSED IN PLACENTA, SIGNAL = 1.1; EXPRESSED IN BRAIN, SIGNAL =   1; EXPRESSED IN BONE MARROW, SIGNAL = 1.2; EXPRESSED IN FETAL LIVER, SIGNAL = 2.9; EXPRESSED IN ADULT LIVER, SIGNAL = 1.1; NT HIT: K01871.1, EVALUE 3.00e+00; EST_HUMAN HIT: BF686309.1, EVALUE 2.80e-01
gaatgtgctcaaatgaaatgaaggagaaaatagggaaaaaagaaacagagtaagaggtgagaggcatcttcagggtggaaatcacaggcag

SEQ ID NO: 19365 - DNA, 213 bp, Homo sapiens
  MAP TO AC009419.1; EXPRESSED IN BONE MARROW, SIGNAL = 1.4; EXPRESSED IN BRAIN, SIGNAL = 1.2; EXPRESSED IN BT474, SIGNAL = 1.1; EXPRESSED IN LUNG, SIGNAL = 4.9; EXPRESSED IN ADULT LIVER, SIGNAL = 1.7; EXPRESSED IN FETAL LIVER, SIGNAL = 1.9; EXPRESSED IN PLACENTA, SIGNAL = 1.6; EXPRESSED IN HEART, SIGNAL = 1.5; EXPRESSED IN HELA, SIGNAL = 1.5; EXPRESSED IN HBL100, SIGNAL = 1.1; EST_HUMAN HIT: AI424405.1, EVALUE 6.00e-10; NT HIT: AF095703.1, EVALUE 5.00e-07; SWISSPROT HIT: P16273, EVALUE 4.40e+00
  unsure 3
ttnggtcaaacccaagatttttctcattttatggattactttcaaattccatactaccagtaccctgctagtaccaagactgagcccccaggaatgccactggaatctttcctcagtagaaactagcttatcttcataaacccaacaattgctctgttttttcactacagcataagacttagctaaagccatccacagattatggccccatgg

SEQ ID NO: 19366 - DNA, 128 bp, Homo sapiens
  MAP TO AC009473.2; EXPRESSED IN PLACENTA, SIGNAL = 1.7; EXPRESSED IN HELA, SIGNAL =   1; EXPRESSED IN HEART, SIGNAL = 1.5; EXPRESSED IN BRAIN, SIGNAL = 1.7; EXPRESSED IN BT474, SIGNAL = 1.3; EXPRESSED IN HBL100, SIGNAL = 1.4; EXPRESSED IN LUNG, SIGNAL = 5.8; EXPRESSED IN BONE MARROW, SIGNAL = 1.8; EXPRESSED IN ADULT LIVER, SIGNAL = 1.9; EXPRESSED IN FETAL LIVER, SIGNAL = 1.2; EST_HUMAN HIT: BE865601.1, EVALUE 1.70e+00; NT HIT: AE004544.1, EVALUE 1.80e-02
agtgggctacaaggaactccatactctctctaatctcatttttctccccatccccatccaccagccacctgccgttctgtctcttgatgatgttaagccctttcctatctcaggctttgtatttgcta

SEQ ID NO: 19367 - DNA, 96 bp, Homo sapiens
  MAP TO AC009476.2; EXPRESSED IN ADULT LIVER, SIGNAL = 1.5; EXPRESSED IN PLACENTA, SIGNAL = 0.95; EXPRESSED IN BRAIN, SIGNAL = 1.1; EXPRESSED IN HEART, SIGNAL = 1.1; EXPRESSED IN HELA, SIGNAL =   1; EXPRESSED IN HBL100, SIGNAL = 1.2; EXPRESSED IN LUNG, SIGNAL = 1.2; EXPRESSED IN BONE MARROW, SIGNAL = 1.1; NT HIT: U58360.1, EVALUE 2.70e+00; EST_HUMAN HIT: AW376990.1, EVALUE 8.20e-01; SWISSPROT HIT: P09509, EVALUE 9.20e+00
tttatccccctggtctgctagccagaaagagattactaagagatttcgatttatttgtcttgcaatggggagctaaagaagaaaaaaaaaaaaaac

SEQ ID NO: 19368 - DNA, 163 bp, Homo sapiens
  MAP TO AC009974.2; EXPRESSED IN FETAL LIVER, SIGNAL = 2.6; EXPRESSED IN ADULT LIVER, SIGNAL = 2.6; EXPRESSED IN PLACENTA, SIGNAL = 2.2; EXPRESSED IN HEART, SIGNAL = 1.8; EXPRESSED IN BRAIN, SIGNAL = 2.2; EXPRESSED IN BT474, SIGNAL = 1.3; EXPRESSED IN HELA, SIGNAL = 2.4; EXPRESSED IN HBL100, SIGNAL = 1.6; EXPRESSED IN LUNG, SIGNAL =  12; EXPRESSED IN BONE MARROW, SIGNAL = 2.5; NT HIT: AB033104.1, EVALUE 2.00e-11; SWISSPROT HIT: Q10064, EVALUE 8.60e+00; EST_HUMAN HIT: BF056547.1, EVALUE 7.00e-16
cttctatgtggtgttggaggtgctggtatcgtgttcacacaagatcctggtctggcagcttatttatatcatttcttgcctttaccaatttcccccttcctagatgaactatatttggttacctactttcaagtcaaggccggtggagctgaaataggaaagg

SEQ ID NO: 19369 - DNA, 160 bp, Homo sapiens
  MAP TO AC010792.1; EXPRESSED IN ADULT LIVER, SIGNAL = 2.3; EXPRESSED IN PLACENTA, SIGNAL = 2.4; EXPRESSED IN BRAIN, SIGNAL = 2.5; EXPRESSED IN FETAL LIVER, SIGNAL = 2.8; EXPRESSED IN BT474, SIGNAL = 1.6; EXPRESSED IN HEART, SIGNAL = 3.4; EXPRESSED IN HELA, SIGNAL =   2; EXPRESSED IN HBL100, SIGNAL = 2.3; EXPRESSED IN LUNG, SIGNAL =  11; EXPRESSED IN BONE MARROW, SIGNAL = 2.6; EST_HUMAN HIT: BF349261.1, EVALUE 9.00e-03; NT HIT: AB033006.1, EVALUE 5.00e-03
gtgccttgcaggcatctctgtgacccttcagggcaatccttgaggtaggtgtcatcatcatcatcatcatcatcatcatcatcatcataggtgttatgattcccaggagtctgggaagttacctgccccaggtcacacagccagtaagaggcagacagaa

SEQ ID NO: 19370 - DNA, 108 bp, Homo sapiens
  MAP TO AC010872.2; EXPRESSED IN PLACENTA, SIGNAL = 1.2; EXPRESSED IN HBL100, SIGNAL = 1.1; EXPRESSED IN HELA, SIGNAL = 1.3; EXPRESSED IN HEART, SIGNAL = 1.4; EXPRESSED IN BONE MARROW, SIGNAL = 1.7; EXPRESSED IN LUNG, SIGNAL = 9.6; EXPRESSED IN BRAIN, SIGNAL =   1; EXPRESSED IN ADULT LIVER, SIGNAL = 1.3; EXPRESSED IN BT474, SIGNAL = 1.2; EXPRESSED IN FETAL LIVER, SIGNAL = 1.2; NT HIT: AJ229042.1, EVALUE 1.00e-18; SWISSPROT HIT: P29070, EVALUE 9.10e+00; EST_HUMAN HIT: BF697362.1, EVALUE 4.00e-19
ccacctcaggacctgcagagtccccactagcaaggtggctctcaccagaggtggccccttgaccctggacttctcagtctccataactgtaagaaataaattcctttt

SEQ ID NO: 19371 - DNA, 166 bp, Homo sapiens
  MAP TO AC010877.1; EXPRESSED IN FETAL LIVER, SIGNAL = 1.4; EXPRESSED IN HEART, SIGNAL =   1; EXPRESSED IN BONE MARROW, SIGNAL = 0.92; EXPRESSED IN LUNG, SIGNAL =   2; NT HIT: AF000995.1, EVALUE 1.00e-28; EST_HUMAN HIT: AA330221.1, EVALUE 3.00e-20; SWISSPROT HIT: O14607, EVALUE 5.00e-07
ttctctgaagatgtggattcgttatctgaatgatctttgtgttgtgttcttttctcattttcttccttcaggttaagaaaaaaatattcatacttagtatcctctaacaggctatcacttctattatacaaattatactcatctacatgagcagtattgactattt

SEQ ID NO: 19372 - DNA, 138 bp, Homo sapiens
  MAP TO AC010102.1; EXPRESSED IN HELA, SIGNAL = 0.95; EXPRESSED IN HEART, SIGNAL = 1.1; EXPRESSED IN LUNG, SIGNAL = 7.2; NT HIT: AF131205.1, EVALUE 1.00e+00; SWISSPROT HIT: Q58069, EVALUE 1.70e+00; EST_HUMAN HIT: BF526052.1, EVALUE 7.20e+00
cttaatattcttgaagtcaggaacaacaaaacagtacctattctcaccactattaattttggtctggaagtgatggttcgcacaattagaccaaaaaaaattgaagtcgaaaatatgagaaaggagaaggtaatattg

SEQ ID NO: 19373 - DNA, 126 bp, Homo sapiens
  MAP TO AC010879.1; EXPRESSED IN HEART, SIGNAL = 0.89; EXPRESSED IN LUNG, SIGNAL = 1.3; EXPRESSED IN BRAIN, SIGNAL = 1.1; EXPRESSED IN BONE MARROW, SIGNAL = 1.3; EXPRESSED IN FETAL LIVER, SIGNAL = 0.9; EXPRESSED IN ADULT LIVER, SIGNAL = 1.1; NT HIT: Z84506.1, EVALUE 6.00e-05; SWISSPROT HIT: Q9Z0L3, EVALUE 8.90e+00; EST_HUMAN HIT: BE151499.1, EVALUE 2.70e-02
tcttgacatgtaatctctgcatacaccagctcctcttcaccttccaccgtgagtgcaagctttctgatgccctcactaggatctgtacccttgaagcagatcctgatgccatgattgatgtacagc

SEQ ID NO: 19374 - DNA, 147 bp, Homo sapiens
  MAP TO AC010888.1; EXPRESSED IN BT474, SIGNAL = 1.3; EXPRESSED IN HBL100, SIGNAL = 1.6; EXPRESSED IN HEART, SIGNAL = 1.9; EXPRESSED IN LUNG, SIGNAL =   2; EXPRESSED IN ADULT LIVER, SIGNAL = 2.8; EXPRESSED IN PLACENTA, SIGNAL = 3.9; EXPRESSED IN HELA, SIGNAL =   3; EXPRESSED IN BRAIN, SIGNAL = 1.3; EXPRESSED IN BONE MARROW, SIGNAL = 1.5; NT HIT: AL163209.2, EVALUE 8.00e-36; EST_HUMAN HIT: BE018348.1, EVALUE 1.00e-40; SWISSPROT HIT: P22776, EVALUE 8.70e+00
gccaaatggaagcctttagagctgcctccacctagaaaaacagtaaatcaaaaacaatatcacatccctggagtggctgcagagattagtgccaccatcaaggacttgaaagacgcaggggtggtgatttccataacatccatattc

SEQ ID NO: 19375 - DNA, 225 bp, Homo sapiens
  MAP TO AC010133.1; EXPRESSED IN BT474, SIGNAL =  25; EXPRESSED IN HBL100, SIGNAL =  57; EXPRESSED IN HEART, SIGNAL =  17; EXPRESSED IN LUNG, SIGNAL = 4.3; EXPRESSED IN ADULT LIVER, SIGNAL = 5.4; EXPRESSED IN FETAL LIVER, SIGNAL = 6.3; EXPRESSED IN PLACENTA, SIGNAL = 6.3; EXPRESSED IN HELA, SIGNAL =  22; EXPRESSED IN BRAIN, SIGNAL =   9; EXPRESSED IN BONE MARROW, SIGNAL =  11; NT HIT: AF261085.1, EVALUE 1.00e-26; EST_HUMAN HIT: AI906017.1, EVALUE 7.00e-26; SWISSPROT HIT: P04406, EVALUE 2.00e-23
tggtgggacatggaaaaccatgctagtgaatttcccattcagcttagaaatgatcttgcccacagcattggcagtgtctgtagagacagagagaatgttttggagagccccatgggtgtcacaccacagcttcccagaggggtcatccacagtcttctgggtagcagtgatggcagttactgtgaatatgggtccttccatgataccaaaattgtcatggattac

SEQ ID NO: 19376 - DNA, 169 bp, Homo sapiens
  MAP TO AC011283.2; EXPRESSED IN FETAL LIVER, SIGNAL = 1.1; EXPRESSED IN ADULT LIVER, SIGNAL = 0.91; EXPRESSED IN HELA, SIGNAL = 0.91; EXPRESSED IN PLACENTA, SIGNAL = 1.1; EXPRESSED IN HEART, SIGNAL = 1.2; EXPRESSED IN BONE MARROW, SIGNAL =   1; EXPRESSED IN LUNG, SIGNAL = 6.5; SWISSPROT HIT: O62621, EVALUE 5.10e+00; EST_HUMAN HIT: BE672608.1, EVALUE 2.00e-04; NT HIT: AF074938.1, EVALUE 2.10e-02
atgtgtctctttcatttgctcattcattcagtccacaaatattcatcaagcccctgctatatgtatggcactattttaagtaatgggaatagaagagggtataagatggacatatccatgacctattgttccttttattccagtagggagacagagaagttagaaataa

SEQ ID NO: 19377 - DNA, 311 bp, Homo sapiens
  MAP TO AP000501.1; EXPRESSED IN FETAL LIVER, SIGNAL = 1.4; EXPRESSED IN BT474, SIGNAL = 1.3; EXPRESSED IN HELA, SIGNAL = 0.9; EXPRESSED IN HBL100, SIGNAL = 1.4; EXPRESSED IN HEART, SIGNAL = 1.7; EXPRESSED IN LUNG, SIGNAL = 8.3; NT HIT: gi11423161, EVALUE 0.00e+00; EST_HUMAN HIT: AW880750.1, EVALUE 0.00e+00; SWISSPROT HIT: P29054, EVALUE 7.00e-03
gtgagagacctttgtcgagttctgcagttgccaccaacatttgaggataccgcggttgcctactaccaacaggcatatcggcactctggcatccgagcggccaggctgcaaaagaaggaggtgttggttgggtgctgcgtcttaatcacctgccgacagcataactggcccctaacaatgggggccatctgcacgctgttgtatgcagatttggatgtgttttctagcacttacatgcagatagtgaagctcctgggactggatgtgccatctctgtgcttggcagaactggtgaagacctattgcagcag

SEQ ID NO: 19378 - DNA, 88 bp, Homo sapiens
  MAP TO AC011297.1; EXPRESSED IN BT474, SIGNAL = 1.7; EXPRESSED IN ADULT LIVER, SIGNAL = 1.1; EXPRESSED IN PLACENTA, SIGNAL = 1.1; EXPRESSED IN BONE MARROW, SIGNAL = 1.3; EXPRESSED IN FETAL LIVER, SIGNAL = 1.5; EXPRESSED IN HEART, SIGNAL = 1.7; EXPRESSED IN HELA, SIGNAL = 1.1; EXPRESSED IN HBL100, SIGNAL = 0.99; EXPRESSED IN BRAIN, SIGNAL = 1.1; EXPRESSED IN LUNG, SIGNAL = 9.9; EST_HUMAN HIT: BF115285.1, EVALUE 3.00e-16; NT HIT: J03061.1, EVALUE 2.00e-16; SWISSPROT HIT: Q90663, EVALUE 9.30e+00
aagaagtgaggagaaaagaacaggaaggcgcagaggacataacaggtggaaacagacaagagaggtaaataaaaagaattaatctaat

SEQ ID NO: 19379 - DNA, 826 bp, Homo sapiens
  MAP TO AL117258.1; EXPRESSED IN BT474, SIGNAL = 1.9; EXPRESSED IN ADULT LIVER, SIGNAL = 0.97; EXPRESSED IN PLACENTA, SIGNAL = 1.7; EXPRESSED IN BONE MARROW, SIGNAL = 1.8; EXPRESSED IN FETAL LIVER, SIGNAL = 1.2; EXPRESSED IN HEART, SIGNAL = 1.1; EXPRESSED IN HBL100, SIGNAL = 1.3; EXPRESSED IN BRAIN, SIGNAL = 1.4; EXPRESSED IN LUNG, SIGNAL = 1.5; SWISSPROT HIT: P07645, EVALUE 1.00e-03; NT HIT: Y18000.1, EVALUE 2.10e+00; EST_HUMAN HIT: BE275138.1, EVALUE 3.00e-40
gaggtcaaacaggcctccgtgttttctttgcctatcagcgccttttggcagccggcactgcttacctcctagatctggaaacgcctgcggttggacaggccaagccgaagcggcttttccacaattagaaacacgtgctcagttccttccacaagcgggggaggcggccaaggaactcggtgcagccaatcacagagccgagcgtagccacacccacgcccccacaggcccggcttccctgcccagcggctccaacctccagcctgggcacccagacccagagggctgctgggagggacatgcctcaccccttttgctccagctggaggggagggagtctgtgggagctggccagagcgtggcagaaggcagagaagtgaacgccccagcaaaaggtgaggctgagaagccaacccttctggcaggccatgacccaggtgaaatttatggcgtttcagagggctggggagctccatccagaaaggtgcctgttttgcaggtttggagaggaacagggcgttctgatttctacaaagtggcgtcactgcttcctttttcagcaaccgtctgcttagtacattccatcttgctgttttcagtcctggcctctctctgttctgctcctctcaagccctttttctctcccactcatctgcattgtcctccccttgctctctcccgccctgtggtttcttgtgctctttccctctcttcttcaccatctgtctttatggactttggcaagtctggacatttttccccctttctactgcctgttttcacttatctgaacagacaaggaggagtggcctggttctggaaatgt

SEQ ID NO: 19380 - DNA, 353 bp, Homo sapiens
  MAP TO AL031258.5; EXPRESSED IN BT474, SIGNAL = 2.6; EXPRESSED IN FETAL LIVER, SIGNAL = 3.1; EXPRESSED IN ADULT LIVER, SIGNAL = 2.8; EXPRESSED IN HBL100, SIGNAL = 2.5; EXPRESSED IN HELA, SIGNAL = 1.9; EXPRESSED IN PLACENTA, SIGNAL =   3; EXPRESSED IN HEART, SIGNAL = 2.9; EXPRESSED IN BRAIN, SIGNAL =   3; EXPRESSED IN BONE MARROW, SIGNAL = 3.9; EXPRESSED IN LUNG, SIGNAL = 2.3; NT HIT: AJ277365.1, EVALUE 4.00e-03; EST_HUMAN HIT: BE910182.1, EVALUE 5.00e-03; SWISSPROT HIT: P51787, EVALUE 1.60e-01
tcctggggaaagaaccttggcctggggcccagagcagtgggcagcaagggacagcaggagggtgaggcctgagctctgcagggcacctggaataaggtgggctgtgagggtcccggcgggagcaggggccggggcatccgggtcccagggtggacctgtgacccccaccatgggggtctgcttgaggccagaggacatggaggaacttctggagccccacagcactggccacctgtgcacagcctgggcccaagcgcaggacgtgtctggtggagcatgcacaggcgtgatgctgtgggtgcatgcaggcacgcacatgtaggtgacagtgtgcacgtgtaagtgacagtgtg

SEQ ID NO: 19381 - DNA, 87 bp, Homo sapiens
  MAP TO AL121722.1; EXPRESSED IN LUNG, SIGNAL = 3.1; EXPRESSED IN BT474, SIGNAL = 1.4; EXPRESSED IN PLACENTA, SIGNAL = 3.3; EXPRESSED IN BRAIN, SIGNAL = 2.4; EXPRESSED IN BONE MARROW, SIGNAL = 3.9; EXPRESSED IN ADULT LIVER, SIGNAL = 2.6; EXPRESSED IN FETAL LIVER, SIGNAL = 2.3; EXPRESSED IN HEART, SIGNAL =   3; EXPRESSED IN HELA, SIGNAL = 2.2; EXPRESSED IN HBL100, SIGNAL = 1.6; NT HIT: AF043430.1, EVALUE 6.00e-01; EST_HUMAN HIT: AW935728.1, EVALUE 1.80e-01
gcagtcacatccttaatgaactgcccagcctccttccatccatgcatggggagcagctctgggcccagattaagccccatgctcttc

SEQ ID NO: 19382 - DNA, 137 bp, Homo sapiens
  MAP TO AL035404.19; EXPRESSED IN PLACENTA, SIGNAL = 6.1; EXPRESSED IN HELA, SIGNAL = 4.8; EXPRESSED IN HEART, SIGNAL = 4.8; EXPRESSED IN BRAIN, SIGNAL = 3.9; EXPRESSED IN BT474, SIGNAL = 2.3; EXPRESSED IN HBL100, SIGNAL = 3.1; EXPRESSED IN LUNG, SIGNAL = 6.8; EXPRESSED IN BONE MARROW, SIGNAL = 4.8; EXPRESSED IN ADULT LIVER, SIGNAL = 3.8; EXPRESSED IN FETAL LIVER, SIGNAL = 3.7; NT HIT: gi11427848, EVALUE 1.00e-71; SWISSPROT HIT: Q07284, EVALUE 3.90e+00; EST_HUMAN HIT: BE298149.1, EVALUE 1.00e-71
tcagaaagccccgatttcagtgatttcagagacccaggagtggtagagcatggctcccgctggcctcccagctggccctggggaggatgagttgggggtgggaacagccacgtaagcagccgaccctgtaggaccag

SEQ ID NO: 19383 - DNA, 460 bp, Homo sapiens
  MAP TO AC011294.1; EXPRESSED IN FETAL LIVER, SIGNAL = 1.1; EXPRESSED IN ADULT LIVER, SIGNAL = 1.4; EXPRESSED IN PLACENTA, SIGNAL =   1; EXPRESSED IN HEART, SIGNAL = 1.1; EXPRESSED IN BRAIN, SIGNAL = 0.96; EXPRESSED IN BT474, SIGNAL = 1.1; EXPRESSED IN HELA, SIGNAL = 0.93; EXPRESSED IN HBL100, SIGNAL = 0.95; EXPRESSED IN LUNG, SIGNAL = 0.9; EXPRESSED IN BONE MARROW, SIGNAL = 1.4; EST_HUMAN HIT: BE080801.1, EVALUE 7.40e-02; NT HIT: AJ271723.1, EVALUE 1.90e-02
aaacattatcatcaacattatagcattatattacatagctctgattggtgatcaaataggccacatttatcaaacccctattactcccactatggctgctcctgctactgttactgtgagccttgttgctcctgctactactgttactgttacctaccagtgctactattgctgctaataccaccactgctactagtactactaatactgccgctatcactactgtaatactattgctattgctgctgctaatgctaccactaatagtgctgctgttcctgctcctgctaccaccagtactactagaactgctgcttctgctattgccattcctgctcctactattgctactgctaatactactgctactgcagctaatactgccactgccaccacaactactactagtgctattgctactaatgctgctactaatgctagcactaatatcactgctact

SEQ ID NO: 19384 - DNA, 127 bp, Homo sapiens
  MAP TO AL121759.1; EXPRESSED IN BT474, SIGNAL = 1.1; EXPRESSED IN ADULT LIVER, SIGNAL = 1.3; EXPRESSED IN FETAL LIVER, SIGNAL = 1.2; EXPRESSED IN HBL100, SIGNAL =   1; EXPRESSED IN HELA, SIGNAL = 1.1; EXPRESSED IN PLACENTA, SIGNAL = 0.97; EXPRESSED IN HEART, SIGNAL =   1; EXPRESSED IN BRAIN, SIGNAL = 1.4; EXPRESSED IN BONE MARROW, SIGNAL = 1.7; EXPRESSED IN LUNG, SIGNAL =   1; EST_HUMAN HIT: BE710396.1, EVALUE 7.00e-03; NT HIT: L33797.1, EVALUE 7.20e-02
atgccaagtgcagctgaggcagaggcagaggcagacgctctcaggttataccacatgcagcaggctgtggcggctgtggcgactgtggcgactgtggatggtagaaaaaaggtcgggccaggaggcg

SEQ ID NO: 19385 - DNA, 100 bp, Homo sapiens
  MAP TO AL035413.19; EXPRESSED IN ADULT LIVER, SIGNAL = 1.3; EXPRESSED IN BT474, SIGNAL =   3; EXPRESSED IN FETAL LIVER, SIGNAL = 0.98; EXPRESSED IN PLACENTA, SIGNAL = 2.4; EXPRESSED IN HBL100, SIGNAL = 3.5; EXPRESSED IN HELA, SIGNAL = 2.3; EXPRESSED IN HEART, SIGNAL = 1.7; EXPRESSED IN BRAIN, SIGNAL = 1.5; EXPRESSED IN BONE MARROW, SIGNAL = 2.2; EXPRESSED IN LUNG, SIGNAL = 4.1; NT HIT: gi11422496, EVALUE 1.00e-49; SWISSPROT HIT: P79136, EVALUE 6.00e-14; EST_HUMAN HIT: BE278901.1, EVALUE 1.00e-49
ggatcatggctttgctggagtgatcctcataaagaaggctggagatggatcaaagaagatcaaaggctgctgggattccatccacgtggtagaagtgcag

SEQ ID NO: 19386 - DNA, 94 bp, Homo sapiens
  MAP TO AC011368.1; EXPRESSED IN BONE MARROW, SIGNAL = 1.4; EXPRESSED IN LUNG, SIGNAL =   1; EXPRESSED IN BT474, SIGNAL = 1.2; EXPRESSED IN ADULT LIVER, SIGNAL = 1.4; EXPRESSED IN FETAL LIVER, SIGNAL =   1; EXPRESSED IN HELA, SIGNAL = 1.1; EXPRESSED IN PLACENTA, SIGNAL = 1.1; EXPRESSED IN HBL100, SIGNAL = 1.3; EXPRESSED IN HEART, SIGNAL = 1.3; EXPRESSED IN BRAIN, SIGNAL = 1.4; NT HIT: gi4507602, EVALUE 7.80e-01
ggcagttgtgttcaagggcagcaaacatttgattgaagcaacaggacttgttaatggattcatggcagctactgagaaaggtggagggctgtct

SEQ ID NO: 19387 - DNA, 391 bp, Homo sapiens
  MAP TO AL049756.16; EXPRESSED IN BRAIN, SIGNAL = 6.9; EXPRESSED IN BONE MARROW, SIGNAL = 5.3; EXPRESSED IN LUNG, SIGNAL = 2.1; EXPRESSED IN BT474, SIGNAL =   2; EXPRESSED IN FETAL LIVER, SIGNAL =  14; EXPRESSED IN ADULT LIVER, SIGNAL = 4.8; EXPRESSED IN HELA, SIGNAL = 2.8; EXPRESSED IN PLACENTA, SIGNAL = 9.3; EXPRESSED IN HBL100, SIGNAL = 2.2; EXPRESSED IN HEART, SIGNAL = 2.9; SWISSPROT HIT: P03341, EVALUE 5.50e-01; NT HIT: AF281074.1, EVALUE 3.80e+00
aacatgcatacatatacacatacacacatatacatacacacataaacatatacacacatatacaaacacacacatacagacacatacacagacacatatgcacacatatacacacacacacatacacacacacacctttcatctgatttcactggtacatgggcaaatttatcattattatcgttggcccccaagcccatctttccctgcactgttagctgtgttgtcactggcctctgaaatgcagccttcttctgctcctgcacctgctgagctcctatgcatcccttatccacagcggccatcagtgcaggttcactgtctgccacctggtgctcggctaggacccagtgctggggagacaaatacaaagcacatgccctgccattca

SEQ ID NO: 19388 - DNA, 141 bp, Homo sapiens
  MAP TO AL024507.7; EXPRESSED IN BRAIN, SIGNAL = 2.6; EXPRESSED IN BONE MARROW, SIGNAL = 3.7; EXPRESSED IN LUNG, SIGNAL =  10; EXPRESSED IN BT474, SIGNAL = 5.8; EXPRESSED IN ADULT LIVER, SIGNAL = 2.9; EXPRESSED IN FETAL LIVER, SIGNAL = 4.4; EXPRESSED IN HELA, SIGNAL =   9; EXPRESSED IN PLACENTA, SIGNAL =   5; EXPRESSED IN HBL100, SIGNAL = 6.5; EXPRESSED IN HEART, SIGNAL = 5.2; EST_HUMAN HIT: AW362756.1, EVALUE 5.00e-74; SWISSPROT HIT: P29316, EVALUE 6.00e-10; NT HIT: gi11426675, EVALUE 6.00e-09
tcttctctccatcagacctgatgagtatgtttaccttggccatgccagtgtcatagagcttcttcacagcctgtttgatctggttggccttgacatccatagtaaacacaaatgtggttgtgtcttcttcatggctgactt

SEQ ID NO: 19389 - DNA, 113 bp, Homo sapiens
  MAP TO AL034380.21; EXPRESSED IN PLACENTA, SIGNAL =   1; EXPRESSED IN HBL100, SIGNAL = 1.5; EXPRESSED IN HEART, SIGNAL = 1.6; EXPRESSED IN BRAIN, SIGNAL = 0.95; EXPRESSED IN BONE MARROW, SIGNAL = 1.2; EXPRESSED IN LUNG, SIGNAL =  10; EXPRESSED IN BT474, SIGNAL = 1.5; EXPRESSED IN FETAL LIVER, SIGNAL = 0.93; EXPRESSED IN HELA, SIGNAL = 1.1; NT HIT: gi11420259, EVALUE 3.00e-04; SWISSPROT HIT: Q09701, EVALUE 2.00e-08; EST_HUMAN HIT: BE676622.1, EVALUE 3.00e-57
ggcgaagatgaaggccgtcaggaatgagagggagagaataaacgcgtagaagaagcgatagttccgtctccccacacagttgcccacccaggggcagtgatggtcaaatcgtt

SEQ ID NO: 19390 - DNA, 298 bp, Homo sapiens
  MAP TO AL109615.8; EXPRESSED IN HELA, SIGNAL = 1.5; EXPRESSED IN PLACENTA, SIGNAL =   2; EXPRESSED IN HBL100, SIGNAL = 1.5; EXPRESSED IN HEART, SIGNAL = 2.3; EXPRESSED IN BONE MARROW, SIGNAL = 2.1; EXPRESSED IN BRAIN, SIGNAL = 1.7; EXPRESSED IN LUNG, SIGNAL = 6.3; EXPRESSED IN ADULT LIVER, SIGNAL =   2; EXPRESSED IN BT474, SIGNAL = 1.8; EXPRESSED IN FETAL LIVER, SIGNAL = 1.9; NT HIT: gi9257243, EVALUE 4.60e-02; EST_HUMAN HIT: AV714519.1, EVALUE 6.90e-02
ctccgcctcctccacagtaaggccctgtgcctcaccaaccagttagcgaagcctcattctctctaaaggaatgggtatgtggcctaatgttggctgatgagaactcaagagtaagttttctaggggcactccagggaaaagttctccttatttgaaaaacagaccttgagaaagatatggcccctcttcaacctccaggcatattatgtctggatgcgatgtctggactttgagcagccaccttacaaccatgaagggcgctatagcacctgagaagcaaatcaacacgctgaggata

SEQ ID NO: 19391 - DNA, 177 bp, Homo sapiens
  MAP TO AF165425.1; EXPRESSED IN BT474, SIGNAL = 1.1; EXPRESSED IN FETAL LIVER, SIGNAL =  12; EXPRESSED IN HEART, SIGNAL = 0.86; EXPRESSED IN LUNG, SIGNAL = 3.3; NT HIT: U05897.1, EVALUE 3.50e-01; SWISSPROT HIT: P79194, EVALUE 2.20e+00
tggatgaaagtgtttactccgaaattccaagtggcattggtgtggctattggggcagcttgctgtgctgaggagcatggacctgagcgtcagagatttggctcctggtcctgccatacccatcacggcagcaaaagtgactaccccatgggcgctgtgcagccttcttacactttgc

SEQ ID NO: 19392 - DNA, 195 bp, Homo sapiens
  MAP TO AL034405.4; EXPRESSED IN PLACENTA, SIGNAL =   5; EXPRESSED IN HBL100, SIGNAL =   3; EXPRESSED IN BONE MARROW, SIGNAL = 4.3; EXPRESSED IN FETAL LIVER, SIGNAL = 3.8; EXPRESSED IN HELA, SIGNAL = 4.4; EXPRESSED IN HEART, SIGNAL =   6; EXPRESSED IN BRAIN, SIGNAL = 4.3; EXPRESSED IN LUNG, SIGNAL = 2.8; EXPRESSED IN BT474, SIGNAL = 2.9; EXPRESSED IN ADULT LIVER, SIGNAL = 6.3; SWISSPROT HIT: Q14142, EVALUE 7.30e-01; NT HIT: X82032.1, EVALUE 3.90e-01; EST_HUMAN HIT: W87365.1, EVALUE 6.80e-01
agaggcctgggttaagctagccctcccaggtggggaccagccaggtacaatgctgagcatccttccacagccagccaggcccattctggcagagtactgcaggctgttcttggttgccctccttcctgttgtggtgatcacaatattgagaggggccagactgtggaagaagggaagcagggagaggcacacagg

SEQ ID NO: 19393 - DNA, 186 bp, Homo sapiens
  MAP TO AL096678.8; EXPRESSED IN BT474, SIGNAL = 1.8; EXPRESSED IN PLACENTA, SIGNAL = 2.5; EXPRESSED IN HBL100, SIGNAL = 1.5; EXPRESSED IN HEART, SIGNAL = 1.9; EXPRESSED IN ADULT LIVER, SIGNAL = 1.5; EXPRESSED IN FETAL LIVER, SIGNAL = 2.8; EXPRESSED IN HELA, SIGNAL = 1.1; EXPRESSED IN BRAIN, SIGNAL = 2.4; EXPRESSED IN LUNG, SIGNAL = 1.4; EXPRESSED IN BONE MARROW, SIGNAL =   2; EST_HUMAN HIT: AV750540.1, EVALUE 2.00e-96; NT HIT: gi11418976, EVALUE 1.00e-100; SWISSPROT HIT: P16329, EVALUE 1.10e-01
gtgtcagcattttctgaccccaccccaccagccgaccaacagcctggacaccagaagaacctgcatgctcataatcaccctaaaaagaggaacaggcatcggtgttcatccccacccccaccccatgagttcagggcgtatcagctctacacattgtaccggggcaaggatgggaaagtgatgcag

SEQ ID NO: 19394 - DNA, 128 bp, Homo sapiens
  MAP TO AL050318.12; EXPRESSED IN BT474, SIGNAL = 4.4; EXPRESSED IN ADULT LIVER, SIGNAL = 2.9; EXPRESSED IN PLACENTA, SIGNAL = 3.4; EXPRESSED IN HBL100, SIGNAL = 2.4; EXPRESSED IN HEART, SIGNAL = 2.9; EXPRESSED IN BONE MARROW, SIGNAL = 4.8; EXPRESSED IN FETAL LIVER, SIGNAL = 3.4; EXPRESSED IN HELA, SIGNAL = 3.9; EXPRESSED IN BRAIN, SIGNAL = 3.5; EXPRESSED IN LUNG, SIGNAL = 7.2; SWISSPROT HIT: P70284, EVALUE 1.00e-10; EST_HUMAN HIT: BE252937.1, EVALUE 6.00e-64; NT HIT: gi11141880, EVALUE 3.00e-66
cctgctgcttctgaagctccatctcagcagccctctgtagcgccacctccaccagcagctggaagctgctgaagtcctctttgtcctgctctgggggtgtgggtggtggcgtgttgaagagtccacct

SEQ ID NO: 19395 - DNA, 145 bp, Homo sapiens
  MAP TO AL031963.11; EXPRESSED IN PLACENTA, SIGNAL = 3.6; EXPRESSED IN BONE MARROW, SIGNAL = 4.9; EXPRESSED IN HELA, SIGNAL = 3.2; EXPRESSED IN HBL100, SIGNAL = 7.3; EXPRESSED IN HEART, SIGNAL = 4.1; EXPRESSED IN BRAIN, SIGNAL = 7.3; EXPRESSED IN LUNG, SIGNAL = 3.5; EXPRESSED IN BT474, SIGNAL = 6.1; EXPRESSED IN ADULT LIVER, SIGNAL = 4.1; EXPRESSED IN FETAL LIVER, SIGNAL = 7.6; SWISSPROT HIT: P02554, EVALUE 4.00e-17; EST_HUMAN HIT: AW162320.1, EVALUE 6.00e-56; NT HIT: gi11418771, EVALUE 4.00e-56
ttttgggaggtcatcagcgatgagcatgggatcgaccccacaggcagttaccatggagacagtgacttgcagctggagagaatcaacgtgtactacaatgaggctgctggtgagtagcgggatgtgtgtgcccaggaatccttgc

SEQ ID NO: 19396 - DNA, 162 bp, Homo sapiens
  MAP TO AL096816.12; EXPRESSED IN BONE MARROW, SIGNAL = 1.6; EXPRESSED IN LUNG, SIGNAL = 1.5; EXPRESSED IN BRAIN, SIGNAL = 1.1; EXPRESSED IN PLACENTA, SIGNAL = 1.2; EXPRESSED IN ADULT LIVER, SIGNAL = 1.7; EXPRESSED IN FETAL LIVER, SIGNAL = 1.1; EXPRESSED IN HEART, SIGNAL = 1.5; EXPRESSED IN HELA, SIGNAL = 1.3; EXPRESSED IN HBL100, SIGNAL = 1.1; NT HIT: AF060568.1, EVALUE 3.20e-01; SWISSPROT HIT: Q14397, EVALUE 9.90e-01; EST_HUMAN HIT: AA424727.1, EVALUE 2.20e+00
aactcaagtactgccaaccgcaggtggctctgctcatcagccttgtccagtgatttagtgatggggggagggcccttctctgttaacaaaaccatctccattaacccctgtgactctcacttgccacttcagcacggaatagtctatgaattctgtctcccc

SEQ ID NO: 19397 - DNA, 204 bp, Homo sapiens
  MAP TO AL034346.18; EXPRESSED IN PLACENTA, SIGNAL = 1.5; EXPRESSED IN HELA, SIGNAL = 1.1; EXPRESSED IN HEART, SIGNAL = 1.5; EXPRESSED IN BRAIN, SIGNAL = 1.1; EXPRESSED IN BT474, SIGNAL = 1.1; EXPRESSED IN HBL100, SIGNAL = 1.1; EXPRESSED IN LUNG, SIGNAL = 4.7; EXPRESSED IN BONE MARROW, SIGNAL = 1.4; EXPRESSED IN ADULT LIVER, SIGNAL = 1.5; EXPRESSED IN FETAL LIVER, SIGNAL = 1.6; NT HIT: gi8923119, EVALUE 7.50e+00; SWISSPROT HIT: Q06355, EVALUE 2.90e+00
tcacaatatgatcctaacagggctgccagagaccatgcagatgaccgcttctcaggggctccttccccacagccacagcacagctatggagctataagaaagctgaggacacagcagctgaacatcggcaacattcgagtcccttccatgaagctagagagaggtggcatccatgacaggaaaaacccaggcgctgaagactga

SEQ ID NO: 19398 - DNA, 173 bp, Homo sapiens
  MAP TO AL109942.4; EXPRESSED IN BT474, SIGNAL = 2.3; EXPRESSED IN BONE MARROW, SIGNAL = 1.5; EXPRESSED IN LUNG, SIGNAL = 2.9; EXPRESSED IN FETAL LIVER, SIGNAL = 1.2; EXPRESSED IN PLACENTA, SIGNAL = 2.3; EXPRESSED IN HELA, SIGNAL = 2.3; EXPRESSED IN HBL100, SIGNAL = 1.3; EXPRESSED IN HEART, SIGNAL = 1.1; EXPRESSED IN ADULT LIVER, SIGNAL = 2.4; EXPRESSED IN BRAIN, SIGNAL =   2; NT HIT: AJ251835.1, EVALUE 3.40e-01; EST_HUMAN HIT: BF695381.1, EVALUE 1.50e-01; SWISSPROT HIT: Q64464, EVALUE 9.80e-01
gtttcattcacttcccaaaatcttttctgaagcgaaagaagcaatggtattttgcagaggggtctcggactttcaaatccaagttcctttgctctttggacctacgtcaagccattatcatagagctaatgaaggagaactggatgtgtgaggtattacagggaaagatgaag

SEQ ID NO: 19399 - DNA, 406 bp, Homo sapiens
  MAP TO AL049692.11; EXPRESSED IN LUNG, SIGNAL = 9.3; EXPRESSED IN BT474, SIGNAL = 1.3; EXPRESSED IN PLACENTA, SIGNAL = 1.3; EXPRESSED IN BRAIN, SIGNAL = 2.2; EXPRESSED IN BONE MARROW, SIGNAL =   2; EXPRESSED IN ADULT LIVER, SIGNAL = 1.9; EXPRESSED IN FETAL LIVER, SIGNAL = 2.3; EXPRESSED IN HEART, SIGNAL = 2.8; EXPRESSED IN HELA, SIGNAL = 1.4; EXPRESSED IN HBL100, SIGNAL = 1.6; EST_HUMAN HIT: H25332.1, EVALUE 1.50e+00; SWISSPROT HIT: O33915, EVALUE 7.70e-01
tcacatctggtgactgtgccgggtgggctcctgtgggcggctgctggagacagtgggtgtgacggccaggctctgctctctgtgactgcgttgtctgtcttgcttctcgtgcttctctacctcattttccttttggcaggtcagccttctcggcagggctcttggttcctgccaccccataacatgggctttgctttggctcagggttaccacagcaggcattgttgctgtcctgcgcagattctctggtccatcttggtgttcagcggcaatagtggcagaccctttcctacaggctggagaatccccgcccaagcatccgcatagctctgcttctttgtgagctttctccttggccaggggaacgtgctgggctgcagccacaaccagtgggggatgggcgtca

SEQ ID NO: 19400 - DNA, 434 bp, Homo sapiens
  MAP TO AC011499.1; EXPRESSED IN PLACENTA, SIGNAL =   7; EXPRESSED IN HBL100, SIGNAL = 5.3; EXPRESSED IN HELA, SIGNAL = 6.6; EXPRESSED IN HEART, SIGNAL = 7.2; EXPRESSED IN BT474, SIGNAL = 3.9; EXPRESSED IN BRAIN, SIGNAL = 7.5; EXPRESSED IN LUNG, SIGNAL =  16; EXPRESSED IN BONE MARROW, SIGNAL =   8; EXPRESSED IN ADULT LIVER, SIGNAL = 5.9; EXPRESSED IN FETAL LIVER, SIGNAL = 6.8; NT HIT: U58767.2, EVALUE 7.00e-05; SWISSPROT HIT: P39192, EVALUE 3.40e+00; EST_HUMAN HIT: W67216.1, EVALUE 1.00e-01
gtcgtgctgacataattgttatgggaaaaggcagacgaaccctgtgcagacagctatgtgtgtgaacttaattcagactaagatgaagtgttaaaagtccattcttactgattttggtaattcacggaatccaacaagttatggaaatttagttccatgagcatattcaggggtggggggagttatggctgaacatcagtgatgcctggaatattatgaagcggaaagattttcacacctacccccaaaaaaacaacaaaaaaaactgccccaaaatgattactgacgggaccaggggatataatccgcaaaatgacaaccagaataaaatatttgtttgtttgttttattattttatatatatttttagagatagtgtctctccctgttgcccagtttggagcgaggggcgcaatctcagctcactgcagcct

SEQ ID NO: 19401 - DNA, 90 bp, Homo sapiens
  MAP TO AL121656.1; EXPRESSED IN BONE MARROW, SIGNAL = 1.2; EXPRESSED IN LUNG, SIGNAL = 3.8; EXPRESSED IN ADULT LIVER, SIGNAL = 1.2; EXPRESSED IN PLACENTA, SIGNAL = 1.3; EXPRESSED IN BRAIN, SIGNAL = 1.2; EXPRESSED IN FETAL LIVER, SIGNAL = 1.7; EXPRESSED IN BT474, SIGNAL = 3.1; EXPRESSED IN HEART, SIGNAL = 3.3; EXPRESSED IN HELA, SIGNAL = 1.1; EXPRESSED IN HBL100, SIGNAL = 1.1; NT HIT: AL163210.2, EVALUE 7.00e-04; EST_HUMAN HIT: BF439442.1, EVALUE 5.00e-03
tctggagtcagacaacctcggtttggaatcaggctctgccgcttactactgctagaggtgagggtgggcaaactttttctgtgaagggct

SEQ ID NO: 19402 - DNA, 110 bp, Homo sapiens
  MAP TO AL096775.9; EXPRESSED IN PLACENTA, SIGNAL = 9.9; EXPRESSED IN HBL100, SIGNAL = 6.5; EXPRESSED IN HELA, SIGNAL = 8.5; EXPRESSED IN HEART, SIGNAL =  11; EXPRESSED IN BONE MARROW, SIGNAL =  11; EXPRESSED IN LUNG, SIGNAL =  11; EXPRESSED IN BRAIN, SIGNAL =   8; EXPRESSED IN ADULT LIVER, SIGNAL = 9.3; EXPRESSED IN BT474, SIGNAL = 4.7; EXPRESSED IN FETAL LIVER, SIGNAL = 9.1; EST_HUMAN HIT: BE765232.1, EVALUE 2.00e-30
ccctggggcagtcagtagttggggagtgcccaggacctccaacactactacttgggccttcctcttcgccttttcttcctcctcttcctccggactctaagaaagtacaa

SEQ ID NO: 19403 - DNA, 95 bp, Homo sapiens
  MAP TO AL118555.1; EXPRESSED IN BONE MARROW, SIGNAL = 1.8; EXPRESSED IN BT474, SIGNAL = 1.4; EXPRESSED IN FETAL LIVER, SIGNAL = 1.1; EXPRESSED IN HEART, SIGNAL = 1.7; EXPRESSED IN BRAIN, SIGNAL =   1; EXPRESSED IN LUNG, SIGNAL = 1.7; EXPRESSED IN ADULT LIVER, SIGNAL = 1.4; EXPRESSED IN PLACENTA, SIGNAL = 1.5; EXPRESSED IN HELA, SIGNAL = 1.3; EXPRESSED IN HBL100, SIGNAL = 1.4; SWISSPROT HIT: Q61151, EVALUE 8.00e-12; EST_HUMAN HIT: BE929768.1, EVALUE 3.00e-44; NT HIT: gi11434604, EVALUE 9.00e-47
cgggactacttaaaaacagtcttacacagaatttatggcaagtttcttggtcttagagcatttatccgaaaacagattaacaatatttttctaag

SEQ ID NO: 19404 - DNA, 190 bp, Homo sapiens
  MAP TO AL034549.16; EXPRESSED IN PLACENTA, SIGNAL = 2.4; EXPRESSED IN HBL100, SIGNAL =   2; EXPRESSED IN BONE MARROW, SIGNAL = 2.5; EXPRESSED IN FETAL LIVER, SIGNAL = 2.2; EXPRESSED IN HELA, SIGNAL = 1.8; EXPRESSED IN HEART, SIGNAL = 2.9; EXPRESSED IN BRAIN, SIGNAL = 2.4; EXPRESSED IN LUNG, SIGNAL = 1.2; EXPRESSED IN BT474, SIGNAL = 1.4; EXPRESSED IN ADULT LIVER, SIGNAL = 3.4; EST_HUMAN HIT: AI278982.1, EVALUE 5.00e-17; SWISSPROT HIT: P31316, EVALUE 1.70e+00; NT HIT: AF223391.1, EVALUE 8.00e-15
aattaaaaactaggacacaaacacacacattggcctaggcccacacaggatcaggatcatcaatatcatcatattccaggtccacccacatctcatgccactggaaggtcttcggcggcaatacatacatggagctgtcaactcctatgataacaatgccttcttcaggaatacctcctgaaggacctgc

SEQ ID NO: 19405 - DNA, 141 bp, Homo sapiens
  MAP TO AL096776.9; EXPRESSED IN BONE MARROW, SIGNAL = 4.3; EXPRESSED IN LUNG, SIGNAL = 9.3; EXPRESSED IN BRAIN, SIGNAL =   3; EXPRESSED IN BT474, SIGNAL = 2.3; EXPRESSED IN PLACENTA, SIGNAL = 5.2; EXPRESSED IN HBL100, SIGNAL = 2.5; EXPRESSED IN HEART, SIGNAL = 5.2; EXPRESSED IN ADULT LIVER, SIGNAL = 4.3; EXPRESSED IN FETAL LIVER, SIGNAL = 3.7; EXPRESSED IN HELA, SIGNAL = 4.1; SWISSPROT HIT: Q92968, EVALUE 3.90e+00; EST_HUMAN HIT: AV741999.1, EVALUE 4.70e-01; NT HIT: AL163278.2, EVALUE 7.00e-05
accaaggtcacctgtctggaccccagaatccagaggctcggaaaacaaaaacataagctcacagtcaaatcaagcaaatatcaaaaacataacagaagcagaagttttatgaccttaaagcttgaagcagagatagcataa

SEQ ID NO: 19406 - DNA, 130 bp, Homo sapiens
  MAP TO AL023755.5; EXPRESSED IN HBL100, SIGNAL = 0.92; EXPRESSED IN HEART, SIGNAL = 0.98; EXPRESSED IN LUNG, SIGNAL = 2.9; EXPRESSED IN FETAL LIVER, SIGNAL = 1.1; EXPRESSED IN BT474, SIGNAL = 1.7; EXPRESSED IN HELA, SIGNAL = 0.94; NT HIT: gi11417448, EVALUE 4.00e-34; EST_HUMAN HIT: BE293450.1, EVALUE 4.00e-34; SWISSPROT HIT: Q9ZE10, EVALUE 1.20e-01
aaagaaaactgggaaaattatttcatcaaagcacagaaaagtgcgacgtctcattgctaatgactttgcaaatgcttttaactctggagcagacgtcttcctaactcccaccatcttaagtgaggcagta

SEQ ID NO: 19407 - DNA, 200 bp, Homo sapiens
  MAP TO AL118512.2; EXPRESSED IN HBL100, SIGNAL = 0.92; EXPRESSED IN HEART, SIGNAL = 0.91; EXPRESSED IN LUNG, SIGNAL = 2.5; EXPRESSED IN FETAL LIVER, SIGNAL = 1.2; EXPRESSED IN BT474, SIGNAL = 1.1; NT HIT: gi11466344, EVALUE 7.30e+00; SWISSPROT HIT: Q62234, EVALUE 3.00e-05
caggcacaatgagagtatttgtgttcagtttgatgggctgttcattcttgagccagctgaggtcaggaggtggaaaaccagagacctcacaggtcaaagagatgaaattgttcaccacgacggtaagattttcagatttaggaccaatgacacttggaggaactataatagtaaatatattaaaagtgaaagcaggtgtt

SEQ ID NO: 19408 - DNA, 258 bp, Homo sapiens
  MAP TO NM_007104.1; EXPRESSED IN BT474, SIGNAL = 1.3; EXPRESSED IN FETAL LIVER, SIGNAL = 1.4; EXPRESSED IN ADULT LIVER, SIGNAL =   1; EXPRESSED IN PLACENTA, SIGNAL = 0.98; EXPRESSED IN BONE MARROW, SIGNAL = 1.1; EXPRESSED IN HELA, SIGNAL = 0.89; EXPRESSED IN HBL100, SIGNAL = 0.96; EXPRESSED IN HEART, SIGNAL = 0.87; EXPRESSED IN LUNG, SIGNAL = 4.6; SWISSPROT HIT: O14254, EVALUE 6.00e-01; NT HIT: AY004854.1, EVALUE 1.60e-01; EST_HUMAN HIT: AA584808.1, EVALUE 1.00e-105
ttgatccttatcactgcttttggcacactcctcatccaagagttgatcgcagaggcagagttccttgccaccagtccagtggaagtacaagccaactttgctctccaaatggcagcagtagctgagcaggccgccctgcattctctcctcataaacatgctgttctcaagtttgtcagaatccagagctctctactcattacccccttttccaaacaagcaagcaaagcatgctcttcctttgtttcccttaattgcc

SEQ ID NO: 19409 - DNA, 337 bp, Homo sapiens
  MAP TO AC007690.11; EXPRESSED IN PLACENTA, SIGNAL =  12; EXPRESSED IN HELA, SIGNAL =  33; EXPRESSED IN HEART, SIGNAL = 8.7; EXPRESSED IN BONE MARROW, SIGNAL =  11; EXPRESSED IN BT474, SIGNAL =  25; EXPRESSED IN HBL100, SIGNAL =  28; EXPRESSED IN BRAIN, SIGNAL = 4.2; EXPRESSED IN LUNG, SIGNAL =  14; EXPRESSED IN ADULT LIVER, SIGNAL = 6.4; EXPRESSED IN FETAL LIVER, SIGNAL = 9.6; EST_HUMAN HIT: BF214902.1, EVALUE 1.00e-130; NT HIT: gi4506628, EVALUE 1.00e-130; SWISSPROT HIT: P47914, EVALUE 2.00e-49
aagctggagctgcagcctggaccttggtttggtccttggccttggcctttggccggcacagcctgagccccttggcaacgcgggcacgagcacgcttcccaagcttggggtggggaatgtaggcaagtcgattgagcttgtggctgacatcctttgggatcttgggcttagcctccttgggcttcacaagggccctgatagcctcggcatgtgcactcatggcctcggcactgttggcctgcatcttctttaggctcttcttgttgtgcttcttggcaaagcacatgttcctcaggaacttggggtcgacccccttaagagattcgtatctttgtga

SEQ ID NO: 19410 - DNA, 663 bp, Homo sapiens
  MAP TO AC007688.15; EXPRESSED IN HBL100, SIGNAL = 1.3; EXPRESSED IN HELA, SIGNAL =  30; EXPRESSED IN HEART, SIGNAL = 0.88; EXPRESSED IN BRAIN, SIGNAL = 5.6; EXPRESSED IN BT474, SIGNAL =  44; EXPRESSED IN LUNG, SIGNAL = 1.7; EXPRESSED IN BONE MARROW, SIGNAL = 1.1; EXPRESSED IN ADULT LIVER, SIGNAL = 7.6; EXPRESSED IN FETAL LIVER, SIGNAL =  13; EST_HUMAN HIT: BE794884.1, EVALUE 0.00e+00; NT HIT: gi4506730, EVALUE 0.00e+00; SWISSPROT HIT: P10660, EVALUE 2.00e-92
cttcattcccttgcctaaaagtttagcatattctgcagcctcttccttatttttcttagtacacggcttcttcagagcaatatgctgccctttgtgctgcaggaaatgtggagtaacaagatgctgaatcttgggtgctttggtcctaggtttcttacctcctttgtttgagggctttcttacaacatactggcggacatcatcttcttcagagagattggaaagtttgcagattctgctagcttttttgggccccaggcgacaaggcaccatagtatcagtcagtccaggaatatccttctttactttttttttttttttaacaataatcaagttgagaatgctcagattggcatccactatgcaaccacgaactgattttctctttctttctccagttctccttggtctgtaacaggaatgccccttactcagtagcaggtggacacggccatgggtcaagacaccctgcttcatgggaaaaccttgtttgttgttcccaccactgattcggaccacataacctttccattcttcacccagagtgtcagcagcaacttctgtggccataagcttctcataaaaagtacgaagtttgcattcatcatccacttcaatgagtttctggcagccagtgaccgggaaggagatgttcagcttcat

SEQ ID NO: 19411 - DNA, 90 bp, Homo sapiens
  MAP TO AL008723.8; EXPRESSED IN HBL100, SIGNAL = 4.9; EXPRESSED IN HELA, SIGNAL = 3.7; EXPRESSED IN HEART, SIGNAL = 4.9; EXPRESSED IN LUNG, SIGNAL = 3.5; EXPRESSED IN BT474, SIGNAL =   5; EXPRESSED IN PLACENTA, SIGNAL = 4.7; EXPRESSED IN BRAIN, SIGNAL = 3.8; EXPRESSED IN BONE MARROW, SIGNAL = 5.7; EXPRESSED IN ADULT LIVER, SIGNAL = 4.6; EXPRESSED IN FETAL LIVER, SIGNAL = 4.1; EST_HUMAN HIT: BF348283.1, EVALUE 1.00e-43; SWISSPROT HIT: Q10570, EVALUE 2.00e-06; NT HIT: gi9558724, EVALUE 6.00e-26
gacgggcatggccttcatggtcgacaggcagctctacatccaccagatgatcagcgtcaggaacttcatcctggcagccgacctcatgaa

SEQ ID NO: 19412 - DNA, 171 bp, Homo sapiens
  MAP TO AL096773.6; EXPRESSED IN FETAL LIVER, SIGNAL = 2.1; EXPRESSED IN ADULT LIVER, SIGNAL = 1.9; EXPRESSED IN PLACENTA, SIGNAL = 5.8; EXPRESSED IN HELA, SIGNAL = 6.6; EXPRESSED IN HEART, SIGNAL =   5; EXPRESSED IN BRAIN, SIGNAL = 2.2; EXPRESSED IN BT474, SIGNAL =  10; EXPRESSED IN HBL100, SIGNAL = 5.8; EXPRESSED IN LUNG, SIGNAL = 4.5; EXPRESSED IN BONE MARROW, SIGNAL =   3; NT HIT: AB020692.1, EVALUE 8.00e-92; SWISSPROT HIT: O75534, EVALUE 2.00e-27; EST_HUMAN HIT: BE708510.1, EVALUE 1.00e-91
cctaaagaacttccctttggagacaaagatacgaaatccaaggtgaccctgctggaaggtgaccatgttaggtttaatatttcaacagaccgacgtgacaaattagagcgagcaaccaatatagaagttctgtcaaatacatttcagttcactaatgaagcccgagaaatg

SEQ ID NO: 19413 - DNA, 106 bp, Homo sapiens
  MAP TO AF181450.1; EXPRESSED IN BRAIN, SIGNAL = 1.5; EXPRESSED IN BONE MARROW, SIGNAL = 1.2; EXPRESSED IN LUNG, SIGNAL = 1.3; EXPRESSED IN BT474, SIGNAL = 1.1; EXPRESSED IN FETAL LIVER, SIGNAL = 0.9; EXPRESSED IN ADULT LIVER, SIGNAL =   1; EXPRESSED IN HEART, SIGNAL = 6.9; NT HIT: X79990.1, EVALUE 3.00e-53; SWISSPROT HIT: Q06455, EVALUE 3.00e-14; EST_HUMAN HIT: BF059405.1, EVALUE 4.00e-53
ggctgctggtggtgtgtccatcgggctcccagccccgctgttgggcgtgacagaggagctgactgcaggtgtgtctccctgctgctgggcctgcagggtctgtcca

SEQ ID NO: 19414 - DNA, 166 bp, Homo sapiens
  MAP TO AC011457.1; EXPRESSED IN BRAIN, SIGNAL = 8.4; EXPRESSED IN BONE MARROW, SIGNAL = 7.5; EXPRESSED IN LUNG, SIGNAL = 5.5; EXPRESSED IN BT474, SIGNAL = 7.4; EXPRESSED IN ADULT LIVER, SIGNAL =   5; EXPRESSED IN FETAL LIVER, SIGNAL = 5.4; EXPRESSED IN HBL100, SIGNAL = 6.7; EXPRESSED IN HELA, SIGNAL = 5.6; EXPRESSED IN PLACENTA, SIGNAL = 9.9; EXPRESSED IN HEART, SIGNAL = 3.9; NT HIT: gi4507974, EVALUE 2.00e-12; EST_HUMAN HIT: AA361275.1, EVALUE 6.00e-40; SWISSPROT HIT: P52742, EVALUE 5.00e-19
agccttgattaaaagccttcccacattccttacattcatagagtttcctgccagtatgaacagtctgatgttgaatcaactgagaacgatgactaaaggttttcccacattccttgcatgcatagggtttttcaccagtatgaattctataatgtactttaagatg

SEQ ID NO: 19415 - DNA, 195 bp, Homo sapiens
  MAP TO AF179633.1; EXPRESSED IN HEART, SIGNAL = 0.86; EXPRESSED IN BRAIN, SIGNAL = 1.1; EXPRESSED IN BONE MARROW, SIGNAL =  38; EXPRESSED IN LUNG, SIGNAL = 2.8; EXPRESSED IN FETAL LIVER, SIGNAL = 1.1; EXPRESSED IN ADULT LIVER, SIGNAL = 1.1; EST_HUMAN HIT: AI623388.1, EVALUE 1.20e-01; SWISSPROT HIT: Q03386, EVALUE 4.30e-01
gatcctaaccatgctgccatatggtcacaggaattaacgaaaatatatcccctacagctggagggggaaaaactggaaaatgagcttttcctgcaagttgtatgtcatggtgtttgggagctggccaaccgtggctcacaagagctgatgactgttcaaaaaatatgcaagccagttattgaacactgccatgat

SEQ ID NO: 19416 - DNA, 289 bp, Homo sapiens
  MAP TO AC000026.3; EXPRESSED IN HBL100, SIGNAL = 5.1; EXPRESSED IN HELA, SIGNAL = 4.6; EXPRESSED IN HEART, SIGNAL = 3.6; EXPRESSED IN LUNG, SIGNAL = 2.2; EXPRESSED IN ADULT LIVER, SIGNAL =   3; EXPRESSED IN PLACENTA, SIGNAL =   4; EXPRESSED IN BRAIN, SIGNAL = 3.8; EXPRESSED IN BONE MARROW, SIGNAL = 3.7; EXPRESSED IN FETAL LIVER, SIGNAL = 2.4; EXPRESSED IN BT474, SIGNAL =   5; EST_HUMAN HIT: AI394032.1, EVALUE 1.00e-128; SWISSPROT HIT: P52303, EVALUE 7.00e-44; NT HIT: U36253.1, EVALUE 0.00e+00
catggggttagagtcggagatgaggtctttaagggtgtccaggaagccctggtcctccaccagctgggcgttgatgtcgtggagcttggccacgcacacagctgctgtcttgcgcacatatggatcctcgtccttcaggcacttccggagtggctcgcacaggtactctgtgatcttgtcaacgcggatgcagcccatggtccgcactgccagggctcggatgagggggttggggtcctcacagtcctggggggaaccagccatcggccagggcaggggtgggatgagc

SEQ ID NO: 19417 - DNA, 113 bp, Homo sapiens
  MAP TO AB020863.1; EXPRESSED IN ADULT LIVER, SIGNAL = 3.9; EXPRESSED IN BT474, SIGNAL = 2.5; EXPRESSED IN FETAL LIVER, SIGNAL = 4.8; EXPRESSED IN PLACENTA, SIGNAL = 5.5; EXPRESSED IN HELA, SIGNAL = 2.5; EXPRESSED IN HEART, SIGNAL = 1.2; EXPRESSED IN LUNG, SIGNAL = 6.7; SWISSPROT HIT: P31647, EVALUE 7.10e+00; NT HIT: X75787.1, EVALUE 3.00e-03; EST_HUMAN HIT: AA419608.1, EVALUE 3.00e-57
agataaacattgagagaacgaaagccaaagtgtcatttaagagagatatatatgaaaaagtaacattaatatatagaactttaccatcaccagccgtagttgatagaaaatat

SEQ ID NO: 19418 - DNA, 276 bp, Homo sapiens
  MAP TO AF181895.1; EXPRESSED IN HBL100, SIGNAL =   5; EXPRESSED IN HEART, SIGNAL = 1.1; EXPRESSED IN BRAIN, SIGNAL = 1.3; EXPRESSED IN BONE MARROW, SIGNAL =   1; EXPRESSED IN LUNG, SIGNAL = 2.4; EXPRESSED IN BT474, SIGNAL = 1.7; EXPRESSED IN ADULT LIVER, SIGNAL = 1.3; EXPRESSED IN FETAL LIVER, SIGNAL = 0.97; NT HIT: gi7669517, EVALUE 0.00e+00; EST_HUMAN HIT: H15479.1, EVALUE 2.00e-16; SWISSPROT HIT: Q15491, EVALUE 2.00e-51
atgccagagccccagactgaagatgggagaacccctggactcgtgggcctggccgtgccctgctgtgcgtgcctagaagctgagcgcctgagaggttgcctcaactcagagaaaatctgcattgtccccatcctggcttgcctggtcagcctctgcctctgcatcgccggcctcaagtgggtatttgtggacaagatctttgaatatgactctcctactcaccttgaccctggggggttaggccaggaccctattatttctctggacgcaactgct

SEQ ID NO: 19419 - DNA, 303 bp, Homo sapiens
  MAP TO AL078638.6; EXPRESSED IN BONE MARROW, SIGNAL = 1.6; EXPRESSED IN BRAIN, SIGNAL = 1.8; EXPRESSED IN ADULT LIVER, SIGNAL = 1.4; EXPRESSED IN BT474, SIGNAL = 1.8; EXPRESSED IN FETAL LIVER, SIGNAL = 1.4; EXPRESSED IN PLACENTA, SIGNAL = 3.7; EXPRESSED IN HELA, SIGNAL = 1.7; EXPRESSED IN HBL100, SIGNAL = 2.4; EXPRESSED IN HEART, SIGNAL =  10; EXPRESSED IN LUNG, SIGNAL = 9.3; SWISSPROT HIT: Q13642, EVALUE 2.00e-29; EST_HUMAN HIT: AA983541.1, EVALUE 1.00e-98; NT HIT: AF110763.1, EVALUE 0.00e+00
gtccctccagctacaaggtgggcaccatggcggagaagtttgactgccactactgcagggatcccttgcaggggaagaagtatgtgcaaaaggatggccaccactgctgcctgaaatgctttgacaagttctgtgccaacacctgtgtggaatgccgcaagcccatcggtgcggactccaaggtaacgggcatccccatgtgccaatgggaagggctgggttttggagtgtcctttgcccacaaccatggcagcagcagctggctgttaggatttcccagcatcactgcagccaccttgaggc

SEQ ID NO: 19420 - DNA, 75 bp, Homo sapiens
  MAP TO AC007919.18; EXPRESSED IN HEART, SIGNAL = 0.9; EXPRESSED IN LUNG, SIGNAL = 2.1; EXPRESSED IN BRAIN, SIGNAL =   1; EXPRESSED IN BONE MARROW, SIGNAL = 1.2; EXPRESSED IN ADULT LIVER, SIGNAL = 0.94; EXPRESSED IN FETAL LIVER, SIGNAL = 0.91; NT HIT: AB007955.1, EVALUE 2.30e+00; SWISSPROT HIT: Q07636, EVALUE 1.90e+00; EST_HUMAN HIT: AI478104.1, EVALUE 6.00e-32
gaggtattccagaaggtgttgttgtcataggaggtgacagctccatgcacgttactgcccgcctctccctgcgag

SEQ ID NO: 19421 - DNA, 243 bp, Homo sapiens
  MAP TO AC010854.1; EXPRESSED IN PLACENTA, SIGNAL = 7.1; EXPRESSED IN HELA, SIGNAL = 5.7; EXPRESSED IN BONE MARROW, SIGNAL = 6.5; EXPRESSED IN BT474, SIGNAL = 3.2; EXPRESSED IN HBL100, SIGNAL = 3.8; EXPRESSED IN HEART, SIGNAL = 5.2; EXPRESSED IN BRAIN, SIGNAL = 5.3; EXPRESSED IN LUNG, SIGNAL =  11; EXPRESSED IN ADULT LIVER, SIGNAL = 8.3; EXPRESSED IN FETAL LIVER, SIGNAL = 3.9; SWISSPROT HIT: P38330, EVALUE 1.20e+00; NT HIT: AL163246.2, EVALUE 1.00e-42; EST_HUMAN HIT: BE005637.1, EVALUE 2.00e-54
gtggaaggaacttgccttgttacagatgagactttggacttggacttttgagttaaagctggaatgtgttaagactttgggggactgttggaagggcatgattgtgtttttgaaatgtgaggacatgagattttggagcggtcagaggtggaatgacacggtttggctctgtccccacccaaatctcatcttgaattgtagttcccataatcctcacatgttgtgggaggaacctgatgagag

SEQ ID NO: 19422 - DNA, 183 bp, Homo sapiens
  MAP TO AC011408.1; EXPRESSED IN LUNG, SIGNAL = 5.7; EXPRESSED IN BRAIN, SIGNAL = 1.3; EXPRESSED IN BT474, SIGNAL = 1.5; EXPRESSED IN ADULT LIVER, SIGNAL = 2.1; EXPRESSED IN PLACENTA, SIGNAL = 1.7; EXPRESSED IN BONE MARROW, SIGNAL = 1.7; EXPRESSED IN FETAL LIVER, SIGNAL = 1.1; EXPRESSED IN HEART, SIGNAL = 1.4; EXPRESSED IN HELA, SIGNAL = 0.96; EXPRESSED IN HBL100, SIGNAL = 1.5; NT HIT: AB040932.1, EVALUE 6.70e+00; EST_HUMAN HIT: AV656000.1, EVALUE 1.00e-88
tccgcatgcgatagatgattactgcagtggctgggcacagcaacaacgaggtcatgatgacaatggtggccaggatgatgaggacaataacccagatatccaggatgtgcttgggaagcacgacttccatggggacttggctgactgcatccatgttgcttcactctgcaacagacaagaaag

SEQ ID NO: 19423 - DNA, 397 bp, Homo sapiens
  MAP TO AL031078.10; EXPRESSED IN BONE MARROW, SIGNAL =  10; EXPRESSED IN LUNG, SIGNAL =  10; EXPRESSED IN BRAIN, SIGNAL =   6; EXPRESSED IN BT474, SIGNAL =  14; EXPRESSED IN PLACENTA, SIGNAL =  11; EXPRESSED IN ADULT LIVER, SIGNAL =  12; EXPRESSED IN FETAL LIVER, SIGNAL = 5.5; EXPRESSED IN HEART, SIGNAL =  21; EXPRESSED IN HELA, SIGNAL =  25; EXPRESSED IN HBL100, SIGNAL =  19; EST_HUMAN HIT: BF677892.1, EVALUE 2.00e-52; SWISSPROT HIT: P39189, EVALUE 8.00e-21; NT HIT: U78027.1, EVALUE 2.00e-38
gcacaatcttctttgtagttttagcctttttccagaaaatcggcttagtctgcccaccatagccactctgcttcctgtcataacaccgctttccctgggcaggcaccatagccactctgctccctgtcataatatcgctttccctgggcatgcagagaatgcttgcccttctttttttttttttttttttttaaatttttttttttttttgaggcagagtcttgctctgtctcccaggctggagtgcagtggcgcgatctcggctcactgcaagccccgtcttccggattcatgccattctcttgcctcagcctcccaaatagctgggactacaggcgcccaccaccacgcccggctaatttttttgtattttagtagagacggggtttcaccgtat

SEQ ID NO: 19424 - DNA, 85 bp, Homo sapiens
  MAP TO AL079338.9; EXPRESSED IN HBL100, SIGNAL = 0.99; EXPRESSED IN HEART, SIGNAL = 0.92; EXPRESSED IN LUNG, SIGNAL = 1.9; EXPRESSED IN BONE MARROW, SIGNAL = 1.4; EXPRESSED IN BRAIN, SIGNAL = 1.2; EXPRESSED IN ADULT LIVER, SIGNAL = 1.1; EXPRESSED IN BT474, SIGNAL = 1.1; SWISSPROT HIT: P14336, EVALUE 4.30e+00; EST_HUMAN HIT: BF541030.1, EVALUE 1.00e-40
tccctcaagacccaacctgacaccatcagtattattacactcttcatttcccagtggaggaggtggggatccaggcaagaaagac

SEQ ID NO: 19425 - DNA, 410 bp, Homo sapiens
  MAP TO AF152363.1; EXPRESSED IN BT474, SIGNAL =  90; EXPRESSED IN FETAL LIVER, SIGNAL =  20; EXPRESSED IN ADULT LIVER, SIGNAL =   8; EXPRESSED IN PLACENTA, SIGNAL =  11; EXPRESSED IN HEART, SIGNAL =  10; EXPRESSED IN BONE MARROW, SIGNAL = 9.8; EXPRESSED IN HELA, SIGNAL =  81; EXPRESSED IN HBL100, SIGNAL =  26; EXPRESSED IN BRAIN, SIGNAL = 7.8; EXPRESSED IN LUNG, SIGNAL =  17; EST_HUMAN HIT: BE796376.1, EVALUE 0.00e+00; SWISSPROT HIT: P04374, EVALUE 6.00e-39; NT HIT: X52857.1, EVALUE 0.00e+00
gaagggaacaaggaaaacatggaacccaaagggaactgcagtgaaagcacaaagattctaggatactgcgagcaaatggggtggaggggtgctcccctgagcaacagaagaaatggtctggtggttaagataaaacacaagtcaaacttattagagctgtccacagtcagcaatagtgaccttcttgctagtcttgccattcctgaacacaaagcgctccatggcctccacaatatccatgccttctttcaccctgccaaagaccacttgcttgccatccaaccacttggtcttggcagggcacatgaaaaactgggaaccatttgcgttgggtccagcatttgccatggacaggatgccaggacctgtatgcttcaggatgaagttctcgtcatcaaatttctccctgt

SEQ ID NO: 19426 - DNA, 282 bp, Homo sapiens
  MAP TO AC005082.2; EXPRESSED IN BT474, SIGNAL = 1.9; EXPRESSED IN HBL100, SIGNAL = 1.5; EXPRESSED IN HELA, SIGNAL = 1.1; EXPRESSED IN HEART, SIGNAL = 3.2; EXPRESSED IN LUNG, SIGNAL = 7.9; EXPRESSED IN FETAL LIVER, SIGNAL = 2.1; NT HIT: AL161507.2, EVALUE 6.80e-01; EST_HUMAN HIT: BF680632.1, EVALUE 0.00e+00; SWISSPROT HIT: Q04652, EVALUE 4.00e-05
atgtttcaagggtctcttcatttgctccacaagtatcgacaacacaaattaaacaacttgtgactggaaaagcacgaactttggagttggcaacccatttgtctgtttcggtattatattcgagaatgtgtcctaatcgaccaacaccctgaaaaccagccaagacataaactatagagccaactgctgcacatttcactgttacacccttccatggcattggtgagaccatcttccattcgttcaacttaatatcgtaatattccacattgtccagaccac

SEQ ID NO: 19427 - DNA, 126 bp, Homo sapiens
  MAP TO AC009406.1; EXPRESSED IN FETAL LIVER, SIGNAL = 3.1; EXPRESSED IN ADULT LIVER, SIGNAL = 6.5; EXPRESSED IN PLACENTA, SIGNAL = 7.4; EXPRESSED IN HELA, SIGNAL =  19; EXPRESSED IN HEART, SIGNAL = 3.5; EXPRESSED IN BRAIN, SIGNAL = 2.6; EXPRESSED IN BT474, SIGNAL = 1.4; EXPRESSED IN HBL100, SIGNAL = 2.6; EXPRESSED IN LUNG, SIGNAL =  11; EXPRESSED IN BONE MARROW, SIGNAL = 3.3; NT HIT: M18048.1, EVALUE 4.00e-46; EST_HUMAN HIT: AI950193.1, EVALUE 1.00e-40
tttagcggctgaagactgatgctgcccgattgcctccgaagccccgtagaccatcacggacgccgagctttgggtaactctcacagtggaaggtaagtccatccccttcttaatcaatatggaggc

SEQ ID NO: 19428 - DNA, 215 bp, Homo sapiens
  MAP TO AP000343.1; EXPRESSED IN BONE MARROW, SIGNAL = 2.5; EXPRESSED IN LUNG, SIGNAL = 9.6; EXPRESSED IN BT474, SIGNAL = 6.3; EXPRESSED IN FETAL LIVER, SIGNAL = 2.8; EXPRESSED IN ADULT LIVER, SIGNAL = 1.8; EXPRESSED IN HBL100, SIGNAL = 3.9; EXPRESSED IN HELA, SIGNAL = 4.3; EXPRESSED IN PLACENTA, SIGNAL = 5.1; EXPRESSED IN HEART, SIGNAL = 2.4; EXPRESSED IN BRAIN, SIGNAL = 2.6; NT HIT: U07000.1, EVALUE 1.00e-118; SWISSPROT HIT: P11274, EVALUE 5.00e-20; EST_HUMAN HIT: AW593895.1, EVALUE 1.00e-106
gagagagaggtccaaggtgccctacatcgtgcgccagtgcgtggaggagatcgagcgccgaggcatggaggaggtgggcatctaccgcgtgtccggtgtggccacggacatccaggcactgaaggcagccttcgacgtcagtgagtgttggcctgcgcaggacgggatggaggtgtgggcaatggtgtccgcgatgagatctcagagtgctccat

SEQ ID NO: 19429 - DNA, 447 bp, Homo sapiens
  MAP TO AL031118.19; EXPRESSED IN HBL100, SIGNAL = 2.3; EXPRESSED IN HELA, SIGNAL = 3.2; EXPRESSED IN HEART, SIGNAL = 1.3; EXPRESSED IN LUNG, SIGNAL = 3.1; EXPRESSED IN BT474, SIGNAL = 2.7; EXPRESSED IN PLACENTA, SIGNAL = 3.3; EXPRESSED IN BRAIN, SIGNAL = 1.2; EXPRESSED IN BONE MARROW, SIGNAL = 1.2; EXPRESSED IN ADULT LIVER, SIGNAL = 1.2; EXPRESSED IN FETAL LIVER, SIGNAL = 1.8; EST_HUMAN HIT: AV721647.1, EVALUE 0.00e+00; SWISSPROT HIT: P80303, EVALUE 1.00e-03; NT HIT: M23161.1, EVALUE 1.00e-120
gtcacatttgcatataaccaagagatgaacaaataacatctactgcagtgattttgcaaattcagcatagtcaatgtatccatcattgttcttgtcatcatctctcaaaacaccatctcttatgttaatcagctcatcttcactcattagtggtgcctgttcactccctttctccttatagatatgagtgatggctgtggagatttctaaaccatcaagcaaataattgccatcataatcgtgcattttgaagtaatggagctgcaaatcttgtagtgacatctccgcctctggtttgttgatgacatcttctgtaaggtacatggatgtgtttgggtcaaggaataggccaaggtggacatccaggcttgcatgactcagcaagtttggcgtgcaggcacacacctccacttgttatataacctgtttgtgtaagttcatacttgg

SEQ ID NO: 19430 - DNA, 186 bp, Homo sapiens
  MAP TO AL034422.18; EXPRESSED IN FETAL LIVER, SIGNAL = 2.7; EXPRESSED IN ADULT LIVER, SIGNAL = 1.4; EXPRESSED IN PLACENTA, SIGNAL = 9.3; EXPRESSED IN HBL100, SIGNAL = 5.2; EXPRESSED IN HELA, SIGNAL =  12; EXPRESSED IN HEART, SIGNAL = 2.6; EXPRESSED IN BT474, SIGNAL =   3; EXPRESSED IN BRAIN, SIGNAL = 1.1; EXPRESSED IN LUNG, SIGNAL = 6.3; EXPRESSED IN BONE MARROW, SIGNAL = 2.1; EST_HUMAN HIT: AW996058.1, EVALUE 7.00e-84; NT HIT: AJ237744.1, EVALUE 1.00e-101; SWISSPROT HIT: P04844, EVALUE 2.00e-24
aatgattaagtagagagtgtaggtgccagaggcagagtcaaattcaatctttctttcagaggtatccagttcaaacttgtacacgttcttgttgtctggctcggcaacaaacaccacttcctggccagtcttctggttatggagtcggacaaatgtctagatggaagaataatacaatctttcatc

SEQ ID NO: 19431 - DNA, 407 bp, Homo sapiens
  MAP TO AL031685.15; EXPRESSED IN FETAL LIVER, SIGNAL = 2.5; EXPRESSED IN ADULT LIVER, SIGNAL = 2.4; EXPRESSED IN PLACENTA, SIGNAL = 2.2; EXPRESSED IN HELA, SIGNAL = 2.2; EXPRESSED IN HEART, SIGNAL = 2.2; EXPRESSED IN BRAIN, SIGNAL = 2.2; EXPRESSED IN BT474, SIGNAL = 1.9; EXPRESSED IN HBL100, SIGNAL = 2.8; EXPRESSED IN LUNG, SIGNAL = 5.1; EXPRESSED IN BONE MARROW, SIGNAL = 2.9; NT HIT: gi11420800, EVALUE 0.00e+00; SWISSPROT HIT: P38266, EVALUE 2.30e+00; EST_HUMAN HIT: BE384874.1, EVALUE 0.00e+00
gatcggatggggaagcccagttcaatggatactaaattcaaggatgacttatttcggaagtacgtgcagttccatgagagcaaagtggataccaccaccagcaggcagcggcctggcagcgatgagtgcctgcgggtggcagcctcaaccctgctcagcctgcacaaggtggatcccttttatcgattccggctgatccagttctatgaggtggtggagagctccttgcgctcgctcagctcctctagcctgcgggctctgcacggcgccttcagcatgctggagacggtgggcatcaacctcttcctctacccgtggaagaaggaattcagaagcatcaaggtgaggtcctggagcagcctccatacaggccctccttctctcttcctgcccctggcagtccctcc

SEQ ID NO: 19432 - DNA, 432 bp, Homo sapiens
  MAP TO AL034380.21; EXPRESSED IN HBL100, SIGNAL = 1.3; EXPRESSED IN HELA, SIGNAL = 1.1; EXPRESSED IN HEART, SIGNAL = 0.9; EXPRESSED IN BRAIN, SIGNAL = 1.2; EXPRESSED IN BONE MARROW, SIGNAL = 0.98; EXPRESSED IN LUNG, SIGNAL = 2.1; EXPRESSED IN BT474, SIGNAL = 1.9; EXPRESSED IN FETAL LIVER, SIGNAL = 1.3; EXPRESSED IN ADULT LIVER, SIGNAL = 1.2; EST_HUMAN HIT: N98886.1, EVALUE 0.00e+00; SWISSPROT HIT: Q09712, EVALUE 4.00e-08; NT HIT: gi8923441, EVALUE 0.00e+00
cactgcagcgtggaccacgtacacaaacacctgaggactgaggaatccaagatcgggcttctctagggtcttattgttcttgctcctttgcagcccaagtgtaaggcagagccaagggtgagtggtcacgtatgtccaagttgcccaggcaaccagtatagccactggtgcagccagtagaaaattgggcacctgcttgagctcatagtatttcaaaaagccaacattccagtagacatcctggatatagctgtatattagtggaacatcccagaagcaccaaggcggttcatttccctctgcaatccggtagcccttgtctacagctaactgtaccaaaggctcaggaatggggcgggctgagcctggcagacagaattgggtgtaggcataatactgaaagagggcaaagggaaggccaagtgtgaacac

SEQ ID NO: 19433 - DNA, 280 bp, Homo sapiens
  MAP TO AF146367.1; EXPRESSED IN ADULT LIVER, SIGNAL = 2.9; EXPRESSED IN BT474, SIGNAL = 9.1; EXPRESSED IN FETAL LIVER, SIGNAL = 2.3; EXPRESSED IN PLACENTA, SIGNAL = 2.2; EXPRESSED IN HBL100, SIGNAL = 2.3; EXPRESSED IN HELA, SIGNAL = 2.5; EXPRESSED IN HEART, SIGNAL = 2.2; EXPRESSED IN BONE MARROW, SIGNAL = 3.2; EXPRESSED IN LUNG, SIGNAL = 1.2; EXPRESSED IN BRAIN, SIGNAL = 2.5; NT HIT: AF290195.1, EVALUE 0.00e+00; EST_HUMAN HIT: BE390866.1, EVALUE 0.00e+00; SWISSPROT HIT: O75949, EVALUE 1.20e+00
ctgcatcatcctggtgatagtcacagtggccgagtgagtttcttgggggcccagcttcctccagaggtggcagcaatggcccggctactaggggacctagacaggagcacgttcagaaagttgctgaagtttgtggtcagcagcctgcagggggaggactgccgagaggctgtgcagcgtcttggggtcagcgccaacctgccggaggagcagctgggtgccctgctggcaggcatgcacacactgctccagcaggccctccgtctgccccccaccagcc

SEQ ID NO: 19434 - DNA, 574 bp, Homo sapiens
  MAP TO AL031670.6; EXPRESSED IN BONE MARROW, SIGNAL =  49; EXPRESSED IN LUNG, SIGNAL = 1.1e+02; EXPRESSED IN ADULT LIVER, SIGNAL =  95; EXPRESSED IN BT474, SIGNAL =  61; EXPRESSED IN FETAL LIVER, SIGNAL = 1.3e+02; EXPRESSED IN HBL100, SIGNAL =  52; EXPRESSED IN PLACENTA, SIGNAL =  48; EXPRESSED IN HELA, SIGNAL =  83; EXPRESSED IN HEART, SIGNAL =  16; EXPRESSED IN BRAIN, SIGNAL =  14; NT HIT: M11147.1, EVALUE 0.00e+00; EST_HUMAN HIT: AV651066.1, EVALUE 0.00e+00; SWISSPROT HIT: P02792, EVALUE 2.00e-69
gcttgttagggtagttaagaaagctgcctattggctggagggagaggcttaggcagaagccctattactttgcaaggggcccttcagaagtcgctgggctcataaggctcttagacgtgcttgagagtgagcctttcgaagagatactcgcccagcccagcctctgggcctcccagcctgtggaggttcgtcaggtggtcacccatcttcttgatgagcttcacttcctcatctaggaagtgagtctccaggaagtcacagagatgggggtccatgtgggcagaatccagggcatgaagatccaaaagggcctggttcagctttttctccagggccatggcagctttcatggcatctggggttttaccccactcatcttcagctggcttcttgatgtcctggaagagagcgcggccgccacgctggttttgcatcttcaggagacgctcgtagccctcgcgcttctcctcggtcaattcgcggaagaagtggctcacgccttccagagccgcatcatcgcggtcgaaatagaagcccagagagaggtaggtgtaggaggcctgcaggtacaaat

SEQ ID NO: 19435 - DNA, 412 bp, Homo sapiens
  MAP TO AL009030.4; EXPRESSED IN PLACENTA, SIGNAL = 5.8; EXPRESSED IN HEART, SIGNAL = 1.7; EXPRESSED IN BRAIN, SIGNAL = 3.1; EXPRESSED IN BONE MARROW, SIGNAL = 6.5; EXPRESSED IN LUNG, SIGNAL = 5.1; EXPRESSED IN BT474, SIGNAL = 2.7; EXPRESSED IN ADULT LIVER, SIGNAL =  11; EXPRESSED IN FETAL LIVER, SIGNAL = 4.9; EXPRESSED IN HBL100, SIGNAL = 3.3; EXPRESSED IN HELA, SIGNAL = 5.4; SWISSPROT HIT: gi115305, EVALUE 2.70e-01; EST_HUMAN HIT: BF377897.1, EVALUE 0.00e+00; NT HIT: U21556.1, EVALUE 0.00e+00
aagcacccactatggatgcacagcaggacagacccaagtcccaagactccctgggcctactggcccccctagcatctgctgcagaggtcccctctacagctcccgtgtctgggaagaagcacagaccaccaggacccctgttctcctcctcagatccccttcctgccacctcttaccactcccgggacacagcacaggtcacctcgctgattcctgccaccttcacagctgcaagcagggatgccggcatgagaagaacaaggtcggctcctgcagctgccacagcagcccctcccccctccacattgaacaacacgtcggggtcactactcaatgcagtggatggaggcccctcacatttcttggcctcagccacagctgcagcacgtgcccagaggtcagaagtgagata

SEQ ID NO: 19436 - DNA, 218 bp, Homo sapiens
  MAP TO AC004878.2; EXPRESSED IN HBL100, SIGNAL = 2.1; EXPRESSED IN HELA, SIGNAL = 6.4; EXPRESSED IN HEART, SIGNAL = 2.1; EXPRESSED IN BONE MARROW, SIGNAL = 3.6; EXPRESSED IN LUNG, SIGNAL =   4; EXPRESSED IN PLACENTA, SIGNAL =   5; EXPRESSED IN BRAIN, SIGNAL = 2.9; EXPRESSED IN ADULT LIVER, SIGNAL = 4.3; EXPRESSED IN FETAL LIVER, SIGNAL =   2; EXPRESSED IN BT474, SIGNAL = 3.5; NT HIT: U29131.1, EVALUE 1.10e-01; EST_HUMAN HIT: AA077498.1, EVALUE 3.00e-98; SWISSPROT HIT: Q24325, EVALUE 1.60e+00
agaagtggaaccgatacttccggaacaaggctatctgagagcagttcttcctggccctcgggttcatgtaacggcataactggaaccaaagctcactgagcaagggtatatgagagcgggtctcctcgtacaggaagtagaagatgttttgtttgggggcctcgtcgtcctcctccatgtcattggccagatagctgaggacagaaatcaggttgctg

SEQ ID NO: 19437 - DNA, 137 bp, Homo sapiens
  MAP TO AL035414.18; EXPRESSED IN BT474, SIGNAL = 7.7; EXPRESSED IN FETAL LIVER, SIGNAL = 4.9; EXPRESSED IN HBL100, SIGNAL = 7.6; EXPRESSED IN HELA, SIGNAL =  12; EXPRESSED IN HEART, SIGNAL = 5.2; EXPRESSED IN LUNG, SIGNAL = 5.8; EXPRESSED IN ADULT LIVER, SIGNAL = 6.4; EXPRESSED IN PLACENTA, SIGNAL = 7.1; EXPRESSED IN BRAIN, SIGNAL = 4.3; EXPRESSED IN BONE MARROW, SIGNAL = 9.7; EST_HUMAN HIT: AA307335.1, EVALUE 8.00e-49; NT HIT: U17714.1, EVALUE 5.00e-49; SWISSPROT HIT: P50502, EVALUE 3.00e-17
ctatcaggtttttcttccttggtattttcttctgatttagctttctgagtagcaggtggtactttacccgccatgctctccacccactctctcaggaagcgcatttccttggtgtatggaacactcagatcctgttt

SEQ ID NO: 19438 - DNA, 101 bp, Homo sapiens
  MAP TO AC009974.2; EXPRESSED IN BRAIN, SIGNAL = 5.8; EXPRESSED IN BONE MARROW, SIGNAL =  13; EXPRESSED IN LUNG, SIGNAL =  28; EXPRESSED IN ADULT LIVER, SIGNAL = 7.6; EXPRESSED IN BT474, SIGNAL =  52; EXPRESSED IN FETAL LIVER, SIGNAL =  15; EXPRESSED IN PLACENTA, SIGNAL =  21; EXPRESSED IN HBL100, SIGNAL =  25; EXPRESSED IN HELA, SIGNAL =  47; EXPRESSED IN HEART, SIGNAL = 7.7; NT HIT: AF001689.1, EVALUE 1.00e-33; SWISSPROT HIT: P29316, EVALUE 6.00e-10; EST_HUMAN HIT: AA226097.1, EVALUE 2.00e-33
tgtgttcattgtggatgttaaagccaacaagcaccagatcacacgggctgtgaagaagctctatgacattgatatgcccaaggtcaacaccctgattaggt

SEQ ID NO: 19439 - DNA, 429 bp, Homo sapiens
  MAP TO AL078639.3; EXPRESSED IN PLACENTA, SIGNAL = 1.2; EXPRESSED IN HEART, SIGNAL = 3.2; EXPRESSED IN BRAIN, SIGNAL =  34; EXPRESSED IN BONE MARROW, SIGNAL = 0.94; EXPRESSED IN LUNG, SIGNAL = 8.3; EXPRESSED IN BT474, SIGNAL =   6; EXPRESSED IN FETAL LIVER, SIGNAL = 7.4; EST_HUMAN HIT: W26363.1, EVALUE 0.00e+00; NT HIT: gi11419668, EVALUE 0.00e+00; SWISSPROT HIT: P51861, EVALUE 9.00e-28
tggagatataggaagacatggatttgttggaagacgtagcttagttggaagacatatattttctggaagacgtggattttctggaagacatggcttggttggaagacgtggattttctggaagacgtacctttgttggaagacatacctttgttggaagacgtacctttgttggaagacgtacctttgttggaagacacaagtaggctggaagacattaatttgatggaagacatggctttgttggaagacgtggatttgctggaagacacggatttcctggaagacctggatttttcggaagctatggatttgagggaagacaaggattttctggaagacatggatagtctggaagacatggctttgttggaagacgtggacttgctggaagacacggatttcctggaagacccggattttttggaag

SEQ ID NO: 19440 - DNA, 171 bp, Homo sapiens
  MAP TO AP000506.1; EXPRESSED IN HELA, SIGNAL = 2.6; EXPRESSED IN HBL100, SIGNAL = 0.93; EXPRESSED IN HEART, SIGNAL =   1; EXPRESSED IN BRAIN, SIGNAL = 1.2; EXPRESSED IN BONE MARROW, SIGNAL = 1.3; EXPRESSED IN LUNG, SIGNAL = 9.2; EXPRESSED IN BT474, SIGNAL = 1.2; EXPRESSED IN FETAL LIVER, SIGNAL =   1; EXPRESSED IN ADULT LIVER, SIGNAL =   1; NT HIT: AB031007.1, EVALUE 7.00e-92; EST_HUMAN HIT: AW961093.1, EVALUE 8.00e-92; SWISSPROT HIT: P47040, EVALUE 7.50e-01
agcgaaggaggtgcagtgtggccatgctgtgggacccactggtcctatcaccatctgcaccaaccaagggctgctggccataaagaatgttgaaaagagcttctataggcacagctcaacgccagcttgcaggaagcactctgcgggtgggagggtgccatctttcaggac

SEQ ID NO: 19441 - DNA, 141 bp, Homo sapiens
  MAP TO AL109956.8; EXPRESSED IN ADULT LIVER, SIGNAL = 7.9; EXPRESSED IN BT474, SIGNAL = 3.4; EXPRESSED IN FETAL LIVER, SIGNAL = 3.3; EXPRESSED IN HELA, SIGNAL = 6.2; EXPRESSED IN PLACENTA, SIGNAL = 7.9; EXPRESSED IN HBL100, SIGNAL = 3.4; EXPRESSED IN HEART, SIGNAL = 4.6; EXPRESSED IN BONE MARROW, SIGNAL = 6.9; EXPRESSED IN BRAIN, SIGNAL = 2.6; EXPRESSED IN LUNG, SIGNAL = 6.1; NT HIT: AB038162.1, EVALUE 9.00e-14; EST_HUMAN HIT: AW844020.1, EVALUE 5.00e-13
agtttcagcctcatttccagctcctgtttaagatggagttgctctggttcacacgcctctgatactagaatgcctaggacccggttctcaacagagaagcacggtggcctgagagtcaatgaaacaatggccacagcaggc

SEQ ID NO: 19442 - DNA, 150 bp, Homo sapiens
  MAP TO AC010739.2; EXPRESSED IN HEART, SIGNAL = 5.5; EXPRESSED IN BRAIN, SIGNAL =   4; EXPRESSED IN BONE MARROW, SIGNAL = 5.6; EXPRESSED IN LUNG, SIGNAL = 3.6; EXPRESSED IN ADULT LIVER, SIGNAL = 6.2; EXPRESSED IN BT474, SIGNAL = 3.3; EXPRESSED IN FETAL LIVER, SIGNAL = 3.1; EXPRESSED IN PLACENTA, SIGNAL = 6.9; EXPRESSED IN HBL100, SIGNAL = 3.6; EXPRESSED IN HELA, SIGNAL = 6.1; NT HIT: AL163246.2, EVALUE 7.00e-39; EST_HUMAN HIT: AI884381.1, EVALUE 6.00e-46; SWISSPROT HIT: O59736, EVALUE 1.30e+00
tcagttttggacttttggatttacaccagtggtttgccaggggctcttgggcgtttggccacagactgaaggctgcactgttggcttccgtacttttgaggttttgggactcagactgatccaccactggctttcttgctcctcaagttg

SEQ ID NO: 19443 - DNA, 448 bp, Homo sapiens
  MAP TO AL034396.6; EXPRESSED IN HELA, SIGNAL =  14; EXPRESSED IN PLACENTA, SIGNAL =  22; EXPRESSED IN HBL100, SIGNAL =  20; EXPRESSED IN HEART, SIGNAL = 2.2; EXPRESSED IN BRAIN, SIGNAL = 2.6; EXPRESSED IN BONE MARROW, SIGNAL =   3; EXPRESSED IN LUNG, SIGNAL = 7.2; EXPRESSED IN BT474, SIGNAL =  38; EXPRESSED IN ADULT LIVER, SIGNAL =   4; EXPRESSED IN FETAL LIVER, SIGNAL = 3.1; NT HIT: gi4504918, EVALUE 0.00e+00; EST_HUMAN HIT: BE747193.1, EVALUE 0.00e+00; SWISSPROT HIT: P05787, EVALUE 1.00e-66
cagcggcatggaagtcatcactgctgtaatggtcaaccagagcctgctgagccccattaacctggaggtggacctcaacatccaggccatgcacacctaagagaaggagcagatcaagaccctcaacaagtttgcctccttcattgacaaggtacagttcctggagcagcagaacaagatgctggagaacaagtggagcctcctgcagcagcagaagatggctcagagcaacctagacaacatgttcgagagctacatcaacaaccttaggtggcagctggagactctgggccggaagaagctgaagctggaggcagagcttggcaacatgcaggggctggtggaggatttcaagaacaagtatgaggatgagatcaataagtatacagagatggagaatgaatttgtcctcatcaagaaggatgtggatgaagcttacatgaacaag

SEQ ID NO: 19444 - DNA, 132 bp, Homo sapiens
  MAP TO AC011242.1; EXPRESSED IN HEART, SIGNAL =   1; EXPRESSED IN LUNG, SIGNAL = 2.2; EXPRESSED IN BONE MARROW, SIGNAL =   1; EXPRESSED IN ADULT LIVER, SIGNAL = 1.2; EXPRESSED IN BT474, SIGNAL = 1.1; EXPRESSED IN FETAL LIVER, SIGNAL = 1.1; EST_HUMAN HIT: AW451832.1, EVALUE 1.00e-68; SWISSPROT HIT: P13242, EVALUE 2.30e+00; NT HIT: gi11431238, EVALUE 2.90e-01
ctctaaatctctgccagaaggatcgtcagtgaacaacgcaaatccagactgcgctggtttcctcattcctgtgtcctggttcaaagtattcaaaaattcttccactgtggtagatgcgtcaaaaccaactac

SEQ ID NO: 19445 - DNA, 228 bp, Homo sapiens
  MAP TO AC007038.3; EXPRESSED IN PLACENTA, SIGNAL = 8.1; EXPRESSED IN HBL100, SIGNAL =  10; EXPRESSED IN BONE MARROW, SIGNAL = 4.1; EXPRESSED IN FETAL LIVER, SIGNAL = 6.7; EXPRESSED IN HELA, SIGNAL = 9.2; EXPRESSED IN HEART, SIGNAL = 4.2; EXPRESSED IN BRAIN, SIGNAL = 3.2; EXPRESSED IN LUNG, SIGNAL = 7.5; EXPRESSED IN BT474, SIGNAL = 9.6; EXPRESSED IN ADULT LIVER, SIGNAL = 5.9; NT HIT: U12413.1, EVALUE 5.40e-01; EST_HUMAN HIT: AI276526.1, EVALUE 1.00e-106; SWISSPROT HIT: Q50680, EVALUE 1.30e+00
cctattttttttaacattagtaagtcctagaccaaaggttttgtattcttccattccatctgactgcttttttggatggtggccattctctggtacactggtaccgaagatttcaccatggaaagctgtgcttgacctttcaacctgatcctttttttcatcttgacataataaggctgccatgtcttcacccttcagtggaaaagcccgtcgttcccaccacaaaga

SEQ ID NO: 19446 - DNA, 428 bp, Homo sapiens
  MAP TO AC008053.1; EXPRESSED IN ADULT LIVER, SIGNAL = 0.91; EXPRESSED IN PLACENTA, SIGNAL = 1.1; EXPRESSED IN HEART, SIGNAL = 0.97; EST_HUMAN HIT: BE176836.1, EVALUE 0.00e+00; SWISSPROT HIT: P26675, EVALUE 1.10e+00
aaatgatccacctggggtttcaaatgcaagtgaaatggaaatggagataagtaacatgagagaaaagtttcttatgagtgtaacaaagttagtagaaagcaaaagttacaacagcaaggtattttccaaagaaaagtactttcaaacaataaaggaagttaaagaagctaaagaaaaagggaagaagtcatcacgtgattatcgccgtgcagcaaaatatgatgtgatctctgtacagggcacagagaaactgatagaggctactcatggagaacgtgatcgaatacggtattatgtacataaggaagagttgtttgatattcttcatgatacacatctcagtattggacatggtgggcggacacgcatgctcaaggagctgcaaggaaaatatgggaatgtcaccaaagaagttattgtcttatatc

SEQ ID NO: 19447 - DNA, 111 bp, Homo sapiens
  MAP TO AC002992.1; EXPRESSED IN BONE MARROW, SIGNAL = 1.5; EXPRESSED IN LUNG, SIGNAL = 1.3; EXPRESSED IN BRAIN, SIGNAL = 1.1; EXPRESSED IN ADULT LIVER, SIGNAL = 1.3; EXPRESSED IN FETAL LIVER, SIGNAL = 1.8; EXPRESSED IN HELA, SIGNAL = 1.1; EXPRESSED IN PLACENTA, SIGNAL = 1.4; EXPRESSED IN HBL100, SIGNAL = 0.93; EXPRESSED IN HEART, SIGNAL = 1.3; EST_HUMAN HIT: AI554698.1, EVALUE 1.40e+00; SWISSPROT HIT: Q12737, EVALUE 6.90e+00; NT HIT: AJ277546.2, EVALUE 9.60e-01
ggtcccattcacagcttctggggagatgtgagttttatggggggcactgcttaccccagtcaacagtgctgtcccataagctgcccacacaatggcacctgcttagagaaa

SEQ ID NO: 19448 - DNA, 186 bp, Homo sapiens
  MAP TO AC007678.1; EXPRESSED IN HBL100, SIGNAL = 1.3; EXPRESSED IN HEART, SIGNAL = 1.4; EXPRESSED IN LUNG, SIGNAL = 2.5; EXPRESSED IN BONE MARROW, SIGNAL = 2.5; EXPRESSED IN BRAIN, SIGNAL = 1.4; EXPRESSED IN ADULT LIVER, SIGNAL = 2.1; EXPRESSED IN BT474, SIGNAL = 1.3; EXPRESSED IN FETAL LIVER, SIGNAL = 1.5; EXPRESSED IN PLACENTA, SIGNAL = 1.7; EXPRESSED IN HELA, SIGNAL = 1.5; NT HIT: AF196779.1, EVALUE 1.00e-44; EST_HUMAN HIT: AW299305.1, EVALUE 1.00e-38; SWISSPROT HIT: P10272, EVALUE 9.00e-12
atcactcagtacacttggacacggctcccccaagggttcaagtactcccccaccatctttggggaggcactggctcaagacccccagaagtttccttccagagacctaggctgcgtgctgctccagtatgtcgatgaccgcctgctgggacaacccatggcagtctggtgcaccaagggaatatac

SEQ ID NO: 19449 - DNA, 134 bp, Homo sapiens
  MAP TO AC004975.2; EXPRESSED IN ADULT LIVER, SIGNAL = 1.5; EXPRESSED IN PLACENTA, SIGNAL = 1.8; EXPRESSED IN HBL100, SIGNAL = 1.1; EXPRESSED IN HEART, SIGNAL = 1.4; EXPRESSED IN BONE MARROW, SIGNAL = 2.1; EXPRESSED IN FETAL LIVER, SIGNAL = 2.3; EXPRESSED IN HELA, SIGNAL = 2.6; EXPRESSED IN BRAIN, SIGNAL = 1.4; EXPRESSED IN LUNG, SIGNAL = 6.1; EST_HUMAN HIT: BE002982.1, EVALUE 1.00e-12; SWISSPROT HIT: P14181, EVALUE 1.80e+00; NT HIT: U91328.1, EVALUE 5.00e-15
ctcaaattctttcttgcgtgagatccgggaaccctcttttggggtctggatcaggaccccttcctggtatagttccgcagagctataagaagcaaagaagggctggatgacggaggcctggatggcattctgag

SEQ ID NO: 19450 - DNA, 125 bp, Homo sapiens
  MAP TO AC008080.1; EXPRESSED IN PLACENTA, SIGNAL = 2.2; EXPRESSED IN HELA, SIGNAL = 5.2; EXPRESSED IN BONE MARROW, SIGNAL = 2.1; EXPRESSED IN BRAIN, SIGNAL = 2.2; EXPRESSED IN BT474, SIGNAL = 1.3; EXPRESSED IN HEART, SIGNAL = 2.1; EXPRESSED IN HBL100, SIGNAL = 1.5; EXPRESSED IN LUNG, SIGNAL = 2.4; EXPRESSED IN ADULT LIVER, SIGNAL = 2.7; EXPRESSED IN FETAL LIVER, SIGNAL = 1.8; NT HIT: X71783.1, EVALUE 2.40e-01
gaagccaagcatctccttgcatatctcaggttcagtgacagaagagcttttggaccctgcataccttttaaaagcagttaccttggctttcataaaattgaatgtgaacgtaggtcctctttgtg

SEQ ID NO: 19451 - DNA, 199 bp, Homo sapiens
  MAP TO AC008677.2; EXPRESSED IN BT474, SIGNAL = 2.2; EXPRESSED IN FETAL LIVER, SIGNAL = 2.8; EXPRESSED IN ADULT LIVER, SIGNAL = 2.5; EXPRESSED IN PLACENTA, SIGNAL = 2.5; EXPRESSED IN BONE MARROW, SIGNAL = 2.3; EXPRESSED IN HELA, SIGNAL = 2.8; EXPRESSED IN HBL100, SIGNAL = 1.8; EXPRESSED IN HEART, SIGNAL = 2.6; EXPRESSED IN BRAIN, SIGNAL = 2.2; EXPRESSED IN LUNG, SIGNAL = 1.7; NT HIT: U12571.1, EVALUE 2.50e-02; SWISSPROT HIT: Q09298, EVALUE 2.50e-01
actctacattcatacccagagcttctgtgctatttgtctcacaaatggagagaaggggtgctccaggcagcagatgcagcatgtgcaaaagcacacctgcctgaggttaaaggcccactcctgcaactgcagggagctcagtgtggtaggaggccaggtctatgactgtttggggatgcagaggaaggagacataagcc

SEQ ID NO: 19452 - DNA, 146 bp, Homo sapiens
  MAP TO AC006323.3; EXPRESSED IN BRAIN, SIGNAL = 0.99; EXPRESSED IN BT474, SIGNAL = 2.8; EXPRESSED IN ADULT LIVER, SIGNAL = 0.94; EXPRESSED IN HEART, SIGNAL = 0.97; EXPRESSED IN PLACENTA, SIGNAL = 1.6; EXPRESSED IN BONE MARROW, SIGNAL = 0.96; EXPRESSED IN FETAL LIVER, SIGNAL = 0.98; EXPRESSED IN HELA, SIGNAL = 1.4; EXPRESSED IN HBL100, SIGNAL = 1.2; NT HIT: gi4503160, EVALUE 5.00e-77; SWISSPROT HIT: Q13616, EVALUE 1.00e-21; EST_HUMAN HIT: AU125466.1, EVALUE 8.00e-77
tccaataaattctgaaattctgtgtggaaaatttccaagtgtttttcaatgaggacttgttcacatttccttgctaattcatcttgtgtgctttcatgaaggtaaacctgaactcttcgttgttcctcaagcagacgagcctctgc

SEQ ID NO: 19453 - DNA, 130 bp, Homo sapiens
  MAP TO AC009405.2; EXPRESSED IN HBL100, SIGNAL = 0.93; EXPRESSED IN HELA, SIGNAL = 0.93; EXPRESSED IN PLACENTA, SIGNAL = 1.1; EXPRESSED IN BONE MARROW, SIGNAL =   1; EXPRESSED IN ADULT LIVER, SIGNAL = 1.3; EXPRESSED IN BT474, SIGNAL =   1; EXPRESSED IN HEART, SIGNAL = 1.1; NT HIT: AF087913.1, EVALUE 2.00e-11; EST_HUMAN HIT: BE010934.1, EVALUE 5.00e-03; SWISSPROT HIT: P21414, EVALUE 3.00e-08
atgtaaataatggggtagctctaggagtgcttacccaagagcaaggaggccatcgacagcccgtggccttcttgtcaaaggtcttagacccagtcattcgtgggtggccccagtgtatccaatccatcat

SEQ ID NO: 19454 - DNA, 172 bp, Homo sapiens
  MAP TO AC004938.2; EXPRESSED IN LUNG, SIGNAL = 2.4; EXPRESSED IN BRAIN, SIGNAL = 1.6; EXPRESSED IN BT474, SIGNAL =   4; EXPRESSED IN FETAL LIVER, SIGNAL = 2.1; EXPRESSED IN ADULT LIVER, SIGNAL = 2.3; EXPRESSED IN PLACENTA, SIGNAL = 2.7; EXPRESSED IN BONE MARROW, SIGNAL =   2; EXPRESSED IN HEART, SIGNAL = 2.4; EXPRESSED IN HELA, SIGNAL = 2.8; EXPRESSED IN HBL100, SIGNAL = 2.2; EST_HUMAN HIT: BE909714.1, EVALUE 3.00e-92; NT HIT: gi11419381, EVALUE 8.00e-92; SWISSPROT HIT: P42305, EVALUE 2.20e-02
agctgtgctgatggagaagccagatgtggtagtagggaccccatctcgcatattaagccacttgcagcaagacagcctgaaacttcgtgactccctggagcttttggtggtggacgaagctgaccttcttttttcctttggctttgaagaagagctcaagagtctcctctgg

SEQ ID NO: 19455 - DNA, 264 bp, Homo sapiens
  MAP TO AC007970.3; EXPRESSED IN FETAL LIVER, SIGNAL = 1.2; EXPRESSED IN ADULT LIVER, SIGNAL =   2; EXPRESSED IN PLACENTA, SIGNAL = 1.6; EXPRESSED IN HBL100, SIGNAL = 1.5; EXPRESSED IN HELA, SIGNAL = 1.6; EXPRESSED IN BRAIN, SIGNAL = 1.2; EXPRESSED IN BT474, SIGNAL = 1.5; EXPRESSED IN HEART, SIGNAL = 1.8; EXPRESSED IN LUNG, SIGNAL = 1.6; EXPRESSED IN BONE MARROW, SIGNAL = 1.8; NT HIT: L41825.1, EVALUE 1.00e-60; EST_HUMAN HIT: AU144050.1, EVALUE 7.00e-82; SWISSPROT HIT: P10267, EVALUE 2.00e-12
tctgttgtccccactaccgtcccccactctcagtatcaacgtagatccagacgttcgacttcacttacctccaacctgactgttcacatacagagttgtgttacgcttccttacatgctgttagtgggaaatatcaaaatttggatgaacaatcaaactgtccaatgcattaattgtcatttatacacttatattaactcccattttgactccaagaaaagtgtaatgctggttcaagctcgagaaggaatctggattctggta

SEQ ID NO: 19456 - DNA, 177 bp, Homo sapiens
  MAP TO AC005095.2; EXPRESSED IN FETAL LIVER, SIGNAL = 1.4; EXPRESSED IN ADULT LIVER, SIGNAL = 2.1; EXPRESSED IN PLACENTA, SIGNAL = 1.3; EXPRESSED IN HELA, SIGNAL = 1.2; EXPRESSED IN BT474, SIGNAL = 1.2; EXPRESSED IN HEART, SIGNAL = 1.1; EXPRESSED IN HBL100, SIGNAL = 1.4; EXPRESSED IN BRAIN, SIGNAL = 1.1; EXPRESSED IN LUNG, SIGNAL = 2.1; EXPRESSED IN BONE MARROW, SIGNAL = 1.9; NT HIT: AJ298105.1, EVALUE 2.00e-34; EST_HUMAN HIT: BE350127.1, EVALUE 1.00e-35; SWISSPROT HIT: Q9ZCN6, EVALUE 1.50e-01
agtgaccctcctcaagaagaaccacaagcaggaccttcaggaggaattccagaagaaggcactgttatcataggagatgacagctccatgcatgttactgcccctgaagaccttccactgggacaagttgaggaggtggaagacagtgacattgatgatcaggaagctgtgtatgcc

SEQ ID NO: 19457 - DNA, 489 bp, Homo sapiens; identical to SEQ ID NO: 2741
  MAP TO AC008018.17; EXPRESSED IN BONE MARROW, SIGNAL = 1.7; EXPRESSED IN LUNG, SIGNAL = 1.7; EXPRESSED IN BT474, SIGNAL = 1.3; EXPRESSED IN FETAL LIVER, SIGNAL = 0.98; EXPRESSED IN ADULT LIVER, SIGNAL = 1.7; EXPRESSED IN HBL100, SIGNAL = 0.93; EXPRESSED IN HELA, SIGNAL = 1.3; EXPRESSED IN HEART, SIGNAL = 1.3; EXPRESSED IN PLACENTA, SIGNAL = 1.1; EXPRESSED IN BRAIN, SIGNAL = 1.1; SWISSPROT HIT: Q05793, EVALUE 1.80e+00; EST_HUMAN HIT: AI343347.1, EVALUE 1.00e-19; NT HIT: AL163201.2, EVALUE 0.00e+00

SEQ ID NO: 19458 - DNA, 312 bp, Homo sapiens
  MAP TO AC008119.6; EXPRESSED IN BONE MARROW, SIGNAL = 4.1; EXPRESSED IN LUNG, SIGNAL = 4.9; EXPRESSED IN FETAL LIVER, SIGNAL = 2.8; EXPRESSED IN ADULT LIVER, SIGNAL = 3.8; EXPRESSED IN PLACENTA, SIGNAL = 3.2; EXPRESSED IN HELA, SIGNAL = 4.3; EXPRESSED IN BT474, SIGNAL = 2.6; EXPRESSED IN HEART, SIGNAL = 3.5; EXPRESSED IN HBL100, SIGNAL = 2.5; EXPRESSED IN BRAIN, SIGNAL = 3.4; SWISSPROT HIT: P27476, EVALUE 1.10e+00; NT HIT: D63879.1, EVALUE 0.00e+00; EST_HUMAN HIT: BF514110.1, EVALUE 0.00e+00
ctgctcctccagtctctcaatctccagctggtttttctcctcctcttcgtcatattcccactcgtactccccgggggagctctccgcggaggaagccatggcgtactcatccccatcgctctcgctcacgccttcctcctgctgatcccacgctggccccatggtcttgtatgtcgcagcggccacagcccgcgataacaccttcctccttgtcctagccgccttaacctcatcctcctctccgtcagccttgggcccagccttggactcagcctcgggttctgaagccgaggtttcggccgcagtcgccat

SEQ ID NO: 19459 - DNA, 307 bp, Homo sapiens
  MAP TO AL008723.8; EXPRESSED IN HBL100, SIGNAL = 5.3; EXPRESSED IN HELA, SIGNAL = 6.5; EXPRESSED IN HEART, SIGNAL = 7.7; EXPRESSED IN BRAIN, SIGNAL = 5.4; EXPRESSED IN BONE MARROW, SIGNAL = 8.4; EXPRESSED IN LUNG, SIGNAL = 4.8; EXPRESSED IN ADULT LIVER, SIGNAL = 7.6; EXPRESSED IN FETAL LIVER, SIGNAL = 7.5; EXPRESSED IN PLACENTA, SIGNAL = 7.2; EXPRESSED IN BT474, SIGNAL = 3.5; SWISSPROT HIT: P19474, EVALUE 2.80e-01; NT HIT: AJ010230.1, EVALUE 1.00e-130; EST_HUMAN HIT: AL118917.1, EVALUE 1.00e-91
aggggccaactgcacaaatgatttttcctggtctggtcttgggaagggggcagggtatacagatgccttaccttggaacttccgcatccttgggttcatctgcagaatcttcttcagcttgggctccagttccttgatgtgggaagccagcctctctagctgccgattgcgcctgattttgttcttccgagagaccatggaagagcaacagcaaagtagatcctccccatggggctccttctgcagtgaattaatgcacttgaggcagacggcgcatccacactccagggacattggtttttccaga

SEQ ID NO: 19460 - DNA, 185 bp, Homo sapiens
  MAP TO AL021807.1; EXPRESSED IN HELA, SIGNAL = 1.1; EXPRESSED IN BRAIN, SIGNAL = 1.3; EXPRESSED IN BONE MARROW, SIGNAL = 1.3; EXPRESSED IN LUNG, SIGNAL = 3.9; EXPRESSED IN FETAL LIVER, SIGNAL = 1.8; EXPRESSED IN PLACENTA, SIGNAL = 0.94; EXPRESSED IN HBL100, SIGNAL =   1; EXPRESSED IN HEART, SIGNAL = 1.1; NT HIT: AF112374.1, EVALUE 6.00e-03; EST_HUMAN HIT: AV712128.1, EVALUE 1.60e-01; SWISSPROT HIT: P16763, EVALUE 5.10e+00
gtttcccctccagcactcggttaaacacgcacacgcacgcgcgcacgagctgcccacggtcttcctttcggggtttgagaagagacagacagaggtgggagagcgcagctgcagccgcatcaacattccggtgtctgcccttagaagaagtccggattcagtactcgcctgcttagacaattcta

SEQ ID NO: 19461 - DNA, 125 bp, Homo sapiens
  MAP TO AC011282.1; EXPRESSED IN PLACENTA, SIGNAL = 1.4; EXPRESSED IN HBL100, SIGNAL = 2.2; EXPRESSED IN HEART, SIGNAL = 1.6; EXPRESSED IN BRAIN, SIGNAL = 1.6; EXPRESSED IN BONE MARROW, SIGNAL =   2; EXPRESSED IN LUNG, SIGNAL = 1.8; EXPRESSED IN ADULT LIVER, SIGNAL = 1.6; EXPRESSED IN BT474, SIGNAL = 1.3; EXPRESSED IN FETAL LIVER, SIGNAL = 1.6; EXPRESSED IN HELA, SIGNAL = 1.3; NT HIT: AB031289.1, EVALUE 6.00e-02; EST_HUMAN HIT: AW298451.1, EVALUE 1.10e+00
aaccctgtctactgggttatgaatcaaaataggagaagcaatcacgataaacccacaatctatgctactactgattggttcaggaattcagaattaaaccagtaagtgtgtggcatttttctaaa

SEQ ID NO: 19462 - DNA, 181 bp, Homo sapiens
  MAP TO AC011309.1; EXPRESSED IN ADULT LIVER, SIGNAL = 2.7; EXPRESSED IN BT474, SIGNAL = 2.3e+02; EXPRESSED IN FETAL LIVER, SIGNAL = 2.8; EXPRESSED IN HELA, SIGNAL = 2.4; EXPRESSED IN HEART, SIGNAL = 3.3; EXPRESSED IN PLACENTA, SIGNAL = 3.2; EXPRESSED IN HBL100, SIGNAL = 3.2; EXPRESSED IN BRAIN, SIGNAL = 2.6; EXPRESSED IN BONE MARROW, SIGNAL = 2.7; EXPRESSED IN LUNG, SIGNAL = 1.3; EST_HUMAN HIT: AA244140.1, EVALUE 2.50e+00; NT HIT: AF064564.2, EVALUE 1.40e+00; SWISSPROT HIT: P08633, EVALUE 8.50e+00
ttctcagacccttatcgtcatcgtcatcatcatcatcatcatcatcatcatcatcatcatcatcccatatctcttggacttctcatcctcaggtcatagcactgatatggagggtgaatatcacaggctgaggaaagtgggccagctacaaatctggtccattcgtacagagcatcatgcc

SEQ ID NO: 19463 - DNA, 105 bp, Homo sapiens
  MAP TO AC011409.1; EXPRESSED IN LUNG, SIGNAL = 2.5; EXPRESSED IN BONE MARROW, SIGNAL = 2.9; EXPRESSED IN ADULT LIVER, SIGNAL = 3.6; EXPRESSED IN BT474, SIGNAL = 2.5; EXPRESSED IN FETAL LIVER, SIGNAL = 2.1; EXPRESSED IN HELA, SIGNAL =   4; EXPRESSED IN HBL100, SIGNAL = 1.9; EXPRESSED IN BRAIN, SIGNAL = 2.4; EXPRESSED IN PLACENTA, SIGNAL = 3.1; EXPRESSED IN HEART, SIGNAL = 1.8; NT HIT: U38613.1, EVALUE 3.00e-10; EST_HUMAN HIT: BF448385.1, EVALUE 2.00e-15
cccctcttggtagccattgctttgattgtgctttgtcttcaggattttactggggaagccacattccatttccttttgcaattcatcaaagaaatgcttcagtgt

SEQ ID NO: 19464 - DNA, 503 bp, Homo sapiens
  MAP TO AC010724.1; EXPRESSED IN LUNG, SIGNAL = 0.97; EXPRESSED IN BRAIN, SIGNAL = 0.99; EXPRESSED IN BONE MARROW, SIGNAL =   1; EXPRESSED IN ADULT LIVER, SIGNAL = 1.2; EXPRESSED IN FETAL LIVER, SIGNAL = 0.88; EXPRESSED IN HEART, SIGNAL = 1.1; EXPRESSED IN PLACENTA, SIGNAL = 1.7; EXPRESSED IN HBL100, SIGNAL = 2.1; NT HIT: gi4503098, EVALUE 0.00e+00; SWISSPROT HIT: Q00657, EVALUE 2.00e-65
tccagcctctgacccccaataagcatgagggctgtgctgaagagttttctgccaatgatgatgtggccctgggcttctctgggtcccactctctggctgccttgcctgcctggggcactcaggatgaaggaaccctggagtttacactcaccacacagagctggcaggcacccttggccttccaggcagcaggctggcatggggacttcatccatgtggacatatttgagggccacctgtggtccatggttgagaagggccagggtactgtattgctcctcaacagtgtgcctgtgactgacgcacagccccacaaggtcagcatccacatcaacattcaccagctagaaatctccatggaccagtaccccacacgaactgaggagtcctcagctacctggagccacgtgacagtctccttcttggggagctggttgcagaggcctctcatcacctccaggaacaccgctcaggcctgacaccaggggctgccaatgcctccc

SEQ ID NO: 19465 - DNA, 341 bp, Homo sapiens
  MAP TO AC010966.1; EXPRESSED IN FETAL LIVER, SIGNAL = 2.3; EXPRESSED IN BT474, SIGNAL = 5.8; EXPRESSED IN HELA, SIGNAL = 5.3; EXPRESSED IN PLACENTA, SIGNAL =  14; EXPRESSED IN HBL100, SIGNAL = 5.5; EXPRESSED IN LUNG, SIGNAL = 3.1; EXPRESSED IN BRAIN, SIGNAL = 2.8; EXPRESSED IN BONE MARROW, SIGNAL = 4.7; EXPRESSED IN ADULT LIVER, SIGNAL = 3.4; EXPRESSED IN HEART, SIGNAL =   3; EST_HUMAN HIT: AU138248.1, EVALUE 4.00e-87; NT HIT: gi4885420, EVALUE 2.00e-87; SWISSPROT HIT: P36194, EVALUE 5.00e-27
  unsure 276
  unsure 282
  unsure 292
gaattccaccccaagatcaaattcataaaccctggcatctctattggagacatggcaaaaaagctgggtaagatgcggaataacttaaatgacagtgaaaagcagccttacaccactaaggcggcaaagctgaaggaaaagtatgagaaggatgtttctgactataagttgaaaggaaagtttgatggagaaaagggtcctgctaaagttgcccagaaaaaggtggaagaggaagatgaagatgaacaagatgaaaaggaagaaggaggggagganggaggnaggaggaggnaggatgaataagagactgtccatttgaaaaaaaaaaaagaaataatact

SEQ ID NO: 19466 - DNA, 249 bp, Homo sapiens
  MAP TO AC011304.1; EXPRESSED IN BT474, SIGNAL = 1.1; EXPRESSED IN HELA, SIGNAL = 1.2; EXPRESSED IN PLACENTA, SIGNAL = 1.6; EXPRESSED IN HBL100, SIGNAL = 1.4; EXPRESSED IN HEART, SIGNAL = 1.8; EXPRESSED IN LUNG, SIGNAL = 3.8; EXPRESSED IN BRAIN, SIGNAL = 1.3; EXPRESSED IN BONE MARROW, SIGNAL = 1.8; EXPRESSED IN ADULT LIVER, SIGNAL =   2; EST_HUMAN HIT: AA632654.1, EVALUE 3.00e-83; SWISSPROT HIT: P53253, EVALUE 1.50e+00; NT HIT: AL163210.2, EVALUE 2.00e-59
gctgccgaaaagatacctgcaaatgtggaagcgactttgaaactgggtaacaggcagatactggaacagtttggaaagctcagaaaaagaaagaaaatatggaagagtttggaacttcctagagatttgttgaatggctttgacaaaaatactgatagtgatatgaacaatatgtccaggctgaggtggtctgagatggagaggaaaaacttgttgggagctgcaggaaaggtgactcttgttatattt

SEQ ID NO: 19467 - DNA, 267 bp, Homo sapiens
  MAP TO AC011382.1; EXPRESSED IN HEART, SIGNAL = 1.2; EXPRESSED IN PLACENTA, SIGNAL = 2.9; EXPRESSED IN LUNG, SIGNAL = 2.4; EXPRESSED IN ADULT LIVER, SIGNAL =   1; NT HIT: gi4505682, EVALUE 1.00e-129; EST_HUMAN HIT: AI041172.1, EVALUE 6.60e-01; SWISSPROT HIT: P09619, EVALUE 3.00e-31
cctccctgtccccaatggtggttttgcagatgtagcttctgtcctcaaagataccagaaaagccacgttggtgatcataggggacaggcagtgcaacgtcccctttcttctcgtgcagtgtcaccaccagctgtgggtctgttactcggcatggaatggtgatctcagttatttccgtgagaaagatgaatagttcctcggcatcattagggaggaagcccacggtgggatctgccaggagtggagccgtgaataaatcaggggaac

SEQ ID NO: 19468 - DNA, 170 bp, Homo sapiens
  MAP TO AL118516.6; EXPRESSED IN BRAIN, SIGNAL = 1.3; EXPRESSED IN BT474, SIGNAL = 0.95; EXPRESSED IN HELA, SIGNAL = 0.96; EXPRESSED IN PLACENTA, SIGNAL = 0.96; EXPRESSED IN LUNG, SIGNAL = 3.5; EXPRESSED IN BONE MARROW, SIGNAL = 1.7; EXPRESSED IN ADULT LIVER, SIGNAL = 1.4; EXPRESSED IN FETAL LIVER, SIGNAL = 0.93; EXPRESSED IN HEART, SIGNAL = 1.1; NT HIT: AF274008.1, EVALUE 9.90e-02; EST_HUMAN HIT: AI818985.1, EVALUE 4.00e-01; SWISSPROT HIT: P80492, EVALUE 9.80e-01
acaggtagggatgttccagagctgctgttgcgtgcccagggcatgccttgacagcatcacagttgaatggagcagtgtctgggtgacatcgatgagaagggagctgaaggaggtgctgcggcccatgttcatgaggagatggaaggagtgcagaatggcagggctgggat

SEQ ID NO: 19469 - DNA, 191 bp, Homo sapiens
  MAP TO AL049822.17; EXPRESSED IN PLACENTA, SIGNAL = 1.5; EXPRESSED IN BONE MARROW, SIGNAL = 1.9; EXPRESSED IN LUNG, SIGNAL =   1; EXPRESSED IN BRAIN, SIGNAL = 2.3; EXPRESSED IN ADULT LIVER, SIGNAL = 1.4; EXPRESSED IN FETAL LIVER, SIGNAL = 1.6; EXPRESSED IN BT474, SIGNAL = 2.1; EXPRESSED IN HEART, SIGNAL = 1.3; EXPRESSED IN HELA, SIGNAL = 0.97; EXPRESSED IN HBL100, SIGNAL = 1.3; NT HIT: J00310.1, EVALUE 3.00e-63
ctgcatgataaataagaagagtagaagcgtgttttccgttagcagagtggcgcagcggaagcgtgctgggcccataacccagaggtcgatggatctaaaccatcctctgctaaagaagggtgcttttttttttttttttccccccccccttcttgaggaattaccttccacagttgtggggagaagatggc

SEQ ID NO: 19470 - DNA, 457 bp, Homo sapiens
  MAP TO AP000180.1; EXPRESSED IN HBL100, SIGNAL = 2.7; EXPRESSED IN HELA, SIGNAL = 4.2; EXPRESSED IN HEART, SIGNAL =   5; EXPRESSED IN PLACENTA, SIGNAL =   5; EXPRESSED IN BRAIN, SIGNAL = 4.7; EXPRESSED IN BONE MARROW, SIGNAL =   4; EXPRESSED IN LUNG, SIGNAL = 3.1; EXPRESSED IN BT474, SIGNAL = 2.4; EXPRESSED IN FETAL LIVER, SIGNAL = 4.3; EXPRESSED IN ADULT LIVER, SIGNAL = 5.5; SWISSPROT HIT: Q26563, EVALUE 3.50e+00; NT HIT: gi7705605, EVALUE 1.00e-123; EST_HUMAN HIT: BF677694.1, EVALUE 0.00e+00
atggaggacggtagactggacacgggtcacactgaggttccagtaacttcaggcctcttcatcagagtgttgaataagaagcagaactttagcctccaaataaggtgtagttttggccggggaccgggaaagctgagacactgctgggctggggccgccatagccctgggaacggagtatattctagtgaaaggagaccaggtgactggcatagtgacagctaaatctggagatatattcagagttgatgttggagggagtgagccagtttctttgtcttacttggcatttgaaggtgcaactaaaagaaacagaccaaatgtgcaggttggagatctcatctatggccaatttgtggttgctaataaagacatggaaccagagatggtctgtattgacagctatggatgagccaatggaaggaatgtcattggacaggatggtctgctttttaaag

SEQ ID NO: 19471 - DNA, 258 bp, Homo sapiens
  MAP TO AL109798.8; EXPRESSED IN ADULT LIVER, SIGNAL = 7.4; EXPRESSED IN PLACENTA, SIGNAL = 8.8; EXPRESSED IN BONE MARROW, SIGNAL = 8.6; EXPRESSED IN LUNG, SIGNAL = 6.1; EXPRESSED IN BRAIN, SIGNAL = 6.8; EXPRESSED IN FETAL LIVER, SIGNAL = 6.5; EXPRESSED IN BT474, SIGNAL =  13; EXPRESSED IN HEART, SIGNAL = 8.2; EXPRESSED IN HELA, SIGNAL = 7.1; EXPRESSED IN HBL100, SIGNAL =  10; EST_HUMAN HIT: AW149516.1, EVALUE 6.30e-01; SWISSPROT HIT: Q13563, EVALUE 3.00e+00; NT HIT: gi11421182, EVALUE 6.20e-01
tagcattggaaatgttatctccttcaatttcatcacctcttcatcctccttggaaacccgatccatggtgggtattaagatctttacatttgtactggttgggcgatgacttcattgctttcaagccagctgggggatcttgtgtggcagagcatcggaccgaagcggaggtgtgggtcgttgctgctgctgctgctgctactgctgcaacagctctttgcacgcgcccagctgctgtgtaaggaatcctcaggctgc

SEQ ID NO: 19472 - DNA, 127 bp, Homo sapiens
  MAP TO AL118496.4; EXPRESSED IN HELA, SIGNAL = 4.6; EXPRESSED IN HEART, SIGNAL = 6.7; EXPRESSED IN BRAIN, SIGNAL = 2.8; EXPRESSED IN BONE MARROW, SIGNAL =   3; EXPRESSED IN LUNG, SIGNAL = 3.4; EXPRESSED IN ADULT LIVER, SIGNAL =   5; EXPRESSED IN BT474, SIGNAL = 3.5; EXPRESSED IN FETAL LIVER, SIGNAL = 3.9; EXPRESSED IN PLACENTA, SIGNAL = 6.3; EXPRESSED IN HBL100, SIGNAL = 3.6; NT HIT: D21353.1, EVALUE 2.80e-01
caaatatgtgtgtgagaagtatgggggcagctggttggtcctgagctctaatttcacccattggaacatgaaaaactggacctgtgaaaacgttgccctcatccctgaagaggtgagacgtactgcc

SEQ ID NO: 19473 - DNA, 120 bp, Homo sapiens
  MAP TO AL049692.11; EXPRESSED IN HELA, SIGNAL = 1.2; EXPRESSED IN PLACENTA, SIGNAL = 0.94; EXPRESSED IN HBL100, SIGNAL = 1.2; EXPRESSED IN HEART, SIGNAL = 1.4; EXPRESSED IN BRAIN, SIGNAL = 1.5; EXPRESSED IN BONE MARROW, SIGNAL = 1.7; EXPRESSED IN LUNG, SIGNAL = 1.5; EXPRESSED IN BT474, SIGNAL = 1.4; EXPRESSED IN ADULT LIVER, SIGNAL = 1.3; EXPRESSED IN FETAL LIVER, SIGNAL =   2; EST_HUMAN HIT: BE545554.1, EVALUE 9.90e-02; NT HIT: AF004708.1, EVALUE 2.30e-01
atgctggactgtgctttgtttgtggccacttttctgatctcagccaggggaaagaggggacagagcactggacttgggtcagaagacctggttccaagtatcttcttctccaccaatgag

SEQ ID NO: 19474 - DNA, 259 bp, Homo sapiens
  MAP TO AL049812.3; EXPRESSED IN LUNG, SIGNAL = 2.3; EXPRESSED IN ADULT LIVER, SIGNAL = 1.3; EXPRESSED IN BT474, SIGNAL = 1.6; EXPRESSED IN FETAL LIVER, SIGNAL = 1.1; EXPRESSED IN HELA, SIGNAL =   1; EXPRESSED IN PLACENTA, SIGNAL = 1.3; EXPRESSED IN HBL100, SIGNAL = 1.4; EXPRESSED IN HEART, SIGNAL = 1.7; EXPRESSED IN BONE MARROW, SIGNAL = 1.6; EXPRESSED IN BRAIN, SIGNAL = 1.7; NT HIT: gi11420678, EVALUE 0.00e+00; SWISSPROT HIT: Q03211, EVALUE 2.40e+00
gtgaatgctggacggtcaaggcccaggctggggaaggggtacagaatggttgtgggcgaagccccatgcaggttaggtgtgaggatggggggcctctcttgtggcctagggaacatcgtaaggtcacactggtccagactgcaaatgtctggtgccagaggcccctgaaggaggttgcagggggcagcagagcagtgacccccaagagcctcaatcttttccatgacgtagaggagcagaacacacatctcctccactc

SEQ ID NO: 19475 - DNA, 145 bp, Homo sapiens
  MAP TO AL121778.2; EXPRESSED IN BONE MARROW, SIGNAL =   2; EXPRESSED IN LUNG, SIGNAL = 2.4; EXPRESSED IN BRAIN, SIGNAL = 1.2; EXPRESSED IN ADULT LIVER, SIGNAL =   2; EXPRESSED IN BT474, SIGNAL = 1.9; EXPRESSED IN FETAL LIVER, SIGNAL =   1; EXPRESSED IN PLACENTA, SIGNAL = 1.6; EXPRESSED IN HELA, SIGNAL = 1.9; EXPRESSED IN HBL100, SIGNAL = 1.6; EXPRESSED IN HEART, SIGNAL = 1.4; NT HIT: gi11431886, EVALUE 5.00e-31; SWISSPROT HIT: P41997, EVALUE 4.00e-04; EST_HUMAN HIT: W05064.1, EVALUE 7.00e-31
caaagttgatcctcttataactacataagaagttgccgaagagctcaacgtcaaccattctatggtcatccagcatttgaagcaaattggaaaggtgaaaaagctcgataggtgggtgcctcatgaactgagcaaaattaaaaaa

SEQ ID NO: 19476 - DNA, 168 bp, Homo sapiens
  MAP TO AL050332.15; EXPRESSED IN BT474, SIGNAL = 4.8; EXPRESSED IN FETAL LIVER, SIGNAL = 8.4; EXPRESSED IN ADULT LIVER, SIGNAL =  12; EXPRESSED IN HELA, SIGNAL = 7.9; EXPRESSED IN PLACENTA, SIGNAL = 9.8; EXPRESSED IN HBL100, SIGNAL = 4.9; EXPRESSED IN HEART, SIGNAL = 8.5; EXPRESSED IN BRAIN, SIGNAL = 7.1; EXPRESSED IN BONE MARROW, SIGNAL = 7.6; EXPRESSED IN LUNG, SIGNAL = 5.8; EST_HUMAN HIT: BE885900.1, EVALUE 4.00e-11; SWISSPROT HIT: P25539, EVALUE 3.80e+00; NT HIT: AF246705.1, EVALUE 3.90e-01
cgctcgctacgtcagaaaatgcgtggacgtcgccgcacgaacgcaactggccaagcgaaactggtggcggccggaggagaaggggcggggacgctggaggaaagaaatgacgcgtgcgcaaacgaggacccgtgccgggagacaggcgggactagcgcctcctggtga

SEQ ID NO: 19477 - DNA, 799 bp, Homo sapiens
  MAP TO AF124523.1; EXPRESSED IN BONE MARROW, SIGNAL =  15; EXPRESSED IN HELA, SIGNAL =  19; EXPRESSED IN LUNG, SIGNAL =  15; EXPRESSED IN BRAIN, SIGNAL =  14; EXPRESSED IN BT474, SIGNAL =  38; EXPRESSED IN ADULT LIVER, SIGNAL = 7.6; EXPRESSED IN FETAL LIVER, SIGNAL =  17; EXPRESSED IN PLACENTA, SIGNAL =  17; EXPRESSED IN HEART, SIGNAL = 9.6; EXPRESSED IN HBL100, SIGNAL =  27; EST_HUMAN HIT: AV725534.1, EVALUE 0.00e+00; SWISSPROT HIT: P52742, EVALUE 1.00e-110; NT HIT: U09413.1, EVALUE 4.00e-08
ggtggccatgctggttgaaggcacgcccacactccccgcactcatagggcttctcgcctgtgtggatccgctggtgctggatgagcactgagtactggctgaaggccttcccgcagctattgcactcatatggcttctcgcccgtgtgggtcctcaggtgcacaatcagagttgctttcaggctgaaggctttgccacattctgtgcactggaagggcttttcacctgtgtggattctctcatgctggatcagagaccggcgtgcactgaaggcgtgcccacattcaccacacacatagggcttctccccagtgtggactctctggtgctggatcaggtgtgagtgctgaacgaaggccttcccacattcgtagcatgcatagggcttttcctcggtgtggatccgctcgtgattcatcagtgtggagcggtggctgaaggtcttcccacactcactgcactcatagggcttctccccggtgtgcacgttgtggtgctgaatgaggactgagcggtcgctgaaggccttcccacactcgctgcacgtgtagggcttctccccggtgtggatcctctggtgctgcagcagtgtcctcttcacactgaaggttttcccacactcattgcacctgtgaggcttctccccagtgtgtaccctctggtggctccgcagaacagtgctatggttgaaggctttcccacacaacggacacacatatggcctttctcccgtgtggatccgctggtgctgaatgagatgtgagagttgagtgaaggctttccgacactcaagacattc

SEQ ID NO: 19478 - DNA, 223 bp, Homo sapiens
  MAP TO Z83844.5; EXPRESSED IN BONE MARROW, SIGNAL = 7.6; EXPRESSED IN LUNG, SIGNAL = 7.8; EXPRESSED IN BRAIN, SIGNAL = 4.2; EXPRESSED IN ADULT LIVER, SIGNAL =   4; EXPRESSED IN BT474, SIGNAL =   2; EXPRESSED IN FETAL LIVER, SIGNAL = 4.1; EXPRESSED IN HELA, SIGNAL = 4.1; EXPRESSED IN PLACENTA, SIGNAL = 3.3; EXPRESSED IN HBL100, SIGNAL = 4.2; EXPRESSED IN HEART, SIGNAL = 3.1; NT HIT: gi6753209, EVALUE 8.30e+00; SWISSPROT HIT: P28166, EVALUE 5.60e-01; EST_HUMAN HIT: AI933496.1, EVALUE 1.40e-01
attggacaccgagatgccccccgggcgtcctcgcccccccgccacacccaatttgaccccttccccttcctcccagacacatcagatgccgagcatcagtgtcagtccccccaacacgagccccttcagctccctgcacctgtgtgtattgggtaccgagatgcaccccgggcctcctccccaccacgccaggccccagagccttccctcttattccaggacc

SEQ ID NO: 19479 - DNA, 589 bp, Homo sapiens
  MAP TO AC007688.15; EXPRESSED IN PLACENTA, SIGNAL =  15; EXPRESSED IN HELA, SIGNAL =  13; EXPRESSED IN HBL100, SIGNAL =  12; EXPRESSED IN HEART, SIGNAL =  11; EXPRESSED IN LUNG, SIGNAL =  12; EXPRESSED IN BONE MARROW, SIGNAL =  14; EXPRESSED IN BRAIN, SIGNAL = 7.6; EXPRESSED IN ADULT LIVER, SIGNAL =   9; EXPRESSED IN BT474, SIGNAL =  15; EXPRESSED IN FETAL LIVER, SIGNAL = 9.4; EST_HUMAN HIT: AI879163.1, EVALUE 0.00e+00; NT HIT: gi11429825, EVALUE 0.00e+00; SWISSPROT HIT: P40429, EVALUE 3.00e-90
gcctcatgaactgtttcttcttccggtagtggatcttggctttctctttcctcttctcctccagggtggctgtcactgcctggtacttccagccaacctcgtgagccaggcgccccagataggcaaactttcttgcaggcttcagacgcacaaccttgagggcagcaggaaccaccatccgctttttcttgtcgtagggcggtgggatgccgtcaaacaccttgaggcagtccagagcggcctggcctggcttggtcttgtggggcggcatacctcgcatggtctgccagaagatgcggctgggggcctggagggggtaggggcctcgggaagggttgctgttcatccgcttgcggaggaaagccaggtacttcaacttgtttctgtagaaattgccagaaatgttgatgccttcacagcatacaaccaccaccttccggcccagcagtacctgtttagccacgatggccgccaggtggcccaggagatggcctcgaccatcaagcaccaggacctgtacctccgccatcttcggcagccgcttgggaaagaagcactgatcttaggagcagtttaggggagggttgga

SEQ ID NO: 19480 - DNA, 151 bp, Homo sapiens
  MAP TO Z98744.1; EXPRESSED IN BONE MARROW, SIGNAL =   5; EXPRESSED IN FETAL LIVER, SIGNAL = 2.7; EXPRESSED IN HELA, SIGNAL = 2.1; EXPRESSED IN BRAIN, SIGNAL = 1.7; EXPRESSED IN LUNG, SIGNAL = 2.8; EXPRESSED IN BT474, SIGNAL = 8.8; EXPRESSED IN ADULT LIVER, SIGNAL = 0.93; EXPRESSED IN PLACENTA, SIGNAL = 1.8; EXPRESSED IN HEART, SIGNAL = 1.1; EXPRESSED IN HBL100, SIGNAL = 6.3; SWISSPROT HIT: P08898, EVALUE 6.00e-22; NT HIT: gi11526421, EVALUE 6.00e-80; EST_HUMAN HIT: AW962341.1, EVALUE 3.00e-36
ttatgctcgctcgccacggatacgacgcgcaagctggatgtccttaggcataatagtgacacgcttggcgtgaatagcacagaggttggtgtcttcaaagagacccaccagataggcctcgcacgcctcttgcagcgccatcaccgccgag

SEQ ID NO: 19481 - DNA, 3331 bp, Homo sapiens
  MAP TO AB023048.1; EXPRESSED IN PLACENTA, SIGNAL =   1; EXPRESSED IN HBL100, SIGNAL = 1.4; EXPRESSED IN HEART, SIGNAL = 1.1; EXPRESSED IN FETAL LIVER, SIGNAL = 1.5; EXPRESSED IN ADULT LIVER, SIGNAL = 1.5; EXPRESSED IN HELA, SIGNAL = 1.1; EXPRESSED IN BRAIN, SIGNAL =   2; EXPRESSED IN LUNG, SIGNAL = 4.7; EXPRESSED IN BONE MARROW, SIGNAL = 2.1; EXPRESSED IN BT474, SIGNAL = 1.4; SWISSPROT HIT: P22105, EVALUE 2.00e-23
aagaggaaattatatctaactgtgtgctggcttgacttgaaccagggcagagatgatagaaacaggtgaacagctggtggttgccactggagttaaaatgtgtgggctcaaagaagacatgggggttagtacctgacataggtgtgttggtgatgggctggatagaaacgtcagtggccttggtgagtacaaacgtggtggaagagacagtggtggaggctgcagtggccccagaagctgtgatagagactgtggtggtctcagagcctgtgagggaagttgcagtgggctccaagcttgcagtggaagctatggtgctctcagagcctatgatgaaggcagtgttggtctcagagcctgcactggagggtgtggaggtctcagaacctgtggtacaggctgtgttggtctcagagcctgaagtggaggctgtggtggtctcagagcctgcagtggaggctgtggtggtctcagagcctgcagtggaggctgtggtggtctcagagccttcagtagaggtggtggtggcctcagagcctgcagcagaggatgtggtggcctcagagcctatggtagagactgtggtggtctcagagactgtggtaaagactgtagtcatctcagagcctgtggtagaggctgtggtggtctcagagctagtggtagaaactgtagtggcctcagagccttcagtagaggcggtggtagtcttagagcctgtgatatagactgttgtggtctcagagcctgcggtagaggctgtggtggtcccagagcctgaggtggagactgtggtggtctccaaatctgcggtagaggctgtggtggtctcagagcccgtggtagagactgtggttgtctcagagccttcagtagaggtggtggtagtctcagagcctgtggtatagactgctgtggtctcagaacctgcagtagtgactgtagtggtctctgaaccttcagtagaggtgatggtagtctcagtgcctgtggtagagactgtggtggtctcagagcctgtggaggagactgtagtggtctcagagccttcaatagaggctgtggtggtctcagagcctgcagtagagactgtggtggtctctgagcctgcagtagaggccgtggtggtctcagagcccatagtagtgactgtagtggtctcagagccttcagcagagactgtgatggtctcagagcctgtggtagaaactgtagtgagctcagagccttcagtagaggctgtggtggtctcagagccttcagtagaggctgtggtggtctcagagcctgtggtagaaactgtagtgatctcagagccttcagtagaggctgtggtggtctcagagccttcagtagaggtggtggtagtctcagagccttcagtagaggctgtggtggtctcagagcctatggtagtggctgtagtggtctcagagctttcagtagaggctgtggtggtctcagagccttcagtagaggctgtagtggtctcagagccttcagtagaggtggtggtggtggtctcagagcctgctgtagaggctgggatggtctcagagcctgcagtggagactgtggtggtctcagaggctgtggtagaggctatggtggtctcagagttttcagtgaagactgtggtcattttagagcttgcagtggagaccttggtggtctcagagcctatggtagaggccatagtggtctcagagcccatgatggatgccatggtggtctcagagcttgtagtagaggctgtggtggtctcagagcctgtagtagaggctgaggtggtctcggagccttcagtagaggctgtggtggtctcggagccttcagtagaggctgtggtggtctcagagcctgtgatggaggctgtagtaatctcagagccttcagtagaagtggtggtggtctctgaacctgtggtagaaactttagtggtctcagagcctgtgatggagactgtagtggtcccagagccttcagtagagactgtggtctcagagcctgtggcagatactgtagtggtctcagagccttcagtagaggtgatggtcctctcagagcctgtggtagagaccatggtggtctcagagtctgtggtggagactgtagtggtctcagagccttcagtagaggctgtggtggtctcagagcttgtagtagaggctgtggtggtctcagagcctgtagtagaggctgaggtggtctcagaatctgcagtagatgctgtggtgttctcagaatctgcagtagagactgtggtggtctcagagcctgcagtggaggctgcagtggtcccagagccttcagtagagtctgtggtggtctcagcacctgtggtggagactgtagtcatctcagagccttcagtggaagtggtggtggtctccaagcctgtggtggaaactgtagtggtctcagagcctgtggtggagactgtagtgttctcagagccttcagtagagactgtggtcatctcagagcctgtggcagagactgcagtggtctcagagccttcagtagaggctgtggtggtgtcagagcctatggtaaagactgtggtggtctccaagcctgtattagaggctgtggtggtctcagagcctgtagtataggctgttttggtctcagagcctgcggtagtgactgtagtggtctcagaaccttcagtagaagctgtggtggtctcagagtctgaagtagaggctattgtgatctcagagccttcagtagaggctgtagtggtctcaaagactgtggtggagactgcagtcatctcagagccttcagtacaggtggtggtggtctctgagtctgtgatagaaactgtagtggtctcagagcctgtggtggagactgtagtggcctcagagccttcagtggaagctgtggtggtctcagagccttcagtagaggctgtggtggtctcagagcctgtggtagaatctgtgctggtctcagagcccatgatggaggctgtggtggtctcagagcctgtggtagagactgtggtggtctcagagcctacggtagaggctctgattgtctcagagcctgcagcaaagactgtggtcacctcagagcttgcagtggagaccttggtggtctcagggcctatggtagaggccatagtggtctcagagcccatggtggatgccatggtaggctcagagcctgtagtagaggctgcggttgtctcaaaccctgtagtagaggctgtggtagtcttagaatcttcagtaaatgctgtgttggtttcagaatcttcagtagaggctgcagtggtctcagagcctgcagtggagactgtggtctcagagcctgcagt

SEQ ID NO: 19482 - DNA, 668 bp, Homo sapiens
  MAP TO AC011301.1; EXPRESSED IN BONE MARROW, SIGNAL = 2.8; EXPRESSED IN FETAL LIVER, SIGNAL = 1.7; EXPRESSED IN HELA, SIGNAL = 2.8; EXPRESSED IN BRAIN, SIGNAL = 5.4; EXPRESSED IN LUNG, SIGNAL = 3.4; EXPRESSED IN BT474, SIGNAL = 2.1; EXPRESSED IN ADULT LIVER, SIGNAL = 2.1; EXPRESSED IN PLACENTA, SIGNAL = 2.1; EXPRESSED IN HEART, SIGNAL =   2; EXPRESSED IN HBL100, SIGNAL = 2.7; SWISSPROT HIT: Q9QYC0, EVALUE 1.60e+00; EST_HUMAN HIT: BF530661.1, EVALUE 0.00e+00; NT HIT: AF036943.1, EVALUE 0.00e+00
atagtatggctttttgacatggctgtcactggatttaggctttctgtcctccccgggaagttgtctcggagactggtcctcatatgacctcatattgtccctcctcccagcttccatggccatcttctccctcatggcctttgctctttccgtttccaaagcgatggctttctccagcagggtcaggttccccttggtcatgtcgaacacctcttcagacctgtccgagttcacagaggtggtatcgtcgtcccgctcatgacacccatcctccttcgcacagctggcaaacactctcgaccgggggctcaactgctcctccagccgcatgaggttcagcatgtccgagtagtttctgtccggcgtccttccggggaagtcctcttctggccggacatgctgacggatgttcatgttctgctgcggattcctctcctgcgggttggtctcactgagcttcctggccaggtcgaagcactgattcctcaaacactccagactgctcagacacacctcctcatcgctctcctccaccatcttttccatgagtccgttgttcatgggcttccccaacatgacgtaattcatatttctactgtcttgctgcgacatgctgtctgcataatttctgtcattcatgttttctgagagcacaacaccgtgtcctt

SEQ ID NO: 19483 - DNA, 594 bp, Homo sapiens
  MAP TO AC011309.1; EXPRESSED IN PLACENTA, SIGNAL =  72; EXPRESSED IN HBL100, SIGNAL =  59; EXPRESSED IN HEART, SIGNAL = 2.9; EXPRESSED IN FETAL LIVER, SIGNAL = 7.7; EXPRESSED IN ADULT LIVER, SIGNAL = 8.8; EXPRESSED IN HELA, SIGNAL =  44; EXPRESSED IN BRAIN, SIGNAL = 5.5; EXPRESSED IN LUNG, SIGNAL =  16; EXPRESSED IN BONE MARROW, SIGNAL = 3.5; EXPRESSED IN BT474, SIGNAL = 1.5e+02; SWISSPROT HIT: P05787, EVALUE 1.00e-70; EST_HUMAN HIT: BE872768.1, EVALUE 0.00e+00; NT HIT: gi4504918, EVALUE 0.00e+00
attctccatctctgtacgcttattgatttcatcctcatactttttcttgaagttctccgccagcctctgcatgttgccaagctctgcctccagcttcggcttctcctggctcagagtctccagccgctgcataaagttgttgatgtagctctcgaacatgtccacgttgctccaagccatcttctgctgctgcaggaggctccccttggtctccagcatcttgttctgctgctccaggaaacgtatcttgtcaatgaaggagggaaacttcttgttgagggtcttgatctgctccttctcctgggtgcgcatggcctggatgttggggtccacctccaggttcagggggctcagcaggttctggttgaccatgacggcagtgatgcctcccatgctgctggccccaccatagcctctgcccaggccagcccggaagctggtgctgcccactcgggagaagcttaaggagctgaggtgggcaccaggcccactcatgtgagagcagctgctgaaggcccggaggccagaggtggacaccttgtaggacttctgggtcaccctgatggacatggtggaggcagacaggctgaacaa

SEQ ID NO: 19484 - DNA, 163 bp, Homo sapiens
  MAP TO Z82188.2; EXPRESSED IN PLACENTA, SIGNAL = 2.1; EXPRESSED IN BONE MARROW, SIGNAL = 4.6; EXPRESSED IN FETAL LIVER, SIGNAL = 3.2; EXPRESSED IN HBL100, SIGNAL = 1.8; EXPRESSED IN HELA, SIGNAL = 1.6; EXPRESSED IN HEART, SIGNAL = 1.7; EXPRESSED IN BRAIN, SIGNAL = 3.2; EXPRESSED IN LUNG, SIGNAL = 1.6; EXPRESSED IN BT474, SIGNAL = 2.2; EXPRESSED IN ADULT LIVER, SIGNAL = 2.2; EST_HUMAN HIT: AI719516.1, EVALUE 8.70e+00; NT HIT: AL161532.2, EVALUE 2.00e-02; SWISSPROT HIT: P16058, EVALUE 7.60e-01
acttgccacttgtcctccaagcaaccacagcacccccactcaatctctgcttctgtctgctcaaagcacacctccttattttcagtatctattaatagatactactcatactactaggacgactactactaacacagagtgcttctcacacacaggtgctgcc

SEQ ID NO: 19485 - DNA, 978 bp, Homo sapiens
  MAP TO AC009497.2; EXPRESSED IN PLACENTA, SIGNAL = 2.4; EXPRESSED IN FETAL LIVER, SIGNAL = 1.6; EXPRESSED IN ADULT LIVER, SIGNAL = 1.3; EXPRESSED IN HEART, SIGNAL = 1.1; EXPRESSED IN HELA, SIGNAL = 3.1; EXPRESSED IN HBL100, SIGNAL = 2.2; EXPRESSED IN BRAIN, SIGNAL = 1.6; EXPRESSED IN LUNG, SIGNAL = 3.5; EXPRESSED IN BONE MARROW, SIGNAL =   2; EXPRESSED IN BT474, SIGNAL = 3.9; EST_HUMAN HIT: AU131494.1, EVALUE 0.00e+00; SWISSPROT HIT: Q02455, EVALUE 2.20e-02; NT HIT: X77864.1, EVALUE 3.40e-02
gaatctttggagacaaaagaagaaaaaccagaagaaaccccaaaaatggaactgagtctagagaatgttactgttgaaggaaatgcatgtaaagtaacagaatccaatctagagaaagcaaaaactatggaattgaatgtaggaaatgaagctagctttcatggacaagagagaaccaaaactggtatttctgaagaagcagcaatagaagaaaataaaagaaatgatgactctgaagcagacacagctaaactgaatgccaaagaagtagcaactgaggaatttaattcagatattagtctttctgataatactacacctgtaaaattgaatgctcaaactgagatttctgaacaaacagcagctggggaactagatggaggaaatgatgtatctgatctacactcatctgaagaaacgaataccaaaatgaaaaataatgaagaaatgatgatcggcgaggcaatggctgaaactggccatgatggtgaaacagagaatgagggcataactaccaaaacctcaaagcctgatgaagctgaaacaaacatgttgactgcagaaatggacaactttgtttgtgacacagttgaaatgagcactgaagaaggaatcattgacgctaataaaactgaaacaaatactgagtatagtaaatctgaagaaaaattagataacaatcaaatggtaatggaaagtgatattttacaggaagatcaccatacttcacagaaagtggaggaaccatcacagtgtctggcatctggaacagctatctctgagctaataatagaagacaataatgcatctcctcaaaaactaagggaacttgatccttcacttgtgtcagcaaatgacagtcctagtggcatgcagacacgctgtgtctggtctcctttggcttctccgtctacgagcattttaaagagaggactaaaaagatcccaagaagatgaaatctcatcacctgttaataag

SEQ ID NO: 19486 - DNA, 825 bp, Homo sapiens
  MAP TO AP000508.1; EXPRESSED IN BONE MARROW, SIGNAL =  35; EXPRESSED IN BT474, SIGNAL = 1.3e+02; EXPRESSED IN HBL100, SIGNAL =  68; EXPRESSED IN LUNG, SIGNAL =  66; EXPRESSED IN BRAIN, SIGNAL =  20; EXPRESSED IN ADULT LIVER, SIGNAL =  22; EXPRESSED IN FETAL LIVER, SIGNAL =  34; EXPRESSED IN PLACENTA, SIGNAL =  64; EXPRESSED IN HEART, SIGNAL =  10; EXPRESSED IN HELA, SIGNAL =  94; SWISSPROT HIT: P39023, EVALUE 0.00e+00; EST_HUMAN HIT: BE300344.1, EVALUE 0.00e+00; NT HIT: gi11418143, EVALUE 0.00e+00
ttgatctcagtgcggtgatggtagcctttctgcccaccacgtaccacagagaagcccacacgagcaggatgccatgccccaatacaggccaccttgcacaggccttggtgggtcttgcggggcagcttcttggtgtgccaacgactggtgacccttttgtagcctttgcccttggtcaccctgatgacgtcgatcatctcatcctgcccaaacacttggttcacaggtacctggtgcttgagcctctcgccagcccagtccagcttctcagccacagtgcctccattcacctggatctccatcaggtgggccttcttctggcacagaggaagcagttgcatctgggtgtgggcaatgacgcagatgacttggcagtacttcttcatgctgctgaagtccttctccagctgcttcttgccatcctcatcctgccatttcttgcagtacttggtaaaggccttcttcttagatttatgccagttcttatagaaacgtctcttgcattcatcactgatgtgctcagcgaagacagtcttgcaagtccggaagccttgaggggtttccacgcagcccacaatgcccactggtggcctctccacaatggtcacagcctccaccacctccttcttgttcaccttggatcctggcctgtcgacttcccgcacgatgtgggtcatgccagccttgtatcccaggaaggctgtgaggtggaccggcttggacgggtcatccttagggaagctcttcaccttcccacaatgcctgctgctgcgcttccaaggcaggaagccgagggacccatgtctgggagtggagaactttctg

SEQ ID NO: 19487 - DNA, 115 bp, Homo sapiens
  MAP TO Z99716.4; EXPRESSED IN BT474, SIGNAL = 2.8; EXPRESSED IN PLACENTA, SIGNAL = 1.1; EXPRESSED IN BONE MARROW, SIGNAL = 1.2; EXPRESSED IN FETAL LIVER, SIGNAL = 1.2; EXPRESSED IN ADULT LIVER, SIGNAL = 0.95; EXPRESSED IN HEART, SIGNAL = 0.96; EXPRESSED IN HELA, SIGNAL = 2.8; EXPRESSED IN HBL100, SIGNAL =   2; EXPRESSED IN BRAIN, SIGNAL = 2.4; EXPRESSED IN LUNG, SIGNAL = 1.5; EST_HUMAN HIT: BF316631.1, EVALUE 2.00e-58; SWISSPROT HIT: Q12772, EVALUE 8.00e-16; NT HIT: gi11418194, EVALUE 1.00e-58
atgcacaagtctggcgttctgaggaaggccattgattacatcaaatacttgcagcaggtcaatcataaactgcgccaggagaacatggtgctgaagctggcaaatcaaaagaaca

SEQ ID NO: 19488 - DNA, 660 bp, Homo sapiens
  MAP TO AC008125.9; EXPRESSED IN BT474, SIGNAL = 2.6; EXPRESSED IN BONE MARROW, SIGNAL = 6.5; EXPRESSED IN LUNG, SIGNAL = 2.9; EXPRESSED IN BRAIN, SIGNAL = 6.5; EXPRESSED IN ADULT LIVER, SIGNAL = 5.8; EXPRESSED IN FETAL LIVER, SIGNAL = 1.8; EXPRESSED IN PLACENTA, SIGNAL =   5; EXPRESSED IN HEART, SIGNAL = 1.1; EXPRESSED IN HELA, SIGNAL = 3.8; EXPRESSED IN HBL100, SIGNAL =   3; NT HIT: AF044255.1, EVALUE 1.10e-01
aaatgatgatgatggggatggtggtaataatgatagtgatgatcgtggtagtagtggtggtagtagcgatgatgagggtgatgctgatggtgatggtgatgggtgataatggtgatgatagtgatgatgatggatatggtggtgatgatgctgatggtgatgatgatggttatggtggtgatgatgctgatggtgatgatggtggtgatagtgatggtgaggatgctgatcgtgatgatgatggttatggtggtgatgatgatggttatggtggtaatgatgctgatagtaatgatgatggttatggcagtgacgatgctgatggtaatgatgatggttatggcagtgacgatgctgatggtgatgacgatggtggtagtgatggtgatgatgctgatggtgatgatggtggtgatggtaatgatgattatataatgatgattgtggtgatggtgatgatgatgtttattatagtcatgatggtggtaatggtagtggtggtgatgatgatgatgatggtagtgatgataatgataatggtgatgagagtgaggatagccaagatatattgagcacttactccctgtcagccacttgaggggtttatatacattattctttaaagccctatgaggtaagacagccagaaagtgagaaaca

SEQ ID NO: 19489 - DNA, 156 bp, Homo sapiens
  MAP TO AC004882.2; EXPRESSED IN HEART, SIGNAL = 1.6; EXPRESSED IN BT474, SIGNAL = 1.4; EXPRESSED IN FETAL LIVER, SIGNAL = 1.4; EXPRESSED IN HELA, SIGNAL = 1.5; EXPRESSED IN ADULT LIVER, SIGNAL = 7.9; EXPRESSED IN PLACENTA, SIGNAL = 1.6; EXPRESSED IN BONE MARROW, SIGNAL = 1.8; EXPRESSED IN HBL100, SIGNAL = 1.6; EXPRESSED IN LUNG, SIGNAL = 1.9; EXPRESSED IN BRAIN, SIGNAL =   2; NT HIT: X63018.1, EVALUE 3.60e-01; SWISSPROT HIT: P10925, EVALUE 2.20e+00
tgcgacatgcagaagctgacggtggatgagctgaagcggctgctctacgacaccttctgcgagcacctgtccatgaaggacatagagaacatcatcatgacggaggaggagagccacctgggcacagccgaggagtgtcccgtggatgtggagagt

SEQ ID NO: 19490 - DNA, 287 bp, Homo sapiens
  MAP TO AC007541.9; EXPRESSED IN BONE MARROW, SIGNAL = 0.64; EXPRESSED IN HBL100, SIGNAL = 3.4; EXPRESSED IN BRAIN, SIGNAL = 1.5; EXPRESSED IN HEART, SIGNAL = 1.8; EXPRESSED IN PLACENTA, SIGNAL = 1.9; EXPRESSED IN BT474, SIGNAL = 4.6; EXPRESSED IN FETAL LIVER, SIGNAL = 2.6; EXPRESSED IN LUNG, SIGNAL = 1.6; EXPRESSED IN HELA, SIGNAL = 2.7; EXPRESSED IN ADULT LIVER, SIGNAL = 2.4; NT HIT: U82668.1, EVALUE 1.50e-01; SWISSPROT HIT: P98157, EVALUE 1.30e-02; EST_HUMAN HIT: BE882395.1, EVALUE 0.00e+00
tcagtcagatttgtctttcttctttcctgttaagggcactttgtttacaacagcagacccaacagctgtaacacctccagccacagcagagacaccccctttcaccagccctattcccatggaaggcacagttgtaacagctgttttggtcacttccagactctttccaccaatccaagccacaccaccaatggtggcaccaacagctccctttgtaacactgaagatacccccagtcacacgggacaacatgcctggctgctgctgtgggtgatctttcattgaac

SEQ ID NO: 19491 - DNA, 194 bp, Homo sapiens
  MAP TO AP000142.1; EXPRESSED IN LUNG, SIGNAL = 4.6; EXPRESSED IN HELA, SIGNAL = 4.5; EXPRESSED IN ADULT LIVER, SIGNAL = 2.9; EXPRESSED IN BRAIN, SIGNAL =  11; EXPRESSED IN HEART, SIGNAL = 2.9; EXPRESSED IN BT474, SIGNAL = 4.5; EXPRESSED IN FETAL LIVER, SIGNAL = 2.8; EXPRESSED IN PLACENTA, SIGNAL = 2.6; EXPRESSED IN HBL100, SIGNAL = 3.9; EXPRESSED IN BONE MARROW, SIGNAL = 1.6; NT HIT: gi11526152, EVALUE 1.00e-105; EST_HUMAN HIT: AW630017.1, EVALUE 1.00e-105; SWISSPROT HIT: P08592, EVALUE 4.00e-23
ctcccatctgcatagtctgtgtctgctccgccccaccagacatccgagtcatcctcctccgcatcagcagaatccacattgtcactttcttcagccagtgggcaacacacaaactctacccctcggaacttgtcaattccgcagggcagcaacatgccgtagtcatgcaagttggtactcttctcactgcatgt

SEQ ID NO: 19492 - DNA, 370 bp, Homo sapiens
  MAP TO AP000252.1; EXPRESSED IN HBL100, SIGNAL = 3.4; EXPRESSED IN LUNG, SIGNAL = 2.6; EXPRESSED IN HELA, SIGNAL = 3.1; EXPRESSED IN BT474, SIGNAL = 2.8; EXPRESSED IN BONE MARROW, SIGNAL = 0.75; EXPRESSED IN PLACENTA, SIGNAL = 1.6; EXPRESSED IN HEART, SIGNAL = 1.9; EXPRESSED IN BRAIN, SIGNAL = 4.3; EXPRESSED IN ADULT LIVER, SIGNAL = 1.8; EXPRESSED IN FETAL LIVER, SIGNAL = 1.7; NT HIT: AB014596.1, EVALUE 0.00e+00; EST_HUMAN HIT: AL040743.1, EVALUE 1.00e-102; SWISSPROT HIT: Q91854, EVALUE 3.00e-46
acaaccagcccatccctgtactggagacaagactcgcttgtgcccattgagagtacgagcaaattcacaggtgctcatgctccagactttgatggtcctgtcaccagaggcagacacgatgtatttctcgtcaaagtctactacgttgacagcagctcagtggacaaccaggacaccacgtaaagtgatatcggtcgcagaagccatgtcccacacagcaatggagcggtccttggaacaggtcaccatcagtccactgctgaagcgtaagtgcagtacatcctcattgtggtggattaatgtgttaagaacttcacccgtgttcacttcccacactctcaccgtagaatccgaagagccagttacaatg

SEQ ID NO: 19493 - DNA, 169 bp, Homo sapiens
  MAP TO AP000106.1; EXPRESSED IN BT474, SIGNAL =   3; EXPRESSED IN BONE MARROW, SIGNAL = 1.1; EXPRESSED IN HBL100, SIGNAL =   2; EXPRESSED IN FETAL LIVER, SIGNAL =   2; EXPRESSED IN LUNG, SIGNAL = 1.4; EXPRESSED IN HELA, SIGNAL = 1.3; EXPRESSED IN ADULT LIVER, SIGNAL = 1.4; EXPRESSED IN BRAIN, SIGNAL = 1.4; EXPRESSED IN PLACENTA, SIGNAL = 2.3; EXPRESSED IN HEART, SIGNAL = 1.2; EST_HUMAN HIT: BF215569.1, EVALUE 2.00e-90; NT HIT: AF231920.1, EVALUE 1.00e-90
cattactgggagttttgaaagggactgtattatctgttttttgagatttggcatctgatgatccataggccgtataactataaggaatgccataggatgagccgtaaggcattgtctggtaagtgttctggtagtacatattcacttctgcgggttgactggcttgaac

SEQ ID NO: 19494 - DNA, 168 bp, Homo sapiens
  MAP TO AC007777.1; EXPRESSED IN BONE MARROW, SIGNAL = 2.4; EXPRESSED IN HBL100, SIGNAL = 2.1; EXPRESSED IN FETAL LIVER, SIGNAL = 2.2; EXPRESSED IN HELA, SIGNAL = 1.6; EXPRESSED IN ADULT LIVER, SIGNAL = 2.1; EXPRESSED IN BRAIN, SIGNAL = 9.3; EXPRESSED IN BT474, SIGNAL =   2; EXPRESSED IN HEART, SIGNAL = 2.3; EXPRESSED IN PLACENTA, SIGNAL = 2.5; EXPRESSED IN LUNG, SIGNAL = 1.9; EST_HUMAN HIT: AV711696.1, EVALUE 1.50e-01; NT HIT: AL163268.2, EVALUE 1.50e+00; SWISSPROT HIT: Q9ZCF4, EVALUE 6.50e+00
tcttgacatccttcttccatttcacccactcctggactactagtagtttctccttcccaggagcagccctccaccagtgctggatcaacttaaaaataaacatcctggttttctctccctataggtagctctgaggtatattctgcattgcttccttcacagagagat

SEQ ID NO: 19495 - DNA, 79 bp, Homo sapiens
  MAP TO AC007297.22; EXPRESSED IN BONE MARROW, SIGNAL = 1.6; EXPRESSED IN HBL100, SIGNAL = 1.1; EXPRESSED IN HEART, SIGNAL = 1.5; EXPRESSED IN PLACENTA, SIGNAL = 1.2; EXPRESSED IN BT474, SIGNAL = 1.1; EXPRESSED IN BRAIN, SIGNAL = 1.5; EXPRESSED IN ADULT LIVER, SIGNAL = 1.1; EXPRESSED IN HELA, SIGNAL = 1.2; EXPRESSED IN LUNG, SIGNAL = 1.4; EXPRESSED IN FETAL LIVER, SIGNAL = 1.6; NT HIT: AF034102.1, EVALUE 5.30e-01; EST_HUMAN HIT: R31497.1, EVALUE 1.60e-01; SWISSPROT HIT: P22048, EVALUE 5.40e+00
atgagattgtcattccttggcactggtgcctgtggcgagcatcttaggcaacttttgattgggcaccatgccctccaaa

SEQ ID NO: 19496 - DNA, 166 bp, Homo sapiens
  MAP TO AP000268.1; EXPRESSED IN PLACENTA, SIGNAL =   2; EXPRESSED IN BT474, SIGNAL = 0.72; EXPRESSED IN FETAL LIVER, SIGNAL = 0.67; EXPRESSED IN LUNG, SIGNAL = 0.81; EXPRESSED IN HEART, SIGNAL = 0.87; EXPRESSED IN BONE MARROW, SIGNAL = 0.68; EXPRESSED IN HELA, SIGNAL =   1; NT HIT: AF231919.1, EVALUE 5.00e-68; EST_HUMAN HIT: BE868305.1, EVALUE 5.70e-01; SWISSPROT HIT: Q06458, EVALUE 1.30e+00
aatccctcttggtcaccagggtgtacagggtctttttattcaaatcaaaatggctgcagacgtccctggcagcttccggaccctgggtcaccatggcggtcatcaggctcaggcaggcgcgagccaacctgcacagggaaccagaggaaatcggacacgtcaacaa

SEQ ID NO: 19497 - DNA, 125 bp, Homo sapiens
  MAP TO AL033524.11; EXPRESSED IN HBL100, SIGNAL = 5.7; EXPRESSED IN HEART, SIGNAL = 4.9; EXPRESSED IN PLACENTA, SIGNAL = 4.4; EXPRESSED IN BT474, SIGNAL =  13; EXPRESSED IN BONE MARROW, SIGNAL = 3.9; EXPRESSED IN FETAL LIVER, SIGNAL = 5.4; EXPRESSED IN LUNG, SIGNAL = 4.2; EXPRESSED IN HELA, SIGNAL = 9.7; EXPRESSED IN ADULT LIVER, SIGNAL = 3.4; EXPRESSED IN BRAIN, SIGNAL = 5.9; NT HIT: AF003528.1, EVALUE 4.00e-43; EST_HUMAN HIT: BE064410.1, EVALUE 1.00e-28; SWISSPROT HIT: P31792, EVALUE 1.40e-02
agcattatgtgcaggataggcaagcccatatctggagtaagtgtctattccagtgaggacaaacctctgccctttccatgatggaagaggtccagcataatcaacctgccaccaggtggctggct

SEQ ID NO: 19498 - DNA, 117 bp, Homo sapiens
  MAP TO AC007655.1; EXPRESSED IN HBL100, SIGNAL = 3.7; EXPRESSED IN BRAIN, SIGNAL = 3.9; EXPRESSED IN PLACENTA, SIGNAL = 3.5; EXPRESSED IN BT474, SIGNAL = 3.1; EXPRESSED IN BONE MARROW, SIGNAL =   3; EXPRESSED IN FETAL LIVER, SIGNAL =   4; EXPRESSED IN LUNG, SIGNAL = 3.4; EXPRESSED IN HELA, SIGNAL = 2.9; EXPRESSED IN ADULT LIVER, SIGNAL = 3.3; EXPRESSED IN HEART, SIGNAL = 2.8; NT HIT: M55270.1, EVALUE 2.00e-23; SWISSPROT HIT: Q11116, EVALUE 2.00e-06
catgatttcataattctcccatccatccatccatccatccagccagccagccagccagccatccatcaagttatctatctagccaacaaatgtactgagcatctactgtttgtcaac

SEQ ID NO: 19499 - DNA, 192 bp, Homo sapiens
  MAP TO AC007285.2; EXPRESSED IN BRAIN, SIGNAL = 2.1; EXPRESSED IN ADULT LIVER, SIGNAL = 1.6; EXPRESSED IN HEART, SIGNAL = 2.3; EXPRESSED IN PLACENTA, SIGNAL = 2.2; EXPRESSED IN BT474, SIGNAL = 1.7; EXPRESSED IN BONE MARROW, SIGNAL = 3.7; EXPRESSED IN HBL100, SIGNAL = 1.9; EXPRESSED IN FETAL LIVER, SIGNAL = 1.7; EXPRESSED IN HELA, SIGNAL = 2.2; EXPRESSED IN LUNG, SIGNAL = 2.3; NT HIT: gi11434717, EVALUE 1.00e-87; SWISSPROT HIT: P05882, EVALUE 1.30e+00; EST_HUMAN HIT: AI989772.1, EVALUE 2.00e-87
tatgaagattttgtggccgcgttaaccgtaaaggaaggtgaccaccagaaagaagctttcagtattgggatgcagagggacctcagcctttacctccctgccatggagaagcagctggccatactggacactttatatgaggtccacgggctggaatctgatgaggtggtatgatggctgctgggcagcacc

SEQ ID NO: 19500 - DNA, 379 bp, Homo sapiens
  MAP TO AC006455.2; EXPRESSED IN HBL100, SIGNAL =  12; EXPRESSED IN FETAL LIVER, SIGNAL =  12; EXPRESSED IN LUNG, SIGNAL = 9.2; EXPRESSED IN ADULT LIVER, SIGNAL = 4.6; EXPRESSED IN PLACENTA, SIGNAL =  18; EXPRESSED IN BT474, SIGNAL =  27; EXPRESSED IN BONE MARROW, SIGNAL =  22; EXPRESSED IN HELA, SIGNAL = 4.7; EXPRESSED IN BRAIN, SIGNAL = 3.8; EXPRESSED IN HEART, SIGNAL = 5.4; NT HIT: L15309.1, EVALUE 7.00e-54; SWISSPROT HIT: Q05481, EVALUE 3.00e-53; EST_HUMAN HIT: AW503073.1, EVALUE 7.00e-61
cagtatgaattctcttgtggtcagtgagggttgaggatacgctaaaggctttgccacattcttcacatttgtagggtctccctccagtatgaattctcttgtggttagtaagtgctgaggagcgcctaaaggcttggccacattcttcacatgtgtagggtttctctccagtatgaattctcttatgtctagtaaggtttgcggaccagctaaaggctttgccacattcctcacatctatatggtttctctccagtatgaattattttatgtgtagtatggtttgaggagcagttaaaggatttgccacattctttgcatttgtaggacttctccctagtatgaattacctgatgttgatttaggtgtgaaagcatgca

SEQ ID NO: 19501 - DNA, 184 bp, Homo sapiens
  MAP TO AC008134.3; EXPRESSED IN BT474, SIGNAL = 2.2; EXPRESSED IN FETAL LIVER, SIGNAL = 2.5; EXPRESSED IN PLACENTA, SIGNAL =  11; EXPRESSED IN HBL100, SIGNAL = 4.3; EXPRESSED IN HELA, SIGNAL =  10; EXPRESSED IN HEART, SIGNAL =   2; EXPRESSED IN BRAIN, SIGNAL = 5.6; EXPRESSED IN BONE MARROW, SIGNAL = 4.1; EXPRESSED IN LUNG, SIGNAL = 4.9; EXPRESSED IN ADULT LIVER, SIGNAL = 9.5; NT HIT: gi9635487, EVALUE 2.00e-80; EST_HUMAN HIT: N66951.1, EVALUE 8.00e-83; SWISSPROT HIT: P14074, EVALUE 3.80e+00
ccatctgacctctcccctcctccccaggctgctcctcgccaggccgagctaggtcccaattcttcctcagcctctgctcctccaccctataatctttttatcacctcccctcctcacacctggtccggcttacagtttcgttccgagactagccctcccccacctgcccagcaatttactctta

SEQ ID NO: 19502 - DNA, 87 bp, Homo sapiens
  MAP TO AC009421.1; EXPRESSED IN LUNG, SIGNAL = 3.1; EXPRESSED IN FETAL LIVER, SIGNAL =   3; EXPRESSED IN ADULT LIVER, SIGNAL = 4.8; EXPRESSED IN PLACENTA, SIGNAL = 6.6; EXPRESSED IN HELA, SIGNAL = 4.8; EXPRESSED IN BRAIN, SIGNAL = 3.7; EXPRESSED IN BONE MARROW, SIGNAL = 4.3; EXPRESSED IN BT474, SIGNAL = 1.9; EXPRESSED IN HEART, SIGNAL = 5.2; EXPRESSED IN HBL100, SIGNAL = 2.7; EST_HUMAN HIT: H15308.1, EVALUE 2.00e-20; NT HIT: AL163248.2, EVALUE 5.00e-14
cttcctgcccttgaacatcggactctgagttcttcagttttgggacttggataggctctccttgctcctcagcttgcagctggccta

SEQ ID NO: 19503 - DNA, 160 bp, Homo sapiens
  MAP TO AF165146.1; EXPRESSED IN BT474, SIGNAL = 8.2; EXPRESSED IN BONE MARROW, SIGNAL =   1; EXPRESSED IN LUNG, SIGNAL = 1.6; EXPRESSED IN ADULT LIVER, SIGNAL = 1.1; EXPRESSED IN FETAL LIVER, SIGNAL = 1.1; EXPRESSED IN PLACENTA, SIGNAL =   3; EXPRESSED IN HEART, SIGNAL = 2.1; EXPRESSED IN HELA, SIGNAL =  20; EXPRESSED IN HBL100, SIGNAL = 2.9; EXPRESSED IN BRAIN, SIGNAL = 1.6; NT HIT: AF006305.1, EVALUE 5.00e-83; SWISSPROT HIT: P49719, EVALUE 1.00e-23; EST_HUMAN HIT: AU119366.1, EVALUE 1.00e-82
catcatttttatggatgaaatagatgctattggtggtcgtcggttttctgagggtacttcagctgacagagagattcagagaacgttaacggagttactgaatcaaatggatggatttgatactctgcatagagttaaaatgatcatggctacaaacaga

SEQ ID NO: 19504 - DNA, 196 bp, Homo sapiens
  MAP TO AC004834.2; EXPRESSED IN BT474, SIGNAL = 1.7; EXPRESSED IN HBL100, SIGNAL =   2; EXPRESSED IN HELA, SIGNAL =   1; EXPRESSED IN HEART, SIGNAL = 1.9; EXPRESSED IN LUNG, SIGNAL = 3.9; EXPRESSED IN BRAIN, SIGNAL = 1.1; EXPRESSED IN ADULT LIVER, SIGNAL = 1.2; EXPRESSED IN FETAL LIVER, SIGNAL = 1.1; EST_HUMAN HIT: AA193163.1, EVALUE 5.00e-08; NT HIT: U51472.2, EVALUE 1.00e-96; SWISSPROT HIT: P05661, EVALUE 2.00e-22
cttgatttgctgttgcagccttttcaatgtctttacaagttcgctgttgttcttgttggcgtggtccagctggatttccatctcattcaggtccgtctccatcttcttcttgagccgaagtgcctctgcccggcccttggcctctgcctctaggctggcctgcaaggactcgattgcccgctggtggttcttcctg

SEQ ID NO: 19505 - DNA, 135 bp, Homo sapiens
  MAP TO AC010891.1; EXPRESSED IN ADULT LIVER, SIGNAL =   1; EXPRESSED IN HEART, SIGNAL =   1; EXPRESSED IN PLACENTA, SIGNAL = 1.4; EXPRESSED IN BRAIN, SIGNAL = 1.2; EXPRESSED IN BONE MARROW, SIGNAL = 1.3; EXPRESSED IN FETAL LIVER, SIGNAL =   1; EST_HUMAN HIT: BF038905.1, EVALUE 1.10e-01; SWISSPROT HIT: Q60368, EVALUE 3.00e+00; NT HIT: AF000990.1, EVALUE 1.00e-55
agcatcacaataaatgtcaccattgccttgcaagaagcatctgcatcttggtggaaaaggagacctccgtggagaagtgtcagcggtgtcttctcgtctgtcttctctgtgaaatccacagatagtctcatgatc

SEQ ID NO: 19506 - DNA, 180 bp, Homo sapiens
  MAP TO AC000026.3; EXPRESSED IN BT474, SIGNAL = 2.1; EXPRESSED IN LUNG, SIGNAL = 3.5; EXPRESSED IN ADULT LIVER, SIGNAL = 2.1; EXPRESSED IN FETAL LIVER, SIGNAL = 1.4; EXPRESSED IN PLACENTA, SIGNAL = 2.4; EXPRESSED IN HEART, SIGNAL = 1.9; EXPRESSED IN HELA, SIGNAL = 3.9; EXPRESSED IN HBL100, SIGNAL = 2.7; EXPRESSED IN BRAIN, SIGNAL = 1.7; EXPRESSED IN BONE MARROW, SIGNAL = 1.6; EST_HUMAN HIT: BE253600.1, EVALUE 5.00e-87; NT HIT: U36255.1, EVALUE 3.00e-97; SWISSPROT HIT: Q10567, EVALUE 3.00e-24
acagcagtgtgaccaggggtggggccagcttcttgagcagtgtgccgtagtagtccaagtccttagacaacatctccatgaacttcatcagcaccttcacagcagagagcaccacagcggagttggcatgggagagcctgggggtgacccgctcacagatgctggggtccgtccattcca

SEQ ID NO: 19507 - DNA, 220 bp, Homo sapiens
  MAP TO AC008080.1; EXPRESSED IN PLACENTA, SIGNAL = 1.1; EXPRESSED IN BRAIN, SIGNAL =   1; EXPRESSED IN FETAL LIVER, SIGNAL = 1.2; EXPRESSED IN HEART, SIGNAL = 1.2; EXPRESSED IN HELA, SIGNAL = 1.9; EXPRESSED IN HBL100, SIGNAL = 1.2; EXPRESSED IN LUNG, SIGNAL = 3.9; EXPRESSED IN BONE MARROW, SIGNAL = 0.93; EXPRESSED IN ADULT LIVER, SIGNAL = 0.91; NT HIT: gi6978676, EVALUE 1.10e-01; EST_HUMAN HIT: AW958061.1, EVALUE 1.30e-01; SWISSPROT HIT: O27224, EVALUE 3.00e+00
gggtggaagaaacagccctggattcttcaagtagaaaataaagaggaactggcagatgagattctgaaaccaacttccttcacagcctgcaagtgtgatatgttcaacccattagagattctaatttcaggggaagccagcctgtgggcaaagggtcagaccactgtttatgccccagagtggaagagcggaggaaaggaatgggtgagtcaagatacct

SEQ ID NO: 19508 - DNA, 277 bp, Homo sapiens
  MAP TO AL035106.25; EXPRESSED IN PLACENTA, SIGNAL = 2.2; EXPRESSED IN HBL100, SIGNAL = 1.5; EXPRESSED IN HELA, SIGNAL = 1.8; EXPRESSED IN BRAIN, SIGNAL = 2.1; EXPRESSED IN BT474, SIGNAL = 3.6; EXPRESSED IN HEART, SIGNAL = 2.4; EXPRESSED IN LUNG, SIGNAL =  16; EXPRESSED IN BONE MARROW, SIGNAL = 2.1; EXPRESSED IN ADULT LIVER, SIGNAL =   2; EXPRESSED IN FETAL LIVER, SIGNAL = 1.8; SWISSPROT HIT: P06798, EVALUE 1.20e+00; NT HIT: AB037836.1, EVALUE 0.00e+00; EST_HUMAN HIT: BE384520.1, EVALUE 0.00e+00
gccacctgaaccccatgtcgtacacccagcactgcatcaccaccatggctgctccctcctggaagtgcttgcctgctgcagagggtgatccccaaggccagggtctccatgatggcagcttcgggccagccagtgggacccttggtcaggaagaccggggcctcagcttcctactcaagcaggaggaccgtgagatccaggatgcctacctgcagctcttcaccaagctggatgtggccctgaaggagatgaagcaatatgtcacccagatcaacag

SEQ ID NO: 19509 - DNA, 160 bp, Homo sapiens
  MAP TO AC011347.1; EXPRESSED IN BONE MARROW, SIGNAL = 4.6; EXPRESSED IN LUNG, SIGNAL = 8.3; EXPRESSED IN PLACENTA, SIGNAL = 3.8; EXPRESSED IN BRAIN, SIGNAL = 3.4; EXPRESSED IN ADULT LIVER, SIGNAL = 3.8; EXPRESSED IN FETAL LIVER, SIGNAL = 3.7; EXPRESSED IN BT474, SIGNAL = 2.5; EXPRESSED IN HEART, SIGNAL = 3.5; EXPRESSED IN HELA, SIGNAL = 3.6; EXPRESSED IN HBL100, SIGNAL = 2.7; NT HIT: gi7661971, EVALUE 3.10e-01; SWISSPROT HIT: Q09695, EVALUE 1.70e+00
ggacaggttgactgatgaatgagaggtcagcatctcatcatgggatccagtccatttttcagccagttgttgatttggtccttgatttttccaggactttaatggcaccttgtcccctggatggaacaggtaaagaagctcatctgtggagtaggcagac

SEQ ID NO: 19510 - DNA, 281 bp, Homo sapiens
  MAP TO AP000506.1; EXPRESSED IN BT474, SIGNAL = 4.6; EXPRESSED IN FETAL LIVER, SIGNAL = 2.2; EXPRESSED IN ADULT LIVER, SIGNAL = 1.6; EXPRESSED IN PLACENTA, SIGNAL = 4.1; EXPRESSED IN BONE MARROW, SIGNAL = 3.3; EXPRESSED IN HELA, SIGNAL = 6.6; EXPRESSED IN HBL100, SIGNAL =   6; EXPRESSED IN HEART, SIGNAL = 2.2; EXPRESSED IN BRAIN, SIGNAL = 1.5; EXPRESSED IN LUNG, SIGNAL = 9.8; NT HIT: gi4758111, EVALUE 1.00e-115; SWISSPROT HIT: Q13838, EVALUE 1.00e-35; EST_HUMAN HIT: BE889256.1, EVALUE 1.00e-116
atggcagagaacgatgtggacaatgagctcttggactatgaagatgatgaggtggagacagcagctgggggagatggggctgaggcccctgccaagaaggatgtcaagggctcctatgtctccatccacagctctggctttcgtgacttcctgctcaagccagagttgctccgggccattgtcgactgtggctttgagcatccgtcagaaggtaaattttctcttgggcatgtagtgctcattgggctctttaagggtacaatacaaagatgtgtttgtcg

SEQ ID NO: 19511 - DNA, 139 bp, Homo sapiens
  MAP TO AC007263.3; EXPRESSED IN BONE MARROW, SIGNAL = 4.8; EXPRESSED IN BRAIN, SIGNAL =   5; EXPRESSED IN PLACENTA, SIGNAL = 7.6; EXPRESSED IN BT474, SIGNAL =   4; EXPRESSED IN LUNG, SIGNAL =   6; EXPRESSED IN HELA, SIGNAL = 5.1; EXPRESSED IN ADULT LIVER, SIGNAL = 4.7; EXPRESSED IN HEART, SIGNAL = 3.3; EXPRESSED IN HBL100, SIGNAL = 4.1; EXPRESSED IN FETAL LIVER, SIGNAL = 9.1; EST_HUMAN HIT: AW954653.1, EVALUE 8.00e-02; SWISSPROT HIT: Q42798, EVALUE 5.10e+00
ccatgagcaacttggtattgtcagagcgaaaaaaactaaaagacaaggggtggcaggagaagctggagcaagtggagccaattgtttagtgctaaagaacctggaagtggcacaggtcacagggagccaggagtcattt

SEQ ID NO: 19512 - DNA, 354 bp, Homo sapiens
  MAP TO AC005921.3; EXPRESSED IN BT474, SIGNAL =   3; EXPRESSED IN HELA, SIGNAL = 3.4; EXPRESSED IN HEART, SIGNAL = 1.4; EXPRESSED IN PLACENTA, SIGNAL = 2.2; EXPRESSED IN HBL100, SIGNAL = 6.5; EXPRESSED IN FETAL LIVER, SIGNAL =   2; EXPRESSED IN LUNG, SIGNAL = 4.5; EXPRESSED IN ADULT LIVER, SIGNAL = 1.2; EXPRESSED IN BONE MARROW, SIGNAL = 1.5; EST_HUMAN HIT: R83530.1, EVALUE 4.00e-53; NT HIT: M38591.1, EVALUE 9.00e-53; SWISSPROT HIT: P08206, EVALUE 2.00e-34
tgcctgcttcgttcccttctgcttcataggtactacaaaatagttgttgtccacagtggtgagccccgcagtgagtgaaaacaagttctggaagttcagtgtgctgtcttggcactggtccatgtccttcattgttatgtctgcagccagagggtctttttgattctccaaaaatccaaggaactcctttcccatgagtactttcaggccctccttcattaagtagcctttatccccggcaaatctgtgaaacgtaaacaacacggtttccatggtgtgttccattggactggggttgttcgtgagatctgttgaaaccttggctggaggtgcgttgtgggcgcttggcaagct

SEQ ID NO: 19513 - DNA, 255 bp, Homo sapiens
  MAP TO AC007281.3; EXPRESSED IN PLACENTA, SIGNAL = 1.3; EXPRESSED IN FETAL LIVER, SIGNAL = 1.2; EXPRESSED IN LUNG, SIGNAL = 1.1; EXPRESSED IN HELA, SIGNAL = 1.1; EXPRESSED IN BT474, SIGNAL = 1.3; EXPRESSED IN BONE MARROW, SIGNAL = 0.83; EXPRESSED IN HBL100, SIGNAL = 1.2; EXPRESSED IN ADULT LIVER, SIGNAL = 0.91; EXPRESSED IN BRAIN, SIGNAL = 1.9; EXPRESSED IN HEART, SIGNAL = 1.7; SWISSPROT HIT: P09346, EVALUE 1.00e+00; NT HIT: S65019.1, EVALUE 1.00e-04; EST_HUMAN HIT: N88965.1, EVALUE 2.00e-35
ctttcagccagttactgaggttctgagtcaactttctcacctgtaaaatgaggaagatggtcatggtgctgttggtgatggtgattttggatatattggtaatggtggtagtgatggttgtggttggaatggtggtggttctagatatgttggaggtggtagtgatggtgatgctgatggtgttggtggtgatagtgttggagatgatggcggtagtggtgattatttttggtgttggtggtggtggtggtgatg

SEQ ID NO: 19514 - DNA, 460 bp, Homo sapiens; identical to SEQ ID NO: 171
  MAP TO AL031122.3; EXPRESSED IN BONE MARROW, SIGNAL = 3.9; EXPRESSED IN HBL100, SIGNAL =   3; EXPRESSED IN LUNG, SIGNAL = 2.7; EXPRESSED IN ADULT LIVER, SIGNAL = 1.8; EXPRESSED IN HEART, SIGNAL = 1.6; EXPRESSED IN PLACENTA, SIGNAL =   2; EXPRESSED IN BT474, SIGNAL = 2.1; EXPRESSED IN FETAL LIVER, SIGNAL = 2.2; EXPRESSED IN HELA, SIGNAL = 2.4; EXPRESSED IN BRAIN, SIGNAL = 1.7; NT HIT: AF020503.1, EVALUE 5.00e-37; EST_HUMAN HIT: BF035327.1, EVALUE 6.00e-59; SWISSPROT HIT: P29130, EVALUE 4.10e-01

SEQ ID NO: 19515 - DNA, 286 bp, Homo sapiens
  MAP TO AL049742.7; EXPRESSED IN HEART, SIGNAL = 9.3; EXPRESSED IN PLACENTA, SIGNAL =  12; EXPRESSED IN BT474, SIGNAL =  27; EXPRESSED IN BONE MARROW, SIGNAL =  51; EXPRESSED IN LUNG, SIGNAL =  14; EXPRESSED IN ADULT LIVER, SIGNAL =  21; EXPRESSED IN BRAIN, SIGNAL = 9.3; EXPRESSED IN HBL100, SIGNAL =  57; EXPRESSED IN FETAL LIVER, SIGNAL =  33; EXPRESSED IN HELA, SIGNAL =  28; EST_HUMAN HIT: AI587308.1, EVALUE 0.00e+00; SWISSPROT HIT: P02584, EVALUE 2.00e-34; NT HIT: gi11426961, EVALUE 1.00e-70
gcctagcgtcttggcagtcatggtgacaatgacgttgaaggtgggggctccaccgatgctcttcatacaaagatccgtggtcaattccccatcctgcagcagtgagtccaggaccacagtatatttctggccccccagtgtcagcccattcatgacaaagcttgaccagtctttgccaaccaggacaccaacctcagctggcgtgatgttgaggaaggttttccctgggacggtggcacagatggaaggtgggtccttgttgcccacaatggccgtgtcctaacag

SEQ ID NO: 19516 - DNA, 185 bp, Homo sapiens
  MAP TO AL096772.5; EXPRESSED IN PLACENTA, SIGNAL = 1.7; EXPRESSED IN BONE MARROW, SIGNAL = 0.89; EXPRESSED IN BT474, SIGNAL =   1; EXPRESSED IN HBL100, SIGNAL =   1; EXPRESSED IN FETAL LIVER, SIGNAL = 1.6; EXPRESSED IN LUNG, SIGNAL =   6; EXPRESSED IN HELA, SIGNAL = 0.97; EXPRESSED IN ADULT LIVER, SIGNAL = 1.1; EXPRESSED IN HEART, SIGNAL = 2.5; EXPRESSED IN BRAIN, SIGNAL = 0.87; SWISSPROT HIT: P18688, EVALUE 2.60e-01; NT HIT: AB018301.1, EVALUE 7.00e-92; EST_HUMAN HIT: BF513128.1, EVALUE 1.00e-91
gaacccctgagacagacatagattctagctgcagcagatacaccctcaaggctgatggaacccagtgcccaagcgggtcgtctggaacaacagtcatctacacttgtgagttcatcagtgcctatggagccagaggcagtgcaaacataaaagtgacattcatctctgtgggtaaggactctccc

SEQ ID NO: 19517 - DNA, 101 bp, Homo sapiens
  MAP TO AP000110.1; EXPRESSED IN ADULT LIVER, SIGNAL = 1.3; EXPRESSED IN BRAIN, SIGNAL = 0.9; EXPRESSED IN HEART, SIGNAL = 1.2; EXPRESSED IN BT474, SIGNAL = 1.9; EXPRESSED IN BONE MARROW, SIGNAL = 1.4; EXPRESSED IN HBL100, SIGNAL =   2; EXPRESSED IN HELA, SIGNAL = 2.5; EXPRESSED IN PLACENTA, SIGNAL = 1.5; EXPRESSED IN FETAL LIVER, SIGNAL = 1.7; EXPRESSED IN LUNG, SIGNAL = 1.5; NT HIT: AB022090.1, EVALUE 1.80e-01; SWISSPROT HIT: Q05556, EVALUE 7.00e+00
tctctcatcctcctggacccactggctgactggatatgttcctatcatggcattggcagaagcacaagggagagagcccgaccccacaagtactttccaag

SEQ ID NO: 19518 - DNA, 511 bp, Homo sapiens
  MAP TO AP000190.1; EXPRESSED IN FETAL LIVER, SIGNAL =  23; EXPRESSED IN BRAIN, SIGNAL = 4.2; EXPRESSED IN HEART, SIGNAL = 5.3; EXPRESSED IN BT474, SIGNAL =  25; EXPRESSED IN BONE MARROW, SIGNAL =  12; EXPRESSED IN HBL100, SIGNAL =  46; EXPRESSED IN HELA, SIGNAL =  14; EXPRESSED IN ADULT LIVER, SIGNAL =  13; EXPRESSED IN PLACENTA, SIGNAL = 8.1; EXPRESSED IN LUNG, SIGNAL = 9.7; NT HIT: gi11426957, EVALUE 0.00e+00; SWISSPROT HIT: P46782, EVALUE 1.00e-74; EST_HUMAN HIT: BF341043.1, EVALUE 0.00e+00
gtggcattgatgagctcatccgccaggcactcagcaatggtcttgatgttccagaaggcagcctcacgagtgcctgtgcacagcagccagacgacctgattcacacagtgcagtggggacatgtccacagcctgttgtctcacagtccctgctcgcccaatgcatgtggagtcctcccagggaccactgttgatgatggcgttcaccaggacctggagagggttctcgcctgtgagcaggtggatgaaatcgaaggcatgcttgatgatgcacatgatcatgagcttgttgctgttgttgcagccgtgcatcatcatggagttagtgaggggctccacaatggggcactgagctttgcggaagcatttggctgcataccacccagcactgtgaggcaggtacttggcatacttctccttcactgcagtgtaatcctgcagggaaatgccattgatctgcatatcatcagtgctccacttcccagagagcttgatgtcaaggggtctctgcc

SEQ ID NO: 19519 - DNA, 294 bp, Homo sapiens
  MAP TO AP000266.1; EXPRESSED IN BONE MARROW, SIGNAL = 2.9; EXPRESSED IN FETAL LIVER, SIGNAL = 2.9; EXPRESSED IN LUNG, SIGNAL = 2.7; EXPRESSED IN ADULT LIVER, SIGNAL = 2.6; EXPRESSED IN PLACENTA, SIGNAL = 2.5; EXPRESSED IN BT474, SIGNAL = 2.9; EXPRESSED IN HBL100, SIGNAL = 3.3; EXPRESSED IN HELA, SIGNAL =   4; EXPRESSED IN BRAIN, SIGNAL = 3.8; EXPRESSED IN HEART, SIGNAL = 3.4; NT HIT: gi11526184, EVALUE 0.00e+00; EST_HUMAN HIT: H14174.1, EVALUE 1.00e-103; SWISSPROT HIT: O60287, EVALUE 4.00e-38
cggccaccgaccgcagcacccaactgactgccagggaagcggcagcatatacggggcctggcgcatcgctctcggggctggctgagtccacaggctcctgagtggggtcaggaccagggatcactggtctccagtaagtcaagatggacctcaggaggcccttgcatgtctccaaggtagatgccatcagctcagggtcagccatctcctctgcctccccaggcctcctctttcggccccgtgggcctttggctcgggctggcatgacaggcttgttcttatccttgagcattt

SEQ ID NO: 19520 - DNA, 186 bp, Homo sapiens
  MAP TO AL078477.5; EXPRESSED IN ADULT LIVER, SIGNAL = 0.86; EXPRESSED IN BONE MARROW, SIGNAL = 1.4; EXPRESSED IN PLACENTA, SIGNAL = 0.88; EXPRESSED IN BT474, SIGNAL = 1.4; EXPRESSED IN LUNG, SIGNAL = 0.73; EXPRESSED IN HELA, SIGNAL = 1.6; EXPRESSED IN HEART, SIGNAL = 0.82; EXPRESSED IN HBL100, SIGNAL = 3.4; EXPRESSED IN FETAL LIVER, SIGNAL = 1.2; EST_HUMAN HIT: BE907607.1, EVALUE 8.00e-96; NT HIT: gi11436804, EVALUE 7.00e-71
ctttatcatcctccttcagacacacatcacaggcttcaataatttgagctaaatcaacatgaagtccaccttccgagttctcttctgaaatctcagctcctttagatttcagataagcacgaagctcagcagcctgttgaggattgctctattataaaactgactacgaatgacaaagcacaatct

SEQ ID NO: 19521 - DNA, 141 bp, Homo sapiens
  MAP TO AL049575.7; EXPRESSED IN BT474, SIGNAL =   3; EXPRESSED IN BONE MARROW, SIGNAL =   2; EXPRESSED IN HBL100, SIGNAL = 1.7; EXPRESSED IN FETAL LIVER, SIGNAL = 2.1; EXPRESSED IN ADULT LIVER, SIGNAL = 1.5; EXPRESSED IN BRAIN, SIGNAL =   2; EXPRESSED IN PLACENTA, SIGNAL = 2.8; EXPRESSED IN HELA, SIGNAL = 1.7; EXPRESSED IN HEART, SIGNAL = 1.5; EXPRESSED IN LUNG, SIGNAL =   2; NT HIT: AB018301.1, EVALUE 1.30e+00; SWISSPROT HIT: P78411, EVALUE 2.60e-01; EST_HUMAN HIT: W58383.1, EVALUE 1.90e+00
agtgctgggggagggggagacggatgggacagttctgccatggggctcaaaaacccaggtgtggatgaacctgctgaatggggaccctctgttggggacagctcggaatgccattttgttgaggatccagaaacacctaga

SEQ ID NO: 19522 - DNA, 340 bp, Homo sapiens
  MAP TO AL031320.6; EXPRESSED IN HEART, SIGNAL = 1.1; EXPRESSED IN FETAL LIVER, SIGNAL = 1.9; EXPRESSED IN PLACENTA, SIGNAL = 1.7; EXPRESSED IN BONE MARROW, SIGNAL = 1.9; EXPRESSED IN HBL100, SIGNAL = 4.8; EXPRESSED IN LUNG, SIGNAL = 1.3; EXPRESSED IN ADULT LIVER, SIGNAL =   2; EXPRESSED IN BRAIN, SIGNAL = 1.1; EXPRESSED IN BT474, SIGNAL = 1.3; EXPRESSED IN HELA, SIGNAL = 1.9; NT HIT: AB023144.1, EVALUE 1.80e-01; SWISSPROT HIT: P17164, EVALUE 9.00e-38; EST_HUMAN HIT: BE907046.1, EVALUE 0.00e+00
ctttcattatataaccaggccaagaagcctgtgctgttccagtattgatccggtgctcctccgtcaccatccgaccacagaacctcaggctgatagttgttcactaactcatagagctctggcaatgtcttagaaactggaaattgccgcttatggaatgaactggattcatcctcaaggaagagcggatgaaaccattcaaaaagggaatagtacagtccaaaacgcaggtcagttctgttcctaatggctacctcaagttccttgacaatgtccctcttgggcccctcatctatggcattccagttccacgaatattctgacccccacaaggtaaagc

SEQ ID NO: 19523 - DNA, 712 bp, Homo sapiens
  MAP TO AC009307.1; EXPRESSED IN BT474, SIGNAL =   2; EXPRESSED IN FETAL LIVER, SIGNAL = 1.3; EXPRESSED IN HELA, SIGNAL = 1.5; EXPRESSED IN HEART, SIGNAL =   2; EXPRESSED IN PLACENTA, SIGNAL = 1.6; EXPRESSED IN BONE MARROW, SIGNAL = 1.2; EXPRESSED IN HBL100, SIGNAL = 1.9; EXPRESSED IN LUNG, SIGNAL = 1.9; EXPRESSED IN ADULT LIVER, SIGNAL =   1; EXPRESSED IN BRAIN, SIGNAL = 1.3; SWISSPROT HIT: O60225, EVALUE 9.90e-01; NT HIT: X55010.1, EVALUE 7.10e+00; EST_HUMAN HIT: BE081527.1, EVALUE 0.00e+00
ttggtaaagggtgtgcagggccattctcaccacactgcaggcggacattctggctggggccagccgatccccaaagtggccacaaccagctcttgtagtgaaagtacctgttccctctaaatgctgggttctgctcccagcaggagtggcagcgattctccctggcatgggacttggaggagggttctgagaagagatctgaactttcatactgccatttctcactgccgactggccagagcccaggtgctggctggttttcacgatctgggcctgcttggagggctgcaggagcagccctgactgggccacaggctctctcagggacttgccgattcctgccctgctctgtggcgataccggccttcctttggactgtaacccttcttgaaggtttcggatgtatgaggaagggacagatgaggatggctgggacctgggagttggggaaacagattcttcctggggagaagtttcttcctcttcagtctcctcagagtgaaagtggtcacttaagccaggggttggggtgtcctcttcgttctcggagtcgttgagtggagctggtagcgggccctgctgtttttgctgttgactcctctggagttgtttgcactcctcttctacgcgggccagaagcctcttgacttcctgattggtgggacagagtttcacagcctcttgcaggtcagccagagctgccacgaattgc

SEQ ID NO: 19524 - DNA, 261 bp, Homo sapiens
  MAP TO AC007857.1; EXPRESSED IN HBL100, SIGNAL = 7.7; EXPRESSED IN ADULT LIVER, SIGNAL = 6.8; EXPRESSED IN BRAIN, SIGNAL = 8.3; EXPRESSED IN HEART, SIGNAL = 6.8; EXPRESSED IN PLACENTA, SIGNAL =  13; EXPRESSED IN BT474, SIGNAL = 6.5; EXPRESSED IN BONE MARROW, SIGNAL =  12; EXPRESSED IN FETAL LIVER, SIGNAL = 6.3; EXPRESSED IN LUNG, SIGNAL = 9.1; EXPRESSED IN HELA, SIGNAL = 8.1; NT HIT: AF092505.1, EVALUE 9.80e+00
agaagaaaggaagaagaagaagaggaggaggaggagaagaggaagaagaagaagaagaaagaagaagaagaagaagaggaagaagaagaagaagaggaagaagaagaagagaagaagaagaagaagaagaagaagaagaagaagaagaagaagaagaagaagaagaagaagaagaagaagaagaagaagaagaaacaaacaaacaaaagggccaccgtgcaaaaatctaatgttggtcttctgccctcagaacaaagcccc

SEQ ID NO: 19525 - DNA, 125 bp, Homo sapiens
  MAP TO AC007656.2; EXPRESSED IN PLACENTA, SIGNAL = 2.1; EXPRESSED IN BONE MARROW, SIGNAL =   3; EXPRESSED IN HBL100, SIGNAL = 2.2; EXPRESSED IN FETAL LIVER, SIGNAL = 2.3; EXPRESSED IN LUNG, SIGNAL = 3.4; EXPRESSED IN HELA, SIGNAL = 3.6; EXPRESSED IN ADULT LIVER, SIGNAL = 3.2; EXPRESSED IN BRAIN, SIGNAL = 3.7; EXPRESSED IN BT474, SIGNAL = 2.3; EXPRESSED IN HEART, SIGNAL = 2.6; NT HIT: gi6680735, EVALUE 1.50e-02; EST_HUMAN HIT: AI911352.1, EVALUE 8.00e-08; SWISSPROT HIT: Q10364, EVALUE 1.00e+00
atccatcatcaccagaggagtctcctctccttctgtgggtgagttctggagaagacctgggcacactgagctcagccacttccccttcctggtatgggtcttccctcatgacttcaccaccacct

SEQ ID NO: 19526 - DNA, 365 bp, Homo sapiens
  MAP TO AC007317.3; EXPRESSED IN HEART, SIGNAL = 0.95; EXPRESSED IN FETAL LIVER, SIGNAL = 1.2; EXPRESSED IN BRAIN, SIGNAL = 1.2; EXPRESSED IN BT474, SIGNAL = 2.1; EXPRESSED IN BONE MARROW, SIGNAL = 3.3; EXPRESSED IN HBL100, SIGNAL = 1.8; EXPRESSED IN HELA, SIGNAL = 1.3; EXPRESSED IN ADULT LIVER, SIGNAL = 1.1; EXPRESSED IN PLACENTA, SIGNAL = 1.8; EXPRESSED IN LUNG, SIGNAL = 1.3; NT HIT: X57147.1, EVALUE 0.00e+00; SWISSPROT HIT: P26809, EVALUE 2.00e-18; EST_HUMAN HIT: AW503208.1, EVALUE 1.00e-117
taccccattctccacaaatgaacttccatcggtatataggttaaggtcaggattagctaaggggacttctaaaagatcctctcgagcagcagaagtctggactataatttgttggcagtcatgctcgattggttccccatcctttgggagaaaagtggcagggtcgagggctgcacacatgcatatttgaagcacaggtccctcaaggagtaatgcctggtatctaagtaggcagttgtctgatagccataaacttcctttggcacctagtatgccatttacatcatgagtagtccagacagtgagatcctttccttgtattattttgatagcctctgacactacgacagccaccatcgcaacta

SEQ ID NO: 19527 - DNA, 168 bp, Homo sapiens
  MAP TO AC007106.6; EXPRESSED IN LUNG, SIGNAL = 8.9; EXPRESSED IN HELA, SIGNAL =   9; EXPRESSED IN PLACENTA, SIGNAL =  11; EXPRESSED IN BT474, SIGNAL =  10; EXPRESSED IN HBL100, SIGNAL = 7.6; EXPRESSED IN FETAL LIVER, SIGNAL = 9.8; EXPRESSED IN BRAIN, SIGNAL = 9.1; EXPRESSED IN BONE MARROW, SIGNAL =  10; EXPRESSED IN ADULT LIVER, SIGNAL = 6.5; EXPRESSED IN HEART, SIGNAL = 6.3; EST_HUMAN HIT: AU122272.1, EVALUE 1.00e-11; SWISSPROT HIT: P08461, EVALUE 1.30e+00; NT HIT: AL163303.2, EVALUE 2.00e-14
gccatcaaggtttatggcttgcaccctcaggagcagcagcctgagctgtacctgggctcctttcagccacagctgaagctagagtggctggtttgcagggagcagtgtcttgaggctgctcagggcatcagcgctctaggcctggtccaggatactgttcttctctcc

SEQ ID NO: 19528 - DNA, 257 bp, Homo sapiens
  MAP TO AC006430.15; EXPRESSED IN LUNG, SIGNAL = 1.6; EXPRESSED IN HELA, SIGNAL = 1.2; EXPRESSED IN ADULT LIVER, SIGNAL = 1.4; EXPRESSED IN PLACENTA, SIGNAL = 1.3; EXPRESSED IN BT474, SIGNAL = 1.1; EXPRESSED IN BRAIN, SIGNAL = 1.3; EXPRESSED IN HEART, SIGNAL = 1.2; EXPRESSED IN BONE MARROW, SIGNAL = 1.8; EXPRESSED IN HBL100, SIGNAL = 1.3; EXPRESSED IN FETAL LIVER, SIGNAL = 1.2; SWISSPROT HIT: Q13077, EVALUE 5.00e-37; NT HIT: gi11427628, EVALUE 1.00e-121; EST_HUMAN HIT: BF343603.1, EVALUE 3.00e-47
ctaagtgctggtctccacaatgcacttgaggaacattgtgtcgtccttcacgtaggcgtgcttgggtgactgcagtttgctgagggggaagaagagtgggcatccactggccacgttggtttcactctggggcctctggaaggacgctgagcttaggtcaggccggaaggcgtcaatggcgtgctcacggttgttctggtccagcagcatgaaggtgacctgcagggaagggataggtgggagatcaggccctacag

SEQ ID NO: 19529 - DNA, 286 bp, Homo sapiens
  MAP TO AC006017.2; EXPRESSED IN BRAIN, SIGNAL =   1; EXPRESSED IN HEART, SIGNAL = 1.2; EXPRESSED IN PLACENTA, SIGNAL = 1.2; EXPRESSED IN HBL100, SIGNAL = 1.7; EXPRESSED IN BT474, SIGNAL = 2.2; EXPRESSED IN BONE MARROW, SIGNAL =   2; EXPRESSED IN FETAL LIVER, SIGNAL = 1.4; EXPRESSED IN LUNG, SIGNAL = 1.2; EXPRESSED IN HELA, SIGNAL = 1.2; EXPRESSED IN ADULT LIVER, SIGNAL = 2.3; NT HIT: AB014607.1, EVALUE 6.00e-41; EST_HUMAN HIT: BE064386.1, EVALUE 2.00e-56; SWISSPROT HIT: P10266, EVALUE 9.00e-12
tttgagctgaaccatagggcatctgaaaaactttaccttttgagccagaataagaagctttaccgttgctagacccatctgtaaaaacattctcagcaccttcaattggtttaaatttagttattctagggagaatccaattacttattgtgactggttgtccagctttcctcaggttttcttccgccatctgtggcagcttctcgatctgtccccaggtgggtggctgtgttcgatgggtgttgctcgtgacagttggggtcctcctcagcgtcagtcttgacat

SEQ ID NO: 19530 - DNA, 347 bp, Homo sapiens
  MAP TO AC004890.2; EXPRESSED IN HELA, SIGNAL = 2.4; EXPRESSED IN BT474, SIGNAL = 4.4; EXPRESSED IN LUNG, SIGNAL = 1.3; EXPRESSED IN ADULT LIVER, SIGNAL = 1.5; EXPRESSED IN BRAIN, SIGNAL = 1.9; EXPRESSED IN HEART, SIGNAL = 0.81; EXPRESSED IN PLACENTA, SIGNAL = 2.4; EXPRESSED IN BONE MARROW, SIGNAL =   3; EXPRESSED IN FETAL LIVER, SIGNAL = 2.4; EXPRESSED IN HBL100, SIGNAL = 4.6; EST_HUMAN HIT: AU119822.1, EVALUE 0.00e+00; SWISSPROT HIT: Q98917, EVALUE 3.50e-01; NT HIT: D30612.1, EVALUE 0.00e+00
atgcgagagccccagttgcccacagcagagatctcactctggactgtggtggctgccattcaggctgtggagaggaaggtggatgcccaggccagccagctgctgaacctggaggggcgcacggggacagccgagaagaagctggccgactgtgaaaagacggccgtggaatttgggaaccacatggagagcaagtgggccgtgctggggaccctgctgcaggagtacgggctgctgcagaggcggctggagaacttggagaacttgctgcgcaacaggaacttctgggtcctgcggctgcccccgggcagcaagggggaggcccccaaggtatgtggtggtccctg

SEQ ID NO: 19531 - DNA, 830 bp, Homo sapiens
  MAP TO Z83851.17; EXPRESSED IN HELA, SIGNAL =  12; EXPRESSED IN ADULT LIVER, SIGNAL =  11; EXPRESSED IN BRAIN, SIGNAL =  12; EXPRESSED IN HEART, SIGNAL =   7; EXPRESSED IN PLACENTA, SIGNAL =  12; EXPRESSED IN BT474, SIGNAL =  11; EXPRESSED IN BONE MARROW, SIGNAL =  13; EXPRESSED IN HBL100, SIGNAL =  11; EXPRESSED IN FETAL LIVER, SIGNAL =  11; EXPRESSED IN LUNG, SIGNAL =  13; SWISSPROT HIT: Q28614, EVALUE 2.00e+00; EST_HUMAN HIT: Z45997.1, EVALUE 7.90e-01
caggaaccagactctggccatggatagctgaatgcacccacaccttcttcccagaggcagaaatgcaggaaaagccgagaagcctctgcttcctcatctgtaaaacggggatgacaactgtacctactttccaaggctgtgaggattaaatgggagagtgagctgttgcggtggtcgcggtggtggtagtggtgatggaggttatggtggtggtggtggtggtggtgatggaggttatggtggtggaggtggtggtggtgatggaggttatggtggtggtggtggtgatggaggttatggtggtggtggtgatggtggtggtggaggttatggtggtggaggtggtggcggaggttatggtggtggtggtggtgatggaggttatggtggtggtggtggtggtgatggaggttatggtggtggtggtggtggtgatggaggttatggtggtggtggtggtggtggttatggtggtggtggtggtggtggtgatagaggttatggtgatggtggtggtgatggaggttatggtggtggtggtggaggttatggtggaggtggtgatgatggtggtgatggtggtggccattattattggaaggggaagggaacaaaggaaagagggtgtgggagggaggagagacgaataaaccagtgagggtaaaaggtaaacattaattaatttcactaggcctgataagacttgagagaaatggaaactgggagacaaacagaagtagtgatagaagaaaataacctccaccattccagaaaataatctccaccatctgagaaaataatctccaccattccagaaaataatctccacc

SEQ ID NO: 19532 - DNA, 86 bp, Homo sapiens
  MAP TO AP000168.1; EXPRESSED IN BONE MARROW, SIGNAL = 1.8; EXPRESSED IN FETAL LIVER, SIGNAL = 1.6; EXPRESSED IN LUNG, SIGNAL = 1.4; EXPRESSED IN PLACENTA, SIGNAL = 2.5; EXPRESSED IN HEART, SIGNAL = 2.4; EXPRESSED IN BRAIN, SIGNAL = 1.2; EXPRESSED IN ADULT LIVER, SIGNAL = 1.4; EXPRESSED IN HELA, SIGNAL = 1.4; EXPRESSED IN HBL100, SIGNAL = 1.8; EXPRESSED IN BT474, SIGNAL = 1.7; EST_HUMAN HIT: AI934364.1, EVALUE 7.00e-41; NT HIT: U65404.1, EVALUE 7.00e-01; SWISSPROT HIT: P12394, EVALUE 9.30e+00
tattgctcacaatggagcctacaaacccctagttcccatccaacacatctccaaggcagactctcagaccagctcccagaaatgag

SEQ ID NO: 19533 - DNA, 147 bp, Homo sapiens; identical to SEQ ID NO: 17091
  MAP TO AP000088.1; EXPRESSED IN HELA, SIGNAL = 6.4; EXPRESSED IN BT474, SIGNAL = 5.9; EXPRESSED IN BONE MARROW, SIGNAL = 2.3; EXPRESSED IN HBL100, SIGNAL = 6.1; EXPRESSED IN FETAL LIVER, SIGNAL =   3; EXPRESSED IN LUNG, SIGNAL = 4.6; EXPRESSED IN ADULT LIVER, SIGNAL = 3.1; EXPRESSED IN BRAIN, SIGNAL =  17; EXPRESSED IN PLACENTA, SIGNAL = 3.4; EXPRESSED IN HEART, SIGNAL =   5; NT HIT: gi11526152, EVALUE 1.00e-77; EST_HUMAN HIT: AW844292.1, EVALUE 2.00e-77; SWISSPROT HIT: Q95241, EVALUE 4.00e-10

SEQ ID NO: 19534 - DNA, 216 bp, Homo sapiens
  MAP TO AL049874.2; EXPRESSED IN PLACENTA, SIGNAL = 1.9; EXPRESSED IN HBL100, SIGNAL = 6.6; EXPRESSED IN HEART, SIGNAL = 0.98; EXPRESSED IN BONE MARROW, SIGNAL = 1.7; EXPRESSED IN ADULT LIVER, SIGNAL = 1.3; EXPRESSED IN BT474, SIGNAL = 2.6; EXPRESSED IN FETAL LIVER, SIGNAL = 1.3; EXPRESSED IN LUNG, SIGNAL = 1.6; EXPRESSED IN HELA, SIGNAL = 0.92; EXPRESSED IN BRAIN, SIGNAL = 0.96; NT HIT: gi11434620, EVALUE 1.00e-118; SWISSPROT HIT: Q15475, EVALUE 2.00e-22; EST_HUMAN HIT: AW409771.1, EVALUE 1.00e-118
ccgtgactgggctgcgaggctgttaagcccgggagagaatagtttgagctcctggcgtggcccatattgccctgcagcagaaggaccgagttctggtctggactttggggaggtgagaattcctcttctgagctggacatgagcggcttgcccccttccagaggagagagttggttctgcttgttggaggaggagttattgttttcggtgttctcc

SEQ ID NO: 19535 - DNA, 249 bp, Homo sapiens
  MAP TO AL035405.10; EXPRESSED IN LUNG, SIGNAL = 2.7; EXPRESSED IN BRAIN, SIGNAL = 3.4; EXPRESSED IN PLACENTA, SIGNAL =   4; EXPRESSED IN BT474, SIGNAL = 2.1; EXPRESSED IN FETAL LIVER, SIGNAL = 6.7; EXPRESSED IN HELA, SIGNAL = 2.7; EXPRESSED IN ADULT LIVER, SIGNAL =   3; EXPRESSED IN HEART, SIGNAL = 2.5; EXPRESSED IN BONE MARROW, SIGNAL = 2.2; EXPRESSED IN HBL100, SIGNAL = 1.9; SWISSPROT HIT: Q61626, EVALUE 7.50e-01; NT HIT: Y15520.1, EVALUE 6.00e-01; EST_HUMAN HIT: AI001948.1, EVALUE 0.00e+00
ttacacgttggtgacctccaggctgttgtagccttccagacggcactgttccagcctgctctgggggtcatcgtctccgcaatcttcgttttgaagagagccatagtcatcatggaaatcgggatctttgctgctgaagccccttcctatcttccccaggggcagctgagaagagaagaatatgatcaaaggacaggaagaagagaaacaagaattaagaatgaaggtctgggaaatgtctccaattct

SEQ ID NO: 19536 - DNA, 102 bp, Homo sapiens
  MAP TO AL023799.5; EXPRESSED IN PLACENTA, SIGNAL = 2.4; EXPRESSED IN BT474, SIGNAL = 1.1; EXPRESSED IN FETAL LIVER, SIGNAL =   1; EXPRESSED IN LUNG, SIGNAL =   1; EXPRESSED IN HELA, SIGNAL = 0.97; EXPRESSED IN ADULT LIVER, SIGNAL =   1; EXPRESSED IN BONE MARROW, SIGNAL = 1.2; EXPRESSED IN HBL100, SIGNAL = 1.1; EXPRESSED IN BRAIN, SIGNAL = 0.95; EXPRESSED IN HEART, SIGNAL = 1.4; EST_HUMAN HIT: AI361230.1, EVALUE 8.10e-02; NT HIT: AL133204.1, EVALUE 5.00e-51; SWISSPROT HIT: Q03376, EVALUE 1.10e+00
ttgtacttgcaaaaactgcagtggatgtatatagaaaagtggcttgcaaaatcttttattttggaatgacattcaatgcacttgtgaattccccgacgacac

SEQ ID NO: 19537 - DNA, 217 bp, Homo sapiens
  MAP TO AC009238.1; EXPRESSED IN ADULT LIVER, SIGNAL = 2.2; EXPRESSED IN BRAIN, SIGNAL = 1.6; EXPRESSED IN BT474, SIGNAL = 1.7; EXPRESSED IN HBL100, SIGNAL = 4.3; EXPRESSED IN FETAL LIVER, SIGNAL = 1.8; EXPRESSED IN HELA, SIGNAL = 1.7; EXPRESSED IN HEART, SIGNAL = 1.6; EXPRESSED IN PLACENTA, SIGNAL = 0.93; EXPRESSED IN BONE MARROW, SIGNAL = 1.8; EXPRESSED IN LUNG, SIGNAL = 0.95; EST_HUMAN HIT: BF314220.1, EVALUE 1.00e-119; SWISSPROT HIT: O28058, EVALUE 2.00e-12; NT HIT: gi11431154, EVALUE 1.00e-119
ctggctctgtggtgggaggaccacctcatcatagggccccacgatggagctggcaaacttgctgaagatgatgggctccttgggcacgggcacgttctgttctttgcagtggtccacataattcatgcccacacacaccaccttatctggtcgtgtgactggagccaggaaggttacctccgaccgtggtaggactggcaactgggcagccagggct

SEQ ID NO: 19538 - DNA, 247 bp, Homo sapiens
  MAP TO AC008009.4; EXPRESSED IN FETAL LIVER, SIGNAL = 1.5; EXPRESSED IN LUNG, SIGNAL =   1; EXPRESSED IN HELA, SIGNAL = 2.5; EXPRESSED IN ADULT LIVER, SIGNAL = 0.97; EXPRESSED IN BRAIN, SIGNAL = 0.96; EXPRESSED IN HBL100, SIGNAL = 2.4; EXPRESSED IN PLACENTA, SIGNAL = 1.2; EXPRESSED IN HEART, SIGNAL = 1.6; EXPRESSED IN BT474, SIGNAL = 2.2; EXPRESSED IN BONE MARROW, SIGNAL = 0.86; SWISSPROT HIT: P51114, EVALUE 1.00e-27; NT HIT: AF124393.1, EVALUE 1.00e-117; EST_HUMAN HIT: AW451314.1, EVALUE 1.00e-113
tactcttaaacgaatatttcttgcctctgacatgaatatagtgctcaaagatccagacagcaatccatacagcttacttgataatacagaatcagatcagactgcagacactgatgccagcgaatctcatcacagtactaaccgtcgtaggcggtctcgtagacgaaggactgatgaagatgctgttctgatggatggaatgactgaatctgatacagcttcagttaatgaaaatgggctaggtatg

SEQ ID NO: 19539 - DNA, 377 bp, Homo sapiens
  MAP TO AC007785.1; EXPRESSED IN PLACENTA, SIGNAL = 1.6; EXPRESSED IN BT474, SIGNAL = 1.6; EXPRESSED IN HBL100, SIGNAL = 1.6; EXPRESSED IN FETAL LIVER, SIGNAL = 1.6; EXPRESSED IN ADULT LIVER, SIGNAL = 1.8; EXPRESSED IN BONE MARROW, SIGNAL =   2; EXPRESSED IN LUNG, SIGNAL = 2.1; EXPRESSED IN HELA, SIGNAL = 2.9; EXPRESSED IN BRAIN, SIGNAL = 2.2; EXPRESSED IN HEART, SIGNAL = 1.8; NT HIT: AB037821.1, EVALUE 7.90e-01; SWISSPROT HIT: P04928, EVALUE 4.00e-14; EST_HUMAN HIT: AV764553.1, EVALUE 5.40e+00
gtcaacactagatggcagtaggagactgctcagaaaatggagagcggcgcccaccttgcagtgcgcaggcgtcgtcagtagacatcgcgcaggcgtcgtcagtagacatcgcgcaggcgtcgtcagtagacatcgcgcaggcgtcgtcagtagacatcgcgcaggcgtcgtcagtagacatcgcgcaggcgtcgtcagtagacatcgcgcaggcgtcgtcagtagacatcgcgcaggcgtcgtcagtagacatcgcgcaggcgtcgtcagtagacatcgcgcaggcgtcgtcagtagacatcgcgcaggcgtcgtcagtagacatcgcgcaggcgtcgtcagtagacatcgcgcaggcgtcgtcagtagacatcgcg

SEQ ID NO: 19540 - DNA, 190 bp, Homo sapiens
  MAP TO AC007535.3; EXPRESSED IN ADULT LIVER, SIGNAL = 4.2; EXPRESSED IN BRAIN, SIGNAL = 4.6; EXPRESSED IN HEART, SIGNAL = 4.1; EXPRESSED IN BONE MARROW, SIGNAL = 4.6; EXPRESSED IN HBL100, SIGNAL = 3.3; EXPRESSED IN FETAL LIVER, SIGNAL = 3.7; EXPRESSED IN LUNG, SIGNAL = 4.7; EXPRESSED IN PLACENTA, SIGNAL = 3.7; EXPRESSED IN BT474, SIGNAL = 3.5; EXPRESSED IN HELA, SIGNAL = 3.9; NT HIT: Z34846.1, EVALUE 3.80e-01; EST_HUMAN HIT: AW972158.1, EVALUE 1.10e-01; SWISSPROT HIT: O04716, EVALUE 8.40e+00
tgatctctttaaaaggctctatttcattggtagggatattgtccctaagtgcaaccttggacaaaatgtttgggatgaggaacatggagtagagcctctttgctgaggctccttccagcccccgcactctagttcctgcttttggaatgtcactgtcaaataagaagtctccttctagtgactgtagcac

SEQ ID NO: 19541 - DNA, 464 bp, Homo sapiens
  MAP TO AC006474.3; EXPRESSED IN PLACENTA, SIGNAL = 2.5; EXPRESSED IN ADULT LIVER, SIGNAL = 0.86; EXPRESSED IN BONE MARROW, SIGNAL = 1.7; EXPRESSED IN HBL100, SIGNAL = 1.1; EXPRESSED IN FETAL LIVER, SIGNAL =   2; EXPRESSED IN LUNG, SIGNAL = 1.2; EXPRESSED IN HELA, SIGNAL = 1.6; EXPRESSED IN BRAIN, SIGNAL = 1.5; EXPRESSED IN BT474, SIGNAL = 4.2; EXPRESSED IN HEART, SIGNAL = 0.95; SWISSPROT HIT: P05142, EVALUE 9.00e-03; NT HIT: gi11420105, EVALUE 0.00e+00; EST_HUMAN HIT: AA135076.1, EVALUE 0.00e+00
cttgctcttgttgagatggtggcacttgttccaaatctgggtgcacaggtagctgattaggtagaccctggggaggtcgtcgcatggggtctgtgtgtctagggcccggaaagtctggccggggaatgaagtttccatgtctcagattagaagatgcctctacaacgctgccaggtggagcactgaaaggcagccgttgccttccgtcaggagccctatgtctcagttcaatatatgcttggcccagtatgttgtgctgctgaactggcaagctctgtggtgaaaaatgctgaggaagtccaactggattattcatttgtgagttatttaaaggcctaggcatatctacagatactgatcttcttagctgtggagaaactccagatccctgtatttgctgaggaggcacaaggaagcgctcttgactcggcatggtaccatgactacctcctggaaatccaaat

SEQ ID NO: 19542 - DNA, 88 bp, Homo sapiens
  MAP TO AC006344.2; EXPRESSED IN LUNG, SIGNAL =  16; EXPRESSED IN HELA, SIGNAL =  12; EXPRESSED IN BRAIN, SIGNAL =  16; EXPRESSED IN HEART, SIGNAL =  13; EXPRESSED IN BONE MARROW, SIGNAL =  13; EXPRESSED IN PLACENTA, SIGNAL =  12; EXPRESSED IN BT474, SIGNAL =  10; EXPRESSED IN ADULT LIVER, SIGNAL =  13; EXPRESSED IN FETAL LIVER, SIGNAL =  11; EXPRESSED IN HBL100, SIGNAL =  12; EST_HUMAN HIT: F18891.2, EVALUE 2.00e-42; NT HIT: AF067166.1, EVALUE 1.00e-42; SWISSPROT HIT: O95178, EVALUE 5.00e-13
atcccaggtgttccagagcgagttcttcagcggactcatgtggttctggattctctggcgcttttggcatgactcagaagaggtgctg

SEQ ID NO: 19543 - DNA, 251 bp, Homo sapiens
  MAP TO AC000029.14; EXPRESSED IN HELA, SIGNAL = 1.3; EXPRESSED IN BT474, SIGNAL = 1.2; EXPRESSED IN FETAL LIVER, SIGNAL = 2.1; EXPRESSED IN LUNG, SIGNAL = 1.3; EXPRESSED IN ADULT LIVER, SIGNAL = 1.3; EXPRESSED IN HEART, SIGNAL = 1.1; EXPRESSED IN PLACENTA, SIGNAL = 1.2; EXPRESSED IN BRAIN, SIGNAL = 1.6; EXPRESSED IN BONE MARROW, SIGNAL = 1.3; EXPRESSED IN HBL100, SIGNAL = 1.2; SWISSPROT HIT: P27596, EVALUE 7.50e-01; NT HIT: gi11417836, EVALUE 0.00e+00; EST_HUMAN HIT: H55588.1, EVALUE 1.00e-116
tgagtggtttctgcagagcttcatttggaaaggcctctgtagttggggaaagatggcccattcccagaactccttggagcttcccattaacatcaatgccacccagattaccactgcctatggccatcgggccctgcccaagctgaaggaggagctgcagtcagaggacctccagacgaggcagaaagccctcatggccttgtgtgacctcatgcatgaccccgagtgtatctacaaggccatgaacatag

SEQ ID NO: 19544 - DNA, 189 bp, Homo sapiens
  MAP TO AC007374.3; EXPRESSED IN BONE MARROW, SIGNAL = 4.8; EXPRESSED IN LUNG, SIGNAL = 4.6; EXPRESSED IN HELA, SIGNAL = 3.4; EXPRESSED IN ADULT LIVER, SIGNAL = 3.8; EXPRESSED IN BRAIN, SIGNAL = 3.8; EXPRESSED IN PLACENTA, SIGNAL = 3.3; EXPRESSED IN BT474, SIGNAL =   7; EXPRESSED IN HBL100, SIGNAL = 3.7; EXPRESSED IN FETAL LIVER, SIGNAL = 4.6; EXPRESSED IN HEART, SIGNAL = 5.3; EST_HUMAN HIT: BE670561.1, EVALUE 8.00e-90; SWISSPROT HIT: Q57695, EVALUE 1.30e+00; NT HIT: AE004713.1, EVALUE 2.00e-03
ttacacctgtgccgtggtgacgtccaccagcttctggatcatctcggcgtgggtgttgtggaagggcagcccatccacctccatgcccacgatgcccgagacgccactccggactttgtgctgcaccaagatgcccagcattttttcttcctggaaaaaaatagggcagaaatagaaggagtggagggg

SEQ ID NO: 19545 - DNA, 208 bp, Homo sapiens
  MAP TO AC009808.2; EXPRESSED IN ADULT LIVER, SIGNAL = 1.4; EXPRESSED IN BT474, SIGNAL = 1.1; EXPRESSED IN FETAL LIVER, SIGNAL = 1.4; EXPRESSED IN PLACENTA, SIGNAL = 1.2; EXPRESSED IN HBL100, SIGNAL = 1.2; EXPRESSED IN HELA, SIGNAL = 1.6; EXPRESSED IN HEART, SIGNAL =   1; EXPRESSED IN LUNG, SIGNAL = 1.3; EXPRESSED IN BONE MARROW, SIGNAL = 1.8; EXPRESSED IN BRAIN, SIGNAL = 1.5; NT HIT: U32772.1, EVALUE 1.90e+00; EST_HUMAN HIT: T95277.1, EVALUE 5.00e-01; SWISSPROT HIT: Q39102, EVALUE 4.20e-01
  unsure 191
  unsure 206
catgcttttggagtctgccaaactgggtctaccttgggagtagagaggctagagaatggggagcaagaaaaataatgaggattgttttcttcactctttggaacatagggtcctctggtcagaggaaagggttcttttctcagagttttaggtgactgtatggtgacaatggtgtaagagtgcccctgatncatgactggggtttngc

SEQ ID NO: 19546 - DNA, 133 bp, Homo sapiens
  MAP TO AL050322.10; EXPRESSED IN PLACENTA, SIGNAL = 1.3; EXPRESSED IN HELA, SIGNAL = 1.7; EXPRESSED IN HBL100, SIGNAL =   3; EXPRESSED IN HEART, SIGNAL =   1; EXPRESSED IN BONE MARROW, SIGNAL = 3.5; EXPRESSED IN LUNG, SIGNAL = 1.2; EXPRESSED IN BRAIN, SIGNAL =   3; EXPRESSED IN ADULT LIVER, SIGNAL = 1.4; EXPRESSED IN BT474, SIGNAL = 2.3; EXPRESSED IN FETAL LIVER, SIGNAL = 1.7; EST_HUMAN HIT: AI079588.1, EVALUE 1.20e+00; NT HIT: Z11898.1, EVALUE 1.20e+00
ttccatcaccaccacctccactatctctaccacctctgtcttcaccaccacaaccaccaccaaccactgccttcacccccaccaccactgccatcacctccaccacctttacttccacctctactattatcag

SEQ ID NO: 19547 - DNA, 136 bp, Homo sapiens
  MAP TO AL035404.19; EXPRESSED IN BONE MARROW, SIGNAL = 0.93; EXPRESSED IN LUNG, SIGNAL = 1.2; EXPRESSED IN BRAIN, SIGNAL = 1.2; EXPRESSED IN FETAL LIVER, SIGNAL = 0.91; EXPRESSED IN HELA, SIGNAL = 1.3; EXPRESSED IN HEART, SIGNAL =   1; EXPRESSED IN BT474, SIGNAL =   1; EXPRESSED IN PLACENTA, SIGNAL = 1.2; NT HIT: AF181897.1, EVALUE 7.70e-02; EST_HUMAN HIT: AW866884.1, EVALUE 7.80e-02; SWISSPROT HIT: P52980, EVALUE 8.90e+00
gaacgccagctccatgcatctggggttccgttttcttcattgctgtatccagcacctacaagagaacctggcacagactcggtgccccatgaatattactggatggaggcagacagagctgatctctgtgtcctga

SEQ ID NO: 19548 - DNA, 180 bp, Homo sapiens
  MAP TO AC009311.1; EXPRESSED IN BONE MARROW, SIGNAL = 1.7; EXPRESSED IN LUNG, SIGNAL = 1.7; EXPRESSED IN BRAIN, SIGNAL = 1.3; EXPRESSED IN ADULT LIVER, SIGNAL = 1.4; EXPRESSED IN BT474, SIGNAL = 1.5; EXPRESSED IN FETAL LIVER, SIGNAL = 2.2; EXPRESSED IN PLACENTA, SIGNAL = 1.9; EXPRESSED IN HBL100, SIGNAL = 1.6; EXPRESSED IN HELA, SIGNAL = 2.3; EXPRESSED IN HEART, SIGNAL = 1.8; EST_HUMAN HIT: AW473941.1, EVALUE 5.00e-97; SWISSPROT HIT: P80217, EVALUE 8.00e-03; NT HIT: gi11431060, EVALUE 4.00e-97
atattttcaggaacatctaagaggacagtgcttctgacaggaatggaaggcattcaaatggatgaagaaattgtggaggatttaattaacattcactttcaacgggcaaagaatggaggtggagaagtagatgtggtcaagtgttctctaggtcaacctcacatagcatactttgaagaa

SEQ ID NO: 19549 - DNA, 454 bp, Homo sapiens
  MAP TO AC006371.2; EXPRESSED IN BRAIN, SIGNAL = 3.6; EXPRESSED IN FETAL LIVER, SIGNAL = 4.5; EXPRESSED IN BT474, SIGNAL = 3.4; EXPRESSED IN HBL100, SIGNAL = 2.3; EXPRESSED IN HELA, SIGNAL = 2.5; EXPRESSED IN HEART, SIGNAL =   3; EXPRESSED IN PLACENTA, SIGNAL = 3.3; EXPRESSED IN LUNG, SIGNAL = 3.4; EXPRESSED IN BONE MARROW, SIGNAL = 3.9; EXPRESSED IN ADULT LIVER, SIGNAL = 2.9; EST_HUMAN HIT: AW900281.1, EVALUE 7.30e-02; NT HIT: Y12488.1, EVALUE 4.50e+00; SWISSPROT HIT: O68827, EVALUE 7.80e+00
gacaagcaaaagtagagatgcatgccaaccaaagaggggcatattttcagggctgcttttctttcctggcctctcccatcttgatgaaaaggaccatgtgaagtgtgtgtgtgcatgtgcccaagcatgtgccttgtggttgggagctccatgtaaaacggctgttcttcttcttcttctcctccttctcctccttctttttcttcttcctcttctccttcccctctcctcctttcttcttcttcttctttcttcttctcctcctccttcttcctcctccttcctcctcctcttctcctcttcctcctcttcctcctcctcttcctcctcctctttctccttctccttcttcttcttcctcttccttcttctccttctcctcctcctccttcttcctctcctcctcctcctttttcctcttcttcttcctctccttctcctccttcttcctctt

SEQ ID NO: 19550 - DNA, 221 bp, Homo sapiens
  MAP TO AL109946.5; EXPRESSED IN PLACENTA, SIGNAL =   1; EXPRESSED IN HEART, SIGNAL = 1.1; EXPRESSED IN BONE MARROW, SIGNAL = 1.4; EXPRESSED IN LUNG, SIGNAL = 1.1; EXPRESSED IN BRAIN, SIGNAL = 1.2; EXPRESSED IN ADULT LIVER, SIGNAL = 1.3; NT HIT: AJ298105.1, EVALUE 1.30e-01; EST_HUMAN HIT: AI379086.1, EVALUE 4.00e-05; SWISSPROT HIT: P31792, EVALUE 1.00e-08
caatatcattcagagtaactattgcataccttgccttatgtatcccttgttctacaaaagaacttctgtctgtaaagagaatccagtttgggttctctaagagggtttccttgagatcctctctggtcacataggtctgtactactagctgttcacagtcatgttcaagcttcccagcttcctctgggaggaaggtggctggatttagggagggacaggtt

SEQ ID NO: 19551 - DNA, 487 bp, Homo sapiens
  MAP TO AL049757.14; EXPRESSED IN BONE MARROW, SIGNAL =  20; EXPRESSED IN LUNG, SIGNAL =  14; EXPRESSED IN BRAIN, SIGNAL =  12; EXPRESSED IN ADULT LIVER, SIGNAL =  12; EXPRESSED IN PLACENTA, SIGNAL =  32; EXPRESSED IN FETAL LIVER, SIGNAL =  26; EXPRESSED IN BT474, SIGNAL =  46; EXPRESSED IN HEART, SIGNAL =  10; EXPRESSED IN HELA, SIGNAL =  72; EXPRESSED IN HBL100, SIGNAL =  39; EST_HUMAN HIT: BF224161.1, EVALUE 0.00e+00; NT HIT: AF113210.1, EVALUE 0.00e+00; SWISSPROT HIT: P46777, EVALUE 4.00e-86
tcccttcagggcgccaaaaactttattgccagtggtagttctggcaagacctgcatccatacagcaggtgaaggcacctggctgaccatcagtactttccacattgtatttatcgccagtcacctccacttggccgtcatagatcttgtccatgccaaacctatcaagaagcctgcgggccagcagcaggccagtacaatatgcagcagcataatttgtcgggccaaccttcacaccgtattttggcagttcgtgtgcatatgccgcgcagactatcatatccccctctatacgggcataagcaatctgacaaatgatatctctgtcagttacacgaacaatcatcctatacttgggtgtgttgtatttatttttatcctgtatcaccaagcgtttccgagcatagtaatcagttttaccctctcgtcgtcttctaaatttcacttggtatctgttaaagtaggccttattcttaacaactttaaca

SEQ ID NO: 19552 - DNA, 806 bp, Homo sapiens
  MAP TO AP000427.1; EXPRESSED IN BONE MARROW, SIGNAL = 2.5; EXPRESSED IN LUNG, SIGNAL = 1.8; EXPRESSED IN BRAIN, SIGNAL = 9.8; EXPRESSED IN ADULT LIVER, SIGNAL = 2.3; EXPRESSED IN BT474, SIGNAL = 6.4; EXPRESSED IN FETAL LIVER, SIGNAL = 2.8; EXPRESSED IN PLACENTA, SIGNAL = 2.1; EXPRESSED IN HELA, SIGNAL = 3.2; EXPRESSED IN HBL100, SIGNAL = 1.7; EXPRESSED IN HEART, SIGNAL = 1.5; EST_HUMAN HIT: N48374.1, EVALUE 0.00e+00; NT HIT: gi11424711, EVALUE 0.00e+00; SWISSPROT HIT: P37617, EVALUE 1.50e+00
ttaggttttgatacggaaggcggtgcggcggagcgaatgcagggcaaccacgcaacagcccctgagcaaggccccgatgttatacacaggatccgttccccctctctgagtactgaatgcccacagaaccgtggggaccacgggggcagccacagccaggagatccaccaggaagctgctgctccagtactgcctcacgacgcccccgcgagccagtgggatgacaccatccaacctctcttccacgcaggctgcaaaatccagctctctcatgaggcggtttgcatgaacttctgcatccacattggcgtagggggtctccacgggagacaaaaggatggctgagtttggatttcttggagttaaatcaaccactaaggcagagagggactctgggaagctctccatcgagtctggttcagactcatcaggggacgccaagctcgagggacaggggtcctggagcttctgcagcacactctgaatgagctctgagatggctgggctgtagggcaccacgtcggtctgaacggctcgctccaccaccacactgccctcctcctgacccatgactatgggcagcagctccaggacgttagccccaggggtggaatgcacaagctccaggtcaccagattctgtggtggtggctgtcactatctcatcgaacaaatctgtgctgttggctatgctatctcctaccagtagctccctgtcagccccttcccccgtgacctgctcttccagagataacccatctgccattgtgtcaagaggggggttgagggttaagctcttctctgggg

SEQ ID NO: 19553 - DNA, 105 bp, Homo sapiens
  MAP TO AC010974.2; EXPRESSED IN BT474, SIGNAL = 3.4; EXPRESSED IN HBL100, SIGNAL =   3; EXPRESSED IN HELA, SIGNAL = 4.1; EXPRESSED IN HEART, SIGNAL = 3.1; EXPRESSED IN PLACENTA, SIGNAL = 4.8; EXPRESSED IN LUNG, SIGNAL = 3.3; EXPRESSED IN BRAIN, SIGNAL = 4.8; EXPRESSED IN BONE MARROW, SIGNAL =   4; EXPRESSED IN FETAL LIVER, SIGNAL = 2.8; EXPRESSED IN ADULT LIVER, SIGNAL = 5.7; SWISSPROT HIT: Q9Y6R4, EVALUE 2.70e-01; EST_HUMAN HIT: AA437183.1, EVALUE 5.00e-03; NT HIT: AL163268.2, EVALUE 1.40e-02
gagggcctcaggaagcttccaatcatgatggaaggtgaaggaggagcaggtgtctcaaatgcaagagcaggagcaagagagaaggtgggaggtgccacacacttt

SEQ ID NO: 19554 - DNA, 227 bp, Homo sapiens
  MAP TO AC009961.2; EXPRESSED IN BONE MARROW, SIGNAL =   2; EXPRESSED IN LUNG, SIGNAL = 2.3; EXPRESSED IN BRAIN, SIGNAL = 0.99; EXPRESSED IN FETAL LIVER, SIGNAL = 1.6; EXPRESSED IN ADULT LIVER, SIGNAL =   2; EXPRESSED IN PLACENTA, SIGNAL = 1.4; EXPRESSED IN HEART, SIGNAL = 1.1; NT HIT: gi11430992, EVALUE 1.00e-125; EST_HUMAN HIT: BF222170.1, EVALUE 1.00e-125; SWISSPROT HIT: P43121, EVALUE 5.80e-01
ataaccacattttaatatcagcattggtgattgctagcacggtaattttgacagttttgggagcaatcatttggttcctgtacaaaaaacattctgattctcgtttcaccacagttttttcaaccgcaccccaatcaccttataatgaagactgtgttttggtagttggagaagaaaatgaatatcctgttcaatttgactaagtttttggtaatcttgcactaaga

SEQ ID NO: 19555 - DNA, 163 bp, Homo sapiens
  MAP TO AP000507.1; EXPRESSED IN FETAL LIVER, SIGNAL =  11; EXPRESSED IN HBL100, SIGNAL = 9.3; EXPRESSED IN HELA, SIGNAL =  12; EXPRESSED IN HEART, SIGNAL =  11; EXPRESSED IN BONE MARROW, SIGNAL =  14; EXPRESSED IN LUNG, SIGNAL =  12; EXPRESSED IN ADULT LIVER, SIGNAL =  11; EXPRESSED IN BT474, SIGNAL = 8.4; EXPRESSED IN PLACENTA, SIGNAL =  12; EXPRESSED IN BRAIN, SIGNAL = 9.9; NT HIT: D26535.1, EVALUE 8.00e-02; EST_HUMAN HIT: AW957590.1, EVALUE 9.60e-02; SWISSPROT HIT: P28494, EVALUE 3.40e-01
ccaaagggcagaaatgtctaccgagtgctccaccagagaaaagaaatgagttcttccttcacaatccatgatccaatttttggttatagagttcagctgagcaataaaggcaacactaagaacaccatcaatatatagattacggattgtcatgtatgtgttc

SEQ ID NO: 19556 - DNA, 498 bp, Homo sapiens
  MAP TO AC007728.1; EXPRESSED IN LUNG, SIGNAL = 0.93; EXPRESSED IN BONE MARROW, SIGNAL = 1.2; EXPRESSED IN BRAIN, SIGNAL = 1.2; EXPRESSED IN ADULT LIVER, SIGNAL = 0.92; EXPRESSED IN BT474, SIGNAL = 1.2; EXPRESSED IN HBL100, SIGNAL =   1; EXPRESSED IN HEART, SIGNAL = 0.87; SWISSPROT HIT: P03386, EVALUE 4.00e-03; NT HIT: gi11545911, EVALUE 0.00e+00; EST_HUMAN HIT: AW845499.1, EVALUE 2.00e-91
cctctgggacggtgtgaagatcggcaacctgatttcatcacattcatactggctgacgaaaccccgctcccatgccaggtccagcatgttctccacatggctgtggagcctcctgacaatggctggccggtgactctgcaggtctcgggctgggtggagcgagtgggggtcccagcagccatgcagcttgggggactggctgtcggcctgggcttcttgggcagccgcgatgagcttctgacaggcccaagtacccttattccagacggtgtccagaaggcgcctggccaagtgggagagaggctggcccaggaggtggaagccctcgtagtcctcccaggagaggacctcccaggacagcagccagtccaggacactctcgaagccttccagggaccctgagaccagcagctcgaccagctggctcctctgtgcctgaaaagcctcctgcgagcacatttcacaacctggggaggagaacaaggtcagtgcgggact

SEQ ID NO: 19557 - DNA, 691 bp, Homo sapiens
  MAP TO AL031668.20; EXPRESSED IN PLACENTA, SIGNAL =  42; EXPRESSED IN HELA, SIGNAL =  58; EXPRESSED IN HBL100, SIGNAL = 1.5e+02; EXPRESSED IN HEART, SIGNAL =  14; EXPRESSED IN LUNG, SIGNAL =  32; EXPRESSED IN BONE MARROW, SIGNAL =  36; EXPRESSED IN BRAIN, SIGNAL = 6.9; EXPRESSED IN ADULT LIVER, SIGNAL =  21; EXPRESSED IN BT474, SIGNAL =  97; EXPRESSED IN FETAL LIVER, SIGNAL =  35; EST_HUMAN HIT: AI872407.1, EVALUE 0.00e+00; SWISSPROT HIT: P15880, EVALUE 2.00e-56; NT HIT: gi4506718, EVALUE 0.00e+00
gggcctgacacttagtaagtactcaacagatattaattcttccatgttggcccctaatttgagaccagctttttttttttttttcaggcttaattcagtttgtttttcttgtataaaaaccctatgctgtagccacagctggagcctgggtcctctgcatggagactctggtgtgggtcttgacgaggtggtcagtgaattcctgatagggagacttggtgaatatagtctccttccagaggtcgagggtcaggtagctgtaggtcttagagatggtgtcaaaggtggccttggcgaagttgccagggtggcagtgcagcccctggctgaggtgtggcagtcatcaataccagccatcatgaggagcttcttgggcacaggtgcggagacgatgccagtgcccctgggtgcagggatgaggtgcaccagcacagagccgcagcggcctgtcaccttgcaagggacggtgtgggcttgtccatcttgttcccccgtagcctctgcgcacggggacaatggagtgcttggtcaggatgacggacccgcggatggcagtagccacctccttggagcacttaacgcacagaccgacgtggccattgtagtccccggtggcaacaaacgccttgaacctggtgcgctggcccgcgcgggtctgcttctgcaccggcataatcttcaaaccctcttc

SEQ ID NO: 19558 - DNA, 320 bp, Homo sapiens
  MAP TO AF162757.1; EXPRESSED IN BONE MARROW, SIGNAL = 3.9; EXPRESSED IN LUNG, SIGNAL = 3.9; EXPRESSED IN BRAIN, SIGNAL = 2.7; EXPRESSED IN ADULT LIVER, SIGNAL = 3.1; EXPRESSED IN BT474, SIGNAL = 5.4; EXPRESSED IN FETAL LIVER, SIGNAL = 5.5; EXPRESSED IN PLACENTA, SIGNAL = 7.6; EXPRESSED IN HBL100, SIGNAL =   8; EXPRESSED IN HELA, SIGNAL = 5.7; EXPRESSED IN HEART, SIGNAL = 3.9; NT HIT: gi4505332, EVALUE 0.00e+00; SWISSPROT HIT: P49321, EVALUE 2.00e-23; EST_HUMAN HIT: BE409177.1, EVALUE 0.00e+00
catagttttcagattcaacaccaacttctccgagtttaagatgtgcctgggcaacataaagctgggcttttgtttcttgccttttaaaaacgatctttgctaaatccagtgtatcccaggcaagctctaggttcccaatctcctcctcttcattttcttgaagagacttgttttcaaggactgaatcatttggcatttcttcagccttatcattttctttatcatcctcttccaagccttcagtttcttcaccctcttttatctgttcgtcctctctcttttgtctcttcattagcagctatctgaactttgtcttcagg

SEQ ID NO: 19559 - DNA, 150 bp, Homo sapiens
  MAP TO NM_007104.1; EXPRESSED IN BONE MARROW, SIGNAL =  16; EXPRESSED IN FETAL LIVER, SIGNAL =  16; EXPRESSED IN ADULT LIVER, SIGNAL =  17; EXPRESSED IN HBL100, SIGNAL =  12; EXPRESSED IN HELA, SIGNAL =  18; EXPRESSED IN HEART, SIGNAL =  15; EXPRESSED IN BRAIN, SIGNAL =  12; EXPRESSED IN LUNG, SIGNAL =  13; EXPRESSED IN BT474, SIGNAL = 9.7; EXPRESSED IN PLACENTA, SIGNAL =  16; EST_HUMAN HIT: BE787947.1, EVALUE 5.10e-01; NT HIT: AL163302.2, EVALUE 7.30e-02; SWISSPROT HIT: P39367, EVALUE 5.10e+00
ctggatgctgctcttacaactgctgccctggctgtctctggaaattgggtggaactgctgctgccactcacctgaatcaattatgtgtgcttcctggttcatctttccaccttccaatacatctgattggtgtgccttggtcatgtgact

SEQ ID NO: 19560 - DNA, 83 bp, Homo sapiens
  MAP TO AC011415.1; EXPRESSED IN BT474, SIGNAL = 1.2; EXPRESSED IN FETAL LIVER, SIGNAL = 1.3; EXPRESSED IN HELA, SIGNAL =   1; EXPRESSED IN HBL100, SIGNAL = 1.3; EXPRESSED IN HEART, SIGNAL = 0.88; EXPRESSED IN BRAIN, SIGNAL = 1.6; EXPRESSED IN BONE MARROW, SIGNAL = 0.94; NT HIT: AB024336.1, EVALUE 5.70e-01; EST_HUMAN HIT: BE696604.1, EVALUE 2.50e-01
tcattggtcattgccatggcaaccagcagctgccgggccagcagcctctaccgcagcaggggtggggcactgggggaggggga

SEQ ID NO: 19561 - DNA, 253 bp, Homo sapiens
  MAP TO AL031651.32; EXPRESSED IN HBL100, SIGNAL = 1.5; EXPRESSED IN HELA, SIGNAL = 1.7; EXPRESSED IN HEART, SIGNAL = 4.1; EXPRESSED IN PLACENTA, SIGNAL =  58; EXPRESSED IN LUNG, SIGNAL =  17; EXPRESSED IN BRAIN, SIGNAL = 1.2; EXPRESSED IN BONE MARROW, SIGNAL = 1.4; EXPRESSED IN ADULT LIVER, SIGNAL = 3.3; EXPRESSED IN FETAL LIVER, SIGNAL = 2.7; EST_HUMAN HIT: AU140189.1, EVALUE 0.00e+00; SWISSPROT HIT: P21980, EVALUE 2.00e-43; NT HIT: M98478.1, EVALUE 0.00e+00
cctctgggtatttgtaggtgtgggtgatatcctcccgctcgtctcggcccacgctcttagtgctgatcttcagcccaacgatcagggaacggttgatggatttgtgcacagacccatcgtcctgctggatccagtctaccacgtcggcattgacctccgcaaagacaaagggcgcatcgtacttggtgctcaggtcgccctccttgatggcacgaactggaactgggccacagcagtacgtccctggcagagg

SEQ ID NO: 19562 - DNA, 267 bp, Homo sapiens
  MAP TO NM_006994.1; EXPRESSED IN PLACENTA, SIGNAL = 1.8; EXPRESSED IN BONE MARROW, SIGNAL = 1.5; EXPRESSED IN LUNG, SIGNAL = 4.5; EXPRESSED IN ADULT LIVER, SIGNAL = 1.9; EXPRESSED IN BT474, SIGNAL = 1.2; EXPRESSED IN HBL100, SIGNAL = 1.7; EXPRESSED IN HELA, SIGNAL = 1.7; EXPRESSED IN HEART, SIGNAL = 0.94; NT HIT: gi5901905, EVALUE 0.00e+00; EST_HUMAN HIT: AW591602.1, EVALUE 0.00e+00; SWISSPROT HIT: P18892, EVALUE 6.00e-19
ttcacgtcgaagtgaagggttatgaggatggagggatccatctggagtgcaggtccaccggctggtacccccaaccccaaatacagtggagcaacgccaagggagagaacatcccagctgtggaagcacctgtggttgcagatggagtgggcctatatgaagtagcagcatctgtgatcatgagaggcggctccggggagggtgtatcctgcatcatcagaaattccctcctcggcctggaaaagacagccagcatttccatcgcag

SEQ ID NO: 19563 - DNA, 198 bp, Homo sapiens
  MAP TO AC008000.7; EXPRESSED IN FETAL LIVER, SIGNAL = 1.2; EXPRESSED IN PLACENTA, SIGNAL = 1.1; EXPRESSED IN HELA, SIGNAL = 1.9; EXPRESSED IN HEART, SIGNAL = 1.2; EXPRESSED IN BRAIN, SIGNAL = 1.2; EXPRESSED IN BONE MARROW, SIGNAL = 1.1; SWISSPROT HIT: P55286, EVALUE 2.90e+00; NT HIT: AF030976.1, EVALUE 4.60e-01; EST_HUMAN HIT: BF209029.1, EVALUE 2.70e+00
agcgaatggacattgcgtccacatgcttgcaaagaaaccacccagcgctgcactatgcacattcaaatccacaatctagtgccacatccacagttgtgtgccacatctgtgggtgcatgtgcacgtctagatgtcaggtctgctatgagcacataactgtgaatgagctgggtgacaaatgctatcagggaggatcag

SEQ ID NO: 19564 - DNA, 302 bp, Homo sapiens
  MAP TO AL121760.1; EXPRESSED IN ADULT LIVER, SIGNAL = 1.7; EXPRESSED IN BT474, SIGNAL = 0.96; EXPRESSED IN FETAL LIVER, SIGNAL =   2; EXPRESSED IN PLACENTA, SIGNAL = 1.4; EXPRESSED IN HBL100, SIGNAL = 1.3; EXPRESSED IN HELA, SIGNAL = 1.4; EXPRESSED IN HEART, SIGNAL = 2.2; EXPRESSED IN BONE MARROW, SIGNAL = 1.7; EXPRESSED IN LUNG, SIGNAL = 1.1; EXPRESSED IN BRAIN, SIGNAL = 1.9; EST_HUMAN HIT: BF685184.1, EVALUE 1.10e+00; NT HIT: gi11434763, EVALUE 4.70e-02; SWISSPROT HIT: P14433, EVALUE 2.50e-02
acccatgtacatgtgcaagacagagtgaatctcacctgccacgtcctccacttctatcccgcccacctgcgactcacctggatggagaacaggagcatgatccagaccctggtgtcccctcgtcccctcaggccaccagaaatccagatgggacatactctctggagcacacgtggcaggcagaggccacgctggaggagcgtgagtttgcttgctgggtggtccacgatgagcagcccccactcaaggccaacgtcaccctgcaagcccaggtgcgcaggcaggggaaaggtgggtacagc

SEQ ID NO: 19565 - DNA, 212 bp, Homo sapiens
  MAP TO AC010872.2; EXPRESSED IN FETAL LIVER, SIGNAL = 2.9; EXPRESSED IN ADULT LIVER, SIGNAL =  11; EXPRESSED IN BT474, SIGNAL = 1.2; EXPRESSED IN HELA, SIGNAL =   1; EXPRESSED IN PLACENTA, SIGNAL = 1.1; EXPRESSED IN HEART, SIGNAL =   1; EXPRESSED IN HBL100, SIGNAL =   1; EXPRESSED IN BRAIN, SIGNAL = 2.6; NT HIT: M19824.1, EVALUE 1.00e-116; EST_HUMAN HIT: T84725.1, EVALUE 1.00e-54; SWISSPROT HIT: P04114, EVALUE 1.00e-29
ctctttggggaaggaatgataaacttcagcttcccagcttttagggcaacatgagcctccagacccgactcgtggaagaagttggtgttcatctggaccccactcctagcgaagtccggaatgatgatgcccatatttgtcacaaactccacagacacggagggttttgccaccagttcagcctgcatctataagtcagaaaacaacctatt

SEQ ID NO: 19566 - DNA, 139 bp, Homo sapiens
  MAP TO AC009498.2; EXPRESSED IN PLACENTA, SIGNAL = 3.1; EXPRESSED IN BONE MARROW, SIGNAL = 2.3; EXPRESSED IN BRAIN, SIGNAL = 2.2; EXPRESSED IN FETAL LIVER, SIGNAL = 2.8; EXPRESSED IN ADULT LIVER, SIGNAL = 2.2; EXPRESSED IN HBL100, SIGNAL = 1.4; EXPRESSED IN HELA, SIGNAL = 2.2; EXPRESSED IN HEART, SIGNAL = 2.4; EXPRESSED IN LUNG, SIGNAL = 2.1; EXPRESSED IN BT474, SIGNAL = 1.1; EST_HUMAN HIT: BF343401.1, EVALUE 7.30e+00; NT HIT: AF047575.1, EVALUE 2.70e-01; SWISSPROT HIT: P18503, EVALUE 2.30e+00
tccttgggcaaggcagtgtcccaaaattcatgctggctctgatggagggaggggagagctgggacagcagccaccacatggcactcttggagttccatgccttggtgcatcacacagaactggatttggacctcatctc

SEQ ID NO: 19567 - DNA, 95 bp, Homo sapiens
  MAP TO AL078583.15; EXPRESSED IN BONE MARROW, SIGNAL = 2.6; EXPRESSED IN LUNG, SIGNAL = 2.3; EXPRESSED IN BRAIN, SIGNAL = 2.5; EXPRESSED IN ADULT LIVER, SIGNAL = 3.9; EXPRESSED IN BT474, SIGNAL = 1.9; EXPRESSED IN FETAL LIVER, SIGNAL = 2.7; EXPRESSED IN PLACENTA, SIGNAL = 5.1; EXPRESSED IN HELA, SIGNAL = 3.2; EXPRESSED IN HBL100, SIGNAL = 2.6; EXPRESSED IN HEART, SIGNAL = 3.6; SWISSPROT HIT: Q12263, EVALUE 9.20e+00
ttctaacagtaaaactatcaaaggcaggaaccagacctgtaatgtcttttgtccttggaatgcttttcatgtttttcaacccaaacaatgataca

SEQ ID NO: 19568 - DNA, 340 bp, Homo sapiens
  MAP TO AC011481.1; EXPRESSED IN BONE MARROW, SIGNAL = 1.7; EXPRESSED IN HELA, SIGNAL = 5.5; EXPRESSED IN BRAIN, SIGNAL =   2; EXPRESSED IN LUNG, SIGNAL = 3.6; EXPRESSED IN BT474, SIGNAL = 7.2; EXPRESSED IN ADULT LIVER, SIGNAL = 3.1; EXPRESSED IN FETAL LIVER, SIGNAL =   2; EXPRESSED IN PLACENTA, SIGNAL = 4.1; EXPRESSED IN HEART, SIGNAL = 1.8; EXPRESSED IN HBL100, SIGNAL = 4.4; NT HIT: AF044962.1, EVALUE 0.00e+00; SWISSPROT HIT: P32507, EVALUE 2.00e-26; EST_HUMAN HIT: BF313617.1, EVALUE 0.00e+00
ccctcgtcctccaccgtgagcccgtggagggccagcgtggcgtcctggagctctgcctctgtgtcttgcccagtgctctgcttggcagagacgaaggacagccgctcgctgccaggcttcgggctggggaagctgggacccatcttagggtggaaggcggccacattctggtggttcgcaggtgcatctgggcgctgccaggtcaccagggagatgtacagtccaggaacaggtggcagcaggtggcacggcagctccacggtgcccccgagctggcctcgcacctcgggtagcacttgaactcgcacatcctgggctcctgggcagagaggacagagag

SEQ ID NO: 19569 - DNA, 386 bp, Homo sapiens
  MAP TO AP000511.1; EXPRESSED IN ADULT LIVER, SIGNAL =   2; EXPRESSED IN BT474, SIGNAL = 1.4; EXPRESSED IN FETAL LIVER, SIGNAL = 2.1; EXPRESSED IN HELA, SIGNAL = 1.5; EXPRESSED IN PLACENTA, SIGNAL =   2; EXPRESSED IN HBL100, SIGNAL = 1.4; EXPRESSED IN HEART, SIGNAL = 2.2; EXPRESSED IN BRAIN, SIGNAL = 1.9; EXPRESSED IN BONE MARROW, SIGNAL = 2.1; EXPRESSED IN LUNG, SIGNAL = 1.2; EST_HUMAN HIT: BF684185.1, EVALUE 3.60e-01; NT HIT: gi4759067, EVALUE 2.10e-01; SWISSPROT HIT: P04929, EVALUE 7.00e-03
cagacaaaaactcagtcctactgacaatccaacagcagccacaactgcagccagggaaatgaggatgatagcccagggctgtaaatatccacttggtttgatcacgtttgtgggtgtgtggctcatgctaactgtgtttgtgcccatggacaccgggcctgtttcctggaaggtgctgctggttggctcacgggtggatcctgtggtggtcctgacgccgtgggctgaggtggtagatgatgctcccatagtggatgtacccaggccagaggtgtttaagactattcctggcacagtatggctggcagcagaggccgtgaagtccattccaggggccatggtgacagagctggaggcagtgagtctggttccagtggttctggtgc

SEQ ID NO: 19570 - DNA, 183 bp, Homo sapiens
  MAP TO AL080313.13; EXPRESSED IN FETAL LIVER, SIGNAL = 1.2; EXPRESSED IN HEART, SIGNAL = 1.1; EXPRESSED IN BONE MARROW, SIGNAL = 0.95; EXPRESSED IN BRAIN, SIGNAL = 0.96; EST_HUMAN HIT: AA398099.1, EVALUE 1.00e-44; SWISSPROT HIT: Q50315, EVALUE 2.30e+00; NT HIT: AF159143.1, EVALUE 3.60e-01
ataatggcattggctgtaccagtggcccagatccttcacctgcagaagagcttcccagagaggagcaagccttcctgccgtcacctctggtgtcatcctataggacattaaaaccaactcaagattgtgttgaaaactgttttccttttgaggatgctaataagaacaagatcatatcaacgg

SEQ ID NO: 19571 - DNA, 145 bp, Homo sapiens
  MAP TO AC008080.1; EXPRESSED IN BT474, SIGNAL = 2.3; EXPRESSED IN FETAL LIVER, SIGNAL = 1.5; EXPRESSED IN HEART, SIGNAL = 1.5; EXPRESSED IN LUNG, SIGNAL = 1.4; EXPRESSED IN BRAIN, SIGNAL = 2.1; EXPRESSED IN ADULT LIVER, SIGNAL = 1.5; EXPRESSED IN PLACENTA, SIGNAL = 1.6; EXPRESSED IN HELA, SIGNAL = 1.9; EXPRESSED IN HBL100, SIGNAL = 1.6; EXPRESSED IN BONE MARROW, SIGNAL = 1.6; SWISSPROT HIT: P25733, EVALUE 5.30e+00; EST_HUMAN HIT: AA230303.1, EVALUE 8.00e-70
ctctttcccaaataggcatgttgttgtttcaaattaacatctgtgcttactgcagaatagtgaatgccatcttcttttgccccgctgaccctgatggtgtcactgaggctttcaaagcagagtgaccaggcacagctatagtttt

SEQ ID NO: 19572 - DNA, 186 bp, Homo sapiens
  MAP TO AL117672.1; EXPRESSED IN HBL100, SIGNAL = 0.97; EXPRESSED IN HELA, SIGNAL = 1.1; EXPRESSED IN PLACENTA, SIGNAL = 1.2; EXPRESSED IN HEART, SIGNAL = 1.7; EXPRESSED IN BRAIN, SIGNAL = 1.7; EXPRESSED IN BONE MARROW, SIGNAL = 1.2; EXPRESSED IN LUNG, SIGNAL = 0.94; EXPRESSED IN BT474, SIGNAL = 1.8; EXPRESSED IN FETAL LIVER, SIGNAL = 1.2; EXPRESSED IN ADULT LIVER, SIGNAL = 1.4; EST_HUMAN HIT: AW139043.1, EVALUE 4.40e-01; NT HIT: gi11437370, EVALUE 1.00e-100; SWISSPROT HIT: Q00664, EVALUE 3.70e+00
ctttctgatgaggagtccagtatgcctctcgctggcatgaaaaagtatgctgatgagaagtcagaaagagcttcatcctctgagaaaaatgagagccattctgccactaaatcagctttaattcagaaactgatgcaagatattcagcaccaagacaactatgaagccatatgggaaaaaatagag

SEQ ID NO: 19573 - DNA, 91 bp, Homo sapiens
  MAP TO AC011416.1; EXPRESSED IN HBL100, SIGNAL = 0.98; EXPRESSED IN PLACENTA, SIGNAL = 1.1; EXPRESSED IN LUNG, SIGNAL = 2.2; EXPRESSED IN BRAIN, SIGNAL = 1.3; EXPRESSED IN BONE MARROW, SIGNAL = 0.99; EXPRESSED IN FETAL LIVER, SIGNAL = 0.96; EXPRESSED IN ADULT LIVER, SIGNAL = 1.1; EXPRESSED IN BT474, SIGNAL = 1.4; EXPRESSED IN HEART, SIGNAL = 0.96; NT HIT: X94232.1, EVALUE 1.60e-01
accccaacactccaggagatacagaaaagacgaaggaagagcgggaagcagaggagcaggagagaagcaatgtacacacaattcccccagg

SEQ ID NO: 19574 - DNA, 224 bp, Homo sapiens
  MAP TO AB020871.1; EXPRESSED IN HBL100, SIGNAL = 1.1; EXPRESSED IN HEART, SIGNAL = 1.1; EXPRESSED IN BONE MARROW, SIGNAL =   1; EXPRESSED IN LUNG, SIGNAL = 4.7; EXPRESSED IN BRAIN, SIGNAL = 1.3; EXPRESSED IN FETAL LIVER, SIGNAL = 1.1; NT HIT: gi11467282, EVALUE 3.40e-02
gaaaatactagctactatgaaagtttttatagaattaaaatactgtacatcaagttctaggtacatagtagaaaataaacaaagaaaattattcttttccttctcctccttctcctcctcctcctctttctcttcctcctccttctccttctcttcctcttcttcctccttctcctcttcttctttcccactactttttgtttttattattattgtcactatta

SEQ ID NO: 19575 - DNA, 131 bp, Homo sapiens
  MAP TO AC009954.1; EXPRESSED IN PLACENTA, SIGNAL = 1.2; EXPRESSED IN HBL100, SIGNAL = 1.7; EXPRESSED IN HELA, SIGNAL = 2.6; EXPRESSED IN HEART, SIGNAL = 1.5; EXPRESSED IN BRAIN, SIGNAL = 0.92; EXPRESSED IN BONE MARROW, SIGNAL = 0.91; EXPRESSED IN LUNG, SIGNAL = 7.1; EXPRESSED IN ADULT LIVER, SIGNAL = 3.3; EXPRESSED IN BT474, SIGNAL = 1.2; EXPRESSED IN FETAL LIVER, SIGNAL =   1; EST_HUMAN HIT: AV647851.1, EVALUE 3.00e-33; SWISSPROT HIT: P10265, EVALUE 5.00e-09
cggcacaatcaggagctgtgctataagctctcctggctctgctttgcagggaacagaagtggatataacaatttgaatttccacattgtaatctgaatcaatgactcctgtttgtacttgtatccctttta

SEQ ID NO: 19576 - DNA, 207 bp, Homo sapiens
  MAP TO AL121716.1; EXPRESSED IN HBL100, SIGNAL = 1.5; EXPRESSED IN HEART, SIGNAL = 1.6; EXPRESSED IN LUNG, SIGNAL = 0.93; EXPRESSED IN FETAL LIVER, SIGNAL = 1.5; EXPRESSED IN ADULT LIVER, SIGNAL = 1.6; EXPRESSED IN PLACENTA, SIGNAL =   2; EXPRESSED IN HELA, SIGNAL = 2.2; EXPRESSED IN BRAIN, SIGNAL = 1.3; EXPRESSED IN BONE MARROW, SIGNAL = 2.2; EXPRESSED IN BT474, SIGNAL = 3.4; EST_HUMAN HIT: BF222312.1, EVALUE 1.00e-05; NT HIT: AF109906.1, EVALUE 1.10e-01; SWISSPROT HIT: Q93008, EVALUE 4.20e-01
aataagaaaactattttgattgaaaggcatcttcccatccaaatcaccttaaacaaggtcttcatggccaagcatacttttcactggaacaaaggctgtgagttctcctctttccttccacaggacaaggaggaggactttaagacagtgattttggagggattggagatggccaagcatcaggtgagggtggctgtttcatgctta

SEQ ID NO: 19577 - DNA, 361 bp, Homo sapiens
  MAP TO AL117348.2; EXPRESSED IN BT474, SIGNAL = 3.4; EXPRESSED IN FETAL LIVER, SIGNAL = 1.7; EXPRESSED IN ADULT LIVER, SIGNAL = 2.1; EXPRESSED IN HELA, SIGNAL =  88; EXPRESSED IN PLACENTA, SIGNAL = 1.8; EXPRESSED IN HBL100, SIGNAL = 1.5; EXPRESSED IN HEART, SIGNAL = 1.8; EXPRESSED IN BRAIN, SIGNAL = 2.2; EXPRESSED IN BONE MARROW, SIGNAL = 1.8; EXPRESSED IN LUNG, SIGNAL = 1.6; NT HIT: gi11424207, EVALUE 5.00e-70; EST_HUMAN HIT: BE830100.1, EVALUE 2.00e-52; SWISSPROT HIT: Q28983, EVALUE 2.80e-01
taggtggccatggacttctcctggaaggtgacgaaggccattcccaggggctggtcctggacgtggcgttcttcctctgtgatcctctccagcagcctgtccttcatccgtgtgtagtaagagatggcgtcttcctgccacaagacacatcccattgggatgacgtggccccatgctggtatctggggcaccccgatgccaatgcctctgctcccagccggggggtgggacccttacccactcacagcccagcacttcacagcagcaaaactggccacagggcttggggttgatgagggtccgctggcctgtcttcacctgcaggtttgtgtaataggtcaggctcttctcagtcttcttt

SEQ ID NO: 19578 - DNA, 227 bp, Homo sapiens
  MAP TO AL035106.25; EXPRESSED IN BONE MARROW, SIGNAL = 2.3; EXPRESSED IN BRAIN, SIGNAL = 1.9; EXPRESSED IN ADULT LIVER, SIGNAL = 2.4; EXPRESSED IN BT474, SIGNAL = 3.9; EXPRESSED IN FETAL LIVER, SIGNAL = 2.3; EXPRESSED IN PLACENTA, SIGNAL = 1.7; EXPRESSED IN HELA, SIGNAL = 1.5; EXPRESSED IN HBL100, SIGNAL = 2.2; EXPRESSED IN HEART, SIGNAL =   2; EXPRESSED IN LUNG, SIGNAL =   4; EST_HUMAN HIT: AF114028.1, EVALUE 6.00e-50; SWISSPROT HIT: P32873, EVALUE 5.10e+00; NT HIT: AB037836.1, EVALUE 2.00e-77
cggattaccatagcaacggctataccgtcaccaacggctggaagatccacaacacggccaagaataagtggtttgtctgcatggccaagacggcagaggagaagcagaagtggctggatgccatcatccgcgagcgggagcagcgcgagagtgagcagcagctttggggtgctcgcctgggatccctgagctatgcgtggcttcttctgagtgggggctgtgtctag

SEQ ID NO: 19579 - DNA, 153 bp, Homo sapiens
  MAP TO AL121748.1; EXPRESSED IN BT474, SIGNAL = 2.4; EXPRESSED IN HELA, SIGNAL =   2; EXPRESSED IN PLACENTA, SIGNAL = 1.3; EXPRESSED IN HBL100, SIGNAL = 1.8; EXPRESSED IN HEART, SIGNAL = 1.9; EXPRESSED IN LUNG, SIGNAL =  17; EXPRESSED IN BRAIN, SIGNAL = 1.8; EXPRESSED IN BONE MARROW, SIGNAL = 1.1; EXPRESSED IN ADULT LIVER, SIGNAL = 1.1; EXPRESSED IN FETAL LIVER, SIGNAL = 1.9; SWISSPROT HIT: P03378, EVALUE 8.70e+00; NT HIT: U95206.1, EVALUE 1.40e+00; EST_HUMAN HIT: AA223252.1, EVALUE 3.50e-01
ctctggggatttcacatagaaacttcactcgcggggcctttttccttggtgcttttgtgctatcttgtaagaaagtgcagcccacagggggagataagatgaagcccaaacggttcatctttcatgtccctccagtctttgaaggaaatatct

SEQ ID NO: 19580 - DNA, 189 bp, Homo sapiens
  MAP TO AC007558.3; EXPRESSED IN HELA, SIGNAL =   4; EXPRESSED IN LUNG, SIGNAL = 3.1; EXPRESSED IN BRAIN, SIGNAL =   4; EXPRESSED IN BT474, SIGNAL = 2.3; EXPRESSED IN ADULT LIVER, SIGNAL = 5.4; EXPRESSED IN FETAL LIVER, SIGNAL = 3.9; EXPRESSED IN PLACENTA, SIGNAL = 5.2; EXPRESSED IN HEART, SIGNAL = 4.4; EXPRESSED IN HBL100, SIGNAL = 3.1; EXPRESSED IN BONE MARROW, SIGNAL = 4.9; NT HIT: gi6678002, EVALUE 3.80e-01; SWISSPROT HIT: P30212, EVALUE 7.40e-01
aagtatgtgctgttccaattcatgggctgctgtattcataatagtgatcatcacagctatgggtactgtttatgcactgccaagccctgtgctcagacgctttctagatactgcctctctgagctctccaatgagccatatttcctccattctaagacaaagctctcagatgatgtataccattaatat

SEQ ID NO: 19581 - DNA, 308 bp, Homo sapiens
  MAP TO AC009948.2; EXPRESSED IN HEART, SIGNAL =   7; EXPRESSED IN LUNG, SIGNAL = 2.3; EXPRESSED IN BT474, SIGNAL = 0.99; NT HIT: gi4507720, EVALUE 0.00e+00; EST_HUMAN HIT: AA192980.1, EVALUE 1.00e-24; SWISSPROT HIT: Q00872, EVALUE 5.00e-14
agttgtcaaagttttagataccccaggtcctccaaccaacattactgtgcaagatgtaaccaaagagtctgcagtgttatcctgggatgttcctgaaaacgatggtggagcaccagtgaagaattaccacatagaaaaacgtgaggccagcaagaaagcatgggtctctgtgaccaacaactgtaaccgcctctcctacaaagttaccaatttacaagaaggagctatctattacttcagagtctctggagaaaatgagtttggtgttggtataccagctgaaacaaaggaaggagtaaaaataacag

SEQ ID NO: 19582 - DNA, 144 bp, Homo sapiens
  MAP TO AC008013.8; EXPRESSED IN HBL100, SIGNAL = 3.7; EXPRESSED IN HELA, SIGNAL =   3; EXPRESSED IN PLACENTA, SIGNAL =   4; EXPRESSED IN HEART, SIGNAL = 4.2; EXPRESSED IN BRAIN, SIGNAL = 3.7; EXPRESSED IN BONE MARROW, SIGNAL = 3.7; EXPRESSED IN LUNG, SIGNAL = 3.8; EXPRESSED IN BT474, SIGNAL = 2.9; EXPRESSED IN FETAL LIVER, SIGNAL = 3.7; EXPRESSED IN ADULT LIVER, SIGNAL = 3.7; NT HIT: gi11424136, EVALUE 3.20e-01; EST_HUMAN HIT: W69330.1, EVALUE 8.40e-02; SWISSPROT HIT: P24734, EVALUE 6.70e+00
aatgagccagtgcaagagaagtgcctggcaccctgtgggcactgaacggatagcagctgccgaggcccccgccaccccctgctctaacccggtggtctcctgcaggtcgggggagcagccgtcctggctgtgggcatctggacc

SEQ ID NO: 19583 - DNA, 106 bp, Homo sapiens
  MAP TO AL035665.22; EXPRESSED IN BONE MARROW, SIGNAL = 3.2; EXPRESSED IN LUNG, SIGNAL = 1.9; EXPRESSED IN ADULT LIVER, SIGNAL = 2.2; EXPRESSED IN PLACENTA, SIGNAL = 1.9; EXPRESSED IN BRAIN, SIGNAL = 1.6; EXPRESSED IN FETAL LIVER, SIGNAL = 1.4; EXPRESSED IN BT474, SIGNAL = 1.1; EXPRESSED IN HEART, SIGNAL = 1.6; EXPRESSED IN HELA, SIGNAL = 1.2; EXPRESSED IN HBL100, SIGNAL = 1.7; EST_HUMAN HIT: BE795108.1, EVALUE 3.40e-01; NT HIT: U82695.2, EVALUE 5.80e-02
catgtgaagacagaggcaggcattggagtgacactgctaccagccaaggaatgtcaggagccaccagaagctggaagagcctaggcaggatcctacactaaacctc

SEQ ID NO: 19584 - DNA, 173 bp, Homo sapiens
  MAP TO AL096867.15; EXPRESSED IN ADULT LIVER, SIGNAL = 1.2; EXPRESSED IN HELA, SIGNAL = 1.8; EXPRESSED IN HEART, SIGNAL = 1.4; EXPRESSED IN LUNG, SIGNAL = 1.3; EST_HUMAN HIT: N39553.1, EVALUE 1.50e-01; SWISSPROT HIT: Q09358, EVALUE 5.00e+00; NT HIT: U67546.1, EVALUE 1.60e+00
tcataatatacaactgagtgaaggcatcttaattttcataatcattctacaactattatttatttggattttgatttggtttggttttgcaattgcacgtaacacctcacacagtttgttcatgcttatagttttctccataatttcagttatttcctcagaaaatggaattc

SEQ ID NO: 19585 - DNA, 357 bp, Homo sapiens
  MAP TO AC007690.11; EXPRESSED IN BONE MARROW, SIGNAL =  14; EXPRESSED IN LUNG, SIGNAL =  31; EXPRESSED IN BT474, SIGNAL =  76; EXPRESSED IN ADULT LIVER, SIGNAL =   6; EXPRESSED IN PLACENTA, SIGNAL =  17; EXPRESSED IN BRAIN, SIGNAL = 3.5; EXPRESSED IN FETAL LIVER, SIGNAL =  14; EXPRESSED IN HEART, SIGNAL =  14; EXPRESSED IN HELA, SIGNAL =  28; EXPRESSED IN HBL100, SIGNAL =  25; NT HIT: gi4506696, EVALUE 0.00e+00; EST_HUMAN HIT: BE563433.1, EVALUE 0.00e+00; SWISSPROT HIT: P17075, EVALUE 8.00e-58
atggcttttaaggataccggaaaagcacccgtggagccggaggtggcaattcaccgaattcgaatcaccctaacaagccgcagcgtaaaatccttggaaaaggtgggtgctgacttgatcagaggcgcaaaagcaaagaatctcaaagtgaaaggaggagttcgaatgccttccaagactttgagaatcactacaagaaaaactccttgtggtgaaggttctaagacgtgggatcgtttccagatgagaattcacaagcgactctttgacttgcacagtccttctgagattgttaagcagattacttccatcagtactgagccaggagttgaggtggaagtcaccattgcagatgct

SEQ ID NO: 19586 - DNA, 242 bp, Homo sapiens
  MAP TO AL121758.5; EXPRESSED IN HEART, SIGNAL = 1.8; EXPRESSED IN BT474, SIGNAL = 2.9; EXPRESSED IN HBL100, SIGNAL = 2.2; EXPRESSED IN HELA, SIGNAL = 2.4; EXPRESSED IN PLACENTA, SIGNAL = 2.3; EXPRESSED IN ADULT LIVER, SIGNAL = 1.9; EXPRESSED IN FETAL LIVER, SIGNAL = 2.1; EXPRESSED IN BRAIN, SIGNAL =   3; EXPRESSED IN LUNG, SIGNAL = 2.3; EXPRESSED IN BONE MARROW, SIGNAL = 2.5; SWISSPROT HIT: P36077, EVALUE 7.00e-07; NT HIT: L10183.1, EVALUE 2.30e+00; EST_HUMAN HIT: BE784636.1, EVALUE 2.00e-81
ctactgcaagtctggtgtggatgctcccaggtacacccttaggtctgagagagtggactggacaagcttggcggggatggtctctcgctgcagttgctggtaggccgcgtagcggtggcagcccccaaaggagtagaagtagtcacctccctgggcccctttgatccagaggacatcgatggggggcacgctgtctgggtcctcctggggagaagaggcacagagtcaatggacatggtaca

SEQ ID NO: 19587 - DNA, 96 bp, Homo sapiens
  MAP TO AJ009615.1; EXPRESSED IN LUNG, SIGNAL = 5.7; EXPRESSED IN BONE MARROW, SIGNAL = 6.6; EXPRESSED IN BRAIN, SIGNAL = 4.4; EXPRESSED IN HBL100, SIGNAL = 7.3; EXPRESSED IN HELA, SIGNAL = 7.7; EXPRESSED IN PLACENTA, SIGNAL = 3.7; EXPRESSED IN ADULT LIVER, SIGNAL = 5.3; EXPRESSED IN HEART, SIGNAL =   6; EXPRESSED IN BT474, SIGNAL = 5.9; EXPRESSED IN FETAL LIVER, SIGNAL = 6.9; EST_HUMAN HIT: AA558715.1, EVALUE 5.00e-09; SWISSPROT HIT: P71353, EVALUE 9.20e+00; NT HIT: AB017196.1, EVALUE 2.00e-07
gcagcccaggggtcacaccagtccttctgttctcagattgacagagacctctactctgaaggcttcgtgggggcctggacacctttggaagcctga

SEQ ID NO: 19588 - DNA, 120 bp, Homo sapiens
  MAP TO AP000010.2; EXPRESSED IN HBL100, SIGNAL = 2.4; EXPRESSED IN HELA, SIGNAL = 1.1; EXPRESSED IN PLACENTA, SIGNAL = 0.98; EXPRESSED IN HEART, SIGNAL = 1.7; EXPRESSED IN BT474, SIGNAL = 1.6; EXPRESSED IN BONE MARROW, SIGNAL = 1.6; EXPRESSED IN BRAIN, SIGNAL = 1.5; EST_HUMAN HIT: BE386363.1, EVALUE 1.00e-61; SWISSPROT HIT: P54138, EVALUE 4.00e+00
cagcgctgcctctgctcctgacagcccaccagcttcctcggagccttcctgctgcagccgctcagggagagcaggcctttcctccagccctgtggcctgcacagacctcctcagctgggc

SEQ ID NO: 19589 - DNA, 546 bp, Homo sapiens
  MAP TO AC004950.2; EXPRESSED IN BONE MARROW, SIGNAL = 2.3; EXPRESSED IN LUNG, SIGNAL = 3.3; EXPRESSED IN BRAIN, SIGNAL = 3.5; EXPRESSED IN HELA, SIGNAL = 4.2; EXPRESSED IN HBL100, SIGNAL = 5.2; EXPRESSED IN PLACENTA, SIGNAL = 3.7; EXPRESSED IN ADULT LIVER, SIGNAL = 3.8; EXPRESSED IN HEART, SIGNAL = 2.4; EXPRESSED IN BT474, SIGNAL = 2.9; EXPRESSED IN FETAL LIVER, SIGNAL = 4.7; EST_HUMAN HIT: BE856375.1, EVALUE 0.00e+00; SWISSPROT HIT: P34896, EVALUE 2.00e-84; NT HIT: X85980.1, EVALUE 0.00e+00
ggaggtccccacaaccacaccattgctggggttgctgtggccctgaagcaagctatgactctggaatttgaagtttatcagcaccatgtggtggccaactgcagagctctgtctgaggcactgacggagctgggctaccaaacagtcacaggttgttctgataaacatttgatcctcgtggatctccattcaatcaaaggcacagatggcagaagggctgagaaggtcctagaagcctgttctattgcctgcaacaagaacacctgcccagatgatagaaacactctacggcccagtggactgcggctggggaacccagcactgacatctcttggacttttggaaaaaggcttccaaaaggtagcccactttatccacagagggatagagctaaccctgcagatccagagcaacgctggcatcagagccaccctgaaagagttcaaggagagactagcagggcataaataccaggggtgtgtgcaggctctccaggaggaggttgagagcttcactctcttccctctgcctggcctgcctgacttc

SEQ ID NO: 19590 - DNA, 434 bp, Homo sapiens; identical to SEQ ID NO: 2806
  MAP TO AL020991.1; EXPRESSED IN BONE MARROW, SIGNAL =   3; EXPRESSED IN BRAIN, SIGNAL = 1.3; EXPRESSED IN PLACENTA, SIGNAL = 1.3; EXPRESSED IN HBL100, SIGNAL = 1.3; EXPRESSED IN HELA, SIGNAL = 1.3; EXPRESSED IN HEART, SIGNAL = 1.3; EXPRESSED IN ADULT LIVER, SIGNAL = 1.7; EXPRESSED IN BT474, SIGNAL = 1.4; EXPRESSED IN FETAL LIVER, SIGNAL = 2.3; EXPRESSED IN LUNG, SIGNAL = 1.4; EST_HUMAN HIT: T81302.1, EVALUE 2.00e-85; NT HIT: AF068624.1, EVALUE 0.00e+00; SWISSPROT HIT: P22557, EVALUE 2.00e-03

SEQ ID NO: 19591 - DNA, 106 bp, Homo sapiens
  MAP TO AL121763.5; EXPRESSED IN PLACENTA, SIGNAL = 0.95; EXPRESSED IN HEART, SIGNAL = 1.1; EXPRESSED IN BT474, SIGNAL = 1.5; EXPRESSED IN BONE MARROW, SIGNAL = 1.5; EXPRESSED IN BRAIN, SIGNAL = 1.1; EXPRESSED IN HBL100, SIGNAL = 2.1; NT HIT: D26105.1, EVALUE 3.60e+00; EST_HUMAN HIT: BF030094.1, EVALUE 5.30e+00
catccaataaaacagtactcagcaccatctttctgagatacaaagccaaccgtgacatgttctcgacttccattgaggtcttcctttataggaaattccccacttc

SEQ ID NO: 19592 - DNA, 761 bp, Homo sapiens
  MAP TO AC004049.1; EXPRESSED IN HEART, SIGNAL = 1.1; EXPRESSED IN PLACENTA, SIGNAL = 1.9; EXPRESSED IN ADULT LIVER, SIGNAL = 1.5; EXPRESSED IN BT474, SIGNAL = 1.3; EXPRESSED IN FETAL LIVER, SIGNAL = 1.6; EXPRESSED IN BRAIN, SIGNAL = 1.2; EXPRESSED IN BONE MARROW, SIGNAL = 1.9; EXPRESSED IN LUNG, SIGNAL = 1.7; EXPRESSED IN HBL100, SIGNAL = 1.3; EXPRESSED IN HELA, SIGNAL = 1.4; SWISSPROT HIT: Q15973, EVALUE 3.10e+00; NT HIT: AB040960.1, EVALUE 0.00e+00; EST_HUMAN HIT: AI274270.1, EVALUE 0.00e+00
tccagaattgaaaaacttacatctgtgtgaagccaaagaggcctttgagattggcctcctcaccaagagagatgatgagcctgttactggaaaacaggagcttcacagctttgtcaaagctgctttcggtctcaccacagtgcacagaaggctccatggggagacagggacggtccatgcagcaagtcagctctgtaaggaagcaatggggaagctgtacaatttcagcacttcctccagaagtcaggacagagaagctctgtctcaagaagttatgtctgtgattgcccaggtgaaggaacatttacaagttcaaagcttctcaaatgtagatgacagatcttatgttcccgagagtttcgagtgcaggttggataaacttatcttgcatgggcaaggggatttccaaaaaatccttgacacctattcacagcaccatacttcggtgtgtgaagtatttgaaagtgattgtggaaacaacaaaaatgaacagaaagatgcaaaaacaggagtctgcatcactgctctaaaaacagaaataaaaaacatagatactgtgagtactactcaagaaaagccacattgtcaaagagacacaggaatatcttcctccctaatgggtaagaatgttcagagggaactcagaaggggaggaaggagaaactggacccattctgatgcatttcgagtctccttggatcaagatgtggagactgagactgagccatcggactacagcaatggtgagggagctgttttca

SEQ ID NO: 19593 - DNA, 357 bp, Homo sapiens
  MAP TO AC006328.3; EXPRESSED IN PLACENTA, SIGNAL = 7.2; EXPRESSED IN LUNG, SIGNAL = 1.2; EXPRESSED IN HELA, SIGNAL = 0.97; EXPRESSED IN BRAIN, SIGNAL =   1; EXPRESSED IN HEART, SIGNAL =   1; EXPRESSED IN BT474, SIGNAL = 0.88; EXPRESSED IN HBL100, SIGNAL =   2; EXPRESSED IN FETAL LIVER, SIGNAL = 0.95; EXPRESSED IN BONE MARROW, SIGNAL =   1; EXPRESSED IN ADULT LIVER, SIGNAL = 0.84; SWISSPROT HIT: Q00657, EVALUE 1.00e-41; EST_HUMAN HIT: BE974452.1, EVALUE 3.30e-01; NT HIT: gi4503098, EVALUE 1.00e-110
gaagacctcagtgtcaatggccagaggtgggggcttcgggaagccttgctgacacacaacatggcggcaggctgcagactggaggaggtggaggagtatgaggacaatacctatggccattatgaagctttctccaccctggcccccagggcttggctgtccatggatctagctgagccatgcatgcttgagccagggctgcctcctgtctttaccaatttcacccagctgctgactatcagcccagtggtggtgaccgagggtggcacagccgagtggtggcatgtgcagcccatgctggccctgatggaggctgaactgcataaatcccaggtgctgttcagcgtgacctgaggg

SEQ ID NO: 19594 - DNA, 741 bp, Homo sapiens
  MAP TO AC006313.1; EXPRESSED IN LUNG, SIGNAL = 2.9; EXPRESSED IN BRAIN, SIGNAL = 3.3; EXPRESSED IN HBL100, SIGNAL = 3.4; EXPRESSED IN HELA, SIGNAL = 3.2; EXPRESSED IN HEART, SIGNAL = 2.8; EXPRESSED IN PLACENTA, SIGNAL = 2.1; EXPRESSED IN BT474, SIGNAL = 1.9; EXPRESSED IN ADULT LIVER, SIGNAL = 4.4; EXPRESSED IN FETAL LIVER, SIGNAL = 2.6; EXPRESSED IN BONE MARROW, SIGNAL = 3.7; NT HIT: AF127861.1, EVALUE 2.00e-06; EST_HUMAN HIT: AW386129.1, EVALUE 1.20e-01; SWISSPROT HIT: P23266, EVALUE 2.00e-76
actctctgaatttattctcttgggactctcctctcggtctgaagaccagaggccactctttgccctctttcttatcatatacctggtcactttgatgggaaatctgctcatcatcttggctatccactctgatcctcgacttcaaaaccctatgtattttttcctaagcatcttgtcctttgctgatatttgctacacaacagtcatagtcccaaagatgctcgtgaacttcttatcagagaaaaagaccatttcctatgctgaatgtctggcacagatgtatttcttcctggtttttggaaacatagatagttatctcctggcggctatggccatcaaccgctgtgtagccatttgtaacccattccattatgtcactgttatgaaccgcagatgctgtgtgttgctactagcattccccatcactttctcctatttccactctctcctacatgtcctcctggtgaatcggctcaccttttgtacatcaaatgttatccatcattttttttgtgatgtcaaccctgtgctgaaactgtcctgctcctccacctttgtcaatgaaattgtggccatgacagaagggctggcctctgtgatggctccatttgtctgtatcatcatctcttatctaagaattctcatcgctgttctcaagattccctcagcagctggaaaacacaaagccttctccacctgcagctcccatctcactgtggtgattctgttttatgggagtat

SEQ ID NO: 19595 - DNA, 237 bp, Homo sapiens
  MAP TO AL033530.1; EXPRESSED IN PLACENTA, SIGNAL = 1.2; EXPRESSED IN ADULT LIVER, SIGNAL = 1.2; EXPRESSED IN BT474, SIGNAL = 1.4; EXPRESSED IN HBL100, SIGNAL = 1.4; EXPRESSED IN HELA, SIGNAL = 1.4; EXPRESSED IN HEART, SIGNAL = 1.5; EXPRESSED IN FETAL LIVER, SIGNAL = 1.2; EXPRESSED IN BRAIN, SIGNAL = 1.3; EXPRESSED IN LUNG, SIGNAL = 1.5; EXPRESSED IN BONE MARROW, SIGNAL = 1.4; EST_HUMAN HIT: BE870817.1, EVALUE 2.10e-01; SWISSPROT HIT: P27176, EVALUE 3.80e-01; NT HIT: D12765.1, EVALUE 1.40e-01
ggcttctgaagatctcttccaggaagcagatgaggagtttccattgcatagctcctctgccagctcatttcagtttgaattcctcctcctcatacggcagcatttttgttgtcttcgtgaaaatgctatttggggttcttattcaggttttctacctctgtgtttcaaggatagtatctttacacttatgcttgatatgcagactttgcacatttttcatctcgcactcgatcccag

SEQ ID NO: 19596 - DNA, 347 bp, Homo sapiens; identical to SEQ ID NO: 2813
  MAP TO AL031595.4; EXPRESSED IN HBL100, SIGNAL = 3.4; EXPRESSED IN HELA, SIGNAL = 3.6; EXPRESSED IN PLACENTA, SIGNAL = 4.1; EXPRESSED IN HEART, SIGNAL = 2.7; EXPRESSED IN FETAL LIVER, SIGNAL = 2.9; EXPRESSED IN ADULT LIVER, SIGNAL = 3.2; EXPRESSED IN BT474, SIGNAL = 3.4; EXPRESSED IN BRAIN, SIGNAL = 3.2; EXPRESSED IN BONE MARROW, SIGNAL = 3.8; EXPRESSED IN LUNG, SIGNAL =   3; SWISSPROT HIT: P45925, EVALUE 2.30e+00; NT HIT: AF151171.1, EVALUE 3.40e+00; EST_HUMAN HIT: AA431157.1, EVALUE 2.00e-69

SEQ ID NO: 19597 - DNA, 524 bp, Homo sapiens
  MAP TO AL022326.1; EXPRESSED IN BONE MARROW, SIGNAL = 0.98; EXPRESSED IN LUNG, SIGNAL = 1.2; EXPRESSED IN HBL100, SIGNAL = 1.2; EXPRESSED IN HELA, SIGNAL = 1.2; EXPRESSED IN HEART, SIGNAL = 1.1; EXPRESSED IN FETAL LIVER, SIGNAL = 1.1; EXPRESSED IN BT474, SIGNAL = 1.1; NT HIT: AJ238852.1, EVALUE 0.00e+00; SWISSPROT HIT: P39023, EVALUE 2.00e-30; EST_HUMAN HIT: BF683200.1, EVALUE 1.00e-102
gctttttaaggcatccattagtttaagctcccccattcacagggactgactaacataattccaagctcccctttgcagttatcagtaggctacaaagagcaaagggtccaggaacgtgttaagaagttgtcccctggccctccgctatcccagccacttctgaccacaaggctgttctcagaaggaaggcagtagagaatggttctacactgtccgattcgggcgctgtacccagcgctcactctgagcctcatcaacgaacagctgggcctgaaaccacttctcccccaggtttgcacagcaactcaagccaccgcaaagctcacctttgtagcctttgcccttggtcaccccgatgacgtcgatcatctcatcctgcccaaacacttggttcacaggtacctgctgctcaagcctctcgcgggcccagtccagcttctcggccacagtgcctccgttcacctggatctccatcaggtgggccttcttctggcgcagaggaagcaggcgcatctaggagaagg

SEQ ID NO: 19598 - DNA, 714 bp, Homo sapiens
  MAP TO AC006475.3; EXPRESSED IN BONE MARROW, SIGNAL = 3.2; EXPRESSED IN HELA, SIGNAL = 2.3; EXPRESSED IN PLACENTA, SIGNAL = 4.2; EXPRESSED IN BT474, SIGNAL = 2.4; EXPRESSED IN BRAIN, SIGNAL = 2.6; EXPRESSED IN HEART, SIGNAL = 2.2; EXPRESSED IN HBL100, SIGNAL = 2.3; EXPRESSED IN ADULT LIVER, SIGNAL = 3.5; EXPRESSED IN FETAL LIVER, SIGNAL = 2.4; EXPRESSED IN LUNG, SIGNAL = 3.3; NT HIT: AL163201.2, EVALUE 0.00e+00; SWISSPROT HIT: Q02952, EVALUE 3.80e+00; EST_HUMAN HIT: AV750850.1, EVALUE 0.00e+00
ctgtttggaccgaggtctactaggagaaaattttctcttagtaatagctggtttacccatgccaatttttggagtgactgagatgtaagttgttggcatgatgtttccagcagaggaactaagagctgaagggtaattatgcagcatgtcatgtgaaggcaagtctgaagaaggtgttggtgaggaagacacatctgccttgcttatgtctgctgataatgaaaatgatgactctgtctcagatgataactttatagatttgcctccttggtatgaaacatctttcacacaaccctcaattgtaggagtcatttcagagtccatcaatccagtagaaagttcagaatcttctttctgttccttttctccttgtagcctttctataaccaactgttcctcaggacataatgaagtgctttcctcatgtggggacactaaggtttctagtggaagagtgacagattcaatgacaaattttggaggccttgattcttctttggataccactgttttaggttcctctaacaactgcagttgctcttgctgcacagtgatctggtgtgtaacgacttcaatgttttctgtcacttccattttatcttcaatttgatcttcgccacaaatatgcttcacttcagaagacattttcatttcttcactatcagtctcattagaaatctgtttttccaattcggtattcactgtatgttggga

SEQ ID NO: 19599 - DNA, 89 bp, Homo sapiens
  MAP TO AL033539.17; EXPRESSED IN BONE MARROW, SIGNAL = 1.6; EXPRESSED IN HEART, SIGNAL = 1.4; EXPRESSED IN FETAL LIVER, SIGNAL = 1.2; EXPRESSED IN ADULT LIVER, SIGNAL = 1.9; EXPRESSED IN BT474, SIGNAL = 1.8; EXPRESSED IN LUNG, SIGNAL = 1.5; EXPRESSED IN PLACENTA, SIGNAL = 1.6; EXPRESSED IN HELA, SIGNAL = 1.5; EXPRESSED IN HBL100, SIGNAL = 1.6; EXPRESSED IN BRAIN, SIGNAL = 1.5; NT HIT: U04439.1, EVALUE 4.70e-02; EST_HUMAN HIT: AV732578.1, EVALUE 5.00e-43; SWISSPROT HIT: O84546, EVALUE 3.10e+00
cttcccaggtcctctgaaagaatctggaggaaatgatgatgctcaggagacaattcatgatcactcggaatttctgacaaccatggcaa

SEQ ID NO: 19600 - DNA, 181 bp, Homo sapiens
  MAP TO AL109809.14; EXPRESSED IN PLACENTA, SIGNAL = 6.7; EXPRESSED IN ADULT LIVER, SIGNAL =   7; EXPRESSED IN BT474, SIGNAL = 5.5; EXPRESSED IN FETAL LIVER, SIGNAL =   6; EXPRESSED IN BRAIN, SIGNAL =   5; EXPRESSED IN LUNG, SIGNAL = 6.4; EXPRESSED IN BONE MARROW, SIGNAL = 4.3; EXPRESSED IN HEART, SIGNAL =   5; EXPRESSED IN HELA, SIGNAL = 6.2; EXPRESSED IN HBL100, SIGNAL = 5.4; SWISSPROT HIT: P01691, EVALUE 1.70e+00; NT HIT: AB023430.1, EVALUE 8.00e-15; EST_HUMAN HIT: BE890577.1, EVALUE 2.00e-19
ctttcccaagatagcttgcatttcagacatcacaaagagaaacaatacagacttttccatgtgcatcactagcatcacaagagccaacactggcacctacaactgtgtgaagttctggaaagggggccctgacatggagcttaaatctggaccaggcactgagttgtctgtgcatagtgag

SEQ ID NO: 19601 - DNA, 186 bp, Homo sapiens
  MAP TO AL118499.5; EXPRESSED IN HBL100, SIGNAL = 5.2; EXPRESSED IN HELA, SIGNAL = 5.3; EXPRESSED IN FETAL LIVER, SIGNAL = 5.4; EXPRESSED IN HEART, SIGNAL = 4.6; EXPRESSED IN PLACENTA, SIGNAL = 5.6; EXPRESSED IN ADULT LIVER, SIGNAL = 5.5; EXPRESSED IN BT474, SIGNAL = 5.5; EXPRESSED IN BRAIN, SIGNAL = 4.9; EXPRESSED IN LUNG, SIGNAL = 5.7; EXPRESSED IN BONE MARROW, SIGNAL = 4.5; NT HIT: L41561.1, EVALUE 2.40e-02; EST_HUMAN HIT: BE902610.1, EVALUE 7.00e-75; SWISSPROT HIT: P47043, EVALUE 2.90e+00
atctctgtcaataatctgcagcagcctttttttgtcatcatccgcttcctccaccacagtcattttttcttcccgatagcggccgcgttctcgagtaccagtttgtttccgacgcatcttctgctcctcctcttcatcatcccggggacgttttgtgcccctattggggctgagagaaaagaaaca

SEQ ID NO: 19602 - DNA, 692 bp, Homo sapiens
  MAP TO AC004230.1; EXPRESSED IN HEART, SIGNAL = 5.9; EXPRESSED IN ADULT LIVER, SIGNAL = 1.8; EXPRESSED IN BT474, SIGNAL = 5.3; EXPRESSED IN BRAIN, SIGNAL = 1.9; EXPRESSED IN HBL100, SIGNAL = 1.6; EXPRESSED IN HELA, SIGNAL = 2.2; EXPRESSED IN PLACENTA, SIGNAL = 6.5; EXPRESSED IN FETAL LIVER, SIGNAL = 1.6; EXPRESSED IN LUNG, SIGNAL = 6.3; EXPRESSED IN BONE MARROW, SIGNAL = 1.6; NT HIT: M80902.1, EVALUE 0.00e+00; SWISSPROT HIT: gi1351900, EVALUE 7.00e-75; EST_HUMAN HIT: AA367864.1, EVALUE 0.00e+00
ctttcaggcctaggtcaccctcaagtgatggcccagtgatttgggggcccttcagcttcccctcaaggccctcaatattggcagagggcacactgacttccagctgaggggcttggatagtcaagcctggcttgccgcccttgtgccccacagagacttcaggtgcagaaaccctcagccctgcctttggtgtctggccctcacgccctgttgagacaccaaatttcggcactttcatggtgggaaatttaattttgccatgatcaccactctccagagatgggccctgtacctctactgccctacccccaagagaagatgaaatgtccactgctggaacttggacccctcctctgccacccaagtccaagccctttgcattgacattgacacctgagcctcccacctttatcccaggcatggtgacctggagcttcgagtggccagcaccttggagctctggtcctgaagcagaaatggcccctgctcggatatccacagcagagcctgtcggagaggctgcccccgagcccgagggcagtctgatcacggtcttcccagactgggtctccacatccacattggagatttcagtcagttcatgtcttggaatcttgatcttgaattcagggctactgatgtctatgtccttggctccttcccggccagtcacatccacagtgtaggccgtg

SEQ ID NO: 19603 - DNA, 326 bp, Homo sapiens; identical to SEQ ID NO: 17107
  MAP TO AP000020.2; EXPRESSED IN HBL100, SIGNAL = 2.2; EXPRESSED IN HEART, SIGNAL = 1.8; EXPRESSED IN PLACENTA, SIGNAL =   1; EXPRESSED IN BT474, SIGNAL = 1.8; EXPRESSED IN BONE MARROW, SIGNAL = 1.7; EXPRESSED IN LUNG, SIGNAL = 1.1; EXPRESSED IN BRAIN, SIGNAL = 1.4; NT HIT: AF115549.2, EVALUE 1.70e-01; EST_HUMAN HIT: AW804759.1, EVALUE 1.00e-115; SWISSPROT HIT: Q28640, EVALUE 6.30e-02

SEQ ID NO: 19604 - DNA, 497 bp, Homo sapiens
  MAP TO AL021026.1; EXPRESSED IN BT474, SIGNAL = 1.3; EXPRESSED IN FETAL LIVER, SIGNAL = 1.1; EXPRESSED IN BONE MARROW, SIGNAL = 1.4; EXPRESSED IN LUNG, SIGNAL = 1.4; EXPRESSED IN BRAIN, SIGNAL = 1.1; EXPRESSED IN HBL100, SIGNAL = 2.7; EXPRESSED IN PLACENTA, SIGNAL = 1.3; EXPRESSED IN HELA, SIGNAL = 1.2; EXPRESSED IN ADULT LIVER, SIGNAL = 1.4; EXPRESSED IN HEART, SIGNAL = 1.1; EST_HUMAN HIT: BE828694.1, EVALUE 2.00e-83; NT HIT: L10391.1, EVALUE 4.00e-62; SWISSPROT HIT: P32417, EVALUE 2.00e-52
gaattgccatgagagaagagagtcagtggcactcatgctgatgtttaactgcttgatgttatttcaatgttatgggctgttgcaggtatttcttggaaatgagctatttacagcaagggtgtttgcctctcattgctgtagttccctgagaaaagagcctgtgttcaatgatgagctcccatcccgcatcctgtgtggcactctgtccatcaagcccagtgtgaaggagttcacggaaacctcagctgtgtttgaggatgggaccatgtttgaggctatcgactctgtcatctttgcaacaggctatgattattcctaccccttccttgatgagaccatcatgaaaagcagaaacaatgaggttaccttgtttaaaggcatcttccccccactaatggagaagccaaccttggctgtgattggcttggttcagtcccttggagctgccatccccacagcagacctgcaagcctggtgggctgctaaagtatttgcaa

SEQ ID NO: 19605 - DNA, 288 bp, Homo sapiens
  MAP TO AC004505.1; EXPRESSED IN BRAIN, SIGNAL = 1.3; EXPRESSED IN BONE MARROW, SIGNAL = 0.96; EXPRESSED IN HELA, SIGNAL = 1.4; EXPRESSED IN PLACENTA, SIGNAL = 0.93; EXPRESSED IN HEART, SIGNAL = 1.6; EXPRESSED IN BT474, SIGNAL =   1; EXPRESSED IN FETAL LIVER, SIGNAL = 1.3; SWISSPROT HIT: P44132, EVALUE 5.40e-01; EST_HUMAN HIT: BE154469.1, EVALUE 0.00e+00; NT HIT: AF207880.1, EVALUE 9.00e-68
cacgtcaggcttccaaacgaagcacacaattgcatggataaaatgaccgctgtctacgccaacatcctgtcggattcctactggtcaggcctgggccttggcttcaagctgtccaatagtgagaggaggaactgtgacacccgaaacggcagcaacaagagtgattttgattggcaccaagacgctctgtccaaaagcctgcagcagaacttgccttctcggtccgtctcgaaacccagcctgttcagctcggtgcagttgtaccgacagagcagcaagatgtgcggg

SEQ ID NO: 19606 - DNA, 169 bp, Homo sapiens
  MAP TO AP000065.1; EXPRESSED IN LUNG, SIGNAL = 6.3; EXPRESSED IN BONE MARROW, SIGNAL = 7.8; EXPRESSED IN BRAIN, SIGNAL = 6.5; EXPRESSED IN HELA, SIGNAL = 6.8; EXPRESSED IN PLACENTA, SIGNAL = 6.5; EXPRESSED IN HBL100, SIGNAL = 9.3; EXPRESSED IN HEART, SIGNAL = 8.4; EXPRESSED IN BT474, SIGNAL = 6.7; EXPRESSED IN FETAL LIVER, SIGNAL = 7.6; EXPRESSED IN ADULT LIVER, SIGNAL =   9; EST_HUMAN HIT: AI954732.1, EVALUE 2.00e-90; NT HIT: gi6005720, EVALUE 1.00e-90; SWISSPROT HIT: P00393, EVALUE 7.50e-01
catcttctaagccaaagcttagcttgtcagctagcccctcaaactgcttgctcacactgcccgcagagtccatgaacatgttaggaatgtctttgccaaagtaaatcttgctgttggaagcaatggccttgtacttcatcagctgcagatattcaggggttagcttcag

SEQ ID NO: 19607 - DNA, 495 bp, Homo sapiens
  MAP TO AL021154.1; EXPRESSED IN HELA, SIGNAL = 1.6; EXPRESSED IN HEART, SIGNAL = 1.4; EXPRESSED IN FETAL LIVER, SIGNAL =   1; EXPRESSED IN ADULT LIVER, SIGNAL = 1.3; EXPRESSED IN BT474, SIGNAL = 1.9; EXPRESSED IN LUNG, SIGNAL = 2.2; EXPRESSED IN BRAIN, SIGNAL = 1.2; EXPRESSED IN PLACENTA, SIGNAL = 2.1; EXPRESSED IN HBL100, SIGNAL = 1.4; EXPRESSED IN BONE MARROW, SIGNAL = 1.5; NT HIT: X73428.1, EVALUE 0.00e+00; EST_HUMAN HIT: AI750929.1, EVALUE 0.00e+00; SWISSPROT HIT: Q02535, EVALUE 2.00e-42
gtgtcaggacacggccgagtcagtggcaaaagctccttttgtcgttggagatgacaagttccggagtgagctcggctgtctgattagaggaaaagagggaagagttacgcgaggcaatcgggagctccgagggtcccgcagcatccttgcctgggtgttcagccctgtcccgacttcgaggcttacctggatgggaaggtgggggccatcagggggtccaggggctggctcggccaggactacctgcaggtcgagaatgtagtcgatgacgcgctgtaggatttccacctggctaagctgagtgcctctcgggactccgggtaccagttcccgcaggcgggagtagcagtggttcatgtcgtccagcaagctcagcggctcctcagctgccgggcccttccctcggccccgggcgatggccagactgcgttccgacaggcagcacaccgcctcgtagcagccgcgcaccgggctcagcgccttcatgctggggag

SEQ ID NO: 19608 - DNA, 766 bp, Homo sapiens
  MAP TO AL008720.1; EXPRESSED IN BT474, SIGNAL = 1.1; EXPRESSED IN PLACENTA, SIGNAL = 0.89; EXPRESSED IN HBL100, SIGNAL = 1.1; EXPRESSED IN HELA, SIGNAL =   1; EXPRESSED IN HEART, SIGNAL = 1.8; EXPRESSED IN FETAL LIVER, SIGNAL = 1.2; SWISSPROT HIT: P17164, EVALUE 4.10e+00; EST_HUMAN HIT: AW844901.1, EVALUE 2.90e+00
tcatcctcctccttttcatcaccatcatcatcatcaccaacctcctcatcatcaccatcatcaccatcctcttcctcgttatcatcattaccatcactaccatcgccattatcaccatcatcaccatcgccaacctcctcttcatcatcgtcatcttcatcgccaacatcatcatcttcatcaccatcactaccatcaccattaacaccatcatcaccatcaccaacctcctcttcatcatcgtcatcttcatcgccaacatcatcatcttcatcaccatcatcgccatcctcctcctcatcaccatcattaccattgtcaccatatcatcctcattctcctcatcctcctcatcatcattatcataatcatcatcattgtcatcatcattatcatcctctccatcatcaccgtcatcatcattttcatcaccatcatcatcatcaccatcattaccatcaccatcctcatcatgatcatcaccgtcattaccattaccaccatatcatcctcattctcctcattatcattttcatcatcaccactatcaccatcattctcctcgtcctcctccccatcattatcataatcatcatcatcgtcatcattattatcatcctctccatcaccaccatcatcttcatcttcatcaccatcatcatcctcatggttgtcctcaagtgtggaagaccctctccaaggctgtctgtcctctcttcctcccctgcctgctgacatgttcccagtcacatcaagggatagaatc

SEQ ID NO: 19609 - DNA, 354 bp, Homo sapiens
  MAP TO AJ229041.1; EXPRESSED IN BONE MARROW, SIGNAL = 3.6; EXPRESSED IN HELA, SIGNAL = 2.8; EXPRESSED IN HEART, SIGNAL = 2.8; EXPRESSED IN FETAL LIVER, SIGNAL = 2.8; EXPRESSED IN ADULT LIVER, SIGNAL = 3.3; EXPRESSED IN LUNG, SIGNAL = 2.9; EXPRESSED IN BRAIN, SIGNAL = 2.6; EXPRESSED IN PLACENTA, SIGNAL = 2.6; EXPRESSED IN HBL100, SIGNAL = 2.8; EXPRESSED IN BT474, SIGNAL = 2.6; NT HIT: AL163268.2, EVALUE 0.00e+00; EST_HUMAN HIT: AW961960.1, EVALUE 8.90e-01; SWISSPROT HIT: P56863, EVALUE 1.10e+00
tttaaatttttaaaatgcaagatggagaagatacaattagaaactgaaaattttgtcctggaactctatagagaattcagttggagtcatcatcacgtggctaaggtttggccctatgaaagatggaatttcgcctggaaaagctgtcaagaaagtcagggaaagcactgtggtgaagagcagcatttggtgatgggaagaacagagaatggtcttagaaagagttctcctagaagccagaagaggagggcgcaatttcagaagaaaagtgtggtccacatcattaattaccacacagggactgaggggacacatgtcaagatggagatgccagatctgctgactgaggataat

SEQ ID NO: 19610 - DNA, 135 bp, Homo sapiens
  MAP TO AL021327.1; EXPRESSED IN HELA, SIGNAL = 1.1; EXPRESSED IN HEART, SIGNAL =   1; EXPRESSED IN FETAL LIVER, SIGNAL = 1.3; EXPRESSED IN LUNG, SIGNAL = 1.3; EXPRESSED IN BONE MARROW, SIGNAL = 1.6; EXPRESSED IN BRAIN, SIGNAL = 1.3; EXPRESSED IN PLACENTA, SIGNAL = 1.3; EXPRESSED IN HBL100, SIGNAL = 1.3; EXPRESSED IN ADULT LIVER, SIGNAL = 1.3; EXPRESSED IN BT474, SIGNAL = 1.1; SWISSPROT HIT: P48634, EVALUE 1.00e+00; EST_HUMAN HIT: T56685.1, EVALUE 7.00e+00
gagatgtgccctctgattatgcccaagcagaggagaaactggcctgccaattggtggagtgcctgctgggtcacagtaaaggatgatgctggtgttagaatctcacccacctgcttcagcagggtgggctccaga

SEQ ID NO: 19611 - DNA, 300 bp, Homo sapiens; identical to SEQ ID NO: 18286
  MAP TO AL109823.11; EXPRESSED IN PLACENTA, SIGNAL =  16; EXPRESSED IN HEART, SIGNAL = 2.6; EXPRESSED IN HBL100, SIGNAL = 0.96; EXPRESSED IN HELA, SIGNAL =   1; EXPRESSED IN ADULT LIVER, SIGNAL = 1.2; EXPRESSED IN FETAL LIVER, SIGNAL = 2.4; EXPRESSED IN LUNG, SIGNAL =  12; EXPRESSED IN BONE MARROW, SIGNAL =   1; NT HIT: M98478.1, EVALUE 0.00e+00; EST_HUMAN HIT: BE385335.1, EVALUE 0.00e+00; SWISSPROT HIT: P21980, EVALUE 6.00e-46

SEQ ID NO: 19612 - DNA, 96 bp, Homo sapiens
  MAP TO AL031662.24; EXPRESSED IN PLACENTA, SIGNAL = 2.1; EXPRESSED IN ADULT LIVER, SIGNAL = 2.1; EXPRESSED IN BT474, SIGNAL = 2.4; EXPRESSED IN HELA, SIGNAL = 1.9; EXPRESSED IN HBL100, SIGNAL = 2.1; EXPRESSED IN HEART, SIGNAL = 1.9; EXPRESSED IN FETAL LIVER, SIGNAL =   2; EXPRESSED IN BRAIN, SIGNAL = 2.3; EXPRESSED IN LUNG, SIGNAL = 1.7; EXPRESSED IN BONE MARROW, SIGNAL = 2.3; NT HIT: AF000716.1, EVALUE 1.70e-01; EST_HUMAN HIT: AI125308.1, EVALUE 2.10e-01
ctgtgtcctgcagagggctggcccgctccctggcaaggatatacccctacctgtgactgtgcagaggacaccactcaactggaaagagctggacag

SEQ ID NO: 19613 - DNA, 431 bp, Homo sapiens; identical to SEQ ID NO: 2830
  MAP TO AL034377.1; EXPRESSED IN BONE MARROW, SIGNAL = 0.99; EXPRESSED IN HBL100, SIGNAL = 0.94; EXPRESSED IN HEART, SIGNAL = 1.1; EXPRESSED IN FETAL LIVER, SIGNAL = 0.98; EXPRESSED IN BRAIN, SIGNAL = 0.96; SWISSPROT HIT: Q9ZCZ8, EVALUE 4.30e+00; NT HIT: AJ223621.1, EVALUE 5.80e-02; EST_HUMAN HIT: BE394558.1, EVALUE 1.10e+00

SEQ ID NO: 19614 - DNA, 99 bp, Homo sapiens
  MAP TO AC007912.2; EXPRESSED IN HBL100, SIGNAL = 0.67; EXPRESSED IN PLACENTA, SIGNAL = 0.64; EXPRESSED IN ADULT LIVER, SIGNAL = 0.97; EXPRESSED IN HEART, SIGNAL = 0.88; EST_HUMAN HIT: BE903097.1, EVALUE 1.00e-03; NT HIT: AJ251058.1, EVALUE 5.00e-05
tcccatggtgtaactattcccagcatggctgtcttcaagctaccaacacgatgtccctgaatgcagaggtaaaatgaaatggcttgcctggcatcactc

SEQ ID NO: 19615 - DNA, 359 bp, Homo sapiens
  MAP TO AL031665.18; EXPRESSED IN BRAIN, SIGNAL =  18; EXPRESSED IN BONE MARROW, SIGNAL =  26; EXPRESSED IN HEART, SIGNAL =  43; EXPRESSED IN FETAL LIVER, SIGNAL =  16; EXPRESSED IN ADULT LIVER, SIGNAL = 5.7; EXPRESSED IN BT474, SIGNAL =  45; EXPRESSED IN LUNG, SIGNAL =  35; EXPRESSED IN PLACENTA, SIGNAL =  30; EXPRESSED IN HELA, SIGNAL =  25; EXPRESSED IN HBL100, SIGNAL =  36; NT HIT: D50657.1, EVALUE 0.00e+00; SWISSPROT HIT: P00544, EVALUE 5.00e-39; EST_HUMAN HIT: BE537170.1, EVALUE 2.00e-61
tcagtcagcagcaccaggtgctcctccaggaacacatgcagcttgttgtagggtgtggtgccagatcttctccatgccttcccagctggtgaaaatcctgtgctcgatggggtacttcatcgtcaggatgccgtgcttgctctgggccttgtcgcccaggtagaagaccttctggcccatccccaccatcatgccctggtgttgggggcacctgacagtggagggaaacatggttccaggggcgtcgtccccagcaaaaccagctttgcacatgctggagccattgtcaatgacgagtatggtgatctcttcttccattgtgatcggtggaggagctgggcggcagagcggtgggaaga

SEQ ID NO: 19616 - DNA, 168 bp, Homo sapiens
  MAP TO AL049553.15; EXPRESSED IN BONE MARROW, SIGNAL = 1.1; EXPRESSED IN HELA, SIGNAL =   1; EXPRESSED IN HEART, SIGNAL = 1.4; EXPRESSED IN PLACENTA, SIGNAL = 0.97; EXPRESSED IN HBL100, SIGNAL = 0.97; EXPRESSED IN ADULT LIVER, SIGNAL = 1.1; EXPRESSED IN BT474, SIGNAL = 1.2; EXPRESSED IN FETAL LIVER, SIGNAL = 1.2; EXPRESSED IN BRAIN, SIGNAL = 1.3; SWISSPROT HIT: Q61490, EVALUE 9.90e-01; EST_HUMAN HIT: BF195188.1, EVALUE 9.00e-74; NT HIT: gi5902121, EVALUE 6.00e+00
ctggggtcgagggtgccctgttacaaggcactgcagcatgagggtgtccccctcccggatggtgtagacacgctcgctgatattgtcctctttcaccacacatgcctggcccgcatgcacgatctgcgcctgggctggagctggcaggagaggatggaggaggaggtt

SEQ ID NO: 19617 - DNA, 123 bp, Homo sapiens
  MAP TO AL109897.9; EXPRESSED IN HEART, SIGNAL = 0.99; EXPRESSED IN BT474, SIGNAL = 1.1; EXPRESSED IN ADULT LIVER, SIGNAL = 0.96; EXPRESSED IN LUNG, SIGNAL = 0.96; EST_HUMAN HIT: N94950.1, EVALUE 2.00e-30; SWISSPROT HIT: P10563, EVALUE 3.00e+00; NT HIT: AL163284.2, EVALUE 9.00e-20
gggttttagccagcttctttactgcagcccgttttatcagcagggtctttatgacctgtgtcttctgctgacctcctctctcatcctgtgacttagaatgccttaaatgtctacaaaccagta

SEQ ID NO: 19618 - DNA, 626 bp, Homo sapiens
  MAP TO AL031675.1; EXPRESSED IN PLACENTA, SIGNAL = 1.6; EXPRESSED IN HBL100, SIGNAL = 1.6; EXPRESSED IN ADULT LIVER, SIGNAL = 1.5; EXPRESSED IN BT474, SIGNAL = 1.6; EXPRESSED IN BRAIN, SIGNAL = 1.9; EXPRESSED IN HELA, SIGNAL = 1.5; EXPRESSED IN HEART, SIGNAL = 1.6; EXPRESSED IN FETAL LIVER, SIGNAL = 1.8; EXPRESSED IN LUNG, SIGNAL = 1.3; EXPRESSED IN BONE MARROW, SIGNAL = 1.9; NT HIT: AL163206.2, EVALUE 9.00e-67; EST_HUMAN HIT: AA584655.1, EVALUE 7.00e-83; SWISSPROT HIT: P39194, EVALUE 8.00e-35
aaagtgtgttttagcacctccccccttgctctttctcttgctcctgctcctgatttggaagatgcctgctccccctttgccttccgccatgattggaagcttccagaggcctccccggaagcagaaaccactatgcttcctgtacagcctgcaaaactatgagcctattaaacctctctcctcctcccccttccccttccccttccctttcttcttcttcttcctcttcctcctctttctcttccccttccccttccccttcttcttcttcctcttcctcttcttcttcttcttctctccttttgatggagtctcgctctgtcacccaggctggagtatagtggcatgatattggctcactgcaacctcctccttccaagttcaagtgatgctcctgcctcatcctcccgagtagcagggattacaggcacctgccaccaggcctggctaatttttgtatttttagtagagacggggtttcaccatgttggccaggctggtcttgaactcctaacctcaagtgatctgcccactttggcctcccaaagtgctgggattacaggcatgagccgccatgcccagcatctcttttctttataatttacccagtctcaggtatttcctta

SEQ ID NO: 19619 - DNA, 1374 bp, Homo sapiens
  MAP TO AL021579.1; EXPRESSED IN HBL100, SIGNAL = 4.9; EXPRESSED IN HEART, SIGNAL = 1.3; EXPRESSED IN BT474, SIGNAL = 3.2; EXPRESSED IN BRAIN, SIGNAL = 1.7; EXPRESSED IN BONE MARROW, SIGNAL = 2.3; EXPRESSED IN PLACENTA, SIGNAL = 3.4; EXPRESSED IN HELA, SIGNAL = 3.9; EXPRESSED IN ADULT LIVER, SIGNAL = 2.2; EXPRESSED IN FETAL LIVER, SIGNAL = 1.9; EXPRESSED IN LUNG, SIGNAL = 4.3; SWISSPROT HIT: P48634, EVALUE 3.00e-13; EST_HUMAN HIT: BE279691.1, EVALUE 0.00e+00; NT HIT: AL096857.1, EVALUE 0.00e+00
gagaggcctcgaccagattcaagaccagcagttaaaaaagaatcaactttgcctcccaggacctattggaaagaagctagagagagagattggtttccagatcaaggatacagaggtcgaggccgaggtgaatattactccagaggtcgaagctatagaggttcttatggagggcgtggcaggggtggtaggggacacactcgagattatcctcagtatagagacaataagccaagagcagagcatataccctcagggcctctcagacagcgagaagaaagtgaaacacggagtgagagctctgattttgaagttgtccccaaaagaagacgacagcggggttcagagactgacacagacagtgaaattcatgaaagtgcaagtgacaaggacagtttaagtaaaggcaaacttcccaaaagagaggaacggcctgaaaacaaaaaacctgtaaagcctcattcttctttcaagcctgataatcatgttcgaatagataatagactgctagaaaagccttatgtaagggatgacgataaagctaaaccaggctttcttcctaaaggagagcctacaaggagaggcagagggggaacattcaggcgtggtggaagggatcctggaggccgtccatcacgcccttccactttacgaagaccagcttatcgggacaatcagtggaacccaaggcagtcagaagttcctaaaccagaagatggagagccgccaagaagacatgagcagtttattcctatagcagcagataaacgacctccaaaatttgagcgaaaatttgacccagctagagaaaggcctcgaaggcagcgtcctactcgaccaccaaggcaagacaagccacctcgatttagacggctaagagagagggaggctgcttcaaaatcaaatgaggtggtagcagtgcccacaaatggcacagttaataatgtggctcaagaaccagttaatactcttggggatatttccgggaataagacaccagatttatctaatcagaactcttcagatcaggcaaatgaagaatgggaaacagcttctgaaagcagtgatttcaatgagaggcgagagagggatgaaaaaaaaaatgctgacttgaatgcacaaacagttgtaaaggttggagagaatgttctacctccaaagagggaaattgcaaagagaagtttttctagtcagagaccagtagatcgtcagaatcgacgtggcaacaatggtccacccaaatcaggaaggaatttctcaggtcctagaaatgaaaggagaagtggcccaccatcaaaaagtgggaagagagggtgagtactttgttttaaatatagttgcttttgcacctttaaagaagctaaaagtagagtt

SEQ ID NO: 19620 - DNA, 612 bp, Homo sapiens
  MAP TO AC001226.1; EXPRESSED IN BT474, SIGNAL = 5.7; EXPRESSED IN ADULT LIVER, SIGNAL = 5.2; EXPRESSED IN BONE MARROW, SIGNAL = 5.2; EXPRESSED IN LUNG, SIGNAL = 7.1; EXPRESSED IN HELA, SIGNAL =  11; EXPRESSED IN BRAIN, SIGNAL = 7.2; EXPRESSED IN PLACENTA, SIGNAL = 6.1; EXPRESSED IN HBL100, SIGNAL = 6.1; EXPRESSED IN HEART, SIGNAL = 4.6; EXPRESSED IN FETAL LIVER, SIGNAL = 7.4; NT HIT: Y10658.1, EVALUE 0.00e+00; SWISSPROT HIT: Q28141, EVALUE 3.00e-99; EST_HUMAN HIT: AU120999.1, EVALUE 0.00e+00
gatccagtaccagttggagtaaccaaggttattttgtccacaaatattgctgaaacaagcattatcataaatgatgtttatgtcgttgactcctgcaagcagaaagtgaaactctttgctactcacaacaatatgaccaactatgctacagtatggggatcaaaaacaaaccttgaacagtggaaagggcaacctggccgaatacggcctggattctgctttcacctctgcagccgagctcgttttgagagacttgaaacccacatgacaccagagatgttccaaacaccattgcatgaagttgctcttagcataaaacttccatgtctagttggaattggccagtttctggccaaagcaattgaaactctccctttggatgctgtgattgaagcagaacacactcttagagagcttgatgcattagatgccaatgatgatttgactccattgggacgaatcctggctaacctcctcattgagcctcgttttggcaaaatgatgataatggtgtgtattttctatgtgggagatgctatctgtaccattcctgctgctacctgctttccagagccttttataaatgaaggaaagtggctgggctacaaccat

SEQ ID NO: 19621 - DNA, 768 bp, Homo sapiens
  MAP TO AC004776.1; EXPRESSED IN BT474, SIGNAL = 1.1; EXPRESSED IN FETAL LIVER, SIGNAL = 1.2; EXPRESSED IN BONE MARROW, SIGNAL = 1.2; EXPRESSED IN LUNG, SIGNAL =   1; EXPRESSED IN BRAIN, SIGNAL = 1.4; EXPRESSED IN HELA, SIGNAL =   1; EXPRESSED IN HBL100, SIGNAL = 1.1; EXPRESSED IN PLACENTA, SIGNAL = 1.1; EXPRESSED IN ADULT LIVER, SIGNAL = 1.2; EXPRESSED IN HEART, SIGNAL = 0.96; NT HIT: gi9256597, EVALUE 0.00e+00; EST_HUMAN HIT: W32160.1, EVALUE 0.00e+00; SWISSPROT HIT: P33450, EVALUE 8.00e-18
aggcaattactaaatacaagttctgggcagaaagctgccctcctggttcccagacatcttcaaagtctggaagtaactgagggacagagttgctcaacagcacacccagagtgacagaggaggaaagtggtgggtctccatggtcccgaaccactaccaccaccctctgcttaactgcatcagtgggaagaactaagcgagcagtacggagctcacctatattggctgaaattctaaagagactagagtcagacgcccgggagatgtggtaggaaagccaggcattagaaccactgtcagcatcctctgctaccacttttgtgaccaagtgtccagtcctggcagagcggggcacaatttccactgggacagaaccatttctgggcaagggaaacaagataaccggataattgtcattcctatctaccacaaacaagtttatagtcactgttgcacttctgggaggaatgccaccatcccggccttctacttggaaatgaaaccccctgagctgctcaaagtcaaaggaagttttggcagtgatggccccactggatgattccactgccaccaagctagaggctgatggcccttcagagataacatccaacagctcataagagacaaggccattcttccccaggtcggggtcctgggcaaacactcggcctagagaggccccagggccattgttttcagcaacgaaaagttcctgctggggttgaggaaagtttggtgtattgtcattcacatcagcaactgacacag

SEQ ID NO: 19622 - DNA, 1246 bp, Homo sapiens
  MAP TO AC005079.1; EXPRESSED IN BT474, SIGNAL =  90; EXPRESSED IN BONE MARROW, SIGNAL =  62; EXPRESSED IN BRAIN, SIGNAL =  48; EXPRESSED IN HEART, SIGNAL =  25; EXPRESSED IN ADULT LIVER, SIGNAL = 8.4; EXPRESSED IN FETAL LIVER, SIGNAL = 1.1e+02; EXPRESSED IN LUNG, SIGNAL = 1.4e+02; EXPRESSED IN HELA, SIGNAL = 1.3e+02; EXPRESSED IN PLACENTA, SIGNAL =  75; EXPRESSED IN HBL100, SIGNAL =  72; SWISSPROT HIT: P04720, EVALUE 0.00e+00; NT HIT: gi11418792, EVALUE 0.00e+00; EST_HUMAN HIT: AU119714.1, EVALUE 0.00e+00
agaagctctcaacacacatgggcttgccaggaaccatatcaacaatggcagcatcaccagacttcaagaatttagggccatcttccagctttttaccagaacggcgatcaatcttttccttcagctcagcaaacttgcatgcaatgtgagccgtgtggcaatccaatacaggggcatagccggtgcttatttggcctggatggttcaggataatcacctgagcagtgaagcccgctgcttccattggtgggtcatttttgctgtcaccagcgacgttgccacgacgaacatccttgacagacacattcttgacattgaagcccacattgtccccaggaagagcttcactcaaagcttcatggtgcatttcgacagattttacttccgttgtaacgttgactggagcaaaggtgaccaccataccgggtttgagaacaccagtctccactcggccaacaggaacagtaccaataccaccaattttgtagacatcctggagaggcaggcgcaagggcttgtcagttggatgagttggtggtaggatgcagtccagagcctcaagcagcgtggttccactggcattgccatccttacgggtgactttccatcccttgaaccaaggcatgttagcacttggctccagcatgttgtcaccattccaaccagaaattggcacaaatgctactgtgtcggggttgtagccaattttcttaatgtaagtgctgacttccttaacgatttcctcatatctcttctggctgtagggtggctcagtggaatccattttgttaacaccgacaattagttgtttcacacccagtgtgtaagccagaagggcatgctctcgggtctgcccattcttggagataccagcttcaaattcaccaacaccagcagcaacaatcaggacagcacagtcagcctgagatgtccctgtaatcatgtttttgatgaagtccctgtgtcctggggcatcaatgatagtcacatagtacttgctggtctcaaatttccacaaggagatatcaatggtgataccacgttcacgctcagctttcagtttatccaagacccaggcatacttgaaggagccctttcccatctcagcagcctccttctcaaatttttcaatggttcttttgtcgatgccaccgcatttatagatcagatggccagtagtggtggacttgcctgaatctacgtgtccaatgacgacaatgttgatatgagtcttttcctttcccat

SEQ ID NO: 19623 - DNA, 189 bp, Homo sapiens
  MAP TO AL118522.7; EXPRESSED IN BRAIN, SIGNAL = 4.5; EXPRESSED IN PLACENTA, SIGNAL = 4.8; EXPRESSED IN HEART, SIGNAL = 4.9; EXPRESSED IN HBL100, SIGNAL = 4.5; EXPRESSED IN HELA, SIGNAL = 5.6; EXPRESSED IN BT474, SIGNAL = 4.7; EXPRESSED IN FETAL LIVER, SIGNAL = 4.8; EXPRESSED IN ADULT LIVER, SIGNAL =   6; EXPRESSED IN BONE MARROW, SIGNAL = 5.4; EXPRESSED IN LUNG, SIGNAL = 5.6; NT HIT: AF182509.1, EVALUE 1.50e+00; SWISSPROT HIT: P42496, EVALUE 5.60e-01; EST_HUMAN HIT: H64245.1, EVALUE 6.60e-01
atgaagctcagtgggctggaagcagcgtgctggtgccactacctcagcctgatttttagcaacagcatcagtaagtttaatattccgatttctgctcagacttcagaggagcagaaacctgggctgaagtctcagagtcggagtgagtggggctccaaggacccacagcccaacaagagcccgaaaaga

SEQ ID NO: 19624 - DNA, 192 bp, Homo sapiens; identical to SEQ ID NO: 18889
  MAP TO AL049629.14; EXPRESSED IN BT474, SIGNAL = 7.4; EXPRESSED IN BRAIN, SIGNAL = 7.4; EXPRESSED IN BONE MARROW, SIGNAL = 7.2; EXPRESSED IN HEART, SIGNAL = 7.6; EXPRESSED IN PLACENTA, SIGNAL =  18; EXPRESSED IN ADULT LIVER, SIGNAL =  12; EXPRESSED IN FETAL LIVER, SIGNAL = 8.2; EXPRESSED IN LUNG, SIGNAL =  10; EXPRESSED IN HELA, SIGNAL =  13; EXPRESSED IN HBL100, SIGNAL = 6.9; NT HIT: gi10835164, EVALUE 1.00e-104; SWISSPROT HIT: P30957, EVALUE 1.70e+00; EST_HUMAN HIT: AA132975.1, EVALUE 1.00e-104

SEQ ID NO: 19625 - DNA, 181 bp, Homo sapiens
  MAP TO AL034412.1; EXPRESSED IN PLACENTA, SIGNAL = 1.3; EXPRESSED IN ADULT LIVER, SIGNAL =   1; EXPRESSED IN BT474, SIGNAL = 1.9; EXPRESSED IN HELA, SIGNAL =   1; EXPRESSED IN HBL100, SIGNAL = 1.3; EXPRESSED IN HEART, SIGNAL = 0.96; EXPRESSED IN BRAIN, SIGNAL = 1.6; EXPRESSED IN LUNG, SIGNAL = 1.3; EXPRESSED IN BONE MARROW, SIGNAL = 1.8; NT HIT: L27223.1, EVALUE 1.70e+00; SWISSPROT HIT: O93375, EVALUE 8.70e+00
gtttagtcctaaagcctgtagatccatgctaagtgatatgactttttttcacatcagattaagcaaaacactgatgatggtgactgtcgcttattgtgcagttaccatgttctggacaggcactgttgtaagggctctacctgcatcgacccatttttcctcatgacaaactattggtgca

SEQ ID NO: 19626 - DNA, 173 bp, Homo sapiens
  MAP TO AC007255.2; EXPRESSED IN PLACENTA, SIGNAL =  11; EXPRESSED IN HBL100, SIGNAL =   7; EXPRESSED IN HEART, SIGNAL = 6.7; EXPRESSED IN BT474, SIGNAL = 6.1; EXPRESSED IN BRAIN, SIGNAL = 5.9; EXPRESSED IN ADULT LIVER, SIGNAL =  15; EXPRESSED IN FETAL LIVER, SIGNAL = 7.9; EXPRESSED IN LUNG, SIGNAL = 8.1; EXPRESSED IN BONE MARROW, SIGNAL = 7.9; EXPRESSED IN HELA, SIGNAL =   5; EST_HUMAN HIT: AI261358.1, EVALUE 4.00e-05; SWISSPROT HIT: Q51487, EVALUE 2.90e+00; NT HIT: U63721.1, EVALUE 6.00e-03
agctatgattatgccactgcactctagcctcaatgtggcactgattatcacaggtgagttgatcgctggggtcatgagccatgatccaagaagcatggcgtcgccaaaggtcagccttagggtcatgagtgcttcctcatggagccaacctgaatcccgaccagagatgggtt

SEQ ID NO: 19627 - DNA, 101 bp, Homo sapiens
  MAP TO AC007066.4; EXPRESSED IN HELA, SIGNAL = 5.9; EXPRESSED IN PLACENTA, SIGNAL = 5.3; EXPRESSED IN HBL100, SIGNAL = 5.9; EXPRESSED IN HEART, SIGNAL = 4.6; EXPRESSED IN ADULT LIVER, SIGNAL = 5.9; EXPRESSED IN BT474, SIGNAL =  13; EXPRESSED IN BONE MARROW, SIGNAL = 5.4; EXPRESSED IN BRAIN, SIGNAL =   5; EXPRESSED IN FETAL LIVER, SIGNAL = 5.7; EXPRESSED IN LUNG, SIGNAL = 5.7; SWISSPROT HIT: P10387, EVALUE 3.20e+00
tcagtcatcaacaaccagagtgtcgacagccagtatttggaggacaaagttcgtatcgcccacccagcctccagcaagccgcaccaggaatgtggatacag

SEQ ID NO: 19628 - DNA, 146 bp, Homo sapiens
  MAP TO AC007114.7; EXPRESSED IN FETAL LIVER, SIGNAL = 4.5; EXPRESSED IN LUNG, SIGNAL = 4.4; EXPRESSED IN HELA, SIGNAL = 4.6; EXPRESSED IN PLACENTA, SIGNAL = 4.5; EXPRESSED IN BT474, SIGNAL = 3.8; EXPRESSED IN ADULT LIVER, SIGNAL = 4.6; EXPRESSED IN BONE MARROW, SIGNAL = 4.4; EXPRESSED IN BRAIN, SIGNAL = 3.8; EXPRESSED IN HEART, SIGNAL = 3.5; EXPRESSED IN HBL100, SIGNAL =   4; SWISSPROT HIT: P24008, EVALUE 1.00e+00
gtggaatttgcaggaatcctcatctgcactatctttcattgcatctcctcctggccactgttgctcatatctgccatatggatgagaaaggagtgtgatggtgaccagcgttttctggagggtcgtccatgatggggcttggcatc

SEQ ID NO: 19629 - DNA, 912 bp, Homo sapiens
  MAP TO AC003002.1; EXPRESSED IN PLACENTA, SIGNAL = 1.6; EXPRESSED IN HBL100, SIGNAL = 0.95; EXPRESSED IN BT474, SIGNAL = 1.6; EXPRESSED IN BONE MARROW, SIGNAL = 1.1; EXPRESSED IN HEART, SIGNAL = 1.6; EXPRESSED IN FETAL LIVER, SIGNAL = 2.2; EXPRESSED IN BRAIN, SIGNAL = 1.5; EXPRESSED IN LUNG, SIGNAL = 1.8; EXPRESSED IN HELA, SIGNAL = 2.1; EST_HUMAN HIT: AW976181.1, EVALUE 3.00e-89; NT HIT: AB040941.1, EVALUE 2.00e-28; SWISSPROT HIT: P52740, EVALUE 2.00e-83
gttgttgccatggagctgaggatgaggaggcacctttagagccaggtgtttctgtaggagtgtcacaggtcatggctccaaagccctgtctatctacccagaatacccagccctgtgagacatgtagctcacttctgaaggacattctgcgtctggctgagcatgacggaacacaccccgagcagggactgtacacgtgtccagcacatcttcaccagcaccaaaaggagcagattagagagaaactttctagaggggatggaggaagaccgacatttgtgaagaaccacagagttcacatggcagggaagaccttcttgtgcagtgaatgtgggaaagcctttagccacaaacataaactttctgaccatcagaaaatccacactggagaaagaacttataagtgcagcaaatgtgggatattgtttatggaaaggtccacactcaatagacatcagagaactcacactggagaaaggccttatgagtgcaatgaatgtgggaaagcctttctttgtaagtctcaccttgttcgtcaccagacaatccactctggagaaaggccttatgagtgcagtgaatgtgggaaattgtttatgtggagttccacactcattacacatcagagggttcacactggaaagaggccttatggttgcagtgaatgtgggaagttctttaagtgcaactcaaacctctttaggcattacagaattcatacaggaaaaaggtcttatggttgcagtgaatgtgggaaattctttatggaaaggtctacactcagtagacatcagagagttcacactggagaaaggccttatgagtgcaatgaatgtgggaaattcttcagcttgaaatccgtcctcattcaacaccaaagagttcacactggagaacggccttatgaatgca

SEQ ID NO: 19630 - DNA, 265 bp, Homo sapiens
  MAP TO AL035252.5; EXPRESSED IN BT474, SIGNAL = 3.8; EXPRESSED IN BRAIN, SIGNAL =   4; EXPRESSED IN BONE MARROW, SIGNAL = 3.9; EXPRESSED IN HEART, SIGNAL = 3.5; EXPRESSED IN PLACENTA, SIGNAL = 5.3; EXPRESSED IN ADULT LIVER, SIGNAL = 4.6; EXPRESSED IN FETAL LIVER, SIGNAL = 4.2; EXPRESSED IN LUNG, SIGNAL = 3.6; EXPRESSED IN HELA, SIGNAL = 4.2; EXPRESSED IN HBL100, SIGNAL = 4.1; NT HIT: Z78265.1, EVALUE 2.50e+00; EST_HUMAN HIT: N99523.1, EVALUE 1.10e-02; SWISSPROT HIT: Q43307, EVALUE 7.20e+00
aaattcagtgtttctagagacttcaatcatcagttctgctaaacaaggtaacgttatcattgtatccagggctgaacactccaagttctctagtaaaacaggactgctctcattgccattcagagagatgacttctttcttagcagtggatgtcagcttactccaggtaatgtcagtatttttaaaagcatgtagaagaaagatgccaaggataatagtgaagaatccattcagggtctcgatgatatctccagttttcatgcca

SEQ ID NO: 19631 - DNA, 267 bp, Homo sapiens
  MAP TO AC007336.2; EXPRESSED IN BT474, SIGNAL = 1.3; EXPRESSED IN FETAL LIVER, SIGNAL = 1.2; EXPRESSED IN BONE MARROW, SIGNAL = 1.3; EXPRESSED IN HEART, SIGNAL = 1.1; EXPRESSED IN BRAIN, SIGNAL = 1.2; EXPRESSED IN LUNG, SIGNAL = 1.4; EXPRESSED IN PLACENTA, SIGNAL = 1.4; EXPRESSED IN HELA, SIGNAL = 1.3; EXPRESSED IN HBL100, SIGNAL = 1.2; EXPRESSED IN ADULT LIVER, SIGNAL = 1.4; NT HIT: gi8922834, EVALUE 4.10e-02; SWISSPROT HIT: P04632, EVALUE 1.00e-06; EST_HUMAN HIT: BE564219.1, EVALUE 1.00e-130
gctctattggaaggagcagatcgaggtcttggagaagctcttggaggcctctttggaggaggtggtcagagaagagaaggaggaggaagaaatattggagggatagttggaggaattgtgaattttatcagtgaggctgcagcagctcagtatactccagaaccgcctcccactcagcagcatttcaccagtgtggaggcctcagaaagtgaggaagttaggcgatttcggcaacaatttacacagctggctggaccagacatggag

SEQ ID NO: 19632 - DNA, 136 bp, Homo sapiens
  MAP TO AL035416.7; EXPRESSED IN BT474, SIGNAL =   1; EXPRESSED IN HEART, SIGNAL = 0.88; NT HIT: gi11426992, EVALUE 5.00e-71; EST_HUMAN HIT: BF116191.1, EVALUE 1.10e-01; SWISSPROT HIT: P10563, EVALUE 2.30e+00
gactgtattatgcatatacatcatgttggtttcctgtaaagttttcacctgcttgcgaaggtcattcagatcttgtagcttctgacgatatatctcaactgttgactccagtttatttgctttatcagaggtagcc

SEQ ID NO: 19633 - DNA, 476 bp, Homo sapiens
  MAP TO AL109798.13; EXPRESSED IN FETAL LIVER, SIGNAL = 2.7; EXPRESSED IN BONE MARROW, SIGNAL = 2.5; EXPRESSED IN HELA, SIGNAL = 2.7; EXPRESSED IN HBL100, SIGNAL = 2.5; EXPRESSED IN BT474, SIGNAL = 2.4; EXPRESSED IN ADULT LIVER, SIGNAL = 2.6; EXPRESSED IN BRAIN, SIGNAL = 2.3; EXPRESSED IN LUNG, SIGNAL = 3.3; EXPRESSED IN PLACENTA, SIGNAL = 2.5; EXPRESSED IN HEART, SIGNAL = 2.4; NT HIT: gi4507280, EVALUE 0.00e+00; EST_HUMAN HIT: BE831003.1, EVALUE 0.00e+00; SWISSPROT HIT: O76039, EVALUE 3.00e-88
tggtcctgtaggagggactcctagaggactggggaattgtgtcaatatagctatgccgactctgcttttcattgggctgcagtgtcccagctttgctttgagagctttccatgaatgagtggcggttctgctgagatctgctgtttgacttgaggtactttgtccctgggccttctgaaggctttgggtcaatattaaaatcaaactctgtttttgacttggcttcttttgggctaagaaggtgtggtatgttgttgttggtgagatctttgctggtagacccaggctggctgcttgcttggtaggttttggtgtgcagtggactaagactagctccagcaaggtttccatttaggaagctttcattggcagggagaccttcgtcagcccggggcaggcctacactcaggttctggatgtccttgctgttagatctgtggtgagactgcaaagcagtacttttgccggcttggttt

SEQ ID NO: 19634 - DNA, 171 bp, Homo sapiens
  MAP TO AC008018.18; EXPRESSED IN ADULT LIVER, SIGNAL = 1.9; EXPRESSED IN BT474, SIGNAL = 1.5; EXPRESSED IN FETAL LIVER, SIGNAL = 1.8; EXPRESSED IN BRAIN, SIGNAL = 1.5; EXPRESSED IN BONE MARROW, SIGNAL = 1.7; EXPRESSED IN HBL100, SIGNAL = 1.4; EXPRESSED IN HEART, SIGNAL =   2; EXPRESSED IN LUNG, SIGNAL = 1.8; EXPRESSED IN PLACENTA, SIGNAL = 1.5; EXPRESSED IN HELA, SIGNAL = 1.6; NT HIT: gi4885270, EVALUE 1.00e-84; EST_HUMAN HIT: AI222095.1, EVALUE 2.00e-89; SWISSPROT HIT: P19440, EVALUE 3.00e-09
ctcccaatctccgagcactgcttggcatccgcggccacggtagccctggtgtacacatggttgtcaggttccttggaggccgagggcagccagagacagaggccgacaatgaccagcaccaggaccacggccagcaggcccagcaccactaacttcttcttcatggctctg

SEQ ID NO: 19635 - DNA, 102 bp, Homo sapiens
  MAP TO AC007350.1; EXPRESSED IN PLACENTA, SIGNAL = 4.9; EXPRESSED IN HELA, SIGNAL = 5.3; EXPRESSED IN ADULT LIVER, SIGNAL = 5.6; EXPRESSED IN BT474, SIGNAL = 4.8; EXPRESSED IN BRAIN, SIGNAL = 4.4; EXPRESSED IN BONE MARROW, SIGNAL = 4.9; EXPRESSED IN HEART, SIGNAL =   4; EXPRESSED IN HBL100, SIGNAL = 5.5; EXPRESSED IN FETAL LIVER, SIGNAL = 4.3; EXPRESSED IN LUNG, SIGNAL = 3.9; SWISSPROT HIT: Q28295, EVALUE 1.80e+00; NT HIT: M10973.1, EVALUE 3.40e+00; EST_HUMAN HIT: BE155625.1, EVALUE 2.20e-01
aaagtgtttgacctcccttttgggagctgcctctttcgaagtgatgtttatgacaatggatcctcatttctgtacgataactgcacagcttgtacctgcagg

SEQ ID NO: 19636 - DNA, 742 bp, Homo sapiens
  MAP TO AL035414.23; EXPRESSED IN FETAL LIVER, SIGNAL =   1; EXPRESSED IN ADULT LIVER, SIGNAL = 1.1; EXPRESSED IN BRAIN, SIGNAL = 1.1; EXPRESSED IN PLACENTA, SIGNAL = 1.2; EXPRESSED IN HELA, SIGNAL = 1.4; EXPRESSED IN BT474, SIGNAL = 1.2; EXPRESSED IN LUNG, SIGNAL = 1.6; EXPRESSED IN BONE MARROW, SIGNAL = 0.91; EXPRESSED IN HEART, SIGNAL = 1.4; EXPRESSED IN HBL100, SIGNAL =   1; EST_HUMAN HIT: AL047599.1, EVALUE 0.00e+00; SWISSPROT HIT: P26480, EVALUE 3.40e-01; NT HIT: gi11422938, EVALUE 0.00e+00
tatgtccttagaaaagctaaagtttatcgatgatcctgaagtgtacctccgaagatctgtccttataaacaatttgatgaaaaggatccatggagaaattatcatgcagaataactggtgcttccctgcctgctctttcaatggcacctctgcccaagagtggtttatggctcaagactgcccttaccgaaaacgaccacggatggccaaagaggaatgtgaaaagtttcatgcctgctgcttttaccaagaatgtggtggccactacctaaatttacccctttctgtcaatgctaatgttggaagtgcctccactgctgcctcctctccctccgcctcttcttcctcctcatcttcctcttcctctccccctttgcctttaccgagttgttcccgccaggtggattttgatgtaggtagtgcatctatttacaagagtgatggccagatacctgccaatgaaatctttgtcactaatgtcagatcacttggtgttcaggaaaaggccaaattaaatgatgagaaagcaaatgatgacaccaacagagatggtggccccctcagccacgaacctgtgggaaatgaccttgcttttgagtgcaaaggccaattttatgattattttgagaccggatataatgaaagaaacaatgtaaatgaatcttggaaaaagtccttacggaaaaaggaggcttcaccaccaagtaacaaactgtgctgcagcaaaggaagtaaaatatga

SEQ ID NO: 19637 - DNA, 571 bp, Homo sapiens
  MAP TO AC005544.1; EXPRESSED IN HELA, SIGNAL = 1.1; EXPRESSED IN HEART, SIGNAL = 1.3; EXPRESSED IN FETAL LIVER, SIGNAL = 1.6; EXPRESSED IN BT474, SIGNAL = 0.93; EXPRESSED IN BRAIN, SIGNAL = 0.97; EXPRESSED IN LUNG, SIGNAL = 1.4; EXPRESSED IN BONE MARROW, SIGNAL = 1.1; EXPRESSED IN PLACENTA, SIGNAL = 0.96; NT HIT: gi11425218, EVALUE 0.00e+00; EST_HUMAN HIT: AU137402.1, EVALUE 0.00e+00; SWISSPROT HIT: P42694, EVALUE 3.00e-39
gttgatttggaatcaaatccacagaacagaagtcctgaatcacgtcctagtgttgtttatcccagtaccaaatttcctcgcaaagataatctcaacccaagacacataaatcttccccttcctgctccccacgcacagtatgcaatccctaatcgccactttcatccccttccccagctaccaagaccaccctttccaattccacagcagcacaccttgttaaatcagcagcagaataatttgcctgaacaaccaaatcagataccacctcagccaaatcaggtagtccagcagcaaagtcagttgaatcagcagcctcagcagccacctcctcagctttctcctgcatatcaggcgggacccaacaatgctttttttaatagtgcagttgctcatcggccacagtctcctcctgcagaagctgtaattccggagcagcagccccctcccatgctgcaagaaggccacagtcctctgagagccattgcacaacccggccccattcttccttcacatctgaatagcttcattgatgagaacccctcgggattacctataggggaggctttag

SEQ ID NO: 19638 - DNA, 774 bp, Homo sapiens
  MAP TO AC005630.1; EXPRESSED IN PLACENTA, SIGNAL = 2.4; EXPRESSED IN HBL100, SIGNAL = 2.1; EXPRESSED IN BT474, SIGNAL = 1.6; EXPRESSED IN BONE MARROW, SIGNAL = 2.1; EXPRESSED IN HEART, SIGNAL = 3.4; EXPRESSED IN ADULT LIVER, SIGNAL = 1.3; EXPRESSED IN FETAL LIVER, SIGNAL = 2.8; EXPRESSED IN BRAIN, SIGNAL =   3; EXPRESSED IN LUNG, SIGNAL = 2.8; EXPRESSED IN HELA, SIGNAL = 1.9; SWISSPROT HIT: Q00657, EVALUE 1.00e-96; NT HIT: gi4503098, EVALUE 0.00e+00
aggcttgtcctgggccaggaggagctgaggctgcagaccccagcagaaattctactgagtgactccgtcccccacaccacagttctgactgtctcagaggactggcccacattgtcagtcaatgggtttctgaatgcctcctctgtagtcctgggagcccccctagaagtcccctatgggctctttgttgggagcactgggagacttggcctgccctacctgaggggaaccagccatcccctgaggggttgcctccatgcagccgctctcaatggccgcagactcctccagcctctgacccccaataagcatgagggctgtgctgaagagttttctgccaatgacgatgtggccctgggcttctctgggtcccactctctggctgccttgcctgcctggggcactcaggatgaaggaaccctggagtttacactcaccacacagagctggcaggcacccttggccttccaggcagcaggctggcatggggacttcatccatgtggacatatttgagggccacctgtggtccatggttgagaagggccagggtactgtattgctcctcaacagtgtgcctgtgactgatgcacagccccacaaggtcagcatccacatcaacattcaccagctagaaatctccatggaccagtaccccacatgtactttgaaccgaggagtcctcagctacctggagccacgtgacagtctccttcttggggagctggtgcagaggcctctcgtcacctccaggaacaccgctcaggcctgacac

SEQ ID NO: 19639 - DNA, 136 bp, Homo sapiens
  MAP TO AL109933.8; EXPRESSED IN BT474, SIGNAL =   2; EXPRESSED IN BRAIN, SIGNAL =   2; EXPRESSED IN HBL100, SIGNAL = 1.8; EXPRESSED IN HELA, SIGNAL = 1.6; EXPRESSED IN PLACENTA, SIGNAL = 1.7; EXPRESSED IN FETAL LIVER, SIGNAL = 3.3; EXPRESSED IN LUNG, SIGNAL = 1.6; EXPRESSED IN BONE MARROW, SIGNAL = 1.9; EXPRESSED IN HEART, SIGNAL = 1.6; EXPRESSED IN ADULT LIVER, SIGNAL = 2.5; NT HIT: gi11418729, EVALUE 5.00e-71; EST_HUMAN HIT: AV650284.1, EVALUE 7.00e-71; SWISSPROT HIT: P00747, EVALUE 3.00e-11
ctgcaggtgaattcttcgtcctcctcacattttgctgcacattcttctatacttcctgctcccagctgcttcttagtgacactgaacagtgaagccccctgggtattcacatagtcatccagaggctctccttgac

SEQ ID NO: 19640 - DNA, 254 bp, Homo sapiens
  MAP TO AC008925.2; EXPRESSED IN BRAIN, SIGNAL = 5.5; EXPRESSED IN LUNG, SIGNAL = 6.1; EXPRESSED IN HELA, SIGNAL = 6.1; EXPRESSED IN PLACENTA, SIGNAL = 5.2; EXPRESSED IN ADULT LIVER, SIGNAL = 6.4; EXPRESSED IN FETAL LIVER, SIGNAL =   6; EXPRESSED IN BT474, SIGNAL = 5.7; EXPRESSED IN BONE MARROW, SIGNAL = 5.4; EXPRESSED IN HEART, SIGNAL =   5; EXPRESSED IN HBL100, SIGNAL = 5.9; NT HIT: AF050667.1, EVALUE 1.30e-01; EST_HUMAN HIT: BE543930.1, EVALUE 0.00e+00; SWISSPROT HIT: P32263, EVALUE 1.70e+00
cttatcacaatgtagatctagcatttcaggcttggggaaatcctgttctatgttttcagcaatgttctgtattgctagcaactgctcgtcaattttctgaagcttagcactgagatgctctagttggtgagctgcagagcttggtgcagggcaagctgcagagacaccttgcagccgtttccacaatagataatcttctgcagagtctgactttgtgctctgtcctttgaatcggaactctggttttggcagac

SEQ ID NO: 19641 - DNA, 175 bp, Homo sapiens
  MAP TO AC007361.1; EXPRESSED IN ADULT LIVER, SIGNAL = 5.4; EXPRESSED IN BRAIN, SIGNAL = 3.6; EXPRESSED IN LUNG, SIGNAL = 3.8; EXPRESSED IN BONE MARROW, SIGNAL = 3.6; EXPRESSED IN PLACENTA, SIGNAL =   5; EXPRESSED IN HEART, SIGNAL =   3; EXPRESSED IN HELA, SIGNAL = 4.4; EXPRESSED IN HBL100, SIGNAL = 3.9; EXPRESSED IN BT474, SIGNAL = 3.4; EXPRESSED IN FETAL LIVER, SIGNAL = 3.7; SWISSPROT HIT: P54100, EVALUE 3.00e+00; EST_HUMAN HIT: BE742759.1, EVALUE 2.00e-22; NT HIT: AL163227.2, EVALUE 2.00e-34
tcccacggtcttgggcagctccacccctatggctttgcagggtacagcctccctcctggctgctttaatgggctggtgttgagtgtctgcaacttttccaggcacacggtgcaagttttcatgaatctaccattctggggtctggaggatggtgacccttttttcactgctccac

SEQ ID NO: 19642 - DNA, 133 bp, Homo sapiens
  MAP TO AL118501.4; EXPRESSED IN BONE MARROW, SIGNAL = 1.8; EXPRESSED IN LUNG, SIGNAL = 2.2; EXPRESSED IN BRAIN, SIGNAL = 1.6; EXPRESSED IN PLACENTA, SIGNAL =   2; EXPRESSED IN HELA, SIGNAL = 1.6; EXPRESSED IN HEART, SIGNAL = 1.5; EXPRESSED IN HBL100, SIGNAL = 1.7; EXPRESSED IN BT474, SIGNAL = 1.7; EXPRESSED IN FETAL LIVER, SIGNAL = 1.7; EXPRESSED IN ADULT LIVER, SIGNAL = 1.7; EST_HUMAN HIT: AU117106.1, EVALUE 1.00e-07; SWISSPROT HIT: P08548, EVALUE 8.00e-05; NT HIT: AJ271735.1, EVALUE 2.00e-05
gtgataaagaaaatgcaaatcaaaagcacaatgagatactacttcacacctattagaatagctgtaatcaaaagacagacaataacaagatttggtgaggatgtggggaaattggagctcacatacactgcag

SEQ ID NO: 19643 - DNA, 109 bp, Homo sapiens
  MAP TO AC007642.4; EXPRESSED IN HBL100, SIGNAL = 7.5; EXPRESSED IN FETAL LIVER, SIGNAL = 0.66; EXPRESSED IN ADULT LIVER, SIGNAL =   1; EXPRESSED IN HEART, SIGNAL = 0.95; EXPRESSED IN PLACENTA, SIGNAL = 0.79; EST_HUMAN HIT: AA369009.1, EVALUE 3.50e-01; NT HIT: AE000413.1, EVALUE 2.40e-01
cagcctctttgaggtaactgctatcctgactttgatgagaatcattttctttttttcctctattgttttatctatttacctttcagaaattgagttcaattttatctgt

SEQ ID NO: 19644 - DNA, 158 bp, Homo sapiens
  MAP TO AC007444.1; EXPRESSED IN PLACENTA, SIGNAL = 3.3; EXPRESSED IN HELA, SIGNAL = 4.8; EXPRESSED IN HEART, SIGNAL = 3.1; EXPRESSED IN ADULT LIVER, SIGNAL = 4.4; EXPRESSED IN BT474, SIGNAL = 1.7; EXPRESSED IN FETAL LIVER, SIGNAL = 3.5; EXPRESSED IN BRAIN, SIGNAL = 3.4; EXPRESSED IN BONE MARROW, SIGNAL = 4.8; EXPRESSED IN HBL100, SIGNAL = 4.2; EXPRESSED IN LUNG, SIGNAL = 3.1; EST_HUMAN HIT: AA759135.1, EVALUE 6.00e-03; SWISSPROT HIT: O24418, EVALUE 5.80e-01; NT HIT: AF060568.1, EVALUE 1.20e+00
tcctggtcccagccttggctctgtttctctgggctggacaactccacaactttacccctggtgtgataccccaggttcaatgaagctctaagaccacctccaagtgtcactaagggaatatcctccctgaaaatgttctgaaaccaagcagagtccat

SEQ ID NO: 19645 - DNA, 89 bp, Homo sapiens
  MAP TO AL118511.6; EXPRESSED IN PLACENTA, SIGNAL =  14; EXPRESSED IN HEART, SIGNAL = 8.9; EXPRESSED IN FETAL LIVER, SIGNAL =  12; EXPRESSED IN BONE MARROW, SIGNAL =  10; EXPRESSED IN HELA, SIGNAL =  11; EXPRESSED IN HBL100, SIGNAL =  11; EXPRESSED IN BT474, SIGNAL =  34; EXPRESSED IN ADULT LIVER, SIGNAL =  16; EXPRESSED IN BRAIN, SIGNAL =  10; EXPRESSED IN LUNG, SIGNAL =  14; NT HIT: AF280107.1, EVALUE 1.80e-01; EST_HUMAN HIT: BF380893.1, EVALUE 2.80e-01
ccaagtcacccagtgcaggcatgacagagagcaccagagcaggagaggagggcccaggccggtctggagcatccatttctagaggaaag

SEQ ID NO: 19646 - DNA, 183 bp, Homo sapiens
  MAP TO AL050344.11; EXPRESSED IN HBL100, SIGNAL = 1.5; EXPRESSED IN BRAIN, SIGNAL = 1.4; EXPRESSED IN LUNG, SIGNAL = 1.8; EXPRESSED IN BONE MARROW, SIGNAL = 1.6; EXPRESSED IN PLACENTA, SIGNAL = 1.5; EXPRESSED IN HEART, SIGNAL = 1.4; EXPRESSED IN HELA, SIGNAL = 1.6; EXPRESSED IN BT474, SIGNAL = 1.5; EXPRESSED IN ADULT LIVER, SIGNAL = 1.6; EXPRESSED IN FETAL LIVER, SIGNAL = 1.7; SWISSPROT HIT: O60152, EVALUE 8.40e+00; NT HIT: Y19214.1, EVALUE 2.70e-02; EST_HUMAN HIT: AV717817.1, EVALUE 1.00e-66
agatagggagaatatcctggattatccttttcagatggatgcaggaggagtcggagctggaggaaaaggcgatgtgatgacagaagcagaaattggagcgatgcactttgagatggaggaagaggccacaagccaaggaatgcaggtgcctctagaatctgataaaaagaaagggaatggttt

SEQ ID NO: 19647 - DNA, 108 bp, Homo sapiens
  MAP TO AL096708.14; EXPRESSED IN BT474, SIGNAL = 1.2; EXPRESSED IN FETAL LIVER, SIGNAL = 1.3; EXPRESSED IN BONE MARROW, SIGNAL = 1.4; EXPRESSED IN LUNG, SIGNAL = 1.4; EXPRESSED IN BRAIN, SIGNAL = 1.5; EXPRESSED IN PLACENTA, SIGNAL =   2; EXPRESSED IN HELA, SIGNAL = 1.4; EXPRESSED IN HEART, SIGNAL = 1.7; EXPRESSED IN HBL100, SIGNAL = 1.5; EXPRESSED IN ADULT LIVER, SIGNAL = 1.9; NT HIT: X94365.1, EVALUE 2.00e-01; SWISSPROT HIT: P54275, EVALUE 1.40e+00; EST_HUMAN HIT: BE645304.1, EVALUE 3.00e-54
cgtctctgggagagtttcaccctgttccagaatcatacactcttcttctgcggagggctcagtttcctcatgcctcttatccgagaaagcagctctttgataaattcc

SEQ ID NO: 19648 - DNA, 572 bp, Homo sapiens
  MAP TO AF130358.1; EXPRESSED IN LUNG, SIGNAL = 2.4; EXPRESSED IN HELA, SIGNAL = 2.9; EXPRESSED IN PLACENTA, SIGNAL = 2.3; EXPRESSED IN HEART, SIGNAL = 1.6; EXPRESSED IN FETAL LIVER, SIGNAL = 2.3; EXPRESSED IN ADULT LIVER, SIGNAL = 2.1; EXPRESSED IN BT474, SIGNAL =   2; EXPRESSED IN BONE MARROW, SIGNAL = 2.5; EXPRESSED IN HBL100, SIGNAL = 3.1; EXPRESSED IN BRAIN, SIGNAL = 2.1; NT HIT: gi11526128, EVALUE 0.00e+00; EST_HUMAN HIT: R13040.1, EVALUE 0.00e+00; SWISSPROT HIT: P48723, EVALUE 1.00e-105
cactcccgttactactgctaggtcagggtctacagatgtgttgggatcttttccaaagaactcttgaatgacttgacggatccgaggaatacgagtggagcccccaactaaaaccacctcatcaatctcagtcttttccaggtggccttctttcaatacttgctgaatgggtaccagtattttctgaaagaggtcttcattaagggtatcaaagagtttccgtgatatttctgtttcaaataaaacctgactttctccacttttcttatcagaaaggccacgtccaaacccactgttcacgcgatggtcatctgctgaggaaagtttgtcttttggcagttcagtgtcactactgtgaggttccttcctgtcctgctcctccaccgttagtaatactgacaactgagcagattgatgaagagtcagatttaatttgaccatttccacagcttgtctcaatctgtggatttcctctttcctagagggcacgaagccatatgtttgatagatctgtttatataagtactgaagcaatctctgattgaagtcctgtcctccaagtttattgtttc

SEQ ID NO: 19649 - DNA, 4185 bp, Homo sapiens
  MAP TO AC000119.1; EXPRESSED IN FETAL LIVER, SIGNAL = 1.3; EXPRESSED IN ADULT LIVER, SIGNAL = 1.2; EXPRESSED IN BONE MARROW, SIGNAL = 0.94; EXPRESSED IN LUNG, SIGNAL = 1.9; EXPRESSED IN HELA, SIGNAL = 1.1; EXPRESSED IN PLACENTA, SIGNAL = 1.3; EXPRESSED IN HBL100, SIGNAL =   1; EXPRESSED IN HEART, SIGNAL = 1.1; SWISSPROT HIT: Q60462, EVALUE 1.60e-01; EST_HUMAN HIT: BE613532.1, EVALUE 0.00e+00; NT HIT: AF132484.1, EVALUE 2.00e-74
gggccttcaatggaaaatcctaggtagaaagacactctttctatgttcctaccacttctgagtggacctgaataaacagatattactggtatttttattttttcctctgttccatattctacagagattagcttgccttcagcctgaccagttagacgacgcaggaggtctttgacttcattttttttccacacatccccactgtgccagagggaatttgtattttgtgctttatcaaagtactgctctattttggccttgtgaacaatactgtttagacccttccttttgcccagatagaaaagtgtgcttgcctgcttggacctgcacatgcgcttgtactgtcccctgaaggatctatttaaggatgaaacatacttttctattagtttggaatcttgatctagctcttgattttctggccagaacaggaggcaggccaagaaataaggacctggatattgatgacttagtcctacaaattgcaagacctctcggagttgtttttttagcgtggtaagtggttgaattaacttggagttgggctttagacaactcagaataatgttggccaaaatggaattttgtttctcatttgtcatgggcttttttgagttttgctgcagtaggaaggcatattcattcactatactttccatggtggtagcatctttgtagtttggattaagatattccaagagtccagcaaacctatctgctctcagagcttctagctttttcctgcaattctcctcctggagtaattgactctctttactttgtaatagacatggatccaaatgacagaaaagttctgtgtatttcctgaaacaacgactgactttcttgcttaacatgatttctgcaatttctttttgggtatacctcattttcagaagaaccatataatcaataaaaaagtcaaagcaccttttcagatctgattgtaaattttttaggtgggatgtgaacttgctaagagccaaataacattcatttctgggatcaggaggaatggtccactttcctgataaaaattgcaccatatgttttttggataattcattttctttgtggaaaaagggagtgagctgaagaatctggatagtgtaaagaccaacttctatttcacccaagaaacaagctgtgttatacatgtcatatcgtctctgggacttctgtggtgaccagttctcggtttcatagtttttactatcagtttgcctttgggattctttgaaagctcttgaggctttttccgcagcttctaggagatgtgttaggtcattaacagtaatgctcctacagtttttgttcccatccaaccaccatttgatttcacttttgtagacttgacctagtgtatctgaaatataggaatttttaggtgctttcattttggcctgacgtgcccagtccagagctgtgttaaagtccttctctttaatgtagaaatgtcttgctaaggcttgacaaatgaatgcattttgtgggaatcgtctacttcctgcactcaagaccttttcaatgtctttattctgtaaagcttccattaatggggaaaacagagtgtctgtttcatctccatacaccttgcgctgtcttgtaagcagaagagtttgaacatcatgttgaaatttgtctcttcctattccagaatcatagaataaattctcttctaatatattcaatgcaatttgacatttatccaagtgatagcttctttccagttcttttagacagtacagggcaatcagagggtgaatgatacgcacacctgtgtatctcccatattctgcaacttctgtttttattagaagtgtagaataagttcccatcttgtcttctaagctttcaggttcccagggtgtactagtgtatatgattcccaaaaatatttcacactgtgaaactgaaattgtagagtcagtaacataagagctgagtaaagccaggaaggaaatgagttgtgcttccttgctgtcaacatcctgtccttttaggatattcctgactacattttctatatatgtttcatcaaaattgcttttcatgatcatgaaggaataaaagttttcacagttcttgtgctgcttttcaatttccttcagtttggcaccaaaagctctttgttccttggaagaaagttggtaatttagtgcaatactgtctgccaattttgcactttcatctggattccgggatctcatgcagtttaagataattaccaatgttttttcatatcgcaaatccttttctgctaaaacggaatggatggcattttgtagaaagtagacattttcttgttcttcaaaatcatccacaaggagaagcacaggaatgtaatcctgatggctctttgccctataggtgaccagattgatcacttgctctgcaatttctgcaaaatcagttgtcttgttttttaacacagcacatctgaagtttttctttaagtcccagagaacatgcatagccagtgtggtacctccacagcctggatgatgataaagattgatgatttttgcaaatattggtttaggagactctgcccagcagtgtattaaatctttaagcttttcataactgtcccttttaacaaaatctgaagaatagttttcagaagaaaaatagaagttccaccaggatactttgccacctcgataaaagtgttcttcttttgatttcttaaactccaggaatttagatttgtctttctcgatgtctgtctctgtacactcattttcacagaggatttccagtgcagtcaagacatcctctttctttttctctaggataactgaagaagatccacgggcgggcaaaaaccttcttgatgaccgagtcaccgattttagtttaaggatagtgctgtttaccagttctatatttaaagtggaaatactgtggtttgttagttcatcttccatcttcattcttgtttgtagtagatctttccatcgttgataaatatgtgagtttacagagatacacaacatattttccattcctttgagagcttgatagaaagcccagaaagtttcaatgagtggatctcctgggctttccactgaagagagtaatagaaacactaccaaaaattttcctcttgtcattatattttcatctgtgagaaataaaattagtttcctgacttctgaagctctttctctctgccataaatgtggttctagaggtttatatgtctcgcttttcaggtctgatctgccgttgcagaaaatccagctgggctgttggtaaagattaagagtagaaatcttctcccacatgttagttgtcttgtcttcatattgatttggaaagtgaaggtttgccacccgactttctttgtaagctttgaccactccattgatcatagattcaggatcaaactccaacacagcaaaccatttaatttcttttaaaaaatctaagtgctttatttggtttggatggcatttatttgttacaagaatgtaccagtcatagtatgaattatccagtgagtctcggtttcctatgagaagtttaaccagctttagtccttcactctccttcttcattgccttcattccatactcttcttcagcctcttttctagatgctaccagtgactttaaattttgtaaaaatgccttgaaatctacatcccgttgcttggaattggccaggatatccctagagctagccccttctcttacaaacagtgaaagattttggttttgtttccatattttatctttacaaatttgcatctgaatgtagaaatacttatcattacatatagagtgttttggaatagtatcaacttcaatgacaaatctgtcagatggtgtattgttctgcagaaggacttccacaaaccttggctcccgaatacacttcttggcttcattgatctcactttcttcaaaatactttttgatcattacattgaagtggtcaatgaaggcagccttactggtgattttcacaccaacaatttctccatggggtttgtccttgactccaaaatggatggtgccattggtgcgtgaattcatacaagctgatgcaaatcggaagacttcattgctgaatttcatcttaatgtccacttccgtggctgtttctgtgtttgtgagagctttgaactcatgtattggatcaatgagattgagtgctcctgtttcaggttgtagagta

SEQ ID NO: 19650 - DNA, 98 bp, Homo sapiens
  MAP TO AL121593.3; EXPRESSED IN ADULT LIVER, SIGNAL = 1.9; EXPRESSED IN BT474, SIGNAL = 1.8; EXPRESSED IN BRAIN, SIGNAL = 1.9; EXPRESSED IN HBL100, SIGNAL = 1.6; EXPRESSED IN HELA, SIGNAL = 1.8; EXPRESSED IN PLACENTA, SIGNAL = 2.3; EXPRESSED IN FETAL LIVER, SIGNAL = 2.4; EXPRESSED IN LUNG, SIGNAL = 1.6; EXPRESSED IN BONE MARROW, SIGNAL = 1.9; EXPRESSED IN HEART, SIGNAL = 1.6; NT HIT: AF184589.1, EVALUE 1.80e-01; SWISSPROT HIT: Q63148, EVALUE 7.00e+00; EST_HUMAN HIT: BE867614.1, EVALUE 4.80e+00
agaagtctgactgcaccttggtggagcccatattgcactggggagaatcatcctcctcctctggacggccagcagacaggaaagactaggtccactga

SEQ ID NO: 19651 - DNA, 140 bp, Homo sapiens
  MAP TO AC007563.1; EXPRESSED IN PLACENTA, SIGNAL = 1.1; EXPRESSED IN HELA, SIGNAL = 0.59; EXPRESSED IN HEART, SIGNAL =   1; EXPRESSED IN BRAIN, SIGNAL = 1.4; EXPRESSED IN ADULT LIVER, SIGNAL = 0.79; EXPRESSED IN HBL100, SIGNAL = 0.67; EXPRESSED IN BONE MARROW, SIGNAL = 0.76; EXPRESSED IN BT474, SIGNAL = 0.87; EXPRESSED IN LUNG, SIGNAL = 0.73; EXPRESSED IN FETAL LIVER, SIGNAL = 0.64; SWISSPROT HIT: Q11000, EVALUE 1.70e+00; NT HIT: AL445067.1, EVALUE 8.00e-02; EST_HUMAN HIT: AI344324.1, EVALUE 1.90e+00
tcattgggcagtgctgctggaagatggtagcaactcacatgagccacaaggtaattcacagttgggtcccagccacacttgttcagcctcattgactgccacacccagaccatgtgttcttcctgcgctggtgcctccac

SEQ ID NO: 19652 - DNA, 131 bp, Homo sapiens
  MAP TO AC007963.1; EXPRESSED IN ADULT LIVER, SIGNAL = 1.3; EXPRESSED IN BRAIN, SIGNAL = 1.2; EXPRESSED IN HEART, SIGNAL = 1.2; EXPRESSED IN BONE MARROW, SIGNAL = 1.6; EXPRESSED IN HBL100, SIGNAL = 0.94; EXPRESSED IN LUNG, SIGNAL = 1.3; EXPRESSED IN HELA, SIGNAL = 1.1; EXPRESSED IN PLACENTA, SIGNAL =   1; EXPRESSED IN BT474, SIGNAL = 0.96; EXPRESSED IN FETAL LIVER, SIGNAL = 1.3; NT HIT: AB041533.1, EVALUE 6.00e-58; EST_HUMAN HIT: BE242150.1, EVALUE 6.00e-58; SWISSPROT HIT: Q16478, EVALUE 8.90e+00
  unsure 125
ccataccctgctgagtcgggactcaaaagccaaggaagttgaagacttagaactcttcatgccggaagaggctgcaggcagaggccgcacccggtctgggccgtggccccctgctctgatggctngggttc

SEQ ID NO: 19653 - DNA, 205 bp, Homo sapiens
  MAP TO AL109919.6; EXPRESSED IN BT474, SIGNAL =   2; EXPRESSED IN FETAL LIVER, SIGNAL = 2.4; EXPRESSED IN ADULT LIVER, SIGNAL = 5.3; EXPRESSED IN BONE MARROW, SIGNAL =   2; EXPRESSED IN LUNG, SIGNAL = 1.8; EXPRESSED IN BRAIN, SIGNAL = 2.5; EXPRESSED IN PLACENTA, SIGNAL = 1.9; EXPRESSED IN HELA, SIGNAL = 2.4; EXPRESSED IN HEART, SIGNAL =   2; EXPRESSED IN HBL100, SIGNAL = 2.3; EST_HUMAN HIT: AI720470.1, EVALUE 1.20e-01; SWISSPROT HIT: P35446, EVALUE 9.50e-01
tccactgctccctcatggcctttctctgcctcctggcctttctctgttatgcctcccttggccttgcctgattgtctccttatttcattgttcaattttccaggagacaaaacctcattcatctgagtaatctgtactgtttgagagaacagggctttccacaacaggctattcacaggactctgcccactgcagattgtagtgg

SEQ ID NO: 19654 - DNA, 292 bp, Homo sapiens
  MAP TO AC006390.8; EXPRESSED IN FETAL LIVER, SIGNAL = 1.2; EXPRESSED IN LUNG, SIGNAL = 0.85; EXPRESSED IN HELA, SIGNAL = 1.1; EXPRESSED IN PLACENTA, SIGNAL = 1.2; EXPRESSED IN BT474, SIGNAL = 1.5; EXPRESSED IN HEART, SIGNAL = 1.1; EXPRESSED IN BRAIN, SIGNAL = 1.3; EXPRESSED IN ADULT LIVER, SIGNAL = 1.2; EXPRESSED IN HBL100, SIGNAL = 1.3; EXPRESSED IN BONE MARROW, SIGNAL = 0.85; SWISSPROT HIT: P35210, EVALUE 5.00e+00; EST_HUMAN HIT: BF340120.1, EVALUE 2.70e-01
aagagatttggggaaatccttgttctatggagctgacgtagcttatttgggaattgaggtagataaagaaaatggaagcaacagttctgtcagatggaaccggccgtctggaattatcactatttcttttaacgtgatggcctatgaagatgtgttgcttggggttgctgcagcttcttgtgaccgtgaaggggacatgaagagaattacagagaagcttgctcagaactttgatgttgttgagctgctgagttaatagtgcaattttcagacttattttcagacttattac

SEQ ID NO: 19655 - DNA, 320 bp, Homo sapiens
  MAP TO AC007101.1; EXPRESSED IN BONE MARROW, SIGNAL = 4.1; EXPRESSED IN LUNG, SIGNAL = 4.6; EXPRESSED IN BRAIN, SIGNAL = 4.2; EXPRESSED IN HELA, SIGNAL = 4.3; EXPRESSED IN PLACENTA, SIGNAL =   4; EXPRESSED IN HBL100, SIGNAL = 4.1; EXPRESSED IN HEART, SIGNAL = 3.1; EXPRESSED IN FETAL LIVER, SIGNAL = 4.1; EXPRESSED IN BT474, SIGNAL = 3.7; EXPRESSED IN ADULT LIVER, SIGNAL = 4.1; EST_HUMAN HIT: BE614893.1, EVALUE 5.00e-03; SWISSPROT HIT: P25691, EVALUE 5.00e-51; NT HIT: Y19210.1, EVALUE 0.00e+00
caccttgtcgatgaaggccgcgaacctgctgttgagggacttgatctgctccttctcctcctgcttcacgcactgtgcgttggggtcgatctccaggttgaggggcgtgaggaggctctcgttgaccgacacggtagtgatgcatggggggctgggtccgcacacgcccccggagcggtagccgaagctgcgtccgcaggagccggctcggaagccacctacagctatccggggcccgcaggagcccaggttgcagaggctgcggctgccgaagcccgtcagccctcggtagcaggacacccctcggtagggggcggcgc

SEQ ID NO: 19656 - DNA, 133 bp, Homo sapiens
  MAP TO AL118523.9; EXPRESSED IN FETAL LIVER, SIGNAL = 8.7; EXPRESSED IN ADULT LIVER, SIGNAL =  11; EXPRESSED IN HELA, SIGNAL = 8.5; EXPRESSED IN HBL100, SIGNAL = 7.8; EXPRESSED IN BT474, SIGNAL = 7.5; EXPRESSED IN BRAIN, SIGNAL = 7.5; EXPRESSED IN LUNG, SIGNAL =  10; EXPRESSED IN BONE MARROW, SIGNAL = 8.5; EXPRESSED IN PLACENTA, SIGNAL = 9.1; EXPRESSED IN HEART, SIGNAL = 7.1; NT HIT: U01086.1, EVALUE 4.60e+00; EST_HUMAN HIT: AA713856.1, EVALUE 1.90e-02; SWISSPROT HIT: P13090, EVALUE 1.80e+00
agtagattttgaaaatattgttgatgtgtttacttccattatagccagagtatacatttttccttctgcctcaggcaccaataaggcttggcacagcagcaccctggccaaggcagagggtagatttgaagat

SEQ ID NO: 19657 - DNA, 238 bp, Homo sapiens
  MAP TO AC007632.4; EXPRESSED IN FETAL LIVER, SIGNAL = 0.61; EXPRESSED IN LUNG, SIGNAL = 0.73; EXPRESSED IN HELA, SIGNAL = 0.68; EXPRESSED IN BONE MARROW, SIGNAL = 0.69; EXPRESSED IN ADULT LIVER, SIGNAL = 1.1; EXPRESSED IN HEART, SIGNAL = 0.83; EXPRESSED IN PLACENTA, SIGNAL = 0.81; EXPRESSED IN BT474, SIGNAL = 0.8; NT HIT: AF055928.1, EVALUE 3.10e-02; EST_HUMAN HIT: AI251744.1, EVALUE 9.00e-03; SWISSPROT HIT: Q03656, EVALUE 2.50e+00
tcagaccgactttggctccatggctgtaggtacaccatatgccattcctcttcctcccttttcctccatgtcactctcctcctttttcatctcctcctcagatgtctccttgttcctctttccgttatcatcccccaccttcctgttcttgttattcttattagtatcatggtcagaataactattctggctctgtacctcccctaacaggattttggtatctgatagagtgagtata

SEQ ID NO: 19658 - DNA, 347 bp, Homo sapiens
  MAP TO AC010899.2; EXPRESSED IN BT474, SIGNAL =   1; EXPRESSED IN ADULT LIVER, SIGNAL = 1.3; EXPRESSED IN BRAIN, SIGNAL = 1.3; EXPRESSED IN LUNG, SIGNAL = 1.3; EXPRESSED IN BONE MARROW, SIGNAL = 1.2; EXPRESSED IN PLACENTA, SIGNAL =   1; EXPRESSED IN HEART, SIGNAL = 1.2; EXPRESSED IN HELA, SIGNAL = 1.1; EXPRESSED IN HBL100, SIGNAL = 1.1; EXPRESSED IN FETAL LIVER, SIGNAL = 1.2; NT HIT: gi4758279, EVALUE 0.00e+00; EST_HUMAN HIT: T07733.1, EVALUE 0.00e+00; SWISSPROT HIT: P54764, EVALUE 6.00e-64
gtccaccatctgctcccctgaacttgatttcaaatgtcaacgagacatctgtgaacttggaatggagtagccctcagaatacaggtggccgccaggacatttcctataatgtggtatgcaagaaatgtggagctggtgaccccagcaagtgccgaccctgtggaagtggggtccactacaccccacagcagaatggcttgaagaccaccaaagtctccatcactgacctcctagctcataccaattacacctttgaaatctgggctgtgaatggagtgtccaaatataaccctaacccagaccaatcagtttctgtcactgtgaccaccaaccaagcaggtaggaat

SEQ ID NO: 19659 - DNA, 466 bp, Homo sapiens
  MAP TO AC010491.2; EXPRESSED IN FETAL LIVER, SIGNAL =  42; EXPRESSED IN BT474, SIGNAL =  43; EXPRESSED IN ADULT LIVER, SIGNAL = 4.3; EXPRESSED IN BRAIN, SIGNAL =  21; EXPRESSED IN PLACENTA, SIGNAL =  26; EXPRESSED IN LUNG, SIGNAL =  67; EXPRESSED IN BONE MARROW, SIGNAL =  23; EXPRESSED IN HEART, SIGNAL =  19; EXPRESSED IN HELA, SIGNAL =  48; EXPRESSED IN HBL100, SIGNAL =  50; EST_HUMAN HIT: BE546317.1, EVALUE 0.00e+00; NT HIT: gi11418792, EVALUE 0.00e+00; SWISSPROT HIT: P04720, EVALUE 3.00e-85
gcatttgtgccaatttctggttggaatggtaacaacatgctggagccaagtgctaacatgccttggttcaagggatggaaagtcacccgtaaggatggcaatgccagtggaaccatgctgcttgaggctctggactgcatcctaccaccaactcgtccaactgacaagcccttgcgcctgcctctccaggatgtctacaaaattggtggtattggtagtgttcctgttggccgagtggagactggtattctcaaacccggtatggtggtcacctttgctccagtcaacgttacaacagaagtaaaatctgtcgaaatgcaccatgaagctttgggtgaagctcttcctggggacagtgtgggcttccatgtcaagaatgtgtctgtcaaggatgttcgtcgtggcaacgttgctggtgacagcaaaaatgacccaccaatggaagcagctggcttcactgctcagg

SEQ ID NO: 19660 - DNA, 315 bp, Homo sapiens
  MAP TO AC007111.1; EXPRESSED IN HBL100, SIGNAL = 2.6; EXPRESSED IN HEART, SIGNAL = 1.2; EXPRESSED IN BT474, SIGNAL = 0.98; EXPRESSED IN BONE MARROW, SIGNAL = 0.92; EXPRESSED IN BRAIN, SIGNAL = 1.9; EXPRESSED IN HELA, SIGNAL = 2.2; EXPRESSED IN PLACENTA, SIGNAL = 1.2; NT HIT: gi11418081, EVALUE 4.90e-02; EST_HUMAN HIT: AI561002.1, EVALUE 0.00e+00; SWISSPROT HIT: P15302, EVALUE 8.00e-10
acatagaagtcagggaccattttcttcttagacacgcagtcactttcctgattattcttcacatcccctagagtggagactccggtgagggtcaggatggtcttcaggccacaggtggcgcctaggaggatgtctgtgtccaggcggtctcccaccatgacggtgcgctcggggttgatgccgtattcctgggacacgcagtcgaaaatgaagcggctgggcttcccgatgatgtcggcctggcgctgggcggccatctccacggctcggaccagacacccggtacctgcggggcacaggggaccgggtcaaagg

SEQ ID NO: 19661 - DNA, 168 bp, Homo sapiens
  MAP TO AL121575.6; EXPRESSED IN LUNG, SIGNAL = 1.4; EXPRESSED IN HELA, SIGNAL = 1.5; EXPRESSED IN PLACENTA, SIGNAL = 0.95; EXPRESSED IN HBL100, SIGNAL = 1.2; EXPRESSED IN HEART, SIGNAL = 1.1; EXPRESSED IN ADULT LIVER, SIGNAL = 0.99; EXPRESSED IN FETAL LIVER, SIGNAL = 1.3; EXPRESSED IN BONE MARROW, SIGNAL = 1.3; EXPRESSED IN BRAIN, SIGNAL =   1; EST_HUMAN HIT: AA325467.1, EVALUE 8.00e-21; SWISSPROT HIT: P31618, EVALUE 6.50e+00; NT HIT: AB033042.1, EVALUE 1.00e-75
cattttccagagaagacaaagaaagagaggaggggagccctgcatagagaagtgggtaataatgtcgttttcgttgctcattgacttccacttcctatactcctcctccacattttttttcagattaaaacggctttcctgaggcacattattttgtttgaagaatgc

SEQ ID NO: 19662 - DNA, 1820 bp, Homo sapiens
  MAP TO AC005261.1; EXPRESSED IN HEART, SIGNAL = 1.9; EXPRESSED IN FETAL LIVER, SIGNAL = 1.7; EXPRESSED IN BT474, SIGNAL = 1.5; EXPRESSED IN LUNG, SIGNAL = 1.2; EXPRESSED IN BRAIN, SIGNAL = 1.6; EXPRESSED IN HELA, SIGNAL = 1.5; EXPRESSED IN PLACENTA, SIGNAL = 1.2; EXPRESSED IN HBL100, SIGNAL = 1.2; EST_HUMAN HIT: BE799352.1, EVALUE 6.00e-28; NT HIT: gi11426556, EVALUE 0.00e+00; SWISSPROT HIT: P52740, EVALUE 0.00e+00
gtttttggtgtgaagcagaacatgaggcaccttctgagcagagcgtttctgtagaaggagtgtcacaggtcaggactgctgagtcaggtcttttccagaaagcacacccatgtgagatgtgtgacccactcttgaaagacattttgcacctggctgaacaccagggatcacaccttacacagaaactgtgcacacgtgggctgtgtaggagaagattctcgttcagtgcaaacttttaccagcaccagaagcaacataatggagagaattgcttcagaggggatgatggaggggcctcatttgtgaagagctgtacagtccacatgttagggagatcctttacgtgcagggaggaagggatggacttaccagatagctctggccttttccagcaccagaccacttacaatagggtgagtccatgcagaaggactgaatgcatggagtctttcccacacagctccagtctcaggcaacaccaaggagactatgatggacagatgcttttcagttgcggtgatgaagggaaagccttcctggacacctttactcttcttgacagccagatgactcatgctgaggtgagacccttcagatgcctaccatgtggaaatgtgttcaaggagaaatcagctcttattaatcacagaaaaatccacagtggagaaatatctcatgtgtgtaaggagtgtggaaaagccttcattcacttgcaccacctaaaaatgcaccagaaatttcacactggaaaaagacactatacatgcagtgaatgtgggaaggccttcagccgcaaggacacacttgttcagcatcagagagttcacactggagaaagatcttatgactgcagtgaatgtggaaaagcctacagcagaagctcccaccttgttcagcaccagagaattcacacaggagaaaggccttataagtgcaacaaatgtgggaaagcctttagccgtaaagacacacttgttcagcaccagagatttcatactggagaaaggccttatgagtgcagtgaatgtggaaaattctttagccaaagctcccaccttattgagcactggagaattcataccggggcaaggccctatgaatgcatagaatgtggaaaattctttagccataactctagcctcattaaacatcggagagtccacacaggagcaagatcctacgtgtgcagcaaatgtgggaaggcctttggctgcaaagacacacttgttcagcaccagataattcacactggagcaaggccttatgagtgcagtgaatgtgggaaggccttcagccgtaaagacacacttgtgcaacaccaaaaaatccacactggagaaaggccttatgagtgtggtgaatgtggtaaattcttcagccatagctccaaccttattgtacaccagagaattcacactggagcaaagccttatgagtgcaatgaatgtgggaaatgctttagccacaactccagcctcattttgcaccagagagttcacacaggagcaaggccttatgtgtgcagtgaatgtgggaaggcttacattagtagctcccaccttgttcaacacaagaaagttcacactggagcaagaccttatgagtgcagtgaatgtgggaaattctttagccgcaactctggcctcattctgcaccagagggttcacactggagaaaagccttacgtatgcagcgaatgtgggaaagcctatagcagaagctcccatcttgttcgtcaccagaaagctcacactggagaaagagctcacgagtgcaacagttttggtggccctttagctgcatctcttaaacttgtttaa

SEQ ID NO: 19663 - DNA, 690 bp, Homo sapiens
  MAP TO AC005366.1; EXPRESSED IN LUNG, SIGNAL = 1.4; EXPRESSED IN BRAIN, SIGNAL =   2; EXPRESSED IN HELA, SIGNAL = 1.3; EXPRESSED IN PLACENTA, SIGNAL =   1; EXPRESSED IN HBL100, SIGNAL = 1.1; EXPRESSED IN BT474, SIGNAL = 0.95; EXPRESSED IN BONE MARROW, SIGNAL = 0.97; EXPRESSED IN HEART, SIGNAL = 1.5; EXPRESSED IN ADULT LIVER, SIGNAL = 1.1; EXPRESSED IN FETAL LIVER, SIGNAL = 1.2; NT HIT: gi11128024, EVALUE 0.00e+00; EST_HUMAN HIT: Z19373.1, EVALUE 1.70e-01; SWISSPROT HIT: P11269, EVALUE 2.70e+00
ctcttacaaaaatggtgacatcactatgggcacttactgagaggccagtactctctaggacatggcctagccatatgcctggatcagaataaccctcaagcatttgttgagcctgcaaaggtctcacctctagcccatagagaagatcagagggtgggcagcttgggcgaacaggctcccctgccataggtgcactgggtgacttcaccatcatgaagctatcactccgagtgggtgcagaagccaagggtgtacagccatgagagtggcctcccacatcaacaaacttgatagggtcatctgaccctagctggattcggaggatcccattggaagggggaagcccctccctccttcgagatctggtgagacaggcacaggtgccagcaggaaagcatgtgactccacaggctgccccacgaagacacttagagagtagtgccacgaatgagccaaaggagacaaagcaaattgccactagggacacagccaagtagagggttagacgagattctccttcccttggagctgaagattctcgaagatctgggacaactggatgagtgtcttcctctaaggacactaagagagtaacagaggtagagagtggtggactaccactatcctttaccacaatgaccagcttctgtggtgggaggtcagctgggataggaacagccgtccgcacct

SEQ ID NO: 19664 - DNA, 193 bp, Homo sapiens
  MAP TO AP000014.2; EXPRESSED IN BONE MARROW, SIGNAL =   1; EXPRESSED IN LUNG, SIGNAL =   1; EXPRESSED IN PLACENTA, SIGNAL = 1.2; EXPRESSED IN ADULT LIVER, SIGNAL = 1.3; EXPRESSED IN BT474, SIGNAL = 0.97; EXPRESSED IN HEART, SIGNAL = 1.1; EXPRESSED IN HBL100, SIGNAL = 1.2; EXPRESSED IN BRAIN, SIGNAL = 0.98; EST_HUMAN HIT: AJ003514.1, EVALUE 9.00e-21; SWISSPROT HIT: P08098, EVALUE 3.70e+00; NT HIT: gi11430908, EVALUE 1.10e-01
aggaaaacagaggctatttattcacacgtgctgtagtaagggaccatcacgtgcatttggtaacggcccaaaggcaggcaggggagtgagaaagcttcatgttggaaaagggggaaggcctcaggcatgccctgatggaaactgtcatcatggggaagctgcaggtgagctacctagaaatggacatcctgtg

SEQ ID NO: 19665 - DNA, 160 bp, Homo sapiens
  MAP TO AL121763.5; EXPRESSED IN BT474, SIGNAL = 0.98; EXPRESSED IN BRAIN, SIGNAL = 0.99; EXPRESSED IN BONE MARROW, SIGNAL = 1.5; EXPRESSED IN PLACENTA, SIGNAL = 1.2; EXPRESSED IN HBL100, SIGNAL = 1.2; EXPRESSED IN HELA, SIGNAL = 0.94; EXPRESSED IN HEART, SIGNAL = 1.1; EXPRESSED IN FETAL LIVER, SIGNAL = 1.2; EXPRESSED IN ADULT LIVER, SIGNAL = 1.2; SWISSPROT HIT: O51596, EVALUE 6.60e+00; NT HIT: AF102552.1, EVALUE 1.40e+00; EST_HUMAN HIT: AL039044.1, EVALUE 1.00e-62
tgaggagtcaaagatggtggtggagctgcccagcaaagatgttcaagtgaaggcatcaggagatggggatgctgagagtcagaagctagatgatgaagcaacagctttgctgcatttcaggataagagcaaagaagctaaatctcaggcaccctttggtc

SEQ ID NO: 19666 - DNA, 205 bp, Homo sapiens
  MAP TO AP000018.2; EXPRESSED IN BT474, SIGNAL = 1.3; EXPRESSED IN BRAIN, SIGNAL = 1.9; EXPRESSED IN BONE MARROW, SIGNAL = 1.5; EXPRESSED IN HELA, SIGNAL = 1.2; EXPRESSED IN ADULT LIVER, SIGNAL = 1.3; EXPRESSED IN FETAL LIVER, SIGNAL = 1.2; EXPRESSED IN LUNG, SIGNAL = 1.1; EXPRESSED IN PLACENTA, SIGNAL = 2.1; EXPRESSED IN HEART, SIGNAL = 1.5; EXPRESSED IN HBL100, SIGNAL = 1.4; EST_HUMAN HIT: AA077732.1, EVALUE 4.90e-01
gctgccactactatcaaaactactaccattactactactaataacataactactattgtcactactattaccactaccattagtactaccaccactatcatcactaccatcactactaatactatcattaccactactattaccattaccacgactatcattactactactaccacctccaccattactactactaatgctatca

SEQ ID NO: 19667 - DNA, 192 bp, Homo sapiens
  MAP TO AP000351.3; EXPRESSED IN PLACENTA, SIGNAL = 2.1; EXPRESSED IN HEART, SIGNAL = 2.8; EXPRESSED IN ADULT LIVER, SIGNAL = 2.9; EXPRESSED IN BT474, SIGNAL = 2.5; EXPRESSED IN LUNG, SIGNAL = 2.2; EXPRESSED IN BRAIN, SIGNAL = 2.7; EXPRESSED IN HELA, SIGNAL = 2.3; EXPRESSED IN HBL100, SIGNAL = 2.6; EXPRESSED IN FETAL LIVER, SIGNAL = 3.2; EXPRESSED IN BONE MARROW, SIGNAL = 2.8; EST_HUMAN HIT: BF343733.1, EVALUE 3.00e-09; SWISSPROT HIT: P30711, EVALUE 1.00e-08; NT HIT: AF240786.1, EVALUE 1.00e-104
gctggctgctgagtctttgaaagcggacccacggtggcagcatggtgcccaacacgtggaggctgcagtgcgggaggacctcttccaggaggccctcccagctgtcctgaaggccaaggacctgcctccagtagaacctgctgttaaagagaatctgaagaccttaatgcagcttttcttgctgtgagtgcg

SEQ ID NO: 19668 - DNA, 148 bp, Homo sapiens
  MAP TO AC007126.5; EXPRESSED IN BONE MARROW, SIGNAL = 1.3; EXPRESSED IN LUNG, SIGNAL = 1.3; EXPRESSED IN BRAIN, SIGNAL = 1.3; EXPRESSED IN HELA, SIGNAL = 1.5; EXPRESSED IN PLACENTA, SIGNAL = 1.2; EXPRESSED IN HBL100, SIGNAL = 1.2; EXPRESSED IN HEART, SIGNAL = 1.1; EXPRESSED IN FETAL LIVER, SIGNAL = 1.3; EXPRESSED IN BT474, SIGNAL =   1; EXPRESSED IN ADULT LIVER, SIGNAL = 1.6; NT HIT: AL163303.2, EVALUE 7.00e-05; EST_HUMAN HIT: BE069189.1, EVALUE 6.00e-06; SWISSPROT HIT: O95947, EVALUE 1.00e+00
caaaggctcttgcccccagttccccttctcccctctgcccaggggtcagaccctgctgcttccctgcatggccttgcatagagtggcatgagaactgtgagaggacttcttccttcatgacagtcatttctctgcctgtgtgtcttac

SEQ ID NO: 19669 - DNA, 81 bp, Homo sapiens
  MAP TO AC007681.2; EXPRESSED IN FETAL LIVER, SIGNAL = 0.69; EXPRESSED IN LUNG, SIGNAL = 0.74; EXPRESSED IN HELA, SIGNAL =   1; EXPRESSED IN BT474, SIGNAL = 0.84; EXPRESSED IN PLACENTA, SIGNAL = 1.2; EXPRESSED IN HEART, SIGNAL = 1.3; EXPRESSED IN BRAIN, SIGNAL =   1; EXPRESSED IN ADULT LIVER, SIGNAL = 1.1; EXPRESSED IN HBL100, SIGNAL = 0.79; EXPRESSED IN BONE MARROW, SIGNAL = 0.78; NT HIT: gi5902085, EVALUE 5.50e-01; EST_HUMAN HIT: BE262710.1, EVALUE 6.60e-01
cagagagatgaaaatgataagcacctcctccatcttatggacccttctctggcctaactgctgtcaaccccctggattttt

SEQ ID NO: 19670 - DNA, 149 bp, Homo sapiens
  MAP TO AC007200.1; EXPRESSED IN BRAIN, SIGNAL = 6.4; EXPRESSED IN LUNG, SIGNAL =  12; EXPRESSED IN HEART, SIGNAL = 6.4; EXPRESSED IN FETAL LIVER, SIGNAL = 6.7; EXPRESSED IN BONE MARROW, SIGNAL = 6.1; EXPRESSED IN PLACENTA, SIGNAL = 6.8; EXPRESSED IN HELA, SIGNAL = 8.1; EXPRESSED IN HBL100, SIGNAL = 6.9; EXPRESSED IN BT474, SIGNAL =   7; EXPRESSED IN ADULT LIVER, SIGNAL = 6.5; NT HIT: L78810.1, EVALUE 7.00e-24; EST_HUMAN HIT: AI961087.1, EVALUE 5.00e-28; SWISSPROT HIT: P32790, EVALUE 1.20e-01
gcggtcgatgggactgggtgccgtggagcagggagcggtgctcctccaggaggctggggctgcgcaggagcccatggcaggtggggggaggctcatgcatggcaggctgcaggtcccgagccctgccctgcgggggcagctaaggccag

SEQ ID NO: 19671 - DNA, 119 bp, Homo sapiens
  MAP TO AC009959.3; EXPRESSED IN PLACENTA, SIGNAL = 2.1; EXPRESSED IN HELA, SIGNAL = 1.7; EXPRESSED IN HEART, SIGNAL = 1.6; EXPRESSED IN ADULT LIVER, SIGNAL = 2.1; EXPRESSED IN BT474, SIGNAL = 1.5; EXPRESSED IN FETAL LIVER, SIGNAL = 1.6; EXPRESSED IN BRAIN, SIGNAL = 1.6; EXPRESSED IN BONE MARROW, SIGNAL = 1.3; EXPRESSED IN HBL100, SIGNAL = 1.4; EXPRESSED IN LUNG, SIGNAL = 1.7; NT HIT: AF020503.1, EVALUE 2.20e-01
cggaagccaaggaacctttgacccctagtcaacctgtggaatctgagctacctctagagagactcacaatgactgagccggttaatggactttgtggagtacctcaaattgtggtcatt

SEQ ID NO: 19672 - DNA, 77 bp, Homo sapiens
  MAP TO AC005497.2; EXPRESSED IN ADULT LIVER, SIGNAL = 1.3; EXPRESSED IN BONE MARROW, SIGNAL = 0.95; EXPRESSED IN HELA, SIGNAL =   1; EXPRESSED IN BRAIN, SIGNAL =   1; EXPRESSED IN HEART, SIGNAL = 0.95; EXPRESSED IN PLACENTA, SIGNAL = 0.84; EXPRESSED IN BT474, SIGNAL = 0.94; EXPRESSED IN HBL100, SIGNAL = 1.1; EXPRESSED IN FETAL LIVER, SIGNAL =   1; EXPRESSED IN LUNG, SIGNAL =   1; NT HIT: AJ007973.1, EVALUE 3.30e-02; EST_HUMAN HIT: AA868218.1, EVALUE 3.00e-06
cccatgtcacacaccctgtgaggggaataaggaaactcttcctgtttcaactggggccttgcctgagatcccggaag

SEQ ID NO: 19673 - DNA, 102 bp, Homo sapiens
  MAP TO AC007221.1; EXPRESSED IN HBL100, SIGNAL = 3.9; EXPRESSED IN HELA, SIGNAL = 4.1; EXPRESSED IN HEART, SIGNAL = 3.9; EXPRESSED IN FETAL LIVER, SIGNAL = 4.1; EXPRESSED IN BT474, SIGNAL = 4.4; EXPRESSED IN ADULT LIVER, SIGNAL = 4.6; EXPRESSED IN BRAIN, SIGNAL = 3.4; EXPRESSED IN PLACENTA, SIGNAL = 3.8; EXPRESSED IN LUNG, SIGNAL = 3.9; EXPRESSED IN BONE MARROW, SIGNAL = 3.5; EST_HUMAN HIT: F02573.1, EVALUE 1.30e+00; NT HIT: U66066.1, EVALUE 1.90e-01; SWISSPROT HIT: P08721, EVALUE 9.10e+00
ttcagcatttccttctcctcaacattgtcatcatcaccatggtcatggataccattcgaagcaattgtcatgtgctgggacttccaatccactatctcatgt

SEQ ID NO: 19674 - DNA, 251 bp, Homo sapiens
  MAP TO AC010947.2; EXPRESSED IN HBL100, SIGNAL =   3; EXPRESSED IN HELA, SIGNAL = 3.1; EXPRESSED IN HEART, SIGNAL = 5.9; EXPRESSED IN FETAL LIVER, SIGNAL = 3.2; EXPRESSED IN BT474, SIGNAL = 2.9; EXPRESSED IN ADULT LIVER, SIGNAL =   4; EXPRESSED IN BRAIN, SIGNAL = 2.9; EXPRESSED IN PLACENTA, SIGNAL = 3.1; EXPRESSED IN LUNG, SIGNAL = 3.3; EXPRESSED IN BONE MARROW, SIGNAL = 3.2; NT HIT: AB043785.1, EVALUE 9.40e+00
accaagaagaggagaagagagggtgggagcaagaggaggaggggggagaggaggaagaggaggaggaagaaggggaggagcaagagaaggaccaagaggagatggaggaaaaggaggaggagagggaggagcaagagaaggatggagaggagaaggaggaagaggaggagagggtgaagaaagaggaggaggagaggaagaagaggaggagatggaggaggaagaagagtgccagcctgatattgtttaag

SEQ ID NO: 19675 - DNA, 111 bp, Homo sapiens
  MAP TO AC008872.2; EXPRESSED IN ADULT LIVER, SIGNAL = 2.3; EXPRESSED IN FETAL LIVER, SIGNAL = 2.5; EXPRESSED IN LUNG, SIGNAL =   2; EXPRESSED IN BRAIN, SIGNAL = 2.3; EXPRESSED IN HBL100, SIGNAL = 2.2; EXPRESSED IN HELA, SIGNAL = 2.1; EXPRESSED IN PLACENTA, SIGNAL = 2.5; EXPRESSED IN HEART, SIGNAL = 1.7; EXPRESSED IN BT474, SIGNAL = 1.9; EXPRESSED IN BONE MARROW, SIGNAL =   2; NT HIT: gi6912445, EVALUE 2.10e-01; SWISSPROT HIT: P50012, EVALUE 8.00e-01
gttattcaaaatgtattgctgacagccttcaaaggaatgatacaggcattggatgttttattcagtatattgctgctctgcccttttgtgcagctattcaaattgctatag

SEQ ID NO: 19676 - DNA, 168 bp, Homo sapiens
  MAP TO AC007159.4; EXPRESSED IN BRAIN, SIGNAL = 3.3; EXPRESSED IN HELA, SIGNAL =  13; EXPRESSED IN HBL100, SIGNAL =  17; EXPRESSED IN HEART, SIGNAL = 3.2; EXPRESSED IN FETAL LIVER, SIGNAL =   4; EXPRESSED IN BONE MARROW, SIGNAL = 4.1; EXPRESSED IN LUNG, SIGNAL = 3.6; EXPRESSED IN PLACENTA, SIGNAL = 6.2; EXPRESSED IN ADULT LIVER, SIGNAL =   2; EXPRESSED IN BT474, SIGNAL = 6.8; EST_HUMAN HIT: AA075045.1, EVALUE 3.00e-09; NT HIT: M81257.1, EVALUE 2.00e-09; SWISSPROT HIT: P06748, EVALUE 5.00e-05
atgaaactcttaggtacccctgaagggggtagcaagtttacacagaaaaaagtaaaacttgctgctgatgaagatgatgatatgatgatgcagatgatgatgatgatgatgatgatgatgatgattttgatgatgaggaaactgaagaaaaagctccagtgaagaaat

SEQ ID NO: 19677 - DNA, 275 bp, Homo sapiens
  MAP TO AC007228.1; EXPRESSED IN BONE MARROW, SIGNAL = 1.7; EXPRESSED IN BRAIN, SIGNAL = 1.6; EXPRESSED IN LUNG, SIGNAL = 1.8; EXPRESSED IN PLACENTA, SIGNAL = 1.5; EXPRESSED IN HELA, SIGNAL = 1.7; EXPRESSED IN HBL100, SIGNAL = 1.5; EXPRESSED IN HEART, SIGNAL = 1.7; EXPRESSED IN BT474, SIGNAL = 1.4; EXPRESSED IN FETAL LIVER, SIGNAL = 1.5; EXPRESSED IN ADULT LIVER, SIGNAL = 1.8; SWISSPROT HIT: P10163, EVALUE 3.90e-01
catcagtcctcaggttctgaatcttgtgcctggagaaccagagaggaccctggagcaggaggagaaagagaagcttgtctcagaagctccacctcctcctggggcaatgcagagtctcaggcctgagcagacacgggggctgctggagcctgagaggaccaagactctgctgcctcgggagagccgggcctgggagaagcctcctcatcccgcctgcaccaaagactgggaggctgtggaggttggggcctccagccatgacagtgatgagaaag

SEQ ID NO: 19678 - DNA, 1263 bp, Homo sapiens
  MAP TO AC005829.1; EXPRESSED IN HEART, SIGNAL = 1.3; EXPRESSED IN FETAL LIVER, SIGNAL = 1.8; EXPRESSED IN ADULT LIVER, SIGNAL = 2.1; EXPRESSED IN BT474, SIGNAL = 1.7; EXPRESSED IN BRAIN, SIGNAL = 1.9; EXPRESSED IN BONE MARROW, SIGNAL = 2.9; EXPRESSED IN LUNG, SIGNAL = 3.1; EXPRESSED IN HELA, SIGNAL = 2.8; EXPRESSED IN PLACENTA, SIGNAL = 3.4; EXPRESSED IN HBL100, SIGNAL = 2.2; NT HIT: AB033093.1, EVALUE 0.00e+00; SWISSPROT HIT: P39969, EVALUE 4.60e-01; EST_HUMAN HIT: BE742019.1, EVALUE 0.00e+00
gacgcagcagctgaagcacaccatatccggttcaaactggctcccccatcctctaccttgtcccctggcagtgccgaaaataacggcaacgccaacatccttattgctgccaacggaaccaaaagaaaagccattgctgcagaggatcccagcctagatttccgaaataatcctaccaaggaagacttgggaaagctgcaaccactggtggcatcttatctctgctctgatgtaacatctgttccctcaaaggagtctttgaagttgcaaggggtcttcagcaagcagacagtccttaaatctcatcctctcttatctcagtcctatgaactccgagctgagctgttggggagacagccagttttggagttttccttagaaaatcttagaaccatgaatacgagtggtcagacagctctgccacaagcacctgtaaatgggttggctaagaaattgactaaaagttcaacacattctgatcatgacaattccacttccctcaatgggggaaaacgggctctcacttcatctgctcttcatgggggtgaaatgggaggatctgaatctggggacttgaaggggggtatgaccaattgcactcttccacatagaagccttgatgtagaacacacaactttgtatagcaataatagcactgcaaacaaatcctctgtcaattccatggaacagccggcacttcaaggaagcagtagattatcacctggtacagactccagctctaacttggggggtgtcaaattggagggtaaaaagtctcccctgtcttccattcttttcagtgctttagattctgacacaaggataacagctttactgcggcgacaggctgacattgagagccgtgcccgcagattacaaaagcgcttacaggttgtgcaagccaagcaggttgagaggcatatacaacatcagctgggtggatttttggagaagactttgagcaaactgccaaacttggaatccttgagaccacggagccagttgatgctgactcgaaaggctgaagctgccttgagaaaagctgccagtgagaccaccacttcagagggacttagcaactttctgaaaagcaattcaatttcagaagaattggagagatttacagctagtggcatagccaacttgaggtgcagtgaacaggcatttgattcagatgtcactgacagtagttcaggaggggagtctgatattgaagaggaagaactgaccagagctgatcccgagcagcgtcatgtacccctg

SEQ ID NO: 19679 - DNA, 1611 bp, Homo sapiens
  MAP TO AC003682.1; EXPRESSED IN PLACENTA, SIGNAL = 6.2; EXPRESSED IN ADULT LIVER, SIGNAL = 5.8; EXPRESSED IN HBL100, SIGNAL = 5.4; EXPRESSED IN HELA, SIGNAL = 5.7; EXPRESSED IN HEART, SIGNAL =   5; EXPRESSED IN FETAL LIVER, SIGNAL = 6.8; EXPRESSED IN BT474, SIGNAL = 5.8; EXPRESSED IN LUNG, SIGNAL = 6.2; EXPRESSED IN BRAIN, SIGNAL = 4.6; EXPRESSED IN BONE MARROW, SIGNAL = 4.9; NT HIT: AB040941.1, EVALUE 0.00e+00; SWISSPROT HIT: P52740, EVALUE 0.00e+00; EST_HUMAN HIT: AW451335.1, EVALUE 0.00e+00
gttgctggtgtggagcagtagatgaggggacgccttctgcagagagcgtttctgtggaagaactgtcacagggcaggactccaaaggcagatacatccactgataagagtcacccctgtgagatttgtaccccagtcctgagagacattttacaaatgattgagctccatgcctcaccctgtggacagaaattgtacttgggtggagcatcaagagatttctggatgagttcaaaccttcaccagctccagaagcttgataatggagagaagctctttaaagtggatggggaccaggcctcatttatgatgaactgcaggttccatgtgtcaggaaaacccttcacgtttggggaagtcgggagggacttttcagccacctcaggacttctccagcatcaggtgactcccaccattgagagaccacacagcaggattagacacttgagagttcccactggacgaaagcctctcaaatacactgaatccaggaaatcttttagagagaaatctgtattcattcaacaccaaagagctgactctggagaaaggccttacaagtgcagtgaatgtgggaaatcctttagtcaaagttctggctttcttcgacacaggaaagcacacggtagaacaaggactcatgaatgtagtgaatgtgggaaatcatttagtcgcaaaactcacctaactcaacaccaaagagttcacactggagaaaggccttatgactgcagtgaatgtggcaaatcctttcgccaggtatctgtcctcattcaacatcaacgagttcacactggagaaaggccttatgagtgcagtgaatgtgggaaatcttttagccacagcactaacctctatcgtcacaggagtgcccacactagcacaaggccttatgagtgcagtgaatgtggaaaatcctttagccatagcactaacctctttcgacactggagagttcacactggagtaaggccttatgagtgtagtgaatgtgggaaagcatttagttgcaatatctaccttattcaccaccaaagatttcacactggagaaagaccttatgtgtgcagtgaatgtgggaaatcatttggccagaaatctgtcctcattcaacaccaaagagttcacactggagaaaggccttatgagtgcagtgaatgtgggaaagtttttagccaaagctctggcctctttcgacacagaagagctcacactaaaacaaagccttatgagtgcagtgaatgtgaaaaatcatttagttgcaaaactgacctcattcgacaccagacagttcacactggagaaaggccttatgagtgcagtgtatgtgggaaatcttttatccgaaaaacccacctcattcgacaccagactgttcacactaatgaaaggccttatgagtgcgatgaatgtgggaaatcctatagccaaagctctgccctccttcagcataggagagttcacactggagaaaggccttatgagtgcagagaatgtgggaaatcttttacccgcaaaaatcacctcattcaacacaagacagttcacactggagaaaggccttatgaatgcagtgaatgtggaaaatcctttagccaaagctctggcctct

SEQ ID NO: 19680 - DNA, 806 bp, Homo sapiens
  MAP TO AC005866.3; EXPRESSED IN LUNG, SIGNAL = 7.4; EXPRESSED IN HELA, SIGNAL = 6.9; EXPRESSED IN PLACENTA, SIGNAL =   7; EXPRESSED IN HBL100, SIGNAL = 6.4; EXPRESSED IN ADULT LIVER, SIGNAL = 8.4; EXPRESSED IN BT474, SIGNAL = 6.1; EXPRESSED IN BONE MARROW, SIGNAL = 6.2; EXPRESSED IN BRAIN, SIGNAL = 6.6; EXPRESSED IN HEART, SIGNAL = 5.6; EXPRESSED IN FETAL LIVER, SIGNAL = 8.1; NT HIT: gi6671494, EVALUE 1.10e-01; EST_HUMAN HIT: AI148329.1, EVALUE 5.20e-01; SWISSPROT HIT: P12036, EVALUE 2.00e-17
ccatgtagtagctggaatcttcacattctcccgtgcagtggctggtgtcttcacactcttccgtgcagtagctggtatcttcacactcttctgtgcagtggctggtgtcttcctgctctcccatgcagtggcttgtgtcttcacactcttccgtgcagtggctggtgtcttcacactcttccatgcagtggctggtgtcttcacacactcctgtgcagttgctggtgtcttcacactattctgtgcagttgctggtgtcttcatactattctgtgcagtagctggtgtcttcacactattctgtgtagtagctggtgtcttcacactattccctgcagtagctggtgtcttcacactattccgtgcagtagctggtgtcttcacactctcctgtgcagttgctggtgtcttcacactattccctgcagtagctgatgtcttcacactattctgtgcagttgctggtgtcttcacactattccctgcagtagctgatgtcttcacacttttctgtgcagtggctggtgtcttcacactcttccgtgcagtagctggggtcttcacattcttccatgcagtggcaggtgtcttcgtgctctcccgtgcagtggctggtgtcttcacgccctcccatgcagtgggtagtgtcttcacactcttctggagcactctcctcttcagctgtagccgagacccagcagagctcacagaattcttcttccttatttacaaacttcctcaaatgaccacccattgacaggcaatttaacaacttattggcccatttaaactgattaaaagcagac

SEQ ID NO: 19681 - DNA, 133 bp, Homo sapiens
  MAP TO AL121879.4; EXPRESSED IN BONE MARROW, SIGNAL = 1.7; EXPRESSED IN PLACENTA, SIGNAL = 1.5; EXPRESSED IN FETAL LIVER, SIGNAL = 1.2; EXPRESSED IN ADULT LIVER, SIGNAL = 2.1; EXPRESSED IN BT474, SIGNAL = 1.5; EXPRESSED IN HEART, SIGNAL = 0.94; EXPRESSED IN HELA, SIGNAL = 1.8; EXPRESSED IN HBL100, SIGNAL = 2.3; EXPRESSED IN BRAIN, SIGNAL = 1.1; EST_HUMAN HIT: AW857579.1, EVALUE 7.00e-36; SWISSPROT HIT: Q57065, EVALUE 2.30e+00; NT HIT: AF223391.1, EVALUE 9.00e-17
ggaggacactacaactgcaggccccttcttcacccctatccaggaggaagtagctagagtggtcatcatccaattcccaacagcaattggggtgtcctgtttagaggggggattgacaggtgaagccaaccgg

SEQ ID NO: 19682 - DNA, 1074 bp, Homo sapiens
  MAP TO AC005726.1; EXPRESSED IN FETAL LIVER, SIGNAL = 3.1; EXPRESSED IN LUNG, SIGNAL = 3.4; EXPRESSED IN HBL100, SIGNAL = 2.8; EXPRESSED IN HELA, SIGNAL = 6.6; EXPRESSED IN PLACENTA, SIGNAL = 3.3; EXPRESSED IN BT474, SIGNAL = 3.5; EXPRESSED IN ADULT LIVER, SIGNAL = 2.2; EXPRESSED IN BRAIN, SIGNAL = 3.6; EXPRESSED IN BONE MARROW, SIGNAL = 2.6; EXPRESSED IN HEART, SIGNAL = 2.7; EST_HUMAN HIT: BE763527.1, EVALUE 0.00e+00; NT HIT: gi11426657, EVALUE 0.00e+00; SWISSPROT HIT: Q13685, EVALUE 1.20e+00
tgaccttactttggagccccccagatcacatgtacctgtaccagcatgtcctggccactctacagtgccgagacctactaagagccactgtgtttcctgagactgtaccatcccttgcactagagacttcaggaactacttctgagctagaaggccgtgcccctgagccattacccccaaagcggctgctaaacctaaccctggaggtgagcacagccaagctcacagcttttgtagctgaggacaagttcattaccctggctgcagagagtgtgtcactgagccggcatggaggttccctgcaggcatactgtccagagctggctgctggctttgatggcaatagtatcttcaacttcaaggaggtggaggtgcagctgctacctgagctggaagagatgatcctccaccggaaccccttccctgcgctgcagaccctccggaaccgtgtttggctcctctctttcggctcagtctcggtggagtttccttatcagtatgacttttctcgaactctagatgaggctgtgggagttcagaagtggctgaagggactacatcaagggactcgtgcttgggcctctccaagccctgtcccactcccacctgatctactcttaaaggttgagcacttctcatgggttttcttggatgatgtttttgaggtgaaacttcatgataactacgagctgatgaaggatgaaagtaaggagagtgccaaaagactacagctactggatgctaaagtggccgcccttcggaagcagcatggggagttgttgcctgcccgcaaaattgaggagctctatgcctctttggaacgcaaaaacattgaaatctacatccagcgttcccgtcgtctctatggcaacacacccatgcgccgggcactgcttacttggagcttagcagggctagaactggtagctctggcagatgcctccttccatggtcctgagcatgtggtagaacaggttcaagagcttgatccaggcagcccttttccccctgagggattagatcttgtcattcagtggtgtcgaatgctcaagtgcaatgtcaagagctttctgg

SEQ ID NO: 19683 - DNA, 796 bp, Homo sapiens
  MAP TO AB011399.1; EXPRESSED IN BT474, SIGNAL = 3.8; EXPRESSED IN BRAIN, SIGNAL = 3.2; EXPRESSED IN BONE MARROW, SIGNAL = 2.7; EXPRESSED IN HELA, SIGNAL = 3.3; EXPRESSED IN ADULT LIVER, SIGNAL = 3.3; EXPRESSED IN FETAL LIVER, SIGNAL = 3.5; EXPRESSED IN LUNG, SIGNAL = 5.8; EXPRESSED IN PLACENTA, SIGNAL = 4.9; EXPRESSED IN HEART, SIGNAL = 3.2; EXPRESSED IN HBL100, SIGNAL = 3.2; NT HIT: gi11419159, EVALUE 0.00e+00; EST_HUMAN HIT: N26539.1, EVALUE 0.00e+00; SWISSPROT HIT: P55196, EVALUE 1.00e-111
cgtgttacacgttcccaagaagaacttcgagaagataaagcttaccaacttgagcggcatcgaatagaggcagctatggaccgaaagtctgatagtgatatgtggataaatcagagctcctcactggactccagtacctctagccaggagcatctgaaccattcctctaagtcggtcacccctgcttccacactgaccaaaagtggccctggccgttggaaaacaccagcagccataccggccacccctgtggccgtctcccagccaatccgaacagacctgcctccgccacccccgccacctccagtccactatgccggtgatttcgatggaatgtccatggatttgcctctcccaccacccccttccgccaaccagatagggctgccgtctgcgcaggtggctgctgctgaacggagaaagagagaagaacatcagcgttggtatgagaaggagaaggcccgcctggaggaggagcgggagaggaagcggagagagcaggagaggaagttgggccagatgcgcactcagtccttaaaccctgctccgttttctcccctgactgcacagcagatgaagcccgaaaagccttccacactccagcggccacaggaaacagtcattcgggagctgcagcctcagcagcagccccgcacgatcgagcgcagagacttgcagtacattacagtcagcaaagaggagctttcctcgggggacagtctgtcccccgacccgtggaagcgggacgccaaggagaagctggagaagcagcagcagatgcacatcgtggacatgc

SEQ ID NO: 19684 - DNA, 174 bp, Homo sapiens
  MAP TO D87675.1; EXPRESSED IN BONE MARROW, SIGNAL = 2.2; EXPRESSED IN HELA, SIGNAL = 3.7; EXPRESSED IN HEART, SIGNAL = 4.3; EXPRESSED IN ADULT LIVER, SIGNAL = 1.2; EXPRESSED IN BRAIN, SIGNAL = 7.5; EXPRESSED IN LUNG, SIGNAL = 4.4; EXPRESSED IN PLACENTA, SIGNAL = 5.9; EXPRESSED IN HBL100, SIGNAL = 3.3; EXPRESSED IN BT474, SIGNAL = 3.7; EXPRESSED IN FETAL LIVER, SIGNAL =   2; NT HIT: D87675.1, EVALUE 1.00e-93; SWISSPROT HIT: P08592, EVALUE 3.00e-15; EST_HUMAN HIT: AU124116.1, EVALUE 3.00e-58
cgagagacagcagctggtggagacacacatggccagagtggaagccatgctcaatgaccgccgccgcctggccctggagaactacatcaccgctctgcaggctgttcctcctcgggtaggtctcgctgcagccgagttcacacttcaggtcacagcacagacagtaagggtggg

SEQ ID NO: 19685 - DNA, 241 bp, Homo sapiens
  MAP TO AC010807.2; EXPRESSED IN BT474, SIGNAL = 3.3; EXPRESSED IN FETAL LIVER, SIGNAL = 3.3; EXPRESSED IN PLACENTA, SIGNAL = 3.4; EXPRESSED IN ADULT LIVER, SIGNAL = 5.1; EXPRESSED IN BRAIN, SIGNAL = 2.9; EXPRESSED IN LUNG, SIGNAL = 3.4; EXPRESSED IN BONE MARROW, SIGNAL = 2.5; EXPRESSED IN HEART, SIGNAL = 2.9; EXPRESSED IN HELA, SIGNAL = 3.5; EXPRESSED IN HBL100, SIGNAL = 3.3; NT HIT: M16364.1, EVALUE 1.20e-01; SWISSPROT HIT: Q64617, EVALUE 1.10e+00
gtccgtggcgttataatggatgtgatgcctaattatatctacagttcagagagtctcatgggctatggtaatccttgctctgtggtgtggaaggaaagccttgctgtagaaggactttataaaagtgtaatgagttttataagagaagggaatgcagaagatagtgggtttagcatgagtgcgaataggcgtttcaacgtgtctaccttctctttcaagagtgtgttaggaagagtgtgtt

SEQ ID NO: 19686 - DNA, 130 bp, Homo sapiens
  MAP TO AP000168.1; EXPRESSED IN LUNG, SIGNAL = 0.69; EXPRESSED IN BRAIN, SIGNAL = 0.88; EXPRESSED IN HEART, SIGNAL = 0.95; EXPRESSED IN BONE MARROW, SIGNAL = 3.7; EXPRESSED IN BT474, SIGNAL = 0.75; EXPRESSED IN ADULT LIVER, SIGNAL = 0.79; EXPRESSED IN HELA, SIGNAL = 0.79; EXPRESSED IN FETAL LIVER, SIGNAL = 0.66; EXPRESSED IN HBL100, SIGNAL = 0.69; EST_HUMAN HIT: BF309055.1, EVALUE 7.00e-03; SWISSPROT HIT: P50110, EVALUE 5.20e+00; NT HIT: gi6755469, EVALUE 2.50e-01
tggatcctcggctcacctgatgattgtgtgaaactggccagagaaagcagagggatttttcctggtgattggaaatcagagtcacggctgaatttaagcaactgtgtgaactcagcaaagtccccaccac

SEQ ID NO: 19687 - DNA, 368 bp, Homo sapiens
  MAP TO AC011281.2; EXPRESSED IN BT474, SIGNAL = 1.2; EXPRESSED IN BRAIN, SIGNAL = 1.2; EXPRESSED IN LUNG, SIGNAL = 1.8; EXPRESSED IN PLACENTA, SIGNAL = 1.3; EXPRESSED IN HBL100, SIGNAL = 0.99; EXPRESSED IN HELA, SIGNAL = 1.3; EXPRESSED IN HEART, SIGNAL = 1.3; EXPRESSED IN FETAL LIVER, SIGNAL = 1.1; SWISSPROT HIT: P36104, EVALUE 4.00e-13; EST_HUMAN HIT: BF110702.1, EVALUE 0.00e+00
acatggacaaggccaccactcttttgctatgtccaggaaagtatctgatgtatttgttgtcatgcaaggacaagtaacgaatagtatcgtctattttgttagagctgtaaacagctgtgtttgcctcatgagtgtatctgatgaggtccacgccatatttcttactgtacagggttctctttggtttgccctcctggcagtcatatagcacgatggagtcgtcgttgctgcttgagatgaccgtctggccgttggggctgaaatcgaagcagttaatcttgtccgagttttcgcaaaacaccctggcgacgcggaagctccgcaacacgctgtcggtcagcttcatggcggcgggtggggaaggcagc

SEQ ID NO: 19688 - DNA, 102 bp, Homo sapiens
  MAP TO AC009972.3; EXPRESSED IN HBL100, SIGNAL = 5.5; EXPRESSED IN HELA, SIGNAL =   7; EXPRESSED IN HEART, SIGNAL = 5.5; EXPRESSED IN ADULT LIVER, SIGNAL = 8.2; EXPRESSED IN BT474, SIGNAL = 5.6; EXPRESSED IN FETAL LIVER, SIGNAL = 6.6; EXPRESSED IN BONE MARROW, SIGNAL = 4.9; EXPRESSED IN PLACENTA, SIGNAL = 7.5; EXPRESSED IN BRAIN, SIGNAL = 5.7; EXPRESSED IN LUNG, SIGNAL = 7.5; NT HIT: AJ006879.1, EVALUE 3.40e+00; EST_HUMAN HIT: AW297503.1, EVALUE 1.30e+00
accagaaaaaaaaagtgcacaataaaaatttcatctgcaagctcagaggcaccaaggaccaccctgtggtctactatggctcctcctggattctgtggatca

SEQ ID NO: 19689 - DNA, 163 bp, Homo sapiens
  MAP TO AC007743.2; EXPRESSED IN FETAL LIVER, SIGNAL = 0.66; EXPRESSED IN LUNG, SIGNAL = 5.9; EXPRESSED IN HELA, SIGNAL = 0.62; EXPRESSED IN ADULT LIVER, SIGNAL = 0.94; EXPRESSED IN BRAIN, SIGNAL = 0.73; EXPRESSED IN PLACENTA, SIGNAL = 0.86; EXPRESSED IN BT474, SIGNAL = 0.74; EXPRESSED IN BONE MARROW, SIGNAL = 0.67; EXPRESSED IN HEART, SIGNAL = 1.1; SWISSPROT HIT: P54254, EVALUE 2.20e+00
aggtgttgacttggtaactgtacatgatattgaaggagtgaattggcttccgagtagggagtgtgagaatgcaggggatggagaacagggtcccacagcaaacctgcaggtaagaggtgggggaggccatggaagcatggctgtgggagaagatgaagaagaa

SEQ ID NO: 19690 - DNA, 203 bp, Homo sapiens
  MAP TO AC007496.2; EXPRESSED IN LUNG, SIGNAL = 2.3; EXPRESSED IN BONE MARROW, SIGNAL = 2.1; EXPRESSED IN HELA, SIGNAL = 2.3; EXPRESSED IN HEART, SIGNAL = 1.8; EXPRESSED IN PLACENTA, SIGNAL = 2.1; EXPRESSED IN BT474, SIGNAL =   2; EXPRESSED IN ADULT LIVER, SIGNAL = 2.8; EXPRESSED IN BRAIN, SIGNAL = 2.2; EXPRESSED IN HBL100, SIGNAL = 2.5; EXPRESSED IN FETAL LIVER, SIGNAL = 2.1; EST_HUMAN HIT: BF667549.1, EVALUE 7.10e-01; NT HIT: AL161536.2, EVALUE 4.10e-01; SWISSPROT HIT: P98167, EVALUE 1.60e+00
atggagccacagcagcctgcctgccactgcagaaactctcggggacagtcatgtgggcgaccgctggaatgttcaggctgctgtgggaaaagatggcctgccccatacgtttaagctcggatgctggggcaatgtacgaaagctagacctcagagctccagttggcaacgctggtgtttcagatgatggtgaaaaacagcccc

SEQ ID NO: 19691 - DNA, 199 bp, Homo sapiens
  MAP TO AC012067.1; EXPRESSED IN FETAL LIVER, SIGNAL = 6.4; EXPRESSED IN BT474, SIGNAL = 4.8; EXPRESSED IN ADULT LIVER, SIGNAL = 7.1; EXPRESSED IN BRAIN, SIGNAL = 5.2; EXPRESSED IN LUNG, SIGNAL =   6; EXPRESSED IN BONE MARROW, SIGNAL = 4.4; EXPRESSED IN PLACENTA, SIGNAL = 5.7; EXPRESSED IN HEART, SIGNAL =   5; EXPRESSED IN HELA, SIGNAL = 6.3; EXPRESSED IN HBL100, SIGNAL = 4.5; EST_HUMAN HIT: BF364203.1, EVALUE 1.10e-02; NT HIT: AB037747.1, EVALUE 1.00e-106; SWISSPROT HIT: P15293, EVALUE 5.60e-01
tagattcaggatcggagttgccatccccttcagtgcgattgctgggtgtagcacgatcaaagtactcctcctgaggatagccaaggggcaggccatgggatgtgctggtaaggctgcctgcatcatggtctcccagtccaccatcactgctgctttcctgagagccttctggcaggtgaaatgtgacacgccgctggga

SEQ ID NO: 19692 - DNA, 191 bp, Homo sapiens
  MAP TO AL078602.10; EXPRESSED IN PLACENTA, SIGNAL = 2.1; EXPRESSED IN HELA, SIGNAL =   2; EXPRESSED IN HEART, SIGNAL = 1.8; EXPRESSED IN FETAL LIVER, SIGNAL =   2; EXPRESSED IN ADULT LIVER, SIGNAL = 2.4; EXPRESSED IN BT474, SIGNAL = 1.9; EXPRESSED IN BRAIN, SIGNAL = 1.9; EXPRESSED IN BONE MARROW, SIGNAL = 2.4; EXPRESSED IN LUNG, SIGNAL = 2.1; EXPRESSED IN HBL100, SIGNAL =   1; EST_HUMAN HIT: BE717242.1, EVALUE 2.60e+00; NT HIT: AF306784.1, EVALUE 1.80e+00; SWISSPROT HIT: Q01456, EVALUE 6.00e-06
gattctggcaggcatgatgactctagcaggtgtgatgaccctggagggtgtgatgaccccagctggtgtgatgactctggctggtgtaattatcccagctgttgtgatgactctggcaggtgtgacgaccctggctggtgtgatgactctaacaggtgtgatgactctggctggtgtgatgaccctggcag

SEQ ID NO: 19693 - DNA, 113 bp, Homo sapiens
  MAP TO AC007652.1; EXPRESSED IN HBL100, SIGNAL = 0.82; EXPRESSED IN HELA, SIGNAL = 0.92; EXPRESSED IN ADULT LIVER, SIGNAL = 0.88; EXPRESSED IN HEART, SIGNAL = 3.9; EXPRESSED IN PLACENTA, SIGNAL = 0.97; EXPRESSED IN BRAIN, SIGNAL = 0.95; EXPRESSED IN LUNG, SIGNAL = 0.98; EXPRESSED IN FETAL LIVER, SIGNAL = 0.88; EXPRESSED IN BONE MARROW, SIGNAL = 0.95; EXPRESSED IN BT474, SIGNAL = 0.7; EST_HUMAN HIT: BE909009.1, EVALUE 1.40e+00; NT HIT: M58417.1, EVALUE 5.30e-02; SWISSPROT HIT: Q10974, EVALUE 4.00e+00
tcacagaacagagaccgccacaccctcttgcgctgtggggactgaaggagccggggggagtcctgactcctcatgccattctggagagccacacagactttggtgtttgcgag

SEQ ID NO: 19694 - DNA, 344 bp, Homo sapiens
  MAP TO AC011301.3; EXPRESSED IN HBL100, SIGNAL = 8.9; EXPRESSED IN HELA, SIGNAL =  10; EXPRESSED IN HEART, SIGNAL = 9.5; EXPRESSED IN FETAL LIVER, SIGNAL =  12; EXPRESSED IN BT474, SIGNAL = 9.3; EXPRESSED IN ADULT LIVER, SIGNAL =  11; EXPRESSED IN BRAIN, SIGNAL = 9.3; EXPRESSED IN PLACENTA, SIGNAL = 9.2; EXPRESSED IN LUNG, SIGNAL =  11; EXPRESSED IN BONE MARROW, SIGNAL =   8; NT HIT: AF036943.1, EVALUE 2.00e-84; EST_HUMAN HIT: AI221961.1, EVALUE 1.40e-02
cgttttcttcttcctcttcctcctcctcctcctcctcctcttcctcttcttcatcctccacatcttctccatcctcgtcatcgtcctcatcctcctcctcgatctcctcctcctcctcccggtccccctcctcgtcctcctcgtcctcatcccctggctcatcattgtcctcggagtactcctccccctcatcctcctccttctcatccatgtcctcagtcccatcactgtcgtcacactcatccactgaggagctgtctgctttcacggcaaatggctttcgtttaggagcaggttcctggggctgtttatcttgtgtttttctttttttcgccaagggacaa

SEQ ID NO: 19695 - DNA, 720 bp, Homo sapiens
  MAP TO AL008628.1; EXPRESSED IN BONE MARROW, SIGNAL =   1; EXPRESSED IN BRAIN, SIGNAL = 1.8; EXPRESSED IN LUNG, SIGNAL = 1.1; EXPRESSED IN HELA, SIGNAL = 1.1; EXPRESSED IN PLACENTA, SIGNAL = 1.4; EXPRESSED IN HBL100, SIGNAL = 1.2; EXPRESSED IN BT474, SIGNAL = 1.1; EXPRESSED IN ADULT LIVER, SIGNAL = 1.6; EXPRESSED IN HEART, SIGNAL = 1.4; EXPRESSED IN FETAL LIVER, SIGNAL = 1.5; EST_HUMAN HIT: AI538795.1, EVALUE 1.20e-01; SWISSPROT HIT: P05227, EVALUE 1.00e-14
acagctgcaggatgtacccttcattcccttcccctgatggctgcaggatgtgacccacattcccttccccagaaggctgcaggacatgcccctcattcccttcccctgatgggtgtggaacataccactcattccctttccttaatgggggcagaatgtgcccatcattcccttttcctgatgggtgcaagacataccagtcagtcccttctcctgatggctgcaggatgggcccatcgttcccttttcctgatgggtgtggaacataccactcattccctttccttaatgggggcagaatgtgcccatcattcccttttcctgatgggtgcaagacataccggtcagtcccttctcctgatggctgcaggatgggcccatcgttcctttcccctagtggaggcaggacatgccactcattcccttgccttaatgagggcagaatgtgcccaccattcccttcccctgatgggtgcaggacatgcccatcagtcccttctcatgatagatgcaggacatgcccatcattcccttcccctgatgggtgcaggacatgcccatcattcccttcccctgatggctgcaggacatgcccatcattcccttcccctgatggctgcaggatgtgcccatcattcccttcccctgatggctgcaggatgtgcccatcattcccttcccctagtgggagcaggacatgccactgattctcttccctta

SEQ ID NO: 19696 - DNA, 649 bp, Homo sapiens
  MAP TO AC005185.1; EXPRESSED IN PLACENTA, SIGNAL = 3.9; EXPRESSED IN HBL100, SIGNAL = 2.2; EXPRESSED IN HEART, SIGNAL =   2; EXPRESSED IN BT474, SIGNAL = 2.6; EXPRESSED IN BRAIN, SIGNAL = 2.2; EXPRESSED IN BONE MARROW, SIGNAL = 2.4; EXPRESSED IN HELA, SIGNAL = 2.6; EXPRESSED IN ADULT LIVER, SIGNAL = 5.5; EXPRESSED IN FETAL LIVER, SIGNAL =   3; EXPRESSED IN LUNG, SIGNAL = 3.6; NT HIT: gi11420771, EVALUE 0.00e+00; EST_HUMAN HIT: AI479347.1, EVALUE 1.00e-81; SWISSPROT HIT: O15481, EVALUE 1.00e-105
ctacaaaggcagaaatgctgaagatcatcagcaaaaagtacaaggagcacttccctgagatcttcaggaaagtctctcagcgcacggagctggtctttggccttgccttgaaggaggtcaaccccaccactcactcctacatcctcgtcagcatgctaggccccaacgatggaaaccagagcagtgcctggacccttccaaggaatgggcttctgatgcctctactgagtgtgatcttcttaaatggcaactgtgcccgtgaagaggaaatctgggaattcctgaatatgctggggatctatgatggaaagaggcaccttatctttggggaaccccgaaagctcatcacccaagatctggtacaggaaaaatatctggaataccagcaggtgcccaacagtgatcccccacgctatcaattcctgtggggtccaagagctcatgcagaaaccagcaagatgaaagtcctggagtttttggccaaggtgaatgacaccacccccaataacttcccactgctttatgaagaggctttgagagatgaagaagagagagctggagcccggcccagagttgcagccaggcgtggcactacagccatgactagtgcgtattccagggccacatccagtagctcttcccaacccat

SEQ ID NO: 19697 - DNA, 264 bp, Homo sapiens
  MAP TO L47234.1; EXPRESSED IN HEART, SIGNAL = 3.2; EXPRESSED IN FETAL LIVER, SIGNAL = 3.2; EXPRESSED IN ADULT LIVER, SIGNAL = 2.2; EXPRESSED IN BT474, SIGNAL = 3.8; EXPRESSED IN BRAIN, SIGNAL = 3.3; EXPRESSED IN LUNG, SIGNAL = 2.2; EXPRESSED IN BONE MARROW, SIGNAL = 3.4; EXPRESSED IN PLACENTA, SIGNAL =   3; EXPRESSED IN HELA, SIGNAL = 3.3; EXPRESSED IN HBL100, SIGNAL = 3.4; NT HIT: X52221.1, EVALUE 1.00e-75; SWISSPROT HIT: P18074, EVALUE 2.00e-22; EST_HUMAN HIT: AI745284.1, EVALUE 2.00e-75
gcgcggctggaatacctgcgggaccagttccagattcgtgagaatgactttcttaccttcgatgccatgcgccacgcggcccagtgtgtgggtcgggccatcaggggcaagacggactacggcctcatggtctttgccgacaaggtgcagcttcaggggtgcccctgtgctcccatcccaggctccaagaaccaggctgtttcccgttcatttcccaggtggggtgggttgcagggtggagagtggcccaggctccccgaatga

SEQ ID NO: 19698 - DNA, 387 bp, Homo sapiens
  MAP TO AC012069.2; EXPRESSED IN HELA, SIGNAL = 1.3; EXPRESSED IN HEART, SIGNAL = 0.94; EST_HUMAN HIT: AW384774.1, EVALUE 3.00e-10; SWISSPROT HIT: Q15303, EVALUE 2.00e-74; NT HIT: gi11428771, EVALUE 0.00e+00
aatacctgaatccagtggaggagaacccttttgtttctcggagaaaaaatggagaccttcaagcattggataatcccgaatatcacaatgcatccaatggtccacccaaggccgaggatgagtatgtgaatgagccactgtacctcaacacctttgccaacaccttgggaaaagctgagtacctgaagaacaacatactgtcaatgccagagaaggccaagaaagcgtttgacaaccctgactactggaaccacagcctgccacctcggagcacccttcagcacccagactacctgcaggagtacagcacaaaatatttttataaacagaatgggcggatccggcctattgtggcagagaatcctgaatacctctctgagttctccc

SEQ ID NO: 19699 - DNA, 189 bp, Homo sapiens
  MAP TO AC010825.2; EXPRESSED IN PLACENTA, SIGNAL = 6.1; EXPRESSED IN HELA, SIGNAL = 6.1; EXPRESSED IN ADULT LIVER, SIGNAL = 6.3; EXPRESSED IN FETAL LIVER, SIGNAL = 4.8; EXPRESSED IN BT474, SIGNAL = 4.8; EXPRESSED IN BRAIN, SIGNAL = 4.1; EXPRESSED IN LUNG, SIGNAL =   8; EXPRESSED IN BONE MARROW, SIGNAL = 2.5; EXPRESSED IN HEART, SIGNAL = 4.3; EXPRESSED IN HBL100, SIGNAL = 4.8; NT HIT: AL163284.2, EVALUE 4.00e-81; EST_HUMAN HIT: N66951.1, EVALUE 3.00e-88; SWISSPROT HIT: O75593, EVALUE 3.30e-01
gctgctccttgccaggccgagctaggtcccaattcttcctcagcctctgctcctccaccctataatctttttatcacctcccctcctcacacctggtctggcttacaatttcgttccctgactagccctccccctcctgcccagcaatttactcttaaaaaggtggctggagctaaaggcatagtcaag

SEQ ID NO: 19700 - DNA, 168 bp, Homo sapiens
  MAP TO AC011330.4; EXPRESSED IN BONE MARROW, SIGNAL = 1.8; EXPRESSED IN BRAIN, SIGNAL = 1.9; EXPRESSED IN LUNG, SIGNAL = 1.8; EXPRESSED IN PLACENTA, SIGNAL = 1.6; EXPRESSED IN HELA, SIGNAL =   2; EXPRESSED IN HBL100, SIGNAL = 1.8; EXPRESSED IN HEART, SIGNAL =   2; EXPRESSED IN FETAL LIVER, SIGNAL = 2.1; EXPRESSED IN BT474, SIGNAL = 2.4; EXPRESSED IN ADULT LIVER, SIGNAL =   2; EST_HUMAN HIT: AW945754.1, EVALUE 3.90e-01; SWISSPROT HIT: P19147, EVALUE 5.00e+00
gtaccaccatccgaggagcaggccctgggtcgcctgacagccctgctgctccagcggtacccacgcctcacctcccagctcttcattgacctgtcaccactcatccctttcttggctgtctctgacctgatgcgcttcccaccatccctgttagccaacgacagtgtg

SEQ ID NO: 19701 - DNA, 560 bp, Homo sapiens
  MAP TO AC007603.1; EXPRESSED IN FETAL LIVER, SIGNAL = 0.71; EXPRESSED IN LUNG, SIGNAL = 0.67; EXPRESSED IN PLACENTA, SIGNAL =   1; EXPRESSED IN BT474, SIGNAL = 0.77; EXPRESSED IN BONE MARROW, SIGNAL = 0.91; EXPRESSED IN BRAIN, SIGNAL = 0.73; EXPRESSED IN HEART, SIGNAL = 0.78; EST_HUMAN HIT: AW955768.1, EVALUE 2.00e-03; NT HIT: M83575.1, EVALUE 8.00e-05; SWISSPROT HIT: P37935, EVALUE 4.70e+00
tttcctgtacctatgactttcttgtgatcctggtcatgatggctggagctctggcagccatcttgggccatgcagtgatcttggggatgaacaccagtgctgtgtttggtggggcagaagaggagaagcgtgtcactgatggtagagctattctaccaccctcaactccccatatctgggcttgttttataggagagagacaaactttatcttctttaaggcactattattttgagttttctattatgtgcagctgacctgttcctagcctatacacccttttccaaggggcgactgctcagttccatttccaccattcagaacctggagaaagatggggagaatccaatccagcagatgtcccctttgcaagcaaatcccatgaatgagctgaagaggagactaaagacggtttgcagaccttctgggatccttctgggtcctctgttcacaggatgcccagggaagcctctgtctttgatgggaatccagtcatgaccttgactgatcagcctggcgtggcttaggtatgtgcctgtatggagctggggtatggacca

SEQ ID NO: 19702 - DNA, 191 bp, Homo sapiens
  MAP TO AC010856.2; EXPRESSED IN HELA, SIGNAL = 2.7; EXPRESSED IN HBL100, SIGNAL = 2.3; EXPRESSED IN HEART, SIGNAL = 1.7; EXPRESSED IN ADULT LIVER, SIGNAL = 4.6; EXPRESSED IN BT474, SIGNAL = 2.7; EXPRESSED IN BONE MARROW, SIGNAL = 1.7; EXPRESSED IN PLACENTA, SIGNAL = 2.6; EXPRESSED IN FETAL LIVER, SIGNAL = 2.5; EXPRESSED IN BRAIN, SIGNAL = 1.5; EXPRESSED IN LUNG, SIGNAL =   3; EST_HUMAN HIT: AV731083.1, EVALUE 8.00e-56; NT HIT: X57147.1, EVALUE 8.00e-61; SWISSPROT HIT: P21414, EVALUE 5.00e-15
tccctaaacccttgaggcaagaccatccacgaaagttgggacgtgtggtctgtgggatcctcaaaggcaaagagaaccttggagtcagagtgcaggagaatgcagaggaaggcatccttgaggtccagaacaatgaaccattctgcttcctctggtatttgagagagcagggtataggggttgggtatagc

SEQ ID NO: 19703 - DNA, 221 bp, Homo sapiens
  MAP TO AC006432.15; EXPRESSED IN FETAL LIVER, SIGNAL = 0.67; EXPRESSED IN HELA, SIGNAL = 1.1; EXPRESSED IN ADULT LIVER, SIGNAL = 0.79; EXPRESSED IN PLACENTA, SIGNAL = 0.75; EXPRESSED IN BT474, SIGNAL = 0.8; EXPRESSED IN BONE MARROW, SIGNAL = 0.82; EXPRESSED IN HEART, SIGNAL = 0.82; SWISSPROT HIT: P20742, EVALUE 9.00e-12
tcattttgaacaaccgaaaagggtgaggcaatctcaataaagaaaggttgggagacttctagagtggttgtagaggaaatgccaaatccaacgtcaccattcacacaaaagccacttgcctcccattgggttatcgtatcaggaatgaggaacgaaagattggcagagcctgaggaactggaagaagaggttatcggtaaaacacattctttgtctgaacc

SEQ ID NO: 19704 - DNA, 97 bp, Homo sapiens
  MAP TO AC009490.4; EXPRESSED IN FETAL LIVER, SIGNAL = 1.6; EXPRESSED IN LUNG, SIGNAL = 1.8; EXPRESSED IN BONE MARROW, SIGNAL = 1.5; EXPRESSED IN HELA, SIGNAL = 1.7; EXPRESSED IN HEART, SIGNAL = 1.5; EXPRESSED IN PLACENTA, SIGNAL = 1.9; EXPRESSED IN BT474, SIGNAL = 1.6; EXPRESSED IN ADULT LIVER, SIGNAL =   2; EXPRESSED IN BRAIN, SIGNAL = 1.7; EXPRESSED IN HBL100, SIGNAL = 1.7; NT HIT: X56160.1, EVALUE 3.20e+00; EST_HUMAN HIT: AV648669.1, EVALUE 1.90e-02
ccatcctgaacccatggaaatcccaggctccactggcagaggagcagcagagaagaagagaagaaaagaagcagccagacatcagagagaagcagct

SEQ ID NO: 19705 - DNA, 382 bp, Homo sapiens
  MAP TO AC011440.4; EXPRESSED IN PLACENTA, SIGNAL = 1.5; EXPRESSED IN HBL100, SIGNAL = 1.6; EXPRESSED IN HELA, SIGNAL = 1.9; EXPRESSED IN HEART, SIGNAL = 1.6; EXPRESSED IN FETAL LIVER, SIGNAL = 1.8; EXPRESSED IN BT474, SIGNAL = 1.5; EXPRESSED IN ADULT LIVER, SIGNAL =   2; EXPRESSED IN BRAIN, SIGNAL = 1.7; EXPRESSED IN LUNG, SIGNAL = 2.2; EXPRESSED IN BONE MARROW, SIGNAL = 1.7; NT HIT: gi4758827, EVALUE 0.00e+00; SWISSPROT HIT: P25304, EVALUE 2.70e-02; EST_HUMAN HIT: AA332346.1, EVALUE 1.00e-100
gtacaatggtgggagaccatacccgtttggagttccacaacattgaaacgggaatcatgactgagaaacgctacatctccgttgtcccctccagctttattggccatctgcagagcctcatgtttaatggccttctctacattgacttgtgcaaaaatggtgacattgattattgtgagctgaaggctcgttttggactgaggaacatcatcgctgaccctgtcacctttaagaccaagagcagctacctgagccttgccactcttcaggcttacacctccatgcacctcttcttccagttcaagaccacctcaccagatggcttcattctcttcaatagtggtgatggcaatgacttcattgcagtcgagcttgtcaaggg

SEQ ID NO: 19706 - DNA, 761 bp, Homo sapiens
  MAP TO AC006337.2; EXPRESSED IN PLACENTA, SIGNAL =  20; EXPRESSED IN BRAIN, SIGNAL =  14; EXPRESSED IN HELA, SIGNAL =  15; EXPRESSED IN HBL100, SIGNAL =  13; EXPRESSED IN HEART, SIGNAL =  12; EXPRESSED IN BT474, SIGNAL =  12; EXPRESSED IN ADULT LIVER, SIGNAL =  12; EXPRESSED IN FETAL LIVER, SIGNAL =  10; EXPRESSED IN LUNG, SIGNAL =  14; EXPRESSED IN BONE MARROW, SIGNAL =  13; NT HIT: AL163227.2, EVALUE 2.00e-86; EST_HUMAN HIT: AU140358.1, EVALUE 7.00e-66; SWISSPROT HIT: P06993, EVALUE 4.70e-01
agcagcaaagcattcaagaggtgacttgggtactgttaaaggcactcagtgttataagggaagcagagcataaaagttcagagaatttgcagcctgacaatgggatagaaaagaaaaatccattttctgaggagaaattcaagctgcctgcagaaatttgcataagtaacgaggagcccaatgttaatccccaagacaatggagaaaatgtctccagggcatgtcagaggtcttcaggcagcccttcccatcgcaggcctggatgcctaggagaaaatggttttttaggcctggcccagggtccccgtgctgtgtgcagcctagggatttggtgtactgcatctctaccactccagccatggctgaaaggggacaatgtagagcttgagccatggcttcagagggtgcaagcccccagctttggcagcttccacgtggtgggacgctcatggagaacctctgctagggcagtgcagaagggaaatgtggggtcggagcctccacacagagttcctactggggcactgcctagtggagctttgagaagagggccaccatcctccagaccccagaatggtagatccaacaatagcttgcactacgtgcctggaaaagccacagacactcaacgccagcctgtgaaagcagctgggagggtggctgtaccctgcaaagccataggggtggagctgcccaagaccatgggaacccacctcttgcatttgcatgacctggatgtgagacctggagtcaaaggagat

SEQ ID NO: 19707 - DNA, 726 bp, Homo sapiens
  MAP TO AL022333.1; EXPRESSED IN HEART, SIGNAL = 4.4; EXPRESSED IN FETAL LIVER, SIGNAL = 3.5; EXPRESSED IN LUNG, SIGNAL =   2; EXPRESSED IN BRAIN, SIGNAL = 4.4; EXPRESSED IN HBL100, SIGNAL = 3.3; EXPRESSED IN HELA, SIGNAL = 3.3; EXPRESSED IN PLACENTA, SIGNAL =   3; EXPRESSED IN BT474, SIGNAL = 3.2; EXPRESSED IN BONE MARROW, SIGNAL = 3.4; EXPRESSED IN ADULT LIVER, SIGNAL = 1.9; NT HIT: X99697.1, EVALUE 2.50e-02; EST_HUMAN HIT: BE893550.1, EVALUE 6.90e-01
tgtgagcaggcacgattctaggtgcccagcacccagcagcaggcagagcagacaagagcaacttctcctggagccaatgtgctgctgggacacagaggaggaggaggatgacaaggagaagggggatgggagaaggaagaggaggaggagaagaagaaagaagggaggaggaggaagaagagagaagcagaggagggaaaggaggaagaggaagagggaaaggaggaagaggaagaagggaaggaggaaggggaaagaagaggaggagggggaggagaaagaggagaaagaaggagaggaagagagggaggagaaagggagaaagaggaggaggagggaggaagaggaacaagaagggaggaggagaaagaggaagaagaggaagaaaagagggaggagagggaagaagaggaggaggagaaagaaggggaggaagagaaggaggagaaggggagaaagaggaggaggagggaggaagaaggaaggaggaagaggaggagggggaaaaagaggaggagggaggaggaagaggaggaaagggaggaagaggaggaggaggaagaggaggagggaggaggtagaggaggagggaggaggaagaggaaggaggaggagtaagagaaagaaggaggagaaagagaaggaggcggaaggaagaggaaggaggaggaagaggaggaggcagagaagaaaattaagtactgcacctgcacgtgttgccatgtg

SEQ ID NO: 19708 - DNA, 1855 bp, Homo sapiens
  MAP TO AC005529.7; EXPRESSED IN HELA, SIGNAL = 1.3; EXPRESSED IN HBL100, SIGNAL = 0.94; EXPRESSED IN HEART, SIGNAL = 1.3; EXPRESSED IN ADULT LIVER, SIGNAL = 1.1; EXPRESSED IN FETAL LIVER, SIGNAL = 1.3; EXPRESSED IN BRAIN, SIGNAL = 5.6; NT HIT: X15309.1, EVALUE 0.00e+00; SWISSPROT HIT: P12036, EVALUE 2.00e-33; EST_HUMAN HIT: BE782873.1, EVALUE 0.00e+00
aaaactcctggaaggtgaagagtgtcggattggctttggcccaattcctttctcgcttccagaaggactccccaaaattccctctgtgtccactcacataaaggtgaaaagcgaagagaagatcaaagtggtggagaagtctgagaaagaaactgtgattgtggaggaacagacagaggagacccaagtgactgaagaagtgactgaagaagaggagaaagaggccaaagaggaggagggcaaggaggaagaagggggtgaagaagaggaggcagaagggggagaagaagaaacaaagtctcccccagcagaagaggctgcatccccagagaaggaagccaagtcaccagtaaaggaagaggcaaagtcaccggctgaggccaagtccccagagaaggaggaagcaaaatccccagccgaagtcaagtcccctgagaaggccaagtctccagcaaaggaagaggcaaagtcaccgcctgaggccaagtccccagagaaggaggaagcaaaatctccagctgaggtcaagtcccccgagaaggccaagtccccagcaaaggaagaggcaaagtcaccggctgaggccaagtctccagagaaggccaagtccccagtgaaggaagaagcaaagtcaccggctgaggccaagtccccagtgaaggaagaagcaaaatctccagctgaggtcaagtccccggaaaaggccaagtctccaacgaaggaggaagcaaagtcccctgagaaggccaagtccccagagaaggaagaggccaagtcccctgagaaggccaagtccccagtgaaggcagaagcaaagtcccctgagaaggccaagtccccagtgaaggcagaagcaaagtcccctgagaaggccaagtccccagtgaaggaagaagcaaagtcccctgagaaggccaagtccccagtgaaggaagaagcaaagtcccctgagaaggccaagtccccagtgaaggaagaagcaaagacccccgagaaggccaagtccccagtgaaggaagaagccaagtccccagagaaggccaagtccccagagaaggccaagactcttgatgtgaagtctccagaagccaagactccagcgaaggaggaagcaaggtcccctgcagacaaattccctgaaaaggccaaaagccctgtcaaggaggaggtcaagtccccagagaaggcgaaatctcccctgaaggcggatgccaaggcccctgagaaggagatcccaaaaaaggaagaggtgaagtccccagtgaaggaggaggagaagccccaggaggtgaaagtcaaagagcccccaaagaaggcagaggaagagaaagcccctgccacaccaaaaacagaggagaagaaggacagcaagaaagaggaggcacccaagaaggaggctccaaagcccaaggtggaggagaagaaggaacctgctgtcgaaaagcccaaagaatccaaagttgaagccaagaaggaagaggctgaagataagaaaaaagtccccaccccagagaaggaggctcctgccaaggtggaggtgaaggaagacgctaaacccaaagaaaagacagaggtggccaagaaggaaccagatgatgccaaggccaaggaacccagcaaaccagcagagaagaaggaggcagcaccggagaaaaaagacaccaaggaggagaaggccaagaagcctgaggagaaacccaagacagaggccaaagccaaggaagatgacaagaccctctcaaaagagcctagcaagcctaaggcagaaaaggctgaaaaatcctccagcacagaccaaaaagacagcaagcctccagagaaggccacagaagacaaggccgccaaggggaagtaa

SEQ ID NO: 19709 - DNA, 163 bp, Homo sapiens
  MAP TO AP000129.1; EXPRESSED IN HEART, SIGNAL = 0.79; EXPRESSED IN PLACENTA, SIGNAL = 0.89; EXPRESSED IN BT474, SIGNAL = 2.1; EXPRESSED IN BONE MARROW, SIGNAL =   1; EXPRESSED IN FETAL LIVER, SIGNAL = 0.93; EXPRESSED IN LUNG, SIGNAL = 0.69; EXPRESSED IN HELA, SIGNAL = 0.82; EXPRESSED IN ADULT LIVER, SIGNAL = 0.86; EXPRESSED IN HBL100, SIGNAL = 1.7; EST_HUMAN HIT: BE886203.1, EVALUE 3.00e-55; SWISSPROT HIT: Q05086, EVALUE 7.00e-10; NT HIT: gi11433063, EVALUE 2.00e-55
cagcagaacatgcagcttttgccttttcattttcattcttctcttcatcctttgcttgaagagacttcagttcttccttggtgtgttgtttagctttccagaagctctctaccaatgcctcagcactagaaaaaactcttccaataacacagttaagggggaa

SEQ ID NO: 19710 - DNA, 339 bp, Homo sapiens; identical to SEQ ID NO: 19130
  MAP TO AC009892.2; EXPRESSED IN FETAL LIVER, SIGNAL = 9.3; EXPRESSED IN ADULT LIVER, SIGNAL =  12; EXPRESSED IN BT474, SIGNAL = 8.6; EXPRESSED IN BRAIN, SIGNAL = 7.6; EXPRESSED IN BONE MARROW, SIGNAL = 7.6; EXPRESSED IN LUNG, SIGNAL =  11; EXPRESSED IN PLACENTA, SIGNAL = 9.6; EXPRESSED IN HELA, SIGNAL =  10; EXPRESSED IN HBL100, SIGNAL = 8.4; EXPRESSED IN HEART, SIGNAL = 7.9; SWISSPROT HIT: P43626, EVALUE 2.00e-11; EST_HUMAN HIT: AI540048.1, EVALUE 9.00e-82; NT HIT: AF106275.1, EVALUE 0.00e+00

SEQ ID NO: 19711 - DNA, 248 bp, Homo sapiens
  MAP TO AC011356.1; EXPRESSED IN BT474, SIGNAL = 0.97; EXPRESSED IN HEART, SIGNAL = 0.86; EXPRESSED IN BRAIN, SIGNAL = 0.93; NT HIT: U47048.1, EVALUE 8.00e-03
atgatatcaacctcacaggcttgatttggagactcagtgtacaacacttccaaagcatctagctcagagccttgtacataggaaccactccataaatggcccttcttgtcaccatcatcatggacacccccctggccagagttcattaattcaacatgaattacatcaagctcttaatgttgcctggcctgtagacatgggcactggaaacacagacagttcttcaaggagcagagatcataaaacac

SEQ ID NO: 19712 - DNA, 168 bp, Homo sapiens
  MAP TO AC012111.1; EXPRESSED IN ADULT LIVER, SIGNAL = 1.3; EXPRESSED IN BONE MARROW, SIGNAL = 1.9; EXPRESSED IN BRAIN, SIGNAL = 1.6; EXPRESSED IN LUNG, SIGNAL = 1.2; EXPRESSED IN PLACENTA, SIGNAL = 1.2; EXPRESSED IN HELA, SIGNAL = 1.3; EXPRESSED IN HBL100, SIGNAL = 1.6; EXPRESSED IN HEART, SIGNAL = 2.5; EXPRESSED IN BT474, SIGNAL = 1.6; EXPRESSED IN FETAL LIVER, SIGNAL = 1.5; EST_HUMAN HIT: W58426.1, EVALUE 1.60e+00; NT HIT: AF262962.1, EVALUE 5.10e+00
aagggaaggaagaagaaagagaggaagaggaggggaaggacatggaggagggaaaagaaaaggagaaggagggagagggagaggagaaggaggaagaggatgaagaggaagaagaaaagaaggaggggaggaggagttttaactgaatactgtatttttgccttaatg

SEQ ID NO: 19713 - DNA, 259 bp, Homo sapiens
  MAP TO Z95325.2; EXPRESSED IN ADULT LIVER, SIGNAL = 1.4; EXPRESSED IN BRAIN, SIGNAL = 0.77; EXPRESSED IN HEART, SIGNAL = 0.93; EXPRESSED IN PLACENTA, SIGNAL = 1.2; EXPRESSED IN HELA, SIGNAL = 1.6; EXPRESSED IN LUNG, SIGNAL = 1.2; EXPRESSED IN FETAL LIVER, SIGNAL = 1.3; EXPRESSED IN HBL100, SIGNAL = 1.4; EXPRESSED IN BONE MARROW, SIGNAL = 1.4; EXPRESSED IN BT474, SIGNAL = 1.4; EST_HUMAN HIT: AW340174.1, EVALUE 9.00e-72; SWISSPROT HIT: O02754, EVALUE 2.70e-01; NT HIT: X89211.1, EVALUE 2.00e-84
tgggtcaatcaccctagccaacactgtaactgccttcttagcctgttgacttaaaggtaggaggagcccaaagtgtccaggtggcaatattaacttccagttcaatgggattgttgtgtctcctggtggcagcattcctccagctggaactaagacctctaggccaggagaatgtaatgttgtgggaacggaaagcaaaaattttgctagtggatcactaggggtgatggtgagtgatgccacttctacttccacccct

SEQ ID NO: 19714 - DNA, 95 bp, Homo sapiens
  MAP TO AC011236.1; EXPRESSED IN HEART, SIGNAL =  10; NT HIT: M31944.1, EVALUE 1.30e-02; EST_HUMAN HIT: T86519.1, EVALUE 7.40e-02
cccaaggggtcaggtgtaaagggtagctgggccagcaagggtggagacagtgagatctccctgggtctgcagttgcacagatgggagcagagaag

SEQ ID NO: 19715 - DNA, 105 bp, Homo sapiens
  MAP TO AC009301.1; EXPRESSED IN PLACENTA, SIGNAL = 1.1; EXPRESSED IN BT474, SIGNAL = 0.87; EXPRESSED IN LUNG, SIGNAL = 1.2; EXPRESSED IN ADULT LIVER, SIGNAL = 1.3; EXPRESSED IN HEART, SIGNAL = 1.3; EXPRESSED IN BONE MARROW, SIGNAL = 1.2; EXPRESSED IN HBL100, SIGNAL = 0.83; EXPRESSED IN FETAL LIVER, SIGNAL = 0.93; EXPRESSED IN HELA, SIGNAL = 0.96; EXPRESSED IN BRAIN, SIGNAL = 1.4; NT HIT: AJ298054.1, EVALUE 2.30e-01; SWISSPROT HIT: P54729, EVALUE 1.80e+00; EST_HUMAN HIT: AA601379.1, EVALUE 2.30e-01
tcaaagagcagttttggagttagaaccagcaggatttggtctggttgatgggctgggtgaagcttcttcatttagtgctgcggggagggaagacaggtgatgatt

SEQ ID NO: 19716 - DNA, 88 bp, Homo sapiens
  MAP TO AC007393.3; EXPRESSED IN HEART, SIGNAL = 8.9; EXPRESSED IN HBL100, SIGNAL = 5.9; EXPRESSED IN BRAIN, SIGNAL =  10; EXPRESSED IN BT474, SIGNAL = 5.9; EXPRESSED IN BONE MARROW, SIGNAL =  11; EXPRESSED IN FETAL LIVER, SIGNAL = 6.6; EXPRESSED IN HELA, SIGNAL =  10; EXPRESSED IN ADULT LIVER, SIGNAL =   9; EXPRESSED IN PLACENTA, SIGNAL = 9.1; EXPRESSED IN LUNG, SIGNAL =  10; SWISSPROT HIT: O43913, EVALUE 2.00e-10; NT HIT: AF081459.1, EVALUE 1.00e-42; EST_HUMAN HIT: BE707579.1, EVALUE 2.00e-42
gatatttccctgagataaacagtctgcatagctttcttcaaatgaggttcaatatttctccacagtttgcgagtatcacgttcacttg

SEQ ID NO: 19717 - DNA, 79 bp, Homo sapiens
  MAP TO AC009961.3; EXPRESSED IN BRAIN, SIGNAL = 3.2; EXPRESSED IN LUNG, SIGNAL = 3.8; EXPRESSED IN HELA, SIGNAL = 3.8; EXPRESSED IN ADULT LIVER, SIGNAL = 4.1; EXPRESSED IN FETAL LIVER, SIGNAL = 3.5; EXPRESSED IN BT474, SIGNAL = 3.5; EXPRESSED IN BONE MARROW, SIGNAL = 3.7; EXPRESSED IN PLACENTA, SIGNAL =   4; EXPRESSED IN HEART, SIGNAL =   3; EXPRESSED IN HBL100, SIGNAL = 3.8; EST_HUMAN HIT: AW961150.1, EVALUE 3.00e-37; NT HIT: gi10181209, EVALUE 3.00e-06
actacgggactgtgaagctgtcaagattcttggagaaacgtaagaattttcagaattcaatgatcttgtattcaaggaa

SEQ ID NO: 19718 - DNA, 90 bp, Homo sapiens
  MAP TO AL122018.4; EXPRESSED IN PLACENTA, SIGNAL = 4.4; EXPRESSED IN HBL100, SIGNAL = 2.5; EXPRESSED IN ADULT LIVER, SIGNAL = 2.3; EXPRESSED IN BT474, SIGNAL = 2.3; EXPRESSED IN BONE MARROW, SIGNAL = 2.7; EXPRESSED IN BRAIN, SIGNAL = 2.6; EXPRESSED IN HEART, SIGNAL = 2.2; EXPRESSED IN FETAL LIVER, SIGNAL = 2.8; EXPRESSED IN LUNG, SIGNAL = 2.3; EXPRESSED IN HELA, SIGNAL = 1.7; EST_HUMAN HIT: BF114846.1, EVALUE 4.40e+00; NT HIT: AF048729.1, EVALUE 7.00e-44; SWISSPROT HIT: Q09456, EVALUE 3.10e+00
ggcagagggaagtcatagacaacagctggccccagggctgtgcttacaaggggcccctggcccatggagcaatcctgggctcccaatggg

SEQ ID NO: 19719 - DNA, 157 bp, Homo sapiens
  MAP TO AC007391.2; EXPRESSED IN FETAL LIVER, SIGNAL = 0.83; EXPRESSED IN LUNG, SIGNAL = 1.2; EXPRESSED IN ADULT LIVER, SIGNAL = 0.95; EXPRESSED IN HEART, SIGNAL = 0.99; EXPRESSED IN BONE MARROW, SIGNAL = 0.81; EXPRESSED IN HELA, SIGNAL = 1.2; EXPRESSED IN BRAIN, SIGNAL = 1.2; EXPRESSED IN PLACENTA, SIGNAL = 0.95; EXPRESSED IN BT474, SIGNAL = 0.78; EXPRESSED IN HBL100, SIGNAL = 0.98; SWISSPROT HIT: O14226, EVALUE 1.00e+00
cttatttcctgtggggatgggtgtgattgaagacacagttacgtccatgccatcaatctgtgtgtggaaaagtcggcaggtcgcgcgcacacacttgtcgcttgaatcgtatgtgtgcctgcagacggcaaggcctatgcctctgactgcgttcacc

SEQ ID NO: 19720 - DNA, 198 bp, Homo sapiens
  MAP TO AC012127.1; EXPRESSED IN BONE MARROW, SIGNAL = 1.3; EXPRESSED IN HBL100, SIGNAL = 1.2; EXPRESSED IN HEART, SIGNAL = 2.2; EXPRESSED IN BT474, SIGNAL = 1.3; EXPRESSED IN FETAL LIVER, SIGNAL = 1.2; EXPRESSED IN ADULT LIVER, SIGNAL = 1.4; EXPRESSED IN BRAIN, SIGNAL = 1.1; EXPRESSED IN LUNG, SIGNAL = 1.4; EXPRESSED IN PLACENTA, SIGNAL = 1.2; EXPRESSED IN HELA, SIGNAL = 1.5; SWISSPROT HIT: P09259, EVALUE 6.30e+00; NT HIT: AE002454.1, EVALUE 4.60e-01
ggctgtgggtcttgcattgttatgcagttggataactttgacaagtattccaaagagggtgagggatgcagggatgagaaattcattctgttgttcttttggataaacattgactcctggcctcggaagttgacattcactaatccttgaccgtttggggaacacgaagattgccagggacagcagcaagatacacag

SEQ ID NO: 19721 - DNA, 144 bp, Homo sapiens
  MAP TO AC011632.2; EXPRESSED IN BT474, SIGNAL = 1.3; EXPRESSED IN FETAL LIVER, SIGNAL = 1.7; EXPRESSED IN BONE MARROW, SIGNAL = 1.5; EXPRESSED IN LUNG, SIGNAL = 1.4; EXPRESSED IN BRAIN, SIGNAL = 1.3; EXPRESSED IN HBL100, SIGNAL = 1.3; EXPRESSED IN PLACENTA, SIGNAL = 1.4; EXPRESSED IN HELA, SIGNAL = 1.6; EXPRESSED IN ADULT LIVER, SIGNAL = 1.5; EXPRESSED IN HEART, SIGNAL = 1.5; NT HIT: AF179480.1, EVALUE 2.80e-01; SWISSPROT HIT: O13290, EVALUE 2.30e+00; EST_HUMAN HIT: AW243266.1, EVALUE 7.60e+00
gatataattcagtataatacactgctgtataagattgatgtaataaaagaggtacagaaaaataccatggaggagttgaagaagggagcgataatctctagttggcagatcatgaaaggctccttggaggaggagcatgtgaaa

SEQ ID NO: 19722 - DNA, 143 bp, Homo sapiens
  MAP TO AC012132.1; EXPRESSED IN PLACENTA, SIGNAL = 2.5; EXPRESSED IN HELA, SIGNAL =   2; EXPRESSED IN ADULT LIVER, SIGNAL = 2.4; EXPRESSED IN HEART, SIGNAL = 2.5; EXPRESSED IN BT474, SIGNAL = 2.3; EXPRESSED IN FETAL LIVER, SIGNAL = 2.4; EXPRESSED IN BRAIN, SIGNAL =   2; EXPRESSED IN BONE MARROW, SIGNAL = 2.6; EXPRESSED IN LUNG, SIGNAL = 2.3; EXPRESSED IN HBL100, SIGNAL = 2.3; EST_HUMAN HIT: BF360178.1, EVALUE 1.90e+00; NT HIT: Z14037.1, EVALUE 2.80e-01; SWISSPROT HIT: P51505, EVALUE 8.80e+00
ggtactggcattgcatagtcaaaatgctccctccaaattcgaatgtctatcagcctatgattcatcttcatagctcttatgcatccatgtatgtgtcctcggaaacatgcatgtgcaatgtcttctttgctacagtgaaaagc

SEQ ID NO: 19723 - DNA, 213 bp, Homo sapiens
  MAP TO AC010877.2; EXPRESSED IN FETAL LIVER, SIGNAL = 1.5; EXPRESSED IN LUNG, SIGNAL = 1.5; EXPRESSED IN BONE MARROW, SIGNAL = 1.3; EXPRESSED IN HELA, SIGNAL = 1.4; EXPRESSED IN HEART, SIGNAL = 1.1; EXPRESSED IN BT474, SIGNAL = 1.6; EXPRESSED IN ADULT LIVER, SIGNAL = 1.5; EXPRESSED IN BRAIN, SIGNAL = 1.3; EXPRESSED IN PLACENTA, SIGNAL = 1.4; EXPRESSED IN HBL100, SIGNAL = 1.5; SWISSPROT HIT: P10266, EVALUE 3.00e-21; NT HIT: AF195658.1, EVALUE 7.90e+00; EST_HUMAN HIT: AA299037.1, EVALUE 4.00e-60
acaaagctgtttcagtttttgaaattaactaattggattctccctaaaataactaaatttaaaccaattgaaggtgctgagaatgttttcacagatgggtctagtaacggtaaagcttcttattttggattaaaaggtaaagttttccagacgccctatactgcagctcaaaaagtggagctggtagcggtaattgaggtattgactgctttt

SEQ ID NO: 19724 - DNA, 260 bp, Homo sapiens
  MAP TO AC009973.3; EXPRESSED IN FETAL LIVER, SIGNAL = 1.3; EXPRESSED IN BRAIN, SIGNAL = 1.1; EXPRESSED IN LUNG, SIGNAL = 1.2; EXPRESSED IN HELA, SIGNAL = 1.3; EXPRESSED IN HEART, SIGNAL = 1.1; EXPRESSED IN ADULT LIVER, SIGNAL = 1.9; EXPRESSED IN BT474, SIGNAL = 0.98; EXPRESSED IN BONE MARROW, SIGNAL = 1.1; EXPRESSED IN PLACENTA, SIGNAL = 1.4; EXPRESSED IN HBL100, SIGNAL = 1.4; EST_HUMAN HIT: AI149880.1, EVALUE 0.00e+00; SWISSPROT HIT: P91758, EVALUE 6.20e-01; NT HIT: X70518.1, EVALUE 2.50e+00
ctgactcaaatgcaatggacacaatgacttcaagccttgacagccattcagtaaccgtgagaaccacttgctgcttagaatggcagagcagaaacacacagagcctggcccttgctggaaccactgtgcaaacgaaccatgtcgtgcaaggaaaaacaaaccccaatctgtttaaggccttgttggtcaagttttctatttacttgcaggtgaaaatgttcctatcagaaaaaggaattattatggataggatgaccaag

SEQ ID NO: 19725 - DNA, 128 bp, Homo sapiens
  MAP TO AC010136.2; EXPRESSED IN HEART, SIGNAL = 0.95; EXPRESSED IN PLACENTA, SIGNAL = 1.1; EXPRESSED IN HBL100, SIGNAL = 0.98; EXPRESSED IN ADULT LIVER, SIGNAL = 1.1; EXPRESSED IN FETAL LIVER, SIGNAL = 1.5; EXPRESSED IN BONE MARROW, SIGNAL = 1.4; EXPRESSED IN LUNG, SIGNAL = 1.8; NT HIT: X65859.1, EVALUE 2.00e-66; EST_HUMAN HIT: BE140372.1, EVALUE 1.00e-28; SWISSPROT HIT: P25025, EVALUE 3.00e-12
gacatgggcaacaatacagcaaactggtggatgctgttacggatcctgccccagtcctttggcttcatcgtgccgctgcgatcatgctgttctgctacagattcaccctgcatacgctgtttaaggcc

SEQ ID NO: 19726 - DNA, 207 bp, Homo sapiens
  MAP TO AC010816.2; EXPRESSED IN BRAIN, SIGNAL = 2.3; EXPRESSED IN LUNG, SIGNAL = 2.7; EXPRESSED IN HELA, SIGNAL = 2.9; EXPRESSED IN ADULT LIVER, SIGNAL = 3.2; EXPRESSED IN FETAL LIVER, SIGNAL = 2.9; EXPRESSED IN BT474, SIGNAL = 2.5; EXPRESSED IN BONE MARROW, SIGNAL = 2.7; EXPRESSED IN PLACENTA, SIGNAL = 2.8; EXPRESSED IN HEART, SIGNAL = 2.8; EXPRESSED IN HBL100, SIGNAL = 2.8; SWISSPROT HIT: P09871, EVALUE 2.50e-01; EST_HUMAN HIT: BF436340.1, EVALUE 1.00e-57; NT HIT: gi7706132, EVALUE 8.00e-58
cagggccaagaaagtcagcaggttgaacacaattccattgatggtgctgtaagcatagtctccggatggaatcagcatgaaaaagaggaccacaaactccgcatagaggaccagaaaccaggtgatgatggcacaggcgatgccacagccatcgtggataagccacatggttctcataggaccagggtagggaggtcggacaggcat

SEQ ID NO: 19727 - DNA, 591 bp, Homo sapiens
  MAP TO AC002041.1; EXPRESSED IN ADULT LIVER, SIGNAL = 4.5; EXPRESSED IN BT474, SIGNAL = 4.4; EXPRESSED IN BRAIN, SIGNAL = 3.8; EXPRESSED IN BONE MARROW, SIGNAL = 3.9; EXPRESSED IN HBL100, SIGNAL = 4.2; EXPRESSED IN HEART, SIGNAL =   4; EXPRESSED IN PLACENTA, SIGNAL = 4.7; EXPRESSED IN FETAL LIVER, SIGNAL = 4.2; EXPRESSED IN LUNG, SIGNAL = 4.5; EXPRESSED IN HELA, SIGNAL = 4.3; SWISSPROT HIT: P03200, EVALUE 3.00e-16
acctgtgggaatgtgtgaggtgacctgtgggacgtgtgaggtgacctgtgggacgtgtgaggtgacctgggggatgtgtgaggtgacctggggtacgtgtgaggagacctgtgggacatgtgaggtgacgtggcggatgtgtgaggtgacgtggggaatgtgtgaggtgacctggggtatgtgtgaggtgacgtggcgaatgtgtgaggtgacctgggggacgtgtgaggtgacctgtgggacatgtgaggtgacctgggggatgtgtgaggtgacctgggggacgtgtgaggtgacctgggggatgtgtgaggtgacctgtgggacatgtgaggtgacgtggcagatgtgtgaggtgacgtggggaatgtgtgaggtgacctgggggacgtgtgacgtgacgtggggaatgtgtgaggtgacctggggaacgtgtgaggtgacctgggggatgtgtgaggtgacctgggggacgtgtgaggtgacctggggaatgtgtgaggtgacctggggaacgtgtgaggtgacctgggggatgtgtgaggtgacctgtgggacatgtgaggtgacctggggaatgtgtgaggtgat

SEQ ID NO: 19728 - DNA, 227 bp, Homo sapiens
  MAP TO AC010826.2; EXPRESSED IN BONE MARROW, SIGNAL = 4.7; EXPRESSED IN LUNG, SIGNAL = 3.1; EXPRESSED IN HELA, SIGNAL = 3.8; EXPRESSED IN HBL100, SIGNAL = 3.5; EXPRESSED IN HEART, SIGNAL = 4.2; EXPRESSED IN BT474, SIGNAL = 2.6; EXPRESSED IN BRAIN, SIGNAL = 3.6; EXPRESSED IN PLACENTA, SIGNAL = 3.4; EXPRESSED IN ADULT LIVER, SIGNAL = 3.8; EXPRESSED IN FETAL LIVER, SIGNAL = 3.2; NT HIT: L12051.1, EVALUE 7.20e+00
cttgtttctagttttatttcttctccttctcctcctcctcctccttcttctcctcctccttcctcttcctcttcctcttgttgtcttcttcttctccttcttcctcctcaccttcctcctcctcttccccttccttttcctcttccccttccccctcctcctcttcttctgcttctgcttctcctcctcctcctccttctccttctcctgctcctcctttttttaaa

SEQ ID NO: 19729 - DNA, 137 bp, Homo sapiens
  MAP TO AC010857.2; EXPRESSED IN FETAL LIVER, SIGNAL =  12; EXPRESSED IN BRAIN, SIGNAL = 7.2; EXPRESSED IN LUNG, SIGNAL =  12; EXPRESSED IN HELA, SIGNAL =  13; EXPRESSED IN HEART, SIGNAL = 6.4; EXPRESSED IN ADULT LIVER, SIGNAL =  15; EXPRESSED IN BT474, SIGNAL = 8.9; EXPRESSED IN BONE MARROW, SIGNAL = 8.4; EXPRESSED IN PLACENTA, SIGNAL =  13; EXPRESSED IN HBL100, SIGNAL =  12; EST_HUMAN HIT: AI582029.1, EVALUE 7.90e-02; SWISSPROT HIT: Q01293, EVALUE 1.70e+00; NT HIT: U26918.1, EVALUE 2.60e-01
cattgtcacatttttcccaggaattttcatattgctgtagagccctaacctgtttttatagccttcataagttgtttcagaggtggggctctgatccaagctgaggcaatcagaggacttccctggaaacttttgag

SEQ ID NO: 19730 - DNA, 283 bp, Homo sapiens
  MAP TO AL118512.2; EXPRESSED IN HEART, SIGNAL = 1.2; NT HIT: X79300.1, EVALUE 5.80e-01; EST_HUMAN HIT: AW975539.1, EVALUE 7.00e-01; SWISSPROT HIT: P11799, EVALUE 1.00e-09
catggacacttaagtcatattttttgtcagtcattcctgctacattcacagcaacacacacataacggcctgtgtcagatacatgaatgttcttcagctgaaggatgtgaccttcatccagtatttctactccctttgccttgatcaaggggtggccatctttcatccaggtcactgttggtggtggaataccctgcacctcacactccaaggagatactcttccctcgggtcacaataatttcagtagggtggctgccactgttggttatggttggtctaac

SEQ ID NO: 19731 - DNA, 120 bp, Homo sapiens
  MAP TO AC011351.1; EXPRESSED IN HEART, SIGNAL = 0.92; EST_HUMAN HIT: AV730747.1, EVALUE 9.90e-02; SWISSPROT HIT: P29162, EVALUE 2.30e+00
ataatgctaggaacaccacagtttctcagtaaaatagaagggatcatcattatcattaataatagtggaaacagcagtattattatttctacaactagtagtagcagcagtagtactgtt

SEQ ID NO: 19732 - DNA, 178 bp, Homo sapiens
  MAP TO AC011592.2; EXPRESSED IN BRAIN, SIGNAL = 1.4; EXPRESSED IN HELA, SIGNAL = 1.4; EXPRESSED IN PLACENTA, SIGNAL = 1.4; EXPRESSED IN ADULT LIVER, SIGNAL = 1.5; EXPRESSED IN LUNG, SIGNAL = 1.3; EXPRESSED IN BONE MARROW, SIGNAL = 1.4; EXPRESSED IN HEART, SIGNAL = 1.2; EXPRESSED IN HBL100, SIGNAL = 1.8; EXPRESSED IN FETAL LIVER, SIGNAL = 1.5; EXPRESSED IN BT474, SIGNAL = 1.2; EST_HUMAN HIT: BE256463.1, EVALUE 2.00e-03; SWISSPROT HIT: P43089, EVALUE 6.50e+00; NT HIT: AB033117.1, EVALUE 1.00e-03
agtctatgatatagtactcttgtttcctcagagccctggggcctgaaccatactcaggtatgataatctggtcactgtgaggccaggtcaacttcagtttgttttgttttttcttttttgatgcttcctgggttatttggagatcttgccatgcattatcttcatttctatgtttact

SEQ ID NO: 19733 - DNA, 251 bp, Homo sapiens
  MAP TO AC007561.2; EXPRESSED IN LUNG, SIGNAL = 1.2; EXPRESSED IN HELA, SIGNAL = 0.91; EXPRESSED IN PLACENTA, SIGNAL = 0.71; EXPRESSED IN FETAL LIVER, SIGNAL = 0.72; EXPRESSED IN ADULT LIVER, SIGNAL = 0.67; EXPRESSED IN HEART, SIGNAL = 0.84; EST_HUMAN HIT: AI752095.1, EVALUE 1.00e-130; SWISSPROT HIT: O60462, EVALUE 5.00e-45; NT HIT: AF281074.1, EVALUE 0.00e+00
catgtggaatgccatcccagatgtccagccaatcgtacttgcagtccccctctcccacctgcaaagggtcatgctccaggtcaaagatcaggaactgcaggatgatctccatcttgggtttggccaggatggtaaaggtgcagtccaagttgtgtggatacttctcaggaaacccaggagattcgatggtcccgttggggcttgtgaagttttttgagcaatcttcagagcctgtatgtaaaagagaactg

SEQ ID NO: 19734 - DNA, 375 bp, Homo sapiens
  MAP TO AC011700.3; EXPRESSED IN PLACENTA, SIGNAL = 0.92; EXPRESSED IN HBL100, SIGNAL = 1.2; EXPRESSED IN FETAL LIVER, SIGNAL = 1.2; EXPRESSED IN ADULT LIVER, SIGNAL = 1.4; EXPRESSED IN BRAIN, SIGNAL = 1.1; EXPRESSED IN BONE MARROW, SIGNAL = 0.97; EXPRESSED IN HEART, SIGNAL = 0.97; NT HIT: gi11426673, EVALUE 0.00e+00; EST_HUMAN HIT: BE086152.1, EVALUE 0.00e+00; SWISSPROT HIT: Q92786, EVALUE 2.00e-41
aactgtcctgggtctagctcgcacatctcattatctgaccttccgacagagtcctgggccctggcatccaggatctccgagcgcatgctgtcttcagacaggttaccatcttcatcattttccgaatcagtgctgtcatagatttggtagaacttttcctgcagctggcgcagctgtttctgcatgtcctccagctgctgtttcagctgtcggcgctcctctcgcttctgttcttttcgggctgaaaccagctgctggaaactctgttgctgctgctggggaagcttttgcttgcgtttgttttctctgtaactttctcggggactcacagactgcggggccatctctctttcattttcattgccccttaatgcc

SEQ ID NO: 19735 - DNA, 1216 bp, Homo sapiens
  MAP TO AC004147.1; EXPRESSED IN LUNG, SIGNAL = 2.8; EXPRESSED IN HELA, SIGNAL = 3.3; EXPRESSED IN PLACENTA, SIGNAL = 2.8; EXPRESSED IN ADULT LIVER, SIGNAL = 2.3; EXPRESSED IN BT474, SIGNAL = 2.4; EXPRESSED IN BONE MARROW, SIGNAL = 2.7; EXPRESSED IN HBL100, SIGNAL = 4.3; EXPRESSED IN HEART, SIGNAL = 2.1; EXPRESSED IN FETAL LIVER, SIGNAL = 2.3; EXPRESSED IN BRAIN, SIGNAL = 2.8; SWISSPROT HIT: P34314, EVALUE 1.00e-120; EST_HUMAN HIT: AU118621.1, EVALUE 0.00e+00; NT HIT: AB004884.1, EVALUE 0.00e+00
acctcctgccatgggtcaggcccctcctgcaaccaatgagcagaaacagtggaaaagcaagaccaatggagctgaaaatgaaacgttaacgttaaaagaataccatgaacaagaagaaatcttcaaactcagattaggtcatcttaaaaaggaggaagcagagatccaggcagagctggagaggctagaaagggttagaaaactacatatcagggaagtaaaaaggatacataatgaagataattcacaatttaaatatcatccaacgctaaatgacagatatttgttgttacatcttttgggtagaggaggtttcagtgaagtttacaaggcatttgatctaacagagcaaagatacgtagctgtgaaaattcaccagttaaataaaaactggagagatgagaaaaaggagaattaccacaagcatgcatgtagggaataccggattcataaagagctggaccatcccagaatagttaagctgtatgattacttttcactggatactgactcgttttgtacagtattagaatactgtgagggaaatgatctggacttctacctgaaacagcacaaattaatgtcagagaaagaggcccggtccattatcatgcagattgtgaatgctttaaagtacttaaatgaaataaaacctcccatcatacactatgacctcaaaccaggtaatattcttttagaaaatggtacagcgtgtggagagataaaaattacagattttggtctttcgaagatcatggatgatgatagctacaattcagtggatggcatggagctaacatcacaaggtgctggtacttattggtatttaccaccagagtgttttgtggttgggaaagaaccaccaaagatctcaaataaagttgatgtgtggtcggtgggtgtgatcttctatcagtgtctttatggaaggaagccttttggccataaccagtctcagcaagacatcctacaagagaatacgattcttaaagctactgaagtgcagttcccgccaaagccggtagtaacacctgaagcaaaggcgttgattcgacgatgcttggcctaccgaaaggaggaccgcattgatgtccagcagctggcctgtgatccctacttgttgcctcacatccgaaagtcagtctctacgagtagccctgctggagctgctattgcatcaacctctggggcgtccaataacagttcttctaattga

SEQ ID NO: 19736 - DNA, 438 bp, Homo sapiens
  MAP TO AC012134.1; EXPRESSED IN HELA, SIGNAL = 2.4; EXPRESSED IN PLACENTA, SIGNAL = 2.8; EXPRESSED IN HBL100, SIGNAL = 2.8; EXPRESSED IN LUNG, SIGNAL =   3; EXPRESSED IN BRAIN, SIGNAL = 2.9; EXPRESSED IN HEART, SIGNAL = 2.6; EXPRESSED IN BT474, SIGNAL = 2.5; EXPRESSED IN ADULT LIVER, SIGNAL = 2.7; EXPRESSED IN FETAL LIVER, SIGNAL = 2.7; EXPRESSED IN BONE MARROW, SIGNAL = 3.4; NT HIT: S65019.1, EVALUE 2.70e-01; EST_HUMAN HIT: AA776664.1, EVALUE 1.60e+00
actctcgtcactatcaccattaccaccacgaccactttcactattaacaccagtatcaccaccgccttcaccattattgccaaaattgtcactaccacaatcatcaccatctttgccatcactgcaacatcaccaccatcactcatcatcagcatcactaccaccttcaccatcatcaccaccaccacaactttcatctacattgccaacattaccaccatcaccaccaccttcaccattatcacaaatatcaccaccatcatcatcactaccactaacaccttcaccattaattctggtattgccaccatcatcaccaccaccttcacagtcatcacgaacatcatcaccgccaccttaaccatcattgccaacatcactaccatcactaccaccaccactgttactactatctgattgtgatcacccactgtcttt

SEQ ID NO: 19737 - DNA, 88 bp, Homo sapiens
  MAP TO AL035469.7; EXPRESSED IN HEART, SIGNAL = 1.3; EXPRESSED IN BT474, SIGNAL = 0.77; EXPRESSED IN BONE MARROW, SIGNAL = 0.91; EXPRESSED IN HBL100, SIGNAL = 0.72; EXPRESSED IN FETAL LIVER, SIGNAL = 0.73; EXPRESSED IN LUNG, SIGNAL = 0.69; EXPRESSED IN HELA, SIGNAL = 0.66; EXPRESSED IN ADULT LIVER, SIGNAL = 0.81; EXPRESSED IN BRAIN, SIGNAL = 2.5; EXPRESSED IN PLACENTA, SIGNAL = 0.99; NT HIT: AF153704.1, EVALUE 6.10e-01; EST_HUMAN HIT: BF088284.1, EVALUE 2.70e-01
aaaagcatcattcttacctttatgagagttagtaatgagcacaggagcctttaaaaaatgaacctggtaatttaaagagaacatggtt

SEQ ID NO: 19738 - DNA, 94 bp, Homo sapiens
  MAP TO AC012380.1; EXPRESSED IN BONE MARROW, SIGNAL = 8.1; EXPRESSED IN LUNG, SIGNAL = 8.2; EXPRESSED IN BRAIN, SIGNAL = 8.6; EXPRESSED IN HELA, SIGNAL = 8.4; EXPRESSED IN HEART, SIGNAL = 5.1; EXPRESSED IN PLACENTA, SIGNAL = 9.3; EXPRESSED IN HBL100, SIGNAL = 6.8; EXPRESSED IN ADULT LIVER, SIGNAL = 8.4; EXPRESSED IN BT474, SIGNAL = 6.6; EXPRESSED IN FETAL LIVER, SIGNAL = 7.1; EST_HUMAN HIT: AI685396.1, EVALUE 7.00e-39; NT HIT: AL163246.2, EVALUE 1.00e-36
tcagttaaggcaggaaccggccatctctatgtgtatgtgcaggtcacaggggatatgatggcttagcttgggctcagaggcctgacattcctgt

SEQ ID NO: 19739 - DNA, 102 bp, Homo sapiens
  MAP TO AC009309.1; EXPRESSED IN HEART, SIGNAL =   1; EXPRESSED IN FETAL LIVER, SIGNAL = 1.1; EXPRESSED IN BRAIN, SIGNAL = 1.1; EXPRESSED IN PLACENTA, SIGNAL = 1.2; EXPRESSED IN BT474, SIGNAL = 0.83; EXPRESSED IN BONE MARROW, SIGNAL = 1.1; EXPRESSED IN HBL100, SIGNAL = 1.2; EXPRESSED IN LUNG, SIGNAL = 0.91; EXPRESSED IN HELA, SIGNAL =   1; EXPRESSED IN ADULT LIVER, SIGNAL = 0.98; NT HIT: AF072246.1, EVALUE 9.00e-04; EST_HUMAN HIT: AI124529.1, EVALUE 2.00e-04
tcacgaagctctgcgtgaagcaccgcagaggaacaaagacgaggatggtacggtccctgctcccatggagctcacagtctagttggggcatcaagacacaaa

SEQ ID NO: 19740 - DNA, 233 bp, Homo sapiens
  MAP TO AC007899.2; EXPRESSED IN BONE MARROW, SIGNAL = 1.5; EXPRESSED IN FETAL LIVER, SIGNAL = 1.3; EXPRESSED IN LUNG, SIGNAL = 1.3; EXPRESSED IN HELA, SIGNAL = 1.5; EXPRESSED IN BRAIN, SIGNAL = 1.2; EXPRESSED IN PLACENTA, SIGNAL = 0.94; EXPRESSED IN BT474, SIGNAL = 1.4; EXPRESSED IN HBL100, SIGNAL =   1; EXPRESSED IN ADULT LIVER, SIGNAL = 1.1; EXPRESSED IN HEART, SIGNAL = 0.93; NT HIT: AB037835.1, EVALUE 2.00e-56; EST_HUMAN HIT: AA375620.1, EVALUE 3.00e-12; SWISSPROT HIT: P32898, EVALUE 1.10e+00
aatgcccaaaggacactgatgtactccacctaacaaagcagccattgcaaaactatatccactgacagcttctggtgaggtcttcaagttgttgagccgttctgcacacctgtctagaaatggtgtcagctggaaaggtaatgccacagccacacagcgcaaacaccatgcagcagcaagtcgggcagccatgcttggatgaagcagcactgaagtcacaatctccaaaagcc

SEQ ID NO: 19741 - DNA, 185 bp, Homo sapiens
  MAP TO AC011743.2; EXPRESSED IN BT474, SIGNAL = 1.8; EXPRESSED IN FETAL LIVER, SIGNAL = 1.7; EXPRESSED IN LUNG, SIGNAL = 1.8; EXPRESSED IN HELA, SIGNAL = 2.1; EXPRESSED IN HBL100, SIGNAL = 1.7; EXPRESSED IN HEART, SIGNAL = 1.8; EXPRESSED IN ADULT LIVER, SIGNAL = 2.2; EXPRESSED IN BRAIN, SIGNAL =   2; EXPRESSED IN BONE MARROW, SIGNAL = 1.7; EXPRESSED IN PLACENTA, SIGNAL = 2.4; SWISSPROT HIT: P33450, EVALUE 1.70e+00; NT HIT: AB018277.1, EVALUE 1.10e-01; EST_HUMAN HIT: AV701901.1, EVALUE 1.60e-01
tattaacagggaataacagcgctgtggtcacggctgctctcggggaggtttgcttgcattccaaagtgcacataagacacctgctcaccaaagacacaccaaagaacttcgtgctttcaaagatacacatgcccctgggagcccctgggttgcatttcttagtagtgaattgcaattcaacaagt

SEQ ID NO: 19742 - DNA, 153 bp, Homo sapiens
  MAP TO AC011036.2; EXPRESSED IN BT474, SIGNAL = 5.7; EXPRESSED IN FETAL LIVER, SIGNAL = 5.8; EXPRESSED IN BRAIN, SIGNAL = 5.8; EXPRESSED IN LUNG, SIGNAL = 6.8; EXPRESSED IN HBL100, SIGNAL = 5.7; EXPRESSED IN HELA, SIGNAL = 6.6; EXPRESSED IN HEART, SIGNAL = 5.1; EXPRESSED IN ADULT LIVER, SIGNAL = 8.1; EXPRESSED IN BONE MARROW, SIGNAL = 5.2; EXPRESSED IN PLACENTA, SIGNAL = 6.1; NT HIT: D90226.1, EVALUE 4.00e-81; EST_HUMAN HIT: AI970310.1, EVALUE 6.00e-81; SWISSPROT HIT: P20935, EVALUE 3.00e-28
actgtggagaatggcagtggagtgtgtgtgtgcccaccagtggagactgtgggctgggcacacgggagggcactcggactggagctgagtgcaagcaaaccatgaagacccagagatgtaagatcccctgcaactggaagaagcaatttggcg

SEQ ID NO: 19743 - DNA, 137 bp, Homo sapiens
  MAP TO AF182108.1; EXPRESSED IN FETAL LIVER, SIGNAL = 1.1; EXPRESSED IN ADULT LIVER, SIGNAL = 1.1; EXPRESSED IN HELA, SIGNAL = 0.92; EXPRESSED IN HEART, SIGNAL = 1.1; EXPRESSED IN BRAIN, SIGNAL =   1; EXPRESSED IN BONE MARROW, SIGNAL = 1.1; EST_HUMAN HIT: BE565644.1, EVALUE 2.90e-02; SWISSPROT HIT: Q09285, EVALUE 2.30e+00; NT HIT: M13158.1, EVALUE 6.70e-02
aagcattccagctggtcaatcataaaggtatgatagaatatcaccactttggaattcctaataaaataattggtctggtcattgatgatcagcctaaaatcattaaaaagcttaatgggagcttgataataaaagat

SEQ ID NO: 19744 - DNA, 350 bp, Homo sapiens
  MAP TO AL035249.6; EXPRESSED IN BONE MARROW, SIGNAL = 0.8; EXPRESSED IN LUNG, SIGNAL = 0.65; EXPRESSED IN ADULT LIVER, SIGNAL = 0.7; EXPRESSED IN BT474, SIGNAL = 1.7; EXPRESSED IN HBL100, SIGNAL = 0.93; EXPRESSED IN FETAL LIVER, SIGNAL = 0.66; EXPRESSED IN HELA, SIGNAL = 0.77; EXPRESSED IN PLACENTA, SIGNAL = 0.77; EXPRESSED IN HEART, SIGNAL = 0.84; NT HIT: AE000542.1, EVALUE 3.40e+00; EST_HUMAN HIT: M92284.1, EVALUE 1.40e-02; SWISSPROT HIT: P54143, EVALUE 2.30e+00
aaacacttcagcaaattttagtaatgtccacatggctggttctggtttagttttttcttcatcttcctcttcctctgtggaggacatgaaagttcttccagttcctcatttgctaacacttctcaaaggccttcagtatgtccttctatttcatcaagcatatcagcaaatccttctccatcaacttgtcttgttgcatggatgattttcctaattcatctatcaatttcaggcaagcctttaaaatcattcacaacttccactccatcagtccttccagcaggcatttggtttgtggtttaattcatccattgcaacttgatgagtgctattgcatcagcaatagtgaa

SEQ ID NO: 19745 - DNA, 1345 bp, Homo sapiens
  MAP TO AC004049.1; EXPRESSED IN HELA, SIGNAL = 1.8; EXPRESSED IN ADULT LIVER, SIGNAL = 1.3; EXPRESSED IN BT474, SIGNAL = 1.8; EXPRESSED IN BRAIN, SIGNAL = 1.5; EXPRESSED IN BONE MARROW, SIGNAL = 1.5; EXPRESSED IN HEART, SIGNAL = 1.3; EXPRESSED IN HBL100, SIGNAL =   2; EXPRESSED IN PLACENTA, SIGNAL = 1.8; EXPRESSED IN FETAL LIVER, SIGNAL = 1.9; EXPRESSED IN LUNG, SIGNAL = 1.5; SWISSPROT HIT: P07155, EVALUE 6.00e-11; NT HIT: gi11437457, EVALUE 0.00e+00; EST_HUMAN HIT: BE781623.1, EVALUE 0.00e+00
aatgacaattacctgacaatcacagggccgtcacacctcttcctgtcaggggccgagacattccatacaccaagcttaggtgatgaagaatttgaaatcccacctatctctttggattctgatccctcattggctgtctcagatgtggttgaccactttgatgacctggcagacccttcctcttcacaggatggcagtgcttcagcccagtatggggtccagacattggacatgctctgtgggcatgacccatggcttgatggagcaaggtgggggctcctcagtggaggcttgatcatggacttaaaccactctataggaactcagtatagtgccaacccacctgttacaattgatgtactaatgatagacatgacatctgacttgatggggcatagccagttgaccaccactgatcagtcagaactgagtttccaactgggtttgagcttacggggtggcaccatcctgccacctgcccagtcacctgaagatcgtatttcaaccaccccttcacctactagttcacttcacgaggttggtgttgaggatttctggaggcaaatttccagccagaagacagtggtggtggaagcagggaaaaagcagaagttcccaaagaagagaaaaaagaaagatcctaatgaacctcagaaaccagtttcagcatatgctttattctttcctgatacacgggctgccatcaagggacagaatcctaatgccacttttggtgaggtttcaaaaattgtggcctccatgtgggatagtcttggagaggagcaaaaacagatatataagaggaaaactgaggctgccaagaaagagtatctgaagacactggctgcttacgaagacaaccaggagtgtcaggccactgtggaaacagcggaattggatccagcaccaccatcacaaactccttctccaccttctatggctactgttgacccagcgtctccagcaccagcttcaacagagccccctgtcctgtccccatccattgttgttaactccaccctttcatcctatgtggcaaaccaggcatcttcaggagctgggggtcagcccaatatcaccaagttgattattaccaaacaaacgttgccctcttccattactatgtctcagggagggatggttactgctatcctagccacagtggtgacctcctgggggctccaactagacccaaccagtacagccactatccagcccagtcaacaagcccagattgtcactcggtcagtgttgcaggcagcagcagcagctgctactgttgcttctatgcaactgcctccaccccgactacagccccctccattataacagatgccacagcccc

SEQ ID NO: 19746 - DNA, 624 bp, Homo sapiens
  MAP TO AC004125.1; EXPRESSED IN PLACENTA, SIGNAL = 2.4; EXPRESSED IN ADULT LIVER, SIGNAL = 2.3; EXPRESSED IN BRAIN, SIGNAL = 3.8; EXPRESSED IN LUNG, SIGNAL = 1.8; EXPRESSED IN BONE MARROW, SIGNAL =   2; EXPRESSED IN HEART, SIGNAL = 1.6; EXPRESSED IN HELA, SIGNAL = 2.2; EXPRESSED IN HBL100, SIGNAL = 2.1; EXPRESSED IN BT474, SIGNAL =   2; EXPRESSED IN FETAL LIVER, SIGNAL = 2.5; NT HIT: gi11431588, EVALUE 0.00e+00; EST_HUMAN HIT: AW905015.1, EVALUE 0.00e+00; SWISSPROT HIT: O60359, EVALUE 2.00e-76
ggttaagcaacatcattggcatcatagtttatatatcagccaacgccggagaccccgggcagcgtgactccaaaaaaagttactcctatggttggtccttttatttcggagccttctctttcatcatcgcagaaattgtaggagtggttgccgtgcacatctatattgaaaaacatcagcagttacgagccaaatcccactcggagttcctgaagaaatctacttttgcccgcctcccaccctacaggtatcgattccggaggcggtcaagttctcgctccaccgagcccagatcccgagacctgtcccccatcagcaaaggcttccacaccatcccttccactgacatctcgatgttcaccctctcccgggacccctcaaagatcaccatggggaccctcctcaactccgaccgggaccacgcttttctacagttccacaattccacacccaaagagttcaaagagtcactgcataataatccggccaacaggcgcaccacgcccgtctgaactgacctctgacctctgccccacgcccagcacagccttgggggaagtgtacagagatgtctctgaggttgcatggcatggtccttgtgatggtattactttttacaaagaa

SEQ ID NO: 19747 - DNA, 95 bp, Homo sapiens
  MAP TO AC012130.1; EXPRESSED IN HBL100, SIGNAL =   4; EXPRESSED IN PLACENTA, SIGNAL = 5.8; EXPRESSED IN HELA, SIGNAL = 4.2; EXPRESSED IN HEART, SIGNAL = 3.7; EXPRESSED IN ADULT LIVER, SIGNAL = 4.6; EXPRESSED IN BT474, SIGNAL = 3.1; EXPRESSED IN FETAL LIVER, SIGNAL = 4.3; EXPRESSED IN BONE MARROW, SIGNAL =   4; EXPRESSED IN LUNG, SIGNAL = 4.4; EXPRESSED IN BRAIN, SIGNAL = 3.4; EST_HUMAN HIT: T94322.1, EVALUE 8.10e-01; NT HIT: gi6678580, EVALUE 6.70e-01
cttccagcaaacccactggcggttcttcattaacatcacagcaggctttaattccagcagaagactgatcacccttcagctgcccgacatccagc

SEQ ID NO: 19748 - DNA, 94 bp, Homo sapiens
  MAP TO AC012441.1; EXPRESSED IN BT474, SIGNAL = 1.1; EXPRESSED IN BONE MARROW, SIGNAL = 1.2; EXPRESSED IN PLACENTA, SIGNAL = 1.1; EXPRESSED IN HBL100, SIGNAL = 1.1; EXPRESSED IN HELA, SIGNAL = 1.3; EXPRESSED IN ADULT LIVER, SIGNAL = 1.2; EXPRESSED IN FETAL LIVER, SIGNAL = 1.9; EXPRESSED IN BRAIN, SIGNAL = 1.3; EXPRESSED IN LUNG, SIGNAL = 1.3; EXPRESSED IN HEART, SIGNAL = 1.4; EST_HUMAN HIT: AA634935.1, EVALUE 8.00e-01; NT HIT: U86592.1, EVALUE 2.00e-01
gtgtggctgcctctctcacaccatcactttccaagctgaccttggtgctggcgacaacatgggactggattctggtctcctgactgttggacca

SEQ ID NO: 19749 - DNA, 121 bp, Homo sapiens
  MAP TO AC007744.1; EXPRESSED IN PLACENTA, SIGNAL = 0.89; EXPRESSED IN HBL100, SIGNAL = 1.1; EXPRESSED IN BRAIN, SIGNAL = 1.4; EXPRESSED IN HEART, SIGNAL = 0.92; EXPRESSED IN HELA, SIGNAL =   1; EXPRESSED IN BT474, SIGNAL =   1; EXPRESSED IN BONE MARROW, SIGNAL = 0.96; EXPRESSED IN FETAL LIVER, SIGNAL = 0.84; EXPRESSED IN LUNG, SIGNAL = 0.84; EXPRESSED IN ADULT LIVER, SIGNAL = 0.74; NT HIT: AF248054.1, EVALUE 2.30e-01; EST_HUMAN HIT: AI147615.1, EVALUE 1.70e-02; SWISSPROT HIT: P45277, EVALUE 6.90e+00
aaactgtttcctgactctcagcatgagcacacgagtgtggctcagttggtaatgtcatgggcacaggttggaggaatgctattctaccatgttgtttatttcctgctgctgttgaatcttc

SEQ ID NO: 19750 - DNA, 225 bp, Homo sapiens
  MAP TO AF017104.1; EXPRESSED IN BONE MARROW, SIGNAL = 1.5; EXPRESSED IN HELA, SIGNAL = 1.3; EXPRESSED IN PLACENTA, SIGNAL = 1.6; EXPRESSED IN HBL100, SIGNAL = 1.6; EXPRESSED IN BRAIN, SIGNAL = 1.4; EXPRESSED IN LUNG, SIGNAL = 1.6; EXPRESSED IN HEART, SIGNAL = 1.1; EXPRESSED IN BT474, SIGNAL = 1.4; EXPRESSED IN ADULT LIVER, SIGNAL = 1.7; EXPRESSED IN FETAL LIVER, SIGNAL = 1.6; EST_HUMAN HIT: AA773919.1, EVALUE 7.00e-62; NT HIT: U09410.1, EVALUE 6.00e-62; SWISSPROT HIT: P52739, EVALUE 5.00e-15
gcacggtctctaatcctcagcatcttcgtgatcttccctggcagcctcagcatctgcttggctaggctctgtcttctcttgggtcatgatttctggggtcatgtggacgaagcctgcttctggaagttcactttgtacttccactggcatctgattttcccgttccacatgcggctcctctccgtgtacttcagtaccttcttcaggctgaattcagcccactgc

SEQ ID NO: 19751 - DNA, 310 bp, Homo sapiens
  MAP TO AP000192.1; EXPRESSED IN PLACENTA, SIGNAL = 0.62; EXPRESSED IN BT474, SIGNAL = 0.68; EXPRESSED IN BONE MARROW, SIGNAL = 0.91; EXPRESSED IN HBL100, SIGNAL = 0.71; EXPRESSED IN HEART, SIGNAL = 0.92; EXPRESSED IN FETAL LIVER, SIGNAL = 0.77; EXPRESSED IN LUNG, SIGNAL = 0.91; EXPRESSED IN HELA, SIGNAL = 0.76; EXPRESSED IN ADULT LIVER, SIGNAL = 0.85; EXPRESSED IN BRAIN, SIGNAL = 0.9; NT HIT: AF114488.1, EVALUE 5.00e-88; SWISSPROT HIT: P34216, EVALUE 3.00e-04; EST_HUMAN HIT: AI580905.1, EVALUE 6.00e-88
gggtaagagtgctaattattttgttttcgtgttggtgggagtggtggttttggaaaggttcttttatggtcacagttgttctcaggccatgctgttggtttgcagggcactagctgacatgaataatgatggaagaatggatcaagtggagttttccatagctatgaaacttatcaaactgaagctacaaggatatcagctaccctctgcacttccccctgtcatgaaacagcaaccagttgctatttctagcgcaccagcatttggtaagtctgaaaatgaattggtttctgtattttcttgtatattt

SEQ ID NO: 19752 - DNA, 149 bp, Homo sapiens
  MAP TO AC005519.2; EXPRESSED IN BONE MARROW, SIGNAL = 0.86; EXPRESSED IN HELA, SIGNAL = 0.97; EXPRESSED IN BRAIN, SIGNAL = 0.85; EXPRESSED IN HEART, SIGNAL = 0.81; EXPRESSED IN PLACENTA, SIGNAL = 0.87; EXPRESSED IN BT474, SIGNAL = 0.68; EXPRESSED IN HBL100, SIGNAL = 0.8; EXPRESSED IN FETAL LIVER, SIGNAL = 0.73; EXPRESSED IN LUNG, SIGNAL = 0.82; EXPRESSED IN ADULT LIVER, SIGNAL = 0.72; NT HIT: AL163210.2, EVALUE 3.40e-01; EST_HUMAN HIT: BF214531.1, EVALUE 5.00e-01; SWISSPROT HIT: P26867, EVALUE 3.90e+00
cttgccattcctgccctgccattctggaaacttggacaccagaaacagctttgtctaagcctcaactctgtgatccctactgtgccagacactaagaaggtggctcaaaataactgcttcctttccactcctgctctcaacaagcagag

SEQ ID NO: 19753 - DNA, 192 bp, Homo sapiens
  MAP TO AL035594.7; EXPRESSED IN LUNG, SIGNAL = 0.97; EXPRESSED IN BRAIN, SIGNAL = 1.1; EXPRESSED IN HEART, SIGNAL = 0.92; EXPRESSED IN PLACENTA, SIGNAL = 0.71; EXPRESSED IN BONE MARROW, SIGNAL = 0.88; EXPRESSED IN HBL100, SIGNAL = 0.82; EXPRESSED IN FETAL LIVER, SIGNAL = 0.89; EXPRESSED IN ADULT LIVER, SIGNAL =  23; EXPRESSED IN BT474, SIGNAL = 0.91; EXPRESSED IN HELA, SIGNAL = 0.92; NT HIT: AJ251057.1, EVALUE 3.80e-01; SWISSPROT HIT: P31314, EVALUE 2.90e+00
cctcattccctgatgactgtactgagaacagaagcctcttcctcttccagcagtctccaccgtggtctagtaccaacttttccataaattctatttacctccactcctcatggtgaaccttccacttcagtaagatccttctccttcggttcctatcccacgtccccacacatacacacgacgtgctttctg

SEQ ID NO: 19754 - DNA, 102 bp, Homo sapiens
  MAP TO AC012448.1; EXPRESSED IN BT474, SIGNAL = 1.2; EXPRESSED IN LUNG, SIGNAL = 1.2; EXPRESSED IN HEART, SIGNAL =   1; EXPRESSED IN FETAL LIVER, SIGNAL = 1.4; EXPRESSED IN HELA, SIGNAL = 1.5; SWISSPROT HIT: O08663, EVALUE 3.00e-10; NT HIT: gi11433895, EVALUE 1.00e-30; EST_HUMAN HIT: AU142749.1, EVALUE 2.00e-30
catctgtgtgatgttggtgagtccatccaaaaatttatggagtcctatgaagttgaaatagatgggaagacacaacaggtgaaaccaatccataacctaaat

SEQ ID NO: 19755 - DNA, 232 bp, Homo sapiens
  MAP TO AP000053.1; EXPRESSED IN PLACENTA, SIGNAL = 0.91; EXPRESSED IN BT474, SIGNAL = 0.74; EXPRESSED IN BONE MARROW, SIGNAL = 0.73; EXPRESSED IN FETAL LIVER, SIGNAL = 0.83; EXPRESSED IN HELA, SIGNAL = 0.81; EXPRESSED IN ADULT LIVER, SIGNAL = 0.87; EXPRESSED IN BRAIN, SIGNAL = 0.97; EXPRESSED IN HBL100, SIGNAL = 0.9; EXPRESSED IN LUNG, SIGNAL = 0.89; EXPRESSED IN HEART, SIGNAL = 0.98; NT HIT: X56882.1, EVALUE 1.20e-01; SWISSPROT HIT: P43873, EVALUE 2.70e-01
aggacttgtcattctttctgaggatgttgctggccagccggaagacgaaaatcaccgcgtagatgccgatgatggtgagtatataccaggcagcgctggttccgtctggcaccttcagagccctggtggagttggtgtcattcctcccctctgtgtggtcacccagcaggagccccaggagggtgctggcctgggtctggttggaggcttcatggggagtccacttggcccc

SEQ ID NO: 19756 - DNA, 193 bp, Homo sapiens
  MAP TO AF020802.1; EXPRESSED IN BONE MARROW, SIGNAL = 3.1; EXPRESSED IN PLACENTA, SIGNAL = 2.8; EXPRESSED IN HBL100, SIGNAL = 3.4; EXPRESSED IN BT474, SIGNAL =   3; EXPRESSED IN LUNG, SIGNAL = 3.2; EXPRESSED IN BRAIN, SIGNAL = 2.9; EXPRESSED IN HEART, SIGNAL = 2.6; EXPRESSED IN HELA, SIGNAL = 3.4; EXPRESSED IN ADULT LIVER, SIGNAL = 3.9; EXPRESSED IN FETAL LIVER, SIGNAL = 3.3; NT HIT: AJ229041.1, EVALUE 1.00e-105; EST_HUMAN HIT: AI906537.1, EVALUE 4.60e-01; SWISSPROT HIT: P24884, EVALUE 2.80e+00
cctatgcccaaatctcacacttggttgtgttcaatcttcctactatatgctttctctgtcctagttttgctggtctgtctcctcatgtgcggcctctgcttactggtgaggtaatgcgaggtgtaattattggtgattgtccccaccattctattacaaatatgccacccaaagacaccagtggctaccttac

SEQ ID NO: 19757 - DNA, 701 bp, Homo sapiens
  MAP TO AC009962.2; EXPRESSED IN BONE MARROW, SIGNAL = 3.8; EXPRESSED IN LUNG, SIGNAL = 5.3; EXPRESSED IN PLACENTA, SIGNAL = 6.1; EXPRESSED IN HELA, SIGNAL = 3.8; EXPRESSED IN FETAL LIVER, SIGNAL =   3; EXPRESSED IN ADULT LIVER, SIGNAL = 3.1; EXPRESSED IN BT474, SIGNAL = 4.7; EXPRESSED IN BRAIN, SIGNAL = 3.9; EXPRESSED IN HEART, SIGNAL = 1.9; EXPRESSED IN HBL100, SIGNAL = 3.7; SWISSPROT HIT: P27476, EVALUE 4.00e-04; EST_HUMAN HIT: AW842451.1, EVALUE 1.00e-107
gccgttttcgtcaaattgaagtgcttactactgtggccaatgcgttttcttctttatattctcaagtctccgggacgcccctgcagagaattggaagtatgtcctcagtgacctctaacaaggagacagacccacctccacctttaactcgaagtaacactgcaaatcgtttaatgaaaacactctcaaaactgaatttatgtgttgataaaacagagaaaggagaaagtagtagtccttctccatcagctgaaaaaggaaagattctaaatgtttcagtgattgaagaaagtggcaataaaaacgatcaaaagtctcaaaaaattatgaagaagaaagagtcatcttctatgttggctacagttaaagaagaagtctctggtagttcagcagctgttacggagaatgctgatagtgatagaatttctgatgaagcaaatagtaattttaaccaaggaactgaaaatgaacaaagtaaagaaactcaaagtcatgagagtaaactgggtgaggaatctggtattgtagaatccaaattagatagtgatttcaacatatccagccacagtgagctggaaaatagcagtgagctgaaaagtgtccatatatccacacctgaaaaagagccttgtgcaccactgacaataccatccataagaaatataatgacacagcagaaggactccttcgaaatggaagag

SEQ ID NO: 19758 - DNA, 87 bp, Homo sapiens; identical to SEQ ID NO: 17089
  MAP TO AP000210.1; EXPRESSED IN FETAL LIVER, SIGNAL = 0.7; EXPRESSED IN BRAIN, SIGNAL = 0.74; EXPRESSED IN BT474, SIGNAL = 0.82; EXPRESSED IN HEART, SIGNAL = 0.98; EXPRESSED IN HBL100, SIGNAL = 0.76; EXPRESSED IN PLACENTA, SIGNAL = 0.64; EXPRESSED IN BONE MARROW, SIGNAL = 0.67; EXPRESSED IN LUNG, SIGNAL = 0.63; EXPRESSED IN HELA, SIGNAL = 0.62; EXPRESSED IN ADULT LIVER, SIGNAL = 0.67; NT HIT: AL161547.2, EVALUE 1.50e-01; EST_HUMAN HIT: BE153583.1, EVALUE 4.60e-02

SEQ ID NO: 19759 - DNA, 310 bp, Homo sapiens; identical to SEQ ID NO: 19751
  MAP TO AP000116.1; EXPRESSED IN ADULT LIVER, SIGNAL = 0.68; EXPRESSED IN PLACENTA, SIGNAL = 0.71; EXPRESSED IN BONE MARROW, SIGNAL = 0.77; EXPRESSED IN HBL100, SIGNAL = 0.76; EXPRESSED IN FETAL LIVER, SIGNAL = 0.91; EXPRESSED IN LUNG, SIGNAL = 0.67; EXPRESSED IN HELA, SIGNAL =   1; EXPRESSED IN BT474, SIGNAL = 0.63; EXPRESSED IN HEART, SIGNAL = 0.94; NT HIT: AF114488.1, EVALUE 5.00e-88; EST_HUMAN HIT: AI580905.1, EVALUE 6.00e-88; SWISSPROT HIT: P34216, EVALUE 3.00e-04

SEQ ID NO: 19760 - DNA, 113 bp, Homo sapiens
  MAP TO AC004985.2; EXPRESSED IN LUNG, SIGNAL = 1.2; EXPRESSED IN ADULT LIVER, SIGNAL = 1.2; EXPRESSED IN HEART, SIGNAL = 0.8; EXPRESSED IN BONE MARROW, SIGNAL = 1.5; EXPRESSED IN FETAL LIVER, SIGNAL = 1.2; EXPRESSED IN HELA, SIGNAL = 1.6; EXPRESSED IN BRAIN, SIGNAL = 1.4; EXPRESSED IN PLACENTA, SIGNAL = 1.4; EXPRESSED IN BT474, SIGNAL = 1.7; EXPRESSED IN HBL100, SIGNAL = 1.8; NT HIT: X57147.1, EVALUE 6.00e-05; EST_HUMAN HIT: BE043584.1, EVALUE 1.00e-15
tcctctctgctgttctttccctgcctctgccagccacttacactgctgttctctcctctccttccccttcccctggggagggaccggcaggagcggagctactctttcttccc

SEQ ID NO: 19761 - DNA, 87 bp, Homo sapiens
  MAP TO AC005075.2; EXPRESSED IN PLACENTA, SIGNAL = 0.89; EXPRESSED IN FETAL LIVER, SIGNAL = 0.9; EXPRESSED IN ADULT LIVER, SIGNAL = 1.1; EXPRESSED IN BT474, SIGNAL = 0.95; EXPRESSED IN HEART, SIGNAL = 0.86; EXPRESSED IN BRAIN, SIGNAL = 1.1; EXPRESSED IN HELA, SIGNAL = 1.6; EXPRESSED IN LUNG, SIGNAL =   1; EXPRESSED IN HBL100, SIGNAL = 0.8; EXPRESSED IN BONE MARROW, SIGNAL = 1.1; NT HIT: M24282.1, EVALUE 2.40e+00
aaagtcagtaaaagctgtgcaacttccatggccattacttcattgtgataaaagcaccgaatttctagcttcttaataacaaagata

SEQ ID NO: 19762 - DNA, 228 bp, Homo sapiens
  MAP TO AC012441.1; EXPRESSED IN HEART, SIGNAL =   1; EXPRESSED IN FETAL LIVER, SIGNAL = 1.4; EXPRESSED IN BRAIN, SIGNAL = 1.8; EXPRESSED IN HBL100, SIGNAL = 1.2; EXPRESSED IN HELA, SIGNAL = 2.5; EXPRESSED IN PLACENTA, SIGNAL = 1.9; EXPRESSED IN ADULT LIVER, SIGNAL = 1.2; EXPRESSED IN BT474, SIGNAL = 1.7; EXPRESSED IN LUNG, SIGNAL = 1.3; EXPRESSED IN BONE MARROW, SIGNAL = 1.5; EST_HUMAN HIT: BE843806.1, EVALUE 2.00e-13; NT HIT: AF109718.1, EVALUE 5.00e-84; SWISSPROT HIT: P36402, EVALUE 5.00e-02
cgcagccccaacaaatgggacaaggaccacatctggtggcccatgagtggcggtcacgatcttcagcaagcggcaccaggccctggcagggcgcaccagggtcacccctaccaggataactggaccatcagccagatcctgagcgagcggtggtacaccctggggcccaatgagatgcagaagtaccacgacctggccttccaggtgaaggtggcccacttgcaacaa

SEQ ID NO: 19763 - DNA, 132 bp, Homo sapiens
  MAP TO AC007158.5; EXPRESSED IN BT474, SIGNAL = 1.1; EXPRESSED IN HBL100, SIGNAL = 1.9; EXPRESSED IN BONE MARROW, SIGNAL = 1.2; EXPRESSED IN LUNG, SIGNAL = 3.1; EXPRESSED IN BRAIN, SIGNAL = 0.96; EXPRESSED IN HEART, SIGNAL = 1.3; EXPRESSED IN ADULT LIVER, SIGNAL = 0.97; NT HIT: AF020092.1, EVALUE 7.40e-02
gctgcgggtctggaggagcagcggcagcgggatcagctgcctgctgagcttggtcaaagggctgtggctgaactggtgcagccagctggagcaggggcggcaggaatagaggcagcaggtatagcagattgt

SEQ ID NO: 19764 - DNA, 188 bp, Homo sapiens
  MAP TO AC007655.1; EXPRESSED IN ADULT LIVER, SIGNAL = 0.72; EXPRESSED IN BT474, SIGNAL = 0.83; EXPRESSED IN BONE MARROW, SIGNAL = 0.8; EXPRESSED IN LUNG, SIGNAL = 0.73; EXPRESSED IN HELA, SIGNAL = 0.67; EXPRESSED IN PLACENTA, SIGNAL = 1.1; EXPRESSED IN HBL100, SIGNAL = 0.67; EXPRESSED IN FETAL LIVER, SIGNAL = 0.66; EXPRESSED IN HEART, SIGNAL = 1.1; SWISSPROT HIT: O02743, EVALUE 3.30e-01; EST_HUMAN HIT: BE972406.1, EVALUE 2.60e+00; NT HIT: X15316.1, EVALUE 1.70e+00
ttgtgttttgtgacctgtgctttccagaaatggctatgttaagatacaaagttgtaattagaatcacacagacagaaatggtgaatcttcttgaggaaaccttgagaaacttgaatattttgcaacttagaaaattggaaaatgagaaaatggaggaaccagagggtcataagacagttctcaaactg

SEQ ID NO: 19765 - DNA, 306 bp, Homo sapiens
  MAP TO AL049737.4; EXPRESSED IN ADULT LIVER, SIGNAL = 0.86; EXPRESSED IN PLACENTA, SIGNAL = 0.93; EXPRESSED IN BT474, SIGNAL = 0.7; EXPRESSED IN BONE MARROW, SIGNAL = 0.8; EXPRESSED IN HBL100, SIGNAL = 0.67; EXPRESSED IN FETAL LIVER, SIGNAL = 0.75; EXPRESSED IN LUNG, SIGNAL = 0.79; EXPRESSED IN HELA, SIGNAL = 0.69; EXPRESSED IN HEART, SIGNAL = 0.93; NT HIT: gi6681252, EVALUE 2.90e+00; SWISSPROT HIT: Q92737, EVALUE 3.20e+00
atttagttacatccattatgaaaatggagagctctcagcaagaagctcacctggaactacagtaaacagcactgcttgctctgggccctcctttctgctcggagcgggacttgcctgtaattacctccaatgtggaaagaaaaagaactttcacatcctgactctaaaattctctcttcgccccgtgtgtcagtacataaactttaattcagacattggcagtactgtcagcagctcatatgtcatcagcggagggctcggaggctccgcgtgccagggagcaggcggcttctattgccttcctgg

SEQ ID NO: 19766 - DNA, 156 bp, Homo sapiens
  MAP TO AP000056.1; EXPRESSED IN HEART, SIGNAL = 1.1; EXPRESSED IN PLACENTA, SIGNAL = 0.68; EXPRESSED IN BONE MARROW, SIGNAL = 0.64; EXPRESSED IN HELA, SIGNAL = 0.72; EXPRESSED IN ADULT LIVER, SIGNAL = 0.78; EXPRESSED IN BRAIN, SIGNAL = 0.71; EXPRESSED IN LUNG, SIGNAL = 0.85; SWISSPROT HIT: Q9XSA7, EVALUE 5.00e-18; NT HIT: AB035520.1, EVALUE 4.00e-28; EST_HUMAN HIT: AW816405.1, EVALUE 6.00e-83
ctgaggaagctggataattacttaaatagccctctgcctgatgaaatagatgcctacagcaccgaggatgtcactgtttctggaaggaagtttctggatggggacgagctgacgctggctgactgcaacctcttacccaagctccatattattaag

SEQ ID NO: 19767 - DNA, 268 bp, Homo sapiens
  MAP TO AF011889.1; EXPRESSED IN HEART, SIGNAL = 2.5; EXPRESSED IN ADULT LIVER, SIGNAL = 3.8; EXPRESSED IN FETAL LIVER, SIGNAL = 3.9; EXPRESSED IN LUNG, SIGNAL = 3.4; EXPRESSED IN BRAIN, SIGNAL = 5.5; EXPRESSED IN HELA, SIGNAL = 5.6; EXPRESSED IN HBL100, SIGNAL = 4.2; EXPRESSED IN PLACENTA, SIGNAL = 6.5; EXPRESSED IN BT474, SIGNAL = 3.5; EXPRESSED IN BONE MARROW, SIGNAL = 3.1; SWISSPROT HIT: P03342, EVALUE 9.40e+00; NT HIT: D11078.1, EVALUE 1.00e-100; EST_HUMAN HIT: AW850765.1, EVALUE 5.00e-94
atcttccttttctatagacccatctgacctctcccctcctcgccaggccaagctaggtcccaattcttcctcagcctctgctcctccaccctataatccttttatcacctcccctcctcacacccggtccagtttacagtttcattccgtgactagccctcccccacctgcccagcaatttactcttaaaaaggtggctggagctaaaggcacagtcaaggttaatgttccttttctttatcagacctctcccaaatcagtgagcgtt

SEQ ID NO: 19768 - DNA, 401 bp, Homo sapiens; identical to SEQ ID NO: 2986
  MAP TO AP000200.1; EXPRESSED IN HELA, SIGNAL =   1; EXPRESSED IN BT474, SIGNAL = 0.76; EXPRESSED IN ADULT LIVER, SIGNAL = 0.88; EXPRESSED IN HEART, SIGNAL = 0.95; EXPRESSED IN PLACENTA, SIGNAL = 0.85; EXPRESSED IN FETAL LIVER, SIGNAL = 0.85; EXPRESSED IN LUNG, SIGNAL = 0.97; EXPRESSED IN BRAIN, SIGNAL = 0.91; EXPRESSED IN BONE MARROW, SIGNAL =   1; EXPRESSED IN HBL100, SIGNAL = 0.93; SWISSPROT HIT: Q09789, EVALUE 5.00e+00; NT HIT: AF111103.1, EVALUE 9.90e-01

SEQ ID NO: 19769 - DNA, 127 bp, Homo sapiens
  MAP TO AP000126.1; EXPRESSED IN BT474, SIGNAL = 0.65; EXPRESSED IN ADULT LIVER, SIGNAL = 0.81; EXPRESSED IN BRAIN, SIGNAL = 1.5; EXPRESSED IN HEART, SIGNAL = 0.91; EXPRESSED IN BONE MARROW, SIGNAL = 0.78; EXPRESSED IN HELA, SIGNAL = 1.2; EXPRESSED IN PLACENTA, SIGNAL = 0.72; EXPRESSED IN LUNG, SIGNAL = 0.93; EXPRESSED IN FETAL LIVER, SIGNAL = 0.76; EXPRESSED IN HBL100, SIGNAL = 4.2; NT HIT: D86423.1, EVALUE 1.00e-24; EST_HUMAN HIT: H10701.1, EVALUE 7.20e-02; SWISSPROT HIT: P02448, EVALUE 6.00e-12
aggtgctgccatagccacagccaacgctatatcccagcgggtagccatagctgccccagtagcatcctgggaagacagccccggggaagttgtcgcagagcatggtgtcgggagtggagggcttagg

SEQ ID NO: 19770 - DNA, 143 bp, Homo sapiens
  MAP TO AL078476.2; EXPRESSED IN HEART, SIGNAL = 1.2; EXPRESSED IN HBL100, SIGNAL = 0.8; EXPRESSED IN FETAL LIVER, SIGNAL = 0.65; EXPRESSED IN BRAIN, SIGNAL = 0.97; EXPRESSED IN PLACENTA, SIGNAL = 0.96; EXPRESSED IN BT474, SIGNAL = 0.81; EXPRESSED IN BONE MARROW, SIGNAL = 1.1; EXPRESSED IN HELA, SIGNAL = 0.91; EXPRESSED IN ADULT LIVER, SIGNAL = 0.86; EXPRESSED IN LUNG, SIGNAL = 0.96; SWISSPROT HIT: P48899, EVALUE 7.70e-01; EST_HUMAN HIT: H85711.1, EVALUE 1.20e-01; NT HIT: AL163201.2, EVALUE 3.00e-75
gatacgttccacccaaattgagggaagaaataaagagaaattcatgaaattgcagaaaacacatgtaacacaggagagaacagaagatgatctccaggatgatgaagaggaaatccccaagttaatcatatgtaatggtttgt

SEQ ID NO: 19771 - DNA, 95 bp, Homo sapiens
  MAP TO AJ229043.1; EXPRESSED IN HBL100, SIGNAL = 1.7; EXPRESSED IN HELA, SIGNAL = 2.1; EXPRESSED IN BT474, SIGNAL = 1.6; EXPRESSED IN FETAL LIVER, SIGNAL =   2; EXPRESSED IN LUNG, SIGNAL = 1.8; EXPRESSED IN BONE MARROW, SIGNAL = 2.1; EXPRESSED IN PLACENTA, SIGNAL =   2; EXPRESSED IN HEART, SIGNAL = 1.7; EXPRESSED IN ADULT LIVER, SIGNAL = 2.4; EXPRESSED IN BRAIN, SIGNAL =   2; NT HIT: AJ229043.1, EVALUE 8.00e-47
ctttaataaactcaactttgcaataaccttcacctctcgtaataacttctcagagttgctgttattctggtagccatttcttcctgtctgcagag

SEQ ID NO: 19772 - DNA, 252 bp, Homo sapiens
  MAP TO AL035610.2; EXPRESSED IN PLACENTA, SIGNAL = 0.61; EXPRESSED IN BT474, SIGNAL = 0.67; EXPRESSED IN BONE MARROW, SIGNAL = 0.74; EXPRESSED IN LUNG, SIGNAL = 0.7; EXPRESSED IN HELA, SIGNAL = 0.66; EXPRESSED IN ADULT LIVER, SIGNAL = 0.81; EXPRESSED IN FETAL LIVER, SIGNAL = 0.73; EXPRESSED IN HEART, SIGNAL = 0.89; EST_HUMAN HIT: AI392768.1, EVALUE 2.30e-01; NT HIT: AL163246.2, EVALUE 0.00e+00; SWISSPROT HIT: Q09435, EVALUE 2.90e+00
acatcctcatcattgtctgcagtaaagggatgtggagcaccatgggatggcccagaagaatttagatcctacctgaaagcagtgtgtgccactttaacccactacataagtctggctagaacccagacttgtggccacacaagaaattcagttgagaaattcagtttagacatggaaccaagtagagaagagaaaataggcattgatgtataccggcagtctctgcttccataactcttctttaaaaatatg

SEQ ID NO: 19773 - DNA, 178 bp, Homo sapiens
  MAP TO AL049563.4; EXPRESSED IN FETAL LIVER, SIGNAL = 0.59; EXPRESSED IN ADULT LIVER, SIGNAL = 0.93; EXPRESSED IN HEART, SIGNAL = 0.98; EXPRESSED IN BONE MARROW, SIGNAL = 0.71; EXPRESSED IN LUNG, SIGNAL = 0.76; EXPRESSED IN HELA, SIGNAL = 0.65; EXPRESSED IN PLACENTA, SIGNAL = 0.71; EST_HUMAN HIT: BE169013.1, EVALUE 7.00e-77; SWISSPROT HIT: Q9UL62, EVALUE 5.00e-28; NT HIT: gi11420764, EVALUE 5.00e-96
ggcaataagctgataggagttgttcatcatagcaatcagcatgttcagcagcactaccagggagatgacattgtatgttccaaacatggtagctcctacaaactcggtgaattcgtgtctggctttcacattggtgacatatagatttaaaaggccaaatacagaccagaagagtgac

SEQ ID NO: 19774 - DNA, 290 bp, Homo sapiens
  MAP TO AF024533.1; EXPRESSED IN FETAL LIVER, SIGNAL = 1.4; EXPRESSED IN LUNG, SIGNAL =   1; EXPRESSED IN BONE MARROW, SIGNAL = 1.3; EXPRESSED IN HELA, SIGNAL = 1.2; EXPRESSED IN HEART, SIGNAL =   1; EXPRESSED IN PLACENTA, SIGNAL = 1.3; EXPRESSED IN BT474, SIGNAL = 1.1; EXPRESSED IN ADULT LIVER, SIGNAL = 1.3; EXPRESSED IN BRAIN, SIGNAL = 1.2; EXPRESSED IN HBL100, SIGNAL = 1.2; NT HIT: M74099.1, EVALUE 0.00e+00; EST_HUMAN HIT: AL041536.1, EVALUE 1.00e-85; SWISSPROT HIT: P39880, EVALUE 2.00e-41
ctctttgtctgccttggatgctacggagggccaggatgttctgctcatcggagaggaactgtttcatcttgtgaaatggctccttgccacgaacagtcagtttattccatggcttgggccgggccagaatctcgctcacggacccttgagacagtcccaacacataatgtccgaaaatacgttgtccgatattgtgcttaatcagctgctctttgacctgccgggcgatttctgcagtgtccatctcctcgccctcggagacgctcccagcactttctgactggctgggg

SEQ ID NO: 19775 - DNA, 679 bp, Homo sapiens
  MAP TO AL021395.14; EXPRESSED IN BT474, SIGNAL = 6.6; EXPRESSED IN ADULT LIVER, SIGNAL = 7.9; EXPRESSED IN FETAL LIVER, SIGNAL = 7.3; EXPRESSED IN BRAIN, SIGNAL = 6.3; EXPRESSED IN LUNG, SIGNAL = 6.6; EXPRESSED IN BONE MARROW, SIGNAL = 7.4; EXPRESSED IN PLACENTA, SIGNAL =   8; EXPRESSED IN HEART, SIGNAL = 5.4; EXPRESSED IN HELA, SIGNAL = 8.4; EXPRESSED IN HBL100, SIGNAL = 6.9; EST_HUMAN HIT: AL120961.1, EVALUE 2.50e+00; NT HIT: gi6912525, EVALUE 9.30e-02; SWISSPROT HIT: P93329, EVALUE 5.30e-01
gtgtcttgggtttctgaggttgaggtcctgatgatgccctgactcctgacttctgctgccttctagacccttccaattctgccccagcatcccccccacccatttctaatacaggccctcacttgcagatactcctgtctgttttctgtcacctgaaatagcttgagcctctcagtggctgttagtaccacctggttgggaatgggtatgctaatatttgagactgggggtgcttagataaggtgtcaagtcctgatatcctaagttgatgtagggttgatgccaggctggggttgggtcaatgagcctttggccaaaggttgggccataaactaggccataatcgaggccctgatcctggccacagatagatgtgtaatcctggatgtagactgtgttggccttggttctggtaataacagctctgaccctcatcccagactgggccttgaccctggcccagactgagccctaatcctggtctcagatcgatctctgatcctggtcccactctgcattctgatcctagttccagaatgaaccctgaccttggccccacactgagccttgaccatggatgagccctacccagctcacagattagacttgcagctgtgggtggtggtgagaatgtggatgactcagggcaacctgtccccacagaggacaggcaggaatg

SEQ ID NO: 19776 - DNA, 122 bp, Homo sapiens
  MAP TO AC012665.1; EXPRESSED IN HBL100, SIGNAL = 2.2; EXPRESSED IN ADULT LIVER, SIGNAL =   2; EXPRESSED IN FETAL LIVER, SIGNAL =   2; EXPRESSED IN LUNG, SIGNAL = 1.7; EXPRESSED IN HEART, SIGNAL = 1.7; EXPRESSED IN HELA, SIGNAL = 2.1; EXPRESSED IN PLACENTA, SIGNAL =   2; EXPRESSED IN BT474, SIGNAL =   2; EXPRESSED IN BRAIN, SIGNAL = 2.1; EXPRESSED IN BONE MARROW, SIGNAL = 1.8; EST_HUMAN HIT: AW138152.1, EVALUE 7.00e-02; SWISSPROT HIT: P40418, EVALUE 2.30e+00
agcagagtgagcagcaagatcctgggctcaggggcatcctggaagtgcgggaaggattcaaagaaggagtggacggcagagctgaccaggagctcacacagcttccagtcaaactggttcat

SEQ ID NO: 19777 - DNA, 187 bp, Homo sapiens; identical to SEQ ID NO: 17138
  MAP TO AP000231.1; EXPRESSED IN HELA, SIGNAL = 0.8; EXPRESSED IN ADULT LIVER, SIGNAL = 0.78; EXPRESSED IN HEART, SIGNAL = 0.87; EXPRESSED IN PLACENTA, SIGNAL = 0.73; EXPRESSED IN BT474, SIGNAL = 0.61; EXPRESSED IN FETAL LIVER, SIGNAL = 0.64; EXPRESSED IN LUNG, SIGNAL = 0.92; EXPRESSED IN BRAIN, SIGNAL = 0.88; EXPRESSED IN BONE MARROW, SIGNAL = 0.66; EST_HUMAN HIT: AW955415.1, EVALUE 7.00e-04; NT HIT: AF029308.1, EVALUE 4.00e-04; SWISSPROT HIT: P21647, EVALUE 4.90e+00

SEQ ID NO: 19778 - DNA, 617 bp, Homo sapiens
  MAP TO AL050305.9; EXPRESSED IN HEART, SIGNAL = 0.93; EXPRESSED IN FETAL LIVER, SIGNAL = 0.99; EXPRESSED IN LUNG, SIGNAL = 0.99; EXPRESSED IN PLACENTA, SIGNAL = 0.92; EXPRESSED IN BT474, SIGNAL = 1.9; EXPRESSED IN BONE MARROW, SIGNAL = 1.6; EXPRESSED IN HBL100, SIGNAL = 1.3; EXPRESSED IN HELA, SIGNAL = 0.96; EXPRESSED IN ADULT LIVER, SIGNAL = 0.9; EXPRESSED IN BRAIN, SIGNAL = 1.2; EST_HUMAN HIT: AA769374.1, EVALUE 3.00e-24; NT HIT: AJ243213.1, EVALUE 2.00e-45; SWISSPROT HIT: Q09472, EVALUE 2.70e-01
gtcctccaggccttggcctccagcaaccccctgccagagctattaagccaggagcagctctgcaacttcctggacacagcccccaggggcaactgaaagcctctctgccactgcctctacagtggaactgcccttgctactctcagactaatgaaggagcaaagaccctaagtgccttaaacaaatctccagcaagatgcaggcaacagagaggaggtcagtctgtctcccataggtcccagatactccccactgctcataatgagacagaaaagcctcagcttgggcccacagcacagacacttcatcctgggctgattgtacagattgctgacctacatctctctggggtggagcctccagcagataagcaaaagacccttcggcacaagttcccttcttctctgcctccaggttggggtaggaacgtgaacactgagatcatcccagagttgcaatgggcagcacaggggtgccacgctaagatctacagccagcactcaaaggggagaggaacccacactctcagagcattgagagggaacacagctgtaactgtgaggaaacacagggaagccacccaactgagcaagagtctaccaactgagcaatatgtc

SEQ ID NO: 19779 - DNA, 186 bp, Homo sapiens
  MAP TO AL049836.2; EXPRESSED IN PLACENTA, SIGNAL = 0.81; EXPRESSED IN HBL100, SIGNAL = 0.83; EXPRESSED IN FETAL LIVER, SIGNAL = 0.78; EXPRESSED IN BRAIN, SIGNAL = 0.82; EXPRESSED IN BT474, SIGNAL = 0.89; EXPRESSED IN BONE MARROW, SIGNAL = 0.95; EXPRESSED IN HELA, SIGNAL = 0.81; EXPRESSED IN ADULT LIVER, SIGNAL = 0.67; EXPRESSED IN LUNG, SIGNAL = 0.83; EXPRESSED IN HEART, SIGNAL = 0.8; EST_HUMAN HIT: F03265.1, EVALUE 1.10e-01; SWISSPROT HIT: P50340, EVALUE 6.40e+00; NT HIT: AP000058.1, EVALUE 1.70e+00
tcttcagttggccttggacagagcccaagatctcatgaggaaggagcagagaggccttttggtgttgctgcaaacatcatggggcccagaaaaagacgtcactgagatcctgggacggcagcactggaagggcctaggacatcacaaccccaccctgctccatcttgacctcagtttccccatcac

SEQ ID NO: 19780 - DNA, 125 bp, Homo sapiens
  MAP TO AP000086.1; EXPRESSED IN PLACENTA, SIGNAL = 0.97; EXPRESSED IN BT474, SIGNAL = 0.87; EXPRESSED IN BONE MARROW, SIGNAL = 0.8; EXPRESSED IN FETAL LIVER, SIGNAL = 0.79; EXPRESSED IN LUNG, SIGNAL = 0.83; EXPRESSED IN HELA, SIGNAL = 1.2; EXPRESSED IN ADULT LIVER, SIGNAL = 0.64; EXPRESSED IN BRAIN, SIGNAL = 1.2; EXPRESSED IN HEART, SIGNAL = 0.85; EXPRESSED IN HBL100, SIGNAL = 0.85; NT HIT: X89211.1, EVALUE 2.00e-05; EST_HUMAN HIT: T84704.1, EVALUE 3.00e-07; SWISSPROT HIT: P24563, EVALUE 2.30e+00
cccactcagaaccagcagctttctggggtggtgggggtgggtcctgaggagaatcagcatcgtcttacctggcaacagcctcggtggggatggtgggggggcattctagtttgctctggaagtgt

SEQ ID NO: 19781 - DNA, 279 bp, Homo sapiens
  MAP TO AC008074.1; EXPRESSED IN BT474, SIGNAL = 0.88; EXPRESSED IN LUNG, SIGNAL = 0.6; EXPRESSED IN PLACENTA, SIGNAL = 0.91; EXPRESSED IN FETAL LIVER, SIGNAL = 0.62; EXPRESSED IN HEART, SIGNAL = 0.89; EXPRESSED IN BONE MARROW, SIGNAL = 0.76; EXPRESSED IN ADULT LIVER, SIGNAL = 4.8; NT HIT: M81441.1, EVALUE 1.50e-01; SWISSPROT HIT: P35830, EVALUE 3.10e+00; EST_HUMAN HIT: AA665238.1, EVALUE 1.70e-01
gtttttgtggagagactgagaaaatcacttcctggagaaatgaaggctgaaagccctggcaaaaaaggagatggttctctagagacaggcaggaaaaaagtttcaggaggagacatgtcaggtgctgatgcgagaagcaaaggtaccaatgttgatggcaccttcttccagatcgtaaagggcttctccttgggttcaagctttctgcaaatggcagcagctgggcaggctgctaagcatagaggagagttgccctcacctgatcctgagaaccaagac

SEQ ID NO: 19782 - DNA, 119 bp, Homo sapiens
  MAP TO AF064861.1; EXPRESSED IN BONE MARROW, SIGNAL =   2; EXPRESSED IN HEART, SIGNAL = 1.9; EXPRESSED IN ADULT LIVER, SIGNAL = 2.7; EXPRESSED IN BRAIN, SIGNAL = 2.6; EXPRESSED IN LUNG, SIGNAL =   2; EXPRESSED IN HELA, SIGNAL = 2.2; EXPRESSED IN HBL100, SIGNAL = 2.2; EXPRESSED IN PLACENTA, SIGNAL = 2.2; EXPRESSED IN BT474, SIGNAL = 2.3; EXPRESSED IN FETAL LIVER, SIGNAL = 1.9; NT HIT: AL163279.2, EVALUE 5.00e-61; EST_HUMAN HIT: BE219326.1, EVALUE 8.00e-61; SWISSPROT HIT: P29146, EVALUE 1.40e+00
cttttgctgtacgtagcaaagactgccttcctgcaccaagtaaagaagtgactcttgaaatactgggtggaatttctttatccaacataggaccgatgcgctggcagatttgcaaaaga

SEQ ID NO: 19783 - DNA, 309 bp, Homo sapiens
  MAP TO AL049767.9; EXPRESSED IN BONE MARROW, SIGNAL = 0.88; EXPRESSED IN ADULT LIVER, SIGNAL = 0.74; EXPRESSED IN BRAIN, SIGNAL = 0.71; EXPRESSED IN PLACENTA, SIGNAL = 0.68; EXPRESSED IN BT474, SIGNAL = 0.65; EXPRESSED IN LUNG, SIGNAL = 0.66; EXPRESSED IN HELA, SIGNAL = 0.65; EXPRESSED IN FETAL LIVER, SIGNAL = 0.72; EXPRESSED IN HEART, SIGNAL = 0.82; NT HIT: M81650.1, EVALUE 0.00e+00; EST_HUMAN HIT: BF679783.1, EVALUE 0.00e+00; SWISSPROT HIT: P04279, EVALUE 5.00e-56
aatgttcctctctcacttcaaccacattttggtaatgccctttattttgatgagaatttttagtctcacgttgttgtttgttagctactagctcttcagtttggagaacataactgctttgggatccgccttgttttctacctttttgtgcaccagagacggaagtttgttctttacttagtccatgaacccacagcctttcttctgtgtttgaatattgactggatattccctttccagatgggctattcccctgatcttgagaaggattttgtgtcccacgatgagctttgcctcctttatggtgta

SEQ ID NO: 19784 - DNA, 255 bp, Homo sapiens
  MAP TO AC009237.1; EXPRESSED IN BONE MARROW, SIGNAL = 0.89; EXPRESSED IN HBL100, SIGNAL = 0.69; EXPRESSED IN ADULT LIVER, SIGNAL = 0.86; EXPRESSED IN BRAIN, SIGNAL = 0.7; EXPRESSED IN PLACENTA, SIGNAL = 0.99; EXPRESSED IN BT474, SIGNAL = 0.87; EXPRESSED IN FETAL LIVER, SIGNAL = 0.77; EXPRESSED IN LUNG, SIGNAL = 0.8; EXPRESSED IN HELA, SIGNAL = 0.72; EXPRESSED IN HEART, SIGNAL = 0.78; SWISSPROT HIT: P19474, EVALUE 4.00e-04; EST_HUMAN HIT: BE535440.1, EVALUE 1.00e-09; NT HIT: gi11437238, EVALUE 3.90e-02
ggcgatgtggttttacgggcacagatgatcaggaatgagtataggaagctgcatccggttctccataaggaagaaaaacaacatttagagagactgaacaaggaataccaagagatttttcagcaactccagagaagttgggtcaaaatggatcaaaagagtaaacacttgaaagaaatgtatcaggaactaatggaaatgtgtcataaaccagaggtggagctgctccaggtaagaatggaggatgccccttga

SEQ ID NO: 19785 - DNA, 92 bp, Homo sapiens
  MAP TO AC007370.7; EXPRESSED IN HEART, SIGNAL = 0.96; EXPRESSED IN BT474, SIGNAL = 0.63; EXPRESSED IN BRAIN, SIGNAL = 0.96; EXPRESSED IN PLACENTA, SIGNAL = 0.84; EXPRESSED IN BONE MARROW, SIGNAL = 0.76; EXPRESSED IN FETAL LIVER, SIGNAL = 1.5; EXPRESSED IN LUNG, SIGNAL = 0.8; EXPRESSED IN HELA, SIGNAL = 0.96; EXPRESSED IN ADULT LIVER, SIGNAL =   1; EST_HUMAN HIT: BF530893.1, EVALUE 4.40e+00
tagttcacctgtactgcaataatggtgatgaaaatgatgatgatgatgatgatgatgacgacgatgatgatgacagtaagggcaatgaatac

SEQ ID NO: 19786 - DNA, 209 bp, Homo sapiens
  MAP TO AC008039.1; EXPRESSED IN PLACENTA, SIGNAL =   1; EXPRESSED IN FETAL LIVER, SIGNAL =   1; EXPRESSED IN HEART, SIGNAL = 0.95; EXPRESSED IN HBL100, SIGNAL = 0.96; EXPRESSED IN BT474, SIGNAL = 0.97; EXPRESSED IN BONE MARROW, SIGNAL = 0.91; EXPRESSED IN LUNG, SIGNAL = 0.89; EXPRESSED IN HELA, SIGNAL = 0.86; EXPRESSED IN ADULT LIVER, SIGNAL = 0.92; EXPRESSED IN BRAIN, SIGNAL = 0.84; NT HIT: AF084936.1, EVALUE 4.20e-01; SWISSPROT HIT: O95382, EVALUE 1.70e+00; EST_HUMAN HIT: AA078165.1, EVALUE 8.00e-40
ctgaccacctcccagtgcaggtccaagaagaagaggttgcagccagtggctcccaggtagtcagagaagtaatgatgagttttggggctgggctcatgctgagcaaccaacagagaatagatgcaacgagccccaaaggtaatgagcccagaatgctgctaactggagtgctccgcctgggatcactggagaaaggagctccggcagtt

SEQ ID NO: 19787 - DNA, 168 bp, Homo sapiens
  MAP TO AF067844.1; EXPRESSED IN BONE MARROW, SIGNAL = 1.9; EXPRESSED IN ADULT LIVER, SIGNAL = 1.7; EXPRESSED IN FETAL LIVER, SIGNAL = 2.7; EXPRESSED IN BRAIN, SIGNAL = 1.2; EXPRESSED IN LUNG, SIGNAL = 2.1; EXPRESSED IN HEART, SIGNAL = 1.8; EXPRESSED IN HELA, SIGNAL = 2.3; EXPRESSED IN HBL100, SIGNAL =   3; EXPRESSED IN PLACENTA, SIGNAL =   2; EXPRESSED IN BT474, SIGNAL =   2; NT HIT: gi5031634, EVALUE 9.00e-36; SWISSPROT HIT: P45592, EVALUE 3.00e-03; EST_HUMAN HIT: BF033033.1, EVALUE 6.00e-38
atgggctcccatgtggctgtctttgatgatgtcatcaaggtgttcagtgacatgaaagtgtgcaagtcttcaacactagaaaaggtgaagaagcgcaagaagttgctgctcttctgcctgagtgagtacaagaagtacatcatccttgcggaggccaagaagatcctg

SEQ ID NO: 19788 - DNA, 1753 bp, Homo sapiens
  MAP TO AL022162.1; EXPRESSED IN HBL100, SIGNAL = 4.1; EXPRESSED IN FETAL LIVER, SIGNAL =   4; EXPRESSED IN BT474, SIGNAL = 3.9; EXPRESSED IN LUNG, SIGNAL = 4.2; EXPRESSED IN PLACENTA, SIGNAL = 3.5; EXPRESSED IN HEART, SIGNAL = 4.8; EXPRESSED IN HELA, SIGNAL = 4.7; EXPRESSED IN ADULT LIVER, SIGNAL = 4.2; EXPRESSED IN BRAIN, SIGNAL = 4.6; EXPRESSED IN BONE MARROW, SIGNAL = 4.4; EST_HUMAN HIT: R98936.1, EVALUE 4.30e-01; NT HIT: AF195953.1, EVALUE 0.00e+00; SWISSPROT HIT: P13983, EVALUE 1.80e-01
aaggatgcaaatggggcctggcctggccttggagacccagatgctgccctctgccctcacagacttcacccctggtgcctctgggtggcaacttctctccctctctcagtgaacatgcatacggactataatatgctacacagcgtggagcaaatatgcatacccattcggtgttcacacaagcacatgcatggagcccacgtatgcccatgacctgtagaggcatcctctcaagtcagtggggcacacccacaaaattgttcagactcagaatcttggagcagaagcaattttagagctgcccccattaaaaaagtcgtctttgatgaacgccagtcagccactcctctacacacactttggcgtttgctcgttctcacacctcctgcagaacaggaaagaggagatgacctcgggaactttcttaaaatggcctgtgcctagacttgacgcaagcctgaagaagtccctgcagttccaggactcagccagcagggggcagcctctcatgacacactgggtttcccccaaagaataagcaggcttggagaagaaagagaggccgactgcaaagaaagggaaacatataagaagtttccagagtgtccggccatcaagctgacccagatgcatgtagccagccactcctgtgggtgaggaattctcagcccctcatattcagctggtgaattgatagagtctggggcaagttatcagaagaggatgtcttagtgaccatagtacatcctgcttgcccagcctagagccacagagggaatcagccagcacacaggagttcagtggaatctctcattctgcaagtcacagcctctctcagggcctgcttcgttgtctgtgaaatgggtttaacaataaatcacatctgcttcctcccaccttggtgctttggacacaagccctgtgctccctctgctgagacctcctttctccagcttaacccctactcactcctgaggtgtcagctcccacttcacctccaggaagctttctctgaccccagatcgtgcactcagtgataaacttcctagaggcctgtttttcgcctccagggcccttgccacagttcctggttagacattcggttgtgatttttgaataacatctgtttccctctccaggtattaaggaatgtggtacaaagtaggccctcaataaacattcagcgaatgctgagaaatgaattcccatagctcttttacagatcaaaaagcactttcacatgcaaacagggtggtcttcatggtacccgctgagaacgatggggttttttccccgttacacacacagcactctctactgtaccaaacattttaacttcagaaacttcagtcactagaagcccgagagggagccagggattcttacttccattttagaaaaggtaaagctgaggcctagaaaggtgaagtgactgacccaggcttggaacttggaggagtcaggatgtttaagtctccgcatcccatgctggaaggtatgatcattacattccctcattatcactgtcagcatcgtcacctccattgtggctatggccatgcctagtctggtgaggaggtgtacagttggcgagcacaaaggcttttgaaggtggcgggcagaagtctgggttccaattctggcctcacctgcaggtgaccatcggggctaggagagcatccagggaggattcatgggggaggggagccttggctggcagttggaggacccggagaattggaggaaggtggag

SEQ ID NO: 19789 - DNA, 147 bp, Homo sapiens
  MAP TO AF068862.1; EXPRESSED IN BT474, SIGNAL = 2.2; EXPRESSED IN FETAL LIVER, SIGNAL = 2.8; EXPRESSED IN LUNG, SIGNAL = 2.5; EXPRESSED IN BONE MARROW, SIGNAL =   2; EXPRESSED IN PLACENTA, SIGNAL = 2.3; EXPRESSED IN HEART, SIGNAL = 2.8; EXPRESSED IN ADULT LIVER, SIGNAL = 3.2; EXPRESSED IN BRAIN, SIGNAL = 1.7; EXPRESSED IN HELA, SIGNAL =   3; EXPRESSED IN HBL100, SIGNAL = 2.3; EST_HUMAN HIT: AI750053.1, EVALUE 1.00e-77; SWISSPROT HIT: Q16698, EVALUE 1.00e-23; NT HIT: gi11427253, EVALUE 1.00e-77
ggtgcctttagccgtctggacccaactggaacatttgagaaagaaatgattggcagaattccctgtggtcgcctggggactgtagaagaactcgcaaatcttgctgctttcctttgtagtgattatgcttcttggattaatggagca

SEQ ID NO: 19790 - DNA, 121 bp, Homo sapiens
  MAP TO AC008277.1; EXPRESSED IN BONE MARROW, SIGNAL =   1; EXPRESSED IN HBL100, SIGNAL = 0.71; EXPRESSED IN ADULT LIVER, SIGNAL = 0.74; EXPRESSED IN BRAIN, SIGNAL = 1.1; EXPRESSED IN PLACENTA, SIGNAL = 1.1; EXPRESSED IN BT474, SIGNAL = 1.1; EXPRESSED IN LUNG, SIGNAL = 1.1; EXPRESSED IN HELA, SIGNAL = 0.74; EXPRESSED IN FETAL LIVER, SIGNAL = 0.93; EXPRESSED IN HEART, SIGNAL = 0.95; NT HIT: gi11430990, EVALUE 4.00e-62; EST_HUMAN HIT: AW886112.1, EVALUE 4.00e-62; SWISSPROT HIT: P28337, EVALUE 9.00e+00
caaaaatccccccacattggggaagaatccagtaccggcgtctgtaacgatcttggccaaacatcactgaacgcaatgagtgagacgcatcaaagagcttccttctgtactgactctgttg

SEQ ID NO: 19791 - DNA, 1034 bp, Homo sapiens
  MAP TO AF134726.1; EXPRESSED IN HBL100, SIGNAL = 6.1; EXPRESSED IN FETAL LIVER, SIGNAL =  20; EXPRESSED IN LUNG, SIGNAL =  87; EXPRESSED IN BONE MARROW, SIGNAL =  15; EXPRESSED IN PLACENTA, SIGNAL = 4.9; EXPRESSED IN HEART, SIGNAL = 7.9; EXPRESSED IN HELA, SIGNAL =  11; EXPRESSED IN BT474, SIGNAL =   7; EXPRESSED IN ADULT LIVER, SIGNAL = 3.8; EXPRESSED IN BRAIN, SIGNAL = 3.7; NT HIT: gi11417759, EVALUE 0.00e+00; EST_HUMAN HIT: AW949581.1, EVALUE 0.00e+00; SWISSPROT HIT: P08107, EVALUE 0.00e+00
ctaatctacctcctcaatggtggggcctgacccagaccctcccttgggaccctgagccccgaagcccccaggcccgggaccaccggcaccctggtacagtccgctgatgatggggttacacacctgctccagctccttcctcttgtgctcaaactcgtccttctcggccaaggtgttggcgtccagccacgagatgacctcttgacacttgtccagcaccttcttcttgtcggcctcgctgatcttgcccttgagcccctcatcctccacggcgctcttcatgttgaaggcgtaggactccagggcgttcttggctgacaccctctcgcgctgcacctcgtcctccgctttgtacttctccgcctcctgcaccatgcgctcgatctcctccttgctcaggcggcccttgtcgttggtgatggtgatcttgttggccttgccggtgctcttgtccgtggccgtgacgttcaggatgccgttggcatcgatgtcgaaggtcacctcgatctggggcacgcccctgggggccggagggatgccgctcagctcgaagcgccccaacagattgttgtctttcgtcatggccctctcgccctcgtacacctggatcagcaccccgggttggttgtcggagtaggtggtgaagatctgcgtctgcttggtggggatggtggagttgcgcttgatcagggcagtcatcacgcctccggccgtctccagccccagcgacaggggagccacgtccagcagcagcaggtcctgcacgttctcggacttgtcccccatcaggatggccgcctgcaccgccgccccgtaggccacagcctcgtcggggttgatgctcttgttcaggtcgcgcccgttgaagaagtcctgcagcagcttctgcaccttggggatgcgggtggagcccccgaccaggaccaggtcgtgaatctgggccttgtccagcttggcgtcgcgcagagccttctccacgggctccagggtgcttcggaacaggtcggagcacagctcctcgaacctcgccctgg

SEQ ID NO: 19792 - DNA, 193 bp, Homo sapiens
  MAP TO AF070717.1; EXPRESSED IN BRAIN, SIGNAL = 1.4; EXPRESSED IN HBL100, SIGNAL = 2.4; EXPRESSED IN ADULT LIVER, SIGNAL = 2.1; EXPRESSED IN FETAL LIVER, SIGNAL = 2.2; EXPRESSED IN BONE MARROW, SIGNAL = 2.1; EXPRESSED IN LUNG, SIGNAL = 1.9; EXPRESSED IN PLACENTA, SIGNAL = 1.9; EXPRESSED IN HEART, SIGNAL =   2; EXPRESSED IN HELA, SIGNAL = 2.3; EXPRESSED IN BT474, SIGNAL = 1.9; EST_HUMAN HIT: AV732048.1, EVALUE 6.70e-01; SWISSPROT HIT: P32870, EVALUE 5.60e-01
cttgcttgaatctcttcactgtcttattcttcaggtgtttctgagagtgggctgtcgttcgccaccctgtgatgaagctccccaatggtgactgcttgaggggagagtggaattccctgtcagatcctgcagcagggtctgtacccttgttggagttggaggatctagttttaaatctgtatttttcacccat

SEQ ID NO: 19793 - DNA, 653 bp, Homo sapiens
  MAP TO AL022237.1; EXPRESSED IN HELA, SIGNAL = 7.2; EXPRESSED IN HEART, SIGNAL = 5.1; EXPRESSED IN PLACENTA, SIGNAL = 7.3; EXPRESSED IN HBL100, SIGNAL = 6.5; EXPRESSED IN FETAL LIVER, SIGNAL = 7.1; EXPRESSED IN ADULT LIVER, SIGNAL = 7.9; EXPRESSED IN BT474, SIGNAL = 6.3; EXPRESSED IN BRAIN, SIGNAL = 5.9; EXPRESSED IN BONE MARROW, SIGNAL = 6.1; EXPRESSED IN LUNG, SIGNAL = 6.9; NT HIT: AL359403.1, EVALUE 0.00e+00; SWISSPROT HIT: P71019, EVALUE 1.00e-11; EST_HUMAN HIT: AI871497.1, EVALUE 0.00e+00
gcttccccacacaccagccctgtggcatcattcttcccaacgtccaaacgtttttccaagggggagaaatggactgggtcatgtaaagaaatactcatttttagggctttttatgtggccttcaaagcacgttgcaaacaaatccctttcactcctcagaggaggagccattaggaaggtagggggcgacaggcacagcctacagcctctcctcaggaggacagagggggtcatcgcatttgagccccctgcagtcatctcgggggctcctgagggtccaggtccacatgttcgagggtctgcagcacatccacggcgctgtaggacttccaggcctgcatgttacagctcttcaggatggctcccagctgcctgccagggcctacttcgaaagtttgggggaaccccctgccctttttcctttcgtatatggcatgcatcgtctgctcccacttcactggggagaccagctgctgggccagcagcttgtggatgtgcccgggatgcctgtatctatgcgcgtggacgttggagtagacagaaaccagaggcttcttaatgtcgactgcctttaaagcttgcgtcaggggctccacggctggctccatgaggcgggtgtggaatgcgccactaaccggcaacatcctggtgcg

SEQ ID NO: 19794 - DNA, 202 bp, Homo sapiens
  MAP TO Z98051.6; EXPRESSED IN PLACENTA, SIGNAL = 1.1; EXPRESSED IN HBL100, SIGNAL =   1; EXPRESSED IN FETAL LIVER, SIGNAL = 0.97; EXPRESSED IN LUNG, SIGNAL = 1.3; EXPRESSED IN HELA, SIGNAL =   1; EXPRESSED IN BRAIN, SIGNAL = 0.9; EXPRESSED IN BT474, SIGNAL = 1.2; EXPRESSED IN BONE MARROW, SIGNAL = 1.3; EXPRESSED IN ADULT LIVER, SIGNAL = 0.73; EXPRESSED IN HEART, SIGNAL = 0.8; NT HIT: AF108134.1, EVALUE 1.00e-01; EST_HUMAN HIT: AW613524.1, EVALUE 2.80e+00; SWISSPROT HIT: P79944, EVALUE 3.70e-02
gctgacctggcaaccaaagtggaaaagatgagacagagcatccttgaaggagtcaacatgaatcatccaccgccttctgctctacttccgtcacctacttttgtgcctcccatggtgccctctctctaccctgtttcactttattcccgagctatgggctccatgccacttccccctcaagggaggagccggggatttgcag

SEQ ID NO: 19795 - DNA, 168 bp, Homo sapiens
  MAP TO AF139813.1; EXPRESSED IN ADULT LIVER, SIGNAL = 5.5; EXPRESSED IN FETAL LIVER, SIGNAL = 4.7; EXPRESSED IN BRAIN, SIGNAL =   3; EXPRESSED IN LUNG, SIGNAL = 5.3; EXPRESSED IN BONE MARROW, SIGNAL = 4.1; EXPRESSED IN PLACENTA, SIGNAL = 4.3; EXPRESSED IN HEART, SIGNAL = 3.4; EXPRESSED IN HELA, SIGNAL = 5.7; EXPRESSED IN HBL100, SIGNAL = 3.8; EXPRESSED IN BT474, SIGNAL = 5.4; EST_HUMAN HIT: BF312963.1, EVALUE 3.70e-02; SWISSPROT HIT: P01138, EVALUE 1.50e-01
cccagaaaggacggccacttgcaggaagactattattaaggccagggctgaggccggccatggagaggtccgagccagggaggcctcacaggagcctttcatgagtctccagtggacggaggtgctggaggagccagcactgcagacgttgctctcgaggtggccagt

SEQ ID NO: 19796 - DNA, 496 bp, Homo sapiens
  MAP TO AF091512.1; EXPRESSED IN BT474, SIGNAL = 2.8; EXPRESSED IN HEART, SIGNAL =   2; EXPRESSED IN ADULT LIVER, SIGNAL = 2.4; EXPRESSED IN BRAIN, SIGNAL = 1.6; EXPRESSED IN LUNG, SIGNAL = 2.8; EXPRESSED IN BONE MARROW, SIGNAL = 2.5; EXPRESSED IN PLACENTA, SIGNAL = 1.9; EXPRESSED IN HELA, SIGNAL = 3.1; EXPRESSED IN HBL100, SIGNAL =   2; EXPRESSED IN FETAL LIVER, SIGNAL = 2.8; SWISSPROT HIT: P49910, EVALUE 3.00e-35; NT HIT: AF017433.1, EVALUE 0.00e+00; EST_HUMAN HIT: BE387349.1, EVALUE 0.00e+00
cagcccagctaccacaggggatccctctgggagactgaaagtacaggttctggggcccaggttgaagccgaccaaccctgagcctcaggccaggggaatggcagcccccttggaggcccaggaccaggcccctggggagggagaagggcttctgattgtgaaagtggaagattcctcctgggaacaggaatctgcccagcatgaggatggcagggattccgaagcctgccgccagcgcttccggcaattctgctacggggatgtgcatgggcctcatgaggccttcagccagctctgggagctctgctgccgctggctgcggcccgagctgcgtaccaaggagcagatcctggagctgctggtgctggagcagttcctgacagtgctgccaggggagatccagggctgggtgcgtgagcagcacccgggaagcggtgaggaggctgtcgccttggtggaggacctacagaagcagccagtgaaagcctggcgacag

SEQ ID NO: 19797 - DNA, 359 bp, Homo sapiens
  MAP TO AC008176.1; EXPRESSED IN HBL100, SIGNAL = 0.79; EXPRESSED IN FETAL LIVER, SIGNAL = 1.1; EXPRESSED IN BRAIN, SIGNAL = 0.94; EXPRESSED IN PLACENTA, SIGNAL = 0.91; EXPRESSED IN BT474, SIGNAL = 0.87; EXPRESSED IN BONE MARROW, SIGNAL = 1.1; EXPRESSED IN LUNG, SIGNAL = 0.84; EXPRESSED IN HELA, SIGNAL = 0.91; EXPRESSED IN ADULT LIVER, SIGNAL = 1.4; EXPRESSED IN HEART, SIGNAL = 0.93; EST_HUMAN HIT: AA315045.1, EVALUE 1.00e-30; SWISSPROT HIT: Q03460, EVALUE 1.90e-02; NT HIT: U27016.1, EVALUE 2.20e-01
tttggaaatgttataagattgcctgcatcattttcatccttcaagtcaagagtcattttctcacttaagtgccccttgggcctgctgaaggttgactggtttgatctatgcccccacaaaggaatggggcttttgaggttcctgagaacaagttgaccaggatccaattttttttcctcacagatgtcagttctggaagcaagtctgcatttctctgcaaatcctttcttaagcacctcttcccctatatccacactgccatactcagcctgagcaataactgttccatcttcagaggttgctttaattctcatttttatttccttttcaaaaatcaagctccccaaaaaggttgtgcc

SEQ ID NO: 19798 - DNA, 170 bp, Homo sapiens
  MAP TO AC004890.2; EXPRESSED IN HEART, SIGNAL =   1; EXPRESSED IN FETAL LIVER, SIGNAL = 0.82; EXPRESSED IN PLACENTA, SIGNAL = 0.78; EXPRESSED IN BT474, SIGNAL = 0.77; EXPRESSED IN BONE MARROW, SIGNAL = 0.91; EXPRESSED IN HBL100, SIGNAL =   1; EXPRESSED IN LUNG, SIGNAL = 0.91; EXPRESSED IN ADULT LIVER, SIGNAL = 0.99; EXPRESSED IN BRAIN, SIGNAL = 1.5; EXPRESSED IN HELA, SIGNAL =   1; NT HIT: AJ007932.2, EVALUE 3.30e-01; SWISSPROT HIT: P25067, EVALUE 2.90e+00; EST_HUMAN HIT: BE736179.1, EVALUE 5.80e-01
ccaaggcctgcgggggccggcagcggccagttgccagggcgaccgaggcgaccgggccgcgcctgcacgcagccccgtagaatgagaaggggacggtcaggccgcggggaaagcactgatcgcatttgccacccaagaggtctttggtcacctctaggagagcaattgta

SEQ ID NO: 19799 - DNA, 554 bp, Homo sapiens
  MAP TO AF196779.1; EXPRESSED IN HBL100, SIGNAL =   2; EXPRESSED IN HELA, SIGNAL = 2.6; EXPRESSED IN FETAL LIVER, SIGNAL = 2.4; EXPRESSED IN BT474, SIGNAL = 1.9; EXPRESSED IN LUNG, SIGNAL = 2.4; EXPRESSED IN PLACENTA, SIGNAL = 2.2; EXPRESSED IN HEART, SIGNAL = 1.7; EXPRESSED IN ADULT LIVER, SIGNAL = 3.1; EXPRESSED IN BRAIN, SIGNAL =   2; EXPRESSED IN BONE MARROW, SIGNAL = 1.7; SWISSPROT HIT: P08247, EVALUE 1.00e-23; NT HIT: AF196779.1, EVALUE 0.00e+00; EST_HUMAN HIT: AL133901.1, EVALUE 1.00e-108
actctgtgtcccggatgcctggtgtggattaatagcagcagcaactatatgtgtggctgttatggtggctgtttgcatgtgggcctgtctgggatttggtgtggtctgtgagcatggctgtgtccctggggttccgtgtccccatggtccctacatgcaagtggctgtggggactcaccagcatgggccctttgttattctctcggtacttgttctgcaggaagatgtaggtggccagagcccccatggagtagaggaaggcaaacacggccacggtgacaaagaattcggctgacgaggagtagtccccaactaagaagaccttggtggtgccccctcggcaggtgggtgcatcaaagtacacttggtgcagcctgcaaacagaggtgggcaggtgtggcccagcccctcagaacaccctcaaccctccagcccaatcatgggtccccccatttctgacaaggccccaggaagaggaggaaataaccattcatcgagcacctactatgtaccagtcacatttcactgattgctcaaaacatcctggtgagata

SEQ ID NO: 19800 - DNA, 354 bp, Homo sapiens
  MAP TO AL035420.14; EXPRESSED IN BONE MARROW, SIGNAL = 1.3; EXPRESSED IN HBL100, SIGNAL = 1.1; EXPRESSED IN FETAL LIVER, SIGNAL = 1.1; EXPRESSED IN ADULT LIVER, SIGNAL = 0.88; EXPRESSED IN BRAIN, SIGNAL = 1.4; EXPRESSED IN PLACENTA, SIGNAL = 1.1; EXPRESSED IN BT474, SIGNAL = 1.3; EXPRESSED IN LUNG, SIGNAL = 1.3; EXPRESSED IN HELA, SIGNAL = 1.3; EXPRESSED IN HEART, SIGNAL = 1.3; NT HIT: M36717.1, EVALUE 8.70e-01; SWISSPROT HIT: P70796, EVALUE 1.10e+00
ctataggttgagtgtccagaggagggggcgatgcagagggccggcctttgtgccaaatggggacaggaggcctggtgagtcctgctgtacaccattcctggtggtggagccgctcagctgtgagcgcccatcctttctctgggcagtggccatgtggcctaggctagcaggccctggaagagcctttctgtgtccttcctggttcttggtgtctaccgcctcacccacacccctgaagctctgggctttgctactcagctctggcacagagactggtttggcaggtttggccacacccatgagcagtgcgatggctgggagctggggtggagcaggcctgaggaggcagtgctg

SEQ ID NO: 19801 - DNA, 407 bp, Homo sapiens
  MAP TO AL022314.1; EXPRESSED IN PLACENTA, SIGNAL = 3.8; EXPRESSED IN HEART, SIGNAL = 0.99; EST_HUMAN HIT: AW190933.1, EVALUE 9.60e-02; NT HIT: gi4504664, EVALUE 0.00e+00; SWISSPROT HIT: P14784, EVALUE 1.00e-49
actccctccctggggccagcgtcagggacctcctccccagcctctcgcagcaccagctcagggggtggctgaaaatccaccaggtctgggactcctggggtgggaggccccaggggctgggggtcccagtctctggggactctttcttgcaaagaagggggcatcctctcttcaccggccccactgcccccaggggcagtgcttggggggctggggccaccgaggagactgggggagaagagcagcaggtcatccctggaggggaaggtgcagtaggcgtcgtcctcccctgacagaggctgcaggggttggggggaagaccctgtgggtgccccggccacaccctcatcagggtcttcctctgagtaggggtcgtaagtaaagtacacctggcaggcctctatctc

SEQ ID NO: 19802 - DNA, 854 bp, Homo sapiens
  MAP TO AC006539.1; EXPRESSED IN ADULT LIVER, SIGNAL = 1.1; EXPRESSED IN LUNG, SIGNAL = 2.2; EXPRESSED IN BRAIN, SIGNAL = 2.2; EXPRESSED IN HBL100, SIGNAL = 1.3; EXPRESSED IN HELA, SIGNAL = 1.3; EXPRESSED IN PLACENTA, SIGNAL = 3.4; EXPRESSED IN BT474, SIGNAL = 2.4; EXPRESSED IN FETAL LIVER, SIGNAL = 1.7; EXPRESSED IN BONE MARROW, SIGNAL = 1.8; EXPRESSED IN HEART, SIGNAL = 1.9; SWISSPROT HIT: Q03923, EVALUE 1.00e-106; EST_HUMAN HIT: BF675662.1, EVALUE 1.00e-107; NT HIT: gi4508026, EVALUE 4.00e-91
cttatgttcagtaagaattgatgatgagttaaaagctttgccacattcttcacatttatagggtttctctcccgtatgggttctctcatgtatagtaagtagtgagcagtggttaaaggctttcccacattctttacatttgtagggtttctttccagtgtgaattgtcttatgtttggtgagatgtgagtgccggttaaacgctctgccacagtcttcacatgtatagggtttttctcctgtatgaattttcttatgtctaacaaagggtgaacaccagtgaaaggcttttccacattcttcacatttgtagggtttctcaccagtatggattctcttatgtttagtaagactcgagcaccagttaaaagctttgccacattcttcacatttgtatggtttctctccagtgtgaattctcttatgtttagtaaggtatgagaaccacttaaaggttttgccacattcctcacatatgcagagtttctcttcagtgtgaattatcttatgataagaaaggcctgagtgagatttaaagactttgccacattgcatacatttgaaaagtttctctgtagtatgtcttatgttttctctatttagatttgatgatttactaaagactttcacacatttattatatgggaaaattttgctaggtagagttgacaaacattggttaagtccattataaatttctttttgatccttacactcacccacattttccccatccttccttaagtgtaaatcctcaagtccacagcttccatatcttctcagtatcactttttggaatgaatcttgcatgcactgttctggcaaaaggtcttcagtgtaatgagaagacatag

SEQ ID NO: 19803 - DNA, 127 bp, Homo sapiens
  MAP TO AC007095.2; EXPRESSED IN FETAL LIVER, SIGNAL = 1.7; EXPRESSED IN LUNG, SIGNAL = 1.6; EXPRESSED IN HELA, SIGNAL = 1.8; EXPRESSED IN HEART, SIGNAL = 1.4; EXPRESSED IN PLACENTA, SIGNAL = 2.6; EXPRESSED IN BT474, SIGNAL = 1.6; EXPRESSED IN BRAIN, SIGNAL = 2.7; EXPRESSED IN BONE MARROW, SIGNAL =   2; EXPRESSED IN HBL100, SIGNAL =   2; EXPRESSED IN ADULT LIVER, SIGNAL = 1.4; NT HIT: S61070.1, EVALUE 1.00e-52; EST_HUMAN HIT: AW889386.1, EVALUE 4.00e-34; SWISSPROT HIT: P21414, EVALUE 6.00e-07
cccttgtgtagtgaggaaatctctttcagcctgtataacagcatggtggtgcagaatatgaaaggcatatttagagtcagtataaatattgacatgtagtccttttgcaagagtgagggcttgagtt

SEQ ID NO: 19804 - DNA, 180 bp, Homo sapiens
  MAP TO AL049797.8; EXPRESSED IN PLACENTA, SIGNAL = 0.95; EXPRESSED IN LUNG, SIGNAL = 0.9; EXPRESSED IN HEART, SIGNAL = 0.93; EXPRESSED IN BT474, SIGNAL = 0.81; EXPRESSED IN BONE MARROW, SIGNAL = 0.94; EXPRESSED IN HBL100, SIGNAL = 0.72; EXPRESSED IN FETAL LIVER, SIGNAL = 0.91; EXPRESSED IN HELA, SIGNAL = 0.87; EXPRESSED IN BRAIN, SIGNAL = 0.75; EST_HUMAN HIT: AW999477.1, EVALUE 4.30e-01; SWISSPROT HIT: P18357, EVALUE 6.50e+00
aaaaacctggttaatggtttcatggtgttaatatgccacctagtggatcaacttgcacattctaacttggggttttcagagttggaagtgttcattttcctttatcagaatggcttgctcactaggaacaccagctgaggtccaattacgataaatccactagttcctgatgttgatatt

SEQ ID NO: 19805 - DNA, 127 bp, Homo sapiens
  MAP TO AL132719.1; EXPRESSED IN BONE MARROW, SIGNAL = 2.5; EXPRESSED IN BRAIN, SIGNAL = 1.6; EXPRESSED IN PLACENTA, SIGNAL =   1; EXPRESSED IN HBL100, SIGNAL = 1.2; EXPRESSED IN HEART, SIGNAL = 1.4; EXPRESSED IN ADULT LIVER, SIGNAL = 1.1; EXPRESSED IN FETAL LIVER, SIGNAL = 0.99; EXPRESSED IN BT474, SIGNAL = 1.7; SWISSPROT HIT: Q02294, EVALUE 5.20e+00; NT HIT: AJ006216.1, EVALUE 1.50e-02; EST_HUMAN HIT: AW978587.1, EVALUE 4.20e-01
caaatcgcaatggatctcaaacacctggcctggtccctccactgtcattgttcttgatgtcacaatcctgtcacactctgctccagtcttcctgcagacaaggagggactcacactttgggcaaatt

SEQ ID NO: 19806 - DNA, 99 bp, Homo sapiens
  MAP TO AL022323.7; EXPRESSED IN BONE MARROW, SIGNAL =  13; EXPRESSED IN HBL100, SIGNAL =  14; EXPRESSED IN FETAL LIVER, SIGNAL =  19; EXPRESSED IN BT474, SIGNAL =  13; EXPRESSED IN LUNG, SIGNAL =  16; EXPRESSED IN PLACENTA, SIGNAL =  16; EXPRESSED IN HEART, SIGNAL =  11; EXPRESSED IN HELA, SIGNAL =  16; EXPRESSED IN ADULT LIVER, SIGNAL =  20; EXPRESSED IN BRAIN, SIGNAL =  12; NT HIT: AJ270777.1, EVALUE 7.10e-01; EST_HUMAN HIT: AW976266.1, EVALUE 8.50e-01
gggatgaaatgtttacagtggcattttggaaagttgatgcctgccccaatgtggaccaggccaagggggaggctgatagagtcctccaggcaggagaag

SEQ ID NO: 19807 - DNA, 124 bp, Homo sapiens
  MAP TO AL034406.1; EXPRESSED IN HBL100, SIGNAL = 0.74; EXPRESSED IN FETAL LIVER, SIGNAL = 1.3; EXPRESSED IN LUNG, SIGNAL = 0.85; EXPRESSED IN BRAIN, SIGNAL = 0.9; EXPRESSED IN PLACENTA, SIGNAL = 0.89; EXPRESSED IN BT474, SIGNAL = 0.74; EXPRESSED IN BONE MARROW, SIGNAL = 0.94; EXPRESSED IN HELA, SIGNAL =   1; EXPRESSED IN ADULT LIVER, SIGNAL = 0.78; EXPRESSED IN HEART, SIGNAL = 1.4; NT HIT: AF198349.1, EVALUE 4.00e-06; SWISSPROT HIT: P48960, EVALUE 2.30e+00
agggttggagcacccccaatgcctggctggccagctagggctgcatgagcaattccatgttggggtccaggtgcagcaaatggagactgcatcttatctttatcccaggaggattcacttccac

SEQ ID NO: 19808 - DNA, 215 bp, Homo sapiens
  MAP TO AL022344.1; EXPRESSED IN LUNG, SIGNAL = 1.4; EXPRESSED IN BRAIN, SIGNAL = 1.3; EXPRESSED IN HBL100, SIGNAL = 1.4; EXPRESSED IN HEART, SIGNAL = 1.5; EXPRESSED IN ADULT LIVER, SIGNAL = 1.5; EXPRESSED IN FETAL LIVER, SIGNAL = 1.6; EXPRESSED IN PLACENTA, SIGNAL = 1.5; EXPRESSED IN HELA, SIGNAL = 1.5; EXPRESSED IN BT474, SIGNAL = 1.8; EXPRESSED IN BONE MARROW, SIGNAL = 1.5; NT HIT: gi7661979, EVALUE 1.00e-102; EST_HUMAN HIT: AW205363.1, EVALUE 1.00e-88; SWISSPROT HIT: P92172, EVALUE 1.20e+00
gggtaggagattttgccgtgagtgacatcagtttcctcccagacccttgcgctcttcctgaacaacaaaagaagcgctgtttaaatgagaaggagaagctggtttatgcgcctctttctggagttgggggtgtgctgtatgacaaagacgctgtctatgttgaccttggtggcagccacgtttttcaggtatcggtgagacgggagtcatttctc

SEQ ID NO: 19809 - DNA, 228 bp, Homo sapiens
  MAP TO AL030999.2; EXPRESSED IN BT474, SIGNAL = 1.9; EXPRESSED IN BONE MARROW, SIGNAL = 1.5; EXPRESSED IN LUNG, SIGNAL = 1.5; EXPRESSED IN HEART, SIGNAL = 1.4; EXPRESSED IN ADULT LIVER, SIGNAL = 1.8; EXPRESSED IN FETAL LIVER, SIGNAL = 1.5; EXPRESSED IN BRAIN, SIGNAL = 1.6; EXPRESSED IN PLACENTA, SIGNAL = 1.6; EXPRESSED IN HELA, SIGNAL = 1.8; EXPRESSED IN HBL100, SIGNAL = 1.3; SWISSPROT HIT: P26311, EVALUE 1.70e+00; NT HIT: AJ248287.1, EVALUE 1.80e+00
ttggaccatcaattatctctttctttggcacactcaactttgccctcttgactggtttattcctcagagatacaagtatattgccataaaacatctttctccaaagcgtagttaagagtctcttcatctgccagccattcttcaaaacaccgatcagccttccaccactactttcctgaatatccaggagcaaatattaacagtaacctcttaatagactcttattag

SEQ ID NO: 19810 - DNA, 101 bp, Homo sapiens
  MAP TO AC007110.3; EXPRESSED IN LUNG, SIGNAL = 1.4; EXPRESSED IN BONE MARROW, SIGNAL = 1.5; EXPRESSED IN HELA, SIGNAL = 1.3; EXPRESSED IN HEART, SIGNAL = 1.2; EXPRESSED IN PLACENTA, SIGNAL = 1.3; EXPRESSED IN BT474, SIGNAL = 1.3; EXPRESSED IN ADULT LIVER, SIGNAL = 1.5; EXPRESSED IN BRAIN, SIGNAL = 1.4; EXPRESSED IN HBL100, SIGNAL = 1.4; EXPRESSED IN FETAL LIVER, SIGNAL = 1.3; NT HIT: gi9634679, EVALUE 8.50e-01; EST_HUMAN HIT: AV726786.1, EVALUE 1.30e+00
aaacatctttccacgggagcgttatgtaagaattggctgtaatgagattatcagtatccaactagctgaatcagtccctctcacaaagacagttttaggag

SEQ ID NO: 19811 - DNA, 239 bp, Homo sapiens
  MAP TO AL031005.1; EXPRESSED IN HBL100, SIGNAL = 1.1; EXPRESSED IN HELA, SIGNAL = 1.2; EXPRESSED IN HEART, SIGNAL = 1.1; EXPRESSED IN BT474, SIGNAL = 1.2; EXPRESSED IN BONE MARROW, SIGNAL = 0.98; EXPRESSED IN PLACENTA, SIGNAL = 1.2; EXPRESSED IN ADULT LIVER, SIGNAL = 1.2; EXPRESSED IN FETAL LIVER, SIGNAL = 1.2; EXPRESSED IN LUNG, SIGNAL = 2.1; NT HIT: X91926.1, EVALUE 6.00e-90; SWISSPROT HIT: P42892, EVALUE 4.00e-24; EST_HUMAN HIT: BE563471.1, EVALUE 9.00e-78
ctggatcacgttgctgttggagttcttggaatcggcactgacatagacagagaagaagggtgaggtgcggtagtgggcggtgaccacctgcagggtgtcctggaagttgtccttggcccagggacctgtgatgttccagcccccgagctgtggggagggagagcaggcagggaggtgatgaggtggcggggagacccagatgtgaattctggttctgccgctgacttgctctgtgaccc

SEQ ID NO: 19812 - DNA, 3693 bp, Homo sapiens
  MAP TO AL022401.1; EXPRESSED IN LUNG, SIGNAL =   3; EXPRESSED IN BRAIN, SIGNAL = 2.7; EXPRESSED IN HELA, SIGNAL = 2.8; EXPRESSED IN HBL100, SIGNAL = 2.6; EXPRESSED IN HEART, SIGNAL = 2.4; EXPRESSED IN BONE MARROW, SIGNAL = 2.5; EXPRESSED IN PLACENTA, SIGNAL = 2.8; EXPRESSED IN BT474, SIGNAL = 2.8; EXPRESSED IN ADULT LIVER, SIGNAL = 2.7; EXPRESSED IN FETAL LIVER, SIGNAL = 2.9; EST_HUMAN HIT: BE744722.1, EVALUE 1.00e-103; NT HIT: AL163303.2, EVALUE 1.00e-85; SWISSPROT HIT: P36079, EVALUE 3.50e+00
atattttaaataattcactttgttctctctgtacttgccagtgtgagcacaccaagtcacaatataattagccctttccaatgttttaaccacctgaaattttttaccctttgatctaacttctggcttaaaaaaggtgaagaggatgaaaagttgccaatcaactattctgtgcttagaactaggtttagttggcaaacaaaatgcagcagaccaagaagcattagatacactttccagagcatggcagttgaccctaagaggttgcagcagttagagagaggagagatttgggaagggctggagtctggctattggaaattggcatcaacaagggccagggcagatgggctataggtgggagtttcataagcaggtagaacacaagaaagagtggtgtgacaacctgcaactggtgctaatcttaggaggcaggtggtgcatgacaagatatatggaagtatgtggtgtgggatccagccacagagactggagtttagggtaaaagctattctatggggaggaggcaaaagggagacaaggtgtcaaacacagaggaactagcatagaagaagtaaaagaattagtagtaataataattattatatttatacttaatatttgtattaaatgttactgacattctattttatgccaaggcactaaggatccagagttgactaaaagtatttgtcatcctggaggaatcactgtcaggtaaaggagaaaagcatgtaaacaaatgacagtgtagtgtggcgtatgtactaatatatccaaagtctagaaataacagaaaggagaaatgagcccaatctaggagtcagagaaccttacggagaggggtataacagaagagtagcaattctccatctaaatcaaagacagtagaattgaaacattctggatgtgaagaataacattggtaccagtccaggatgtaaaagataaatatcatggtgtattgtttcatacaaataaacaggtattagtaaatcaagaagtctgagagatggaggctagatgaaatggtatatgataagatcagagaaggtaggcctgaagggttttattttctatagtaggaatcttggattttatcctattggtgatggggagtcattgaagaattttaagccaaaaatggaataaacagaattttattttccattgacccatctgaggatggcatggagatggattatatgggggaactctagaggcaaggagaccagtccaattctgaggctattgtagttgtctagttgaaagatggtgcatgtctgggctatgtcagtggggaaggaacagatgaagttaagagatagaagataaaattgatagaatttgatgattgtttgcatgccaaagataaaagggagggagaacttttacagatagtaaaaacagagatgtaagacaaaaagaccattaggggaacggaagtatgaggtaatggctttgtctgatctaggtcctgcttctacaggggttgcgtgtctctagcaaaggagtatggtgagtctccgggatggagagcaaagacaggcatctgtaatgtttaatttccaaatagccataataaaaaatgcagttagctatagttaccatgctgtacattagatccccagaacttatagctgaaagttcatacccttaaaccaacagctctacactccccagcccctggcaaccaccctcaacttttttagattctacatataagtgagatcatgtgatatttgtctttctgtgcttggcttatttcacttagcataatgtcctccaggttcatttatcttgtcataaatgacaggattcttcaattcaaatttgacaagagagcagattttaagtattcttactacaaacacacacacacacacacacacacacacacacacagtggtaactattagtggtgatggacgtgttaacttaattgtggtaatcattacacagtgtatatcaagtgaccttgtacaccttaaatatatatactttttgtcaattaagtatttaaaaacttaaattgtctatagtaattggcatgtccaagaacatacccttgaaggttttttattctgttaccctgtcatactaataagttcagcttaaatcttgacatttttacttatgttattattagtaataatgaaaatagctaccatatatgtcggcttaatctctgatattttatagataaggaagccaaagctcggaaattgagaaagcattccccaaatcacataactgctaaatcgtagagccagtatttttactgaggctatcttttcaaaacccatgagcttaaacaagtgctatagtccttaaagtccagggaatggaaattctatcaaaaagcaaatagttgaacaaacagtgaagagttttcttcatttgaacagtgacttgttaaaattactatatgctaaattagactataccagtatcacatgtgggcttgtattagtctgtcctcacactgctataaagataccacctgagactgtaatttataaacaaaagaggtttaattgactgacagttcctcatagctggggaggcctaaggaaatgtaaaatcagggtggaaggcaaaggggaagcaaggcatgtcttacatggcggcaggagagcaaagaaagcaaagagggaactgccaaacacttttaaaccatcagatcttgtgagaagtcactatcacgaggacagcatggggaaaagtgcccccataatccattcatctcccaccagtccctccctaatacttgtggattacaattgcaaatgagatttgggtagggacatagagccaaaccatatcattctgccccgacccttcccaaatctcatgtccttttcacatttcaaaaccaatcatcccttcccaacagccctccaaagtcttaaaactcattccagcattaactcaaaagtccacgtccaaagtctcatctgagacaagtcaagtcccttctgcctatgaacctgtaaaatcaaaagcaagttagttacttccaagatacgatggggtataggcattgggtaaatgtccccattccaaatgggagaaattggacaaaacaaaggggccataggccccatgcaagtccaaaacccagccgggcagtcattaaatcttaaagctccaaaatctcctttgactccatgtctcacatccaggccatgctgatacaagggctaggctcccacagccttgggcagttccaaccctgtggctctgcaggggataggcactgtgcctgctttcatgggctggcattgagtgcctgtgacttttccaggtgcatggtgcaggctgtcagtggagctaccattctggggtctagaggacagtggccctcttcttacagctccactaaacagttccctagtggtgactctttgtgggggctccaagcccacatttcccttcagcactgccctagcagaggttctccatgagggctctacccctgcagcagacttctgcctggccatctaggcgtttcctaacatcctctgaaatctatgcagaagctcccaaacctcacctcttgtcttttgtgcaccctcaggcccaacatcacgtggaagctggcaacgctcggggcttgcaccctctgaagcaacagcccaagctgtacctttattccttttagccatggctggagctggagcagctgggatg

SEQ ID NO: 19813 - DNA, 156 bp, Homo sapiens
  MAP TO AC007114.7; EXPRESSED IN LUNG, SIGNAL = 1.1; EXPRESSED IN BONE MARROW, SIGNAL =   1; EXPRESSED IN HBL100, SIGNAL =   1; EXPRESSED IN HEART, SIGNAL = 0.94; EST_HUMAN HIT: AA701457.1, EVALUE 6.00e-83; SWISSPROT HIT: P21529, EVALUE 5.30e-02; NT HIT: AF113214.1, EVALUE 2.00e-73
ccatggtatctacgatgagatccagctgtccattatacaccgtcacgttgatccctgcctccagcaactcgtccacaatgctaatgactggcttcatgaagtcctcctccatgttcacaaagacgttggtagcctggcctgcacatggggaaggag

SEQ ID NO: 19814 - DNA, 149 bp, Homo sapiens
  MAP TO AC007320.2; EXPRESSED IN BONE MARROW, SIGNAL = 0.78; EXPRESSED IN HBL100, SIGNAL = 1.3; EXPRESSED IN LUNG, SIGNAL = 0.97; EXPRESSED IN ADULT LIVER, SIGNAL = 0.94; EXPRESSED IN BRAIN, SIGNAL = 1.3; EXPRESSED IN PLACENTA, SIGNAL =   1; EXPRESSED IN BT474, SIGNAL = 0.92; EXPRESSED IN HELA, SIGNAL = 1.8; EXPRESSED IN HEART, SIGNAL = 1.2; EXPRESSED IN FETAL LIVER, SIGNAL = 1.3; NT HIT: AF000991.1, EVALUE 1.00e-12; SWISSPROT HIT: P21404, EVALUE 3.00e+00; EST_HUMAN HIT: AW181908.1, EVALUE 3.00e-08
gacccaatttgcacaccaaatgtttttggcgtgttggagtactcccacctcaacatcgggccattgtatggactgcttgtgcaattaaaggaatgtgcgaatggtgttggaagcaccttctgtgtcatctgtctttctcagtgttgcag

SEQ ID NO: 19815 - DNA, 425 bp, Homo sapiens
  MAP TO AL031055.1; EXPRESSED IN BONE MARROW, SIGNAL = 1.5; EXPRESSED IN LUNG, SIGNAL = 1.2; EXPRESSED IN BRAIN, SIGNAL = 1.3; EXPRESSED IN HELA, SIGNAL = 1.4; EXPRESSED IN HBL100, SIGNAL = 1.1; EXPRESSED IN HEART, SIGNAL = 1.3; EXPRESSED IN ADULT LIVER, SIGNAL = 1.6; EXPRESSED IN PLACENTA, SIGNAL = 1.1; EXPRESSED IN BT474, SIGNAL = 1.4; EXPRESSED IN FETAL LIVER, SIGNAL = 1.6; NT HIT: AJ006345.1, EVALUE 6.70e-02; SWISSPROT HIT: P23497, EVALUE 5.50e+00; EST_HUMAN HIT: R81642.1, EVALUE 1.60e+00
gccacacggctctgaacctttggaatggcatctctcacgctgaacatacgatgacccaggaaagggcagccttgaagggttgcctgcaggaggccagccttgtgcagatgcgaaactgggcaaagagaggaaaactgtcagcttcgcgtaggcgagaaaaaaagatgatttttccctttcaccccccattttattttcctgtaaagataataaaaagctttgacttccattatacaagtgacagactctcactagagaaagcacagccggccactgcccctggctctgctccagccacaacggcccctagctgttttctgtgcacccttcatttgctgttccccttgcctgaaaccttcttcccccaaacattctcactctctcctctcctcccaatctttgctcgagcatctttttctcagtaa

SEQ ID NO: 19816 - DNA, 174 bp, Homo sapiens
  MAP TO AC007158.5; EXPRESSED IN BONE MARROW, SIGNAL = 0.92; EXPRESSED IN HEART, SIGNAL =   1; EXPRESSED IN HELA, SIGNAL = 1.2; NT HIT: AF052036.1, EVALUE 1.60e+00; SWISSPROT HIT: P32609, EVALUE 6.50e+00
gaagaagaataagaagaaggaagaggaagaggaggaggaggagaaggagaccatttttctattaacttaatcagatcagaaaatggacttacctacttgggtgaaggaagccaaagggaagcagtgtgttgacgatgctgggaaaagcactaagcacaccatagttgctgttat

SEQ ID NO: 19817 - DNA, 401 bp, Homo sapiens
  MAP TO AL022313.1; EXPRESSED IN PLACENTA, SIGNAL = 8.1; EXPRESSED IN HBL100, SIGNAL =  54; EXPRESSED IN HEART, SIGNAL = 6.1; EXPRESSED IN ADULT LIVER, SIGNAL =  11; EXPRESSED IN LUNG, SIGNAL = 8.2; EXPRESSED IN BRAIN, SIGNAL = 7.5; EXPRESSED IN HELA, SIGNAL =  11; EXPRESSED IN BT474, SIGNAL = 7.2; EXPRESSED IN FETAL LIVER, SIGNAL = 9.1; EXPRESSED IN BONE MARROW, SIGNAL = 7.6; EST_HUMAN HIT: AA160709.1, EVALUE 1.00e-126; SWISSPROT HIT: P26371, EVALUE 4.00e-03; NT HIT: gi9845229, EVALUE 2.50e-01
tcagagctcctctttgttgctatcgacggactgagccagaggccctggagccaggggggaacctagtggctcttggtcgccaagctgctggctgctgtcctccaggcgcctgcctgtgggggcatagtcccgcaggagcctgctctccactctgtgctgccaaaggctctcggtactcacgagtccctgcatcctcaggtacccctgctggcaaaagggtggcaacttctggcgcgtgagggcgaacaggaagcaggactctacacaaaagcaaaatgaggagaatgagccaggctgggacatgtggggaggggtgcagaaaggggagctgccaatgccaggtgtgggggcttcactgcaggccttgcctggtatcttccatcccttgaaactgggagctg

SEQ ID NO: 19818 - DNA, 165 bp, Homo sapiens
  MAP TO AC007097.2; EXPRESSED IN PLACENTA, SIGNAL =   2; EXPRESSED IN ADULT LIVER, SIGNAL = 2.4; EXPRESSED IN FETAL LIVER, SIGNAL = 2.2; EXPRESSED IN BONE MARROW, SIGNAL = 2.2; EXPRESSED IN LUNG, SIGNAL = 2.1; EXPRESSED IN BRAIN, SIGNAL = 2.1; EXPRESSED IN HEART, SIGNAL = 1.8; EXPRESSED IN HELA, SIGNAL = 1.9; EXPRESSED IN HBL100, SIGNAL = 2.4; EXPRESSED IN BT474, SIGNAL = 2.2; SWISSPROT HIT: P94547, EVALUE 1.30e+00; NT HIT: AL163206.2, EVALUE 8.20e-02
cctctcaacgttggtgtgtccttggcagtctccactatgggccttcctaagaaatctctccaagtgattctgtccggtcttgtcaccaaattttacttcctcttcctttttcacttctatggtaaaatgacaactctccatcatgtgcgtttttcatctattaat

SEQ ID NO: 19819 - DNA, 138 bp, Homo sapiens
  MAP TO AJ229043.1; EXPRESSED IN BT474, SIGNAL =  11; EXPRESSED IN HBL100, SIGNAL =  13; EXPRESSED IN HELA, SIGNAL =  11; EXPRESSED IN HEART, SIGNAL =  11; EXPRESSED IN FETAL LIVER, SIGNAL =  13; EXPRESSED IN BRAIN, SIGNAL =  11; EXPRESSED IN LUNG, SIGNAL =  14; EXPRESSED IN BONE MARROW, SIGNAL =  13; EXPRESSED IN PLACENTA, SIGNAL =  13; EXPRESSED IN ADULT LIVER, SIGNAL =  16; NT HIT: AJ229043.1, EVALUE 3.00e-72; EST_HUMAN HIT: AI041146.1, EVALUE 3.00e-04; SWISSPROT HIT: P20213, EVALUE 5.10e+00
agttccaagctttaagacctgcagaggctgtacacatttctgcttactttctctgtcacttccatgtgaacgtgactgtgctagcatcctggaggatgagagaccacatggaggttagtccaggtgtcccagctgagg

SEQ ID NO: 19820 - DNA, 320 bp, Homo sapiens
  MAP TO AL022324.1; EXPRESSED IN PLACENTA, SIGNAL = 3.2; EXPRESSED IN HBL100, SIGNAL = 3.2; EXPRESSED IN LUNG, SIGNAL = 7.6; EXPRESSED IN BRAIN, SIGNAL = 2.8; EXPRESSED IN BONE MARROW, SIGNAL =  13; EXPRESSED IN HELA, SIGNAL = 3.5; EXPRESSED IN HEART, SIGNAL = 2.8; EXPRESSED IN BT474, SIGNAL = 3.2; EXPRESSED IN ADULT LIVER, SIGNAL = 4.5; EXPRESSED IN FETAL LIVER, SIGNAL = 3.4; NT HIT: X03529.1, EVALUE 0.00e+00; EST_HUMAN HIT: W73790.1, EVALUE 0.00e+00; SWISSPROT HIT: P15814, EVALUE 1.00e-53
gtcagcccaaggccaccccctcggtcactctgttcctgccgtcctctgaggagctccaagccaacaaggccacactggtgtgtctcatgaatgacttctatctgggaatcttgacggtgacctggaaggcagatggtacccccatcacccagggcgtggagatgaccacgccctccaaacagagcaacagcaagtacatggccagcagctacctgagcctgacgcccgagcagtggaggtcccgcagaagctacagctgccaggtcatgcatgaagggagcactgcagagaagacggtggcccctgcagaatgttcatag

SEQ ID NO: 19821 - DNA, 110 bp, Homo sapiens
  MAP TO AL021395.14; EXPRESSED IN BONE MARROW, SIGNAL = 1.4; EXPRESSED IN BRAIN, SIGNAL = 1.2; EXPRESSED IN HEART, SIGNAL = 2.7; EXPRESSED IN FETAL LIVER, SIGNAL = 1.2; EXPRESSED IN ADULT LIVER, SIGNAL = 1.2; EXPRESSED IN LUNG, SIGNAL = 1.4; EXPRESSED IN PLACENTA, SIGNAL = 1.3; EXPRESSED IN HBL100, SIGNAL = 1.2; EXPRESSED IN BT474, SIGNAL = 1.1; EST_HUMAN HIT: AV750732.1, EVALUE 5.50e+00; SWISSPROT HIT: P35887, EVALUE 5.30e+00
ggatgctggcgagaaaccaccggttctcaggccccgcctgatgcagttcctccagcaaagattctttggcatcgtggactatctgtctgcttctctggacgtctgcagcg

SEQ ID NO: 19822 - DNA, 88 bp, Homo sapiens
  MAP TO AL008632.1; EXPRESSED IN BT474, SIGNAL = 3.4; EXPRESSED IN BRAIN, SIGNAL = 4.3; EXPRESSED IN HELA, SIGNAL = 3.9; EXPRESSED IN HEART, SIGNAL =   4; EXPRESSED IN FETAL LIVER, SIGNAL = 3.4; EXPRESSED IN LUNG, SIGNAL = 3.7; EXPRESSED IN BONE MARROW, SIGNAL = 4.2; EXPRESSED IN PLACENTA, SIGNAL = 6.4; EXPRESSED IN HBL100, SIGNAL = 3.6; EXPRESSED IN ADULT LIVER, SIGNAL =   4; NT HIT: AJ007973.1, EVALUE 3.00e-21; EST_HUMAN HIT: BF590777.1, EVALUE 2.00e-17; SWISSPROT HIT: Q61207, EVALUE 3.10e+00
ctcttgaaagcttttctgcttagaaatttcttctgccagatactctaaatcctctttcaagttcaaagcttcacagatttctagggca

SEQ ID NO: 19823 - DNA, 221 bp, Homo sapiens
  MAP TO AC007101.1; EXPRESSED IN BT474, SIGNAL = 5.9; EXPRESSED IN LUNG, SIGNAL =   4; EXPRESSED IN HEART, SIGNAL = 3.1; EXPRESSED IN FETAL LIVER, SIGNAL = 3.6; EXPRESSED IN ADULT LIVER, SIGNAL = 3.6; EXPRESSED IN BRAIN, SIGNAL = 3.5; EXPRESSED IN BONE MARROW, SIGNAL = 3.4; EXPRESSED IN PLACENTA, SIGNAL = 5.8; EXPRESSED IN HELA, SIGNAL = 4.5; EXPRESSED IN HBL100, SIGNAL =   4; EST_HUMAN HIT: BF182773.1, EVALUE 1.00e-104; NT HIT: Y19208.1, EVALUE 1.00e-121; SWISSPROT HIT: P15241, EVALUE 5.00e-29
ccctccagcaggcgcctgtaggtggcgatctcgatatccaggcctagcttggagttcatcacctcctggtactccctgatcaggcaggccatgtcttgcttggccttctgcagggcgccctccagctcggccagcttgcagcgggcatcactgagggccgcctcaccctgctgctcagactgggccaccgcagcttccagcttggagttctgggaggtagg

SEQ ID NO: 19824 - DNA, 445 bp, Homo sapiens
  MAP TO AL022395.2; EXPRESSED IN LUNG, SIGNAL = 1.6; EXPRESSED IN HBL100, SIGNAL = 1.6; EXPRESSED IN HEART, SIGNAL = 1.9; EXPRESSED IN BT474, SIGNAL = 1.5; EXPRESSED IN BRAIN, SIGNAL = 1.5; EXPRESSED IN BONE MARROW, SIGNAL = 1.8; EXPRESSED IN PLACENTA, SIGNAL = 1.9; EXPRESSED IN HELA, SIGNAL = 1.7; EXPRESSED IN ADULT LIVER, SIGNAL =   2; EXPRESSED IN FETAL LIVER, SIGNAL = 1.7; EST_HUMAN HIT: N91340.1, EVALUE 1.00e-113; SWISSPROT HIT: P04929, EVALUE 4.40e+00; NT HIT: AF199355.1, EVALUE 0.00e+00
agggaccagtagatctcattctaaactgtattatagggaagtttctttttttggcagatgggagattctttggtcagagagacctacgaaggtgaatgcttcccaagctcgccagtttaaaccttgtattaagcagataaatttccccacaaatcttatacgactggaagtaaatagttctcttctggaatattacactgaattagatgcagttgtgctacatggtgtgaaggacaagccagtgctttctctcaagacttcacttattgacatgaatgatatagaagatgatgcctatgcagaaaaggatggttgtggaatggacagtcttaacaaaaagtttagcagtgctgtcctcggggaagggccaaataatgggtattttgataaactaccttatgaggtaagccaaaaatatttagcagcagtattggatataacacta

SEQ ID NO: 19825 - DNA, 255 bp, Homo sapiens
  MAP TO AL032818.2; EXPRESSED IN HBL100, SIGNAL = 4.5; EXPRESSED IN PLACENTA, SIGNAL = 3.5; EXPRESSED IN HELA, SIGNAL = 3.9; EXPRESSED IN HEART, SIGNAL = 4.5; EXPRESSED IN ADULT LIVER, SIGNAL = 2.5; EXPRESSED IN BT474, SIGNAL = 4.4; EXPRESSED IN FETAL LIVER, SIGNAL = 3.3; EXPRESSED IN LUNG, SIGNAL = 4.4; EXPRESSED IN BONE MARROW, SIGNAL = 4.1; EXPRESSED IN BRAIN, SIGNAL = 3.3; NT HIT: X75290.1, EVALUE 1.60e-01; EST_HUMAN HIT: BE379296.1, EVALUE 3.00e-03; SWISSPROT HIT: O30409, EVALUE 1.70e-01
gacactgctcgagtcacacttcctggctgttcctctcatgagcccaccctgctgccctccctgtcaggatgctcccatcctgatgtctgctccacctgctctcacctgcttccagcccttcctcagatgctaggtcctggtcaccacctcagggaagccaaactggaccagcttcctggtgccctcaccccttctggcacccttgacccactcacctgtcctgggcttgctcctcctactgtacctgaaggcggc

SEQ ID NO: 19826 - DNA, 358 bp, Homo sapiens
  MAP TO AL021406.1; EXPRESSED IN ADULT LIVER, SIGNAL = 7.9; EXPRESSED IN BT474, SIGNAL = 5.3; EXPRESSED IN HBL100, SIGNAL =   6; EXPRESSED IN HELA, SIGNAL =   7; EXPRESSED IN HEART, SIGNAL = 5.7; EXPRESSED IN FETAL LIVER, SIGNAL =   7; EXPRESSED IN BRAIN, SIGNAL = 7.1; EXPRESSED IN LUNG, SIGNAL = 7.6; EXPRESSED IN BONE MARROW, SIGNAL = 7.2; EXPRESSED IN PLACENTA, SIGNAL = 7.1; EST_HUMAN HIT: R21732.1, EVALUE 2.30e-01
aataagtttctcaaatctagcaaagtatgtaatattcactaatttactttgcacatacctttttatcgttgttatcattatccttgttatccttagcatcaccaacagcaaacacatatatgctgttttatccttgccagacacaattctaataatatatagtctgtatatttatagcatatacatatttttatacatatatttatatagtatatgtagcataggtatacttatagtctataatagtatgtatatagtgcatatatgctacatatatacatacatagtgtgtctatatgccgtgctacatatatacatacatagtgtgtgtatacttacacatatatatagtgtgtgt

SEQ ID NO: 19827 - DNA, 184 bp, Homo sapiens
  MAP TO AP000188.1; EXPRESSED IN PLACENTA, SIGNAL = 0.93; EXPRESSED IN LUNG, SIGNAL =   1; EXPRESSED IN HELA, SIGNAL = 1.2; EXPRESSED IN HEART, SIGNAL = 0.89; EXPRESSED IN BT474, SIGNAL = 0.94; EXPRESSED IN HBL100, SIGNAL = 1.3; EXPRESSED IN FETAL LIVER, SIGNAL = 0.9; EXPRESSED IN BRAIN, SIGNAL = 1.4; EXPRESSED IN BONE MARROW, SIGNAL = 1.6; EXPRESSED IN ADULT LIVER, SIGNAL = 1.5; NT HIT: gi10835182, EVALUE 1.00e-99; SWISSPROT HIT: P17181, EVALUE 5.00e-29; EST_HUMAN HIT: AV735185.1, EVALUE 2.00e-99
acaaatcgaaaaatgtttcataattgaaaatataagcacaattgctacagtagaagaaactaatcaaactgatgaagatcataaaaaatacagttcccaaactagccaagattcaggaaattattctaatgaagatgaaagcgaaagtaaaacaagtgaagaactacagcaggactttgtatga

SEQ ID NO: 19828 - DNA, 681 bp, Homo sapiens
  MAP TO AL023279.1; EXPRESSED IN BRAIN, SIGNAL = 1.7; EXPRESSED IN BONE MARROW, SIGNAL = 1.7; EXPRESSED IN LUNG, SIGNAL = 1.5; EXPRESSED IN PLACENTA, SIGNAL = 1.8; EXPRESSED IN HELA, SIGNAL = 1.9; EXPRESSED IN HBL100, SIGNAL = 1.4; EXPRESSED IN HEART, SIGNAL = 1.9; EXPRESSED IN ADULT LIVER, SIGNAL = 1.5; EXPRESSED IN BT474, SIGNAL = 1.4; EXPRESSED IN FETAL LIVER, SIGNAL = 1.7; NT HIT: AF064589.1, EVALUE 0.00e+00; EST_HUMAN HIT: AL135051.1, EVALUE 1.00e-35; SWISSPROT HIT: P98193, EVALUE 6.00e-04
taaagtggaggaggaggcggcgctcacaggaatctggagaacagactggggaaaaccctcaaaaggactttgaatactctcaggggaactctggaaaatactcaataaagcagaggagaagaaggaactcgcaggattctgcagaggagactggacatcctcaccctcaggagggctctgagaaatctctagaggagacagggagtccttcccctcaggagaactctgagaattctggagaggagactgggtgtcgtcgccctcaggagaactctggggaatctggagaggagactgggagtccttcccctcaggaggtctctggagaggatccgaggagtcctccccctcagaacgactctgaggactctggagaggatacagggtgtcgtcgctctcaggagaactctggggaatctggagaggagactgggagtcctccccctcaggataactctgaggactctcagaggaactctggagaagactcggcatcccagcagtaggcatatccttgtcccctggagaacgcagaagcagagaggaggatgaggatgagaaagaaaaacaggaggaggacgaggggaataaaaagtggaaagaggaagagaaaatggaggaagcttcctcctcttcctcatctgggggatcctctgcatctaccaactccagtatgaaaat

SEQ ID NO: 19829 - DNA, 301 bp, Homo sapiens
  MAP TO AC007097.2; EXPRESSED IN BT474, SIGNAL = 1.1; EXPRESSED IN BONE MARROW, SIGNAL =   1; EXPRESSED IN LUNG, SIGNAL = 1.3; EXPRESSED IN HBL100, SIGNAL = 1.1; EXPRESSED IN ADULT LIVER, SIGNAL = 2.2; EXPRESSED IN FETAL LIVER, SIGNAL = 1.2; EXPRESSED IN PLACENTA, SIGNAL = 1.5; EXPRESSED IN HEART, SIGNAL = 1.1; EXPRESSED IN HELA, SIGNAL = 1.2; NT HIT: U78027.1, EVALUE 1.00e-110; EST_HUMAN HIT: AI124095.1, EVALUE 1.00e-86; SWISSPROT HIT: P08547, EVALUE 3.00e-35
caaaaagaaccttcaaaaccagacaaatacatggaaattaaataacctgctcctgagtgatcattgggtcaacaatgaaatcaagatggaaattttaaaattcttcaaaccaaatgataatagtgacacaacctatcaaaacctctgggagacagcaaaggcggtgctaagaggaaagttcatagccctaaatgcttacatcaaaaagtctgaaagagcacaaatagacaatctaaggtcacacctcaaggaactagagaaacaagaacaaaccaaacccaaacccagcagaagaaagaaa

SEQ ID NO: 19830 - DNA, 300 bp, Homo sapiens
  MAP TO AL033377.2; EXPRESSED IN BT474, SIGNAL = 2.3; EXPRESSED IN BONE MARROW, SIGNAL = 2.9; EXPRESSED IN HBL100, SIGNAL = 2.6; EXPRESSED IN PLACENTA, SIGNAL = 2.3; EXPRESSED IN HELA, SIGNAL =   3; EXPRESSED IN FETAL LIVER, SIGNAL = 2.8; EXPRESSED IN ADULT LIVER, SIGNAL = 2.7; EXPRESSED IN BRAIN, SIGNAL = 2.2; EXPRESSED IN LUNG, SIGNAL = 2.7; EXPRESSED IN HEART, SIGNAL = 2.6; EST_HUMAN HIT: BE151322.1, EVALUE 7.00e-08; SWISSPROT HIT: Q09708, EVALUE 1.80e+00; NT HIT: X00856.1, EVALUE 7.00e-10
caaggtacacagctttgggatgtgggaagacactggaggacctggagaaaccccatgaagacaaggggagaacatgcagaccctacgcagacaggggacctggccaggcattgagtcgtctcctcatcaactttgtaatgaagctctgttgaatgaaatgatgttactcaaggacctgctgtgtacactaagaaagtctttaaagctacttttcacaaacagatatttcaggatatgggtaatctggggattcccacaaataatgatcttttttatgttttccattacattcccaagaaa

SEQ ID NO: 19831 - DNA, 212 bp, Homo sapiens
  MAP TO AL035462.17; EXPRESSED IN BT474, SIGNAL = 2.1; EXPRESSED IN LUNG, SIGNAL = 2.4; EXPRESSED IN BRAIN, SIGNAL = 2.1; EXPRESSED IN BONE MARROW, SIGNAL = 2.2; EXPRESSED IN HBL100, SIGNAL = 2.6; EXPRESSED IN HEART, SIGNAL = 1.9; EXPRESSED IN ADULT LIVER, SIGNAL = 2.4; EXPRESSED IN FETAL LIVER, SIGNAL =   2; EXPRESSED IN PLACENTA, SIGNAL = 2.1; EXPRESSED IN HELA, SIGNAL = 2.2; NT HIT: gi6753963, EVALUE 5.00e-07; EST_HUMAN HIT: BE253433.1, EVALUE 1.00e-94; SWISSPROT HIT: Q00808, EVALUE 1.50e+00
tgcggatctcggccgtggcgtacttggggatcatggagtcggtggtgagctcgggatgcaggatgcagccatgcgtgtaggcatccatgggcagtgcgtccagcagctcccggtactgcagcacccgtgcgtgctgcaggctgcccacctcgggcatcagggccaccacgtgctctgtgggcaccgccaggggctgggcagggaagccagag

SEQ ID NO: 19832 - DNA, 185 bp, Homo sapiens
  MAP TO AL031076.1; EXPRESSED IN LUNG, SIGNAL = 3.3; EXPRESSED IN HBL100, SIGNAL = 2.9; EXPRESSED IN HEART, SIGNAL = 2.4; EXPRESSED IN BT474, SIGNAL = 2.5; EXPRESSED IN BRAIN, SIGNAL = 2.7; EXPRESSED IN BONE MARROW, SIGNAL = 2.7; EXPRESSED IN PLACENTA, SIGNAL = 2.9; EXPRESSED IN HELA, SIGNAL =   3; EXPRESSED IN ADULT LIVER, SIGNAL = 3.2; EXPRESSED IN FETAL LIVER, SIGNAL = 3.7; EST_HUMAN HIT: BE835556.1, EVALUE 1.00e-02; SWISSPROT HIT: Q09625, EVALUE 1.30e+00
acagccaccccagggctgtggccgggtgtgttgtgggtctccagcttctcccagacctcacgactctggaagctgaggtgagccctgaagaggcaacagcagaagcccacagcagaggagacggcagcttgggccaggacggtggccctgggcacggaggagggatggacatagggagcttgcag

SEQ ID NO: 19833 - DNA, 141 bp, Homo sapiens; identical to SEQ ID NO: 19111
  MAP TO AL035553.13; EXPRESSED IN PLACENTA, SIGNAL = 6.2; EXPRESSED IN LUNG, SIGNAL = 5.6; EXPRESSED IN BRAIN, SIGNAL = 5.2; EXPRESSED IN HELA, SIGNAL = 4.6; EXPRESSED IN HBL100, SIGNAL =   5; EXPRESSED IN ADULT LIVER, SIGNAL = 4.7; EXPRESSED IN HEART, SIGNAL = 4.4; EXPRESSED IN BT474, SIGNAL = 6.6; EXPRESSED IN FETAL LIVER, SIGNAL = 4.6; EXPRESSED IN BONE MARROW, SIGNAL = 5.5; SWISSPROT HIT: P04116, EVALUE 4.00e-21; EST_HUMAN HIT: AV723893.1, EVALUE 7.00e-74; NT HIT: AJ006976.1, EVALUE 4.00e-74

SEQ ID NO: 19834 - DNA, 417 bp, Homo sapiens; identical to SEQ ID NO: 3053
  MAP TO AL022722.1; EXPRESSED IN BONE MARROW, SIGNAL =   1; EXPRESSED IN LUNG, SIGNAL = 1.1; EXPRESSED IN HELA, SIGNAL =   1; EXPRESSED IN PLACENTA, SIGNAL = 1.1; EXPRESSED IN BT474, SIGNAL = 1.1; EXPRESSED IN HBL100, SIGNAL = 1.1; EXPRESSED IN HEART, SIGNAL =   1; EST_HUMAN HIT: AW974531.1, EVALUE 2.60e-01

SEQ ID NO: 19835 - DNA, 132 bp, Homo sapiens
  MAP TO AC007100.2; EXPRESSED IN HEART, SIGNAL = 1.7; EXPRESSED IN LUNG, SIGNAL = 2.2; EXPRESSED IN BRAIN, SIGNAL = 1.3; EXPRESSED IN BONE MARROW, SIGNAL = 1.5; EXPRESSED IN PLACENTA, SIGNAL = 1.7; EXPRESSED IN HELA, SIGNAL =   2; EXPRESSED IN HBL100, SIGNAL = 1.7; EXPRESSED IN BT474, SIGNAL =   2; EXPRESSED IN ADULT LIVER, SIGNAL =   2; EXPRESSED IN FETAL LIVER, SIGNAL = 1.9; SWISSPROT HIT: P21004, EVALUE 1.80e+00; NT HIT: AF250369.1, EVALUE 3.90e+00
cttgtgattagtggcatttatgtataaagtgactacctgggattcagtcttctgtctggatccaggaaagaattgttctctctggagcaaagggtgctctaatctgctgtctgcttcttctagcatcaagtt

SEQ ID NO: 19836 - DNA, 436 bp, Homo sapiens; identical to SEQ ID NO: 3055
  MAP TO AL022165.1; EXPRESSED IN BONE MARROW, SIGNAL = 1.1; EXPRESSED IN BRAIN, SIGNAL = 1.7; EXPRESSED IN PLACENTA, SIGNAL = 1.3; EXPRESSED IN HBL100, SIGNAL = 1.7; EXPRESSED IN HELA, SIGNAL = 1.3; EXPRESSED IN HEART, SIGNAL = 1.1; EXPRESSED IN BT474, SIGNAL = 1.5; SWISSPROT HIT: P17678, EVALUE 1.90e+00; EST_HUMAN HIT: BE743299.1, EVALUE 1.00e-32; NT HIT: gi11429852, EVALUE 4.00e-31

SEQ ID NO: 19837 - DNA, 113 bp, Homo sapiens
  MAP TO AL031906.1; EXPRESSED IN BONE MARROW, SIGNAL = 3.1; EXPRESSED IN PLACENTA, SIGNAL = 3.5; EXPRESSED IN HBL100, SIGNAL =   3; EXPRESSED IN ADULT LIVER, SIGNAL = 4.3; EXPRESSED IN BRAIN, SIGNAL =   3; EXPRESSED IN LUNG, SIGNAL = 3.2; EXPRESSED IN HEART, SIGNAL = 2.6; EXPRESSED IN HELA, SIGNAL = 3.2; EXPRESSED IN BT474, SIGNAL = 3.2; EXPRESSED IN FETAL LIVER, SIGNAL = 3.3; NT HIT: D78170.1, EVALUE 9.80e-01; SWISSPROT HIT: P73528, EVALUE 4.00e+00
gagttaatatgactgattcgattgacccgaacaaaggcaaatgctgtaggatgacctggaagaccatgatcattgaagcatggtgccttaaaaagattgccaaggaagtgtga

SEQ ID NO: 19838 - DNA, 216 bp, Homo sapiens
  MAP TO AC007124.1; EXPRESSED IN HELA, SIGNAL = 5.7; EXPRESSED IN ADULT LIVER, SIGNAL = 4.9; EXPRESSED IN BT474, SIGNAL = 4.5; EXPRESSED IN LUNG, SIGNAL = 5.9; EXPRESSED IN BRAIN, SIGNAL = 3.5; EXPRESSED IN BONE MARROW, SIGNAL = 4.3; EXPRESSED IN PLACENTA, SIGNAL = 6.1; EXPRESSED IN HEART, SIGNAL = 3.7; EXPRESSED IN HBL100, SIGNAL = 4.6; EXPRESSED IN FETAL LIVER, SIGNAL = 5.2; NT HIT: AF055066.1, EVALUE 5.00e-04; SWISSPROT HIT: P38691, EVALUE 1.20e+00; EST_HUMAN HIT: AI218983.1, EVALUE 9.00e-06
ctgcatcaaccagaagttttttgttgcttcccatgtcgtcttgaccacctagaatgcttgtcacctggttgcctcctgcttctcctgcagttattatctggtaatgtctggagatgtttttgtttttcacattagggggtaaggcactactcaaatcttgtgggtagaggccaggtgtcttagtccattttgtgttgctacaaagaatacctgagg

SEQ ID NO: 19839 - DNA, 196 bp, Homo sapiens
  MAP TO AL032818.2; EXPRESSED IN BT474, SIGNAL =   4; EXPRESSED IN BRAIN, SIGNAL = 4.7; EXPRESSED IN BONE MARROW, SIGNAL = 4.6; EXPRESSED IN HEART, SIGNAL = 3.6; EXPRESSED IN PLACENTA, SIGNAL = 4.2; EXPRESSED IN ADULT LIVER, SIGNAL = 6.2; EXPRESSED IN FETAL LIVER, SIGNAL = 3.9; EXPRESSED IN LUNG, SIGNAL = 4.2; EXPRESSED IN HELA, SIGNAL = 4.8; EXPRESSED IN HBL100, SIGNAL = 4.2; NT HIT: AJ225896.1, EVALUE 3.90e-01; EST_HUMAN HIT: AA868156.1, EVALUE 6.90e-01; SWISSPROT HIT: P51532, EVALUE 4.90e+00
ttataaccatagaaatttattttccatgtgctgtcccatcttcttgatgagacagatgtttaacagctggagaactggacccatctttgtccccatcttgcctagcaacagaaggtggtcactaatcagggattttcgagcccgttgcttaaggccgtcgttgacccaaaggatagtgagtccctgctcctcttcc

SEQ ID NO: 19840 - DNA, 106 bp, Homo sapiens
  MAP TO AL078624.22; EXPRESSED IN BONE MARROW, SIGNAL = 6.1; EXPRESSED IN HBL100, SIGNAL = 6.1; EXPRESSED IN PLACENTA, SIGNAL = 5.1; EXPRESSED IN LUNG, SIGNAL = 6.2; EXPRESSED IN HELA, SIGNAL = 6.4; EXPRESSED IN ADULT LIVER, SIGNAL = 7.3; EXPRESSED IN HEART, SIGNAL = 5.1; EXPRESSED IN BT474, SIGNAL = 5.8; EXPRESSED IN FETAL LIVER, SIGNAL = 5.8; EXPRESSED IN BRAIN, SIGNAL = 5.8; EST_HUMAN HIT: AA169851.1, EVALUE 3.00e-44; SWISSPROT HIT: Q17308, EVALUE 3.10e+00
cctgtttggttcagaccgcacagtccctgctttgcagggcttcagggaccacaccaaggaaggccactgtgaacatcataaatggcacgctgaatggcactcattg

SEQ ID NO: 19841 - DNA, 223 bp, Homo sapiens
  MAP TO AL031119.1; EXPRESSED IN PLACENTA, SIGNAL = 1.7; EXPRESSED IN BT474, SIGNAL = 1.8; EXPRESSED IN FETAL LIVER, SIGNAL = 1.9; EXPRESSED IN BONE MARROW, SIGNAL = 1.8; EXPRESSED IN LUNG, SIGNAL = 1.9; EXPRESSED IN HELA, SIGNAL = 2.3; EXPRESSED IN HEART, SIGNAL = 1.4; EXPRESSED IN HBL100, SIGNAL = 2.5; EXPRESSED IN ADULT LIVER, SIGNAL = 1.9; EXPRESSED IN BRAIN, SIGNAL = 1.5; SWISSPROT HIT: P52739, EVALUE 7.00e-37; NT HIT: U09410.1, EVALUE 3.00e-79; EST_HUMAN HIT: F08171.1, EVALUE 9.00e-77
ctgtatgttttctaagatgttctttaaaatgtccagaacagtcaaactgcttctcacagtactgacatacataaactttcttcccagttctttgcttcttagtgactccaccttcttcaagatggtaacaatttaggtgctgtttccatgtgctctcccaaagatacctttcattgcatatttcacacttgaaactctcagtagagtgtgatttcatgcgttc

SEQ ID NO: 19842 - DNA, 277 bp, Homo sapiens
  MAP TO AL031133.1; EXPRESSED IN PLACENTA, SIGNAL = 2.9; EXPRESSED IN HEART, SIGNAL = 2.6; EXPRESSED IN BT474, SIGNAL = 3.5; EXPRESSED IN BRAIN, SIGNAL = 2.6; EXPRESSED IN BONE MARROW, SIGNAL = 3.2; EXPRESSED IN LUNG, SIGNAL = 4.7; EXPRESSED IN HELA, SIGNAL = 3.9; EXPRESSED IN HBL100, SIGNAL = 7.5; EXPRESSED IN ADULT LIVER, SIGNAL = 2.4; EXPRESSED IN FETAL LIVER, SIGNAL =   3; EST_HUMAN HIT: BF106334.1, EVALUE 1.00e-107; NT HIT: gi5902097, EVALUE 1.00e-107; SWISSPROT HIT: P55855, EVALUE 1.00e-39
ctcccgtaggctgttgaaacacatcaattgtatcttcatcttccatttccaactgtgcaggtttgtctgttccactgattggttgcccaccaaatcggaatctgatctgcttcactgacaatccccgtggttcacaataggctttcattagtttactaagtggtgtctgcctcttaatcttaaactgcaccacagaaccatcctgtcccgccaccttcaaattaatatgattgttgttctcagtcttgacttcttctgtgggcttttcgttggccat

SEQ ID NO: 19843 - DNA, 422 bp, Homo sapiens
  MAP TO AL035669.28; EXPRESSED IN HBL100, SIGNAL =   1; EXPRESSED IN HEART, SIGNAL = 1.2; EXPRESSED IN BT474, SIGNAL = 1.1; EXPRESSED IN BRAIN, SIGNAL = 1.2; EXPRESSED IN BONE MARROW, SIGNAL =   1; NT HIT: gi7110600, EVALUE 2.30e-01; EST_HUMAN HIT: AA781996.1, EVALUE 6.80e-02; SWISSPROT HIT: P41809, EVALUE 8.20e-01
ggacagcaggccgagcccatggtgtgcgccgtcagcatgggctctgcagcctccgacccatgtgcggcctgcccggaccctcgctcctccgtgtgcggctcgcctggaccctcgctcctttgggccgtcactctccctactttgtagacctggaatgccatccctgccccagctccactgcccatgggtggccatccagcagccacggtggagtacacgctgcactgtggtgcccaggggccctctatcacggcaggactccccaacgcgatgtccccggggttcactgccccagccctcagtggcctgcctctctaggcattgcactggcagaagaaaatgttctcgtccaagctcacagccaccaaggtcacaggctaccaaggtcatggccacccacaccgggcagctgacctccagga

SEQ ID NO: 19844 - DNA, 90 bp, Homo sapiens
  MAP TO AL079338.13; EXPRESSED IN BONE MARROW, SIGNAL = 6.6; EXPRESSED IN PLACENTA, SIGNAL = 7.3; EXPRESSED IN HEART, SIGNAL = 6.2; EXPRESSED IN LUNG, SIGNAL = 7.2; EXPRESSED IN BRAIN, SIGNAL = 6.7; EXPRESSED IN HELA, SIGNAL = 6.9; EXPRESSED IN HBL100, SIGNAL = 6.9; EXPRESSED IN ADULT LIVER, SIGNAL = 8.7; EXPRESSED IN BT474, SIGNAL = 6.9; EXPRESSED IN FETAL LIVER, SIGNAL = 7.6; NT HIT: AF218909.1, EVALUE 2.50e+00; EST_HUMAN HIT: AA075418.1, EVALUE 1.20e-02; SWISSPROT HIT: Q03469, EVALUE 7.30e+00
actttatctccatttttgcagatgaagaaatcaaggctgtgggagatcaaagtcacttccctgaagtcacacagttcgtggcagagctga

SEQ ID NO: 19845 - DNA, 381 bp, Homo sapiens
  MAP TO AC007198.6; EXPRESSED IN HEART, SIGNAL = 1.8; EXPRESSED IN PLACENTA, SIGNAL =   1; EXPRESSED IN HBL100, SIGNAL = 0.92; EXPRESSED IN ADULT LIVER, SIGNAL = 1.1; EXPRESSED IN BT474, SIGNAL = 0.94; EXPRESSED IN FETAL LIVER, SIGNAL =   1; EXPRESSED IN BONE MARROW, SIGNAL = 0.98; EXPRESSED IN BRAIN, SIGNAL = 1.6; SWISSPROT HIT: P12021, EVALUE 2.10e-02; NT HIT: gi8922205, EVALUE 1.00e-119; EST_HUMAN HIT: AA418099.1, EVALUE 4.00e-74
ggcctccccggagttccagcagtgaccctgactttgtggtggtagacggcgtgcccgtcatgctcccgtcctatgacgaagctgtgagtggtggcttgagtgccttaggccccgggtacatggcctctgtgggccagggctgccccttacccgtggacgaccagagccccccagcataccccggctcaggggacacggacacaggcccaggggagtcagaaacctgtgacagcgtctcaggctcttctgagctgctccaaagtctgtattcacctcccaggtgccaagagagcacccaccctgcttcggacaaccctgacataattgccagcacggcagaggaggtggcatccaccagcccaggcatcgacattgcagatg

SEQ ID NO: 19846 - DNA, 108 bp, Homo sapiens
  MAP TO AL031228.1; EXPRESSED IN BT474, SIGNAL = 6.3; EXPRESSED IN HEART, SIGNAL = 6.8; EXPRESSED IN FETAL LIVER, SIGNAL =  10; EXPRESSED IN ADULT LIVER, SIGNAL =  11; EXPRESSED IN LUNG, SIGNAL =   9; EXPRESSED IN BONE MARROW, SIGNAL = 7.1; EXPRESSED IN BRAIN, SIGNAL = 7.4; EXPRESSED IN HELA, SIGNAL =  12; EXPRESSED IN PLACENTA, SIGNAL =  10; EXPRESSED IN HBL100, SIGNAL = 7.8; SWISSPROT HIT: P41178, EVALUE 9.10e+00; NT HIT: U32169.1, EVALUE 1.00e-45; EST_HUMAN HIT: AI926176.1, EVALUE 2.00e-04
ggctcccctggggaacgaggtgcagcaggatcagggggacccattggtccgccagggcgcccaggcccgcagggtccccctggagcagcaggagagaaaggtgtccca

SEQ ID NO: 19847 - DNA, 215 bp, Homo sapiens
  MAP TO AC007284.2; EXPRESSED IN BRAIN, SIGNAL = 4.6; EXPRESSED IN HELA, SIGNAL = 4.9; EXPRESSED IN PLACENTA, SIGNAL = 4.6; EXPRESSED IN ADULT LIVER, SIGNAL = 5.7; EXPRESSED IN LUNG, SIGNAL = 4.6; EXPRESSED IN BONE MARROW, SIGNAL = 3.9; EXPRESSED IN HEART, SIGNAL = 3.7; EXPRESSED IN HBL100, SIGNAL = 4.4; EXPRESSED IN FETAL LIVER, SIGNAL =   4; EXPRESSED IN BT474, SIGNAL = 4.2; NT HIT: Y13932.1, EVALUE 1.00e-118; EST_HUMAN HIT: AA339493.1, EVALUE 3.30e-02; SWISSPROT HIT: P08680, EVALUE 3.10e-01
ttaaggataagaaatttaaaactacagaaatgctaactgatagacgtgttaaattcagacgtactggcttctgtttcatggaacctatgtttatttcttctgctgtcccacatttaattgataacaacatcactacaagtataagaaaaggaagcagagtgaggtttacggatgagcacttgggagggatttcagaggtcgtgatggccacagtg

SEQ ID NO: 19848 - DNA, 93 bp, Homo sapiens
  MAP TO AC007156.2; EXPRESSED IN BT474, SIGNAL = 1.6; EXPRESSED IN FETAL LIVER, SIGNAL = 1.9; EXPRESSED IN BONE MARROW, SIGNAL = 1.7; EXPRESSED IN BRAIN, SIGNAL = 1.2; EXPRESSED IN LUNG, SIGNAL = 2.8; EXPRESSED IN PLACENTA, SIGNAL = 1.7; EXPRESSED IN HEART, SIGNAL = 1.9; EXPRESSED IN HELA, SIGNAL = 1.8; EXPRESSED IN HBL100, SIGNAL = 1.4; EXPRESSED IN ADULT LIVER, SIGNAL = 2.2; NT HIT: AF081514.1, EVALUE 1.70e-01; SWISSPROT HIT: O08770, EVALUE 9.20e+00; EST_HUMAN HIT: W25728.1, EVALUE 2.90e-01
ctgtccagaagaagagggaagccaacaatgaggaaccctgggcttggaggccattgttcgccatgggacagaatcccaaaaccagggcagtgg

SEQ ID NO: 19849 - DNA, 1735 bp, Homo sapiens
  MAP TO AL034380.22; EXPRESSED IN BRAIN, SIGNAL = 3.2; EXPRESSED IN LUNG, SIGNAL = 3.3; EXPRESSED IN HELA, SIGNAL = 4.8; EXPRESSED IN PLACENTA, SIGNAL = 4.7; EXPRESSED IN HEART, SIGNAL = 2.8; EXPRESSED IN ADULT LIVER, SIGNAL = 1.6; EXPRESSED IN BT474, SIGNAL = 4.3; EXPRESSED IN BONE MARROW, SIGNAL = 4.2; EXPRESSED IN HBL100, SIGNAL = 3.5; EXPRESSED IN FETAL LIVER, SIGNAL = 3.6; SWISSPROT HIT: Q9Y4H2, EVALUE 5.00e-04; NT HIT: AF231056.1, EVALUE 0.00e+00; EST_HUMAN HIT: BE251304.1, EVALUE 0.00e+00
tcatgactggccaatcaaaaacagtacatcacaaatgacttgtgaaaccaatgagttcatcaacggtgataccgagatgtccaacagccgtgattcgtacagagtaaactctgagtggttctcgtccaccttggccaaggcaagcagcgcgcgggcagcccgccgcatcatgtccacactagttggctcaaagggtgggttctgcatgtggaggaggctggcctggctctgctggaactgtgtggcggcaaggctgtcctctaggaagcccaggaggttgccgatactgcccttctgcactgcaatggcacgagctgccaggctgtccccctgagccaggttggccagcagtaccacagccatctcccggcacaccgggttctttcggtcactgaggaagcgcaccatagtgctatacaacttctccaggcggctgaaggggggtgtggccagaatcaggtccacattgttgtcctggatgctgagtttgctgagggtttccaagaccagtctctgcggggaaaggacggcattggggcccagggtggaaaaggggtcctgggcttcagctgaagggcaaactgcccagtgtaggagtccgtccaggacaggcaggcaaatgctctcggggtatggagataggtccaactgccccgagatgttggcgagtgtaaccaaggtgttttcccggagcatctccaagcagtcccaccaccactccactttgttgcagctcaccccttggtcctgttcctcctccttttcataagttagtggtgcctgcttccgttctgggtgcttgtggtgcagcaggatcagcttgcccaggatgagcagcagccctgggtgtttggacatctcaaagtcattgcctggcacaaatgacaggcttcgaatggtattggacacacagacgcagcgcttggcaagagaatcctgccagtccagaagggtacacagtggggtctcatccttactgtggggttcgtcctctaggatcttgatgttccggtggctctgtgctgggctaatgccaaatggaaacttgctgctctccttgatggcctctgaactcttagctccatcctcggtcaaggtgctagaccgagtagacaacatgtcatccatagtggctgtgatccgtttttctggaggtccatcaggtgggggcccctcctggtctgttgtccctggtgtaccctctgctgttgtcacatgcttccgaggggctggtgggcagggtgcgtgaggccgggaaggcagcagctctgtcttgctctcgaagtgggtctggatatgctcagtggtgtcccccccaccaatccgccagtgcagcaggccactgtcaaactcctgcacacgcccaagcttatctgagcagtccaccacaaatggatcattcttctgtacgatctttactggaagcttgtcaaacttactgatcagcttctcctcactattctctgaagctggcttgtccttgcctgaaaaggctatctcctcatcattttcaactacttcctcttcttcttcctcttctagtttaggacctagaagttcttcttcttcttccccaccctccatgggagctggactagacaccttgctgaacctcccaggatccagtagcgttctctgtcctgggtcacccacctcatactcctttaaaatgccaaagatctcaatcaggcatcgtcggaaatattctacaaggagctctagcaaccctgggagc

SEQ ID NO: 19850 - DNA, 688 bp, Homo sapiens
  MAP TO AC010183.6; EXPRESSED IN BRAIN, SIGNAL = 7.8; EXPRESSED IN LUNG, SIGNAL = 5.4; EXPRESSED IN HELA, SIGNAL =  10; EXPRESSED IN PLACENTA, SIGNAL =  10; EXPRESSED IN ADULT LIVER, SIGNAL = 4.5; EXPRESSED IN FETAL LIVER, SIGNAL = 5.3; EXPRESSED IN BT474, SIGNAL =   5; EXPRESSED IN BONE MARROW, SIGNAL = 4.7; EXPRESSED IN HEART, SIGNAL =   4; EXPRESSED IN HBL100, SIGNAL = 5.9; NT HIT: AF149773.1, EVALUE 0.00e+00; EST_HUMAN HIT: BE150340.1, EVALUE 0.00e+00; SWISSPROT HIT: P10272, EVALUE 4.00e-36
ctccttaagctgtactcactctttgttgaatttcccagttaccattgttcctggcccggacttcaatctggcctcccacattattcctgataccacacctgacccccatgactgttatctctctgatacacctggcattcactccatttcccatatttccttctttgctattcctcaccctgatcacacctggtttattgatggcagttccaccacgcctaatcgccacacaccagcaaaggcaggctatgctatagtaccttccacatctatcattgaggctgctgctctgccgccctccgctacctctcggcaagccaaactcattgccttaactcgaaccctcactcttgcaaaggaattatgtgtcaatatttatactgactctaaatatgccttccatatcctgcaccaccatgctgttatatgggctgaaagaggtttcctcactaagcaagggtggtccaacattaatgcctctttaataaaaactcttctcaaggccactttacttccaaaggaagctggagtcatacactgcaagggccaccaaaaggcatcagatcccatcgctcagggcaacacttatgctgataagatagctaaagaagcagctagcggtccaacttctgtccctcatggccagtttttctcctcatcttgtcactcccacctactctcccactga

SEQ ID NO: 19851 - DNA, 454 bp, Homo sapiens
  MAP TO AL031864.1; EXPRESSED IN BT474, SIGNAL = 2.6; EXPRESSED IN BONE MARROW, SIGNAL = 1.9; EXPRESSED IN HBL100, SIGNAL = 5.9; EXPRESSED IN PLACENTA, SIGNAL = 1.3; EXPRESSED IN HELA, SIGNAL = 4.2; EXPRESSED IN FETAL LIVER, SIGNAL = 3.1; EXPRESSED IN BRAIN, SIGNAL = 2.5; EXPRESSED IN LUNG, SIGNAL = 3.3; EXPRESSED IN HEART, SIGNAL = 3.4; NT HIT: gi11426272, EVALUE 1.00e-25; EST_HUMAN HIT: AW021371.1, EVALUE 1.00e-25; SWISSPROT HIT: P11174, EVALUE 1.00e-24
atgaagctgcaccgtggcctgtggcagaagcagcactcgctgctgaagcgcctgcgcaagggcaagaagtgggcactgcctatgcagaagctggaggtggtgaacgcgcacctgcaggatatgatcatcctgcccgagatgggagacaagacggtgggtagcatggtgggcgtctacaatggcaaggccttcaaccaagtggagggcaagcccgagaggattggccattacctcgatcacctacaagctcgtgaagcactgcccggccaggcatcagagccacccactcttcctgcttcaccaccctcaaggattctgctcagccagtaaaggcacacacacttcttaaataaataaataaataacaaaatgtcttttctcatggaaatgtgaatgattgcaatattttgtggagctaagggttttaattagtcagattcgttctatttatgaa

SEQ ID NO: 19852 - DNA, 132 bp, Homo sapiens
  MAP TO AL049176.3; EXPRESSED IN PLACENTA, SIGNAL =  13; EXPRESSED IN HELA, SIGNAL =  13; EXPRESSED IN HEART, SIGNAL =  10; EXPRESSED IN ADULT LIVER, SIGNAL =  17; EXPRESSED IN BT474, SIGNAL =  11; EXPRESSED IN LUNG, SIGNAL =  13; EXPRESSED IN BRAIN, SIGNAL =  10; EXPRESSED IN BONE MARROW, SIGNAL =  11; EXPRESSED IN HBL100, SIGNAL =  11; EXPRESSED IN FETAL LIVER, SIGNAL =  13; SWISSPROT HIT: Q03247, EVALUE 6.80e+00; NT HIT: AJ271736.1, EVALUE 6.00e-15; EST_HUMAN HIT: AI144166.1, EVALUE 2.00e-27
atggactctttcacaaaagatttctttgtgagtgtaatgctgttttgtagcattttacccacagtagaacttcttccaaaattggagtcaattctctcaagccctgctgctgctttatcaattaagtttata

SEQ ID NO: 19853 - DNA, 154 bp, Homo sapiens
  MAP TO AC007321.1; EXPRESSED IN PLACENTA, SIGNAL = 1.1; EXPRESSED IN BT474, SIGNAL = 0.95; EXPRESSED IN LUNG, SIGNAL = 1.1; EXPRESSED IN BRAIN, SIGNAL = 1.2; EXPRESSED IN HELA, SIGNAL = 1.1; EXPRESSED IN HEART, SIGNAL = 0.95; EXPRESSED IN ADULT LIVER, SIGNAL = 1.7; EXPRESSED IN FETAL LIVER, SIGNAL = 1.2; EXPRESSED IN BONE MARROW, SIGNAL = 0.99; NT HIT: AB020681.1, EVALUE 1.20e+00; SWISSPROT HIT: Q15750, EVALUE 3.00e+00; EST_HUMAN HIT: AI961026.1, EVALUE 2.10e+00
atgggaaataggctttactgaattatccatttgggctgtaattaatttcagtgatgagcgggagatgttgttagttgtgctcagtaactttttgatagtagcgggagtaggagtaaatcttgtactaattagtgaatattctgttgatggtggc

SEQ ID NO: 19854 - DNA, 140 bp, Homo sapiens
  MAP TO AL109956.13; EXPRESSED IN BT474, SIGNAL = 4.5; EXPRESSED IN HELA, SIGNAL = 5.1; EXPRESSED IN HBL100, SIGNAL =   5; EXPRESSED IN ADULT LIVER, SIGNAL = 6.4; EXPRESSED IN FETAL LIVER, SIGNAL = 4.3; EXPRESSED IN BRAIN, SIGNAL =   4; EXPRESSED IN LUNG, SIGNAL = 5.8; EXPRESSED IN BONE MARROW, SIGNAL = 5.4; EXPRESSED IN PLACENTA, SIGNAL = 7.5; EXPRESSED IN HEART, SIGNAL = 3.7; EST_HUMAN HIT: AW513296.1, EVALUE 9.00e-14; NT HIT: AB038162.1, EVALUE 9.00e-14
gtttcagcctcatttccagctcctgtttaagatggagttgctctggttcacacgcctctgatactagaatgcctaggacccggttctcaacagagaagcacggtggcctgagagtcaatgaaacaatggccacagcaggc

SEQ ID NO: 19855 - DNA, 406 bp, Homo sapiens
  MAP TO AL031447.4; EXPRESSED IN HEART, SIGNAL = 4.2; EXPRESSED IN PLACENTA, SIGNAL = 3.9; EXPRESSED IN BT474, SIGNAL = 3.2; EXPRESSED IN ADULT LIVER, SIGNAL = 4.9; EXPRESSED IN BRAIN, SIGNAL = 3.4; EXPRESSED IN LUNG, SIGNAL = 4.2; EXPRESSED IN BONE MARROW, SIGNAL = 2.8; EXPRESSED IN HELA, SIGNAL = 4.3; EXPRESSED IN HBL100, SIGNAL = 3.2; EXPRESSED IN FETAL LIVER, SIGNAL = 4.4; NT HIT: gi11421399, EVALUE 0.00e+00; EST_HUMAN HIT: BE836843.1, EVALUE 2.00e-09; SWISSPROT HIT: Q04652, EVALUE 5.00e-09
gtgggtccgatggctcccggctctatgactgcgtgtggaggtacaactcaagcgtgaatgagtgggcggaggtggcgcccatgctgaaggcccgcgagtaccacagctcctctgtgctggacggactgctgtacgtggtggccgccgacagcaccgagcgctatgaccacaccactgactcctgggaggccctgcagcccatgacctaccccatggacaactgctccaccactgcgtgccgtggccggctctatgccatcggctccctggctggcaaggagaccatggtgatgcagtgctacgacccggacaccgacctgtggtcgctggtggactgcggccagctcccgccctggtccttcgcccccaagactgcgactctaaacggactcatgtactttgtcag

SEQ ID NO: 19856 - DNA, 355 bp, Homo sapiens
  MAP TO AL031983.1; EXPRESSED IN BRAIN, SIGNAL = 1.2; EXPRESSED IN HELA, SIGNAL = 1.5; EXPRESSED IN HEART, SIGNAL = 1.6; EXPRESSED IN LUNG, SIGNAL = 1.4; EXPRESSED IN BONE MARROW, SIGNAL = 1.6; EXPRESSED IN PLACENTA, SIGNAL = 1.3; EXPRESSED IN HBL100, SIGNAL = 1.4; EXPRESSED IN BT474, SIGNAL = 1.3; EXPRESSED IN ADULT LIVER, SIGNAL = 1.4; EXPRESSED IN FETAL LIVER, SIGNAL = 1.5; NT HIT: AF042075.1, EVALUE 0.00e+00; EST_HUMAN HIT: AI023490.1, EVALUE 1.00e-67; SWISSPROT HIT: Q15062, EVALUE 2.00e-47
actctaccagcccaatgacccaggccacagatgccagctgccagcacaggcagaggtggacgatggtggcatggcgcaggggcttgaagatagccatgtagcggtcaaaggccatcaccgtcaggaggatgcactcagtggtccccagggacaggaagatgaagaactggacagagcagcccagtaagatgatggtcttctttggctcccagaggttgaccagcatcccggggacacaacttatggtgaaacagaggtccaagaaggagaggttggagaggaaaaagtacattggagagtggagcctggggtccagcacagacagcaggatgatgagtccaccggggttaggagg

SEQ ID NO: 19857 - DNA, 97 bp, Homo sapiens
  MAP TO AL033523.12; EXPRESSED IN BT474, SIGNAL = 2.3; EXPRESSED IN ADULT LIVER, SIGNAL = 2.5; EXPRESSED IN FETAL LIVER, SIGNAL = 2.4; EXPRESSED IN LUNG, SIGNAL = 2.5; EXPRESSED IN BONE MARROW, SIGNAL =   2; EXPRESSED IN BRAIN, SIGNAL = 2.3; EXPRESSED IN HEART, SIGNAL = 2.3; EXPRESSED IN PLACENTA, SIGNAL = 2.4; EXPRESSED IN HBL100, SIGNAL = 2.2; EXPRESSED IN HELA, SIGNAL = 2.3; NT HIT: AJ277661.1, EVALUE 5.20e-02; EST_HUMAN HIT: BF525865.1, EVALUE 7.60e-02
gtgggaaaggcgcgcagtgtcatgtccaggcccaactggcagtttgggacactaagtggtggtgaggggccctgccctcagcctgtgcacacttcct

SEQ ID NO: 19858 - DNA, 211 bp, Homo sapiens
  MAP TO AC007324.38; EXPRESSED IN BONE MARROW, SIGNAL = 2.7; EXPRESSED IN LUNG, SIGNAL = 2.3; EXPRESSED IN BRAIN, SIGNAL = 6.2; EXPRESSED IN HELA, SIGNAL = 5.5; EXPRESSED IN HEART, SIGNAL = 2.1; EXPRESSED IN PLACENTA, SIGNAL = 2.9; EXPRESSED IN HBL100, SIGNAL = 7.6; EXPRESSED IN BT474, SIGNAL = 3.7; EXPRESSED IN FETAL LIVER, SIGNAL = 2.8; SWISSPROT HIT: P06605, EVALUE 9.00e-27; EST_HUMAN HIT: AA352021.1, EVALUE 1.00e-114; NT HIT: gi11526303, EVALUE 1.00e-115
gctccagatctatcatgacggcccggggcacatgcttcccattgccagtctcgctgaaaaaggtggtgaaggagtcatcatcgttgatcttgctagcttgagcatcaaaagtgccgtctgcctggatgccgtgttccaggcagaagagctcccagcaggcattgccaatctgaactcccgcttggcccacgtggactgatatgcattcccg

SEQ ID NO: 19859 - DNA, 454 bp, Homo sapiens; identical to SEQ ID NO: 3078
  MAP TO AL031585.1; EXPRESSED IN PLACENTA, SIGNAL =  11; EXPRESSED IN HBL100, SIGNAL = 8.1; EXPRESSED IN BT474, SIGNAL = 7.8; EXPRESSED IN FETAL LIVER, SIGNAL = 9.4; EXPRESSED IN LUNG, SIGNAL = 9.8; EXPRESSED IN HELA, SIGNAL = 9.1; EXPRESSED IN HEART, SIGNAL =  10; EXPRESSED IN ADULT LIVER, SIGNAL =  16; EXPRESSED IN BRAIN, SIGNAL = 8.3; EXPRESSED IN BONE MARROW, SIGNAL = 8.8; NT HIT: AF003528.1, EVALUE 3.00e-07; SWISSPROT HIT: P08548, EVALUE 3.00e-01; EST_HUMAN HIT: BE148710.1, EVALUE 5.00e-10

SEQ ID NO: 19860 - DNA, 172 bp, Homo sapiens
  MAP TO AC007981.31; EXPRESSED IN BT474, SIGNAL = 6.5; EXPRESSED IN FETAL LIVER, SIGNAL = 6.9; EXPRESSED IN BRAIN, SIGNAL = 6.3; EXPRESSED IN HELA, SIGNAL = 7.1; EXPRESSED IN PLACENTA, SIGNAL = 7.3; EXPRESSED IN ADULT LIVER, SIGNAL = 6.3; EXPRESSED IN LUNG, SIGNAL = 7.7; EXPRESSED IN BONE MARROW, SIGNAL = 6.8; EXPRESSED IN HEART, SIGNAL = 5.5; EXPRESSED IN HBL100, SIGNAL = 7.5; NT HIT: gi11427757, EVALUE 4.00e-66; SWISSPROT HIT: Q92794, EVALUE 3.90e-02; EST_HUMAN HIT: BE531263.1, EVALUE 4.00e-11
cttcaggtactcctggatggcctcctcaatgtcccggtccacggaatcgtcactgtctgaatctagcaccaatgggccaaagtctgcagtttcctcctcccccacggggtcaaagtcagcaacaagaccacaggcagccaacgcaggcagctccttgtgcatggtgggcttg

SEQ ID NO: 19861 - DNA, 157 bp, Homo sapiens
  MAP TO AC007189.6; EXPRESSED IN PLACENTA, SIGNAL = 5.3; EXPRESSED IN HELA, SIGNAL = 5.8; EXPRESSED IN HEART, SIGNAL =   4; EXPRESSED IN ADULT LIVER, SIGNAL = 6.3; EXPRESSED IN BT474, SIGNAL = 4.7; EXPRESSED IN FETAL LIVER, SIGNAL = 5.4; EXPRESSED IN BRAIN, SIGNAL = 3.8; EXPRESSED IN BONE MARROW, SIGNAL =   4; EXPRESSED IN HBL100, SIGNAL = 4.8; EXPRESSED IN LUNG, SIGNAL = 6.2; NT HIT: gi4557498, EVALUE 7.00e-36; SWISSPROT HIT: P56545, EVALUE 8.00e-07; EST_HUMAN HIT: BF203385.1, EVALUE 1.00e-35
tgtggatggacatcaaggctggctgtgagctcgggattgctgtgtgcaacatcccttccgagccgaggaagaaacagccgactccaccatctgccacatcctcaatctgtaccggaggaaccgtggctgtacgaggcgctgcgggaaggcacgtggg

SEQ ID NO: 19862 - DNA, 77 bp, Homo sapiens
  MAP TO AL032822.1; EXPRESSED IN BT474, SIGNAL = 1.4; EXPRESSED IN FETAL LIVER, SIGNAL = 1.7; EXPRESSED IN BONE MARROW, SIGNAL = 1.6; EXPRESSED IN HBL100, SIGNAL = 1.7; EXPRESSED IN HELA, SIGNAL = 1.9; EXPRESSED IN HEART, SIGNAL = 1.9; EXPRESSED IN ADULT LIVER, SIGNAL = 1.5; EXPRESSED IN BRAIN, SIGNAL = 1.2; EXPRESSED IN LUNG, SIGNAL = 1.8; EXPRESSED IN PLACENTA, SIGNAL = 2.1; NT HIT: U65942.1, EVALUE 5.20e-01
ctgatgttcttggcaacacaaaaaatagctcccaagaaaaaacagccaaggttataatccatattttacttgctaag

SEQ ID NO: 19863 - DNA, 227 bp, Homo sapiens
  MAP TO AL033538.1; EXPRESSED IN HELA, SIGNAL = 2.2; EXPRESSED IN HEART, SIGNAL = 4.5; EXPRESSED IN PLACENTA, SIGNAL = 2.1; EXPRESSED IN HBL100, SIGNAL = 2.4; EXPRESSED IN BT474, SIGNAL = 1.9; EXPRESSED IN ADULT LIVER, SIGNAL = 1.1; EXPRESSED IN FETAL LIVER, SIGNAL = 2.4; EXPRESSED IN BONE MARROW, SIGNAL =  11; EXPRESSED IN LUNG, SIGNAL = 3.6; EXPRESSED IN BRAIN, SIGNAL = 1.6; SWISSPROT HIT: P96848, EVALUE 3.90e+00
tggagccggctagcggtgttatatcgccctcttgtggcctctggagcagtgcgtgggtgcttgcagccagaagcaggagaatgatccaggccttcccctccacctgggcagcgcaggtgacgggtgccaaaccctcccgagatgacggggtcactgaggctgacctgccacaattcggcatggcccaccggcctcgggtgctggcctccatcaccaccattagcagt

SEQ ID NO: 19864 - DNA, 416 bp, Homo sapiens; identical to SEQ ID NO: 3083
  MAP TO AL031622.1; EXPRESSED IN PLACENTA, SIGNAL = 2.5; EXPRESSED IN BT474, SIGNAL = 2.3; EXPRESSED IN ADULT LIVER, SIGNAL = 2.8; EXPRESSED IN FETAL LIVER, SIGNAL = 2.5; EXPRESSED IN BRAIN, SIGNAL = 2.2; EXPRESSED IN LUNG, SIGNAL = 2.8; EXPRESSED IN BONE MARROW, SIGNAL = 4.1; EXPRESSED IN HEART, SIGNAL = 2.2; EXPRESSED IN HELA, SIGNAL =   6; EXPRESSED IN HBL100, SIGNAL = 2.5; NT HIT: U04489.1, EVALUE 2.00e-78

SEQ ID NO: 19865 - DNA, 124 bp, Homo sapiens
  MAP TO AC008015.5; EXPRESSED IN PLACENTA, SIGNAL = 3.9; EXPRESSED IN HBL100, SIGNAL = 5.1; EXPRESSED IN BT474, SIGNAL = 4.4; EXPRESSED IN LUNG, SIGNAL =   5; EXPRESSED IN BRAIN, SIGNAL = 4.4; EXPRESSED IN HEART, SIGNAL = 3.7; EXPRESSED IN HELA, SIGNAL =   5; EXPRESSED IN ADULT LIVER, SIGNAL = 9.9; EXPRESSED IN FETAL LIVER, SIGNAL = 4.5; EXPRESSED IN BONE MARROW, SIGNAL = 4.2; NT HIT: AF075460.1, EVALUE 1.00e-03; EST_HUMAN HIT: R25984.1, EVALUE 9.00e-64; SWISSPROT HIT: P30594, EVALUE 1.40e+00
gatggggagatcgacctgaaactcctcaccaaagtgctcgcgccggagcacgaagtccgggaggtacagtggtggcagcaattccccggtctctcagctctggcattcccataaccagccgact

SEQ ID NO: 19866 - DNA, 87 bp, Homo sapiens
  MAP TO AL035467.21; EXPRESSED IN PLACENTA, SIGNAL = 1.6; EXPRESSED IN HEART, SIGNAL = 1.3; EXPRESSED IN ADULT LIVER, SIGNAL = 1.1; EXPRESSED IN LUNG, SIGNAL =   1; EXPRESSED IN BRAIN, SIGNAL = 1.8; EXPRESSED IN BONE MARROW, SIGNAL = 1.3; EXPRESSED IN HELA, SIGNAL = 1.9; EXPRESSED IN HBL100, SIGNAL = 2.5; EXPRESSED IN BT474, SIGNAL = 2.1; EXPRESSED IN FETAL LIVER, SIGNAL = 1.3; EST_HUMAN HIT: AW995178.1, EVALUE 1.80e-01; NT HIT: gi11427590, EVALUE 7.10e-01
tttataaaggttcgcaaaggtattctactaaggtggcatgttgttgaggtcaagcccttggagaaagaaatgtttgtgtctcagcat

SEQ ID NO: 19867 - DNA, 111 bp, Homo sapiens
  MAP TO AL031662.24; EXPRESSED IN BT474, SIGNAL = 1.9; EXPRESSED IN ADULT LIVER, SIGNAL = 1.9; EXPRESSED IN FETAL LIVER, SIGNAL = 1.9; EXPRESSED IN LUNG, SIGNAL = 1.6; EXPRESSED IN BONE MARROW, SIGNAL = 1.8; EXPRESSED IN BRAIN, SIGNAL = 1.5; EXPRESSED IN HEART, SIGNAL = 1.6; EXPRESSED IN PLACENTA, SIGNAL = 1.7; EXPRESSED IN HBL100, SIGNAL = 1.5; EXPRESSED IN HELA, SIGNAL = 1.7; EST_HUMAN HIT: AU138025.1, EVALUE 4.00e-56; NT HIT: gi7305306, EVALUE 4.00e-24; SWISSPROT HIT: Q9UGV2, EVALUE 1.00e-16
ataaatcctgtttcaatgcattctttaactttgaggatatgcaagagatcacccagcactttgctgtctgtcatgtggatgccccaggccagcaggaaggtgcaccctctt

SEQ ID NO: 19868 - DNA, 84 bp, Homo sapiens; identical to SEQ ID NO: 18865
  MAP TO AL034372.15; EXPRESSED IN PLACENTA, SIGNAL = 5.3; EXPRESSED IN HBL100, SIGNAL = 4.1; EXPRESSED IN BT474, SIGNAL = 4.4; EXPRESSED IN FETAL LIVER, SIGNAL = 4.3; EXPRESSED IN LUNG, SIGNAL = 5.2; EXPRESSED IN HEART, SIGNAL = 3.6; EXPRESSED IN HELA, SIGNAL = 4.7; EXPRESSED IN ADULT LIVER, SIGNAL = 5.1; EXPRESSED IN BRAIN, SIGNAL = 4.3; EXPRESSED IN BONE MARROW, SIGNAL = 4.4; NT HIT: gi11418489, EVALUE 3.00e-40; EST_HUMAN HIT: AA349381.1, EVALUE 4.00e-40; SWISSPROT HIT: P40123, EVALUE 2.00e-09

SEQ ID NO: 19869 - DNA, 175 bp, Homo sapiens
  MAP TO AC007353.1; EXPRESSED IN FETAL LIVER, SIGNAL = 7.8; EXPRESSED IN BRAIN, SIGNAL =   7; EXPRESSED IN HBL100, SIGNAL = 6.9; EXPRESSED IN HELA, SIGNAL = 7.8; EXPRESSED IN PLACENTA, SIGNAL = 7.7; EXPRESSED IN ADULT LIVER, SIGNAL = 8.4; EXPRESSED IN BT474, SIGNAL = 6.5; EXPRESSED IN LUNG, SIGNAL = 8.9; EXPRESSED IN BONE MARROW, SIGNAL =   7; EXPRESSED IN HEART, SIGNAL = 6.2; EST_HUMAN HIT: AI807484.1, EVALUE 5.00e-59; SWISSPROT HIT: P12234, EVALUE 5.00e+00; NT HIT: AB040962.1, EVALUE 2.00e-05
attataaatttcaggccagcctcttctgtctttcagggtctcgtcagccaacctggatttcatgttcttcagaaaatctctggcctttcttagatgaaactttagtatttcctcatgcctttgatgccttatttggtccaagagctcatcaagttgggcctcctggacctgagat

SEQ ID NO: 19870 - DNA, 1163 bp, Homo sapiens
  MAP TO AC011451.2; EXPRESSED IN PLACENTA, SIGNAL = 1.4; EXPRESSED IN HEART, SIGNAL = 1.4; EXPRESSED IN BT474, SIGNAL = 1.8; EXPRESSED IN LUNG, SIGNAL = 1.3; EXPRESSED IN BRAIN, SIGNAL = 1.2; EXPRESSED IN HELA, SIGNAL = 1.5; EXPRESSED IN HBL100, SIGNAL = 1.7; EXPRESSED IN ADULT LIVER, SIGNAL = 0.96; EXPRESSED IN FETAL LIVER, SIGNAL = 1.4; EXPRESSED IN BONE MARROW, SIGNAL = 1.3; SWISSPROT HIT: Q14585, EVALUE 1.00e-129; NT HIT: gi4507974, EVALUE 6.00e-14; EST_HUMAN HIT: AF150239.1, EVALUE 1.00e-12
aaatcatatggtagagaacatctatgaatgttatgaagaaaatcaagatggacagactttcagccaagttccaaatcttgattcactcaagagaaatactgaagtaaaatcctgtgaatgccatgagtgtggaaaggccttcgtggatcattcatcccttaagagtcacatcaggtctcatactggaagcaaaccctatcagtgcaaggaatgtgggaaggccttccattttcttgcttgtttcaagaagcatatgaaaacccccactgaagagaagccctatgaatgtaaggaatgtaccaaagccttcagctgttcctcattctttagggcacatatgaagattcacatcggaaagacaaactatgaatgtaaagaatgtgggaaaggttttagttgttcctcatcgctcacagaacacaaaagaattcacagtggagataagccttatgaatgtaaggaatgtgggaaggccttcagttgttcctcctcactctccaaacacaaaagaattcacagtggagataagccatatgaatgtaaggaatgtgggaaggcctttagctcttcctctcaccttataatacatataagaattcacactggagagaagccttatgaatgtaaagagtgtgggaaggccttcagcgagtcctcaaaactcactgtacatgggaggacacatactggagagaaaccctataaatgtaaggaatgtgggaaagcctacaattgtccctcctccttaagtatccatatgagaaaacacactggagaaaaaccgtatgaatgtctggaatgtggaaaggccttctaccttcccacttcccttaatacacatgtgaaaaatcaaagtcgagagaaaccctatgaatgtaaggaatgtgggaaggcctttagttgtccctcgtcctttagagcacatgtgagagatcacactggaaagatacagtatgaatgtaaggagtgtgggaagacctttagtcgttcctcatccctcaccgaacacctaagaactcacagcggagagaagccgtatgaatgtaaagaatgtgggaaagcctttattagttcctcccaccttacagtacatatcagaactcacactggagagaaaccctatgaatgtaagaaatgtgggaaagcctttatttatccctcag

SEQ ID NO: 19871 - DNA, 116 bp, Homo sapiens
  MAP TO AC007114.7; EXPRESSED IN LUNG, SIGNAL =   4; EXPRESSED IN PLACENTA, SIGNAL = 4.3; EXPRESSED IN HELA, SIGNAL =   4; EXPRESSED IN ADULT LIVER, SIGNAL = 4.6; EXPRESSED IN BT474, SIGNAL = 3.8; EXPRESSED IN BRAIN, SIGNAL = 3.8; EXPRESSED IN BONE MARROW, SIGNAL = 2.9; EXPRESSED IN HEART, SIGNAL = 3.7; EXPRESSED IN HBL100, SIGNAL = 3.7; EXPRESSED IN FETAL LIVER, SIGNAL = 4.7; NT HIT: U34074.1, EVALUE 3.00e-59; EST_HUMAN HIT: AW384646.1, EVALUE 5.00e-59; SWISSPROT HIT: Q92667, EVALUE 1.00e-16
ccagatgatgaggtcgaccttcttagggttggagcctgcctgggcattttggaagctctcagtcttcttgagactgcaacagctatccacggaatccatgctgttcctgtcagaac

SEQ ID NO: 19872 - DNA, 264 bp, Homo sapiens
  MAP TO AL121965.5; EXPRESSED IN FETAL LIVER, SIGNAL = 2.1; EXPRESSED IN ADULT LIVER, SIGNAL =   1; EXPRESSED IN LUNG, SIGNAL = 2.6; EXPRESSED IN BT474, SIGNAL = 3.2; EXPRESSED IN BRAIN, SIGNAL = 1.9; EXPRESSED IN BONE MARROW, SIGNAL = 1.2; EXPRESSED IN PLACENTA, SIGNAL = 2.1; EXPRESSED IN HEART, SIGNAL = 2.3; EXPRESSED IN HELA, SIGNAL = 1.7; EXPRESSED IN HBL100, SIGNAL = 2.2; SWISSPROT HIT: P53327, EVALUE 7.00e-11; EST_HUMAN HIT: AW500519.1, EVALUE 1.00e-113; NT HIT: AJ223948.1, EVALUE 1.00e-113
aatgcagctagaattgtccgtgctctttttgaaattgctctgaggaaacgttggcctaccatgacctacaggctcctgaatcttagtaaagtcattgacaagaggctttggggttgggctagccctttgagacaattttcaatcctaccaccacacatcctaacaagattagaagaaaaaaagcttactgtggataagctgaaagacatgaggaaagatgaaataggtaagaaggaagcaaatatgtttgaatgtattgttttg

SEQ ID NO: 19873 - DNA, 208 bp, Homo sapiens
  MAP TO AL035554.1; EXPRESSED IN BT474, SIGNAL = 2.8; EXPRESSED IN FETAL LIVER, SIGNAL = 2.4; EXPRESSED IN BRAIN, SIGNAL = 2.8; EXPRESSED IN BONE MARROW, SIGNAL = 2.9; EXPRESSED IN HBL100, SIGNAL = 2.5; EXPRESSED IN PLACENTA, SIGNAL = 2.6; EXPRESSED IN HEART, SIGNAL = 2.3; EXPRESSED IN LUNG, SIGNAL = 2.5; EXPRESSED IN HELA, SIGNAL = 2.3; EXPRESSED IN ADULT LIVER, SIGNAL = 2.4; EST_HUMAN HIT: AV649329.1, EVALUE 2.00e-93; NT HIT: X04086.1, EVALUE 1.00e-114; SWISSPROT HIT: P04040, EVALUE 1.00e-27
ctgctcctttagcatgcacaactctctcaggaattctctctcggtcaaaatgagccatttcatcagtgaaaaccacatcctgaacaagaaggggcccacggggccctactgtaataacattaagtttgtctcctactgggttaccagctccagtggtcaggacatcagctttctacaggaacacagaaagaaagtgcaggagagttag

SEQ ID NO: 19874 - DNA, 127 bp, Homo sapiens
  MAP TO AL034425.6; EXPRESSED IN BT474, SIGNAL = 2.6; EXPRESSED IN BONE MARROW, SIGNAL = 3.2; EXPRESSED IN BRAIN, SIGNAL = 2.9; EXPRESSED IN HBL100, SIGNAL = 3.6; EXPRESSED IN HEART, SIGNAL = 2.8; EXPRESSED IN ADULT LIVER, SIGNAL = 3.8; EXPRESSED IN FETAL LIVER, SIGNAL = 3.3; EXPRESSED IN LUNG, SIGNAL = 3.1; EXPRESSED IN HELA, SIGNAL = 3.3; EXPRESSED IN PLACENTA, SIGNAL =   3; NT HIT: AY014404.1, EVALUE 2.80e-01; SWISSPROT HIT: P28964, EVALUE 4.10e+00; EST_HUMAN HIT: BE880769.1, EVALUE 4.20e-01
ggtgcagaggccaatgagtggcttggtgtctacactacctaccatgtgggaatgccaggtggggaggccaatgagcagcttgttgttcacactgcctaccatgtaggggtgctaggtgcagagacca

SEQ ID NO: 19875 - DNA, 189 bp, Homo sapiens
  MAP TO AL078634.20; EXPRESSED IN HELA, SIGNAL = 3.1; EXPRESSED IN HEART, SIGNAL = 5.6; EXPRESSED IN ADULT LIVER, SIGNAL = 4.3; EXPRESSED IN BT474, SIGNAL = 5.7; EXPRESSED IN BRAIN, SIGNAL = 4.8; EXPRESSED IN BONE MARROW, SIGNAL = 3.2; EXPRESSED IN HBL100, SIGNAL = 2.9; EXPRESSED IN PLACENTA, SIGNAL = 3.7; EXPRESSED IN FETAL LIVER, SIGNAL = 4.1; EXPRESSED IN LUNG, SIGNAL =   3; EST_HUMAN HIT: AU141005.1, EVALUE 1.00e-102; SWISSPROT HIT: Q9Z265, EVALUE 1.70e+00
tgttgacaagagaatccgctgtaccatttcatacaccattcggtgctcttcttcaatgctacagaggctggagttgctgagtcttcggtccgacaaggtgctgctgttagaatggcttttgtcctgctccgtgggcccaccaccatccagctcaggcgctctctcctgcacagcaccaccaccaacagt

SEQ ID NO: 19876 - DNA, 148 bp, Homo sapiens
  MAP TO AL049553.15; EXPRESSED IN PLACENTA, SIGNAL =  13; EXPRESSED IN HEART, SIGNAL =  11; EXPRESSED IN FETAL LIVER, SIGNAL =  12; EXPRESSED IN BT474, SIGNAL = 9.4; EXPRESSED IN BONE MARROW, SIGNAL = 9.6; EXPRESSED IN BRAIN, SIGNAL =  10; EXPRESSED IN HBL100, SIGNAL =  13; EXPRESSED IN ADULT LIVER, SIGNAL =  17; EXPRESSED IN LUNG, SIGNAL =  14; EXPRESSED IN HELA, SIGNAL =  14; EST_HUMAN HIT: BE867353.1, EVALUE 3.20e-02; NT HIT: U71280.1, EVALUE 5.20e+00; SWISSPROT HIT: P01266, EVALUE 3.40e-01
taggaaggaggaagctggcccaggaagggaggccaggctcggggctggctggcacagagctgaggccacccaacctccagactcccatccatgagctggccactgcccatgtgaggatgaggagggaggagcatctccaggtcctcag

SEQ ID NO: 19877 - DNA, 125 bp, Homo sapiens
  MAP TO AL035662.23; EXPRESSED IN HELA, SIGNAL = 3.2; EXPRESSED IN HEART, SIGNAL = 3.6; EXPRESSED IN ADULT LIVER, SIGNAL = 4.3; EXPRESSED IN BT474, SIGNAL = 3.7; EXPRESSED IN LUNG, SIGNAL = 2.9; EXPRESSED IN BRAIN, SIGNAL = 4.4; EXPRESSED IN BONE MARROW, SIGNAL = 3.3; EXPRESSED IN PLACENTA, SIGNAL = 5.7; EXPRESSED IN HBL100, SIGNAL = 3.9; EXPRESSED IN FETAL LIVER, SIGNAL = 3.3; NT HIT: gi11424495, EVALUE 2.00e-45; EST_HUMAN HIT: BE676795.1, EVALUE 1.00e-47; SWISSPROT HIT: Q9Z313, EVALUE 2.00e-14
ctataagaaggagaaagctcgaatcgtcactgaggaggagaagaatgtcaaagcctttgctagtctctgcatggcccgtgccaacgcccggcttttcggcatacgggcaaaaagagccaaggaag

SEQ ID NO: 19878 - DNA, 140 bp, Homo sapiens
  MAP TO AC007248.1; EXPRESSED IN BONE MARROW, SIGNAL =   4; EXPRESSED IN HEART, SIGNAL = 4.1; EXPRESSED IN BT474, SIGNAL = 3.7; EXPRESSED IN FETAL LIVER, SIGNAL = 4.5; EXPRESSED IN ADULT LIVER, SIGNAL =   5; EXPRESSED IN LUNG, SIGNAL = 4.2; EXPRESSED IN BRAIN, SIGNAL = 3.8; EXPRESSED IN PLACENTA, SIGNAL = 3.9; EXPRESSED IN HELA, SIGNAL = 4.5; EXPRESSED IN HBL100, SIGNAL = 3.9; NT HIT: AB008831.1, EVALUE 6.80e-02; EST_HUMAN HIT: T87623.1, EVALUE 5.00e-03; SWISSPROT HIT: O70306, EVALUE 1.70e+00
aaggtcttcggccacatccacctccaccccatccaccgtttccagccgacattcctttatgtggggatcacattctccagaaagttctctctgacctcccatgccccatttcccttgcccttcctacaccatatgaaaat

SEQ ID NO: 19879 - DNA, 105 bp, Homo sapiens
  MAP TO AL034561.4; EXPRESSED IN HELA, SIGNAL = 1.8; EXPRESSED IN HEART, SIGNAL = 1.5; EXPRESSED IN FETAL LIVER, SIGNAL = 1.6; EXPRESSED IN BT474, SIGNAL = 1.3; EXPRESSED IN BONE MARROW, SIGNAL = 1.1; EXPRESSED IN LUNG, SIGNAL = 1.6; EXPRESSED IN BRAIN, SIGNAL = 1.2; EXPRESSED IN PLACENTA, SIGNAL = 1.3; EXPRESSED IN HBL100, SIGNAL = 1.7; EXPRESSED IN ADULT LIVER, SIGNAL = 1.9; EST_HUMAN HIT: AA398613.1, EVALUE 3.30e-01; NT HIT: AF001298.1, EVALUE 2.00e-04; SWISSPROT HIT: P26760, EVALUE 9.10e+00
ctactcttcagaaacaaaagagagataaagaccttccaagataagcaaaaacagagggaattcatcatcactaggcaggtcttggaagaaatgcttaagggagtg

SEQ ID NO: 19880 - DNA, 142 bp, Homo sapiens
  MAP TO AC008417.2; EXPRESSED IN BONE MARROW, SIGNAL = 2.8; EXPRESSED IN HELA, SIGNAL = 2.5; EXPRESSED IN PLACENTA, SIGNAL = 2.8; EXPRESSED IN BT474, SIGNAL = 3.5; EXPRESSED IN BRAIN, SIGNAL = 3.6; EXPRESSED IN HEART, SIGNAL =   6; EXPRESSED IN HBL100, SIGNAL = 3.2; EXPRESSED IN ADULT LIVER, SIGNAL = 2.6; EXPRESSED IN FETAL LIVER, SIGNAL = 2.7; EXPRESSED IN LUNG, SIGNAL = 2.9; NT HIT: gi4758697, EVALUE 1.00e-74; EST_HUMAN HIT: AA331565.1, EVALUE 1.00e-74; SWISSPROT HIT: Q16706, EVALUE 7.00e-23
aaaaagctgctgataattcttaaactgtaaatcccattccgtgtattcacagtagcggaaatcatctcctagtggagccaggagaactttggtacgaaaaagctttgacttctttcggtactgatctagtagcatccgagcc

SEQ ID NO: 19881 - DNA, 221 bp, Homo sapiens
  MAP TO AL049596.11; EXPRESSED IN BRAIN, SIGNAL = 1.4; EXPRESSED IN HELA, SIGNAL = 2.1; EXPRESSED IN HBL100, SIGNAL = 0.91; EXPRESSED IN HEART, SIGNAL = 2.6; EXPRESSED IN FETAL LIVER, SIGNAL = 1.2; EXPRESSED IN BT474, SIGNAL = 1.1; NT HIT: gi4504068, EVALUE 2.00e-64; SWISSPROT HIT: P00507, EVALUE 4.00e-22; EST_HUMAN HIT: BE252704.1, EVALUE 4.00e-64
ggcagcatgtacggcttcccattatcatcccaactcccagattcatctttttgctattgatgtccctcttaaaggcttcagtgactcccaggatgggatctggaggtcccatttccacatgggtccaccaggagctggctctggcagaggctgcagcagcaaggcctgggtggaaggctgcggtaatcccggagaggagtgcagcagggccatggtggatg

SEQ ID NO: 19882 - DNA, 289 bp, Homo sapiens
  MAP TO AL035685.17; EXPRESSED IN BT474, SIGNAL = 3.3; EXPRESSED IN FETAL LIVER, SIGNAL = 3.5; EXPRESSED IN BONE MARROW, SIGNAL = 4.3; EXPRESSED IN HEART, SIGNAL = 3.4; EXPRESSED IN BRAIN, SIGNAL = 3.7; EXPRESSED IN LUNG, SIGNAL = 2.8; EXPRESSED IN PLACENTA, SIGNAL = 3.6; EXPRESSED IN HELA, SIGNAL =   3; EXPRESSED IN HBL100, SIGNAL = 3.4; EXPRESSED IN ADULT LIVER, SIGNAL = 3.4; NT HIT: L02840.1, EVALUE 0.00e+00; EST_HUMAN HIT: AA625212.1, EVALUE 9.00e-53; SWISSPROT HIT: Q14721, EVALUE 9.00e-51
gcggctgctgtcgctggactggagtgtgccacgcttttggacaaggctgtgctgagcccagagtcctccatctacaccacagcaagtgctaagacacccccccggtctcctgagaaacacacagcaatagcgttcaactttgaggcgggtgtccaccagtacattgacgcagacacagatgatgagggacagctgctctacagtgtggactccagcccccccaaaagcctccctgggagcaccagtccgaagttcagcacggggacaagatcggagaaaaaccactttg

SEQ ID NO: 19883 - DNA, 328 bp, Homo sapiens
  MAP TO AC008496.2; EXPRESSED IN ADULT LIVER, SIGNAL = 1.3; EXPRESSED IN FETAL LIVER, SIGNAL = 1.1; EXPRESSED IN LUNG, SIGNAL = 1.1; EXPRESSED IN BRAIN, SIGNAL = 1.3; EXPRESSED IN HBL100, SIGNAL = 1.4; EXPRESSED IN HELA, SIGNAL = 1.1; EXPRESSED IN PLACENTA, SIGNAL = 1.2; EXPRESSED IN BT474, SIGNAL = 1.4; EXPRESSED IN BONE MARROW, SIGNAL = 1.2; EXPRESSED IN HEART, SIGNAL = 0.99; EST_HUMAN HIT: AU139280.1, EVALUE 5.00e-03; NT HIT: U52111.2, EVALUE 7.00e-07; SWISSPROT HIT: P08547, EVALUE 1.00e-15
gttaaaagtaaaaagatggagaaaaatgtaccatactggagtggctatgttattatcaaagcagatttcagagataaagagggacatttcataataataaagggttcaatttgccaagaagacataatcttaaatgcatattcacctaacaacaatatttcaaaatatatgaagcaaaaactagaagaactgaaaggagaaacagacaaatccataattatagttggagatgttaacactcttcccttggtaatcaatagaaaaagtagacataaaatcagcaaggttatagaagacacgaacaacactatcaaccaactttacccaa

SEQ ID NO: 19884 - DNA, 76 bp, Homo sapiens
  MAP TO AC007199.1; EXPRESSED IN PLACENTA, SIGNAL = 1.9; EXPRESSED IN BT474, SIGNAL = 1.2; EXPRESSED IN LUNG, SIGNAL = 1.1; EXPRESSED IN BRAIN, SIGNAL = 1.8; EXPRESSED IN HEART, SIGNAL = 1.1; EXPRESSED IN HELA, SIGNAL = 1.3; EXPRESSED IN HBL100, SIGNAL = 1.2; EXPRESSED IN FETAL LIVER, SIGNAL =   1; NT HIT: Z47087.1, EVALUE 1.00e-35; SWISSPROT HIT: P34991, EVALUE 9.00e-07; EST_HUMAN HIT: BF245789.1, EVALUE 2.00e-35
aatagtcacagattgtttggcaatttccacatcaacttcaaatatctctccatcagaactctgcaacttaattgaa

SEQ ID NO: 19885 - DNA, 579 bp, Homo sapiens
  MAP TO AL022313.1; EXPRESSED IN ADULT LIVER, SIGNAL = 1.4; EXPRESSED IN BT474, SIGNAL = 1.4; EXPRESSED IN LUNG, SIGNAL = 1.3; EXPRESSED IN BONE MARROW, SIGNAL = 1.8; EXPRESSED IN BRAIN, SIGNAL = 1.4; EXPRESSED IN HBL100, SIGNAL = 2.2; EXPRESSED IN FETAL LIVER, SIGNAL = 1.4; EXPRESSED IN PLACENTA, SIGNAL = 1.1; EXPRESSED IN HEART, SIGNAL = 1.2; EXPRESSED IN HELA, SIGNAL = 2.3; NT HIT: gi7305474, EVALUE 2.00e-02; SWISSPROT HIT: P40600, EVALUE 5.60e-01
gcacacactcagtaagtgccagctgtcactgccagcctatttcaccaccgtgaacacagagcctcagaatggaaaagcagcctgcccaaggtcgcacaacttgcaggtggcacaggcaggatctgaatccagatcagattcttcccgccctacttctatcaccgtggaagggcctgggggggcctgcagccaggaggtggctggaaagggaggttccttggaacaaccagtggcccaggcttcctgcagagccggggaccccagccctggccagggtaagggtcacgcctgcagctggtgttccaggcatcggagaggaactgcggctgcaggcctggcagccttaccgtcgccagcatcctgccctccatggacacggccccaacattgttttctgggccgttccctgcccagagcccacacattcgggatttccgcagcttggccagcactaccttcgcttcctggagcagctttccccaggcggccggggtgggggttgagctggccctggcccctggtaggggcaggcactgctcggaaggcagtggcagcagcgccgtcaacatcctcttgacc

SEQ ID NO: 19886 - DNA, 195 bp, Homo sapiens
  MAP TO AC007025.2; EXPRESSED IN PLACENTA, SIGNAL = 3.7; EXPRESSED IN ADULT LIVER, SIGNAL =   5; EXPRESSED IN BT474, SIGNAL = 3.7; EXPRESSED IN FETAL LIVER, SIGNAL = 4.2; EXPRESSED IN BRAIN, SIGNAL = 3.6; EXPRESSED IN BONE MARROW, SIGNAL = 4.3; EXPRESSED IN LUNG, SIGNAL =   4; EXPRESSED IN HBL100, SIGNAL =   4; EXPRESSED IN HELA, SIGNAL = 3.7; EXPRESSED IN HEART, SIGNAL = 3.3; NT HIT: AF184273.1, EVALUE 1.20e-01; SWISSPROT HIT: P16453, EVALUE 3.70e+00
gccatacaaaaacagtctgttgttgccaaccaccctgctatggtataagatgccgatcgataactgttgtagaggctggaggggaggtagagtgtgacaggataggctttgtagaaaggattacagttgagctaggacttgaagaaggaaggcttttcctggacagacaagtaggagaaagtgaaagacaaagat

SEQ ID NO: 19887 - DNA, 227 bp, Homo sapiens
  MAP TO AC007161.1; EXPRESSED IN BONE MARROW, SIGNAL = 6.3; EXPRESSED IN PLACENTA, SIGNAL =   7; EXPRESSED IN HELA, SIGNAL =  15; EXPRESSED IN FETAL LIVER, SIGNAL = 5.7; EXPRESSED IN ADULT LIVER, SIGNAL = 2.6; EXPRESSED IN BT474, SIGNAL = 7.6; EXPRESSED IN BRAIN, SIGNAL = 2.3; EXPRESSED IN LUNG, SIGNAL = 9.5; EXPRESSED IN HEART, SIGNAL = 3.8; EXPRESSED IN HBL100, SIGNAL =  18; NT HIT: U43701.1, EVALUE 3.00e-73; SWISSPROT HIT: P29316, EVALUE 8.00e-32; EST_HUMAN HIT: BF340769.1, EVALUE 1.00e-79
ccacatcgatgtcacagagcttcttcacagcctgtttgatctggtgcttgttggctttaacatccacagtgaacacaagcgtgctgttgtcttctgtcttcttcatggccgactcagtggtcagcggaaatttgatagtgtagtggttaagcttgtttctcctgggggcgctcttccgaggatatctgggctgcctccggagtcgcagtgtcttgggctgctggaag

SEQ ID NO: 19888 - DNA, 159 bp, Homo sapiens
  MAP TO AC007228.1; EXPRESSED IN ADULT LIVER, SIGNAL =   4; EXPRESSED IN BT474, SIGNAL =   3; EXPRESSED IN BRAIN, SIGNAL = 3.2; EXPRESSED IN HEART, SIGNAL = 2.6; EXPRESSED IN HELA, SIGNAL =   3; EXPRESSED IN HBL100, SIGNAL =   3; EXPRESSED IN PLACENTA, SIGNAL =   3; EXPRESSED IN FETAL LIVER, SIGNAL = 3.2; EXPRESSED IN LUNG, SIGNAL = 3.2; EXPRESSED IN BONE MARROW, SIGNAL = 3.1; NT HIT: AB037852.1, EVALUE 5.00e-68; EST_HUMAN HIT: BF515666.1, EVALUE 3.00e-33; SWISSPROT HIT: P52738, EVALUE 5.00e-13
gttgagcaagaacatggttatatcatttcagggcttggtgacatttggggatgtggctgtagatttctcccaagaggagtgggagtggctgaaccccattcagaggaacttgtacaggaaggtgatgttggagaactacaggaacctggcatcgctggg

SEQ ID NO: 19889 - DNA, 127 bp, Homo sapiens
  MAP TO AP000557.2; EXPRESSED IN PLACENTA, SIGNAL = 1.5; EXPRESSED IN HBL100, SIGNAL = 1.6; EXPRESSED IN BT474, SIGNAL = 1.8; EXPRESSED IN FETAL LIVER, SIGNAL = 1.4; EXPRESSED IN LUNG, SIGNAL = 1.5; EXPRESSED IN BONE MARROW, SIGNAL = 1.7; EXPRESSED IN BRAIN, SIGNAL = 1.5; EXPRESSED IN HEART, SIGNAL = 1.9; SWISSPROT HIT: Q98878, EVALUE 6.00e-01; EST_HUMAN HIT: N36252.1, EVALUE 1.70e+00; NT HIT: X74209.1, EVALUE 2.40e-01
ccagggagccgtgggggtgccgcgttgaagaggaatggctgcgaggccagaggggacagtgtccaggagcgcaagggtcacttggctgagtgtggcaagtgggcaagtcagggacagctgaccccca

SEQ ID NO: 19890 - DNA, 296 bp, Homo sapiens
  MAP TO AL096776.12; EXPRESSED IN ADULT LIVER, SIGNAL =  21; EXPRESSED IN BRAIN, SIGNAL =  27; EXPRESSED IN BONE MARROW, SIGNAL =  22; EXPRESSED IN HBL100, SIGNAL =  28; EXPRESSED IN FETAL LIVER, SIGNAL =  48; EXPRESSED IN BT474, SIGNAL =  51; EXPRESSED IN LUNG, SIGNAL =  53; EXPRESSED IN PLACENTA, SIGNAL =  21; EXPRESSED IN HEART, SIGNAL =  20; EXPRESSED IN HELA, SIGNAL =  54; NT HIT: gi11424415, EVALUE 0.00e+00; SWISSPROT HIT: P02794, EVALUE 5.00e-51; EST_HUMAN HIT: AI754715.1, EVALUE 0.00e+00
atatcaagaaaccagactgtgatgactgggagagcgggctgaatgcgatggagtgtgcattacatttggaaaaaagtgtgaatcagtcactactggaactgcacaaactggccactgacaaaaatgacccccatttgtgtgacttcattgagacacattacctgaataagcaggtgaaagccatcaaagaattgggtgagcacgtgaccaacttgtgcaagatgggagcgcccgaatctggctcggcggaatacctcttagacaagcacaccctgggggacagtgataatgaaagc

SEQ ID NO: 19891 - DNA, 266 bp, Homo sapiens
  MAP TO AL034419.13; EXPRESSED IN BONE MARROW, SIGNAL = 2.5; EXPRESSED IN LUNG, SIGNAL = 2.9; EXPRESSED IN BRAIN, SIGNAL = 2.5; EXPRESSED IN HELA, SIGNAL = 2.9; EXPRESSED IN HEART, SIGNAL = 2.6; EXPRESSED IN PLACENTA, SIGNAL = 2.5; EXPRESSED IN HBL100, SIGNAL = 3.1; EXPRESSED IN BT474, SIGNAL = 2.8; EXPRESSED IN ADULT LIVER, SIGNAL = 3.1; EXPRESSED IN FETAL LIVER, SIGNAL = 3.2; SWISSPROT HIT: P46474, EVALUE 2.40e+00; NT HIT: gi6680388, EVALUE 9.00e-03; EST_HUMAN HIT: AW802687.1, EVALUE 3.00e-03
ttataaagatagtggaacctcaatacagaagtatgataaagctatcttataaaaagccaccaccggatcagagaggggacgggctaagggagaggggatgtggctgaggaaggagggaagggggtgagtgctggtggcagccccaagaccagaggcagcaatgaggttgtcatttgttaagtttccctgcagaagtgagggcccacgggacgtggaggtgctgctcactgtcctgcatgagaagcagagctgtgtggcaaaaggga

SEQ ID NO: 19892 - DNA, 113 bp, Homo sapiens; identical to SEQ ID NO: 19178
  MAP TO AL035705.16; EXPRESSED IN PLACENTA, SIGNAL = 4.8; EXPRESSED IN HELA, SIGNAL =   4; EXPRESSED IN HEART, SIGNAL = 4.6; EXPRESSED IN FETAL LIVER, SIGNAL = 4.5; EXPRESSED IN ADULT LIVER, SIGNAL = 4.2; EXPRESSED IN BT474, SIGNAL = 4.3; EXPRESSED IN BONE MARROW, SIGNAL = 5.4; EXPRESSED IN BRAIN, SIGNAL = 5.5; EXPRESSED IN HBL100, SIGNAL = 4.7; EXPRESSED IN LUNG, SIGNAL = 4.4; NT HIT: AJ276408.1, EVALUE 5.30e-02; SWISSPROT HIT: Q13202, EVALUE 6.90e+00

SEQ ID NO: 19893 - DNA, 119 bp, Homo sapiens
  MAP TO AC007833.1; EXPRESSED IN HELA, SIGNAL =   1; EXPRESSED IN HEART, SIGNAL = 0.84; EXPRESSED IN ADULT LIVER, SIGNAL = 1.4; NT HIT: AB020632.1, EVALUE 5.00e-61; EST_HUMAN HIT: BF316637.1, EVALUE 1.50e+00; SWISSPROT HIT: Q93126, EVALUE 9.00e+00
tcagtaaaagtccatcatgatgcagtagggtttccagaagcaagttccagttacaacgtggctgggataagagcagtttcaactgaccctcggctttcagtcctccagctgatggagtc

SEQ ID NO: 19894 - DNA, 258 bp, Homo sapiens
  MAP TO AC007256.1; EXPRESSED IN HELA, SIGNAL = 1.3; EXPRESSED IN FETAL LIVER, SIGNAL = 2.1; EXPRESSED IN LUNG, SIGNAL = 1.7; EXPRESSED IN BRAIN, SIGNAL = 1.3; EXPRESSED IN PLACENTA, SIGNAL = 1.1; EXPRESSED IN HEART, SIGNAL = 1.8; EXPRESSED IN HBL100, SIGNAL = 1.1; EXPRESSED IN BT474, SIGNAL = 1.2; EXPRESSED IN ADULT LIVER, SIGNAL = 1.1; EXPRESSED IN BONE MARROW, SIGNAL = 1.3; SWISSPROT HIT: P22346, EVALUE 1.60e-01; NT HIT: AB011121.1, EVALUE 0.00e+00; EST_HUMAN HIT: R93255.1, EVALUE 1.00e-129
agcagcttgctcaaccaaacttgggaaccatccttgatccacgaccaggtgtcattactaaaggctttacccagttgcccggggatgctatttatcacatctcagatttagaagaggatgaagaggagggtattacttttcaggttcagcaacctcttgaagtggaagagaaactttcaacatccaagccagtaacagggatcttcctgccacccattacttcagcaggtggaccagttacaggtgagaagagtgtct

SEQ ID NO: 19895 - DNA, 160 bp, Homo sapiens
  MAP TO AL080274.13; EXPRESSED IN HELA, SIGNAL = 2.3; EXPRESSED IN HEART, SIGNAL = 1.8; EXPRESSED IN FETAL LIVER, SIGNAL = 2.2; EXPRESSED IN ADULT LIVER, SIGNAL = 2.2; EXPRESSED IN BT474, SIGNAL = 2.1; EXPRESSED IN BONE MARROW, SIGNAL =   3; EXPRESSED IN LUNG, SIGNAL = 2.2; EXPRESSED IN BRAIN, SIGNAL = 2.8; EXPRESSED IN PLACENTA, SIGNAL = 2.7; EXPRESSED IN HBL100, SIGNAL = 2.7; NT HIT: AL161491.2, EVALUE 5.00e-03; EST_HUMAN HIT: BF244611.1, EVALUE 3.50e-02; SWISSPROT HIT: Q9Z7N9, EVALUE 2.30e+00
aatagtagataaactgtttttgctgttgctgtttgtttttgttattcacctggctaggacaacattctcaaagattttgaatttgaggggatttgtagtgaatatgcaaggatggaggaaggcacttgtatatccaggtgtggaggtcagagagatgacg

SEQ ID NO: 19896 - DNA, 80 bp, Homo sapiens
  MAP TO AC005682.2; EXPRESSED IN HEART, SIGNAL = 0.9; EXPRESSED IN FETAL LIVER, SIGNAL = 0.98; NT HIT: AJ131016.1, EVALUE 1.40e-01; EST_HUMAN HIT: AI493472.1, EVALUE 4.20e-02
atgaatgctgaaatcatgcaaactgtggtggtcctgttggcttccatcctctgcctgtcacctgttttcaaggtggacag

SEQ ID NO: 19897 - DNA, 215 bp, Homo sapiens
  MAP TO AL049539.19; EXPRESSED IN HEART, SIGNAL = 1.1; EXPRESSED IN FETAL LIVER, SIGNAL = 1.1; EXPRESSED IN ADULT LIVER, SIGNAL = 1.3; EXPRESSED IN BRAIN, SIGNAL = 1.4; EXPRESSED IN LUNG, SIGNAL =   1; EXPRESSED IN BONE MARROW, SIGNAL = 1.2; EXPRESSED IN HELA, SIGNAL = 1.1; EXPRESSED IN PLACENTA, SIGNAL = 1.1; EXPRESSED IN HBL100, SIGNAL = 1.1; EXPRESSED IN BT474, SIGNAL =   1; NT HIT: gi11420944, EVALUE 1.00e-94; SWISSPROT HIT: P32802, EVALUE 3.00e-05; EST_HUMAN HIT: BE866833.1, EVALUE 2.00e-94
gtgccctttcccaccatggtggctctgctgtgcatgtggttcgggatctccctgcccctcgtctacttgggctactacttcggcttccgaaagcagccatatgacaaccctgtgcgcaccaaccagattccccggcagatccccgagcagcggtggtacatgaaccgatttgtggggtgagtcctccagcagaggcaagagcaggggaacgtgga

SEQ ID NO: 19898 - DNA, 123 bp, Homo sapiens
  MAP TO D87675.1; EXPRESSED IN FETAL LIVER, SIGNAL =   1; EXPRESSED IN HEART, SIGNAL = 1.7; EXPRESSED IN PLACENTA, SIGNAL = 1.9; EXPRESSED IN BT474, SIGNAL = 1.7; EXPRESSED IN BRAIN, SIGNAL = 3.4; EXPRESSED IN LUNG, SIGNAL = 3.7; EXPRESSED IN HELA, SIGNAL = 1.2; EXPRESSED IN HBL100, SIGNAL = 1.6; NT HIT: X13487.1, EVALUE 2.00e-63; SWISSPROT HIT: Q95241, EVALUE 3.00e-05; EST_HUMAN HIT: W27111.1, EVALUE 3.00e-63
tcaaacaaaggtgcaatcattggactcatggtgggcggtgttgtcatagcgacagtgatcgtcatcaccttggtgatgctgaagaagaaacagtacacatccattcatcatggtgtggtggag

SEQ ID NO: 19899 - DNA, 177 bp, Homo sapiens
  MAP TO AC007272.2; EXPRESSED IN BONE MARROW, SIGNAL = 2.5; EXPRESSED IN LUNG, SIGNAL =   8; EXPRESSED IN BRAIN, SIGNAL =   2; EXPRESSED IN PLACENTA, SIGNAL = 2.1; EXPRESSED IN HBL100, SIGNAL = 1.9; EXPRESSED IN HELA, SIGNAL = 3.3; EXPRESSED IN HEART, SIGNAL = 3.5; EXPRESSED IN BT474, SIGNAL = 2.6; EXPRESSED IN FETAL LIVER, SIGNAL = 2.5; EXPRESSED IN ADULT LIVER, SIGNAL =   2; SWISSPROT HIT: Q51391, EVALUE 4.90e+00; EST_HUMAN HIT: AV691851.1, EVALUE 3.00e-95; NT HIT: AF015450.1, EVALUE 2.00e-95
gagcagttcagccaagtccccgacagacagcttacctctttcccgtaaaatatccagaaggtccctgacattaggtggaaccacatctatagcaacatcccggcacaaaaagagcagcatctccttctcatctgtatcaagtgcttcttcaacctgatggatgacttcagcagacat

SEQ ID NO: 19900 - DNA, 522 bp, Homo sapiens
  MAP TO AL049749.1; EXPRESSED IN BT474, SIGNAL = 5.8; EXPRESSED IN BONE MARROW, SIGNAL = 4.2; EXPRESSED IN HEART, SIGNAL = 5.8; EXPRESSED IN ADULT LIVER, SIGNAL = 3.2; EXPRESSED IN FETAL LIVER, SIGNAL = 4.7; EXPRESSED IN BRAIN, SIGNAL = 5.7; EXPRESSED IN LUNG, SIGNAL = 5.2; EXPRESSED IN HELA, SIGNAL = 5.3; EXPRESSED IN PLACENTA, SIGNAL = 3.9; EXPRESSED IN HBL100, SIGNAL = 4.4; EST_HUMAN HIT: AA776664.1, EVALUE 4.90e-01
aatgatggtggtgttagtggtggtgatggtggtagtaattatagccatgatgcaggtggtggtgatcatgaaggtggtgctgatggtggtggtagtaattgtaaccatgatgcaggtggcagtgatcatgaaggtggtgatgattgatggtggtaataatgactgtgataaagatggtggtgatgaaagtggtgatggtgatggtggtgatggtggtggtggtgatgatggtgatgatggtggtagtgatggtggcagtgatggtggtggtaatggtgatgatggtgatgatggtggtagtgatgatggtgatggcggtggtaattatagccatgatgcaggtggcagtgatcatgaaggtggtggtgatggtggtgatggtggtggtgttgatgatggtgatggtggtggtgatgatggtggtggtagtggtggtgacagtgatggtggtggtagtgatggtggtggtaatggtggtgacggtgatggtggtggtagtgatggtggtgatggtggtggtaa

SEQ ID NO: 19901 - DNA, 339 bp, Homo sapiens
  MAP TO AL033532.15; EXPRESSED IN BONE MARROW, SIGNAL = 1.7; EXPRESSED IN BRAIN, SIGNAL = 1.5; EXPRESSED IN HBL100, SIGNAL = 1.6; EXPRESSED IN BT474, SIGNAL = 1.7; EXPRESSED IN FETAL LIVER, SIGNAL =   2; EXPRESSED IN LUNG, SIGNAL = 1.5; EXPRESSED IN PLACENTA, SIGNAL = 1.8; EXPRESSED IN HEART, SIGNAL = 1.8; EXPRESSED IN HELA, SIGNAL = 1.8; EXPRESSED IN ADULT LIVER, SIGNAL = 2.3; SWISSPROT HIT: P38739, EVALUE 3.00e-07
gctgccctattcgacttccaatcagccagctgcctctacactgccctattcgacttccaatcagccagctgcgtctacactgccctattcgacttccaatcagccagctgcctctacactgccctattcgtcttccaatcagccagctgcgtctacactgccctattcgacttccaatcagccagctgcctctacactgccctattcgacttccaatcagccagctgcgtctacactgccctattcgacttccaatcagccagctgcctctacactgccctattcgacttccaatcagccagctgcgtctacactgccctattcgacttccaatcagcc

SEQ ID NO: 19902 - DNA, 327 bp, Homo sapiens
  MAP TO AC007030.2; EXPRESSED IN BONE MARROW, SIGNAL =  21; EXPRESSED IN PLACENTA, SIGNAL =  26; EXPRESSED IN ADULT LIVER, SIGNAL = 3.7; EXPRESSED IN BT474, SIGNAL =  22; EXPRESSED IN LUNG, SIGNAL =  22; EXPRESSED IN BRAIN, SIGNAL = 8.6; EXPRESSED IN HEART, SIGNAL = 9.4; EXPRESSED IN HELA, SIGNAL =  37; EXPRESSED IN HBL100, SIGNAL =  33; EXPRESSED IN FETAL LIVER, SIGNAL =  18; NT HIT: gi6912633, EVALUE 1.00e-111; EST_HUMAN HIT: T94870.1, EVALUE 0.00e+00; SWISSPROT HIT: P40429, EVALUE 2.00e-46
ggccgggccgccctggagcgcctcaaggtgtttgacggcatcccaccgccctatgacatgaaaaagcggatggtggttcctgctgccctcaaggtcatgcatctgaagcctacaagaaactttgcctacgtggggcgcctggctcacgaggtttgctgtaagtacctggcagtggcatctaccctgaaggagaagaggaaggagaaagccaagatccactatcggaagaagaaacagctcatgaggctatggaaaccgggtgaaaagaacgtggagaagaaaactgacaaatacacagaagctctcaagacccatggactcctgatc

SEQ ID NO: 19903 - DNA, 175 bp, Homo sapiens
  MAP TO AC007044.1; EXPRESSED IN BT474, SIGNAL = 6.9; EXPRESSED IN FETAL LIVER, SIGNAL = 6.8; EXPRESSED IN BONE MARROW, SIGNAL = 6.6; EXPRESSED IN LUNG, SIGNAL =   7; EXPRESSED IN BRAIN, SIGNAL = 6.2; EXPRESSED IN HELA, SIGNAL = 6.5; EXPRESSED IN HBL100, SIGNAL = 7.4; EXPRESSED IN HEART, SIGNAL = 5.4; EXPRESSED IN PLACENTA, SIGNAL = 6.1; EXPRESSED IN ADULT LIVER, SIGNAL = 7.7; EST_HUMAN HIT: AA143131.1, EVALUE 9.40e+00; NT HIT: X99914.1, EVALUE 4.10e-01; SWISSPROT HIT: P30205, EVALUE 2.90e+00
gggcgtttccagcagtcacgtgctctgctgttgtttgttctgaagatgcaggagccgtagaggagaataactcacagagaagggcagtgggaatattccaggccagggtcttggaaaccaccttagtcaccttcttcagcatcccctggtcagaggattcagcagctcccaagca

SEQ ID NO: 19904 - DNA, 162 bp, Homo sapiens
  MAP TO AC007057.3; EXPRESSED IN ADULT LIVER, SIGNAL = 1.6; EXPRESSED IN BT474, SIGNAL = 1.4; EXPRESSED IN BRAIN, SIGNAL = 1.5; EXPRESSED IN HEART, SIGNAL = 2.1; EXPRESSED IN HELA, SIGNAL = 1.4; EXPRESSED IN HBL100, SIGNAL = 1.4; EXPRESSED IN PLACENTA, SIGNAL = 1.7; EXPRESSED IN FETAL LIVER, SIGNAL = 1.5; EXPRESSED IN LUNG, SIGNAL = 3.1; EXPRESSED IN BONE MARROW, SIGNAL = 1.5; EST_HUMAN HIT: AA037185.1, EVALUE 3.00e-86; SWISSPROT HIT: Q9WVH9, EVALUE 3.00e-25; NT HIT: gi5453649, EVALUE 1.00e-86
ttgatctggaaaatgtaataggccccagggtagcgggtcgtggcttgcatttggaagatgtcagcgggaacggagcgtcctgacaccacgtccatgtcccggtacaagatggtaaagggctggtctctgcagccagggttctcagcaggacacatacagcgg

SEQ ID NO: 19905 - DNA, 151 bp, Homo sapiens
  MAP TO AC007335.2; EXPRESSED IN ADULT LIVER, SIGNAL = 1.7; EXPRESSED IN HBL100, SIGNAL = 2.5; EXPRESSED IN HELA, SIGNAL = 1.9; EXPRESSED IN HEART, SIGNAL = 2.2; EXPRESSED IN FETAL LIVER, SIGNAL = 1.5; EXPRESSED IN BT474, SIGNAL = 3.1; EXPRESSED IN BRAIN, SIGNAL = 3.3; EXPRESSED IN LUNG, SIGNAL = 1.5; EXPRESSED IN BONE MARROW, SIGNAL = 3.4; EXPRESSED IN PLACENTA, SIGNAL = 1.7; EST_HUMAN HIT: AV650422.1, EVALUE 1.00e-35; SWISSPROT HIT: Q04791, EVALUE 4.00e-12; NT HIT: AF079410.1, EVALUE 1.40e+00
cgaacataacaatgtcccccttcaggaaggcaccaccgaacacaaagcggacttcatcagcgtggtcggctttgacaaaagctggcttcgtgtcttcaaagcactgaggccggtgccgaaactcatagaagtagacaggtgcaccagcatc

SEQ ID NO: 19906 - DNA, 171 bp, Homo sapiens
  MAP TO AL132642.1; EXPRESSED IN PLACENTA, SIGNAL = 2.8; EXPRESSED IN HBL100, SIGNAL = 3.3; EXPRESSED IN HELA, SIGNAL = 1.4; EXPRESSED IN FETAL LIVER, SIGNAL = 2.6; EXPRESSED IN LUNG, SIGNAL = 2.5; EXPRESSED IN HEART, SIGNAL = 1.9; EXPRESSED IN BT474, SIGNAL = 3.1; EXPRESSED IN BRAIN, SIGNAL = 0.95; EXPRESSED IN BONE MARROW, SIGNAL = 1.8; EST_HUMAN HIT: AV682518.1, EVALUE 6.00e-04; SWISSPROT HIT: P10723, EVALUE 8.50e+00; NT HIT: AF281074.1, EVALUE 4.00e-04
ccccgaccaactctactttatgacttgctccaacagtgttctctgaccattttacagaaggaaagactgaggctcagagagcttctgcgttattcaaggacacacagctgctacgtggcagagctggtgcagagtcgaggtgtgctggcatctaaagatgatgtttccact

SEQ ID NO: 19907 - DNA, 152 bp, Homo sapiens
  MAP TO AL096862.15; EXPRESSED IN BT474, SIGNAL = 5.6; EXPRESSED IN BRAIN, SIGNAL =   6; EXPRESSED IN BONE MARROW, SIGNAL = 6.1; EXPRESSED IN LUNG, SIGNAL =   5; EXPRESSED IN HELA, SIGNAL = 6.7; EXPRESSED IN HEART, SIGNAL = 5.4; EXPRESSED IN PLACENTA, SIGNAL =   7; EXPRESSED IN HBL100, SIGNAL = 6.1; EXPRESSED IN FETAL LIVER, SIGNAL = 7.2; EXPRESSED IN ADULT LIVER, SIGNAL = 8.3; NT HIT: U90450.1, EVALUE 1.40e+00
tcaattctttcctcttcctctgccttctcctcctccccctttctcttcttcttcctcctcttcctcctcctctttcgcttcttcctcctcccccttctctctctcctcctcctcctcctctttcttctctgaacaatgaagaggaaaacaaa

SEQ ID NO: 19908 - DNA, 136 bp, Homo sapiens
  MAP TO AL109755.14; EXPRESSED IN PLACENTA, SIGNAL = 1.2; EXPRESSED IN ADULT LIVER, SIGNAL = 1.4; EXPRESSED IN BT474, SIGNAL = 1.1; EXPRESSED IN BONE MARROW, SIGNAL = 1.2; EXPRESSED IN HBL100, SIGNAL = 1.4; EXPRESSED IN HEART, SIGNAL =   1; EXPRESSED IN FETAL LIVER, SIGNAL = 1.1; EXPRESSED IN BRAIN, SIGNAL = 1.3; EXPRESSED IN LUNG, SIGNAL = 1.1; EXPRESSED IN HELA, SIGNAL = 1.1; EST_HUMAN HIT: R71794.1, EVALUE 5.00e-03; SWISSPROT HIT: Q08470, EVALUE 5.20e+00; NT HIT: gi7304922, EVALUE 1.20e+00
tcatctactctgcactgtagcccggatggaagcagccttgtgggggcatggaattctcagagctccaaagacagaagcagccttctgcctcaaaatccccccagctcctcttggataagatggtctactgataggc

SEQ ID NO: 19909 - DNA, 174 bp, Homo sapiens
  MAP TO AC008015.5; EXPRESSED IN PLACENTA, SIGNAL = 3.1; EXPRESSED IN HEART, SIGNAL = 4.7; EXPRESSED IN FETAL LIVER, SIGNAL = 3.9; EXPRESSED IN ADULT LIVER, SIGNAL = 5.6; EXPRESSED IN HBL100, SIGNAL = 5.6; EXPRESSED IN HELA, SIGNAL = 5.6; EXPRESSED IN BT474, SIGNAL = 5.6; EXPRESSED IN BRAIN, SIGNAL = 5.4; EXPRESSED IN LUNG, SIGNAL = 3.7; EXPRESSED IN BONE MARROW, SIGNAL = 6.2; EST_HUMAN HIT: BF335227.1, EVALUE 1.00e-14; NT HIT: AB049094.1, EVALUE 6.30e+00; SWISSPROT HIT: O35984, EVALUE 8.50e+00
tgcctcctcatatttgatagctgcaagacatactttgccagcctcctcactcctattggaaaaccagcagtgcagatcatgtaattcaggactagttctggacccccagtgtttgggagcaatgcggggtcgggggagctcaggttcatccactgcacgtccagtattgccagg

SEQ ID NO: 19910 - DNA, 129 bp, Homo sapiens
  MAP TO L11910.1; EXPRESSED IN BONE MARROW, SIGNAL = 1.2; EXPRESSED IN BRAIN, SIGNAL = 1.2; EXPRESSED IN PLACENTA, SIGNAL = 1.4; EXPRESSED IN HBL100, SIGNAL = 1.5; EXPRESSED IN BT474, SIGNAL = 1.3; EXPRESSED IN LUNG, SIGNAL = 1.6; EXPRESSED IN HEART, SIGNAL = 1.2; EXPRESSED IN HELA, SIGNAL = 1.2; EXPRESSED IN ADULT LIVER, SIGNAL = 0.97; SWISSPROT HIT: P06400, EVALUE 9.00e-19; NT HIT: L11910.1, EVALUE 7.00e-67; EST_HUMAN HIT: AV722384.1, EVALUE 1.00e-66
ccagaaaataaatcagatggtatgtaacagcgaccgtgtgctcaaaagaagtgctgaaggaagcaaccctcctaaaccactgaaaaaactacgctttgatattgaaggatcagatgaagcagatggaag

SEQ ID NO: 19911 - DNA, 133 bp, Homo sapiens
  MAP TO AC007220.1; EXPRESSED IN HBL100, SIGNAL = 6.7; EXPRESSED IN HEART, SIGNAL = 2.7; EXPRESSED IN PLACENTA, SIGNAL = 2.5; EXPRESSED IN HELA, SIGNAL = 6.5; EXPRESSED IN FETAL LIVER, SIGNAL = 3.8; EXPRESSED IN BT474, SIGNAL = 5.9; EXPRESSED IN ADULT LIVER, SIGNAL =   1; EXPRESSED IN BRAIN, SIGNAL = 2.4; EXPRESSED IN BONE MARROW, SIGNAL = 2.2; EXPRESSED IN LUNG, SIGNAL = 6.2; NT HIT: M29063.1, EVALUE 7.00e-36; EST_HUMAN HIT: BE259267.1, EVALUE 2.00e-36; SWISSPROT HIT: P19600, EVALUE 4.60e-01
ttcccaacgaacacgcgttcatggagcgaggatctctcttgttggtaacattgctggccgttgtgtttgatgataagatttctcacaaagctgaaaatgtagctgaagatcaaaaaagtctcacaggagcggg

SEQ ID NO: 19912 - DNA, 175 bp, Homo sapiens
  MAP TO AC006362.2; EXPRESSED IN HEART, SIGNAL = 1.3; EST_HUMAN HIT: D57309.1, EVALUE 9.40e+00; SWISSPROT HIT: Q13585, EVALUE 6.60e-02; NT HIT: AF275948.1, EVALUE 1.00e-01
gacagcatctctcttcagctgcactgtatatctgtatatctctcccttcagctgcactgtatctcccttcagctgcactgtatctcccttcagctgcactgtatctcccttcagctgcactgtatctcccttcagctgcactgtatatctctccctttctgccccagggtttctg

SEQ ID NO: 19913 - DNA, 204 bp, Homo sapiens
  MAP TO AC007016.5; EXPRESSED IN BONE MARROW, SIGNAL = 4.5; EXPRESSED IN HELA, SIGNAL = 4.2; EXPRESSED IN FETAL LIVER, SIGNAL = 4.8; EXPRESSED IN LUNG, SIGNAL = 4.5; EXPRESSED IN BRAIN, SIGNAL = 3.6; EXPRESSED IN PLACENTA, SIGNAL = 3.9; EXPRESSED IN HEART, SIGNAL = 3.8; EXPRESSED IN HBL100, SIGNAL = 3.7; EXPRESSED IN BT474, SIGNAL = 3.4; EXPRESSED IN ADULT LIVER, SIGNAL = 4.5; NT HIT: AB037766.1, EVALUE 4.00e-81; EST_HUMAN HIT: T06680.1, EVALUE 5.00e-69; SWISSPROT HIT: P35991, EVALUE 1.20e+00
aatgaaattccaaaattcctgtttgatatcatgttgcctctaactcaacagagggccaagaagaagaaaaggaaacaagcagcagaagaacatcccggtgatgagattgcagagccgtatcccgaggaggaccttgtgaagcccagccctccagagcccactgatcgggcagtgatagagcaggaggtgagggagagagcagcc

SEQ ID NO: 19914 - DNA, 221 bp, Homo sapiens
  MAP TO AC006230.11; EXPRESSED IN HELA, SIGNAL = 1.3; EXPRESSED IN HEART, SIGNAL = 1.2; EXPRESSED IN PLACENTA, SIGNAL =   1; EXPRESSED IN BT474, SIGNAL =   1; EXPRESSED IN FETAL LIVER, SIGNAL =   1; EXPRESSED IN LUNG, SIGNAL = 0.95; EXPRESSED IN BRAIN, SIGNAL =   1; EXPRESSED IN BONE MARROW, SIGNAL = 1.3; EXPRESSED IN HBL100, SIGNAL = 1.9; EXPRESSED IN ADULT LIVER, SIGNAL = 0.92; SWISSPROT HIT: Q62093, EVALUE 1.00e-04; NT HIT: gi11431116, EVALUE 1.00e-112; EST_HUMAN HIT: BF206374.1, EVALUE 1.00e-114
cacatcatggagatattttccacctatgggaaaattaaaatgattgacatgcccgtggaaaggatgcatccccatctgtccaaaggctatgcgtgcgtagagtttgagaatccagatgaagctgagaaggcgctgaagcacatggatggaggacaaattgatggccaggagatcactgccaccgtcgtgctggccccctggcctaggccaacccccaggag

SEQ ID NO: 19915 - DNA, 159 bp, Homo sapiens
  MAP TO AC008045.4; EXPRESSED IN BONE MARROW, SIGNAL =   4; EXPRESSED IN BRAIN, SIGNAL = 3.4; EXPRESSED IN HELA, SIGNAL = 3.8; EXPRESSED IN PLACENTA, SIGNAL = 3.5; EXPRESSED IN HBL100, SIGNAL = 3.4; EXPRESSED IN HEART, SIGNAL = 2.8; EXPRESSED IN BT474, SIGNAL = 3.3; EXPRESSED IN FETAL LIVER, SIGNAL = 3.5; EXPRESSED IN LUNG, SIGNAL = 3.3; EXPRESSED IN ADULT LIVER, SIGNAL = 4.4; SWISSPROT HIT: P27920, EVALUE 6.60e+00; EST_HUMAN HIT: AA535749.1, EVALUE 2.10e+00
gttgccctggaaattgatatcttcttctgagtttggcttaacaggggaaccaccagtgcccttgcggatggctgaggtgtcttttatgctaggtatggctctcttccagataaccaagtgtagacaggagtaggcccagttgttcatggagcattggtt

SEQ ID NO: 19916 - DNA, 212 bp, Homo sapiens
  MAP TO L77570.1; EXPRESSED IN PLACENTA, SIGNAL = 6.9; EXPRESSED IN ADULT LIVER, SIGNAL = 5.9; EXPRESSED IN BT474, SIGNAL = 5.5; EXPRESSED IN FETAL LIVER, SIGNAL = 4.2; EXPRESSED IN BRAIN, SIGNAL = 4.9; EXPRESSED IN LUNG, SIGNAL = 3.5; EXPRESSED IN BONE MARROW, SIGNAL = 5.4; EXPRESSED IN HEART, SIGNAL = 4.7; EXPRESSED IN HELA, SIGNAL = 6.2; EXPRESSED IN HBL100, SIGNAL = 5.8; SWISSPROT HIT: P98153, EVALUE 1.00e-35; EST_HUMAN HIT: AI073830.1, EVALUE 1.00e-109; NT HIT: L77570.1, EVALUE 1.00e-116
ttgcgctggtccttccaaccaaagctccgctcgggctggtcccattcctgggccaggacaaagcgcagctcctggtcagtgaagaaggtggcgagagagccattcaggcgctggcaggtctgcgcggcatcccagtagttctccccgctcaggtagacccggtagcagctggccgtgccttcgtagtggtgccacctgtcgggcacttccct

SEQ ID NO: 19917 - DNA, 469 bp, Homo sapiens
  MAP TO AL035411.27; EXPRESSED IN HELA, SIGNAL = 1.2; EXPRESSED IN HEART, SIGNAL = 1.1; EXPRESSED IN FETAL LIVER, SIGNAL = 1.2; EXPRESSED IN BT474, SIGNAL = 1.2; EXPRESSED IN BRAIN, SIGNAL = 0.98; EXPRESSED IN LUNG, SIGNAL = 1.1; EXPRESSED IN BONE MARROW, SIGNAL = 1.1; EXPRESSED IN PLACENTA, SIGNAL = 0.93; EXPRESSED IN HBL100, SIGNAL = 1.2; EXPRESSED IN ADULT LIVER, SIGNAL = 1.3; NT HIT: U66061.1, EVALUE 4.60e+00; SWISSPROT HIT: P32591, EVALUE 3.20e-01; EST_HUMAN HIT: BF243336.1, EVALUE 0.00e+00
cattgatccaaaatataatttctaattttcaaatagcgttctggtgttttagcttggcgcccctcaaaaaactcaggaattgcttgtttttcttcttcttgaatgatatttctatctatttctatttcctgttctggtggcttaagctcttcttcctcatggctttcctctaccatttggcaagaatgaaaaagcatttcattatcattcaaatttttctgaatttcacaaggctctggagaaggcaactgcctggcatcaactattattccccttccatcatgcttgttgcagtttttaatcaattcattaaatttctggtcatttaattcaattgattttttgtcaccattgctctgtttctcagtccacagtgtaatttctgagcttgaaagtgtttcatcttgcttttcattttgaagacagcccctggaagacttagaaaagagagcttcctggctgtcagaag

SEQ ID NO: 19918 - DNA, 323 bp, Homo sapiens
  MAP TO AC007353.1; EXPRESSED IN BONE MARROW, SIGNAL = 1.4; EXPRESSED IN BRAIN, SIGNAL = 1.5; EXPRESSED IN HELA, SIGNAL = 1.1; EXPRESSED IN HBL100, SIGNAL = 0.99; EXPRESSED IN HEART, SIGNAL = 1.1; EXPRESSED IN BT474, SIGNAL = 1.5; EXPRESSED IN ADULT LIVER, SIGNAL = 0.99; EST_HUMAN HIT: AU120753.1, EVALUE 8.00e-79; NT HIT: gi8922325, EVALUE 4.00e-79; SWISSPROT HIT: P57175, EVALUE 3.70e+00
tggaaaacagatggttcagctgcaaactaaatgtgacccttatgtccttgagcatagacatgaagtgaaaattggagagactgtgttaccctttcacattcaccctggcagcgatacttgtgatggctgcgagccacggcatggtagagctcacctttgccttgataagaaagatgaattgtttactggtccaacactgagtaaggagaaaaaaagagttgggaataagaaaataattaaagaaaatacgagtaaaatatggtttcagaatacagactatgaagatgaatagacatggaagaatctaaaatataaagatagag

SEQ ID NO: 19919 - DNA, 267 bp, Homo sapiens
  MAP TO AL109627.12; EXPRESSED IN BONE MARROW, SIGNAL = 1.1; EXPRESSED IN HBL100, SIGNAL = 1.3; EXPRESSED IN HELA, SIGNAL =   1; EXPRESSED IN PLACENTA, SIGNAL = 1.2; EXPRESSED IN HEART, SIGNAL =   1; EXPRESSED IN BT474, SIGNAL = 1.1; EXPRESSED IN FETAL LIVER, SIGNAL = 1.3; EXPRESSED IN ADULT LIVER, SIGNAL = 1.4; EST_HUMAN HIT: AI968086.1, EVALUE 0.00e+00; SWISSPROT HIT: P13805, EVALUE 2.10e-01; NT HIT: AB037753.1, EVALUE 3.00e-21
ctgttgagtggaatgtcatggccagctcctcggacagtgaagatgacagtttcatggctgtggaccaggaagaaactgtgctggaagggacaatggatcaagatgaggagccccacccagtattggaggctgaggagactagacataataggtccatgtcggagctgccagaagaggttttggagtatatcctgtcctttctctcaccgtatcaggaacacaaaactgcggcccttgtctgcaaacagtggtatcgacttatcaaag

SEQ ID NO: 19920 - DNA, 186 bp, Homo sapiens
  MAP TO AC007738.2; EXPRESSED IN HBL100, SIGNAL = 3.3; EXPRESSED IN HEART, SIGNAL = 2.9; EXPRESSED IN BT474, SIGNAL = 3.3; EXPRESSED IN BRAIN, SIGNAL = 2.8; EXPRESSED IN BONE MARROW, SIGNAL = 2.6; EXPRESSED IN PLACENTA, SIGNAL = 3.1; EXPRESSED IN HELA, SIGNAL = 3.4; EXPRESSED IN ADULT LIVER, SIGNAL =   3; EXPRESSED IN FETAL LIVER, SIGNAL = 3.1; EXPRESSED IN LUNG, SIGNAL =   3; EST_HUMAN HIT: BF569848.1, EVALUE 3.00e-58; NT HIT: Z97341.2, EVALUE 6.80e+00; SWISSPROT HIT: P52867, EVALUE 7.40e-01
attcatcagtaatcttagtttttcaatgtctttcatctgctggagttctttcagggttagagttacatcacacctggcttcataaaccaatgtttccagagtaaccaaattgtcacagagaaccagcaaaccaggaatattccgctccatcccaagtcgaataagtgacaatgcacagtccaccta

SEQ ID NO: 19921 - DNA, 115 bp, Homo sapiens
  MAP TO AC007249.2; EXPRESSED IN BONE MARROW, SIGNAL = 3.7; EXPRESSED IN PLACENTA, SIGNAL = 3.7; EXPRESSED IN ADULT LIVER, SIGNAL = 4.7; EXPRESSED IN BT474, SIGNAL = 3.5; EXPRESSED IN BRAIN, SIGNAL = 3.3; EXPRESSED IN LUNG, SIGNAL = 4.4; EXPRESSED IN HEART, SIGNAL = 4.5; EXPRESSED IN HELA, SIGNAL =   4; EXPRESSED IN HBL100, SIGNAL = 3.9; EXPRESSED IN FETAL LIVER, SIGNAL = 3.9; SWISSPROT HIT: Q28631, EVALUE 9.20e-02
gcgcttggccgtggaaaagctcctgggagggtgttcctgccccggaaaacctcgctgctgcatccgttccaccagcaaggtttcctgagtgtctcctgggttcagaaacggtgtc

SEQ ID NO: 19922 - DNA, 195 bp, Homo sapiens
  MAP TO AC007321.1; EXPRESSED IN HBL100, SIGNAL = 2.4; EXPRESSED IN HEART, SIGNAL = 2.4; EXPRESSED IN ADULT LIVER, SIGNAL = 2.6; EXPRESSED IN BT474, SIGNAL = 3.8; EXPRESSED IN BRAIN, SIGNAL = 2.2; EXPRESSED IN PLACENTA, SIGNAL = 2.5; EXPRESSED IN HELA, SIGNAL = 2.8; EXPRESSED IN FETAL LIVER, SIGNAL =   2; EXPRESSED IN LUNG, SIGNAL = 2.5; EXPRESSED IN BONE MARROW, SIGNAL = 1.7; EST_HUMAN HIT: AW629173.1, EVALUE 1.00e-106; NT HIT: gi11420122, EVALUE 1.00e-106; SWISSPROT HIT: Q9S5A3, EVALUE 1.30e+00
tgcctttgcattcaagcaaagaagatgcttatgatggagtcacatctgaaaacatgaggaatggactggttaatagtgaagtccataatgaagatggaagaaatggagatgtctctcagtttccatatgtggaatttacaggaagagatagtgtcacctgccctacttgtcagggaacaggaagaattcctaggg

SEQ ID NO: 19923 - DNA, 163 bp, Homo sapiens
  MAP TO AC007256.1; EXPRESSED IN PLACENTA, SIGNAL =   2; EXPRESSED IN ADULT LIVER, SIGNAL = 2.6; EXPRESSED IN BT474, SIGNAL =   4; EXPRESSED IN FETAL LIVER, SIGNAL = 2.1; EXPRESSED IN BONE MARROW, SIGNAL = 3.9; EXPRESSED IN LUNG, SIGNAL = 1.8; EXPRESSED IN BRAIN, SIGNAL =   4; EXPRESSED IN HELA, SIGNAL = 3.5; EXPRESSED IN HBL100, SIGNAL =   4; EXPRESSED IN HEART, SIGNAL = 3.5; EST_HUMAN HIT: BF095670.1, EVALUE 3.00e-73; SWISSPROT HIT: Q14790, EVALUE 8.00e-20; NT HIT: X98177.1, EVALUE 2.00e-73
ctttgctgaattcttcatagtcgttgattatcttcagcaggctcttgttgatttgggcacagactcttttcaggatgtccaactttccttctcccaggatgaccctcttctccatctctatgaaaatatccagcaggttctaagaggaggagaaataaagttg

SEQ ID NO: 19924 - DNA, 496 bp, Homo sapiens
  MAP TO AC007981.31; EXPRESSED IN BRAIN, SIGNAL = 4.4; EXPRESSED IN BONE MARROW, SIGNAL = 4.3; EXPRESSED IN PLACENTA, SIGNAL = 5.4; EXPRESSED IN ADULT LIVER, SIGNAL =   6; EXPRESSED IN FETAL LIVER, SIGNAL = 4.7; EXPRESSED IN BT474, SIGNAL = 4.3; EXPRESSED IN LUNG, SIGNAL = 7.8; EXPRESSED IN HEART, SIGNAL =   4; EXPRESSED IN HELA, SIGNAL = 4.7; EXPRESSED IN HBL100, SIGNAL = 4.1; NT HIT: X98922.1, EVALUE 0.00e+00; EST_HUMAN HIT: AI806336.1, EVALUE 1.00e-117; SWISSPROT HIT: P19440, EVALUE 2.00e-42
atggacgacttcagctctcccagcatcaccaatgagtttggggcacccccctcacctgccaatttcatccagccaggtatggggtggaggtccggggggtgggggactggggtggagaggggcgggtgtcctgggcaggcagctgacgggcatccctgtcttctcccatcggccgcagggaagcagccgctcttgtccatgtgcccgacgatcatggtgggccaggacggccaggtccggatggtggtgggagctgctgggggcacgcagatcaccacagacactgcactggtatgtgtcaccccttttctccctggccctgcccactctgcacagcccccaagccacgctgatcacactcccatgccccaggccatcatctacaacctctggttcggctatgacgtgaagagggccgtggaggagccccggctgcacaacaagcttctgcccaacgtcacgacagtggagagaaacattgaccaggtgggccggg

SEQ ID NO: 19925 - DNA, 157 bp, Homo sapiens
  MAP TO AC006992.2; EXPRESSED IN BONE MARROW, SIGNAL = 0.65; EXPRESSED IN FETAL LIVER, SIGNAL = 0.69; EXPRESSED IN ADULT LIVER, SIGNAL = 0.77; EXPRESSED IN BRAIN, SIGNAL = 1.2; EXPRESSED IN HEART, SIGNAL = 0.84; EXPRESSED IN PLACENTA, SIGNAL = 0.72; EXPRESSED IN BT474, SIGNAL = 0.93; SWISSPROT HIT: P09379, EVALUE 3.00e+00; NT HIT: gi7662349, EVALUE 1.00e-83
cattgcttgtagtccgcgtcgcagttacagtagtacttgggatctgtgcagttgcgttcgatgccgcaggcacatttctggattccaggcccagagcctccccagtagtagtgcttctcgttggctttgccaacccaccaagtgtaagggcttccat

SEQ ID NO: 19926 - DNA, 152 bp, Homo sapiens
  MAP TO AL118508.9; EXPRESSED IN HBL100, SIGNAL =   1; EXPRESSED IN PLACENTA, SIGNAL = 0.96; EXPRESSED IN ADULT LIVER, SIGNAL = 1.4; EXPRESSED IN HEART, SIGNAL =   1; EXPRESSED IN BT474, SIGNAL =   1; EXPRESSED IN LUNG, SIGNAL = 1.1; NT HIT: AF078111.1, EVALUE 2.90e-01; SWISSPROT HIT: P15989, EVALUE 1.70e+00
ggcagaggtgggggatttccatgcttccggggatttggcataactcctccaaactctggtctctaatcatccaccacatgacccctgggaccctgacatccagtctggacttgattgtcttcagattgttcacctgcagccagttctggggc

SEQ ID NO: 19927 - DNA, 358 bp, Homo sapiens
  MAP TO AL050343.17; EXPRESSED IN HELA, SIGNAL = 3.1; EXPRESSED IN PLACENTA, SIGNAL = 1.8; EXPRESSED IN BT474, SIGNAL = 2.3; EXPRESSED IN BONE MARROW, SIGNAL = 1.2; EXPRESSED IN BRAIN, SIGNAL = 1.8; EXPRESSED IN HBL100, SIGNAL = 2.7; EXPRESSED IN HEART, SIGNAL = 3.3; EXPRESSED IN ADULT LIVER, SIGNAL = 1.4; EXPRESSED IN FETAL LIVER, SIGNAL = 1.9; EXPRESSED IN LUNG, SIGNAL =   2; SWISSPROT HIT: P12236, EVALUE 8.00e-27; NT HIT: AF055633.1, EVALUE 1.00e-05; EST_HUMAN HIT: BE786601.1, EVALUE 7.00e-24
acagggagatggccccagccgcccctcaggaagccaggttgcctgcaaaatatctccagaactgtgcatgcttatgcacgcctcccagaaggacctgcttgtacttatccctaaaggcaaagttgagggcttgcatggggaagcagtggatggtgctggccaggtgcccctccagaaggacaagtgccctgctccttggggatgtggaccttgcagcccaccacaccacgcctttgtacggtgtcgccacaatctgcttactggcatgttgcacctgcagcagtgccttgactggctcaactcgggtcgctgccctcttggaaatagcgagggcaatgcctccggccagtaagtcctt

SEQ ID NO: 19928 - DNA, 232 bp, Homo sapiens
  MAP TO AP000082.1; EXPRESSED IN FETAL LIVER, SIGNAL = 1.6; EXPRESSED IN BONE MARROW, SIGNAL = 3.1; EXPRESSED IN LUNG, SIGNAL = 3.1; EXPRESSED IN BRAIN, SIGNAL = 2.8; EXPRESSED IN HELA, SIGNAL = 3.3; EXPRESSED IN HEART, SIGNAL = 3.7; EXPRESSED IN PLACENTA, SIGNAL = 3.7; EXPRESSED IN HBL100, SIGNAL = 3.3; EXPRESSED IN BT474, SIGNAL = 2.7; EXPRESSED IN ADULT LIVER, SIGNAL = 2.4
  unsure 124
  unsure 127
aggtaaacacacccctcggtgcataatctttcttcttcttctttcttcttctttcttctccttctccttctccttcttcttcttccttctttcctcctcctcctcctcctcctcctccaccacnacntcctcctcctcctccttcttcttcttcttcttcttcttcttcttcttcttcttcttcttcttcttcttcttcttcttcttcttcttcttcttcttcttcttcttc

SEQ ID NO: 19929 - DNA, 130 bp, Homo sapiens
  MAP TO AC007247.2; EXPRESSED IN BONE MARROW, SIGNAL = 2.2; EXPRESSED IN HELA, SIGNAL = 2.4; EXPRESSED IN FETAL LIVER, SIGNAL = 3.1; EXPRESSED IN BRAIN, SIGNAL =   3; EXPRESSED IN LUNG, SIGNAL =   3; EXPRESSED IN PLACENTA, SIGNAL = 2.4; EXPRESSED IN HEART, SIGNAL = 2.9; EXPRESSED IN HBL100, SIGNAL = 2.1; EXPRESSED IN BT474, SIGNAL = 2.2; EXPRESSED IN ADULT LIVER, SIGNAL = 2.6; NT HIT: Y19215.1, EVALUE 5.00e-09; EST_HUMAN HIT: N74366.1, EVALUE 3.00e-11; SWISSPROT HIT: P25236, EVALUE 8.90e+00
ggctgctagttgtcagaagacaagtgatttctttgaaatgcatgaggttagaaaggaagctgatcttcagttggcagtgtttgtccaagatgatggtgcccttgttctgtcattccagaccctttagtta

SEQ ID NO: 19930 - DNA, 172 bp, Homo sapiens
  MAP TO AC007444.1; EXPRESSED IN LUNG, SIGNAL = 2.8; EXPRESSED IN BONE MARROW, SIGNAL = 4.5; EXPRESSED IN BRAIN, SIGNAL = 4.6; EXPRESSED IN HELA, SIGNAL = 2.5; EXPRESSED IN PLACENTA, SIGNAL = 2.4; EXPRESSED IN HBL100, SIGNAL = 3.4; EXPRESSED IN HEART, SIGNAL = 2.9; EXPRESSED IN BT474, SIGNAL = 3.6; EXPRESSED IN FETAL LIVER, SIGNAL = 2.4; EXPRESSED IN ADULT LIVER, SIGNAL =   3; SWISSPROT HIT: P20849, EVALUE 2.20e+00; EST_HUMAN HIT: BF526783.1, EVALUE 5.90e-01; NT HIT: L05468.1, EVALUE 8.60e-02
tcagtgccgctctccaccatctgcgtgaggagagagataccgtccaggtttataaactcctgggcaaacgtgacatcccgggagaggctggccaagtccttcagggcttccagcttggcatccatactcgaggactggattcgttcatggagctgctgggcgttctgagcct

SEQ ID NO: 19931 - DNA, 143 bp, Homo sapiens; identical to SEQ ID NO: 18547
  MAP TO AL049593.8; EXPRESSED IN ADULT LIVER, SIGNAL = 1.2; EXPRESSED IN HELA, SIGNAL =   1; EXPRESSED IN HEART, SIGNAL = 1.3; EXPRESSED IN FETAL LIVER, SIGNAL = 1.1; EXPRESSED IN BT474, SIGNAL = 1.2; EXPRESSED IN BRAIN, SIGNAL = 1.3; EXPRESSED IN LUNG, SIGNAL = 1.1; EXPRESSED IN BONE MARROW, SIGNAL = 1.1; EXPRESSED IN PLACENTA, SIGNAL = 1.1; EXPRESSED IN HBL100, SIGNAL =   1; EST_HUMAN HIT: BE697682.1, EVALUE 5.00e-75; NT HIT: AY004175.1, EVALUE 3.00e-75; SWISSPROT HIT: P10687, EVALUE 2.00e-06

SEQ ID NO: 19932 - DNA, 122 bp, Homo sapiens
  MAP TO AL109855.8; EXPRESSED IN BT474, SIGNAL = 3.1; EXPRESSED IN BRAIN, SIGNAL = 2.3; EXPRESSED IN HEART, SIGNAL = 2.4; EXPRESSED IN ADULT LIVER, SIGNAL =   3; EXPRESSED IN FETAL LIVER, SIGNAL = 2.4; EXPRESSED IN LUNG, SIGNAL = 2.4; EXPRESSED IN BONE MARROW, SIGNAL = 2.5; EXPRESSED IN HELA, SIGNAL = 2.7; EXPRESSED IN PLACENTA, SIGNAL = 3.1; EXPRESSED IN HBL100, SIGNAL = 2.4; EST_HUMAN HIT: BE008025.1, EVALUE 9.00e-30; NT HIT: AJ271736.1, EVALUE 5.00e-21; SWISSPROT HIT: P21435, EVALUE 8.10e-01
ctaggggacagcttgtaacccagaggtttgggacattctttactccagtgtcctggatttctacagcaatgccaggcccccattcttttagtattatagggacgagccttggggttattagc

SEQ ID NO: 19933 - DNA, 193 bp, Homo sapiens
  MAP TO AP000556.2; EXPRESSED IN HBL100, SIGNAL = 2.2; EXPRESSED IN HELA, SIGNAL = 1.5; EXPRESSED IN FETAL LIVER, SIGNAL = 1.8; EXPRESSED IN HEART, SIGNAL = 2.3; EXPRESSED IN PLACENTA, SIGNAL = 2.8; EXPRESSED IN ADULT LIVER, SIGNAL =   1; EXPRESSED IN BT474, SIGNAL = 2.1; EXPRESSED IN BRAIN, SIGNAL = 2.2; EXPRESSED IN LUNG, SIGNAL = 3.4; EXPRESSED IN BONE MARROW, SIGNAL = 2.1; SWISSPROT HIT: P18915, EVALUE 1.00e-03; EST_HUMAN HIT: AI912258.1, EVALUE 6.70e-01; NT HIT: D30612.1, EVALUE 1.80e+00
gccccagtccttgttccagcagtccccacccactggaagaagctggcccctgcctgtgggggcccaggccagtccctcatcgacattgactttcacagggtccggcggaactctaccctagggcccttcatcttccgaggctatgactcagcacctccaggcccttggaccctggagaatgacagccacacag

SEQ ID NO: 19934 - DNA, 87 bp, Homo sapiens
  MAP TO AC007335.2; EXPRESSED IN PLACENTA, SIGNAL = 0.95; EXPRESSED IN HELA, SIGNAL = 1.1; EXPRESSED IN HBL100, SIGNAL = 1.1; EXPRESSED IN HEART, SIGNAL = 1.2; EXPRESSED IN ADULT LIVER, SIGNAL = 1.2; EXPRESSED IN BT474, SIGNAL = 0.95; EXPRESSED IN BONE MARROW, SIGNAL = 1.2; EST_HUMAN HIT: W92548.1, EVALUE 2.00e-08; NT HIT: X70872.1, EVALUE 5.00e-08
aatatcttcagacattgccaaatgtcccctgggggacaaaagcaccttggttgggaacgactgctttaacctagtaaaacttagaag

SEQ ID NO: 19935 - DNA, 263 bp, Homo sapiens
  MAP TO AC008045.4; EXPRESSED IN FETAL LIVER, SIGNAL = 1.6; EXPRESSED IN ADULT LIVER, SIGNAL = 1.5; EXPRESSED IN BT474, SIGNAL = 1.7; EXPRESSED IN BRAIN, SIGNAL = 1.3; EXPRESSED IN BONE MARROW, SIGNAL = 1.2; EXPRESSED IN LUNG, SIGNAL = 1.5; EXPRESSED IN PLACENTA, SIGNAL = 1.4; EXPRESSED IN HBL100, SIGNAL = 1.5; EXPRESSED IN HELA, SIGNAL = 1.6; EXPRESSED IN HEART, SIGNAL = 1.5; EST_HUMAN HIT: BE348399.1, EVALUE 9.00e-25; NT HIT: gi4758827, EVALUE 0.00e+00; SWISSPROT HIT: Q21313, EVALUE 2.00e-09
atctgtgctacgacctgtctcagaacccgatccagagcagcagtgatgaaatcaccctctcctttaagacctggcagcgtaacggcctcatcctgcacacgggcaagtcggctgactatgtcaacctggctctgaaggatggtgcggtctccttggtcattaacctggggtccggggcctttgaggccattgtggagccagtgaatggaaaattcaacgacaacgcctggcatgatgtcaaagtgacacgcaacctccggcag

SEQ ID NO: 19936 - DNA, 294 bp, Homo sapiens
  MAP TO AL031983.1; EXPRESSED IN BT474, SIGNAL = 1.3; EXPRESSED IN BONE MARROW, SIGNAL = 1.7; EXPRESSED IN HEART, SIGNAL = 1.3; EXPRESSED IN FETAL LIVER, SIGNAL = 1.4; EXPRESSED IN LUNG, SIGNAL = 1.2; EXPRESSED IN HELA, SIGNAL = 1.1; EXPRESSED IN BRAIN, SIGNAL = 1.2; EXPRESSED IN PLACENTA, SIGNAL = 1.2; EXPRESSED IN HBL100, SIGNAL = 1.3; EXPRESSED IN ADULT LIVER, SIGNAL = 1.5; NT HIT: S78653.1, EVALUE 1.00e-02; EST_HUMAN HIT: N79066.1, EVALUE 1.20e-02; SWISSPROT HIT: P35410, EVALUE 3.00e-17
gtggtctgctggcttttctgcttccaggtcaggagcagcccctacgtgacctatgtccttaacctggccgctgctgatatggtcaacctctcctgtgtaactgtgatcctgttggagaaaatcctcatgctgtatcaccaggtgacattgcaggtggccatgtttctggagcctgtgtcctatttctctgacacagtgagtctctgtctcctggtggccatgaatattgagagctttctgtgtgtcctctgtcccacctggtgctgccaccgcccaaagcacacctctgctgtg

SEQ ID NO: 19937 - DNA, 262 bp, Homo sapiens
  MAP TO AC010175.4; EXPRESSED IN HEART, SIGNAL = 1.9; EXPRESSED IN PLACENTA, SIGNAL = 2.7; EXPRESSED IN FETAL LIVER, SIGNAL = 6.4; EXPRESSED IN ADULT LIVER, SIGNAL = 1.9; EXPRESSED IN BRAIN, SIGNAL = 1.5; EXPRESSED IN LUNG, SIGNAL = 8.2; EXPRESSED IN BONE MARROW, SIGNAL = 1.5; EXPRESSED IN HELA, SIGNAL = 2.7; NT HIT: gi11436041, EVALUE 1.00e-110; EST_HUMAN HIT: BE695987.1, EVALUE 1.00e-103; SWISSPROT HIT: P20742, EVALUE 2.00e-32
ggaccgtggccttgagtgtgaagacctctccacgaatcacagagtaaggcattgtgagctccacaaagaagggctggaaggctcggagagaggcagtggaagagataccaagtccagcatcttcggacaggcagaaggcccctgccttccactcggtgatggtgtcagggactgttactcctacctcagccacacctgatgagctggggaggagggcaagtgaagaacagaaataatgaatgtaagccaccttttctcaagt

SEQ ID NO: 19938 - DNA, 215 bp, Homo sapiens
  MAP TO AC010892.2; EXPRESSED IN BT474, SIGNAL = 4.9; EXPRESSED IN LUNG, SIGNAL = 5.9; EXPRESSED IN HEART, SIGNAL = 4.5; EXPRESSED IN ADULT LIVER, SIGNAL = 6.5; EXPRESSED IN FETAL LIVER, SIGNAL = 6.5; EXPRESSED IN BRAIN, SIGNAL = 4.7; EXPRESSED IN BONE MARROW, SIGNAL = 4.6; EXPRESSED IN PLACENTA, SIGNAL = 6.7; EXPRESSED IN HELA, SIGNAL = 5.4; EXPRESSED IN HBL100, SIGNAL = 4.9; SWISSPROT HIT: Q58576, EVALUE 2.10e-02; NT HIT: AB040969.1, EVALUE 3.00e-85; EST_HUMAN HIT: AI347694.1, EVALUE 1.00e-118
aaccagctcgatgagagccagcaagaacggaatgacctgatgcagctgaagctacagctggagggacaggtgacagagctgaggagccgagtgcaggagctcgagagggctctggcaactgccaggcaggagcacacggagctgatggaacagtacaaggtgggagctgggccaggtaggggacagggcctggctgctcacccagcatccaaaat

SEQ ID NO: 19939 - DNA, 162 bp, Homo sapiens
  MAP TO AC007322.2; EXPRESSED IN BONE MARROW, SIGNAL = 8.7; EXPRESSED IN BRAIN, SIGNAL = 7.6; EXPRESSED IN PLACENTA, SIGNAL = 5.6; EXPRESSED IN HBL100, SIGNAL = 5.7; EXPRESSED IN HELA, SIGNAL =   4; EXPRESSED IN HEART, SIGNAL = 4.2; EXPRESSED IN FETAL LIVER, SIGNAL =   7; EXPRESSED IN BT474, SIGNAL = 6.5; EXPRESSED IN ADULT LIVER, SIGNAL = 8.7; EXPRESSED IN LUNG, SIGNAL = 7.6; SWISSPROT HIT: P10263, EVALUE 2.00e-11; EST_HUMAN HIT: AW380045.1, EVALUE 1.50e+00
tgtggaagggctccagtgctgttttaattgctgaccacccagagcaagtggagaagggaatattgtggccctcttggtgtgctccttttaagtctggtccgatcttgtcccagtcttttacattcatggttccatattctgggaaccaaggagaatactttt

SEQ ID NO: 19940 - DNA, 119 bp, Homo sapiens
  MAP TO D87675.1; EXPRESSED IN HBL100, SIGNAL = 1.7; EXPRESSED IN HELA, SIGNAL = 1.6; EXPRESSED IN HEART, SIGNAL = 1.9; EXPRESSED IN BT474, SIGNAL = 1.5; EXPRESSED IN LUNG, SIGNAL = 4.1; EXPRESSED IN BRAIN, SIGNAL = 3.3; EXPRESSED IN PLACENTA, SIGNAL = 1.8; NT HIT: X06989.1, EVALUE 6.00e-61; EST_HUMAN HIT: BE735858.1, EVALUE 8.00e-61; SWISSPROT HIT: P05067, EVALUE 3.00e-19
actgcagatcaccaatgtggtagaagccaaccaaccagtgaccatccagaactggtgcaagcggggccgcaagcagtgcaagacccatccccactttgtgattccctaccgctgcttag

SEQ ID NO: 19941 - DNA, 117 bp, Homo sapiens
  MAP TO AP000169.1; EXPRESSED IN ADULT LIVER, SIGNAL = 1.2; EXPRESSED IN HELA, SIGNAL = 1.2; EXPRESSED IN HEART, SIGNAL = 1.2; EXPRESSED IN PLACENTA, SIGNAL = 1.2; EXPRESSED IN BT474, SIGNAL = 1.1; EXPRESSED IN BONE MARROW, SIGNAL = 1.1; EXPRESSED IN FETAL LIVER, SIGNAL = 0.91; EXPRESSED IN LUNG, SIGNAL = 1.2; EXPRESSED IN BRAIN, SIGNAL = 1.2; EXPRESSED IN HBL100, SIGNAL = 0.82; SWISSPROT HIT: Q9ZKE4, EVALUE 4.00e+00; NT HIT: X77260.1, EVALUE 4.00e+00; EST_HUMAN HIT: AA204973.1, EVALUE 1.50e+00
atgtcacctatcctatcccgtgccctcaaatgggggctactgctccactgacacgctggttgggaaggtgagggcgctgcagctgaaacagctgtattacacaggagtacagccata

SEQ ID NO: 19942 - DNA, 241 bp, Homo sapiens
  MAP TO AC007271.2; EXPRESSED IN ADULT LIVER, SIGNAL =  11; EXPRESSED IN BONE MARROW, SIGNAL = 9.6; EXPRESSED IN PLACENTA, SIGNAL = 9.6; EXPRESSED IN BT474, SIGNAL = 8.2; EXPRESSED IN FETAL LIVER, SIGNAL =  11; EXPRESSED IN BRAIN, SIGNAL = 8.5; EXPRESSED IN LUNG, SIGNAL =  12; EXPRESSED IN HEART, SIGNAL = 7.7; EXPRESSED IN HELA, SIGNAL =  10; EXPRESSED IN HBL100, SIGNAL = 9.1; EST_HUMAN HIT: AW262008.1, EVALUE 0.00e+00; SWISSPROT HIT: P14778, EVALUE 8.00e-40; NT HIT: X16896.1, EVALUE 0.00e+00
acgtaaagaaaagcagaagactgattatcattttagtcagagaaacatcaggcttcagctggctgggtggttcatctgaagagcaaatagccatgtataatgctcttgttcaggatggaattaaagttgtcctgcttgagctggagaaaatccaagactatgagaaaatgccagaatcgattaaattcattaagcagaaacatggggctatccgctggtcaggggactttacacagggacc

SEQ ID NO: 19943 - DNA, 588 bp, Homo sapiens
  MAP TO AC010680.3; EXPRESSED IN HEART, SIGNAL = 3.3; EXPRESSED IN ADULT LIVER, SIGNAL = 1.2; EXPRESSED IN FETAL LIVER, SIGNAL = 0.92; NT HIT: gi4507720, EVALUE 0.00e+00; EST_HUMAN HIT: BE712539.1, EVALUE 0.00e+00; SWISSPROT HIT: Q00872, EVALUE 9.00e-25
tggctcctgatcttgacttaaagggtctacctgatttgtgctacttggctaaagaaaacagcaacttccggcttaagatccccataaaaggcaagccagctccatcagtctcctggaagaaaggggaagatcctctagcaactgacactagagtcagtgttgagtcatctgcggttaacacaactcttatagtgtacgattgccaaaaatctgatgctggaaaatacacaatcacacttaagaatgttgctggcaccaaggaaggaactatctccataaaggttgttggcaagcctggcatccccactggaccaatcaaatttgatgaagtcacagcagaagccatgaccttaaagtgggctcctccaaaggatgatggaggttctgaaatcaccaactatatcctagagaagagggattctgtgaacaacaagtgggtgacgtgcgcctcagctgtccagaaaaccacctttagagtaaccagacttcatgagggcatggaatataccttcagggtcagtgccgaaaataaatatggtgtaggggaaggcctgaaatcggagccaattgttgcgagacatccatttg

SEQ ID NO: 19944 - DNA, 126 bp, Homo sapiens
  MAP TO AL132641.1; EXPRESSED IN HBL100, SIGNAL = 3.9; EXPRESSED IN HELA, SIGNAL = 3.6; EXPRESSED IN FETAL LIVER, SIGNAL = 1.8; EXPRESSED IN BONE MARROW, SIGNAL = 3.8; EXPRESSED IN PLACENTA, SIGNAL = 5.7; EXPRESSED IN HEART, SIGNAL = 3.4; EXPRESSED IN BT474, SIGNAL = 3.9; EXPRESSED IN ADULT LIVER, SIGNAL = 4.7; EXPRESSED IN BRAIN, SIGNAL = 3.3; EXPRESSED IN LUNG, SIGNAL = 3.4; SWISSPROT HIT: P16379, EVALUE 6.80e+00; EST_HUMAN HIT: AL121002.1, EVALUE 1.60e+00
gaagcagaaaccaactgttttgcaatagctcagcccatactccagaccaattatgccaaaattcttggggttggggttgcatacagccatcaatattttcttctttttatttttatttttaacttt

SEQ ID NO: 19945 - DNA, 275 bp, Homo sapiens
  MAP TO AL109942.4; EXPRESSED IN PLACENTA, SIGNAL = 1.6; EXPRESSED IN HBL100, SIGNAL = 1.7; EXPRESSED IN ADULT LIVER, SIGNAL = 1.6; EXPRESSED IN BT474, SIGNAL =  11; EXPRESSED IN BONE MARROW, SIGNAL = 1.4; EXPRESSED IN BRAIN, SIGNAL = 1.7; EXPRESSED IN HEART, SIGNAL = 1.3; EXPRESSED IN FETAL LIVER, SIGNAL = 1.3; EXPRESSED IN LUNG, SIGNAL = 1.4; EXPRESSED IN HELA, SIGNAL = 1.6; NT HIT: gi9910391, EVALUE 5.00e-91; SWISSPROT HIT: P04863, EVALUE 2.00e+00; EST_HUMAN HIT: AW007384.1, EVALUE 8.00e-91
gaagttgctttctcccctagctgggagggcagagccctgctctcagcagggctcccaggacaaggctgcatgtagtaaacatctgtctgttgtggtttgttccagagctggtgatgctgctggagtggtggtcgggcacggaatgcaccatcttcacggacccgcgcgcctacctcaagtatgggaaggaaaatgccatcgtggttctcaaccacaagtttgaaattgactttctgtgtggctggagcctgtccgaacgctttgggctgttaggg

SEQ ID NO: 19946 - DNA, 193 bp, Homo sapiens
  MAP TO AC008132.26; EXPRESSED IN HBL100, SIGNAL = 2.4; EXPRESSED IN HEART, SIGNAL = 2.5; EXPRESSED IN BT474, SIGNAL = 2.7; EXPRESSED IN BRAIN, SIGNAL =   2; EXPRESSED IN BONE MARROW, SIGNAL = 1.7; EXPRESSED IN PLACENTA, SIGNAL =   3; EXPRESSED IN HELA, SIGNAL = 2.9; EXPRESSED IN ADULT LIVER, SIGNAL = 3.3; EXPRESSED IN FETAL LIVER, SIGNAL = 2.9; EXPRESSED IN LUNG, SIGNAL = 3.1; EST_HUMAN HIT: AI906419.1, EVALUE 2.00e-80; SWISSPROT HIT: P19440, EVALUE 9.00e-31; NT HIT: gi9845492, EVALUE 1.00e-101
cacaagacaggctgctgctcgatgacggtccgcttgttttccaggactgccgccaagcccttgcccacggggaagccctggcgggccagctggatgctgggctggaagaggcgagcccagggcagccgcccatgccgctggtgtgccagctcatagcctcggatctccccaggcaccgccaccgacagccctc

SEQ ID NO: 19947 - DNA, 210 bp, Homo sapiens
  MAP TO AC007423.4; EXPRESSED IN BONE MARROW, SIGNAL =   1; EXPRESSED IN LUNG, SIGNAL = 1.8; EXPRESSED IN HBL100, SIGNAL = 1.4; EXPRESSED IN HEART, SIGNAL = 1.2; EXPRESSED IN ADULT LIVER, SIGNAL = 2.6; EXPRESSED IN BT474, SIGNAL = 1.5; EXPRESSED IN BRAIN, SIGNAL =   1; EXPRESSED IN PLACENTA, SIGNAL = 1.8; EXPRESSED IN HELA, SIGNAL = 1.9; EXPRESSED IN FETAL LIVER, SIGNAL = 1.5; EST_HUMAN HIT: AI935086.1, EVALUE 4.00e-54; NT HIT: AF003528.1, EVALUE 8.00e-43
taccaaaagaaggaggaaatactcatgacaattacagtcctcatttctgcagctggtcatgtggtcataactggtattgatgactaccttcttctaccacccattctgtattccttttgcctccagcaagcaactcagcaggtcgtggatttttttttttttcctgttggtgtgacccaaaccttcattcctgaagggtctggtaatttg

SEQ ID NO: 19948 - DNA, 105 bp, Homo sapiens
  MAP TO AP000264.1; EXPRESSED IN HBL100, SIGNAL = 0.83; EXPRESSED IN HELA, SIGNAL = 1.3; EXPRESSED IN ADULT LIVER, SIGNAL = 0.98; EXPRESSED IN BRAIN, SIGNAL = 1.1; EXPRESSED IN HEART, SIGNAL = 0.97; EXPRESSED IN PLACENTA, SIGNAL = 1.3; EXPRESSED IN FETAL LIVER, SIGNAL = 0.93; EXPRESSED IN LUNG, SIGNAL = 1.1; EXPRESSED IN BONE MARROW, SIGNAL = 1.1; EXPRESSED IN BT474, SIGNAL =   1; SWISSPROT HIT: P55200, EVALUE 7.20e+00; EST_HUMAN HIT: T26418.1, EVALUE 9.10e-01
aacagatgtcccacttgcacttcatgctggagatgcacaaatgcgcgctcatccccgcccactacaggttgggctccctccgctgacaccttagttgctgtccct

SEQ ID NO: 19949 - DNA, 121 bp, Homo sapiens
  MAP TO AC009290.1; EXPRESSED IN BT474, SIGNAL = 0.76; EXPRESSED IN FETAL LIVER, SIGNAL = 0.81; EXPRESSED IN LUNG, SIGNAL = 0.63; EXPRESSED IN ADULT LIVER, SIGNAL = 1.1; EXPRESSED IN HEART, SIGNAL = 0.89; EXPRESSED IN PLACENTA, SIGNAL = 0.8; EXPRESSED IN HELA, SIGNAL = 0.6; NT HIT: gi7661625, EVALUE 9.00e-01; SWISSPROT HIT: Q09630, EVALUE 2.30e+00
ggtaaatccaggtctgcaaaatctccctggaaacacttgtgcatgcatcaagcaccacaactttcatgctcccacctaaagcactgagacattgcttcacacttctcatgatagctattat

SEQ ID NO: 19950 - DNA, 232 bp, Homo sapiens
  MAP TO AC007993.8; EXPRESSED IN HBL100, SIGNAL = 6.2; EXPRESSED IN HELA, SIGNAL =   7; EXPRESSED IN PLACENTA, SIGNAL = 5.6; EXPRESSED IN HEART, SIGNAL =   6; EXPRESSED IN BT474, SIGNAL = 5.7; EXPRESSED IN FETAL LIVER, SIGNAL = 6.8; EXPRESSED IN ADULT LIVER, SIGNAL = 6.9; EXPRESSED IN LUNG, SIGNAL = 7.3; EXPRESSED IN BONE MARROW, SIGNAL = 8.2; EXPRESSED IN BRAIN, SIGNAL = 7.9; SWISSPROT HIT: O42280, EVALUE 2.00e-08; NT HIT: AJ249601.1, EVALUE 8.60e+00
atgccggaactggaactggcactccaggccgaggtgcatggcgtcccacagggtctcagccaggctgggctccctcccgcagagctgcttctgctgccgggacaacttcagcaggtcacactgcttcaggtgggccctgccctgtgctggggccaccgcagtgcccagtcctgggaagggcatcaggacctcccacctggtcaggctggagacggcgagaggacagagacgg

SEQ ID NO: 19951 - DNA, 103 bp, Homo sapiens
  MAP TO AC007274.1; EXPRESSED IN PLACENTA, SIGNAL = 1.8; EXPRESSED IN HBL100, SIGNAL =   2; EXPRESSED IN HELA, SIGNAL = 2.5; EXPRESSED IN HEART, SIGNAL = 2.1; EXPRESSED IN BT474, SIGNAL = 1.8; EXPRESSED IN FETAL LIVER, SIGNAL = 2.3; EXPRESSED IN ADULT LIVER, SIGNAL = 1.7; EXPRESSED IN BONE MARROW, SIGNAL = 1.9; EXPRESSED IN BRAIN, SIGNAL = 2.1; EXPRESSED IN LUNG, SIGNAL = 2.5; NT HIT: X17144.1, EVALUE 4.80e-02; SWISSPROT HIT: Q64707, EVALUE 2.70e-01; EST_HUMAN HIT: AA401020.1, EVALUE 3.30e-01
tcagtccttgtgctcttcattctctggtatcttctcaaggtccagttgctgtgacttcttctgctgatggttccactcgatgtccagctgctgttgactctcc

SEQ ID NO: 19952 - DNA, 92 bp, Homo sapiens
  MAP TO AL121590.7; EXPRESSED IN LUNG, SIGNAL = 2.4; EXPRESSED IN HELA, SIGNAL =   2; EXPRESSED IN PLACENTA, SIGNAL = 2.9; EXPRESSED IN ADULT LIVER, SIGNAL = 2.7; EXPRESSED IN BT474, SIGNAL = 2.4; EXPRESSED IN BONE MARROW, SIGNAL = 1.5; EXPRESSED IN HBL100, SIGNAL = 2.1; EXPRESSED IN HEART, SIGNAL =   2; EXPRESSED IN FETAL LIVER, SIGNAL = 2.2; EXPRESSED IN BRAIN, SIGNAL = 1.8; NT HIT: gi11421405, EVALUE 5.00e-45; EST_HUMAN HIT: AI523766.1, EVALUE 5.00e-45; SWISSPROT HIT: P15863, EVALUE 8.00e-12
aagatggaagactgggccggcgtgaaccgcacggccttccccgccacccccgcagtgaatgggctagagaaacctgccttagaggcagacat

SEQ ID NO: 19953 - DNA, 124 bp, Homo sapiens
  MAP TO AC009313.1; EXPRESSED IN HBL100, SIGNAL = 0.69; EXPRESSED IN FETAL LIVER, SIGNAL = 0.72; EXPRESSED IN BRAIN, SIGNAL = 0.94; EXPRESSED IN PLACENTA, SIGNAL = 0.94; EXPRESSED IN BT474, SIGNAL = 0.86; EXPRESSED IN HEART, SIGNAL = 0.89; EXPRESSED IN ADULT LIVER, SIGNAL = 1.2; EXPRESSED IN HELA, SIGNAL = 0.78; EXPRESSED IN LUNG, SIGNAL = 0.63; EXPRESSED IN BONE MARROW, SIGNAL = 1.1; EST_HUMAN HIT: AI805829.1, EVALUE 1.80e-02; SWISSPROT HIT: P24739, EVALUE 6.80e+00
tcaaacatgcagctggcaagtcttctaccctttctgtcttccacctcaggggtaggagctctcttcttcgttctcctggccttaacttcctctttgctgcctggtgagtttttacataaagtca

SEQ ID NO: 19954 - DNA, 156 bp, Homo sapiens
  MAP TO AC010937.2; EXPRESSED IN PLACENTA, SIGNAL = 1.3; EXPRESSED IN HBL100, SIGNAL = 4.1; EXPRESSED IN LUNG, SIGNAL = 1.4; EXPRESSED IN BRAIN, SIGNAL = 1.2; EXPRESSED IN HEART, SIGNAL = 0.98; EXPRESSED IN BT474, SIGNAL = 1.3; EXPRESSED IN ADULT LIVER, SIGNAL = 1.6; EXPRESSED IN FETAL LIVER, SIGNAL = 1.4; EXPRESSED IN BONE MARROW, SIGNAL = 1.3; EXPRESSED IN HELA, SIGNAL = 1.3; EST_HUMAN HIT: BE711682.1, EVALUE 8.30e+00; NT HIT: AB037541.1, EVALUE 3.60e-01; SWISSPROT HIT: O13353, EVALUE 1.30e+00
gtggtctttccaatgatgaggaatccaccatgcaggcccaggaccagagactgggagctcagagaaagtgtatggatgacatttctgttcatcctcggtggaagggtgagagtcacgtggtgacgaaattggctggagatatgagcgttgttttta

SEQ ID NO: 19955 - DNA, 101 bp, Homo sapiens
  MAP TO AL109798.13; EXPRESSED IN BRAIN, SIGNAL =   2; EXPRESSED IN LUNG, SIGNAL = 1.6; EXPRESSED IN HELA, SIGNAL = 1.8; EXPRESSED IN PLACENTA, SIGNAL = 1.8; EXPRESSED IN HEART, SIGNAL = 1.9; EXPRESSED IN FETAL LIVER, SIGNAL = 1.9; EXPRESSED IN ADULT LIVER, SIGNAL = 2.1; EXPRESSED IN BT474, SIGNAL = 2.4; EXPRESSED IN BONE MARROW, SIGNAL =   2; EXPRESSED IN HBL100, SIGNAL = 2.2; NT HIT: AF160969.2, EVALUE 1.40e-02; SWISSPROT HIT: Q9ZLN3, EVALUE 5.50e+00
ggtccttaccctcatggaactttacattttgctggtggagaaaaaatacgagactattatcttgtattttgttatgaaagagggaaaaagaatgatagaca

SEQ ID NO: 19956 - DNA, 234 bp, Homo sapiens
  MAP TO AC008018.18; EXPRESSED IN LUNG, SIGNAL = 2.1; EXPRESSED IN BONE MARROW, SIGNAL = 2.3; EXPRESSED IN BRAIN, SIGNAL = 2.2; EXPRESSED IN PLACENTA, SIGNAL = 2.4; EXPRESSED IN HBL100, SIGNAL = 1.9; EXPRESSED IN HELA, SIGNAL =   2; EXPRESSED IN HEART, SIGNAL =   2; EXPRESSED IN FETAL LIVER, SIGNAL = 1.9; EXPRESSED IN BT474, SIGNAL =   2; EXPRESSED IN ADULT LIVER, SIGNAL = 2.2; SWISSPROT HIT: P17678, EVALUE 2.40e+00; EST_HUMAN HIT: BF697081.1, EVALUE 1.30e-02
ttactgctggggatgttgcttgtctgtgggaattgggaatttcacacctagctctgaatttctaggaagcccgaacaaaagagaaatagaaatagagaaatcacatacttcccaccagagaggagacaccatccataccagaggagactcgtatggggggtggtgaggataaggccgatccatcttccccacctcatactctgcctcctgcagtgtggcctccctgagggcgcc

SEQ ID NO: 19957 - DNA, 148 bp, Homo sapiens
  MAP TO AC010149.1; EXPRESSED IN BT474, SIGNAL = 0.95; EXPRESSED IN HBL100, SIGNAL = 1.3; EXPRESSED IN HEART, SIGNAL = 0.91; NT HIT: AF056322.1, EVALUE 4.00e-78; EST_HUMAN HIT: AU136994.1, EVALUE 5.00e-78; SWISSPROT HIT: P23497, EVALUE 7.00e-23
tgtgatgagatcacgatcacggaggccctcgaggaatggaaatgtcttttttattgcatttgaaatctccaccttatttcttttgaagtgcttgaatacaatgtcatagagcagcctgtcatctacaccctggtcttccgtgaacatc

SEQ ID NO: 19958 - DNA, 116 bp, Homo sapiens
  MAP TO AC008854.2; EXPRESSED IN BT474, SIGNAL = 4.2; EXPRESSED IN ADULT LIVER, SIGNAL =   4; EXPRESSED IN PLACENTA, SIGNAL = 3.3; EXPRESSED IN HELA, SIGNAL =   4; EXPRESSED IN BRAIN, SIGNAL = 3.9; EXPRESSED IN LUNG, SIGNAL = 4.1; EXPRESSED IN BONE MARROW, SIGNAL = 3.4; EXPRESSED IN HEART, SIGNAL = 3.6; EXPRESSED IN HBL100, SIGNAL = 3.8; EXPRESSED IN FETAL LIVER, SIGNAL = 3.8; EST_HUMAN HIT: AU145832.1, EVALUE 3.80e-01; NT HIT: gi6755501, EVALUE 5.50e-02
acatggcctgtggctctcttaccaacgcgttccttgcctcatgtcacactgccacatcagcaactggagtcaatggctgatgattttttgcggcttcctcgtgttcctctctcctg

SEQ ID NO: 19959 - DNA, 420 bp, Homo sapiens
  MAP TO AC007349.1; EXPRESSED IN BT474, SIGNAL = 6.3; EXPRESSED IN FETAL LIVER, SIGNAL = 2.9; EXPRESSED IN ADULT LIVER, SIGNAL = 1.2; EXPRESSED IN LUNG, SIGNAL = 3.1; EXPRESSED IN BONE MARROW, SIGNAL = 3.9; EXPRESSED IN BRAIN, SIGNAL = 3.2; EXPRESSED IN HELA, SIGNAL =  11; EXPRESSED IN PLACENTA, SIGNAL = 4.5; EXPRESSED IN HBL100, SIGNAL =  13; EXPRESSED IN HEART, SIGNAL = 2.4; EST_HUMAN HIT: BF036130.1, EVALUE 0.00e+00; SWISSPROT HIT: P06748, EVALUE 6.00e-58; NT HIT: M23613.1, EVALUE 0.00e+00
ctcaatggacatggacatgagtcccctgagaccccagaacaatcttttccgttgtgaactaaaggctgacaatcactttcaagtggataatgatgaaaatgagcatcagttatcttcaagaacggtcagctcaggggctggtgcaaaggatgaattgcacattgttgaagcagaggcaatgaattacgaaggcagtccaattaaagtcacactggcaactttgaaaatgtctgtacagccaacggtttcccttgggggctttgaaataacaccaccagtagtcttacggttgaagtgtggttcagggccagtgcatattagtggacagcacttagtcactgtggaggaagattcagaggcagaagatgaagaacaggaggatgtgaaactcttaagtatatatggaaagtgatttgcccc

SEQ ID NO: 19960 - DNA, 126 bp, Homo sapiens
  MAP TO AC010951.3; EXPRESSED IN BRAIN, SIGNAL = 2.1; EXPRESSED IN HELA, SIGNAL = 2.1; EXPRESSED IN PLACENTA, SIGNAL = 2.2; EXPRESSED IN ADULT LIVER, SIGNAL = 2.7; EXPRESSED IN LUNG, SIGNAL =   2; EXPRESSED IN BONE MARROW, SIGNAL = 1.9; EXPRESSED IN HEART, SIGNAL = 1.7; EXPRESSED IN HBL100, SIGNAL = 1.8; EXPRESSED IN FETAL LIVER, SIGNAL = 2.5; EXPRESSED IN BT474, SIGNAL =   2; EST_HUMAN HIT: AI820708.1, EVALUE 4.40e+00; NT HIT: AF080595.1, EVALUE 9.40e-01
aactttatcactccccatctctatcacctgtttctccttcattttctgtgcttttgcctcgctgggttcattgtcttcaatagctacttcgatgactttgtacatgttcttctcttcattttagct

SEQ ID NO: 19961 - DNA, 97 bp, Homo sapiens
  MAP TO AC008082.12; EXPRESSED IN PLACENTA, SIGNAL = 1.7; EXPRESSED IN HBL100, SIGNAL = 1.6; EXPRESSED IN HEART, SIGNAL = 1.6; EXPRESSED IN LUNG, SIGNAL = 1.7; EXPRESSED IN BRAIN, SIGNAL =   2; EXPRESSED IN HELA, SIGNAL = 1.7; EXPRESSED IN BT474, SIGNAL = 1.4; EXPRESSED IN ADULT LIVER, SIGNAL = 1.9; EXPRESSED IN FETAL LIVER, SIGNAL = 1.7; EXPRESSED IN BONE MARROW, SIGNAL = 1.8; NT HIT: AL163285.2, EVALUE 3.20e+00; EST_HUMAN HIT: AI745659.1, EVALUE 1.20e+00
taattctagagtaagaaaagttatacttaatatgttggatgatgaaaaggtattcaagatttttgagccagtaagtggcatgatcagggcagtccct

SEQ ID NO: 19962 - DNA, 263 bp, Homo sapiens
  MAP TO L78810.1; EXPRESSED IN LUNG, SIGNAL = 3.2; EXPRESSED IN HBL100, SIGNAL =  10; EXPRESSED IN FETAL LIVER, SIGNAL = 2.3; EXPRESSED IN BONE MARROW, SIGNAL = 1.5; EXPRESSED IN PLACENTA, SIGNAL = 1.9; EXPRESSED IN HEART, SIGNAL = 2.2; EXPRESSED IN HELA, SIGNAL = 7.3; EXPRESSED IN BT474, SIGNAL = 2.7; EXPRESSED IN ADULT LIVER, SIGNAL = 1.1; EXPRESSED IN BRAIN, SIGNAL =   2; EST_HUMAN HIT: BE733840.1, EVALUE 0.00e+00; NT HIT: gi11421392, EVALUE 0.00e+00; SWISSPROT HIT: P05141, EVALUE 6.00e-38
cctttgcagtgtcatagataccgaagtaggcggctcggtagatgataataccctgcacagacacgttaaagccttggtacaggcccttaatcccatcagatttgtagatcttaaccaggcagtcaccgaggcctcggaattccctttcagctccagctttacccacatcagctgctagacgggtacgggcaaaatcaagagggtacacaaaacacagggatgtggcccctgcggcaccacccgatgccagattccctgcaaag

SEQ ID NO: 19963 - DNA, 388 bp, Homo sapiens
  MAP TO AC008929.2; EXPRESSED IN HBL100, SIGNAL =   2; EXPRESSED IN HEART, SIGNAL = 2.5; EXPRESSED IN FETAL LIVER, SIGNAL = 2.6; EXPRESSED IN BONE MARROW, SIGNAL =   2; EXPRESSED IN PLACENTA, SIGNAL = 2.3; EXPRESSED IN HELA, SIGNAL = 2.9; EXPRESSED IN BT474, SIGNAL = 2.9; EXPRESSED IN ADULT LIVER, SIGNAL =   2; EXPRESSED IN BRAIN, SIGNAL = 1.9; EXPRESSED IN LUNG, SIGNAL = 2.3; SWISSPROT HIT: P32242, EVALUE 5.00e+00; NT HIT: AL163247.2, EVALUE 1.00e-30; EST_HUMAN HIT: BE784971.1, EVALUE 6.00e-46
ggtaatgaaaagaggttggaagagtttggagggctcagaagaagacaggaagatgagggaaagtttggaatttctcaaagactagttaatgattgtgaacaaaatgctgatggtgataggggcagtgaaggccagattgatgaggtctcagatggaaatgaggaacttcttggaaactggagcaaaggccacccttgttatgctctagcaaaacacttggctgcattctgttcatgccctagcgatctgtggaagtttgaacttcagagtgatgatttagggtatctggcaaaagaaatttctaagcagcaaagtgttcaagatgtggtgtggctgcttctaattgcctatggtcagacatgggagcaaagaaataaagttggaatat

SEQ ID NO: 19964 - DNA, 220 bp, Homo sapiens
  MAP TO AL118501.4; EXPRESSED IN HELA, SIGNAL = 1.3; EXPRESSED IN PLACENTA, SIGNAL = 1.2; EXPRESSED IN HBL100, SIGNAL = 1.4; EXPRESSED IN ADULT LIVER, SIGNAL = 1.4; EXPRESSED IN HEART, SIGNAL = 1.4; EXPRESSED IN BT474, SIGNAL = 1.7; EXPRESSED IN FETAL LIVER, SIGNAL = 1.3; EXPRESSED IN BONE MARROW, SIGNAL = 1.5; EXPRESSED IN BRAIN, SIGNAL = 1.6; EXPRESSED IN LUNG, SIGNAL = 1.5; NT HIT: gi8923847, EVALUE 9.00e-24; EST_HUMAN HIT: N26446.1, EVALUE 2.00e-49; SWISSPROT HIT: P46056, EVALUE 9.40e-01
aagggctgtttatctttcagacccgagacggggaggccatctatcagaaagtccactctgctgccttggccatagccgagcagcacgagcgcttgctacagagtgtgaaaaactcgatggtacgtttggaatttcttcctcgtgtcccagtgcctatcactgcagaaagcaattgggtcatttttgtgctggaaaatatggtcagcattatttgagcaga

SEQ ID NO: 19965 - DNA, 206 bp, Homo sapiens
  MAP TO AC011112.2; EXPRESSED IN BONE MARROW, SIGNAL = 1.4; EXPRESSED IN HEART, SIGNAL = 1.5; EXPRESSED IN BT474, SIGNAL = 1.9; EXPRESSED IN LUNG, SIGNAL = 1.5; EXPRESSED IN BRAIN, SIGNAL = 1.6; EXPRESSED IN PLACENTA, SIGNAL = 1.5; EXPRESSED IN HELA, SIGNAL = 1.5; EXPRESSED IN HBL100, SIGNAL = 1.4; EXPRESSED IN ADULT LIVER, SIGNAL = 1.7; EXPRESSED IN FETAL LIVER, SIGNAL = 1.6; SWISSPROT HIT: Q9WTJ2, EVALUE 5.70e-01
gtttctcaggtttgttgacagtcatgattgtggcagatcctgtctgattataagcgagtacacatggagcagaagacagagctctagatgaatcaagaacagaggcagtagtggcagtaggacactcagtccatgcatcaatggatacctgagggatcatcaaacaccataaaatagaacatggcctctgataagagatgtcaaat

SEQ ID NO: 19966 - DNA, 186 bp, Homo sapiens
  MAP TO AC010099.3; EXPRESSED IN BT474, SIGNAL = 2.2; EXPRESSED IN BRAIN, SIGNAL =   2; EXPRESSED IN HELA, SIGNAL = 1.4; EXPRESSED IN HEART, SIGNAL = 1.4; EXPRESSED IN PLACENTA, SIGNAL = 1.4; EXPRESSED IN ADULT LIVER, SIGNAL = 1.3; EXPRESSED IN FETAL LIVER, SIGNAL = 1.7; EXPRESSED IN LUNG, SIGNAL = 1.2; EXPRESSED IN BONE MARROW, SIGNAL = 1.6; EXPRESSED IN HBL100, SIGNAL =   2; NT HIT: AF111167.2, EVALUE 2.00e-27
caccactgcttctacctctagcactgccattgccacaaacaccatcagtatcaccatcacaaccattactaccaccgtcaccataaccaccaccaccatcagcacctgtaccataactaccatctccaccatcatcagcaccattatcatcagtatgccaccaccaccactgccattgccaatgcc

SEQ ID NO: 19967 - DNA, 1018 bp, Homo sapiens
  MAP TO AC006111.2; EXPRESSED IN BONE MARROW, SIGNAL = 0.98; EXPRESSED IN BRAIN, SIGNAL = 0.85; EXPRESSED IN PLACENTA, SIGNAL = 0.76; EXPRESSED IN BT474, SIGNAL = 0.79; EXPRESSED IN LUNG, SIGNAL = 0.8; EXPRESSED IN HELA, SIGNAL = 0.97; EXPRESSED IN ADULT LIVER, SIGNAL = 1.1; EXPRESSED IN HEART, SIGNAL = 0.82; EXPRESSED IN HBL100, SIGNAL = 0.8; EXPRESSED IN FETAL LIVER, SIGNAL = 0.96; EST_HUMAN HIT: AW503620.1, EVALUE 2.00e-73; NT HIT: gi4758055, EVALUE 0.00e+00; SWISSPROT HIT: Q92793, EVALUE 2.00e-69
cttctctagcgtgtcccccgtggtgtccccgaccagggacagttcgctggacagcgcactcctgctgggggtgttcagctgggggagcattgcactctgttcggggttccccaagtgtccctgatctatggagctggccatggtgactgcgagtccggggtggggggaaccagtctggggtgagacgtggtgtggcgaaggctggggctgtatccgtggtgacgggctggaatgtggaggctgggactggggccgtggagactggacaggggctggagaccgcacctggttactaagggacgtggcgatctgctggccagggagatgcgaggcctgtggctgtcctgagagcatgtgttgctgggggctcatggggttcggctggcctggggacccaatctgctgcttcatctgctgttgctgcagaatccgctgctgcagggcttgctggatgttgggggtgctgtctgcccccagccccggctgccccatctggccaagctgtcccatctgagccgccatctggcccatggagctgccctggagggggagatgctgctgcatgcgctgctgctgctgcatggccggtgggtagcctccgggtccttgaggctgctggaactggccgtgccccgccatgcccccagccatgccggcactcccttgctgctgctgctgttgctgctgttgttgctgctgctgttgctgctgctgctgcagcagctgcctccgtaacatttctcggtactgtggattcatactcgccatgttggggttgtgtcctgggttcatgatgttcaaggcctggccctgggggttcaggcctcccatcgcctgctgctgtggaggcacaccgggccgcggcacgccagcctgcatggcattcaggttctgcaggctgggctgctggtgcatgccaggctggggttgcatgccgggctgggactggaggccaggctggggctgcatgccgggctgattggccacgtacttggctgtgcgctgtttgatgaaagct

SEQ ID NO: 19968 - DNA, 157 bp, Homo sapiens
  MAP TO AC008249.14; EXPRESSED IN BONE MARROW, SIGNAL = 1.8; EXPRESSED IN BRAIN, SIGNAL = 2.3; EXPRESSED IN PLACENTA, SIGNAL =   2; EXPRESSED IN FETAL LIVER, SIGNAL = 1.6; EXPRESSED IN LUNG, SIGNAL = 1.7; EXPRESSED IN HEART, SIGNAL = 3.3; EXPRESSED IN HELA, SIGNAL = 1.7; EXPRESSED IN HBL100, SIGNAL = 1.5; EXPRESSED IN ADULT LIVER, SIGNAL = 1.5; EXPRESSED IN BT474, SIGNAL = 1.3; SWISSPROT HIT: P21952, EVALUE 4.60e-01; NT HIT: M59215.1, EVALUE 2.30e-02; EST_HUMAN HIT: N84605.1, EVALUE 8.30e+00
ggtctatgaaattattacttcagaatggttctgcatggcttgtggatctctgaggagttctggcttgctgaattgggagtcttcttcatcaccaccatcatcaaacagtgcctggggaggtaggtcaagctgtgctctctcagtctcctattctagg

SEQ ID NO: 19969 - DNA, 612 bp, Homo sapiens
  MAP TO AC004230.1; EXPRESSED IN BT474, SIGNAL =  35; EXPRESSED IN FETAL LIVER, SIGNAL = 4.6; EXPRESSED IN ADULT LIVER, SIGNAL = 6.9; EXPRESSED IN BRAIN, SIGNAL = 3.1; EXPRESSED IN BONE MARROW, SIGNAL = 3.3; EXPRESSED IN LUNG, SIGNAL =  93; EXPRESSED IN PLACENTA, SIGNAL =  29; EXPRESSED IN HELA, SIGNAL = 7.4; EXPRESSED IN HEART, SIGNAL =  26; EXPRESSED IN HBL100, SIGNAL = 2.9; NT HIT: X65157.1, EVALUE 1.00e-108; EST_HUMAN HIT: AV704300.1, EVALUE 0.00e+00; SWISSPROT HIT: gi1351901, EVALUE 1.00e-100
cttccacttttggcagagacacatccatatcacccttcactttgggtcctttcaggttaagatcaatgtcaggcatggagatcttgggggctttgatgttcatctcaggcatcttgaatttgggacctttcaactttccctctgggccttcgatattcacatctggaacatcaatgtccaccttgggtcctgagacatcaaggtcagccttgggcaggttcacatccacatctgggccctctcctttgaagccaggcatgctgaacttgggcattttcaccttgggcatcttcaggtgccagtctgggccttgaacatcaacatctggagcattaatgtccactttggggcccttgatgtcaacttcaggacccttgaggtcaccttccattttgggcagagaaacatccacatcgcccttgactttggggcccttcaggtttaaatcaatgtcaggcatcgatattttgggagccttcaggtgcatctctggtatcttaaatttgggtcccttgaatttaccctctgagccttcgatgttaatgtcaggagtgtcaatgtccactttggggcccttgatgtccacctcagggccttttagatcaccttcca

SEQ ID NO: 19970 - DNA, 108 bp, Homo sapiens
  MAP TO AC010130.3; EXPRESSED IN HELA, SIGNAL = 1.5; EXPRESSED IN PLACENTA, SIGNAL = 2.1; EXPRESSED IN HBL100, SIGNAL = 1.6; EXPRESSED IN LUNG, SIGNAL = 1.8; EXPRESSED IN BRAIN, SIGNAL = 1.5; EXPRESSED IN HEART, SIGNAL = 1.2; EXPRESSED IN BT474, SIGNAL =   2; EXPRESSED IN ADULT LIVER, SIGNAL = 1.1; EXPRESSED IN FETAL LIVER, SIGNAL = 1.2; EXPRESSED IN BONE MARROW, SIGNAL = 1.5; EST_HUMAN HIT: AA372376.1, EVALUE 6.00e-02
cggacagtcagctgggggtgggtgcagatccacaaaagcccttgagggcagtggtgattgacttgagcctgaaggttgtaaagaggtcagccatgggaagattgtgca

SEQ ID NO: 19971 - DNA, 197 bp, Homo sapiens
  MAP TO AC011899.2; EXPRESSED IN PLACENTA, SIGNAL = 2.5; EXPRESSED IN ADULT LIVER, SIGNAL =   3; EXPRESSED IN BT474, SIGNAL = 1.8; EXPRESSED IN FETAL LIVER, SIGNAL = 2.1; EXPRESSED IN BRAIN, SIGNAL = 1.6; EXPRESSED IN HBL100, SIGNAL = 1.6; EXPRESSED IN HELA, SIGNAL = 2.2; EXPRESSED IN HEART, SIGNAL =   2; EXPRESSED IN LUNG, SIGNAL = 2.3; EXPRESSED IN BONE MARROW, SIGNAL = 1.3; EST_HUMAN HIT: AV724673.1, EVALUE 1.70e-01; SWISSPROT HIT: Q09709, EVALUE 1.60e+00
aacctgctttcgtgccagcccatcccgagagaatctgccatgttagacctgcactgtacaaaatgctgcggacctcttctgactgatgggaaatcacagcagttggagacccaggtccacaggaaggatgaagaacccaagaaatggcagcagactgagagcttctggaggaagtgagacagccctgcaggctctgg

SEQ ID NO: 19972 - DNA, 119 bp, Homo sapiens
  MAP TO AC010882.2; EXPRESSED IN BONE MARROW, SIGNAL = 4.9; EXPRESSED IN LUNG, SIGNAL = 5.5; EXPRESSED IN BRAIN, SIGNAL = 5.9; EXPRESSED IN HELA, SIGNAL = 4.9; EXPRESSED IN HEART, SIGNAL = 4.3; EXPRESSED IN PLACENTA, SIGNAL = 5.2; EXPRESSED IN HBL100, SIGNAL = 5.3; EXPRESSED IN ADULT LIVER, SIGNAL = 6.6; EXPRESSED IN BT474, SIGNAL = 5.3; EXPRESSED IN FETAL LIVER, SIGNAL = 4.9; NT HIT: X86694.1, EVALUE 2.00e-26; EST_HUMAN HIT: AA013013.1, EVALUE 8.00e-21; SWISSPROT HIT: Q62048, EVALUE 1.00e-12
gtgatctcctcactcttttcactggggatgtccttcttacaggttgacttgtgctgtttcagatctttaagggtgatattgttggtcagatcctggaggagggtcccatacccagccat

SEQ ID NO: 19973 - DNA, 184 bp, Homo sapiens
  MAP TO AP000021.2; EXPRESSED IN BT474, SIGNAL = 2.2; EXPRESSED IN FETAL LIVER, SIGNAL = 2.9; EXPRESSED IN BONE MARROW, SIGNAL = 1.3; EXPRESSED IN PLACENTA, SIGNAL = 2.3; EXPRESSED IN BRAIN, SIGNAL = 1.8; EXPRESSED IN LUNG, SIGNAL =   2; EXPRESSED IN HEART, SIGNAL = 1.7; EXPRESSED IN HELA, SIGNAL = 2.8; EXPRESSED IN HBL100, SIGNAL = 1.8; EXPRESSED IN ADULT LIVER, SIGNAL = 3.2; EST_HUMAN HIT: AI752367.1, EVALUE 4.00e-29; NT HIT: U63721.1, EVALUE 3.60e-01; SWISSPROT HIT: Q10691, EVALUE 1.90e-01
agggcaggtaataggaatattgcctgaggttccacagccaggaagagaagcagtggagccaggagcccagcctctgttaacttctagcaaaatggctcaaggaaatatcagcacaaacctggttcttggctggcttctccttttcaccggtggacaaactggtggaaaagtggagggtcctgtt

SEQ ID NO: 19974 - DNA, 209 bp, Homo sapiens
  MAP TO AC010149.2; EXPRESSED IN BT474, SIGNAL =   5; EXPRESSED IN FETAL LIVER, SIGNAL = 2.6; EXPRESSED IN BRAIN, SIGNAL =   3; EXPRESSED IN HELA, SIGNAL = 5.8; EXPRESSED IN PLACENTA, SIGNAL = 3.7; EXPRESSED IN ADULT LIVER, SIGNAL = 2.1; EXPRESSED IN LUNG, SIGNAL = 3.5; EXPRESSED IN BONE MARROW, SIGNAL = 3.9; EXPRESSED IN HEART, SIGNAL = 2.4; EXPRESSED IN HBL100, SIGNAL = 4.6; EST_HUMAN HIT: BE906207.1, EVALUE 9.00e-93; SWISSPROT HIT: Q01173, EVALUE 4.00e-17; NT HIT: X03541.1, EVALUE 6.00e-93
gatccagctggttgaagaagagctggaccatgctcaggagtacctggccactgccttgcaaaagctggaagaagcggaaaaagctgctgatgagagtgagagaggtatgaaggttgttgaaaatcgggccttaaaagatgaagaaaagatggaactccaggaaatctaactccaagaagctaagcacattgcagaagaggcagatagga

SEQ ID NO: 19975 - DNA, 81 bp, Homo sapiens
  MAP TO AC007449.1; EXPRESSED IN PLACENTA, SIGNAL = 2.9; EXPRESSED IN HELA, SIGNAL = 3.2; EXPRESSED IN HBL100, SIGNAL = 3.6; EXPRESSED IN HEART, SIGNAL = 3.1; EXPRESSED IN BT474, SIGNAL = 3.9; EXPRESSED IN FETAL LIVER, SIGNAL = 2.7; EXPRESSED IN ADULT LIVER, SIGNAL = 2.7; EXPRESSED IN BONE MARROW, SIGNAL = 4.7; EXPRESSED IN LUNG, SIGNAL =   3; EXPRESSED IN BRAIN, SIGNAL = 4.2; EST_HUMAN HIT: BF669424.1, EVALUE 9.70e-01; NT HIT: gi11421209, EVALUE 6.50e-01
  unsure 78
ttaactcaaaaggaaatagtaaggtttacactggcgacatgaagctgagtctcctttgggtctggagtagattttggntct

SEQ ID NO: 19976 - DNA, 162 bp, Homo sapiens
  MAP TO AL121831.8; EXPRESSED IN ADULT LIVER, SIGNAL = 2.9; EXPRESSED IN BT474, SIGNAL =   3; EXPRESSED IN FETAL LIVER, SIGNAL = 3.1; EXPRESSED IN BRAIN, SIGNAL = 2.7; EXPRESSED IN BONE MARROW, SIGNAL = 2.6; EXPRESSED IN HBL100, SIGNAL = 2.7; EXPRESSED IN PLACENTA, SIGNAL = 2.4; EXPRESSED IN LUNG, SIGNAL = 3.4; EXPRESSED IN HEART, SIGNAL = 2.4; EXPRESSED IN HELA, SIGNAL = 2.5; EST_HUMAN HIT: AI620160.1, EVALUE 5.00e-66; SWISSPROT HIT: P19440, EVALUE 3.00e-20; NT HIT: L20492.1, EVALUE 1.00e-86
gaagtgactgcagccctggagacccggcaccatcacacccagatcacgtccaccttcattgctgtggtgcaagccatcgtccgcatggctggtggctgggcagctgcctcggactccaggaaaggtggggaacctgctggctactgattgctccaggcggac

SEQ ID NO: 19977 - DNA, 625 bp, Homo sapiens
  MAP TO AC004827.1; EXPRESSED IN BT474, SIGNAL = 5.7; EXPRESSED IN FETAL LIVER, SIGNAL = 4.1; EXPRESSED IN BRAIN, SIGNAL = 5.4; EXPRESSED IN BONE MARROW, SIGNAL = 3.6; EXPRESSED IN LUNG, SIGNAL = 7.7; EXPRESSED IN HBL100, SIGNAL = 5.5; EXPRESSED IN HELA, SIGNAL = 5.8; EXPRESSED IN PLACENTA, SIGNAL = 8.4; EXPRESSED IN ADULT LIVER, SIGNAL = 1.9; EXPRESSED IN HEART, SIGNAL = 4.5; EST_HUMAN HIT: AW881551.1, EVALUE 6.00e-31; SWISSPROT HIT: Q04891, EVALUE 5.40e+00; NT HIT: AF286598.1, EVALUE 0.00e+00
gtgtcctgggggcatcagaagcctcctcatctcacttttgtgtgcccttctcccccagtgccttaggagagaaattaacccgcacctgcccttcatgttttacaggccagcgcaggacatctcattgccattgtcagccaggaactcgcagcctcacagccctacttcttctctgacctctggggggtccttgcccttgctacaatctccaccatccactagattgtctcctgcccgacaccccttggtcccaaaccagggagaccattcagctcacctgcctaggccgcagcagcatttccttcctaatcaggctcaccagggggatcattaccgtctctcccaacctggcctgagtcagcagcagcagcaacagcagcagcagcaccatcatcaccatcaccaccaacaacagcagcagcagcagccacagcagcagccaggagaagcctattcagctatgcctcgggctcagccatcctctgcttcttatcagccagtgccagcagacccttttgccattgtttccagagcccagcagatggttgagatcctctcagacgagaaccggaacttgaggcaagagttggaaggatgctatgagaaggtggcaagactgcagaag

SEQ ID NO: 19978 - DNA, 78 bp, Homo sapiens
  MAP TO AC007281.3; EXPRESSED IN LUNG, SIGNAL = 0.8; EXPRESSED IN HEART, SIGNAL = 1.2; EXPRESSED IN HELA, SIGNAL = 0.77; EXPRESSED IN BONE MARROW, SIGNAL = 1.1; EXPRESSED IN BT474, SIGNAL = 0.66; EXPRESSED IN PLACENTA, SIGNAL =   1; EXPRESSED IN BRAIN, SIGNAL =   1; EXPRESSED IN FETAL LIVER, SIGNAL = 0.71; EST_HUMAN HIT: R70902.1, EVALUE 9.20e-01; NT HIT: D73443.1, EVALUE 5.20e-01
aatgaccatggaaaatatgaccgacaccgagaaggaacattttaaggttggtgacgctgattccacagcctgccaggc

SEQ ID NO: 19979 - DNA, 78 bp, Homo sapiens
  MAP TO AC011995.2; EXPRESSED IN BONE MARROW, SIGNAL = 3.1; EXPRESSED IN ADULT LIVER, SIGNAL = 5.2; EXPRESSED IN BT474, SIGNAL = 3.1; EXPRESSED IN BRAIN, SIGNAL = 2.9; EXPRESSED IN LUNG, SIGNAL = 4.3; EXPRESSED IN PLACENTA, SIGNAL = 3.9; EXPRESSED IN HEART, SIGNAL =   3; EXPRESSED IN HELA, SIGNAL = 3.6; EXPRESSED IN HBL100, SIGNAL = 3.2; EXPRESSED IN FETAL LIVER, SIGNAL =   4; EST_HUMAN HIT: BE622702.1, EVALUE 9.20e-01; SWISSPROT HIT: O68906, EVALUE 2.40e+00
gaggggacccttgttctaccttcactgtcatgcttagtctctggggtgtgaggcagggtcctacgagggggctcatgt

SEQ ID NO: 19980 - DNA, 217 bp, Homo sapiens
  MAP TO AL031121.5; EXPRESSED IN BONE MARROW, SIGNAL = 0.68; EXPRESSED IN ADULT LIVER, SIGNAL = 1.1; EXPRESSED IN BRAIN, SIGNAL = 0.8; EXPRESSED IN HEART, SIGNAL = 1.1; EXPRESSED IN PLACENTA, SIGNAL = 2.2; EXPRESSED IN HELA, SIGNAL = 0.74; EXPRESSED IN FETAL LIVER, SIGNAL = 0.79; EXPRESSED IN LUNG, SIGNAL = 1.2; SWISSPROT HIT: P37915, EVALUE 7.90e-02; EST_HUMAN HIT: AA916760.1, EVALUE 1.00e-119; NT HIT: AE005068.1, EVALUE 8.00e+00
ggacttttcgggaaattgcagagaagtaactggcctctttgtgtgtttgcatgcaccagtgaactccggagacggcattgactacagccagcagaagagggagaacattggggacttgatccaggagacactggaggccttcgagcgctacggaggagaaaatgcctttatcaacattaagtacgtggtcccaacctacgagtcttgcttgctaaac

SEQ ID NO: 19981 - DNA, 344 bp, Homo sapiens
  MAP TO AC010888.2; EXPRESSED IN BT474, SIGNAL = 2.4; EXPRESSED IN BRAIN, SIGNAL = 2.3; EXPRESSED IN HELA, SIGNAL = 2.4; EXPRESSED IN HEART, SIGNAL = 2.2; EXPRESSED IN PLACENTA, SIGNAL = 2.3; EXPRESSED IN ADULT LIVER, SIGNAL = 3.1; EXPRESSED IN FETAL LIVER, SIGNAL = 2.4; EXPRESSED IN LUNG, SIGNAL = 2.5; EXPRESSED IN BONE MARROW, SIGNAL = 2.5; EXPRESSED IN HBL100, SIGNAL = 2.8; NT HIT: AJ271736.1, EVALUE 6.00e-66; EST_HUMAN HIT: BF035327.1, EVALUE 1.00e-101
acttttcttctctagctatgaaagtcctagatggcatcttcttccaatagaaatctgtgtcatctacactgaaaatctgttgtttagtgtagctaccttcatcaataatcttagccagatcttctggaaaacttgctgcagcttctccatcagcatttgctgcttcatcttgcacttttatgttaggaagacagcttctttccttaaacctcatgaaccagcctctgctagcttcagacttttcttctccagcttcctcacctctctcagccttcatagaattgaagaggattagggccttgctccgaattaggctttggctaaagggaaagttgtggctggtt

SEQ ID NO: 19982 - DNA, 126 bp, Homo sapiens
  MAP TO AC008833.2; EXPRESSED IN BRAIN, SIGNAL = 9.3; EXPRESSED IN PLACENTA, SIGNAL =  15; EXPRESSED IN HBL100, SIGNAL =  15; EXPRESSED IN HELA, SIGNAL =  18; EXPRESSED IN HEART, SIGNAL =  13; EXPRESSED IN BT474, SIGNAL =  13; EXPRESSED IN FETAL LIVER, SIGNAL =  16; EXPRESSED IN ADULT LIVER, SIGNAL =  18; EXPRESSED IN BONE MARROW, SIGNAL =  16; EXPRESSED IN LUNG, SIGNAL =  19; NT HIT: D79206.1, EVALUE 3.00e-19; EST_HUMAN HIT: AA528602.1, EVALUE 1.00e-32; SWISSPROT HIT: P49646, EVALUE 1.00e-04
ttctcttctctcttattcttctccttctcctccttcttctttttttctttttttccagacacagtcttgtcttcctctgtcacccaggctggactgcagtggcatgatcgtagctcactgcaaccc

SEQ ID NO: 19983 - DNA, 79 bp, Homo sapiens
  MAP TO AC010183.6; EXPRESSED IN PLACENTA, SIGNAL = 3.8; EXPRESSED IN HBL100, SIGNAL = 3.7; EXPRESSED IN BT474, SIGNAL = 3.1; EXPRESSED IN LUNG, SIGNAL = 3.4; EXPRESSED IN BRAIN, SIGNAL = 2.7; EXPRESSED IN HEART, SIGNAL = 2.9; EXPRESSED IN HELA, SIGNAL = 3.4; EXPRESSED IN ADULT LIVER, SIGNAL =   4; EXPRESSED IN FETAL LIVER, SIGNAL = 3.1; EXPRESSED IN BONE MARROW, SIGNAL = 3.2; NT HIT: AF095455.1, EVALUE 9.80e+00
agggtagacagcatcagggcctccctttgagagggtttgagaaagtaagagaccaagtggaatcttgtatctggagtac

SEQ ID NO: 19984 - DNA, 89 bp, Homo sapiens
  MAP TO AC011998.2; EXPRESSED IN ADULT LIVER, SIGNAL = 4.8; EXPRESSED IN BT474, SIGNAL =   4; EXPRESSED IN FETAL LIVER, SIGNAL = 3.7; EXPRESSED IN BONE MARROW, SIGNAL = 2.6; EXPRESSED IN LUNG, SIGNAL = 3.3; EXPRESSED IN BRAIN, SIGNAL = 3.3; EXPRESSED IN HELA, SIGNAL = 3.4; EXPRESSED IN PLACENTA, SIGNAL = 3.9; EXPRESSED IN HBL100, SIGNAL =   3; EXPRESSED IN HEART, SIGNAL = 2.7; SWISSPROT HIT: P40090, EVALUE 9.20e+00; EST_HUMAN HIT: AW293828.1, EVALUE 1.90e-01; NT HIT: AB025194.1, EVALUE 4.70e-02
caaatgtagcttcaacctgacccagagtgggccccagccccagtcccatccagtcactgcatgccgtcaaagtccagggcctttaagtg

SEQ ID NO: 19985 - DNA, 106 bp, Homo sapiens
  MAP TO AC008283.2; EXPRESSED IN HBL100, SIGNAL = 2.5; EXPRESSED IN FETAL LIVER, SIGNAL = 0.67; EXPRESSED IN BRAIN, SIGNAL = 3.7; EXPRESSED IN BONE MARROW, SIGNAL = 0.8; EXPRESSED IN HELA, SIGNAL = 0.6; EXPRESSED IN HEART, SIGNAL = 1.2; EXPRESSED IN PLACENTA, SIGNAL = 1.3; SWISSPROT HIT: P54290, EVALUE 7.00e-15; NT HIT: gi4757893, EVALUE 3.00e-53; EST_HUMAN HIT: AW051755.1, EVALUE 1.00e-24
ggcagccagaggataaaacctgttttcattgaagatgctaattttggacgacaaatatcttatcagcacgcagcagtccatattcctactgacatctatgagggct

SEQ ID NO: 19986 - DNA, 154 bp, Homo sapiens
  MAP TO AC010899.2; EXPRESSED IN BONE MARROW, SIGNAL = 2.3; EXPRESSED IN HELA, SIGNAL = 2.3; EXPRESSED IN PLACENTA, SIGNAL = 2.3; EXPRESSED IN HBL100, SIGNAL = 2.5; EXPRESSED IN LUNG, SIGNAL = 2.1; EXPRESSED IN BRAIN, SIGNAL = 2.2; EXPRESSED IN HEART, SIGNAL = 2.1; EXPRESSED IN BT474, SIGNAL = 2.4; EXPRESSED IN ADULT LIVER, SIGNAL = 2.7; EXPRESSED IN FETAL LIVER, SIGNAL = 2.2; NT HIT: AB032989.1, EVALUE 7.50e-02; EST_HUMAN HIT: H75690.1, EVALUE 6.00e-03; SWISSPROT HIT: P29473, EVALUE 3.40e-01
atatattatgtggaggaaaacaatgcagggtagtgtgaaagggaatcccagggtgagtctccttagactaggcatttggaaaaggcctcagaggagacagcacctacacactgtgtcccaaacccccaggaggagacagccctggagaagtaga

SEQ ID NO: 19987 - DNA, 118 bp, Homo sapiens
  MAP TO AC011257.2; EXPRESSED IN HBL100, SIGNAL = 0.95; EXPRESSED IN HELA, SIGNAL = 1.1; EXPRESSED IN PLACENTA, SIGNAL =   1; EXPRESSED IN HEART, SIGNAL =   1; EXPRESSED IN ADULT LIVER, SIGNAL = 1.3; EXPRESSED IN BT474, SIGNAL = 1.1; EXPRESSED IN FETAL LIVER, SIGNAL = 1.1; EXPRESSED IN BRAIN, SIGNAL = 1.1; EXPRESSED IN LUNG, SIGNAL = 0.97; SWISSPROT HIT: P17671, EVALUE 9.30e+00
  unsure 70
gatggtcgacgtagcagtacagtcagcctctggagggttaggaggggcaaacaaattgtcaagcacggtngagcacattggagccatcccacaacctccactggaccttgggaatact

SEQ ID NO: 19988 - DNA, 311 bp, Homo sapiens
  MAP TO AC009834.2; EXPRESSED IN HBL100, SIGNAL = 1.6; EXPRESSED IN HEART, SIGNAL = 1.6; EXPRESSED IN FETAL LIVER, SIGNAL = 1.4; EXPRESSED IN ADULT LIVER, SIGNAL = 1.6; EXPRESSED IN LUNG, SIGNAL = 1.5; EXPRESSED IN BRAIN, SIGNAL = 1.4; EXPRESSED IN PLACENTA, SIGNAL =   3; EXPRESSED IN BT474, SIGNAL = 1.2; EXPRESSED IN BONE MARROW, SIGNAL = 1.2; EXPRESSED IN HELA, SIGNAL = 1.4; EST_HUMAN HIT: AA722723.1, EVALUE 0.00e+00; NT HIT: gi11432721, EVALUE 0.00e+00; SWISSPROT HIT: P35555, EVALUE 1.00e-54
ttgggatgttgagaagacagccatctttgctttcaatatttcccacgtcagtaacaaggttcgaatcctagaactccttccagctcttacaactctgacgaatcacaacagatacttgatcgaatctggaaatgaagatggcttctttaaaatcaaccaaaaggccgggatcagctacctccacttcacaaagaagaagccagtggctggaacctattcattacaaatcagtagtactccactttataaaaagaaagaacttaaccaactagaagacaaatatgacaaagactacctcagtggtgaactgg

SEQ ID NO: 19989 - DNA, 127 bp, Homo sapiens
  MAP TO AL121752.2; EXPRESSED IN BT474, SIGNAL = 1.7; EXPRESSED IN FETAL LIVER, SIGNAL =  22; EXPRESSED IN BONE MARROW, SIGNAL = 1.3; EXPRESSED IN LUNG, SIGNAL = 3.4; EXPRESSED IN BRAIN, SIGNAL = 4.5; EXPRESSED IN PLACENTA, SIGNAL = 2.1; EXPRESSED IN HBL100, SIGNAL = 8.5; EXPRESSED IN HELA, SIGNAL = 4.7; EXPRESSED IN HEART, SIGNAL = 2.8; EXPRESSED IN ADULT LIVER, SIGNAL = 7.2; NT HIT: V01533.1, EVALUE 1.00e-37; EST_HUMAN HIT: AA631912.1, EVALUE 1.00e-46
gcatttgcactctttgcacttgcaggagccggcgcacgtgcaggagccaccagtggtgcaggagcagttggggtccatttcaagccgcggtaaggctggagatctcaagcgataatggagagacagc

SEQ ID NO: 19990 - DNA, 112 bp, Homo sapiens
  MAP TO Z99758.7; EXPRESSED IN HBL100, SIGNAL = 1.2; EXPRESSED IN HEART, SIGNAL = 0.92; EXPRESSED IN LUNG, SIGNAL = 1.3; EXPRESSED IN FETAL LIVER, SIGNAL = 1.1; EXPRESSED IN ADULT LIVER, SIGNAL = 1.2; EXPRESSED IN BRAIN, SIGNAL = 0.9; EXPRESSED IN BONE MARROW, SIGNAL = 1.1; EXPRESSED IN BT474, SIGNAL = 1.3; NT HIT: gi11423139, EVALUE 8.00e-57; EST_HUMAN HIT: BF217053.1, EVALUE 1.00e-56
acttggaagatttatttataggcaacaaagtgaatgtcttttctcgacaactggtattaattgactatggggatcaatatacagctcgccagctgggcagtaggaaagaaaa

SEQ ID NO: 19991 - DNA, 129 bp, Homo sapiens
  MAP TO AC007403.2; EXPRESSED IN HBL100, SIGNAL = 2.8; EXPRESSED IN FETAL LIVER, SIGNAL = 2.1; EXPRESSED IN LUNG, SIGNAL = 2.8; EXPRESSED IN BRAIN, SIGNAL = 2.7; EXPRESSED IN BT474, SIGNAL = 3.6; EXPRESSED IN BONE MARROW, SIGNAL = 1.9; EXPRESSED IN HELA, SIGNAL = 1.8; EXPRESSED IN ADULT LIVER, SIGNAL = 1.2; EXPRESSED IN PLACENTA, SIGNAL = 2.9; EXPRESSED IN HEART, SIGNAL = 2.3; SWISSPROT HIT: P35201, EVALUE 5.20e+00; EST_HUMAN HIT: BF218455.1, EVALUE 4.30e-01
tttcgattcagaatcatacaagtacatggttttccacaaaatatcatccatagtgccattaagagtagtgggcaatgcaatgctctgcttcctgcagattttgaactgaagttgcaaagctccaggaac

SEQ ID NO: 19992 - DNA, 277 bp, Homo sapiens
  MAP TO AC012458.2; EXPRESSED IN PLACENTA, SIGNAL = 6.4; EXPRESSED IN HBL100, SIGNAL =  19; EXPRESSED IN HELA, SIGNAL =  20; EXPRESSED IN HEART, SIGNAL = 6.9; EXPRESSED IN FETAL LIVER, SIGNAL =  10; EXPRESSED IN BT474, SIGNAL =  12; EXPRESSED IN ADULT LIVER, SIGNAL = 3.5; EXPRESSED IN BONE MARROW, SIGNAL = 7.2; EXPRESSED IN LUNG, SIGNAL =  15; EXPRESSED IN BRAIN, SIGNAL =  26; NT HIT: AF082027.1, EVALUE 1.00e-39; EST_HUMAN HIT: BE619648.1, EVALUE 7.00e-79; SWISSPROT HIT: P36220, EVALUE 2.00e-35
aaatacatgtacttgctgcctgatgtaccagatgttcccaaatatgtcaatgctggcattgtcaccctcaggaccaaccacagcatccactttgtggattggtgtcccactggcttcaaggttggcatcaattatcagcctcccaatgtggtacccggtggagacctggccaaggtacagagagctgtgtgtatgctgagcaacaccattgccattgctgaggcctgggctcacctggaccacaagtttgacctcacatatgccaagtatgcatttt

SEQ ID NO: 19993 - DNA, 324 bp, Homo sapiens
  MAP TO AC010680.3; EXPRESSED IN HBL100, SIGNAL = 0.98; EXPRESSED IN BT474, SIGNAL = 0.92; EXPRESSED IN BRAIN, SIGNAL =   1; EXPRESSED IN HELA, SIGNAL = 0.96; EXPRESSED IN HEART, SIGNAL = 3.3; EXPRESSED IN PLACENTA, SIGNAL =   1; EXPRESSED IN ADULT LIVER, SIGNAL = 1.3; EXPRESSED IN FETAL LIVER, SIGNAL = 1.1; EXPRESSED IN LUNG, SIGNAL = 0.98; EXPRESSED IN BONE MARROW, SIGNAL =   1; SWISSPROT HIT: Q62234, EVALUE 4.00e-10; NT HIT: gi4507720, EVALUE 0.00e+00; EST_HUMAN HIT: N53218.1, EVALUE 5.20e-02
gcctacctggaccatgcaaagatattaaagcaagtgacattaccaagagttcttgtaagttaacttgggaacctccagaatttgatggtggaaccccaattcttcattatgtcctggagcgcagagaagctgggaggagaacatatataccagtcatgtctggtgagaacaaactgtcatggactgtgaaggatctcataccaaatggtgaatacttcttccgtgttaaagcagtcaacaaggttggtggaggagaatatattgaactgaaaaatccagtcattgctcaagatccaaagcgtaagtttggacatggatgcacta

SEQ ID NO: 19994 - DNA, 151 bp, Homo sapiens
  MAP TO AL080239.11; EXPRESSED IN HELA, SIGNAL = 0.7; EXPRESSED IN ADULT LIVER, SIGNAL = 0.83; EXPRESSED IN BRAIN, SIGNAL = 0.89; EXPRESSED IN HEART, SIGNAL = 0.95; EXPRESSED IN BT474, SIGNAL = 0.71; EXPRESSED IN BONE MARROW, SIGNAL = 0.72; EXPRESSED IN PLACENTA, SIGNAL = 0.82; EXPRESSED IN FETAL LIVER, SIGNAL = 0.76; EXPRESSED IN LUNG, SIGNAL = 0.87; NT HIT: AP000001.1, EVALUE 2.90e-01; EST_HUMAN HIT: BE794381.1, EVALUE 3.00e-64; SWISSPROT HIT: P42066, EVALUE 3.00e+00
gttttgaagcagtgggtgttggacttcagagttgttttcctggaggcactggtactggacttggcagaggagaaggatggtatcaatgtgttgctgggtggccgcctggacaggggagtttagccttcgggagataaagcgggatatgaag

SEQ ID NO: 19995 - DNA, 191 bp, Homo sapiens
  MAP TO AC007687.16; EXPRESSED IN BRAIN, SIGNAL = 1.6; EXPRESSED IN LUNG, SIGNAL =   2; EXPRESSED IN HEART, SIGNAL = 1.9; EXPRESSED IN FETAL LIVER, SIGNAL = 2.4; EXPRESSED IN BONE MARROW, SIGNAL = 2.1; EXPRESSED IN PLACENTA, SIGNAL = 1.8; EXPRESSED IN HELA, SIGNAL = 2.4; EXPRESSED IN HBL100, SIGNAL = 1.9; EXPRESSED IN BT474, SIGNAL = 1.9; EXPRESSED IN ADULT LIVER, SIGNAL =   2; EST_HUMAN HIT: BE887384.1, EVALUE 3.00e-58; NT HIT: gi4507848, EVALUE 5.00e-65; SWISSPROT HIT: Q92995, EVALUE 9.00e-12
tgcacactcactgaccagggctggtaactcctcaatatttggtagtgctatttcatagtgatctgggaatataacaagtttggcttcatcttcatattcataatcgtcgctatttaaatcgtcatcagtatctagatctgaggagaaaacaaaaacaaagaacaagaagtgaggaaaataatatcccacac

SEQ ID NO: 19996 - DNA, 114 bp, Homo sapiens
  MAP TO AC010681.3; EXPRESSED IN BONE MARROW, SIGNAL =   2; EXPRESSED IN HELA, SIGNAL =   2; EXPRESSED IN PLACENTA, SIGNAL = 2.2; EXPRESSED IN HBL100, SIGNAL = 2.3; EXPRESSED IN BT474, SIGNAL = 1.8; EXPRESSED IN BRAIN, SIGNAL = 1.8; EXPRESSED IN LUNG, SIGNAL = 1.9; EXPRESSED IN HEART, SIGNAL =   2; EXPRESSED IN ADULT LIVER, SIGNAL = 1.9; EXPRESSED IN FETAL LIVER, SIGNAL =   2; EST_HUMAN HIT: BF575511.1, EVALUE 9.30e-02; NT HIT: AF080106.1, EVALUE 2.50e-01
ggcctggctcatctacagcttcgtactgagagcctgtcatacccaaaaccacggcaggcccatggagagcccaagtgagatatatctgtgaagtgaataaggtaagaaggtagg

SEQ ID NO: 19997 - DNA, 232 bp, Homo sapiens
  MAP TO AL079304.2; EXPRESSED IN FETAL LIVER, SIGNAL = 1.2; EXPRESSED IN ADULT LIVER, SIGNAL =   1; EXPRESSED IN BONE MARROW, SIGNAL = 0.82; EXPRESSED IN HBL100, SIGNAL = 0.79; EXPRESSED IN HELA, SIGNAL =   1; EXPRESSED IN BRAIN, SIGNAL = 1.1; EXPRESSED IN HEART, SIGNAL = 0.97; EXPRESSED IN PLACENTA, SIGNAL = 0.74; EXPRESSED IN BT474, SIGNAL = 0.72; EXPRESSED IN LUNG, SIGNAL = 0.91; NT HIT: AL163252.2, EVALUE 8.60e+00; SWISSPROT HIT: P34221, EVALUE 4.00e+00; EST_HUMAN HIT: BF576709.1, EVALUE 2.10e-01
agaaagtgtttgttctaatacacgtttactttcttttatttatagaataagaatgttagttactatttgctgtgcaccaacaatggcaggctccatattgggaactttaaatgtatctttaaccttcgcattgagtgaggtaagcataatattttcctccttttccagattcagaacccggagctctgagagagtaagtgattttcctaaaatcatatgggtggtaagaacc

SEQ ID NO: 19998 - DNA, 224 bp, Homo sapiens
  MAP TO AC010686.2; EXPRESSED IN FETAL LIVER, SIGNAL = 1.3; EXPRESSED IN BRAIN, SIGNAL = 1.3; EXPRESSED IN HBL100, SIGNAL = 2.1; EXPRESSED IN HELA, SIGNAL = 1.6; EXPRESSED IN PLACENTA, SIGNAL = 1.4; EXPRESSED IN ADULT LIVER, SIGNAL = 1.3; EXPRESSED IN BT474, SIGNAL = 1.5; EXPRESSED IN LUNG, SIGNAL = 1.1; EXPRESSED IN BONE MARROW, SIGNAL = 1.2; EXPRESSED IN HEART, SIGNAL = 1.1; SWISSPROT HIT: P13010, EVALUE 2.00e-30; EST_HUMAN HIT: AL035866.3, EVALUE 3.00e-99; NT HIT: gi10863944, EVALUE 2.00e-99
gtgtttgctgagaacaaggatgagattgctttagtcctgtttggtacagatggcactgacaatcccctttctggtggggatcagtatcagaacatcacagtgcacagacatctgatgctaccagattttgatttgctggaggacattgaaagcaaaatccaaccaggttctcaacaggctgactgtatcctttttctgccagagaagactttaagaaatttcct

SEQ ID NO: 19999 - DNA, 213 bp, Homo sapiens
  MAP TO AC009437.1; EXPRESSED IN HEART, SIGNAL = 1.5; NT HIT: U09586.1, EVALUE 7.90e+00
ctctcttggcctctttccctgaagagctcaaactcatccttcaagccttagttctaattgtgcacccccagagaaatcttctcttcaacctatacgagttatcatttgtaatctcctattccaccctttccttttgcttcgaggaacttatcacattgcatcattatcattcatttgtgagattactggctcagtacttgtcgcctaaactaa

SEQ ID NO: 20000 - DNA, 155 bp, Homo sapiens
  MAP TO AL049549.3; EXPRESSED IN LUNG, SIGNAL = 0.71; EXPRESSED IN PLACENTA, SIGNAL = 0.72; EXPRESSED IN HBL100, SIGNAL = 0.75; EXPRESSED IN FETAL LIVER, SIGNAL = 0.75; EXPRESSED IN BONE MARROW, SIGNAL = 0.72; EXPRESSED IN HELA, SIGNAL = 0.63; EXPRESSED IN ADULT LIVER, SIGNAL = 0.75; EXPRESSED IN HEART, SIGNAL = 0.82; NT HIT: AB033611.1, EVALUE 1.90e-02; EST_HUMAN HIT: AI358822.1, EVALUE 2.30e-02; SWISSPROT HIT: P48743, EVALUE 5.10e-02
gaagtaggagtactaattctgattccttcagaattcatttgcatcttctggcttataatctcaacaagattcagatccacccttttggagcgaataccatacaagtgtatggacattctgctctcatggctgagcctcaggcatcagctgagaag

SEQ ID NO: 20001 - DNA, 180 bp, Homo sapiens
  MAP TO AP000215.1; EXPRESSED IN FETAL LIVER, SIGNAL = 1.5; EXPRESSED IN HELA, SIGNAL = 1.3; EXPRESSED IN PLACENTA, SIGNAL = 0.96; EXPRESSED IN BT474, SIGNAL = 0.99; EXPRESSED IN BONE MARROW, SIGNAL =   1; EXPRESSED IN HEART, SIGNAL = 1.1; EXPRESSED IN BRAIN, SIGNAL = 1.3; EXPRESSED IN ADULT LIVER, SIGNAL = 1.2; EXPRESSED IN LUNG, SIGNAL = 0.94; EXPRESSED IN HBL100, SIGNAL = 1.1; NT HIT: gi5174478, EVALUE 3.00e-97; EST_HUMAN HIT: AA333809.1, EVALUE 1.00e-10; SWISSPROT HIT: O95613, EVALUE 7.00e-19
tctgatttatcaaaagaagtatcttttgctgttgattggtggattccaggattctgaacaagaaacactctccatgattgcccatttgggggtatttccttccaaagcagaacggaaaatcacatctcgtcctttcaccaggttccgcacggccgtcagggtggtcattgcaatattaag

SEQ ID NO: 20002 - DNA, 540 bp, Homo sapiens
  MAP TO AC011421.2; EXPRESSED IN BRAIN, SIGNAL = 5.8; EXPRESSED IN LUNG, SIGNAL = 7.4; EXPRESSED IN PLACENTA, SIGNAL =  10; EXPRESSED IN HEART, SIGNAL = 4.4; EXPRESSED IN FETAL LIVER, SIGNAL = 0.96; EXPRESSED IN ADULT LIVER, SIGNAL = 1.7; NT HIT: M65189.1, EVALUE 0.00e+00; SWISSPROT HIT: P17302, EVALUE 9.00e-98; EST_HUMAN HIT: AU125708.1, EVALUE 0.00e+00
aggtgaccttgctgatccagtggtacatctatggattcagcttgagtgctgttcacacttgcaaaagagatccctgcccacatcaggtggactgcttcctctcttgccccatggagaaaaccatcttcatcatcttcatgctggtggtgtccttggtgtccctggccttgaatatcattgaactcttctacgttttcttcaagggcgttaaggattgggttaagggaaagagcgacccttaccatgcgaccactggcccgctgagccccgccaaagactgtgggtctcaaaaatatgcttatttcaatggctgctcctcaccaactgctcccctctcgcctatgtctcttcctgggtacaagctggttaatggcgacagaaacaattcttcttgccgcaattacgacaagcaagcaagtgagcaaaactgggctaattacagtgcagaacaaaatcgaatggggcaggcgggaagcaccatctctaactcccacgcacagccttttgatttccccgatgataaccagaattctaaaaaac

SEQ ID NO: 20003 - DNA, 323 bp, Homo sapiens
  MAP TO AF019413.1; EXPRESSED IN HEART, SIGNAL = 1.2; EXPRESSED IN FETAL LIVER, SIGNAL = 1.7; EXPRESSED IN BRAIN, SIGNAL = 1.3; EXPRESSED IN PLACENTA, SIGNAL = 0.95; EXPRESSED IN HELA, SIGNAL = 1.8; EXPRESSED IN HBL100, SIGNAL = 1.7; EXPRESSED IN BT474, SIGNAL = 1.1; EXPRESSED IN LUNG, SIGNAL = 1.6; EXPRESSED IN BONE MARROW, SIGNAL =   1; NT HIT: L03411.1, EVALUE 0.00e+00; EST_HUMAN HIT: BF037815.1, EVALUE 0.00e+00; SWISSPROT HIT: P18615, EVALUE 4.00e-07
tgatcgacttcgagaactaggaccagatggagaagaggcagagggcccaggggctggtgatggtccccctcgaagctttgactggggctatgaagaacgcagtggtgcccactcctcagcctcccctccccgaagccgcagccgggaccgcagccatgagaggaaccgggacagagaccgagatcgggagcgggatcgagaccgggatcgagacagagacagagagcgggacagggatcgggatcgggatcgagatcgagaccgggaacgggacagggatcgggagcgggatcgagaccgagaccgagagggtcctttccgca

SEQ ID NO: 20004 - DNA, 185 bp, Homo sapiens
  MAP TO AL050331.11; EXPRESSED IN ADULT LIVER, SIGNAL = 0.99; EXPRESSED IN BRAIN, SIGNAL = 1.5; EXPRESSED IN PLACENTA, SIGNAL = 1.2; EXPRESSED IN BT474, SIGNAL = 1.2; EXPRESSED IN HEART, SIGNAL = 1.2; EXPRESSED IN HELA, SIGNAL = 1.3; EXPRESSED IN LUNG, SIGNAL = 1.3; EXPRESSED IN HBL100, SIGNAL = 0.98; EXPRESSED IN BONE MARROW, SIGNAL = 1.3; EXPRESSED IN FETAL LIVER, SIGNAL = 1.4; EST_HUMAN HIT: BE968999.1, EVALUE 1.00e-02; NT HIT: Y08582.1, EVALUE 9.30e-02; SWISSPROT HIT: P13285, EVALUE 1.90e-01
cttgacaactgaactgtgagagtcatgtggtatgtaaaacgtctggaaagaatcgttctgctgagggggcaagtgacaggtctgctggatttcagtaatccaagaaggtgccagagacaggttctcagtttcgttgggatgggttctgtgtggtgcttctacatggctctcattagtggttaccc

SEQ ID NO: 20005 - DNA, 456 bp, Homo sapiens
  MAP TO AC012545.1; EXPRESSED IN LUNG, SIGNAL =   5; EXPRESSED IN HEART, SIGNAL = 4.2; EXPRESSED IN FETAL LIVER, SIGNAL = 4.5; EXPRESSED IN ADULT LIVER, SIGNAL = 5.1; EXPRESSED IN BRAIN, SIGNAL =   4; EXPRESSED IN BONE MARROW, SIGNAL = 4.4; EXPRESSED IN PLACENTA, SIGNAL = 4.1; EXPRESSED IN HELA, SIGNAL = 4.9; EXPRESSED IN HBL100, SIGNAL = 3.6; EXPRESSED IN BT474, SIGNAL =   4; EST_HUMAN HIT: BF362169.1, EVALUE 1.00e-130; NT HIT: AF055084.1, EVALUE 0.00e+00; SWISSPROT HIT: Q58296, EVALUE 2.70e+00
caccatctttgaccaccagctgcctctctgcattttcggtaacaatcggctgttctttatgatccgatgatattcgaagcccaacagccacatctccaaatgttccagcaagccgggttatgttaatttggatggatctaataaggttctgcccaataagtattgactggcgatccgaatacagggcaaatactccatgtgggtcatcatttgcataaacagagaaccatgtgatactcttctccagatccagttcggctcctccctctacagaaacaagctggatcacataatcttcctctatctcaggtacctcatctggtagcaaatgaacatcaaagctagcttcactctctccatcagcaatggtgaaaaatccactggtggaaagaaagtcttcagtaatgtcaaactcactacttaattcccagtaaacctaaaataaaagaaaaaaac

SEQ ID NO: 20006 - DNA, 96 bp, Homo sapiens
  MAP TO AC010807.2; EXPRESSED IN BONE MARROW, SIGNAL = 2.3; EXPRESSED IN LUNG, SIGNAL = 2.3; EXPRESSED IN BRAIN, SIGNAL = 2.1; EXPRESSED IN HELA, SIGNAL = 2.6; EXPRESSED IN PLACENTA, SIGNAL = 2.7; EXPRESSED IN HBL100, SIGNAL = 2.2; EXPRESSED IN HEART, SIGNAL = 2.1; EXPRESSED IN FETAL LIVER, SIGNAL = 2.4; EXPRESSED IN BT474, SIGNAL = 2.3; EXPRESSED IN ADULT LIVER, SIGNAL = 2.2; EST_HUMAN HIT: AI857779.1, EVALUE 3.00e-06; NT HIT: AL163201.2, EVALUE 2.00e-01; SWISSPROT HIT: P11369, EVALUE 1.40e-01
atgttaataatcgcattagatgtaaatggtctaaactccccacttacaaaacagattatcagactggacaaagaagtaagacccaactgtatgctg

SEQ ID NO: 20007 - DNA, 196 bp, Homo sapiens
  MAP TO AC011174.2; EXPRESSED IN BT474, SIGNAL = 1.2; EXPRESSED IN FETAL LIVER, SIGNAL =   2; EXPRESSED IN BONE MARROW, SIGNAL = 1.5; EXPRESSED IN HELA, SIGNAL = 1.4; EXPRESSED IN ADULT LIVER, SIGNAL = 1.2; EXPRESSED IN BRAIN, SIGNAL = 1.3; EXPRESSED IN LUNG, SIGNAL = 1.1; EXPRESSED IN PLACENTA, SIGNAL = 1.3; EXPRESSED IN HEART, SIGNAL = 1.2; EXPRESSED IN HBL100, SIGNAL = 1.4; NT HIT: AF099810.1, EVALUE 9.90e-02
aacgaattctgattgtctaatcaacaggttgaaaatatgcatgagaatgaagggtaagtacagaagcttaaggaaagaagaaggagaaaaaggaggagaaggaagaagaactagtagaaatagcagtaaaagtagtagcagtggtggtagtggtggtggtggtggtggtggtcgtgtgaatgatccctcctgatgt

SEQ ID NO: 20008 - DNA, 213 bp, Homo sapiens
  MAP TO AC009155.2; EXPRESSED IN BT474, SIGNAL = 1.7; EXPRESSED IN ADULT LIVER, SIGNAL = 1.5; EXPRESSED IN BRAIN, SIGNAL = 1.6; EXPRESSED IN LUNG, SIGNAL =   2; EXPRESSED IN HEART, SIGNAL = 1.8; EXPRESSED IN FETAL LIVER, SIGNAL = 1.5; EXPRESSED IN BONE MARROW, SIGNAL = 1.5; EXPRESSED IN PLACENTA, SIGNAL = 1.9; EXPRESSED IN HELA, SIGNAL = 2.3; EXPRESSED IN HBL100, SIGNAL = 1.9; NT HIT: AB046832.1, EVALUE 1.00e-109; EST_HUMAN HIT: AA978114.1, EVALUE 1.00e-117; SWISSPROT HIT: P98193, EVALUE 1.30e-01
gcctgaagcttcatttcttggccccttcggaagaagatgagatgaatgataaaaaagaggcagaaaccactgatatcactgaagaagggactagccatagtcctcctgagccagagaataatcagatggccatcagcaacaacagccaacagagcaatgagcagacagacccagagccagaggaaaatgaaacaaagaaaggtaagctgttgt

SEQ ID NO: 20009 - DNA, 157 bp, Homo sapiens
  MAP TO AC007498.2; EXPRESSED IN FETAL LIVER, SIGNAL = 2.5; EXPRESSED IN BT474, SIGNAL =   2; EXPRESSED IN ADULT LIVER, SIGNAL = 2.2; EXPRESSED IN BRAIN, SIGNAL = 1.9; EXPRESSED IN LUNG, SIGNAL = 2.6; EXPRESSED IN BONE MARROW, SIGNAL = 2.1; EXPRESSED IN PLACENTA, SIGNAL = 2.2; EXPRESSED IN HEART, SIGNAL = 1.8; EXPRESSED IN HELA, SIGNAL = 2.7; EXPRESSED IN HBL100, SIGNAL = 2.2; SWISSPROT HIT: P11994, EVALUE 3.40e-01; NT HIT: gi11430834, EVALUE 2.00e-83; EST_HUMAN HIT: AU123635.1, EVALUE 2.00e-77
cggcagtgggaacagctcacctattagtgggctgacgggaaacctggagaggctccagaactcagagcccaatgctcccctggccggcctggagaaaatggcaagcagtgagaacggaaccaacttccgcttcacccgcttcgtggaggacagcatg

SEQ ID NO: 20010 - DNA, 86 bp, Homo sapiens
  MAP TO AC011208.2; EXPRESSED IN BONE MARROW, SIGNAL = 4.9; EXPRESSED IN LUNG, SIGNAL = 5.4; EXPRESSED IN HBL100, SIGNAL = 9.2; EXPRESSED IN HELA, SIGNAL = 5.4; EXPRESSED IN PLACENTA, SIGNAL = 5.2; EXPRESSED IN HEART, SIGNAL = 4.9; EXPRESSED IN ADULT LIVER, SIGNAL = 6.1; EXPRESSED IN BT474, SIGNAL =   5; EXPRESSED IN FETAL LIVER, SIGNAL = 5.1; EXPRESSED IN BRAIN, SIGNAL = 2.3; NT HIT: AJ229042.1, EVALUE 7.00e-01; EST_HUMAN HIT: AI682889.1, EVALUE 1.00e+00
cccgacctgtttcatcgtcctcaccggagaataccacaatctgagataatccacaagcgttgcttgcatttccacagttcacatag

SEQ ID NO: 20011 - DNA, 112 bp, Homo sapiens
  MAP TO AL050309.4; EXPRESSED IN ADULT LIVER, SIGNAL = 0.8; EXPRESSED IN HEART, SIGNAL = 6.5; EXPRESSED IN BONE MARROW, SIGNAL = 0.65; EXPRESSED IN HBL100, SIGNAL = 0.74; EXPRESSED IN FETAL LIVER, SIGNAL =   1; EXPRESSED IN HELA, SIGNAL = 0.78; EXPRESSED IN BRAIN, SIGNAL = 1.1; EXPRESSED IN PLACENTA, SIGNAL = 0.81; EXPRESSED IN BT474, SIGNAL = 0.78; EXPRESSED IN LUNG, SIGNAL = 1.1; EST_HUMAN HIT: BE541391.1, EVALUE 1.00e-56; NT HIT: gi6005979, EVALUE 7.00e-57; SWISSPROT HIT: Q06205, EVALUE 2.30e+00
tcttgctgtagtccctgcagactctgcaaggctgaggatccactctcaattgtactctcctcactgtcacttggaatttccagtggagacatggaggtggggtcaactttca

SEQ ID NO: 20012 - DNA, 191 bp, Homo sapiens
  MAP TO AC007524.1; EXPRESSED IN BONE MARROW, SIGNAL = 2.3; EXPRESSED IN LUNG, SIGNAL = 2.8; EXPRESSED IN PLACENTA, SIGNAL = 2.4; EXPRESSED IN HELA, SIGNAL = 2.4; EXPRESSED IN HBL100, SIGNAL = 2.2; EXPRESSED IN HEART, SIGNAL = 2.1; EXPRESSED IN BT474, SIGNAL = 1.9; EXPRESSED IN FETAL LIVER, SIGNAL = 2.5; EXPRESSED IN ADULT LIVER, SIGNAL = 2.4; EXPRESSED IN BRAIN, SIGNAL = 2.5; SWISSPROT HIT: Q16620, EVALUE 7.00e-22; NT HIT: gi5453811, EVALUE 3.00e-82; EST_HUMAN HIT: AL134306.1, EVALUE 3.00e-82
  unsure 140
  unsure 164
tgatgactctgccagcccactccatcacatctccaatgggagtaacactccatcttcttcggaaggtggcccagatgctgtcattattggaatgaccaagatccctgtcattgaaaatccccagtactttggcatcaccnaacagtcagctcaagccagacacnatgtaagtacagctgtttgtacttatt

SEQ ID NO: 20013 - DNA, 122 bp, Homo sapiens
  MAP TO AC012069.2; EXPRESSED IN HEART, SIGNAL = 5.1; EXPRESSED IN ADULT LIVER, SIGNAL = 2.4; EXPRESSED IN FETAL LIVER, SIGNAL = 6.1; EXPRESSED IN LUNG, SIGNAL = 8.5; EXPRESSED IN BRAIN, SIGNAL = 2.6; EXPRESSED IN HBL100, SIGNAL = 9.7; EXPRESSED IN HELA, SIGNAL =  13; EXPRESSED IN PLACENTA, SIGNAL = 7.6; EXPRESSED IN BT474, SIGNAL = 8.4; EXPRESSED IN BONE MARROW, SIGNAL = 6.1; EST_HUMAN HIT: AA304095.1, EVALUE 3.00e-47; SWISSPROT HIT: P47904, EVALUE 1.00e-14; NT HIT: gi11436355, EVALUE 5.00e-49
agaaatacctggtgcagagccccagttcctacttcagggatgtgaaatgcccaggacgctataaaatcaccacggtctttagctatgcacaaacagtagttttgtgtgttggctgctccact

SEQ ID NO: 20014 - DNA, 156 bp, Homo sapiens
  MAP TO AC010819.2; EXPRESSED IN BRAIN, SIGNAL = 2.4; EXPRESSED IN HELA, SIGNAL =   1; EXPRESSED IN HBL100, SIGNAL = 1.5; EXPRESSED IN HEART, SIGNAL =   4; EXPRESSED IN FETAL LIVER, SIGNAL = 1.1; EXPRESSED IN LUNG, SIGNAL = 1.1; EXPRESSED IN BONE MARROW, SIGNAL = 1.7; EXPRESSED IN PLACENTA, SIGNAL =   1; EXPRESSED IN ADULT LIVER, SIGNAL =   1; EXPRESSED IN BT474, SIGNAL = 1.6; EST_HUMAN HIT: BF028507.1, EVALUE 8.30e+00; NT HIT: AL163280.2, EVALUE 4.70e+00
aaggagaaggagaaggaggagcaggaggaggaggaggaggaggaggaagaggaggaagaggaggagaaggagaagtggaagaggaagaggagaaggaagagaaggaagaggaggaggagaaacctgaaagactaattaataccatggaaagcactt

SEQ ID NO: 20015 - DNA, 76 bp, Homo sapiens
  MAP TO AL035409.15; EXPRESSED IN FETAL LIVER, SIGNAL = 0.78; EXPRESSED IN LUNG, SIGNAL = 0.79; EXPRESSED IN HELA, SIGNAL = 0.6; EXPRESSED IN PLACENTA, SIGNAL = 0.71; EXPRESSED IN BT474, SIGNAL = 0.89; EXPRESSED IN BONE MARROW, SIGNAL = 0.72; EXPRESSED IN HBL100, SIGNAL = 0.74; EXPRESSED IN ADULT LIVER, SIGNAL = 0.7; EXPRESSED IN BRAIN, SIGNAL = 1.4; EXPRESSED IN HEART, SIGNAL = 0.88; NT HIT: M94579.1, EVALUE 1.50e-01; EST_HUMAN HIT: BF326455.1, EVALUE 7.00e-20
ctgtgtgcttagtacagccaggattagcaaatgtaatgaattcagcaacattatcctactgaaatctaggtcagct

SEQ ID NO: 20016 - DNA, 126 bp, Homo sapiens
  MAP TO AC005046.2; EXPRESSED IN HBL100, SIGNAL = 0.83; EXPRESSED IN FETAL LIVER, SIGNAL = 0.96; EXPRESSED IN LUNG, SIGNAL = 1.2; EXPRESSED IN HELA, SIGNAL = 1.5; EXPRESSED IN ADULT LIVER, SIGNAL = 1.1; EXPRESSED IN BRAIN, SIGNAL = 0.75; EXPRESSED IN BONE MARROW, SIGNAL = 0.68; EXPRESSED IN PLACENTA, SIGNAL = 1.2; EXPRESSED IN BT474, SIGNAL = 0.8; EXPRESSED IN HEART, SIGNAL = 1.4; EST_HUMAN HIT: AL046247.2, EVALUE 1.00e-09; SWISSPROT HIT: P07942, EVALUE 2.00e-20; NT HIT: M61916.1, EVALUE 4.00e-65
ttccttccacttcttcattgaatccatccacaggggcacattcgctggcatgaccatagcagaagcaatttcctcgaaccaccatatcataaactgcataataatacttttctctgatttccatcc

SEQ ID NO: 20017 - DNA, 155 bp, Homo sapiens
  MAP TO AC009304.1; EXPRESSED IN HBL100, SIGNAL = 0.75; EXPRESSED IN FETAL LIVER, SIGNAL = 0.86; EXPRESSED IN LUNG, SIGNAL = 0.89; EXPRESSED IN HELA, SIGNAL = 0.65; EXPRESSED IN BRAIN, SIGNAL = 1.1; EXPRESSED IN PLACENTA, SIGNAL = 0.84; EXPRESSED IN BT474, SIGNAL = 0.99; EXPRESSED IN BONE MARROW, SIGNAL = 0.94; EXPRESSED IN ADULT LIVER, SIGNAL = 0.97; EXPRESSED IN HEART, SIGNAL = 1.1; EST_HUMAN HIT: BF677525.1, EVALUE 2.10e+00; NT HIT: AJ297357.1, EVALUE 5.00e-03; SWISSPROT HIT: P42630, EVALUE 3.90e+00
ctagcagggctgttgtgaagattgaatattatagtgtagttacagttcctggccctgaagagatgcccccaaagagtcattattctattgtggtgtgctttgttctgtctgatgagtatgtggcaagtagacacaaagtggaagcagcagaactt

SEQ ID NO: 20018 - DNA, 162 bp, Homo sapiens
  MAP TO AC012443.1; EXPRESSED IN BONE MARROW, SIGNAL = 2.4; EXPRESSED IN LUNG, SIGNAL = 3.2; EXPRESSED IN PLACENTA, SIGNAL = 2.7; EXPRESSED IN HBL100, SIGNAL = 2.5; EXPRESSED IN HELA, SIGNAL = 3.5; EXPRESSED IN HEART, SIGNAL = 2.6; EXPRESSED IN FETAL LIVER, SIGNAL = 2.8; EXPRESSED IN BT474, SIGNAL = 2.7; EXPRESSED IN ADULT LIVER, SIGNAL = 2.7; EXPRESSED IN BRAIN, SIGNAL = 2.2; NT HIT: gi11428745, EVALUE 4.00e-72; SWISSPROT HIT: P13215, EVALUE 2.20e+00; EST_HUMAN HIT: AU139074.1, EVALUE 5.00e-72
ttactagaaaaggcagaagcccgtgaacgtgaaagagaaaaagaagaggctcggaagatgaaacgaaaagaatctgcatttaagagtatgttaaaacaagctgctcctccgatagaattggatgctgtctgggaagatgtatgtatacttgttatttttttc

SEQ ID NO: 20019 - DNA, 109 bp, Homo sapiens
  MAP TO AJ239325.2; EXPRESSED IN FETAL LIVER, SIGNAL =   1; EXPRESSED IN BT474, SIGNAL = 1.1; EXPRESSED IN HBL100, SIGNAL = 1.2; EXPRESSED IN HELA, SIGNAL = 0.94; EXPRESSED IN HEART, SIGNAL = 1.4; NT HIT: AL163300.2, EVALUE 4.00e-55; EST_HUMAN HIT: AI762591.1, EVALUE 7.00e-55
ctctcctgacggaagtgacactcctcacgtccagctccagcttctgcaccaaggcgctggggtctatcttggtcctggcaaagatgttggtgttgatgaacgcccagtc

SEQ ID NO: 20020 - DNA, 98 bp, Homo sapiens
  MAP TO AC011235.2; EXPRESSED IN FETAL LIVER, SIGNAL = 1.2; EXPRESSED IN BONE MARROW, SIGNAL = 1.1; EXPRESSED IN PLACENTA, SIGNAL = 1.4; EXPRESSED IN ADULT LIVER, SIGNAL = 1.1; EXPRESSED IN BT474, SIGNAL = 0.97; EXPRESSED IN BRAIN, SIGNAL =   1; EXPRESSED IN LUNG, SIGNAL =   1; EXPRESSED IN HEART, SIGNAL =   1; EXPRESSED IN HELA, SIGNAL = 1.3; EXPRESSED IN HBL100, SIGNAL =   1; NT HIT: gi11419946, EVALUE 9.00e-04; EST_HUMAN HIT: AI038626.1, EVALUE 9.00e-04
cactgctgccactgccaccaccaccaccatcatcatcatcatcatcatcatcaattatcatgaccatggaatttctagatgtaggctcaggaatgact

SEQ ID NO: 20021 - DNA, 167 bp, Homo sapiens
  MAP TO AC012073.1; EXPRESSED IN BONE MARROW, SIGNAL = 1.1; EXPRESSED IN HEART, SIGNAL = 1.1; EXPRESSED IN ADULT LIVER, SIGNAL =   1; EXPRESSED IN BRAIN, SIGNAL = 1.1; EXPRESSED IN HELA, SIGNAL =   1; EXPRESSED IN HBL100, SIGNAL = 1.3; EXPRESSED IN BT474, SIGNAL = 1.1; EXPRESSED IN FETAL LIVER, SIGNAL = 1.2; EXPRESSED IN LUNG, SIGNAL = 0.95; SWISSPROT HIT: P24105, EVALUE 3.90e+00; NT HIT: AF109907.1, EVALUE 6.00e-09; EST_HUMAN HIT: BF431899.1, EVALUE 2.00e-13
acatgatggtcaaaggaaatgcttatttccagttttggattttcagatatgggatgttcagccagtaagtgtaatgcaaatactcccaattccgaaatctgaaacacctctagtcccaaaacgttcggatactcaacttgcatggacaactcttttaagtagttttc

SEQ ID NO: 20022 - DNA, 102 bp, Homo sapiens
  MAP TO AC011242.2; EXPRESSED IN HBL100, SIGNAL = 1.6; EXPRESSED IN HEART, SIGNAL = 1.4; EXPRESSED IN ADULT LIVER, SIGNAL = 1.5; EXPRESSED IN BT474, SIGNAL = 1.4; EXPRESSED IN FETAL LIVER, SIGNAL = 1.5; EXPRESSED IN BONE MARROW, SIGNAL = 1.7; EXPRESSED IN PLACENTA, SIGNAL = 1.3; EXPRESSED IN HELA, SIGNAL = 1.4; EXPRESSED IN BRAIN, SIGNAL = 1.4; EXPRESSED IN LUNG, SIGNAL = 1.3; NT HIT: AF059036.1, EVALUE 7.30e-01; EST_HUMAN HIT: AW889219.1, EVALUE 7.00e-51
ttcagaggaaaaagtccatttatgatttgatcatttgtctgatacattaacagcaacttttctctatcagtctctccacgagcttgcactgagaaatatagt

SEQ ID NO: 20023 - DNA, 107 bp, Homo sapiens
  MAP TO AP000115.1; EXPRESSED IN HBL100, SIGNAL = 2.1; EXPRESSED IN LUNG, SIGNAL = 0.82; EXPRESSED IN HELA, SIGNAL = 1.3; EXPRESSED IN ADULT LIVER, SIGNAL =   1; EXPRESSED IN BRAIN, SIGNAL = 0.77; EXPRESSED IN HEART, SIGNAL = 0.84; EXPRESSED IN PLACENTA, SIGNAL = 0.72; EXPRESSED IN BT474, SIGNAL = 0.9; EXPRESSED IN BONE MARROW, SIGNAL = 0.99; EXPRESSED IN FETAL LIVER, SIGNAL = 1.1; NT HIT: AF232673.1, EVALUE 7.00e-54; EST_HUMAN HIT: BF036521.1, EVALUE 1.00e-53; SWISSPROT HIT: O04716, EVALUE 9.10e+00
caggtaaagggttgagaagaggtgaaaaggagtcgcgttttaatactccagtccacaggtaactcagtactttttgaggacggaatatcaggctcggagaatgatac

SEQ ID NO: 20024 - DNA, 340 bp, Homo sapiens
  MAP TO AL078622.6; EXPRESSED IN HBL100, SIGNAL = 0.96; EXPRESSED IN FETAL LIVER, SIGNAL = 1.1; EXPRESSED IN LUNG, SIGNAL = 0.98; EXPRESSED IN HELA, SIGNAL = 0.95; EXPRESSED IN ADULT LIVER, SIGNAL = 1.4; EXPRESSED IN BRAIN, SIGNAL = 1.1; EXPRESSED IN BT474, SIGNAL = 0.97; EXPRESSED IN PLACENTA, SIGNAL = 1.2; EXPRESSED IN HEART, SIGNAL =   1; EXPRESSED IN BONE MARROW, SIGNAL = 1.1; SWISSPROT HIT: Q62203, EVALUE 1.00e-04
ctgtctcatcttggacctcctgtccctggggcctggagtccggagcccctccctgcagacctgatttgggatgttcacgtccccgagcccactcacctgtctcttctcggaactcctgtccctggggccaggagtccgcagcccctccctgcagacctgatttgggatgttcacgtccccgagcccactcacctgtctcttctcggacctcctgtccctggggcctggagtccggagcccctccctgcagacctgatttgggatgttcacgtccttgagcccacgcacgtgtctctgctcggacctcctgtccctggggtctggagtccggagcccctcc

SEQ ID NO: 20025 - DNA, 144 bp, Homo sapiens
  MAP TO AC012005.2; EXPRESSED IN BONE MARROW, SIGNAL = 2.8; EXPRESSED IN BRAIN, SIGNAL =   2; EXPRESSED IN LUNG, SIGNAL = 2.4; EXPRESSED IN PLACENTA, SIGNAL = 2.4; EXPRESSED IN HBL100, SIGNAL = 2.2; EXPRESSED IN HELA, SIGNAL = 2.5; EXPRESSED IN HEART, SIGNAL = 1.8; EXPRESSED IN ADULT LIVER, SIGNAL = 2.3; EXPRESSED IN BT474, SIGNAL = 2.3; EXPRESSED IN FETAL LIVER, SIGNAL = 1.7; EST_HUMAN HIT: AI673690.1, EVALUE 8.40e-02; SWISSPROT HIT: P06831, EVALUE 2.00e-01; NT HIT: AF109718.1, EVALUE 2.00e-63
gtttgtgtgcagaacatcctgcccttgctgccccagcagcttcagttggcacctgccccagtccagcctctgggacccatgcagcagctcccagcggccctgcagccaccaccagcatctgtttcacctgcagttgaagatcca

SEQ ID NO: 20026 - DNA, 208 bp, Homo sapiens
  MAP TO AC012079.2; EXPRESSED IN ADULT LIVER, SIGNAL = 4.2; EXPRESSED IN FETAL LIVER, SIGNAL = 3.4; EXPRESSED IN LUNG, SIGNAL = 3.2; EXPRESSED IN HELA, SIGNAL = 2.7; EXPRESSED IN HEART, SIGNAL = 2.9; EXPRESSED IN PLACENTA, SIGNAL = 3.6; EXPRESSED IN BT474, SIGNAL = 3.4; EXPRESSED IN BRAIN, SIGNAL = 2.6; EXPRESSED IN BONE MARROW, SIGNAL = 3.1; EXPRESSED IN HBL100, SIGNAL = 3.3; NT HIT: gi4504518, EVALUE 1.90e+00; SWISSPROT HIT: P54910, EVALUE 1.20e+00
aaccatcattaagcaaggccttgatgatgaactgttcagactcattaaatcctctaatgaggtggagcctgttatgatgaatggacaggcagcctgcatgcctccacgccagatactctccactggtttcaagcagatattccttgtggctcattgccaaaaaatgagtactgtcaatcaaggtgctgggtctgtggcactgaactcc

SEQ ID NO: 20027 - DNA, 87 bp, Homo sapiens
  MAP TO AC011274.2; EXPRESSED IN LUNG, SIGNAL = 2.2; EXPRESSED IN FETAL LIVER, SIGNAL =   2; EXPRESSED IN ADULT LIVER, SIGNAL = 2.4; EXPRESSED IN BT474, SIGNAL = 1.8; EXPRESSED IN BRAIN, SIGNAL = 2.1; EXPRESSED IN BONE MARROW, SIGNAL = 2.6; EXPRESSED IN PLACENTA, SIGNAL =   2; EXPRESSED IN HEART, SIGNAL = 1.9; EXPRESSED IN HELA, SIGNAL = 2.1; EXPRESSED IN HBL100, SIGNAL =   2; EST_HUMAN HIT: AV656961.1, EVALUE 1.10e+00; NT HIT: AB012113.1, EVALUE 2.80e+00
tctacaatcttccgtctgcaagctggatgaccaggaaagtagggcctgagaaccaggggaaacgatggtgtaagtcccaatctgagt

SEQ ID NO: 20028 - DNA, 202 bp, Homo sapiens
  MAP TO AC011451.2; EXPRESSED IN ADULT LIVER, SIGNAL = 1.7; EXPRESSED IN FETAL LIVER, SIGNAL = 1.6; EXPRESSED IN LUNG, SIGNAL = 5.8; EXPRESSED IN BRAIN, SIGNAL = 2.5; EXPRESSED IN HEART, SIGNAL = 1.9; EXPRESSED IN HELA, SIGNAL = 1.7; EXPRESSED IN HBL100, SIGNAL = 1.5; EXPRESSED IN PLACENTA, SIGNAL = 1.9; EXPRESSED IN BT474, SIGNAL = 1.7; EXPRESSED IN BONE MARROW, SIGNAL = 1.6; EST_HUMAN HIT: BF570035.1, EVALUE 1.80e-01; SWISSPROT HIT: P54258, EVALUE 4.90e-02
ggatttctcatccacttgcggctggaaccagccttggcgctcctttgcatcccgctcctacctgctccacccccttcacctcaagtcccgcttcccaggccccgccccatacgccatttgcagcgccgaaagaggaatcagaagtgtgcttctgcgcatgcgcgagtcgacagccttgtcaccctacgcctccgcccgcgtc

SEQ ID NO: 20029 - DNA, 600 bp, Homo sapiens
  MAP TO AL034380.22; EXPRESSED IN BRAIN, SIGNAL = 2.3; EXPRESSED IN BONE MARROW, SIGNAL =   3; EXPRESSED IN LUNG, SIGNAL = 2.9; EXPRESSED IN PLACENTA, SIGNAL = 3.6; EXPRESSED IN FETAL LIVER, SIGNAL = 2.6; EXPRESSED IN ADULT LIVER, SIGNAL = 1.8; EXPRESSED IN BT474, SIGNAL = 3.1; EXPRESSED IN HEART, SIGNAL =   2; EXPRESSED IN HELA, SIGNAL = 3.5; EXPRESSED IN HBL100, SIGNAL = 2.9; EST_HUMAN HIT: AI268382.1, EVALUE 0.00e+00; SWISSPROT HIT: O15534, EVALUE 1.00e-02; NT HIT: AF219114.1, EVALUE 0.00e+00
taaggtggagggaacaatggacaagatggaaaggggcagattaggcaaccgaatgaggaagatctccttaccaatgtctttcattgtgagccgcctcctctgcttcaacacaggctgtgtggcttcaacagagccaggtgggaaggtgatatcccgccgaatcatggggggctgcacaggggcaggtgctatgtgcgaggcaggtactgggggacctgccttctgcattttcatcccagagtgcaggaatggagacttgctaggagaggtgcggttctccattggccggggcaggggagcagggctggatacctgaggaatgtgattctgcatgcttggtgggggctggtagttagatggagggggccttgtcatggggggcacaggggcagagggaccatatgggggctggcgtgtgccatgggaaggccacgagccttcgtggttggccctctgatctgtgtgcagcatttcatctgttcggttcacgccatgataggcggggccctggggggcagagcccgtgctctgcctgttggcataattataggtcatgtcattacgcccctgccacatggtgccttgctgagcaacctcagc

SEQ ID NO: 20030 - DNA, 281 bp, Homo sapiens
  MAP TO AC008101.6; EXPRESSED IN FETAL LIVER, SIGNAL = 1.7; EXPRESSED IN HELA, SIGNAL = 1.1; EXPRESSED IN BT474, SIGNAL = 1.8; EXPRESSED IN BONE MARROW, SIGNAL = 0.86; EXPRESSED IN HBL100, SIGNAL =   2; EXPRESSED IN LUNG, SIGNAL = 0.87; EXPRESSED IN ADULT LIVER, SIGNAL = 1.4; EXPRESSED IN BRAIN, SIGNAL = 1.2; EXPRESSED IN PLACENTA, SIGNAL = 0.95; EXPRESSED IN HEART, SIGNAL = 0.89; EST_HUMAN HIT: AW797166.1, EVALUE 2.00e-38; SWISSPROT HIT: Q10449, EVALUE 8.00e+00; NT HIT: gi11526301, EVALUE 0.00e+00
caaaatgcaagagcctggagctgtgctggatgtggtgggtgcctggctccaagacccagccaatcaaaaccttccagaatatggagccttggcagaatttcacgtgcagcgggtgctgctgcctctgggctgcttatcggaggctgaggagctagtggtgggctctgcagcctttggtgaggagcggcgactggatgtacttcaggccattcacacagcgaggcagcagcagaaacaggaacactcaggctctgaggaggcccagaagccaaacctggaag

SEQ ID NO: 20031 - DNA, 144 bp, Homo sapiens
  MAP TO AC012064.1; EXPRESSED IN PLACENTA, SIGNAL = 3.8; EXPRESSED IN ADULT LIVER, SIGNAL = 4.1; EXPRESSED IN FETAL LIVER, SIGNAL = 3.2; EXPRESSED IN BT474, SIGNAL = 2.6; EXPRESSED IN BRAIN, SIGNAL =   3; EXPRESSED IN LUNG, SIGNAL = 3.4; EXPRESSED IN BONE MARROW, SIGNAL =  29; EXPRESSED IN HEART, SIGNAL = 2.6; EXPRESSED IN HELA, SIGNAL = 3.4; EXPRESSED IN HBL100, SIGNAL = 3.5; NT HIT: AF056490.1, EVALUE 7.00e-76; EST_HUMAN HIT: AW964200.1, EVALUE 1.00e-75; SWISSPROT HIT: O60658, EVALUE 2.00e-23
ataaacactatgcttaggactccagagaaccggaccctaatcaaacgaatgctgattaaatgtgctgatgtgtccaatccctgccgacccctgcagtactgcatcgagtgggctgcacgcatttcggaagaatatttttctcag

SEQ ID NO: 20032 - DNA, 137 bp, Homo sapiens
  MAP TO AC012460.2; EXPRESSED IN BT474, SIGNAL = 1.1; EXPRESSED IN LUNG, SIGNAL = 1.3; EXPRESSED IN HEART, SIGNAL = 1.2; EXPRESSED IN FETAL LIVER, SIGNAL = 1.4; EXPRESSED IN ADULT LIVER, SIGNAL = 1.3; EXPRESSED IN BRAIN, SIGNAL =   1; EXPRESSED IN BONE MARROW, SIGNAL = 1.3; EXPRESSED IN PLACENTA, SIGNAL = 1.2; EXPRESSED IN HELA, SIGNAL = 1.4; EXPRESSED IN HBL100, SIGNAL = 1.1; SWISSPROT HIT: P26205, EVALUE 5.10e+00; NT HIT: X71791.2, EVALUE 6.00e-18
gtctcccaaaggaaagtgattgaagacaaagacccattctgccagtgggatatgctgggaataccaactatacttgttactgagtgtgcatggctggtgttggccagccttcctgatgccagcaagaggagacagaa

SEQ ID NO: 20033 - DNA, 426 bp, Homo sapiens
  MAP TO AC010737.2; EXPRESSED IN FETAL LIVER, SIGNAL = 1.2; EXPRESSED IN BT474, SIGNAL = 1.3; EXPRESSED IN ADULT LIVER, SIGNAL = 2.2; EXPRESSED IN BONE MARROW, SIGNAL = 2.2; EXPRESSED IN LUNG, SIGNAL = 1.2; EXPRESSED IN BRAIN, SIGNAL = 1.3; EXPRESSED IN HELA, SIGNAL = 1.1; EXPRESSED IN PLACENTA, SIGNAL = 1.7; EXPRESSED IN HBL100, SIGNAL = 1.2; EXPRESSED IN HEART, SIGNAL = 1.3; NT HIT: AL163209.2, EVALUE 1.00e-86; SWISSPROT HIT: P70213, EVALUE 9.00e-21; EST_HUMAN HIT: AA055018.1, EVALUE 1.00e-77
atgatgaaagaaaatgatgagctcagagtttctaactcctggcttcagaagcagatacttagcctcaaatctgctaagattaccctgagtgagagtcttaactcctgtagagaaagagctgaaattgtgaaaaaacagacacaagctcttatcatgcgagtggctgacctgcagcaaaaggtgcatgcaaaaccttgccatgtgtctactgttaaattgagggcattgactgaaaaagaatgggaccctgcaacatggaatgggaacgtgtgggaggacactgacgaagtgggggacaccgagtttgtaaactttcatgaagcttttttgccagaaggaacagcttacccatccgcagtagtggcaacatccacccccgcccccaccccatccatgctgtcatcagtgtttccaactttgaggaga

SEQ ID NO: 20034 - DNA, 154 bp, Homo sapiens
  MAP TO AC012135.1; EXPRESSED IN HBL100, SIGNAL = 1.9; EXPRESSED IN HEART, SIGNAL =   2; EXPRESSED IN BT474, SIGNAL =   2; EXPRESSED IN PLACENTA, SIGNAL = 2.2; EXPRESSED IN ADULT LIVER, SIGNAL = 2.2; EXPRESSED IN FETAL LIVER, SIGNAL = 2.3; EXPRESSED IN BRAIN, SIGNAL = 2.1; EXPRESSED IN LUNG, SIGNAL = 2.4; EXPRESSED IN BONE MARROW, SIGNAL = 1.9; EXPRESSED IN HELA, SIGNAL = 1.8; NT HIT: gi4758613, EVALUE 6.00e-61; EST_HUMAN HIT: AA445992.1, EVALUE 2.00e-76; SWISSPROT HIT: P53714, EVALUE 8.80e-02
gcatacagctatgagaaaggttactacctccacagaccacaccatcgaggtcttcacagcggcgatcatcacactcacaagtcttgccatacacccggcgatctcctggaggatagcaggtgcatttgccacattcacatttacctggaaagta

SEQ ID NO: 20035 - DNA, 180 bp, Homo sapiens
  MAP TO AC012667.1; EXPRESSED IN LUNG, SIGNAL = 2.1; EXPRESSED IN BRAIN, SIGNAL = 1.3; EXPRESSED IN HELA, SIGNAL =   1; EXPRESSED IN HBL100, SIGNAL = 1.2; EXPRESSED IN HEART, SIGNAL = 1.8; EXPRESSED IN ADULT LIVER, SIGNAL =   2; EXPRESSED IN BT474, SIGNAL = 1.3; EXPRESSED IN BONE MARROW, SIGNAL = 1.6; EXPRESSED IN PLACENTA, SIGNAL = 2.1; EXPRESSED IN FETAL LIVER, SIGNAL = 1.5; EST_HUMAN HIT: BF666983.1, EVALUE 3.00e-40; SWISSPROT HIT: O70492, EVALUE 1.00e-14; NT HIT: gi4507142, EVALUE 1.00e-40
aaatggcggagtccatggctgacacccagtggctgatcaccaagccgcagaacctgaatgacgcctaccggtcccccagcaacttccttgagatctatgagcaacgggcagactgtggggggcggctggggccgcttcaccacattcgaaatcagggtcaaggctaccctttctttaaat

SEQ ID NO: 20036 - DNA, 116 bp, Homo sapiens
  MAP TO AL035699.4; EXPRESSED IN ADULT LIVER, SIGNAL =   1; EXPRESSED IN BONE MARROW, SIGNAL = 0.88; EXPRESSED IN HBL100, SIGNAL = 0.89; EXPRESSED IN LUNG, SIGNAL = 1.3; EXPRESSED IN HELA, SIGNAL = 1.3; EXPRESSED IN BRAIN, SIGNAL = 1.2; EXPRESSED IN HEART, SIGNAL = 1.1; EXPRESSED IN PLACENTA, SIGNAL = 0.92; EXPRESSED IN BT474, SIGNAL = 0.63; EXPRESSED IN FETAL LIVER, SIGNAL = 0.78; NT HIT: AF043092.1, EVALUE 2.50e-01; EST_HUMAN HIT: AA746142.1, EVALUE 3.00e-50
gttttatgagtcatcaccaagaagaattagtgccaaaacagcctcaaaaaagaaaaccccaggagcagctcttggagtgtaacaagctgtgtggtaggggccaatccaggcagctt

SEQ ID NO: 20037 - DNA, 144 bp, Homo sapiens
  MAP TO AC009961.3; EXPRESSED IN BONE MARROW, SIGNAL = 8.2; EXPRESSED IN BRAIN, SIGNAL = 7.5; EXPRESSED IN HELA, SIGNAL = 8.2; EXPRESSED IN HBL100, SIGNAL = 7.1; EXPRESSED IN HEART, SIGNAL = 7.1; EXPRESSED IN BT474, SIGNAL = 6.3; EXPRESSED IN FETAL LIVER, SIGNAL = 5.8; EXPRESSED IN ADULT LIVER, SIGNAL =  11; EXPRESSED IN LUNG, SIGNAL = 8.2; EXPRESSED IN PLACENTA, SIGNAL = 9.1; EST_HUMAN HIT: AW502536.1, EVALUE 3.00e-35; NT HIT: gi4505052, EVALUE 7.00e-76; SWISSPROT HIT: Q57598, EVALUE 1.00e+00
gagcaggaagaccaactataaaaaatgagaagtttttggctggtttaagtactgacggcttctgggatattcaaacctttaaagttattgaagaagcagtttattttcaccagcacagcattcttgcttgtaaaattgaaatgg

SEQ ID NO: 20038 - DNA, 139 bp, Homo sapiens
  MAP TO AF130351.1; EXPRESSED IN HBL100, SIGNAL = 1.6; EXPRESSED IN FETAL LIVER, SIGNAL = 1.3; EXPRESSED IN HELA, SIGNAL = 1.4; EXPRESSED IN BRAIN, SIGNAL = 1.2; EXPRESSED IN BT474, SIGNAL = 0.89; EXPRESSED IN BONE MARROW, SIGNAL =   1; EXPRESSED IN ADULT LIVER, SIGNAL = 0.91; EXPRESSED IN HEART, SIGNAL = 1.1; EXPRESSED IN PLACENTA, SIGNAL = 0.7; EXPRESSED IN LUNG, SIGNAL = 0.74; EST_HUMAN HIT: AI473371.1, EVALUE 2.00e-18; NT HIT: AL163206.2, EVALUE 7.00e-73; SWISSPROT HIT: P08548, EVALUE 3.00e-09
ctaggacttccagtactatgtggaataacactggtgagccaggttatattccagatcttagaggaaaggctttcatcttttccccagtcagtatgatactagctgtgggtctattgtataaggcttttattatgttgag

SEQ ID NO: 20039 - DNA, 129 bp, Homo sapiens
  MAP TO AC008151.1; EXPRESSED IN FETAL LIVER, SIGNAL = 0.79; EXPRESSED IN ADULT LIVER, SIGNAL = 0.88; EXPRESSED IN BONE MARROW, SIGNAL = 1.2; EXPRESSED IN HBL100, SIGNAL = 0.75; EXPRESSED IN LUNG, SIGNAL = 0.65; EXPRESSED IN HELA, SIGNAL = 0.84; EXPRESSED IN PLACENTA, SIGNAL = 0.75; EXPRESSED IN BT474, SIGNAL = 0.8; EXPRESSED IN HEART, SIGNAL = 1.2; SWISSPROT HIT: P08547, EVALUE 1.00e-03; EST_HUMAN HIT: AV731600.1, EVALUE 1.70e+00
agactcattgcaactcccgtcacaattccaacagagttcttcatgaatactggcaagctgattctgaaatataaatggaagaacaaaaggcagggaatggccaagacattcctgaagaggaaaaacaag

SEQ ID NO: 20040 - DNA, 175 bp, Homo sapiens
  MAP TO AC007463.3; EXPRESSED IN FETAL LIVER, SIGNAL = 0.66; EXPRESSED IN HELA, SIGNAL = 0.6; EXPRESSED IN ADULT LIVER, SIGNAL = 1.1; EXPRESSED IN BONE MARROW, SIGNAL = 0.69; EXPRESSED IN HBL100, SIGNAL = 0.7; EXPRESSED IN PLACENTA, SIGNAL = 0.66; EXPRESSED IN HEART, SIGNAL = 1.1; EXPRESSED IN BRAIN, SIGNAL = 2.5; EST_HUMAN HIT: AA533486.1, EVALUE 6.00e-01; SWISSPROT HIT: P23144, EVALUE 5.70e-01
tagtcttctgtgacacaagtggcacttctgttactctcctgaaggaggaccctctgaatcaccctcgaggacaggcacttgctctgcacagacttccctgtttggagagccgtctgtgcatccagcttcccactctccccaggcaccaaacaatgaggttctgtctaaggcttct

SEQ ID NO: 20041 - DNA, 172 bp, Homo sapiens
  MAP TO AL035694.8; EXPRESSED IN PLACENTA, SIGNAL = 0.63; EXPRESSED IN BT474, SIGNAL = 1.1; EXPRESSED IN FETAL LIVER, SIGNAL = 0.79; EXPRESSED IN LUNG, SIGNAL = 0.74; EXPRESSED IN HELA, SIGNAL = 0.7; EXPRESSED IN ADULT LIVER, SIGNAL =   1; EXPRESSED IN HBL100, SIGNAL = 0.85; EXPRESSED IN BRAIN, SIGNAL = 1.3; EXPRESSED IN HEART, SIGNAL = 0.82; NT HIT: AF190338.1, EVALUE 6.00e-03; EST_HUMAN HIT: AA853350.1, EVALUE 1.50e-01
aaataatgtttttacctctcaaagtaaaacttattataattattataattcccttattaccataggctgtcaacagtctgaatatgaggcccatcatgaatgtgggactgggacaaatagatctcaatgttccactccactgagcttgaccctgctcaactcaacagacttt

SEQ ID NO: 20042 - DNA, 156 bp, Homo sapiens
  MAP TO AC007561.2; EXPRESSED IN BT474, SIGNAL = 0.82; EXPRESSED IN HBL100, SIGNAL = 0.82; EXPRESSED IN FETAL LIVER, SIGNAL = 0.86; EXPRESSED IN LUNG, SIGNAL = 0.72; EXPRESSED IN HELA, SIGNAL = 0.68; EXPRESSED IN ADULT LIVER, SIGNAL = 1.1; EXPRESSED IN BRAIN, SIGNAL = 0.85; EXPRESSED IN HEART, SIGNAL = 1.2; EXPRESSED IN PLACENTA, SIGNAL =   1; EXPRESSED IN BONE MARROW, SIGNAL = 0.99; SWISSPROT HIT: P17862, EVALUE 1.00e+00
atggaggtaggagatcgaccatacgatgtccagctgaattggtcccaaatcttcctgtgtctgggggcaggtgagaggaaggttcaggcctctgaaaaggagtcaacagaagcaagctggaggaaagcaagttctggcccaaagaggaggccagag

SEQ ID NO: 20043 - DNA, 313 bp, Homo sapiens
  MAP TO AC012513.2; EXPRESSED IN BRAIN, SIGNAL = 9.4; EXPRESSED IN BONE MARROW, SIGNAL = 8.1; EXPRESSED IN LUNG, SIGNAL =  13; EXPRESSED IN PLACENTA, SIGNAL = 8.2; EXPRESSED IN HBL100, SIGNAL =  14; EXPRESSED IN HELA, SIGNAL =  12; EXPRESSED IN HEART, SIGNAL = 8.2; EXPRESSED IN BT474, SIGNAL = 8.6; EXPRESSED IN FETAL LIVER, SIGNAL =  12; EXPRESSED IN ADULT LIVER, SIGNAL =   8; EST_HUMAN HIT: AU130689.1, EVALUE 6.00e-61; NT HIT: Y16641.1, EVALUE 1.00e-45; SWISSPROT HIT: P04929, EVALUE 5.00e-06
catagttaccactgccaaaatttcctccttcattgtaaccatcatatccttcaccactatccccatacccgccattgtggttttcatatcctggttcaccatctccatagcccccactactgctgtaggcaggcccaccaccattgttgcccaccgtcacctccacatccattatatccaccattacaccctccataaccacctctgctgccaccacctctacttctaccaccagagcctcctcttccaccaaagtttccaccacagccaaaattacttgcaccacttccagagtttcctccacaacccataa

SEQ ID NO: 20044 - DNA, 198 bp, Homo sapiens
  MAP TO AC012130.1; EXPRESSED IN BT474, SIGNAL = 3.6; EXPRESSED IN FETAL LIVER, SIGNAL = 4.9; EXPRESSED IN LUNG, SIGNAL = 3.9; EXPRESSED IN BONE MARROW, SIGNAL = 3.2; EXPRESSED IN HEART, SIGNAL = 3.4; EXPRESSED IN PLACENTA, SIGNAL = 4.3; EXPRESSED IN ADULT LIVER, SIGNAL = 5.6; EXPRESSED IN BRAIN, SIGNAL = 3.4; EXPRESSED IN HELA, SIGNAL = 3.6; EXPRESSED IN HBL100, SIGNAL = 4.1; NT HIT: AF064070.1, EVALUE 1.00e-01; EST_HUMAN HIT: AI348091.1, EVALUE 4.70e-01; SWISSPROT HIT: P25147, EVALUE 3.00e-04
agcaataaccagattgagatgatcacaggtttggaggatctgaaagccctgcagaacctggatctgtcccacaatcagataagcagcctccaaggcttagagaatcatgacctcctggaagtgatcaacctggaggataataaggtagtgttgcacttcacatgtcttggtttcagtgttgacataagaggacatatt

SEQ ID NO: 20045 - DNA, 217 bp, Homo sapiens
  MAP TO AF027390.1; EXPRESSED IN HELA, SIGNAL = 1.1; EXPRESSED IN HEART, SIGNAL = 0.97; EXPRESSED IN FETAL LIVER, SIGNAL = 0.99; EXPRESSED IN BONE MARROW, SIGNAL = 1.1; NT HIT: AF196576.1, EVALUE 1.30e-01; EST_HUMAN HIT: BE171225.1, EVALUE 8.00e-03; SWISSPROT HIT: P39870, EVALUE 2.00e+00
aaattcatgtttgaagccgctaaatcctggagtgtttgttccacagcagcagcagctgaagcaggtcccggatgatgtcaaacatcttgcagctgtgcagagggcaccatccatcctgcacctttctcagctgactctcaggccggaaagcgtcccgatgaaatggggtcctaaggtgacgccagccctggccacagtcacaaatgctgagagcctc

SEQ ID NO: 20046 - DNA, 224 bp, Homo sapiens
  MAP TO AE000659.1; EXPRESSED IN FETAL LIVER, SIGNAL = 2.4; EXPRESSED IN BRAIN, SIGNAL = 2.6; EXPRESSED IN LUNG, SIGNAL = 1.9; EXPRESSED IN HELA, SIGNAL = 2.1; EXPRESSED IN HEART, SIGNAL = 1.5; EXPRESSED IN ADULT LIVER, SIGNAL =   2; EXPRESSED IN BT474, SIGNAL = 2.2; EXPRESSED IN BONE MARROW, SIGNAL =   2; EXPRESSED IN PLACENTA, SIGNAL = 2.2; EXPRESSED IN HBL100, SIGNAL = 2.4; NT HIT: X56717.1, EVALUE 1.30e-01; SWISSPROT HIT: O24059, EVALUE 3.90e+00; EST_HUMAN HIT: AV647246.1, EVALUE 7.00e-23
tacatctcagaaaacaggaagaacacactaatgaacagtctgtgctaaactctggttctgcacttggcctccagagagcgatgctgcacacactggagcttttgtttctgttgaagatcagtccactgctcagtttcttcttcctgcagctggttgagttctttccagacaaagacaagtgacaagaatcagagttttaaaagcaaccagattcatctctgcag

SEQ ID NO: 20047 - DNA, 348 bp, Homo sapiens
  MAP TO AC006548.19; EXPRESSED IN BT474, SIGNAL = 0.62; EXPRESSED IN FETAL LIVER, SIGNAL = 0.79; EXPRESSED IN BRAIN, SIGNAL = 1.1; EXPRESSED IN ADULT LIVER, SIGNAL = 0.79; EXPRESSED IN PLACENTA, SIGNAL = 1.1; EXPRESSED IN BONE MARROW, SIGNAL = 0.93; EXPRESSED IN LUNG, SIGNAL = 7.8; EXPRESSED IN HELA, SIGNAL =   1; EXPRESSED IN HEART, SIGNAL = 0.97; EST_HUMAN HIT: BF316383.1, EVALUE 3.00e-35; SWISSPROT HIT: P54644, EVALUE 2.00e-08; NT HIT: AB018413.1, EVALUE 2.00e-35
gcctggaggaaacgctggtttatcctgcggaggggccagactagcagtgacccagatgttctggaatactacaagaatgatggctccaagaagcccctgcgcaccatcaacctgaacctctgtgagcagctggatgttgatgtgactctgaacttcaacaagaaggagattcagaagggctatatgtttgacatcaagaccagtgagcgtaccttttacctggtggctgagaccagggaggacatgaatgagtgggtccagagcatctgtcagatctgtggcttcaggcaggaggaaagcacaggtatgggagcacacacagccctgtctcaggaggggctgagatga

SEQ ID NO: 20048 - DNA, 110 bp, Homo sapiens
  MAP TO AP000221.1; EXPRESSED IN PLACENTA, SIGNAL = 1.3; EXPRESSED IN BT474, SIGNAL = 1.1; EXPRESSED IN LUNG, SIGNAL = 1.3; EXPRESSED IN HELA, SIGNAL = 1.7; EXPRESSED IN HBL100, SIGNAL = 1.2; EXPRESSED IN FETAL LIVER, SIGNAL = 1.1; EXPRESSED IN ADULT LIVER, SIGNAL = 0.9; EXPRESSED IN BRAIN, SIGNAL = 1.3; EXPRESSED IN BONE MARROW, SIGNAL = 1.3; EXPRESSED IN HEART, SIGNAL = 1.1; SWISSPROT HIT: P57235, EVALUE 9.30e+00; NT HIT: AB006193.1, EVALUE 8.00e-01
cttggtgccttccacacatttgctcttcaatccaaccgaaaacagtctcactctttcgtggatgtctgcaacgtgaagagaagtacaggataggactctggctgctgaac

SEQ ID NO: 20049 - DNA, 216 bp, Homo sapiens
  MAP TO AF001549.1; EXPRESSED IN PLACENTA, SIGNAL = 1.5; EXPRESSED IN HBL100, SIGNAL = 1.2; EXPRESSED IN HEART, SIGNAL = 0.99; EXPRESSED IN BRAIN, SIGNAL = 1.3; EXPRESSED IN LUNG, SIGNAL = 1.5; EXPRESSED IN HELA, SIGNAL = 1.4; EXPRESSED IN ADULT LIVER, SIGNAL = 1.6; EXPRESSED IN FETAL LIVER, SIGNAL = 1.3; EXPRESSED IN BT474, SIGNAL = 1.3; EXPRESSED IN BONE MARROW, SIGNAL = 1.4; NT HIT: AF058790.1, EVALUE 4.40e-01; SWISSPROT HIT: P55129, EVALUE 6.90e-01
ccaagtatttggcagacaagatgatgacctggctcttggcccaacctgagacctggttgagggtggagatggctccgtgcacagcctcgggggagagggattccagttggctgtaggtcaaacctacaactgcatccgacaaagaacccagggtctcattgagggtctggttctccatggcaatgtccaggagttctgctttgagctggaaggaga

SEQ ID NO: 20050 - DNA, 293 bp, Homo sapiens
  MAP TO AC007221.1; EXPRESSED IN BT474, SIGNAL =   4; EXPRESSED IN FETAL LIVER, SIGNAL = 5.2; EXPRESSED IN BRAIN, SIGNAL = 4.6; EXPRESSED IN BONE MARROW, SIGNAL = 3.9; EXPRESSED IN HBL100, SIGNAL = 4.3; EXPRESSED IN PLACENTA, SIGNAL = 4.5; EXPRESSED IN HEART, SIGNAL =   4; EXPRESSED IN LUNG, SIGNAL = 5.6; EXPRESSED IN HELA, SIGNAL = 4.1; EXPRESSED IN ADULT LIVER, SIGNAL = 6.7; SWISSPROT HIT: Q05793, EVALUE 4.50e-01
tggctgtaaatcattccaccgcagctgtccgagtgagaagtgactgggaattgagaagggatgggggatgtgctcccatcctcaggagccatatgggctctttccaaggcttggcaacttatgctgaaaatcaaggggcttggttctttagctcccaaatcaacaggactcagagcaacatttgttcttatagtggggccaatggcaaatgttgggagccaggtatcttgggagagatccttcagcagtcttgtagtgcaggctcttggaaaggtggccactttgatgaagag

SEQ ID NO: 20051 - DNA, 217 bp, Homo sapiens
  MAP TO AP000023.1; EXPRESSED IN BONE MARROW, SIGNAL = 0.64; EXPRESSED IN FETAL LIVER, SIGNAL = 1.7; EXPRESSED IN ADULT LIVER, SIGNAL = 0.95; EXPRESSED IN BT474, SIGNAL = 0.92; EXPRESSED IN HBL100, SIGNAL = 0.86; EXPRESSED IN LUNG, SIGNAL = 1.1; EXPRESSED IN HELA, SIGNAL = 0.88; EXPRESSED IN PLACENTA, SIGNAL = 0.71; EXPRESSED IN HEART, SIGNAL = 0.96; EST_HUMAN HIT: AW880120.1, EVALUE 3.00e-03; NT HIT: AL163201.2, EVALUE 6.00e-96
ttagaacttggacatcgttggtgaaatcactttgtctttgtcctttcttattcttagaattctagtgacaagcgtcttcttcttcctcaacttcttcttcctcagcgttcctatggggcctccaacactcaccagacagctccctgactgcattaccctagattgtatttggccaagattctcgggtttttcttggtttctccaagcaggatggaag

SEQ ID NO: 20052 - DNA, 132 bp, Homo sapiens
  MAP TO AC007027.2; EXPRESSED IN HELA, SIGNAL =   2; EXPRESSED IN ADULT LIVER, SIGNAL = 2.9; EXPRESSED IN BT474, SIGNAL =   2; EXPRESSED IN BRAIN, SIGNAL = 2.9; EXPRESSED IN BONE MARROW, SIGNAL = 1.9; EXPRESSED IN HBL100, SIGNAL = 1.8; EXPRESSED IN HEART, SIGNAL = 1.9; EXPRESSED IN PLACENTA, SIGNAL = 2.1; EXPRESSED IN FETAL LIVER, SIGNAL = 2.3; EXPRESSED IN LUNG, SIGNAL = 2.4; NT HIT: AF260827.1, EVALUE 1.00e+00; SWISSPROT HIT: P48754, EVALUE 5.20e+00; EST_HUMAN HIT: BF056726.1, EVALUE 4.40e-01
agcctcatattagatgaatgtaattcacaccgcaaacagcaaaaggcacccactaatcccttctctgacaggactggtgctgaagctcagtgtgtggttttagctggaagaagattatctgtgattgtttgg

SEQ ID NO: 20053 - DNA, 127 bp, Homo sapiens
  MAP TO AC007228.1; EXPRESSED IN PLACENTA, SIGNAL = 3.1; EXPRESSED IN HELA, SIGNAL = 3.4; EXPRESSED IN ADULT LIVER, SIGNAL = 4.6; EXPRESSED IN BT474, SIGNAL =   3; EXPRESSED IN LUNG, SIGNAL =   4; EXPRESSED IN BRAIN, SIGNAL =   4; EXPRESSED IN BONE MARROW, SIGNAL = 2.8; EXPRESSED IN HEART, SIGNAL = 2.7; EXPRESSED IN HBL100, SIGNAL = 3.2; EXPRESSED IN FETAL LIVER, SIGNAL = 3.7; EST_HUMAN HIT: AA083688.1, EVALUE 4.00e-25; NT HIT: gi11419745, EVALUE 4.00e-25; SWISSPROT HIT: Q06730, EVALUE 2.00e-13
gaatcagtgacgttcagggatgtgactgtggacttcacccaggaggagtggcagcagctggagcctgcccagaaggacctgtacagggatgtcatgctggagaactacaggaacctggtctcactgg

SEQ ID NO: 20054 - DNA, 211 bp, Homo sapiens
  MAP TO AP000161.1; EXPRESSED IN HEART, SIGNAL = 0.98; EXPRESSED IN PLACENTA, SIGNAL = 0.88; EXPRESSED IN BT474, SIGNAL = 0.75; EXPRESSED IN BONE MARROW, SIGNAL = 0.7; EXPRESSED IN LUNG, SIGNAL = 0.88; EXPRESSED IN HELA, SIGNAL = 0.98; EXPRESSED IN ADULT LIVER, SIGNAL = 0.85; EXPRESSED IN BRAIN, SIGNAL = 0.84; EXPRESSED IN HBL100, SIGNAL = 0.7; EXPRESSED IN FETAL LIVER, SIGNAL = 0.81; NT HIT: AL163278.2, EVALUE 4.00e-63; EST_HUMAN HIT: AW850897.1, EVALUE 1.30e-01; SWISSPROT HIT: Q9UKP6, EVALUE 3.20e-01
atagttgggcgggaggggctggggcaggcagtcttcattttctgctttcctctttagctgtactttcgagtcctcgtcactgtggtccctagagaaatctcccaactgcatggtgtccagcaggttttcagccatagattttaattggctcatggtatctttcatgacctgttttatttgtgcattcaaaggtttccagcttttctttctc

SEQ ID NO: 20055 - DNA, 167 bp, Homo sapiens
  MAP TO AL049838.2; EXPRESSED IN BT474, SIGNAL = 0.61; EXPRESSED IN BONE MARROW, SIGNAL = 0.74; EXPRESSED IN LUNG, SIGNAL = 0.76; EXPRESSED IN FETAL LIVER, SIGNAL = 0.78; EXPRESSED IN HELA, SIGNAL = 0.77; EXPRESSED IN ADULT LIVER, SIGNAL = 0.83; EXPRESSED IN PLACENTA, SIGNAL = 1.1; EXPRESSED IN HEART, SIGNAL =   1; EXPRESSED IN BRAIN, SIGNAL = 0.74; EXPRESSED IN HBL100, SIGNAL = 0.67; EST_HUMAN HIT: R78338.1, EVALUE 5.00e-13; NT HIT: AF149773.1, EVALUE 2.00e-08; SWISSPROT HIT: Q09512, EVALUE 8.60e+00
caagatgacagagatgctagaattacctgacaagaattttgaagcagctatgatgataataatgcttcatcaattaagaacatcttgaaacacatgaaacaataacaaacttcctcaagaagaagaagaaccaaatggaaattttacaactgaaaaatacaataacc

SEQ ID NO: 20056 - DNA, 114 bp, Homo sapiens
  MAP TO AC007246.2; EXPRESSED IN BT474, SIGNAL = 3.8; EXPRESSED IN FETAL LIVER, SIGNAL = 4.2; EXPRESSED IN BONE MARROW, SIGNAL = 3.8; EXPRESSED IN PLACENTA, SIGNAL = 4.1; EXPRESSED IN BRAIN, SIGNAL = 4.3; EXPRESSED IN LUNG, SIGNAL = 5.3; EXPRESSED IN HEART, SIGNAL = 3.6; EXPRESSED IN HELA, SIGNAL = 4.5; EXPRESSED IN HBL100, SIGNAL = 9.2; EXPRESSED IN ADULT LIVER, SIGNAL = 5.3; EST_HUMAN HIT: AA325374.1, EVALUE 7.00e-58; NT HIT: AL445066.1, EVALUE 2.50e-01; SWISSPROT HIT: P54145, EVALUE 6.90e+00
ccacgtgctgggtcaagctctcctcccagaagaaactgactgtggccacaatgcagccgcagagaaggacggctacggccatgccgaggaagccagcagtgattcttcttaaat

SEQ ID NO: 20057 - DNA, 301 bp, Homo sapiens
  MAP TO AF067844.1; EXPRESSED IN BONE MARROW, SIGNAL = 2.9; EXPRESSED IN HBL100, SIGNAL =   6; EXPRESSED IN BT474, SIGNAL = 4.5; EXPRESSED IN ADULT LIVER, SIGNAL = 1.1; EXPRESSED IN FETAL LIVER, SIGNAL = 5.6; EXPRESSED IN BRAIN, SIGNAL =   2; EXPRESSED IN LUNG, SIGNAL =  10; EXPRESSED IN PLACENTA, SIGNAL = 3.1; EXPRESSED IN HEART, SIGNAL = 4.9; EXPRESSED IN HELA, SIGNAL = 8.2; NT HIT: L05092.1, EVALUE 3.00e-89; EST_HUMAN HIT: AI589294.1, EVALUE 0.00e+00; SWISSPROT HIT: Q29205, EVALUE 3.00e-39
cagaaccaggtgttttccaaagctagatatactgttagcccctttggcaacagaagaaatgaaaagactgttgtctgctgcacagttcgaggggccaaggcagacgaaatcctggagaatgatctaaaggtgcaggagtgtgagttaagaaaaaataacttctcagatactggaaactttggttttgggacccaggaacacattgatctgggtatcagatatgacccaagcattgatgtctacagcctggacttctatgtggtgctggaaaagccaggtttcatcattgcaggtaagaagt

SEQ ID NO: 20058 - DNA, 114 bp, Homo sapiens
  MAP TO AF001905.1; EXPRESSED IN BONE MARROW, SIGNAL = 1.1; EXPRESSED IN LUNG, SIGNAL = 1.6; EXPRESSED IN HELA, SIGNAL = 1.1; EXPRESSED IN HEART, SIGNAL = 1.1; EXPRESSED IN BT474, SIGNAL =   1; EXPRESSED IN BRAIN, SIGNAL =   1; EXPRESSED IN PLACENTA, SIGNAL = 1.4; EXPRESSED IN ADULT LIVER, SIGNAL = 1.8; EXPRESSED IN FETAL LIVER, SIGNAL = 1.6; NT HIT: D16470.1, EVALUE 4.00e-58; EST_HUMAN HIT: AI350172.1, EVALUE 1.00e-06
ttcctctccatgagagaggcacaccctagctgcttctagtagacgatcttcaccaaacatccccatctccaaaatcttatcattttcaacaacatggatggaattggaggtcat

SEQ ID NO: 20059 - DNA, 129 bp, Homo sapiens
  MAP TO AP000183.1; EXPRESSED IN FETAL LIVER, SIGNAL = 0.76; EXPRESSED IN HELA, SIGNAL = 1.6; EXPRESSED IN ADULT LIVER, SIGNAL = 0.9; EXPRESSED IN BT474, SIGNAL = 0.77; EXPRESSED IN LUNG, SIGNAL =   1; EXPRESSED IN BRAIN, SIGNAL = 1.1; EXPRESSED IN HEART, SIGNAL = 0.87; EXPRESSED IN PLACENTA, SIGNAL = 0.92; EXPRESSED IN BONE MARROW, SIGNAL =   1; EXPRESSED IN HBL100, SIGNAL = 0.74; NT HIT: AF020503.1, EVALUE 6.00e-05; EST_HUMAN HIT: AI478617.1, EVALUE 2.00e-11; SWISSPROT HIT: P28947, EVALUE 8.90e+00
cacacgttttcattatgtcgtctagaggcaatttttctgcagtgttaactatgttatcttcagcattgtgcacctgcattttgactgcgacccatcacacgaggtcaggtgagaaatcttccacttgtg

SEQ ID NO: 20060 - DNA, 204 bp, Homo sapiens
  MAP TO AL035552.9; EXPRESSED IN BONE MARROW, SIGNAL = 0.65; EXPRESSED IN FETAL LIVER, SIGNAL = 0.62; EXPRESSED IN ADULT LIVER, SIGNAL = 0.99; EXPRESSED IN HEART, SIGNAL = 0.95; EXPRESSED IN BT474, SIGNAL = 0.99; EXPRESSED IN LUNG, SIGNAL = 0.6; EXPRESSED IN PLACENTA, SIGNAL = 0.72; EST_HUMAN HIT: BF245240.1, EVALUE 6.00e-97; SWISSPROT HIT: Q24595, EVALUE 2.20e+00; NT HIT: X61186.1, EVALUE 3.10e-02
agagcttccttcagacaaacagatggatacttcatcatttctgtcattatcctctcctacttcaggcccagcttcctctcctggtgtgagtgcagataaagaaccagactcaggctgctcagagaaatcagcagggcctcctcttggaggtggaacttcaatccccattaaacgatatttccttcttcgattcccaatccaagt

SEQ ID NO: 20061 - DNA, 214 bp, Homo sapiens
  MAP TO AC007251.1; EXPRESSED IN PLACENTA, SIGNAL = 1.8; EXPRESSED IN ADULT LIVER, SIGNAL = 2.2; EXPRESSED IN BRAIN, SIGNAL = 1.1; EXPRESSED IN LUNG, SIGNAL = 1.4; EXPRESSED IN BONE MARROW, SIGNAL =   2; EXPRESSED IN HEART, SIGNAL = 0.99; EXPRESSED IN HELA, SIGNAL = 1.7; EXPRESSED IN HBL100, SIGNAL = 1.2; EXPRESSED IN BT474, SIGNAL = 1.2; EXPRESSED IN FETAL LIVER, SIGNAL = 1.2; NT HIT: AL163246.2, EVALUE 7.00e-74; SWISSPROT HIT: Q02817, EVALUE 1.50e+00; EST_HUMAN HIT: AW340174.1, EVALUE 2.00e-47
acttaaaggtaggaggagcccaaagtgtccaggtggcaatcttaacttccaatgtaatgggattgttgttgtgtctgctggtggcagtgttcctccctctgaaactaagacctctaggccagcagaacgtaatgtagcaggcacaggaagcaaaaattttgctagtggatcactaggggtgatggtgagtgatgccacttccatgtccacccct

SEQ ID NO: 20062 - DNA, 271 bp, Homo sapiens
  MAP TO AP000193.1; EXPRESSED IN PLACENTA, SIGNAL = 0.9; EXPRESSED IN BT474, SIGNAL = 0.94; EXPRESSED IN BONE MARROW, SIGNAL = 1.1; EXPRESSED IN FETAL LIVER, SIGNAL =   1; EXPRESSED IN LUNG, SIGNAL =   1; EXPRESSED IN HELA, SIGNAL = 3.3; EXPRESSED IN ADULT LIVER, SIGNAL =   1; EXPRESSED IN BRAIN, SIGNAL = 1.1; EXPRESSED IN HEART, SIGNAL = 1.1; EXPRESSED IN HBL100, SIGNAL = 1.3; NT HIT: AL163280.2, EVALUE 4.00e-08; EST_HUMAN HIT: BE222239.1, EVALUE 3.00e-09; SWISSPROT HIT: P37246, EVALUE 2.50e+00
ggggaaatgtggacacacagacgctggagatgtgcatgcacagaggaaagaccctgccgaggagagaggcctcaggaggaaccagccctgttgtcaccttgatcttggactttgtatctttagaaccatgaggaagtatatgttgtttaagcggctgggtctgtggcctttgttatggtcgcctgagcagattagcgcaccagcgaggaggaagaggcctccggggaagagcatgagctctagggtcagactccctctgccatttatcaac

SEQ ID NO: 20063 - DNA, 146 bp, Homo sapiens
  MAP TO AC012678.1; EXPRESSED IN BONE MARROW, SIGNAL = 7.3; EXPRESSED IN LUNG, SIGNAL = 9.3; EXPRESSED IN PLACENTA, SIGNAL = 8.9; EXPRESSED IN HELA, SIGNAL = 8.2; EXPRESSED IN HBL100, SIGNAL = 7.2; EXPRESSED IN HEART, SIGNAL = 6.6; EXPRESSED IN FETAL LIVER, SIGNAL = 9.3; EXPRESSED IN ADULT LIVER, SIGNAL =  11; EXPRESSED IN BT474, SIGNAL = 6.8; EXPRESSED IN BRAIN, SIGNAL = 6.5; EST_HUMAN HIT: AA766595.1, EVALUE 7.70e+00; SWISSPROT HIT: P47031, EVALUE 1.80e+00
ctatgacttaaattctcaaatttctctaatggcttgtctgtgtaaatgatcttttggttactactggagttataagtaggtatgaagtgactcaaggggtgatttgggtgagccaaacagctggacaccttctccctgctggccat

SEQ ID NO: 20064 - DNA, 156 bp, Homo sapiens
  MAP TO AC012275.1; EXPRESSED IN FETAL LIVER, SIGNAL = 1.3; EXPRESSED IN LUNG, SIGNAL = 1.3; EXPRESSED IN HELA, SIGNAL = 0.97; EXPRESSED IN HBL100, SIGNAL = 1.6; EXPRESSED IN HEART, SIGNAL = 1.2; EXPRESSED IN BRAIN, SIGNAL = 1.4; EXPRESSED IN BONE MARROW, SIGNAL = 0.99; EXPRESSED IN PLACENTA, SIGNAL = 0.93; EXPRESSED IN ADULT LIVER, SIGNAL = 1.3; EXPRESSED IN BT474, SIGNAL =   1; NT HIT: AB014607.1, EVALUE 8.00e-42; SWISSPROT HIT: Q01546, EVALUE 4.40e-01; EST_HUMAN HIT: BE670617.1, EVALUE 4.00e-45
tccccaggtgggtggctgtgtttgacaggtgttgctcatgacagttggggtcctcctcagcatcagtctcgacatgactgcaactggtgggtcctcaggatcctcccggaatctcttctttggcatctggctcatgataaggtttcaggtgtcttg

SEQ ID NO: 20065 - DNA, 422 bp, Homo sapiens
  MAP TO AH007699.1; EXPRESSED IN BT474, SIGNAL = 2.8; EXPRESSED IN BONE MARROW, SIGNAL = 2.4; EXPRESSED IN HBL100, SIGNAL = 2.1; EXPRESSED IN HELA, SIGNAL =   3; EXPRESSED IN ADULT LIVER, SIGNAL = 2.6; EXPRESSED IN FETAL LIVER, SIGNAL = 2.3; EXPRESSED IN BRAIN, SIGNAL = 2.3; EXPRESSED IN LUNG, SIGNAL = 2.6; EXPRESSED IN PLACENTA, SIGNAL = 2.4; EXPRESSED IN HEART, SIGNAL =   3; EST_HUMAN HIT: BE514070.1, EVALUE 1.00e-120; NT HIT: AF128893.1, EVALUE 0.00e+00; SWISSPROT HIT: P04196, EVALUE 3.00e-03
tctggggtgtggtcgccaggccctcggtgagctggaggtatggagtccggatgatgcaggtccggggtgaggttgccaggccctgctgtgagctggatgtgctgtatccggatggtgcagtccggggtgaggtcgccaggccctgctgtgagctggatgtgctgtatccggatggtgcaggtctggggtgaggtcaccaggccctgcggtgagctggttgtgcggtgtccggttgctgcaggtccggggtgagttcgccaggccctcggtgagctggatgtgcggtgtccccgtgtccggatggtgcaggtccagggtgaggtcgctaggcccttggtgggctggatgtgccgtgtccggatggtgcaggtctggggtgaggtcgccaggcctttggtgagctggatgtgcggtgtctgcat

SEQ ID NO: 20066 - DNA, 528 bp, Homo sapiens
  MAP TO AP000036.1; EXPRESSED IN HBL100, SIGNAL = 0.78; EXPRESSED IN LUNG, SIGNAL = 0.98; EXPRESSED IN HELA, SIGNAL = 0.98; EXPRESSED IN BT474, SIGNAL = 1.1; EXPRESSED IN BONE MARROW, SIGNAL = 0.85; EXPRESSED IN PLACENTA, SIGNAL =   1; EXPRESSED IN HEART, SIGNAL =   1; EXPRESSED IN BRAIN, SIGNAL = 1.2; EXPRESSED IN ADULT LIVER, SIGNAL = 1.1; EXPRESSED IN FETAL LIVER, SIGNAL = 0.91; NT HIT: gi11526180, EVALUE 0.00e+00; EST_HUMAN HIT: BF529471.1, EVALUE 0.00e+00; SWISSPROT HIT: P57058, EVALUE 6.00e-83
acatctgtccgatgcccatcatagggaaccggcctcggcttttcacacaattggggctccccagaggctgcatggggccattgctgggaaccggaggtgggcaacacaggccctcctcttttggggggctgttcttatcttcgtgagcaaaagagaccagagttggatgcaaaggagtatggagaggcgacatgcttccggatggcagacccggggacagcgtcctctcgctggaatttctgcgagccaagctgaccggggagttcagaatcctgtagtgatgagagggagacagcacttctacgtggtcgtcgcgatccacagactcgaaggagcgcaccatgtccagcatcagggggtcttccttgtgggggatgccagtgcttccgggccctggctgatggggctccggtttcttcacaatcctcggggtcctgggcggtggcacggggatgaactccatggaagaagaagccacacaattggaatctgaggttttgcggaaaatattgcggcagccaaaggaat

SEQ ID NO: 20067 - DNA, 184 bp, Homo sapiens
  MAP TO AC006984.2; EXPRESSED IN BONE MARROW, SIGNAL = 0.63; EXPRESSED IN HBL100, SIGNAL = 0.89; EXPRESSED IN LUNG, SIGNAL = 0.86; EXPRESSED IN BT474, SIGNAL = 0.8; EXPRESSED IN FETAL LIVER, SIGNAL = 0.68; EXPRESSED IN PLACENTA, SIGNAL = 0.79; EXPRESSED IN HEART, SIGNAL = 0.87; SWISSPROT HIT: P41990, EVALUE 2.20e+00
agaaaagattcatgtggttcagctgtccaagggtattgagcatgagaaaccagcgcaaagtgaaggctcccttaggatggcctctcttattcccactgctgtgccattccacaatgcttgtcttctcaccctcagcagtatgacaggtgctacactcagagcatctgcaaagacacttagtaga

SEQ ID NO: 20068 - DNA, 332 bp, Homo sapiens
  MAP TO AC007256.1; EXPRESSED IN HELA, SIGNAL = 1.6; EXPRESSED IN HEART, SIGNAL =   1; EXPRESSED IN ADULT LIVER, SIGNAL = 1.8; EXPRESSED IN BT474, SIGNAL = 2.1; EXPRESSED IN FETAL LIVER, SIGNAL = 1.2; EXPRESSED IN BRAIN, SIGNAL = 1.3; EXPRESSED IN BONE MARROW, SIGNAL = 1.1; EXPRESSED IN HBL100, SIGNAL = 1.2; EXPRESSED IN PLACENTA, SIGNAL = 1.3; EXPRESSED IN LUNG, SIGNAL = 1.6; NT HIT: X98176.1, EVALUE 0.00e+00; SWISSPROT HIT: Q14790, EVALUE 2.00e-51; EST_HUMAN HIT: AA312258.1, EVALUE 0.00e+00
ctgtaggcagaaatttgagccctgcctggtgtctgaagttccctttccatctcctcctttctagtgtttaggtaggtaatcagcaaatccagtctattaattcggaagagcagctccttcaggaaggacagattgctttcctccaacattctcttttcctggagtctctggaataacatcaaggcatccttgatgggttcttgcttcctttgcggaatgtagtccaggctcaggaacttgagggaggccagatcttcactgtccagttgttccccaatatcataaagatttctgctgaagtccatctttttaaaaggcaggagaatataatc

SEQ ID NO: 20069 - DNA, 144 bp, Homo sapiens
  MAP TO AF181450.1; EXPRESSED IN FETAL LIVER, SIGNAL =   2; EXPRESSED IN HEART, SIGNAL = 1.1; EXPRESSED IN BRAIN, SIGNAL = 0.93; EXPRESSED IN LUNG, SIGNAL = 2.7; EXPRESSED IN ADULT LIVER, SIGNAL = 1.1; EST_HUMAN HIT: AL134801.1, EVALUE 4.00e-25; SWISSPROT HIT: Q06455, EVALUE 4.00e-21; NT HIT: D14289.1, EVALUE 8.00e-76
gagaagcagctctgaggagtcaacaggtgaggtggtgctggcatccagaagcagctgttcatgctgggcgaggtactgggcagggttctgtttggccagtcttgcgcagtggaggagctcacgctgcagcaggggcaagttggc

SEQ ID NO: 20070 - DNA, 180 bp, Homo sapiens
  MAP TO AC005769.9; EXPRESSED IN BONE MARROW, SIGNAL = 1.1; EXPRESSED IN HBL100, SIGNAL = 0.76; EXPRESSED IN FETAL LIVER, SIGNAL = 0.83; EXPRESSED IN LUNG, SIGNAL =   1; EXPRESSED IN ADULT LIVER, SIGNAL = 0.73; EXPRESSED IN PLACENTA, SIGNAL = 1.1; EXPRESSED IN HEART, SIGNAL = 0.92; EXPRESSED IN BRAIN, SIGNAL = 0.84; EXPRESSED IN HELA, SIGNAL = 0.75; EXPRESSED IN BT474, SIGNAL = 1.4; NT HIT: AF279135.1, EVALUE 9.00e-02; SWISSPROT HIT: P34782, EVALUE 2.90e+00
ttatcacctgctgtcaacaaatggattacccaagttaaggtcattattgttgctgtcattctcttacatattaaaactgttatttatgaacataggaatgaaatggatgatcttaaatttatctggggtttctatgagacctttttgaacttcattttgcatgcttgtaagattacgaat

SEQ ID NO: 20071 - DNA, 108 bp, Homo sapiens
  MAP TO AC007073.2; EXPRESSED IN HELA, SIGNAL = 1.4; EXPRESSED IN ADULT LIVER, SIGNAL = 1.7; EXPRESSED IN BT474, SIGNAL = 1.4; EXPRESSED IN BRAIN, SIGNAL = 1.4; EXPRESSED IN BONE MARROW, SIGNAL = 1.3; EXPRESSED IN HEART, SIGNAL = 1.2; EXPRESSED IN HBL100, SIGNAL = 1.2; EXPRESSED IN PLACENTA, SIGNAL = 1.4; EXPRESSED IN FETAL LIVER, SIGNAL = 1.4; EXPRESSED IN LUNG, SIGNAL = 1.5; SWISSPROT HIT: P27987, EVALUE 4.00e+00; EST_HUMAN HIT: BF332528.1, EVALUE 5.40e+00; NT HIT: gi7305610, EVALUE 5.00e-02
cctgaagtgacccaaggtgcctggagcctcaccaaggagatgaagttggaggaaggcctggaagagccagaagagaaaatggcaccctaaagaaaagggggaacagaa

SEQ ID NO: 20072 - DNA, 474 bp, Homo sapiens
  MAP TO AJ003147.1; EXPRESSED IN HBL100, SIGNAL =  11; EXPRESSED IN PLACENTA, SIGNAL =  12; EXPRESSED IN HELA, SIGNAL =  13; EXPRESSED IN HEART, SIGNAL =  11; EXPRESSED IN ADULT LIVER, SIGNAL =  14; EXPRESSED IN BT474, SIGNAL =  11; EXPRESSED IN FETAL LIVER, SIGNAL =  13; EXPRESSED IN BONE MARROW, SIGNAL =  11; EXPRESSED IN LUNG, SIGNAL =  13; EXPRESSED IN BRAIN, SIGNAL = 9.8; NT HIT: AF111163.1, EVALUE 0.00e+00; SWISSPROT HIT: O15553, EVALUE 4.00e-90
agataggttgaaggggcccagagaaagagcagctggcgaatgtatagatgtgggatctggctgtcacattgtaaaaggagatgcttccaactctgtagtccacgaagatgcccacacgcttgggaggctcctttattagcaggcgggtcgggggaacgctggacgcctggtactcattttccttcatcattatcaccacccagtagccattctctggcgacagagtcatgttccctttcctgcttatggatgtcttgcaggctcccaggatccatgctgtcttgtctccaacctccacctcccagtaacggcggccagagaggaaactcggagagcccagaacaatgatacagctgtcaaatctttgcgggccatcaggcagcctctcccacttgtttccaagtctaacactcttcagatcatcagagaagatgaggttggggtaagcggtttctgcatccagaatcacattaa

SEQ ID NO: 20073 - DNA, 170 bp, Homo sapiens
  MAP TO AF064863.1; EXPRESSED IN BRAIN, SIGNAL = 1.6; EXPRESSED IN BONE MARROW, SIGNAL = 1.8; EXPRESSED IN LUNG, SIGNAL = 1.2; EXPRESSED IN HBL100, SIGNAL = 1.6; EXPRESSED IN PLACENTA, SIGNAL = 1.3; EXPRESSED IN HELA, SIGNAL = 1.4; EXPRESSED IN HEART, SIGNAL = 1.8; EXPRESSED IN ADULT LIVER, SIGNAL = 1.1; EXPRESSED IN BT474, SIGNAL = 1.5; EXPRESSED IN FETAL LIVER, SIGNAL = 1.4; NT HIT: AL163283.2, EVALUE 3.00e-91; SWISSPROT HIT: P53246, EVALUE 1.30e+00
gtgaagaacttggaagggacaaacgtaccattgttttcatttttgttcctcacaggaaaattcatactctcaaaatcattgttttttcccctgcagtggtctgttttgtagagttccctaaccactttgtttccagtggtaactgtgtactttcctctgacacaagattt

SEQ ID NO: 20074 - DNA, 341 bp, Homo sapiens
  MAP TO AC004985.2; EXPRESSED IN HEART, SIGNAL = 0.96; EXPRESSED IN BONE MARROW, SIGNAL = 1.1; EXPRESSED IN ADULT LIVER, SIGNAL = 1.2; EXPRESSED IN PLACENTA, SIGNAL =   1; EXPRESSED IN BT474, SIGNAL = 1.8; EXPRESSED IN HBL100, SIGNAL = 1.3; EXPRESSED IN FETAL LIVER, SIGNAL = 0.89; EXPRESSED IN LUNG, SIGNAL = 0.94; EXPRESSED IN HELA, SIGNAL = 0.93; EXPRESSED IN BRAIN, SIGNAL = 1.3; EST_HUMAN HIT: BE883388.1, EVALUE 0.00e+00; SWISSPROT HIT: P03369, EVALUE 1.30e+00; NT HIT: AB040940.1, EVALUE 0.00e+00
tggagagaagcaggcttcaagaaatgctgtcacttttgggcctagagacgtaccaggtccagaaactcagcctccaggactctctgcagatcagttttgacagtatgaagaactgggcccctcaggttcccaaagacttgccctggaatttcctcaggaagttgcaggccctcaatgctgatgccaggaataccactatggtgctggacgtgctcccagacgccaggcctgtggagaaggagagccagatggaagaggagatcatctactgggacccagctgatgaccttgctgccgacatttattccttttctgagctgcccacccctgatacgccagtg

SEQ ID NO: 20075 - DNA, 223 bp, Homo sapiens
  MAP TO AC007222.1; EXPRESSED IN LUNG, SIGNAL = 1.7; EXPRESSED IN HELA, SIGNAL = 1.8; EXPRESSED IN ADULT LIVER, SIGNAL = 2.1; EXPRESSED IN BT474, SIGNAL = 1.4; EXPRESSED IN BRAIN, SIGNAL = 1.8; EXPRESSED IN BONE MARROW, SIGNAL = 1.7; EXPRESSED IN HEART, SIGNAL = 1.4; EXPRESSED IN HBL100, SIGNAL = 1.6; EXPRESSED IN PLACENTA, SIGNAL = 1.6; EXPRESSED IN FETAL LIVER, SIGNAL = 1.9; NT HIT: AL163279.2, EVALUE 5.30e-01; EST_HUMAN HIT: BE164773.1, EVALUE 5.40e-01
aagtcaggtggcactgacctgggtggtatgcagcttcatggaagtgagtgacaggccagtctcagcatatcttaggccaaagctcccagagctcagaatttttcatctgaactctaccatcaccaccactatcaccactgtcaccaatccagtgctattatcaccaccactatcaccatcgccattaggaccatcaccatcacgaagcaactggtctcatgta

SEQ ID NO: 20076 - DNA, 82 bp, Homo sapiens
  MAP TO AL049736.10; EXPRESSED IN BONE MARROW, SIGNAL = 0.76; EXPRESSED IN FETAL LIVER, SIGNAL = 0.59; EXPRESSED IN ADULT LIVER, SIGNAL = 0.93; EXPRESSED IN HEART, SIGNAL = 0.87; EXPRESSED IN PLACENTA, SIGNAL = 0.65; EXPRESSED IN BT474, SIGNAL = 0.63; EXPRESSED IN LUNG, SIGNAL =   1; EXPRESSED IN HELA, SIGNAL = 0.68; EXPRESSED IN BRAIN, SIGNAL = 0.88; SWISSPROT HIT: Q60432, EVALUE 5.60e+00; NT HIT: AF010317.1, EVALUE 4.00e-05; EST_HUMAN HIT: BE080748.1, EVALUE 8.00e-10
atgtctgaagacctttggctgaggtgggggtggggtactggtggcatccagtgggtggaggccagggatgttgctaaacatc

SEQ ID NO: 20077 - DNA, 85 bp, Homo sapiens
  MAP TO AC008038.1; EXPRESSED IN HBL100, SIGNAL = 1.8; EXPRESSED IN FETAL LIVER, SIGNAL = 1.4; EXPRESSED IN BRAIN, SIGNAL = 0.95; EXPRESSED IN PLACENTA, SIGNAL = 0.69; EXPRESSED IN BT474, SIGNAL =   1; EXPRESSED IN BONE MARROW, SIGNAL =   1; EXPRESSED IN LUNG, SIGNAL = 0.97; EXPRESSED IN HELA, SIGNAL = 1.6; EXPRESSED IN ADULT LIVER, SIGNAL = 1.1; EXPRESSED IN HEART, SIGNAL = 1.4; NT HIT: U70560.1, EVALUE 5.90e-01; EST_HUMAN HIT: AA206131.1, EVALUE 6.00e-26
ttcaagctttatcccaagaccactatttctctcttacttctaagttatttaagaataagtgtcttactataatctgtgagcacag

SEQ ID NO: 20078 - DNA, 333 bp, Homo sapiens
  MAP TO AL022397.1; EXPRESSED IN PLACENTA, SIGNAL = 0.79; EXPRESSED IN BONE MARROW, SIGNAL = 0.85; EXPRESSED IN LUNG, SIGNAL = 0.78; EXPRESSED IN ADULT LIVER, SIGNAL = 0.89; EXPRESSED IN BRAIN, SIGNAL = 0.84; EXPRESSED IN BT474, SIGNAL = 0.62; EXPRESSED IN HELA, SIGNAL = 0.79; EXPRESSED IN HEART, SIGNAL = 0.99; SWISSPROT HIT: Q27450, EVALUE 4.20e-01; EST_HUMAN HIT: BE779039.1, EVALUE 0.00e+00
ctttttctggtattatcttagaatatttttcatctttactctttgctgttcctttcttggcagaaatggcctcagttttctttggttttatgtcttcgttcactttacagtatttcgttgaatttatttgttcttcaattttcccagataacttatctttagaattagttgatggtgctggatgtatgtcttcttttataatagatttctgtgtcatatgcctattgcttgtcaaaatatcttttaaagaacattcatttcctgaacactcattccctttggatgctttacttttaacacatttttcagctttctttaaatgatctgaatgcc

SEQ ID NO: 20079 - DNA, 172 bp, Homo sapiens
  MAP TO AC007750.2; EXPRESSED IN HEART, SIGNAL = 0.94; EXPRESSED IN PLACENTA, SIGNAL =   1; EXPRESSED IN BT474, SIGNAL = 0.66; EXPRESSED IN BONE MARROW, SIGNAL = 0.88; EXPRESSED IN FETAL LIVER, SIGNAL = 0.63; EXPRESSED IN LUNG, SIGNAL = 0.97; EXPRESSED IN HELA, SIGNAL = 0.96; EXPRESSED IN ADULT LIVER, SIGNAL = 0.92; EXPRESSED IN BRAIN, SIGNAL = 0.93; EXPRESSED IN HBL100, SIGNAL = 0.85; NT HIT: gi7305592, EVALUE 4.00e-04; EST_HUMAN HIT: AW771104.1, EVALUE 3.00e-05
tcatttaccacattttattattggatatgagacatggaaaagggggtatcccaatagcctaattaaagctgcaaagtataattatccttcacacatgacaaacaagattttcattcattcattcactcattcagtgactgcaattgcaagccactattttaggtactgtagg

SEQ ID NO: 20080 - DNA, 229 bp, Homo sapiens
  MAP TO AC007740.1; EXPRESSED IN HEART, SIGNAL = 0.94; EXPRESSED IN PLACENTA, SIGNAL = 0.64; EXPRESSED IN LUNG, SIGNAL = 0.76; EXPRESSED IN BRAIN, SIGNAL = 0.71; EXPRESSED IN BT474, SIGNAL = 0.63; EXPRESSED IN BONE MARROW, SIGNAL = 0.79; EXPRESSED IN FETAL LIVER, SIGNAL = 0.73; EXPRESSED IN HELA, SIGNAL = 0.71; EXPRESSED IN ADULT LIVER, SIGNAL = 0.75; SWISSPROT HIT: Q12809, EVALUE 9.00e-34; NT HIT: AF032897.1, EVALUE 1.00e-108; EST_HUMAN HIT: BF315050.1, EVALUE 3.00e-03
ttacaagcagacatttgtctacatctcaaccagacattgctgcaaaactgcaaagcctttcggggggcaagtaaaggttgccttagagctttggcaatgaagttcaaaaccacccatgcacctccaggagacaccctcgttcactgtggggatgtcctcactgcactttatttcttatccagaggctccattgaaattctcaaagatgacattgtggtggctattctgg

SEQ ID NO: 20081 - DNA, 143 bp, Homo sapiens
  MAP TO AL049797.8; EXPRESSED IN HBL100, SIGNAL = 0.75; EXPRESSED IN LUNG, SIGNAL = 0.98; EXPRESSED IN HELA, SIGNAL = 1.1; EXPRESSED IN ADULT LIVER, SIGNAL = 0.84; EXPRESSED IN BONE MARROW, SIGNAL = 0.95; EXPRESSED IN BRAIN, SIGNAL = 0.75; EXPRESSED IN PLACENTA, SIGNAL = 0.93; EXPRESSED IN BT474, SIGNAL = 0.65; EXPRESSED IN HEART, SIGNAL =   1; EXPRESSED IN FETAL LIVER, SIGNAL = 0.83; NT HIT: M72393.1, EVALUE 3.00e-75; EST_HUMAN HIT: AU120946.1, EVALUE 5.00e-75; SWISSPROT HIT: P47712, EVALUE 5.00e-22
ttagccacaatccccttttacttctcacaccacagaaagttaaaagatatgttgagtctttatggaagaagaaaagctctggacaacctgtcacctttactgatatctttgggatgttaataggagaaacactaattcataat

SEQ ID NO: 20082 - DNA, 215 bp, Homo sapiens
  MAP TO AC008277.1; EXPRESSED IN BT474, SIGNAL = 0.87; EXPRESSED IN FETAL LIVER, SIGNAL = 0.72; EXPRESSED IN HELA, SIGNAL =   1; EXPRESSED IN PLACENTA, SIGNAL = 0.86; EXPRESSED IN BONE MARROW, SIGNAL = 1.1; EXPRESSED IN LUNG, SIGNAL = 0.85; EXPRESSED IN ADULT LIVER, SIGNAL = 0.8; EXPRESSED IN BRAIN, SIGNAL = 0.88; EXPRESSED IN HEART, SIGNAL = 0.93; EST_HUMAN HIT: BF670714.1, EVALUE 1.00e-105; NT HIT: gi7304922, EVALUE 1.00e-105; SWISSPROT HIT: P45904, EVALUE 1.50e+00
gtgtaaatgggtcaataaatggaagtaatacatcatctgtaattggtatcaacacatctgtactatccactactgcttcaagttccatgggacaaactaaaagtacaagctcaggtggaggaaatcgaaaatgtaatcaggaacaaagcaaaaaccagcctttggatgctagagttgacaaaatcaaagataaggtaagttgtacttggaaggac

SEQ ID NO: 20083 - DNA, 243 bp, Homo sapiens
  MAP TO AC007247.2; EXPRESSED IN HBL100, SIGNAL = 4.6; EXPRESSED IN PLACENTA, SIGNAL = 5.8; EXPRESSED IN HELA, SIGNAL = 4.9; EXPRESSED IN HEART, SIGNAL = 4.2; EXPRESSED IN ADULT LIVER, SIGNAL =   6; EXPRESSED IN BT474, SIGNAL = 4.2; EXPRESSED IN FETAL LIVER, SIGNAL = 6.9; EXPRESSED IN BONE MARROW, SIGNAL = 5.5; EXPRESSED IN BRAIN, SIGNAL = 5.1; EXPRESSED IN LUNG, SIGNAL = 4.9; NT HIT: U48698.1, EVALUE 5.80e-01; SWISSPROT HIT: P06239, EVALUE 1.20e+00; EST_HUMAN HIT: AA935049.1, EVALUE 1.50e-01
catctttgctaaggggaacagtactttcagagtcttcagacctacttacagccgcatccctccttacatgaactggatcccacatgccgccgatacacccagccctgtgaccatcagaggccctgtctcccctttcttgagggagccaccccctacctggctctcaaactcattctctacctggaaaacataaagctcttctatgaccgtccacaccatcgtccagcaagcctactggacaca

SEQ ID NO: 20084 - DNA, 175 bp, Homo sapiens
  MAP TO AL035687.13; EXPRESSED IN PLACENTA, SIGNAL = 0.75; EXPRESSED IN BONE MARROW, SIGNAL = 0.84; EXPRESSED IN FETAL LIVER, SIGNAL = 0.59; EXPRESSED IN LUNG, SIGNAL = 0.71; EXPRESSED IN HELA, SIGNAL = 0.68; EXPRESSED IN ADULT LIVER, SIGNAL = 0.73; EXPRESSED IN BRAIN, SIGNAL = 0.81; EXPRESSED IN HEART, SIGNAL = 0.91; NT HIT: AF181897.1, EVALUE 8.00e-27; EST_HUMAN HIT: BF035327.1, EVALUE 1.00e-26; SWISSPROT HIT: P09107, EVALUE 1.30e+00
gctgagcaaagtgaggaagctacagaagaaaagtctgaaaccaacagaagttggttcatgaggtttaaggaaagaagctgtctttataacataaaaacgaaagatgaagcagcaagtgcagatataaaatctgtagcaagttatccagaagctctacctaagatatttaatgaag

SEQ ID NO: 20085 - DNA, 77 bp, Homo sapiens
  MAP TO AC007160.3; EXPRESSED IN FETAL LIVER, SIGNAL = 0.83; EXPRESSED IN ADULT LIVER, SIGNAL = 0.67; EXPRESSED IN PLACENTA, SIGNAL = 1.1; EXPRESSED IN BONE MARROW, SIGNAL = 0.65; EXPRESSED IN HBL100, SIGNAL = 0.98; EXPRESSED IN LUNG, SIGNAL = 0.73; EXPRESSED IN HELA, SIGNAL = 0.79; EXPRESSED IN BRAIN, SIGNAL = 0.82; EXPRESSED IN BT474, SIGNAL = 1.9; EXPRESSED IN HEART, SIGNAL = 3.2; EST_HUMAN HIT: BE250273.1, EVALUE 6.00e-36; SWISSPROT HIT: Q9XC07, EVALUE 5.40e+00; NT HIT: X94355.1, EVALUE 2.40e+00
cagtaattggtgacgttgagaaaacccagctggctttttcgtagcatggaagatgcattaaatcccatcctggcaat

SEQ ID NO: 20086 - DNA, 151 bp, Homo sapiens
  MAP TO AC007716.1; EXPRESSED IN PLACENTA, SIGNAL = 0.61; EXPRESSED IN BONE MARROW, SIGNAL = 0.78; EXPRESSED IN HBL100, SIGNAL = 0.73; EXPRESSED IN FETAL LIVER, SIGNAL = 0.57; EXPRESSED IN LUNG, SIGNAL = 0.7; EXPRESSED IN ADULT LIVER, SIGNAL = 0.67; EXPRESSED IN BT474, SIGNAL = 0.65; EXPRESSED IN HELA, SIGNAL = 0.66; EXPRESSED IN BRAIN, SIGNAL = 1.1; EXPRESSED IN HEART, SIGNAL = 0.78; NT HIT: X02987.1, EVALUE 5.40e+00
ttctttgaataagcaccaaattcagggaatgcagctacaccacaagtcacagattggtcctgcaggcaatggcaaagtaccagattcccagccattaggctgccagactcagagccccaggctgtgaggctatagagcctgggcccctgtg

SEQ ID NO: 20087 - DNA, 156 bp, Homo sapiens
  MAP TO AC007033.3; EXPRESSED IN ADULT LIVER, SIGNAL = 1.2; EXPRESSED IN FETAL LIVER, SIGNAL = 0.77; EXPRESSED IN HEART, SIGNAL = 0.99; NT HIT: M81779.1, EVALUE 1.20e+00; SWISSPROT HIT: P37476, EVALUE 2.90e+00
gtgagggcttgctacatgagaagtaagcaggaacaatacgagaaccaagacaagctacaagcaggacatgaacacatcaaaaggcttctgaaaagacacgtctacctagcctgtgaccaggtcaactccctcattaagtttagcccctttaaaaaa

SEQ ID NO: 20088 - DNA, 106 bp, Homo sapiens
  MAP TO AC007857.1; EXPRESSED IN PLACENTA, SIGNAL = 0.89; EXPRESSED IN BT474, SIGNAL = 0.78; EXPRESSED IN FETAL LIVER, SIGNAL = 0.62; EXPRESSED IN HEART, SIGNAL = 0.8; EXPRESSED IN ADULT LIVER, SIGNAL = 0.79; EXPRESSED IN BRAIN, SIGNAL = 0.84; EXPRESSED IN BONE MARROW, SIGNAL = 0.76; EXPRESSED IN LUNG, SIGNAL = 0.81; NT HIT: gi8393408, EVALUE 7.70e-01; EST_HUMAN HIT: BE075761.1, EVALUE 9.20e-01
cttttgctcttgattcattgccacctttcttctgttctgctccatatgcagggagctcgtccctgcaaactccattcccaggcattcttgttaactggcttccaga

SEQ ID NO: 20089 - DNA, 247 bp, Homo sapiens
  MAP TO AC007777.1; EXPRESSED IN HBL100, SIGNAL = 0.68; EXPRESSED IN BRAIN, SIGNAL = 1.1; EXPRESSED IN LUNG, SIGNAL = 1.2; EXPRESSED IN HELA, SIGNAL = 0.88; EXPRESSED IN ADULT LIVER, SIGNAL =   1; EXPRESSED IN HEART, SIGNAL = 0.89; EXPRESSED IN PLACENTA, SIGNAL =   1; EXPRESSED IN BT474, SIGNAL = 0.8; EXPRESSED IN BONE MARROW, SIGNAL = 0.93; EXPRESSED IN FETAL LIVER, SIGNAL = 0.89; EST_HUMAN HIT: BE072343.1, EVALUE 1.00e-02; SWISSPROT HIT: P38055, EVALUE 2.80e+00; NT HIT: AL163303.2, EVALUE 3.80e-02
caataagccttaggcccctggacagcatgtgtagtgtgggcaatggcaatagcagtggtgggataatctgttctcaaacagtccacactgatgttggtggtggctgtgatgggctgggtggggagcttacaggcctgcaggtggtacatgtaggtgggtgccagctgtattggttgcagcaggtcaggtggatccaacctcaagcccctgtaggagtgctcaagtgcaataatggtaggtgggaatg

SEQ ID NO: 20090 - DNA, 90 bp, Homo sapiens
  MAP TO AC009419.1; EXPRESSED IN BRAIN, SIGNAL = 0.95; EXPRESSED IN BT474, SIGNAL = 0.96; EXPRESSED IN ADULT LIVER, SIGNAL = 1.2; EXPRESSED IN HEART, SIGNAL = 0.88; EST_HUMAN HIT: C14203.1, EVALUE 7.50e-01
  unsure 52
aggcaactggtgttattaggccctgggaggagtgtactatttcaacagaccnaccatgctctccaccaaactttgactttggtactgcag

SEQ ID NO: 20091 - DNA, 118 bp, Homo sapiens
  MAP TO AC007280.2; EXPRESSED IN PLACENTA, SIGNAL = 0.6; EXPRESSED IN FETAL LIVER, SIGNAL = 0.58; EXPRESSED IN LUNG, SIGNAL = 0.7; EXPRESSED IN HELA, SIGNAL = 0.61; EXPRESSED IN ADULT LIVER, SIGNAL = 0.92; EXPRESSED IN HEART, SIGNAL = 0.84; EST_HUMAN HIT: AV696624.1, EVALUE 4.00e-04; NT HIT: AJ251973.1, EVALUE 6.60e-02
atgacaagaactgtagtaaagattactccactgaagctggtatgggtcagagggagagggaaaagaaggagggagggagacgacatgaggggaagatgtgagcaagcagaaggagaag

SEQ ID NO: 20092 - DNA, 102 bp, Homo sapiens
  MAP TO AC007736.3; EXPRESSED IN HELA, SIGNAL = 0.77; EXPRESSED IN ADULT LIVER, SIGNAL = 0.66; EXPRESSED IN HEART, SIGNAL = 0.83; EXPRESSED IN PLACENTA, SIGNAL = 0.82; EXPRESSED IN HBL100, SIGNAL = 0.82; EXPRESSED IN LUNG, SIGNAL = 0.99; EXPRESSED IN FETAL LIVER, SIGNAL = 0.76; EXPRESSED IN BONE MARROW, SIGNAL = 0.72; EXPRESSED IN BT474, SIGNAL = 0.7; NT HIT: X89369.1, EVALUE 4.70e-02; EST_HUMAN HIT: AW274720.1, EVALUE 7.00e-51; SWISSPROT HIT: Q62786, EVALUE 7.00e+00
cttgtctttatcttcaacaacatctgccaagacatcatctggatccaggattcctccatctgtatattctaagtgatgaatcttcacccagtaaccaggacc

SEQ ID NO: 20093 - DNA, 82 bp, Homo sapiens
  MAP TO AC007720.1; EXPRESSED IN LUNG, SIGNAL = 1.2; EXPRESSED IN HEART, SIGNAL = 1.2; EXPRESSED IN PLACENTA, SIGNAL = 1.1; EXPRESSED IN BONE MARROW, SIGNAL = 1.5; EXPRESSED IN HBL100, SIGNAL = 1.1; EXPRESSED IN FETAL LIVER, SIGNAL =   1; EXPRESSED IN ADULT LIVER, SIGNAL = 1.1; EXPRESSED IN BRAIN, SIGNAL = 1.3; EXPRESSED IN BT474, SIGNAL = 1.3; EXPRESSED IN HELA, SIGNAL = 1.2; NT HIT: AB018283.2, EVALUE 5.60e-01; SWISSPROT HIT: P41226, EVALUE 7.10e+00
cacagttgcacccagtgacaaaggggccaagaaatgcagttctcccatgtgcactcaggtggaaaacatcatgaatggctga

SEQ ID NO: 20094 - DNA, 225 bp, Homo sapiens
  MAP TO AP000095.1; EXPRESSED IN HELA, SIGNAL = 0.6; EXPRESSED IN BRAIN, SIGNAL = 0.85; EXPRESSED IN HEART, SIGNAL = 0.85; EXPRESSED IN ADULT LIVER, SIGNAL = 0.65; EST_HUMAN HIT: R13319.1, EVALUE 5.00e-66; NT HIT: gi11526170, EVALUE 1.00e-124; SWISSPROT HIT: P22756, EVALUE 1.00e-38
agggctgacctggcagtggctcctcttaccatcacctacgtgcgggagaaagtcattgacttctccaaacccttcatgaccctaggcatcagcattctctaccggaagcccaatggtaccaatccaggcgttttctccttcctcaaccccctgtctccagatatttggatgtatgtgctcttagcctgcttgggagtcagctgtgtactctttgtgattgcaagg

SEQ ID NO: 20095 - DNA, 218 bp, Homo sapiens
  MAP TO AL033380.10; EXPRESSED IN ADULT LIVER, SIGNAL = 1.8; EXPRESSED IN BT474, SIGNAL = 1.1; EXPRESSED IN FETAL LIVER, SIGNAL = 1.6; EXPRESSED IN BRAIN, SIGNAL = 1.3; EXPRESSED IN BONE MARROW, SIGNAL = 1.3; EXPRESSED IN PLACENTA, SIGNAL = 1.2; EXPRESSED IN HBL100, SIGNAL = 1.1; EXPRESSED IN HELA, SIGNAL = 1.2; EXPRESSED IN HEART, SIGNAL = 1.3; SWISSPROT HIT: Q64733, EVALUE 1.60e+00; NT HIT: AF066063.1, EVALUE 2.80e-02; EST_HUMAN HIT: AW028059.1, EVALUE 5.30e-01
ctccccagcattgcccacaccatgaccacaatacccatctccaccatcagtgtgatcatatcctccaaccccaaaatccccccagcctcctccaccaccatcacaggagtctgcataaagcagcccctccacctgtgtaatggagtcagactgctctgtaccaaagctctgaccatttgagacaaagactcagaaacacaccatcaggacgcctgtca

SEQ ID NO: 20096 - DNA, 88 bp, Homo sapiens
  MAP TO AC009296.1; EXPRESSED IN HEART, SIGNAL = 0.87; EXPRESSED IN FETAL LIVER, SIGNAL = 0.65; EXPRESSED IN LUNG, SIGNAL = 0.71; EXPRESSED IN PLACENTA, SIGNAL = 0.73; EXPRESSED IN BONE MARROW, SIGNAL = 0.74; EXPRESSED IN ADULT LIVER, SIGNAL = 0.79; EXPRESSED IN BRAIN, SIGNAL = 0.82; EXPRESSED IN BT474, SIGNAL = 0.61; EXPRESSED IN HELA, SIGNAL = 0.77; EST_HUMAN HIT: BF361430.1, EVALUE 1.10e+00; NT HIT: Z23104.1, EVALUE 1.50e-01; SWISSPROT HIT: P37208, EVALUE 9.30e+00
gtggcaacttctggaactcccctggggagatgtagttcctccctttctgtgctccagggacacttgtacctccactaagttggtccat

SEQ ID NO: 20097 - DNA, 165 bp, Homo sapiens
  MAP TO AC007106.6; EXPRESSED IN BT474, SIGNAL = 0.94; EXPRESSED IN BONE MARROW, SIGNAL = 1.4; EXPRESSED IN FETAL LIVER, SIGNAL =   1; EXPRESSED IN HELA, SIGNAL = 0.93; EXPRESSED IN ADULT LIVER, SIGNAL = 0.85; EXPRESSED IN BRAIN, SIGNAL = 1.2; EXPRESSED IN HEART, SIGNAL = 1.1; EXPRESSED IN PLACENTA, SIGNAL = 1.1; EXPRESSED IN HBL100, SIGNAL = 1.1; EXPRESSED IN LUNG, SIGNAL = 1.1; SWISSPROT HIT: O60231, EVALUE 8.60e+00; NT HIT: X89211.1, EVALUE 2.00e-05; EST_HUMAN HIT: AA490128.1, EVALUE 2.50e-02
actggcttctctttctcaatccacacatttacgttgaacagttggttgaggaagaaaaactcaagcttggtttccagatggttctgcacaatatgtaggcaccatgcaaagatggacagtttgagtacgattgcaccaatccaggatgaccctgaaaggcaatgc

SEQ ID NO: 20098 - DNA, 103 bp, Homo sapiens
  MAP TO AP000045.1; EXPRESSED IN PLACENTA, SIGNAL = 1.3; EXPRESSED IN BT474, SIGNAL = 0.8; EXPRESSED IN LUNG, SIGNAL = 0.94; EXPRESSED IN HELA, SIGNAL = 1.2; EXPRESSED IN BRAIN, SIGNAL = 1.1; EXPRESSED IN HEART, SIGNAL = 1.1; EXPRESSED IN BONE MARROW, SIGNAL = 1.3; EXPRESSED IN HBL100, SIGNAL = 1.2; EXPRESSED IN FETAL LIVER, SIGNAL = 0.78; EXPRESSED IN ADULT LIVER, SIGNAL = 1.4; NT HIT: M31652.1, EVALUE 8.70e-01; SWISSPROT HIT: P41511, EVALUE 7.20e+00; EST_HUMAN HIT: AA359369.1, EVALUE 1.30e+00
gtcaatccccacggacaccaacgatgacacaaaatggcagcaaacagtggaagatggtagtcagagaaggcaacagagttctcaggaaatggagtccagaagt

SEQ ID NO: 20099 - DNA, 113 bp, Homo sapiens
  MAP TO AL049738.4; EXPRESSED IN PLACENTA, SIGNAL = 1.1; EXPRESSED IN BT474, SIGNAL = 0.91; EXPRESSED IN BONE MARROW, SIGNAL = 1.5; EXPRESSED IN LUNG, SIGNAL = 1.3; EXPRESSED IN HELA, SIGNAL = 1.3; EXPRESSED IN ADULT LIVER, SIGNAL = 1.2; EXPRESSED IN BRAIN, SIGNAL = 1.5; EXPRESSED IN HEART, SIGNAL = 1.5; EXPRESSED IN HBL100, SIGNAL = 1.1; EXPRESSED IN FETAL LIVER, SIGNAL = 1.4; EST_HUMAN HIT: AA877764.1, EVALUE 3.00e-23; NT HIT: AF181897.1, EVALUE 4.00e-21
aaaaagccatcttcatgacatacaagtgcaaagtgaagcagcaagtgctgatgtagaagttgcagcaagtcatccagaagatctagctaagctattgttgaagttgactaccc

SEQ ID NO: 20100 - DNA, 127 bp, Homo sapiens
  MAP TO AC007385.2; EXPRESSED IN BONE MARROW, SIGNAL = 0.8; EXPRESSED IN HBL100, SIGNAL = 0.79; EXPRESSED IN ADULT LIVER, SIGNAL = 0.77; EXPRESSED IN BRAIN, SIGNAL = 0.81; EXPRESSED IN BT474, SIGNAL = 1.2; EXPRESSED IN LUNG, SIGNAL = 1.3; EXPRESSED IN HELA, SIGNAL = 0.86; EXPRESSED IN PLACENTA, SIGNAL = 0.8; EXPRESSED IN FETAL LIVER, SIGNAL = 0.94; EXPRESSED IN HEART, SIGNAL = 0.89; NT HIT: gi6755691, EVALUE 1.50e-02; EST_HUMAN HIT: AA436201.1, EVALUE 1.00e-65; SWISSPROT HIT: P51865, EVALUE 4.00e+00
gaaagtgttctcctgttccatctgtagggctgcttactactggaacctaaaacaaaacctgttgtttgtaccatcactttttctggtgtttcctgtgcttttgtgattccaagtctgttcataagtt

SEQ ID NO: 20101 - DNA, 136 bp, Homo sapiens
  MAP TO AL031320.6; EXPRESSED IN ADULT LIVER, SIGNAL = 0.65; EXPRESSED IN LUNG, SIGNAL = 0.7; EXPRESSED IN HEART, SIGNAL = 0.81; EXPRESSED IN PLACENTA, SIGNAL = 0.73; SWISSPROT HIT: Q06890, EVALUE 3.90e+00
tgaagaagtgaactatccatgtggcgacccagttctgcacccccagaatggcatagagtcagcctctgctggaggcctctcaccacagctgctcattccttttcttgaagacacatctcccatttatttttgggcc

SEQ ID NO: 20102 - DNA, 195 bp, Homo sapiens
  MAP TO AB008681.1; EXPRESSED IN PLACENTA, SIGNAL =   1; EXPRESSED IN LUNG, SIGNAL = 0.6; EXPRESSED IN BRAIN, SIGNAL = 0.81; EXPRESSED IN BT474, SIGNAL = 0.77; EXPRESSED IN FETAL LIVER, SIGNAL = 0.72; EXPRESSED IN HELA, SIGNAL = 0.65; EXPRESSED IN ADULT LIVER, SIGNAL = 0.74; EXPRESSED IN HEART, SIGNAL = 0.8; NT HIT: gi11432054, EVALUE 1.00e-106; EST_HUMAN HIT: AI143544.1, EVALUE 1.00e-103; SWISSPROT HIT: Q95126, EVALUE 1.00e-28
tgtgtgaccatcgaggattgctgggaccatgatgcagaggctcgcttgtccgcgggctgtgtggaggagcgggtgtccctgattcggaggtcggtcaatggcactacctcggactgtctcgtttccctggtgacctctgtcaccaatgtggacctgccccctaaagagtcaagcatctaagcccaggacatgagt

SEQ ID NO: 20103 - DNA, 188 bp, Homo sapiens
  MAP TO AC007786.1; EXPRESSED IN BT474, SIGNAL = 0.6; EXPRESSED IN BONE MARROW, SIGNAL = 0.92; EXPRESSED IN LUNG, SIGNAL = 0.9; EXPRESSED IN FETAL LIVER, SIGNAL = 0.7; EXPRESSED IN HELA, SIGNAL = 0.82; EXPRESSED IN ADULT LIVER, SIGNAL = 0.75; EXPRESSED IN HEART, SIGNAL = 0.82; EXPRESSED IN PLACENTA, SIGNAL = 0.77; EXPRESSED IN BRAIN, SIGNAL = 0.72; EST_HUMAN HIT: BF570241.1, EVALUE 2.60e+00; NT HIT: AE001945.1, EVALUE 1.50e+00
agtttgatgtttgcatgttaagagttctgacactgagcaggttggagaatgagaaagagcaagacaagagaaaggaagggagagggaaattaagaaagggaagcaaggagaaaagagagggaagaaaggaggaaagaaaggaaaagaaaggagaaaaggagagggaaattaagaaagagaataaatga

SEQ ID NO: 20104 - DNA, 120 bp, Homo sapiens
  MAP TO AC006286.12; EXPRESSED IN PLACENTA, SIGNAL = 0.85; EXPRESSED IN LUNG, SIGNAL = 0.92; EXPRESSED IN BT474, SIGNAL = 0.88; EXPRESSED IN BONE MARROW, SIGNAL = 0.87; EXPRESSED IN HBL100, SIGNAL = 0.73; EXPRESSED IN FETAL LIVER, SIGNAL = 0.88; EXPRESSED IN HELA, SIGNAL = 0.79; EXPRESSED IN BRAIN, SIGNAL = 0.86; EXPRESSED IN HEART, SIGNAL = 0.88; EST_HUMAN HIT: AA084272.1, EVALUE 2.70e-01; SWISSPROT HIT: Q09564, EVALUE 1.00e-04; NT HIT: gi11526083, EVALUE 1.00e-61
ctaaatacaccatcagcaatatgagtgactctgttgtctcctaaattcaatctctccaataagctcagacccacaaaggcagattcatccaggcgggtcagctggttataggacaaatca

SEQ ID NO: 20105 - DNA, 225 bp, Homo sapiens
  MAP TO AL033377.2; EXPRESSED IN BT474, SIGNAL =   1; EXPRESSED IN BRAIN, SIGNAL = 1.1; EXPRESSED IN HELA, SIGNAL = 1.2; EXPRESSED IN HBL100, SIGNAL = 1.4; EXPRESSED IN ADULT LIVER, SIGNAL = 1.7; EXPRESSED IN FETAL LIVER, SIGNAL = 1.1; EXPRESSED IN LUNG, SIGNAL = 1.1; EXPRESSED IN BONE MARROW, SIGNAL = 1.6; EXPRESSED IN PLACENTA, SIGNAL = 1.5; EXPRESSED IN HEART, SIGNAL = 1.1; EST_HUMAN HIT: AA399672.1, EVALUE 5.40e-01; SWISSPROT HIT: Q12815, EVALUE 4.90e+00; NT HIT: AF126378.1, EVALUE 4.50e-01
attggagtaagacagctaccaatatcatcaagaaaagttctgataatctaggaaaatctttgtcttcaagctccattggttccaactcaacctatcttacatccaaatctaaatccagctctaccacctatttcaaaaggaatagccacacaggtgagtctaaagatgtcctcaagtttagttctcatcacattttcattgcaaaaattggcatatcatgaagat

SEQ ID NO: 20106 - DNA, 147 bp, Homo sapiens
  MAP TO AC006546.9; EXPRESSED IN PLACENTA, SIGNAL = 1.1; EXPRESSED IN FETAL LIVER, SIGNAL = 1.3; EXPRESSED IN LUNG, SIGNAL = 1.1; EXPRESSED IN ADULT LIVER, SIGNAL = 0.98; EXPRESSED IN BT474, SIGNAL = 0.88; EXPRESSED IN HEART, SIGNAL = 1.1; EXPRESSED IN BRAIN, SIGNAL = 1.1; EXPRESSED IN HELA, SIGNAL = 1.1; EXPRESSED IN HBL100, SIGNAL = 0.85; EXPRESSED IN BONE MARROW, SIGNAL = 1.2; EST_HUMAN HIT: T86019.1, EVALUE 2.00e+00; SWISSPROT HIT: P36035, EVALUE 6.70e+00; NT HIT: M10072.1, EVALUE 3.30e-01
aattgcctacctatccgtgatgtggaaaatgcactgaaattgaaggacaaaataaagcccatcagctctggagccagggataagtcacagcctctggacaccaagggcctcatccatcagataaagaagttggagcttcaggggtct

SEQ ID NO: 20107 - DNA, 191 bp, Homo sapiens
  MAP TO AC007881.2; EXPRESSED IN BONE MARROW, SIGNAL = 4.4; EXPRESSED IN HEART, SIGNAL = 3.4; EXPRESSED IN PLACENTA, SIGNAL = 5.3; EXPRESSED IN ADULT LIVER, SIGNAL = 3.9; EXPRESSED IN BRAIN, SIGNAL = 4.1; EXPRESSED IN HELA, SIGNAL = 3.2; EXPRESSED IN HBL100, SIGNAL =   4; EXPRESSED IN BT474, SIGNAL = 3.6; EXPRESSED IN FETAL LIVER, SIGNAL = 3.7; EXPRESSED IN LUNG, SIGNAL = 4.7; EST_HUMAN HIT: AI146728.1, EVALUE 1.00e-103; NT HIT: gi11430916, EVALUE 1.00e-103; SWISSPROT HIT: P03204, EVALUE 9.60e-01
ctaggaaaaggtgtaggaatagaaggcaatggcattggcgctatagtccatggggaggaggtgcccgatgtgcctggcccctaggctggccccacccagagcggaggagtgcctcagcttcatcagggtgaagctggagaagaagttctgagcctggatctctctgccctgggtcagcgccagaagaaaac

SEQ ID NO: 20108 - DNA, 187 bp, Homo sapiens
  MAP TO AC007327.1; EXPRESSED IN ADULT LIVER, SIGNAL = 1.9; EXPRESSED IN FETAL LIVER, SIGNAL = 1.9; EXPRESSED IN LUNG, SIGNAL =   2; EXPRESSED IN BRAIN, SIGNAL = 1.9; EXPRESSED IN HBL100, SIGNAL =   2; EXPRESSED IN HELA, SIGNAL = 1.7; EXPRESSED IN HEART, SIGNAL = 1.7; EXPRESSED IN PLACENTA, SIGNAL = 1.8; EXPRESSED IN BT474, SIGNAL = 1.9; EXPRESSED IN BONE MARROW, SIGNAL = 1.7; SWISSPROT HIT: Q21973, EVALUE 5.70e-01; EST_HUMAN HIT: AA335987.1, EVALUE 1.00e-101
gatgtcattatcttaggggattttggccaagggccagacagcaatgactatgatatcctgaggaaagaaaagttccaccacctgatccccgcgcacaccttcaccaacatcagcaccaagaaccctcaaggctcgaagtctctggacaacatctggatcagtaaaagcttaaagaaggttttcacag

SEQ ID NO: 20109 - DNA, 136 bp, Homo sapiens
  MAP TO AC010899.1; EXPRESSED IN HEART, SIGNAL =   1; EXPRESSED IN LUNG, SIGNAL = 6.3; EXPRESSED IN BRAIN, SIGNAL = 0.98; EXPRESSED IN FETAL LIVER, SIGNAL =   1; EXPRESSED IN ADULT LIVER, SIGNAL = 1.1; EXPRESSED IN HBL100, SIGNAL = 1.4; NT HIT: gi4758279, EVALUE 8.00e-57; EST_HUMAN HIT: AW956250.1, EVALUE 2.00e-14; SWISSPROT HIT: P54764, EVALUE 2.30e+00
tgccttcccggatcattggagatggggctaactccacagtccttctggtctctgtctcgggcagtgtggtgctggtggtaattctcattgcagcttttgtcatcagccggaggtaagcactgaagccactcactgt

SEQ ID NO: 20110 - DNA, 184 bp, Homo sapiens
  MAP TO AC006367.3; EXPRESSED IN HBL100, SIGNAL = 1.3; EXPRESSED IN FETAL LIVER, SIGNAL = 1.1; EXPRESSED IN LUNG, SIGNAL = 1.1; EXPRESSED IN BRAIN, SIGNAL = 1.2; EXPRESSED IN PLACENTA, SIGNAL = 1.3; EXPRESSED IN BT474, SIGNAL = 1.2; EXPRESSED IN BONE MARROW, SIGNAL = 1.3; EXPRESSED IN HELA, SIGNAL = 1.3; EXPRESSED IN ADULT LIVER, SIGNAL = 0.97; EXPRESSED IN HEART, SIGNAL = 1.2; NT HIT: U90880.1, EVALUE 6.00e-03; EST_HUMAN HIT: AW149638.1, EVALUE 4.40e-01; SWISSPROT HIT: P21412, EVALUE 4.30e-01
tctgccaccgccaatggtacctcgggggttggctgtgtccagcctatactcctgttctgtggagggaaatgggatgagcatcgggagaatcttgggtgggtggtaccccagccagtttaccttggttctggtgtaagcgcccctgtctccacacgtctgacaggccacaatggatggagtcctg

SEQ ID NO: 20111 - DNA, 139 bp, Homo sapiens; identical to SEQ ID NO: 18801
  MAP TO AL049593.8; EXPRESSED IN HELA, SIGNAL = 2.5; EXPRESSED IN PLACENTA, SIGNAL =   3; EXPRESSED IN HBL100, SIGNAL = 2.5; EXPRESSED IN HEART, SIGNAL = 2.2; EXPRESSED IN FETAL LIVER, SIGNAL = 2.3; EXPRESSED IN ADULT LIVER, SIGNAL = 3.3; EXPRESSED IN BT474, SIGNAL = 2.6; EXPRESSED IN BRAIN, SIGNAL = 2.5; EXPRESSED IN BONE MARROW, SIGNAL = 2.6; EXPRESSED IN LUNG, SIGNAL =   3; EST_HUMAN HIT: AW874690.1, EVALUE 2.00e-09; SWISSPROT HIT: P27773, EVALUE 3.00e+00; NT HIT: AF195953.1, EVALUE 8.00e-05

SEQ ID NO: 20112 - DNA, 181 bp, Homo sapiens
  MAP TO AL033543.6; EXPRESSED IN BT474, SIGNAL = 4.6; EXPRESSED IN ADULT LIVER, SIGNAL = 5.4; EXPRESSED IN BONE MARROW, SIGNAL = 4.9; EXPRESSED IN FETAL LIVER, SIGNAL =   5; EXPRESSED IN LUNG, SIGNAL = 4.7; EXPRESSED IN BRAIN, SIGNAL = 4.1; EXPRESSED IN PLACENTA, SIGNAL = 5.4; EXPRESSED IN HBL100, SIGNAL = 4.7; EXPRESSED IN HELA, SIGNAL = 5.4; EXPRESSED IN HEART, SIGNAL = 3.9; EST_HUMAN HIT: AA181053.1, EVALUE 6.00e-59; NT HIT: gi11418255, EVALUE 6.00e-62; SWISSPROT HIT: P43252, EVALUE 1.50e-01
atctaaagcgtctcccttcctccttcctcctgcagcaattcacgggaagaacctggtggccatcctccacctgctggtctctctggccatgcacttcagggcccccatccgccttcctgagcatgtaacggtgcaggtggtggtcgtgcgggtgagtataaccgagtggtcggcctgcctg

SEQ ID NO: 20113 - DNA, 218 bp, Homo sapiens
  MAP TO AC007336.2; EXPRESSED IN BONE MARROW, SIGNAL = 3.9; EXPRESSED IN HEART, SIGNAL = 3.8; EXPRESSED IN PLACENTA, SIGNAL = 5.1; EXPRESSED IN ADULT LIVER, SIGNAL = 4.5; EXPRESSED IN BRAIN, SIGNAL = 3.8; EXPRESSED IN HELA, SIGNAL = 4.4; EXPRESSED IN HBL100, SIGNAL = 4.2; EXPRESSED IN BT474, SIGNAL = 3.9; EXPRESSED IN FETAL LIVER, SIGNAL = 3.9; EXPRESSED IN LUNG, SIGNAL = 4.4; NT HIT: M55586.1, EVALUE 5.00e-78; SWISSPROT HIT: P08253, EVALUE 5.00e-25; EST_HUMAN HIT: AI751579.1, EVALUE 7.00e-72
cctgcaagtttccattccgcttccagggcacatcctatgacagctgcaccactgagggccgcacggatggctaccgctggtgcggcaccactgaggactacgaccgcgacaagaagtatggcttctgccctgagaccggtgggtgccactccctctccctccctcagggcccagcacctgctgtctgacaaaaaaaaaacccataagactccgagtgc

SEQ ID NO: 20114 - DNA, 407 bp, Homo sapiens; identical to SEQ ID NO: 3340
  MAP TO AL031659.6; EXPRESSED IN PLACENTA, SIGNAL = 1.3; EXPRESSED IN HBL100, SIGNAL = 1.3; EXPRESSED IN HELA, SIGNAL = 1.4; EXPRESSED IN BONE MARROW, SIGNAL = 1.8; EXPRESSED IN HEART, SIGNAL = 1.2; EXPRESSED IN BT474, SIGNAL = 1.1; EXPRESSED IN ADULT LIVER, SIGNAL = 1.7; EXPRESSED IN FETAL LIVER, SIGNAL = 1.6; EXPRESSED IN BRAIN, SIGNAL = 1.1; EXPRESSED IN LUNG, SIGNAL = 1.5; NT HIT: AJ237744.1, EVALUE 8.00e-69; SWISSPROT HIT: P70120, EVALUE 2.00e-01; EST_HUMAN HIT: BF343897.1, EVALUE 6.00e-06

SEQ ID NO: 20115 - DNA, 97 bp, Homo sapiens
  MAP TO AL034350.2; EXPRESSED IN PLACENTA, SIGNAL = 3.1; EXPRESSED IN HEART, SIGNAL = 2.6; EXPRESSED IN HBL100, SIGNAL = 2.6; EXPRESSED IN HELA, SIGNAL =   2; EXPRESSED IN BT474, SIGNAL = 1.8; EXPRESSED IN FETAL LIVER, SIGNAL = 3.1; EXPRESSED IN ADULT LIVER, SIGNAL = 3.2; EXPRESSED IN BONE MARROW, SIGNAL = 2.4; EXPRESSED IN LUNG, SIGNAL = 2.3; EXPRESSED IN BRAIN, SIGNAL =   2; EST_HUMAN HIT: BE514432.1, EVALUE 7.60e-02; NT HIT: AL139074.2, EVALUE 3.20e+00
atgaaatgtgttttaaagaaggcaacaagagcagaaaaggagctgctaattttgtctggggagatcgagaaaagcctgatggaggagatggcattgg

SEQ ID NO: 20116 - DNA, 201 bp, Homo sapiens
  MAP TO AC007349.1; EXPRESSED IN ADULT LIVER, SIGNAL = 1.3; EXPRESSED IN FETAL LIVER, SIGNAL = 1.3; EXPRESSED IN LUNG, SIGNAL = 1.5; EXPRESSED IN HELA, SIGNAL = 1.3; EXPRESSED IN HEART, SIGNAL = 1.4; EXPRESSED IN PLACENTA, SIGNAL = 2.1; EXPRESSED IN BT474, SIGNAL =   1; EXPRESSED IN BRAIN, SIGNAL = 3.1; EXPRESSED IN BONE MARROW, SIGNAL = 1.3; EXPRESSED IN HBL100, SIGNAL = 1.4; EST_HUMAN HIT: AI634538.1, EVALUE 1.00e-109; SWISSPROT HIT: Q92556, EVALUE 1.00e-23; NT HIT: gi11419588, EVALUE 1.00e-109
tcagttacagtcatagacgaagtcatagttgctgggctccttgggaatcggcggaggtgcgtcagggatctggatgttttccaggtccaggaggcggagcttgatttccatgctgagcagggtgtccaggtcattccgcgtcaggtcgctcatcatgtccttcccgagtagcgcattcagtccatccgtccagatacagta

SEQ ID NO: 20117 - DNA, 280 bp, Homo sapiens
  MAP TO AL031663.1; EXPRESSED IN BRAIN, SIGNAL = 2.3; EXPRESSED IN HELA, SIGNAL = 2.8; EXPRESSED IN HBL100, SIGNAL = 2.6; EXPRESSED IN BT474, SIGNAL = 2.5; EXPRESSED IN LUNG, SIGNAL = 2.9; EXPRESSED IN BONE MARROW, SIGNAL = 2.8; EXPRESSED IN PLACENTA, SIGNAL = 2.8; EXPRESSED IN HEART, SIGNAL = 2.3; EXPRESSED IN ADULT LIVER, SIGNAL = 3.1; EXPRESSED IN FETAL LIVER, SIGNAL = 2.9; EST_HUMAN HIT: AI693217.1, EVALUE 5.00e-88; SWISSPROT HIT: P00993, EVALUE 1.00e-01
agtctgcggtttcacaggacacgtcgccactttctcctcggaaggcagagagagcctcagcatcagaggagggacactgtgtaggtgcgaggggtgtaggacctgtgaactctacctctttgcctcagatcttccctccggacctgctcctcgccttaacccatgccctgggttcccggctctcttgtgtggcagatcctggctcactcctgcttctccaggaagtggttctccttccttctgcagcggccatatccaaagatcttgcagatcctggagc

SEQ ID NO: 20118 - DNA, 113 bp, Homo sapiens
  MAP TO AC008082.12; EXPRESSED IN ADULT LIVER, SIGNAL = 1.4; EXPRESSED IN FETAL LIVER, SIGNAL = 1.2; EXPRESSED IN LUNG, SIGNAL = 1.1; EXPRESSED IN BRAIN, SIGNAL = 1.6; EXPRESSED IN HEART, SIGNAL = 1.2; EXPRESSED IN HBL100, SIGNAL = 1.2; EXPRESSED IN PLACENTA, SIGNAL = 1.3; EXPRESSED IN BT474, SIGNAL = 1.1; EXPRESSED IN BONE MARROW, SIGNAL = 1.2; EST_HUMAN HIT: AW166197.1, EVALUE 1.00e-10; NT HIT: U82828.1, EVALUE 2.00e-11
ctccaccctctcctaaacgttacctatgacaaccactactctgttcttcaattctataattttgtcatttcaagaaagttatataaatggaaccacaaagtaaataagacaaa

SEQ ID NO: 20119 - DNA, 206 bp, Homo sapiens
  MAP TO AL035209.1; EXPRESSED IN BONE MARROW, SIGNAL = 1.9; EXPRESSED IN LUNG, SIGNAL =   2; EXPRESSED IN HBL100, SIGNAL = 1.8; EXPRESSED IN HELA, SIGNAL = 2.1; EXPRESSED IN PLACENTA, SIGNAL = 2.3; EXPRESSED IN HEART, SIGNAL = 1.5; EXPRESSED IN BT474, SIGNAL =   2; EXPRESSED IN FETAL LIVER, SIGNAL = 1.8; EXPRESSED IN ADULT LIVER, SIGNAL = 2.3; EXPRESSED IN BRAIN, SIGNAL =   2; SWISSPROT HIT: P91285, EVALUE 2.20e+00; NT HIT: AE004649.1, EVALUE 1.20e-01; EST_HUMAN HIT: AA319436.1, EVALUE 1.00e-104
cgggtgccccgcaatcaacgccgaatactccagggcatcctctaagagcagactgatggtgtcgatgtggacaaaatggtcctccaggtgtactgccctctcccctgccccatgacaatcgacacccaatacattgttatccaacagaatatgacaatcgccacactcaaaggccctacgaacacattcatgctggtgatggctgc

SEQ ID NO: 20120 - DNA, 409 bp, Homo sapiens
  MAP TO AL031666.3; EXPRESSED IN BT474, SIGNAL = 2.2; EXPRESSED IN ADULT LIVER, SIGNAL = 3.7; EXPRESSED IN FETAL LIVER, SIGNAL = 2.7; EXPRESSED IN BONE MARROW, SIGNAL = 2.3; EXPRESSED IN BRAIN, SIGNAL =   2; EXPRESSED IN LUNG, SIGNAL = 2.6; EXPRESSED IN HELA, SIGNAL = 2.6; EXPRESSED IN PLACENTA, SIGNAL = 2.4; EXPRESSED IN HBL100, SIGNAL = 2.3; EXPRESSED IN HEART, SIGNAL = 2.7; SWISSPROT HIT: P97445, EVALUE 1.30e+00; EST_HUMAN HIT: AW176626.1, EVALUE 1.00e+00
agggggattgaaaattctgactggttgcaaagtgaaacctcctataacacccagcaaggggagctttgtgctccttcccatgggagttaggaaaatccatttcaatgaggaagctgagcacaacacagtttatttatgtcccagatctgatgatggaaccttcaaggaaaactcaaccagtgacttttctgtagagggtgagaatttggttagttccttcagttttgagatgagatttgatatacagcctttgccccttgaggaaaatctgcatgtgggggaagggttggccagttgtgtacctcacagtggtgcctcacctgtgagtcccaggtcaaaccatggccactgtggtttgtatatttatcacaatacttttcaggaaaatggcagaaaaataacttgtttt

SEQ ID NO: 20121 - DNA, 377 bp, Homo sapiens
  MAP TO AL031678.2; EXPRESSED IN PLACENTA, SIGNAL = 3.7; EXPRESSED IN HELA, SIGNAL = 3.4; EXPRESSED IN HEART, SIGNAL =   3; EXPRESSED IN HBL100, SIGNAL = 3.2; EXPRESSED IN BT474, SIGNAL = 3.1; EXPRESSED IN FETAL LIVER, SIGNAL = 2.7; EXPRESSED IN ADULT LIVER, SIGNAL = 2.9; EXPRESSED IN BONE MARROW, SIGNAL = 3.1; EXPRESSED IN LUNG, SIGNAL =   3; EXPRESSED IN BRAIN, SIGNAL = 2.6; EST_HUMAN HIT: AW361149.1, EVALUE 1.00e-70; NT HIT: gi11421195, EVALUE 1.00e-70; SWISSPROT HIT: Q08188, EVALUE 7.00e-18
gagttccaagacccccaaaagagtaaagaacccaaggtcagagggagctctgtctgtcccacccaggggatctggagggcccccccgccccctcccgccctcctgcaccggccacttaggcccaggactcactcgatcttcaggttacccaacagcaggccgcttccctccaccatcagcacgcagtccctcaccggctcatccagtggattggagaagagcatctgcacgttcacaggcttccgcacacgagcctcgttcagcacctatgggggagaggggctgccgagtcaggactccagctgctcagcccctgcctgcaccttggtgagggctgggcagggtgactgagtgaagggggtgatgtcactgaggat

SEQ ID NO: 20122 - DNA, 348 bp, Homo sapiens
  MAP TO AL034418.2; EXPRESSED IN HELA, SIGNAL = 1.2; EXPRESSED IN HBL100, SIGNAL = 1.3; EXPRESSED IN BT474, SIGNAL = 1.1; EXPRESSED IN BRAIN, SIGNAL = 1.1; EXPRESSED IN LUNG, SIGNAL = 1.3; EXPRESSED IN BONE MARROW, SIGNAL = 1.2; EXPRESSED IN PLACENTA, SIGNAL = 1.2; EXPRESSED IN HEART, SIGNAL = 1.1; EXPRESSED IN ADULT LIVER, SIGNAL = 1.1; EXPRESSED IN FETAL LIVER, SIGNAL = 1.1; SWISSPROT HIT: P38741, EVALUE 6.00e-01; NT HIT: AB033073.1, EVALUE 1.00e-128; EST_HUMAN HIT: BE074312.1, EVALUE 1.00e-128
agtacaaggccagctatgtccgcagtcgctccatccgctcagtggccatcgaggtggacggcagggtgtaccacgtaggcctgggtgatgccgcccagccccgaaacctcaccaagcggcactggccaggggcccctgaggaccaagatgacaaggatggtggggacttcagtggcactggaggccttcccgactactcagccgccaaccccattaaagtgacacatcggtgagtgtccaggtggaagtcgagggtgaaggggacaggacagacctcggcaaagggcttcccacacctcttgggcccctgaggaccaagatgacaaggatggtggggacttcagtggc

SEQ ID NO: 20123 - DNA, 104 bp, Homo sapiens
  MAP TO AC007012.1; EXPRESSED IN BONE MARROW, SIGNAL =   4; EXPRESSED IN ADULT LIVER, SIGNAL = 8.5; EXPRESSED IN BT474, SIGNAL = 3.6; EXPRESSED IN BRAIN, SIGNAL = 4.3; EXPRESSED IN LUNG, SIGNAL = 4.2; EXPRESSED IN PLACENTA, SIGNAL = 4.1; EXPRESSED IN HEART, SIGNAL = 3.4; EXPRESSED IN HELA, SIGNAL = 4.5; EXPRESSED IN HBL100, SIGNAL = 4.3; EXPRESSED IN FETAL LIVER, SIGNAL = 4.2; EST_HUMAN HIT: BF371290.1, EVALUE 3.30e-01; NT HIT: D13197.1, EVALUE 1.90e-01; SWISSPROT HIT: P50448, EVALUE 7.00e+00
ataattctagctgtcctcagcagtccctctgtattcatcttctaattcaggctttccaagggaggaatataaccagttttccaaaggtaaaggatattcctgag

SEQ ID NO: 20124 - DNA, 392 bp, Homo sapiens
  MAP TO AC007204.1; EXPRESSED IN BT474, SIGNAL = 6.6; EXPRESSED IN FETAL LIVER, SIGNAL = 3.2; EXPRESSED IN BONE MARROW, SIGNAL = 4.2; EXPRESSED IN HELA, SIGNAL =   3; EXPRESSED IN ADULT LIVER, SIGNAL = 2.3; EXPRESSED IN BRAIN, SIGNAL = 4.4; EXPRESSED IN LUNG, SIGNAL = 4.3; EXPRESSED IN PLACENTA, SIGNAL =  10; EXPRESSED IN HEART, SIGNAL =   3; EXPRESSED IN HBL100, SIGNAL = 3.1; NT HIT: gi11427233, EVALUE 1.00e-103; SWISSPROT HIT: Q03923, EVALUE 5.00e-65; EST_HUMAN HIT: AU123664.1, EVALUE 0.00e+00
actagacataagagagttcatactggagagaagccctacaaatgtgaagaatgtggcaaagcctttaagtactcctctacccttagttcacataagagaagtcatactggagagaaaccctacaaatgtgaagaatgtggcaaagcctttgttgcatcctcaacccttagtaaacatgagatcattcatactggaaagaaaccctacaagtgtgaagaatgtggcaaagcttttaaccagtcctcatcccttactaaacataagaaaattcatactggagagaaaccctacaaatgtgaagaatgtggcaaagcttttaaccagtcctcttcccttactaaacataagaaaattcatactggagagaaaccctacaaatgtgaagaatgtgg

SEQ ID NO: 20125 - DNA, 179 bp, Homo sapiens
  MAP TO AC007016.5; EXPRESSED IN PLACENTA, SIGNAL = 1.6; EXPRESSED IN HBL100, SIGNAL = 1.4; EXPRESSED IN HEART, SIGNAL = 1.5; EXPRESSED IN ADULT LIVER, SIGNAL = 1.9; EXPRESSED IN BT474, SIGNAL = 1.2; EXPRESSED IN FETAL LIVER, SIGNAL = 1.6; EXPRESSED IN BONE MARROW, SIGNAL = 1.3; EXPRESSED IN HELA, SIGNAL = 1.6; EXPRESSED IN BRAIN, SIGNAL = 1.5; EXPRESSED IN LUNG, SIGNAL = 1.7; EST_HUMAN HIT: AV719384.1, EVALUE 2.00e-07; NT HIT: AL163285.2, EVALUE 1.00e-07; SWISSPROT HIT: Q14832, EVALUE 8.70e+00
ttctggaggctgggaagtccaagattgagaagtggcatctggtgagggtcttcttgctgcatcataacatactgaaaggatcacatggtgagcaaactgtgatgcagagagaggatgggggcagaactcatccttattaccagaaaactactcctgtgatcattaacacactccctcaa

SEQ ID NO: 20126 - DNA, 103 bp, Homo sapiens
  MAP TO AL022725.8; EXPRESSED IN BT474, SIGNAL = 0.67; EXPRESSED IN FETAL LIVER, SIGNAL = 0.96; EXPRESSED IN LUNG, SIGNAL = 0.85; EXPRESSED IN PLACENTA, SIGNAL = 1.2; EXPRESSED IN BONE MARROW, SIGNAL = 0.98; EXPRESSED IN HBL100, SIGNAL = 0.73; EXPRESSED IN ADULT LIVER, SIGNAL = 0.79; EXPRESSED IN BRAIN, SIGNAL = 1.1; EXPRESSED IN HELA, SIGNAL = 0.96; EXPRESSED IN HEART, SIGNAL = 0.99; NT HIT: L24920.1, EVALUE 2.20e-01; EST_HUMAN HIT: AV719958.1, EVALUE 2.10e-02; SWISSPROT HIT: P46448, EVALUE 2.40e+00
gagagcaaagtggataaacatgctgggtatgttcacacaatggaacactgctcaccatcccacgacaacacagacgaatccaaacgtcaccatgctcagcaaa

SEQ ID NO: 20127 - DNA, 164 bp, Homo sapiens
  MAP TO AL035088.1; EXPRESSED IN LUNG, SIGNAL = 8.3; EXPRESSED IN HBL100, SIGNAL = 7.9; EXPRESSED IN HELA, SIGNAL = 9.6; EXPRESSED IN PLACENTA, SIGNAL = 9.1; EXPRESSED IN BONE MARROW, SIGNAL = 6.5; EXPRESSED IN BRAIN, SIGNAL = 6.3; EXPRESSED IN HEART, SIGNAL = 6.6; EXPRESSED IN ADULT LIVER, SIGNAL = 8.3; EXPRESSED IN FETAL LIVER, SIGNAL =   8; EXPRESSED IN BT474, SIGNAL = 8.1; SWISSPROT HIT: P05783, EVALUE 2.00e-17; NT HIT: gi11434787, EVALUE 5.00e-62; EST_HUMAN HIT: BE513112.1, EVALUE 8.00e-62
gtcaaggctctcaaggaggagttgctcttcatgaagaagaaccacgaagaggaagtaaaaggcctacaatcccagattgccagctctgggttgtccatggaggtagataccccaaatctcaggacctcaccaaaatcatggcagacatccaggcccaatatgac

SEQ ID NO: 20128 - DNA, 155 bp, Homo sapiens
  MAP TO AL035091.2; EXPRESSED IN BT474, SIGNAL = 1.3; EXPRESSED IN ADULT LIVER, SIGNAL = 1.2; EXPRESSED IN LUNG, SIGNAL = 1.3; EXPRESSED IN HBL100, SIGNAL = 1.5; EXPRESSED IN HELA, SIGNAL = 1.3; EXPRESSED IN HEART, SIGNAL = 1.3; EXPRESSED IN FETAL LIVER, SIGNAL = 1.4; EXPRESSED IN BRAIN, SIGNAL = 1.2; EXPRESSED IN BONE MARROW, SIGNAL = 1.2; EXPRESSED IN PLACENTA, SIGNAL = 1.2; NT HIT: AL163249.2, EVALUE 2.00e-11; EST_HUMAN HIT: AA834967.1, EVALUE 1.00e-19; SWISSPROT HIT: P49880, EVALUE 3.40e-01
aaatattgcaagaattttcaaaatgtgacacagaggcaaagagtgagcacatgctgctcaacaatggtgccaatgaacttgctggatgcagggttgccacaaaccttcaaattgtaaaaaactcagtgtcaatatggagagacacaataaagtga

SEQ ID NO: 20129 - DNA, 452 bp, Homo sapiens; identical to SEQ ID NO: 3356
  MAP TO AL035447.3; EXPRESSED IN HELA, SIGNAL = 2.9; EXPRESSED IN HEART, SIGNAL = 2.8; EXPRESSED IN PLACENTA, SIGNAL = 2.8; EXPRESSED IN HBL100, SIGNAL = 2.9; EXPRESSED IN BT474, SIGNAL = 3.5; EXPRESSED IN FETAL LIVER, SIGNAL = 3.2; EXPRESSED IN ADULT LIVER, SIGNAL = 3.8; EXPRESSED IN BONE MARROW, SIGNAL = 2.7; EXPRESSED IN BRAIN, SIGNAL =   3; EXPRESSED IN LUNG, SIGNAL =   3; NT HIT: AB002590.1, EVALUE 1.60e-02; EST_HUMAN HIT: AW887671.1, EVALUE 4.00e-25

SEQ ID NO: 20130 - DNA, 501 bp, Homo sapiens
  MAP TO AL049739.1; EXPRESSED IN HEART, SIGNAL = 1.7; EXPRESSED IN BT474, SIGNAL = 0.98; EXPRESSED IN FETAL LIVER, SIGNAL = 0.94; EXPRESSED IN ADULT LIVER, SIGNAL = 1.1; EXPRESSED IN BONE MARROW, SIGNAL = 1.1; EXPRESSED IN BRAIN, SIGNAL = 0.95; EXPRESSED IN HELA, SIGNAL = 0.94; EXPRESSED IN HBL100, SIGNAL = 0.95; EST_HUMAN HIT: BE501015.1, EVALUE 3.00e-08; NT HIT: gi11526383, EVALUE 0.00e+00; SWISSPROT HIT: Q95154, EVALUE 1.00e-35
gctgggtcggcgtgggcctgtggggtgctggtggggctgggccacacccctttcatcttctctttgcccttctgcggccccaataccatcccgcagttcttctgtgagatccagcctgtcctgcagctggtatgtggagacacctcgcttaatgaactgcagattatcctggcaacagccctcctcatcctctgcccctttggcctcatcctgggctcctacgggcgtatcctcgttaccatcttccggatcccatctgttgcgggccgccgcaaggccttctccacctgctcctcccacctgatcgtggtctccctcttctatggcaccgcactctttatctatattcgccctaaggccagctacgatccggccactgaccctctggtgtccctcttctatgctgtggtcacccccatcctcaaccccatcatctacagcctgcggaacacagaggtcaaagctgccctaaagagaaccatccagaaaacggtgcctatg

SEQ ID NO: 20131 - DNA, 145 bp, Homo sapiens
  MAP TO AC009886.2; EXPRESSED IN PLACENTA, SIGNAL = 7.5; EXPRESSED IN HBL100, SIGNAL = 6.2; EXPRESSED IN ADULT LIVER, SIGNAL =   7; EXPRESSED IN FETAL LIVER, SIGNAL = 5.7; EXPRESSED IN BONE MARROW, SIGNAL = 6.1; EXPRESSED IN LUNG, SIGNAL = 7.3; EXPRESSED IN HEART, SIGNAL = 5.3; EXPRESSED IN HELA, SIGNAL = 7.6; EXPRESSED IN BT474, SIGNAL = 5.2; EXPRESSED IN BRAIN, SIGNAL = 5.8; SWISSPROT HIT: O62621, EVALUE 4.00e+00; EST_HUMAN HIT: BF680294.1, EVALUE 2.00e-65; NT HIT: AL163207.2, EVALUE 2.00e-05
gtactgatccttggcctgggggttgggaacccctgtgctaggcatcgttctgggtaccaggatgcagcagtatacatacacactgtacccctcgtggagcttgtggtctaacaggggatacagacactaaacaaatagcgacaca

SEQ ID NO: 20132 - DNA, 78 bp, Homo sapiens
  MAP TO AL035457.13; EXPRESSED IN FETAL LIVER, SIGNAL = 1.7; EXPRESSED IN ADULT LIVER, SIGNAL = 1.8; EXPRESSED IN HELA, SIGNAL = 1.5; EXPRESSED IN HBL100, SIGNAL =  12; EXPRESSED IN BT474, SIGNAL = 1.7; EXPRESSED IN BRAIN, SIGNAL = 1.6; EXPRESSED IN LUNG, SIGNAL = 1.8; EXPRESSED IN BONE MARROW, SIGNAL = 1.4; EXPRESSED IN PLACENTA, SIGNAL = 1.6; EXPRESSED IN HEART, SIGNAL = 1.8; NT HIT: AL116780.1, EVALUE 5.20e-01; EST_HUMAN HIT: AI819806.1, EVALUE 2.50e+00
gtgaaaggtgctataagtgggttccaggatacagaccttcctaaaggcaccctggagaatcttcccaaggtgaagctt

SEQ ID NO: 20133 - DNA, 272 bp, Homo sapiens
  MAP TO AC008274.1; EXPRESSED IN HELA, SIGNAL = 1.4; EXPRESSED IN HEART, SIGNAL = 1.4; EXPRESSED IN BT474, SIGNAL =   2; EXPRESSED IN HBL100, SIGNAL = 1.9; EXPRESSED IN FETAL LIVER, SIGNAL = 1.9; EXPRESSED IN LUNG, SIGNAL = 1.1; EXPRESSED IN BRAIN, SIGNAL = 1.4; EXPRESSED IN PLACENTA, SIGNAL = 1.2; EXPRESSED IN BONE MARROW, SIGNAL = 6.3; EXPRESSED IN ADULT LIVER, SIGNAL = 1.3; NT HIT: gi7706239, EVALUE 0.00e+00; EST_HUMAN HIT: AA699984.1, EVALUE 0.00e+00; SWISSPROT HIT: P07762, EVALUE 3.80e-01
gctgtactgaaggttctgaaggcctggtgagtccccctcacggccagaaggagagacccggcttcggcttcatggccggcctcccgcaggtgtctgcccagctcctctgcatcccagcgcccttgctggaggctagccaagaggtggtcaacaatacgtggatagaagggagtggagacacacttcaccagcagcttggcatccaggagcagggaaagaagttcttggtcacaattggaatcattcaccttcaagaaataagacaggcacag

SEQ ID NO: 20134 - DNA, 317 bp, Homo sapiens
  MAP TO AL022319.2; EXPRESSED IN PLACENTA, SIGNAL = 1.3; EXPRESSED IN LUNG, SIGNAL = 1.2; EXPRESSED IN HELA, SIGNAL = 1.2; EXPRESSED IN HEART, SIGNAL = 0.99; EXPRESSED IN BT474, SIGNAL = 1.1; EXPRESSED IN HBL100, SIGNAL =   1; EXPRESSED IN FETAL LIVER, SIGNAL =   1; EXPRESSED IN BRAIN, SIGNAL = 1.4; EXPRESSED IN BONE MARROW, SIGNAL = 1.5; EXPRESSED IN ADULT LIVER, SIGNAL = 1.1; NT HIT: AF142567.1, EVALUE 0.00e+00; SWISSPROT HIT: Q9Z0Y8, EVALUE 2.00e-60; EST_HUMAN HIT: BF529461.1, EVALUE 1.90e-02
acaaggggatgtggccttgcccccatactaccagccggaggaggatgatgagatgcccttcatctgctccctgtcgggcgacaatgggataatgggctgccatgagatccccccgctcaaggagcagggccgtgagtgctgcctgtccaaggacgacgtctacgactttggggcggggcgccaggacctcaatgccagcggcctctgtgtcaactggaaccgttactacaatgtgtgccgcacgggcagcgccaacccccacaagggtgccatcaactttgacaacatcggttatgcttggattgtcatcttccagg

SEQ ID NO: 20135 - DNA, 132 bp, Homo sapiens
  MAP TO AC008268.1; EXPRESSED IN PLACENTA, SIGNAL = 0.98; EXPRESSED IN LUNG, SIGNAL = 1.1; EXPRESSED IN HELA, SIGNAL = 1.1; EXPRESSED IN HEART, SIGNAL = 0.94; EXPRESSED IN BT474, SIGNAL = 0.89; EXPRESSED IN BONE MARROW, SIGNAL =   1; EXPRESSED IN HBL100, SIGNAL = 0.82; EXPRESSED IN FETAL LIVER, SIGNAL = 0.67; EXPRESSED IN ADULT LIVER, SIGNAL = 1.2; EXPRESSED IN BRAIN, SIGNAL = 1.1; EST_HUMAN HIT: AA296447.1, EVALUE 7.60e-02; SWISSPROT HIT: Q03169, EVALUE 1.30e+00; NT HIT: gi11056025, EVALUE 1.20e+00
tccagctgttgtattgtgttctgtcttcttgatcccagatgtcctggcttggtttttctcaaggccgtcctccatagcctcaccgacctcattggcctggttgcacacagcttcgagtgcccacagaccaac

SEQ ID NO: 20136 - DNA, 384 bp, Homo sapiens
  MAP TO AL035553.13; EXPRESSED IN BONE MARROW, SIGNAL = 0.96; EXPRESSED IN LUNG, SIGNAL = 1.2; EXPRESSED IN PLACENTA, SIGNAL = 1.2; EXPRESSED IN HEART, SIGNAL = 1.2; EXPRESSED IN BT474, SIGNAL = 0.97; EXPRESSED IN ADULT LIVER, SIGNAL = 1.3; NT HIT: AJ271735.1, EVALUE 9.00e-50; EST_HUMAN HIT: W28189.1, EVALUE 1.00e-55; SWISSPROT HIT: P17167, EVALUE 8.90e-01
gaagccagcagaggctggttcatgaggttcaaggaaagaagctatcttcataacataaaagtgcaaggtgaagtggcaagtgctgatgtaaaagttgcaaaaagttatctagaaaatctagctaagataatcgatgaaagtggctacacaaaacaacaaattttcaatgcagacaaaacagccttatattggaataagacgccatctaggactttcacagatagagagaagtcaatgcctggcttcaatgacttaaaggacaggctgactttcttgttagaggctaatgcagctggtgattttaattcgaagccaattcttattgaccattccgaaaatccttgggcccttaagaattatgccaaatctatgctgcctgtgctc

SEQ ID NO: 20137 - DNA, 167 bp, Homo sapiens
  MAP TO AC010778.2; EXPRESSED IN HELA, SIGNAL = 1.4; EXPRESSED IN HEART, SIGNAL =   1; EXPRESSED IN PLACENTA, SIGNAL =   3; EXPRESSED IN HBL100, SIGNAL = 1.2; EXPRESSED IN ADULT LIVER, SIGNAL = 1.5; EXPRESSED IN BT474, SIGNAL = 1.2; EXPRESSED IN FETAL LIVER, SIGNAL = 1.4; EXPRESSED IN BONE MARROW, SIGNAL = 1.3; EXPRESSED IN LUNG, SIGNAL = 1.5; EXPRESSED IN BRAIN, SIGNAL = 1.1; SWISSPROT HIT: P10272, EVALUE 1.00e-07; EST_HUMAN HIT: AU121943.1, EVALUE 1.00e-42; NT HIT: AB026898.1, EVALUE 1.00e-53
gtatgccacaggttgcaagctcgtccctcggacctgtataaggactcctagagctattcctttttcttctgtgacatataaagaaaagtcttgccctgttggcaagcttaacactggggcttgggttagggccttctttagggtatggaaagctgcttctgcttcag

SEQ ID NO: 20138 - DNA, 209 bp, Homo sapiens
  MAP TO AL078624.22; EXPRESSED IN FETAL LIVER, SIGNAL = 1.5; EXPRESSED IN ADULT LIVER, SIGNAL = 1.6; EXPRESSED IN HELA, SIGNAL = 1.6; EXPRESSED IN HBL100, SIGNAL = 1.7; EXPRESSED IN BT474, SIGNAL = 1.4; EXPRESSED IN BRAIN, SIGNAL = 1.4; EXPRESSED IN LUNG, SIGNAL = 1.4; EXPRESSED IN BONE MARROW, SIGNAL = 1.5; EXPRESSED IN PLACENTA, SIGNAL = 1.5; EXPRESSED IN HEART, SIGNAL = 1.7; NT HIT: D14547.1, EVALUE 1.00e-22; SWISSPROT HIT: P06646, EVALUE 2.50e-01; EST_HUMAN HIT: BE504208.1, EVALUE 2.00e-16
aataaagacaattggattggattacagttggccttggaacaacacagttttcaatttcgaggattcacttatacttgaatcttccttcacctttgccatccctgagacagcaagaacaatcccttctcttcttcctcccttcatcctactcattatgaagacaatgaggatgaagacctttatggtgatccacttccatttaatgaata

SEQ ID NO: 20139 - DNA, 112 bp, Homo sapiens
  MAP TO AC007322.2; EXPRESSED IN ADULT LIVER, SIGNAL = 4.9; EXPRESSED IN BT474, SIGNAL = 3.3; EXPRESSED IN FETAL LIVER, SIGNAL = 3.4; EXPRESSED IN BRAIN, SIGNAL =   3; EXPRESSED IN BONE MARROW, SIGNAL = 2.8; EXPRESSED IN LUNG, SIGNAL = 3.6; EXPRESSED IN HBL100, SIGNAL = 3.3; EXPRESSED IN PLACENTA, SIGNAL = 3.3; EXPRESSED IN HELA, SIGNAL = 4.3; EXPRESSED IN HEART, SIGNAL = 2.9; SWISSPROT HIT: P03355, EVALUE 1.40e+00; NT HIT: AF061957.1, EVALUE 3.80e+00
ttttgagggattgatctgtaagatctcctggttcagcaaatacgtgatccactgtttagacacagttatggaggggagcatcaaatttgactgggagcagggtggttgggct

SEQ ID NO: 20140 - DNA, 201 bp, Homo sapiens
  MAP TO AC007955.3; EXPRESSED IN PLACENTA, SIGNAL = 1.6; EXPRESSED IN HELA, SIGNAL = 1.6; EXPRESSED IN HEART, SIGNAL = 1.4; EXPRESSED IN BT474, SIGNAL = 1.3; EXPRESSED IN BRAIN, SIGNAL = 1.3; EXPRESSED IN BONE MARROW, SIGNAL = 1.3; EXPRESSED IN LUNG, SIGNAL = 1.3; EXPRESSED IN HBL100, SIGNAL = 1.2; EXPRESSED IN ADULT LIVER, SIGNAL = 1.7; EXPRESSED IN FETAL LIVER, SIGNAL = 1.5; NT HIT: L35930.1, EVALUE 3.00e-02; SWISSPROT HIT: P30814, EVALUE 2.80e+00; EST_HUMAN HIT: Z40561.1, EVALUE 7.00e-04
tggccctctgctgcccccacttgccgcaagttcacactaaccacagaagtcctgcaggcctgcaccacagggctcaaaacacactgtttttgctctgtgcctggtattgtattgccttaggtcatctgatttatagtcattgcagtcctcagttaagtatgatttccattctacagatgagaaaactgagtctcaagatag

SEQ ID NO: 20141 - DNA, 188 bp, Homo sapiens
  MAP TO AL109829.10; EXPRESSED IN LUNG, SIGNAL = 2.5; EXPRESSED IN HBL100, SIGNAL = 3.1; EXPRESSED IN HELA, SIGNAL = 2.7; EXPRESSED IN PLACENTA, SIGNAL = 4.3; EXPRESSED IN ADULT LIVER, SIGNAL = 2.4; EXPRESSED IN BONE MARROW, SIGNAL = 3.2; EXPRESSED IN HEART, SIGNAL = 2.9; EXPRESSED IN BT474, SIGNAL = 3.1; EXPRESSED IN FETAL LIVER, SIGNAL = 2.2; EXPRESSED IN BRAIN, SIGNAL = 3.8; NT HIT: AL163303.2, EVALUE 4.00e-44; EST_HUMAN HIT: BE390947.1, EVALUE 1.00e-38; SWISSPROT HIT: O62732, EVALUE 1.50e-01
gtcttgggcagctccacccctgtgactttgcagggtacaccctccatcctggctgccttcatgggctggcattgaatgtctgcggcctttccaggtacatggtgcaagctgtcggtggatctactattctggggtctggaggacagcatggtggcccttgtcttacagctccactaggtggtgtccca

SEQ ID NO: 20142 - DNA, 200 bp, Homo sapiens
  MAP TO AL035662.23; EXPRESSED IN PLACENTA, SIGNAL = 1.5; EXPRESSED IN HEART, SIGNAL = 1.4; EXPRESSED IN FETAL LIVER, SIGNAL = 1.4; EXPRESSED IN BONE MARROW, SIGNAL = 1.5; EXPRESSED IN HELA, SIGNAL = 1.5; EXPRESSED IN HBL100, SIGNAL = 1.2; EXPRESSED IN BT474, SIGNAL = 1.4; EXPRESSED IN ADULT LIVER, SIGNAL = 1.5; EXPRESSED IN BRAIN, SIGNAL = 1.3; EXPRESSED IN LUNG, SIGNAL = 1.6; EST_HUMAN HIT: AL046572.1, EVALUE 3.00e-86; NT HIT: AB046857.1, EVALUE 2.00e-86
cggtgaatctggtgttgctgggtgatgacaatagcaaaaggagaacctcccctgctaacatcctccaaggcttgtgacagtgacacttctgtgttaaggaagatcaagtccactaccatgcccaggtctcgcaccttccgccccacagactcagcatagtctctgtaaaaataaataagatccaggtgagcgaccaactc

SEQ ID NO: 20143 - DNA, 219 bp, Homo sapiens
  MAP TO AL050349.9; EXPRESSED IN BT474, SIGNAL = 3.4; EXPRESSED IN HBL100, SIGNAL = 5.6; EXPRESSED IN HELA, SIGNAL = 4.7; EXPRESSED IN PLACENTA, SIGNAL = 4.9; EXPRESSED IN ADULT LIVER, SIGNAL = 4.7; EXPRESSED IN FETAL LIVER, SIGNAL = 4.9; EXPRESSED IN BRAIN, SIGNAL = 4.3; EXPRESSED IN LUNG, SIGNAL = 5.1; EXPRESSED IN BONE MARROW, SIGNAL = 4.8; EXPRESSED IN HEART, SIGNAL =   4; EST_HUMAN HIT: AA450138.1, EVALUE 2.00e-03; SWISSPROT HIT: P97367, EVALUE 4.20e-01; NT HIT: gi5834897, EVALUE 8.10e+00
tggtggggacacagtgatgaatgtgaccatcacatcttacttcatggacctcacagtttcaggggatgctgagcggttttccaaacctaccaggactatacaattatcaagtacacgctccttctcctgtttcccaacttcattactgccatcaccatccaaccagctgcccaagctatgaactggggaatcatcctccactcccctctctccttcgtc

SEQ ID NO: 20144 - DNA, 93 bp, Homo sapiens
  MAP TO AL096712.17; EXPRESSED IN PLACENTA, SIGNAL = 2.2; EXPRESSED IN HEART, SIGNAL = 1.9; EXPRESSED IN BT474, SIGNAL = 1.6; EXPRESSED IN LUNG, SIGNAL = 2.1; EXPRESSED IN HBL100, SIGNAL = 2.1; EXPRESSED IN HELA, SIGNAL = 3.4; EXPRESSED IN ADULT LIVER, SIGNAL = 2.3; EXPRESSED IN FETAL LIVER, SIGNAL = 2.1; EXPRESSED IN BRAIN, SIGNAL = 1.7; EXPRESSED IN BONE MARROW, SIGNAL = 1.6; NT HIT: U34606.1, EVALUE 3.00e-03; EST_HUMAN HIT: AA448942.1, EVALUE 5.00e-02
atgaatctaaaatcatcaccttggcatctatggcagcttctaaaactgtctccaaccaggaaattagtgttggacatcctgagagaggtagag

SEQ ID NO: 20145 - DNA, 194 bp, Homo sapiens
  MAP TO AC010809.2; EXPRESSED IN PLACENTA, SIGNAL = 2.5; EXPRESSED IN HBL100, SIGNAL = 2.5; EXPRESSED IN LUNG, SIGNAL = 2.8; EXPRESSED IN BRAIN, SIGNAL = 2.9; EXPRESSED IN HEART, SIGNAL = 2.2; EXPRESSED IN BT474, SIGNAL = 2.7; EXPRESSED IN ADULT LIVER, SIGNAL = 2.4; EXPRESSED IN FETAL LIVER, SIGNAL = 2.5; EXPRESSED IN BONE MARROW, SIGNAL =   3; EXPRESSED IN HELA, SIGNAL = 2.4; EST_HUMAN HIT: BE930045.1, EVALUE 4.30e-02; SWISSPROT HIT: P21817, EVALUE 4.00e-12; NT HIT: AB001025.1, EVALUE 6.00e-62
gggaggtgtgggaacctcacttatctaatgtcattctcaaccctatcttccagctcatccagacaggaaagggggaagccatccgcatcaggtccatcctgcgctccctggtccccacagaagacctggttgggatcatcagcatccccttgaaactgccctccctcaacaaaggtaaggggagtgactgcagg

SEQ ID NO: 20146 - DNA, 92 bp, Homo sapiens
  MAP TO AC009974.3; EXPRESSED IN HELA, SIGNAL =   4; EXPRESSED IN HEART, SIGNAL = 4.1; EXPRESSED IN PLACENTA, SIGNAL =   4; EXPRESSED IN HBL100, SIGNAL = 3.9; EXPRESSED IN ADULT LIVER, SIGNAL = 5.8; EXPRESSED IN BT474, SIGNAL = 3.8; EXPRESSED IN FETAL LIVER, SIGNAL = 5.3; EXPRESSED IN BONE MARROW, SIGNAL = 4.8; EXPRESSED IN LUNG, SIGNAL = 4.2; EXPRESSED IN BRAIN, SIGNAL = 4.4; NT HIT: gi11430152, EVALUE 2.00e-22; EST_HUMAN HIT: BE327467.1, EVALUE 3.00e-06; SWISSPROT HIT: P54619, EVALUE 3.00e-03
gaggggctgcccgcacaccgttggccaccagagcaaagaaggccttcttgatctgaggggccagggagaacagtcaagggtgggtcccgaga

SEQ ID NO: 20147 - DNA, 178 bp, Homo sapiens
  MAP TO AL096774.8; EXPRESSED IN BONE MARROW, SIGNAL = 2.2; EXPRESSED IN LUNG, SIGNAL = 2.7; EXPRESSED IN BRAIN, SIGNAL = 2.1; EXPRESSED IN HELA, SIGNAL = 2.3; EXPRESSED IN HBL100, SIGNAL = 2.8; EXPRESSED IN PLACENTA, SIGNAL = 2.1; EXPRESSED IN HEART, SIGNAL =   3; EXPRESSED IN ADULT LIVER, SIGNAL =   3; EXPRESSED IN BT474, SIGNAL = 2.3; EXPRESSED IN FETAL LIVER, SIGNAL = 2.3; EST_HUMAN HIT: BE393186.1, EVALUE 1.10e-01; SWISSPROT HIT: P91621, EVALUE 9.80e-01
attccagggagcatcaaggcaagagacacagggagaaggagcagccagtccccctgccgcaggactggccacatctgtcacatctggagaagtctgcccagagtggttcccctggactaagggcagatggcgttggggaagagggagctctttctccttgctccacccatcaggatgc

SEQ ID NO: 20148 - DNA, 166 bp, Homo sapiens
  MAP TO AL031684.11; EXPRESSED IN PLACENTA, SIGNAL = 0.96; EXPRESSED IN BT474, SIGNAL = 0.98; EXPRESSED IN LUNG, SIGNAL = 0.91; EXPRESSED IN HELA, SIGNAL = 0.79; EXPRESSED IN HEART, SIGNAL =   1; EXPRESSED IN BONE MARROW, SIGNAL = 0.8; EXPRESSED IN BRAIN, SIGNAL = 1.1; EXPRESSED IN ADULT LIVER, SIGNAL = 0.84; EXPRESSED IN FETAL LIVER, SIGNAL = 0.76; EXPRESSED IN HBL100, SIGNAL = 0.86; EST_HUMAN HIT: BF568955.1, EVALUE 2.00e-03; SWISSPROT HIT: P21619, EVALUE 2.90e+00
cctgcttgagggcatgtctgtgtcaatggaaaggtggtccctctccgaattccctctcctgctgcttctccttctctccctccaggcgaggagcccctgacatcactttattctgtcaggtcttttgctgtatatcctcactccttcttgccttttccacctgctg

SEQ ID NO: 20149 - DNA, 468 bp, Homo sapiens; identical to SEQ ID NO: 18910
  MAP TO AL080274.13; EXPRESSED IN PLACENTA, SIGNAL =   2; EXPRESSED IN HEART, SIGNAL = 1.3; EXPRESSED IN BT474, SIGNAL = 1.4; EXPRESSED IN FETAL LIVER, SIGNAL = 1.3; EXPRESSED IN BONE MARROW, SIGNAL = 1.1; EXPRESSED IN HELA, SIGNAL = 3.2; EXPRESSED IN HBL100, SIGNAL = 1.4; EXPRESSED IN ADULT LIVER, SIGNAL = 1.4; EXPRESSED IN BRAIN, SIGNAL = 1.7; EXPRESSED IN LUNG, SIGNAL = 1.7; EST_HUMAN HIT: AI834229.1, EVALUE 1.00e-125; SWISSPROT HIT: Q9JWD6, EVALUE 1.30e+00; NT HIT: gi11421836, EVALUE 0.00e+00

SEQ ID NO: 20150 - DNA, 519 bp, Homo sapiens
  MAP TO AC010083.2; EXPRESSED IN BT474, SIGNAL = 1.2; EXPRESSED IN BRAIN, SIGNAL = 1.3; EXPRESSED IN HELA, SIGNAL = 0.96; EXPRESSED IN HEART, SIGNAL = 0.96; EXPRESSED IN PLACENTA, SIGNAL = 0.92; EXPRESSED IN ADULT LIVER, SIGNAL = 1.3; EXPRESSED IN FETAL LIVER, SIGNAL = 1.1; EXPRESSED IN LUNG, SIGNAL = 0.94; EXPRESSED IN BONE MARROW, SIGNAL =   1; EXPRESSED IN HBL100, SIGNAL = 1.1; EST_HUMAN HIT: BE925247.1, EVALUE 3.00e-98; NT HIT: Y16723.1, EVALUE 0.00e+00; SWISSPROT HIT: Q12934, EVALUE 1.00e-82
atcttaccagagctctgcaggatataacagcagcaaaaccaagacaaaaagccctccccaagaatgttccaaggagaaaagagattataacaaaagacaaaaccaacggagctctggaagatgcaccattaaaaggtttggaagacacaaagctggtacaggtggtacttaaagaggaaagtgaatctaagtttgaatcagaaagtaaagaagtaagtcccctgacacaagaaggggctccagaggatgtgccagatggagggcagataagcaaaggctttgggaaactatacaggaaggtcaaggagaaagtgagaagccccaaagagcctgagacccccactgagctctacaccaaagagcggcacgtgctggtcacaggggatgccaattacgtggaccctagattctatgtctcctccatcacagctaaaggtggggtggctgtttctgttgcggaagactctgtgctttatgacggccaggtggagccctctcctgagtcacccaagccccctt

SEQ ID NO: 20151 - DNA, 111 bp, Homo sapiens
  MAP TO AL080312.8; EXPRESSED IN LUNG, SIGNAL =   8; EXPRESSED IN PLACENTA, SIGNAL = 7.5; EXPRESSED IN BT474, SIGNAL = 7.1; EXPRESSED IN BRAIN, SIGNAL =   6; EXPRESSED IN BONE MARROW, SIGNAL = 6.7; EXPRESSED IN HEART, SIGNAL = 6.7; EXPRESSED IN HELA, SIGNAL = 7.4; EXPRESSED IN HBL100, SIGNAL = 7.5; EXPRESSED IN ADULT LIVER, SIGNAL = 7.9; EXPRESSED IN FETAL LIVER, SIGNAL = 7.3; SWISSPROT HIT: P07183, EVALUE 5.30e+00; NT HIT: Y12500.1, EVALUE 3.00e-03
aaaggttgacgaggattccacagggtggcagcagaaccaggaccaggaccaggggagcactaccaaggaaaacctggacacagccacctgggggcaggagccacacctact

SEQ ID NO: 20152 - DNA, 237 bp, Homo sapiens
  MAP TO AL035452.6; EXPRESSED IN FETAL LIVER, SIGNAL = 0.99; EXPRESSED IN ADULT LIVER, SIGNAL =   1; EXPRESSED IN BONE MARROW, SIGNAL = 0.97; EXPRESSED IN HEART, SIGNAL = 0.96; NT HIT: AF003528.1, EVALUE 2.20e+00; SWISSPROT HIT: Q10369, EVALUE 7.30e+00; EST_HUMAN HIT: W31469.1, EVALUE 2.10e-01
tctttgacttctgcttcagacaagatggagtagacatacttttccttacaccttctaataagtacagataaaaaccataaacactatattcaaaacaaaatgacaacaatctgaaagtaggagagaagaaggcagatgtacttagagaccttggaaccagaggaatggcatagtgatgcattccctggtattctctttgccccatatatccatggtagtattggagaaattggaaac

SEQ ID NO: 20153 - DNA, 246 bp, Homo sapiens
  MAP TO AC009892.2; EXPRESSED IN BT474, SIGNAL =   2; EXPRESSED IN FETAL LIVER, SIGNAL = 1.7; EXPRESSED IN BRAIN, SIGNAL = 5.4; EXPRESSED IN HELA, SIGNAL = 2.1; EXPRESSED IN PLACENTA, SIGNAL = 2.3; EXPRESSED IN ADULT LIVER, SIGNAL = 1.6; EXPRESSED IN LUNG, SIGNAL = 2.1; EXPRESSED IN BONE MARROW, SIGNAL = 2.8; EXPRESSED IN HEART, SIGNAL = 1.7; EXPRESSED IN HBL100, SIGNAL = 2.1; EST_HUMAN HIT: AW503927.1, EVALUE 3.00e-18; NT HIT: AF025531.1, EVALUE 0.00e+00; SWISSPROT HIT: Q64281, EVALUE 1.00e-10
gctctgtgatcatccagggaagtcctgtgaccctcaggtgtcaggggagccttcaggctgaggagtaccatctatatagggaaaacaaatcagcatcctgggttagacggatacaagagcctgggaagaatggccagttccccatcccatccatcacctgggaacacgcagggcggtatcactgtcagtactacagccacaatcactcatcagagtacagtgaccccctggagctggtggtgacag

SEQ ID NO: 20154 - DNA, 145 bp, Homo sapiens
  MAP TO AL132780.1; EXPRESSED IN BONE MARROW, SIGNAL =   5; EXPRESSED IN HELA, SIGNAL = 5.2; EXPRESSED IN FETAL LIVER, SIGNAL = 5.2; EXPRESSED IN ADULT LIVER, SIGNAL =   7; EXPRESSED IN BT474, SIGNAL = 5.9; EXPRESSED IN BRAIN, SIGNAL =   5; EXPRESSED IN LUNG, SIGNAL = 5.2; EXPRESSED IN PLACENTA, SIGNAL = 5.8; EXPRESSED IN HEART, SIGNAL = 4.2; EXPRESSED IN HBL100, SIGNAL = 6.2; EST_HUMAN HIT: BF375689.1, EVALUE 3.00e-76; NT HIT: gi8923395, EVALUE 2.00e-57
ccgcacttgacttccaggtactgggcattgatgcggtctagctcggattgagtcttcagccggtgttcttgaagaagcctctgcagcaaagtgaggcagcggagaagcacctgagcccaagatggaggaagaagagggcataaat

SEQ ID NO: 20155 - DNA, 95 bp, Homo sapiens
  MAP TO AC010737.2; EXPRESSED IN BT474, SIGNAL = 8.4; EXPRESSED IN BRAIN, SIGNAL = 7.8; EXPRESSED IN HELA, SIGNAL = 8.7; EXPRESSED IN HEART, SIGNAL =   7; EXPRESSED IN PLACENTA, SIGNAL = 9.2; EXPRESSED IN ADULT LIVER, SIGNAL =  11; EXPRESSED IN FETAL LIVER, SIGNAL = 8.1; EXPRESSED IN LUNG, SIGNAL = 9.3; EXPRESSED IN BONE MARROW, SIGNAL = 8.9; EXPRESSED IN HBL100, SIGNAL = 8.4; NT HIT: AL163210.2, EVALUE 4.30e-02; EST_HUMAN HIT: AL138153.1, EVALUE 5.20e-02
ctttttccctttcatcataagtggaagctttctgaagttctaaccagaagcacatgttcatgccatgcatcctatacagcttgcagaagagtgag

SEQ ID NO: 20156 - DNA, 261 bp, Homo sapiens
  MAP TO AL121757.7; EXPRESSED IN BT474, SIGNAL = 1.2; EXPRESSED IN BONE MARROW, SIGNAL = 1.2; EXPRESSED IN HELA, SIGNAL = 1.1; EXPRESSED IN FETAL LIVER, SIGNAL = 1.1; EXPRESSED IN ADULT LIVER, SIGNAL = 1.8; EXPRESSED IN BRAIN, SIGNAL = 1.4; EXPRESSED IN LUNG, SIGNAL = 1.3; EXPRESSED IN PLACENTA, SIGNAL = 1.5; EXPRESSED IN HEART, SIGNAL = 1.2; EXPRESSED IN HBL100, SIGNAL = 1.4; NT HIT: AL163208.2, EVALUE 3.40e-02; SWISSPROT HIT: Q64435, EVALUE 2.40e+00
ccattgccaaacagctgcacatgcagctggtctgggagtcagagatgctgaggggtgacccagcaggagctgcagcagccacaaccaggaggctgagcttatggacaggtaagccagcaggtgagtgatgccatgcacaagcagcaacagcacactgatcccctaagagtactgggaatatggctgccatttcacttccatcttccaaatctctcagcacatctcctgtggccatgctcacttacacatgtgcaaggaagg

SEQ ID NO: 20157 - DNA, 211 bp, Homo sapiens
  MAP TO AL078600.14; EXPRESSED IN BONE MARROW, SIGNAL = 1.9; EXPRESSED IN LUNG, SIGNAL =   3; EXPRESSED IN BRAIN, SIGNAL = 1.7; EXPRESSED IN HBL100, SIGNAL = 1.8; EXPRESSED IN HELA, SIGNAL = 2.1; EXPRESSED IN PLACENTA, SIGNAL =   2; EXPRESSED IN HEART, SIGNAL =   2; EXPRESSED IN BT474, SIGNAL = 1.7; EXPRESSED IN ADULT LIVER, SIGNAL = 1.7; EXPRESSED IN FETAL LIVER, SIGNAL = 4.2; EST_HUMAN HIT: AA887330.1, EVALUE 7.40e-01; NT HIT: AL161494.2, EVALUE 2.70e-02; SWISSPROT HIT: O08811, EVALUE 3.60e+00
aaaagcatcctgattcattccaaaaggagaaagatccttccgcagatctccagagaggtcaataccttcctcaagtatctgaggcaaaatcccaactgtcacttaaaaatgaagatgcgctggtaaagctggctaggtctcagctgaaggatgtgggctgtcccaagtgcctggtaagagctcctatcaataaaggatattttattctaag

SEQ ID NO: 20158 - DNA, 93 bp, Homo sapiens
  MAP TO AL109615.9; EXPRESSED IN HEART, SIGNAL = 5.1; EXPRESSED IN BT474, SIGNAL =   4; EXPRESSED IN LUNG, SIGNAL = 5.5; EXPRESSED IN PLACENTA, SIGNAL = 5.5; EXPRESSED IN HELA, SIGNAL = 5.2; EXPRESSED IN HBL100, SIGNAL = 4.8; EXPRESSED IN ADULT LIVER, SIGNAL = 5.8; EXPRESSED IN FETAL LIVER, SIGNAL =   5; EXPRESSED IN BRAIN, SIGNAL = 4.3; EXPRESSED IN BONE MARROW, SIGNAL = 4.6; EST_HUMAN HIT: BE973335.1, EVALUE 1.10e+00; SWISSPROT HIT: O54828, EVALUE 7.00e+00; NT HIT: Z94043.1, EVALUE 7.70e-01
tcctttgtcccactctgcctgttggggcccaagcaccaggagagagcgagggatcctggggatgaagggggcacagaagtggtgttgcatcca

SEQ ID NO: 20159 - DNA, 101 bp, Homo sapiens
  MAP TO AL035633.15; EXPRESSED IN PLACENTA, SIGNAL = 1.8; EXPRESSED IN HBL100, SIGNAL = 1.6; EXPRESSED IN BT474, SIGNAL = 1.8; EXPRESSED IN FETAL LIVER, SIGNAL = 1.6; EXPRESSED IN LUNG, SIGNAL = 1.5; EXPRESSED IN HEART, SIGNAL = 1.6; EXPRESSED IN HELA, SIGNAL = 1.6; EXPRESSED IN ADULT LIVER, SIGNAL = 1.9; EXPRESSED IN BRAIN, SIGNAL = 1.7; EXPRESSED IN BONE MARROW, SIGNAL = 1.7; NT HIT: AF199333.1, EVALUE 6.00e-23; EST_HUMAN HIT: BE244307.1, EVALUE 8.70e-01; SWISSPROT HIT: P49657, EVALUE 7.00e+00
cattaggggaaaacatcctgctcgctcaaggtcgagtgagcactctagtatcagaacactgtgttctatgcaccaccttgtccctggagggtcggcgccac

SEQ ID NO: 20160 - DNA, 531 bp, Homo sapiens
  MAP TO AL034428.1; EXPRESSED IN BT474, SIGNAL = 1.8; EXPRESSED IN LUNG, SIGNAL = 2.1; EXPRESSED IN BRAIN, SIGNAL = 1.5; EXPRESSED IN HBL100, SIGNAL = 1.9; EXPRESSED IN HELA, SIGNAL = 1.8; EXPRESSED IN HEART, SIGNAL = 1.9; EXPRESSED IN ADULT LIVER, SIGNAL =   2; EXPRESSED IN FETAL LIVER, SIGNAL = 2.1; EXPRESSED IN BONE MARROW, SIGNAL = 2.1; EXPRESSED IN PLACENTA, SIGNAL =   2; EST_HUMAN HIT: N48126.1, EVALUE 2.00e+00; NT HIT: AJ248283.1, EVALUE 5.20e+00
ctgttttctaccatcatatttttagggcctagaagaatggcacacagcgtacctgctcattcaatatttgttgaataagcatttgttgaaaaaaatgttggagcaactgtgggttcatccactaccattttctatgcatggccttctctgatctcaaatagagtcaaataaattctacccaatccctagtagtaaaataaaagaagaaagaggcatatttttaaaagaactataaatttagtctttgttctgcttttagggataaaaattataacatcagaaactgtcatcacctcctttctctttcccttctctttcatcttttcaggaggctcatcaatcagcttcctaaccagctatttgctatctggagacctggggggcagcacctttaccacctgctggctgatgcctgtggcagtgccatcctaaagggctgcctatctcttttatgtctcacctgctttctcttctacctgggcagccaatttaccaaaatagtaggacttcattatgttattttgaaggttt

SEQ ID NO: 20161 - DNA, 289 bp, Homo sapiens
  MAP TO AL035045.2; EXPRESSED IN HELA, SIGNAL =   2; EXPRESSED IN BRAIN, SIGNAL =   2; EXPRESSED IN HBL100, SIGNAL = 2.7; EXPRESSED IN PLACENTA, SIGNAL = 2.6; EXPRESSED IN ADULT LIVER, SIGNAL = 3.5; EXPRESSED IN HEART, SIGNAL = 2.5; EXPRESSED IN BT474, SIGNAL = 2.5; EXPRESSED IN FETAL LIVER, SIGNAL = 2.5; EXPRESSED IN BONE MARROW, SIGNAL = 2.4; EXPRESSED IN LUNG, SIGNAL = 2.6; SWISSPROT HIT: O43426, EVALUE 1.30e+00; EST_HUMAN HIT: F05940.1, EVALUE 3.00e-04; NT HIT: L11569.1, EVALUE 7.00e-01
tgaaaaatgacaatagttaatacttcctggatgctgtggtaggttaaagatggccacacattctttgctactcttcttgttgggatgtggggtctgtgtcccttcttgctgaatttggagaggctctgtgggcacttggccagtagaaaatggtggaagtgctgccatactagtttctgggccaggccttaggtgtctgtgtctggcagcttccacttccactgctgggactcctgctctgggagctttgacctttgtaagaagtttgactaccctgggctggtcatcc

SEQ ID NO: 20162 - DNA, 129 bp, Homo sapiens
  MAP TO AC009966.3; EXPRESSED IN HBL100, SIGNAL = 1.4; EXPRESSED IN BT474, SIGNAL = 1.2; EXPRESSED IN BRAIN, SIGNAL = 1.6; EXPRESSED IN HELA, SIGNAL = 1.3; EXPRESSED IN HEART, SIGNAL = 1.2; EXPRESSED IN PLACENTA, SIGNAL = 1.3; EXPRESSED IN ADULT LIVER, SIGNAL = 1.4; EXPRESSED IN FETAL LIVER, SIGNAL = 1.5; EXPRESSED IN LUNG, SIGNAL = 1.3; EXPRESSED IN BONE MARROW, SIGNAL = 1.3; NT HIT: gi4507332, EVALUE 6.00e-67; EST_HUMAN HIT: AW161039.1, EVALUE 7.00e-67; SWISSPROT HIT: O14994, EVALUE 5.00e-18
cagtctgtatgggcatcatcgatcaccaacaggatcctgggtctttgaacaatgggcgtggagggacctggaggctccatcagtcctgaggtggcctgaggggcctgcttcatggcactggagagggag

SEQ ID NO: 20163 - DNA, 113 bp, Homo sapiens
  MAP TO AL109748.2; EXPRESSED IN PLACENTA, SIGNAL = 1.4; EXPRESSED IN HEART, SIGNAL = 2.9; EXPRESSED IN FETAL LIVER, SIGNAL = 2.3; EXPRESSED IN BT474, SIGNAL = 1.4; EXPRESSED IN BONE MARROW, SIGNAL = 2.2; EXPRESSED IN HELA, SIGNAL = 2.7; EXPRESSED IN HBL100, SIGNAL = 3.5; EXPRESSED IN ADULT LIVER, SIGNAL = 1.8; EXPRESSED IN BRAIN, SIGNAL = 1.2; EXPRESSED IN LUNG, SIGNAL = 3.9; EST_HUMAN HIT: AU129695.1, EVALUE 4.00e-38; SWISSPROT HIT: Q08093, EVALUE 1.00e-11; NT HIT: AL163204.2, EVALUE 2.00e-57
gcgagaagagacacctgcacctgcctcacgttcccactctcaaacaggtcgttggtctcaaataggtccacggggttcatgctgtagctgaccatggccttgaggaggttgga

SEQ ID NO: 20164 - DNA, 462 bp, Homo sapiens
  MAP TO AL035703.19; EXPRESSED IN PLACENTA, SIGNAL = 0.95; EXPRESSED IN HBL100, SIGNAL = 1.2; EXPRESSED IN HELA, SIGNAL = 1.3; EXPRESSED IN BT474, SIGNAL = 0.97; EXPRESSED IN ADULT LIVER, SIGNAL = 1.4; EXPRESSED IN FETAL LIVER, SIGNAL = 1.2; EXPRESSED IN LUNG, SIGNAL = 1.1; EXPRESSED IN BONE MARROW, SIGNAL = 1.3; EXPRESSED IN BRAIN, SIGNAL = 0.99; EXPRESSED IN HEART, SIGNAL = 1.1; SWISSPROT HIT: O09127, EVALUE 9.00e-56; EST_HUMAN HIT: AW845008.1, EVALUE 2.00e-28; NT HIT: gi11425791, EVALUE 1.00e-103
ctgctgactgtggcggtggccctgagactctcagggctgcggatgagcgcatcgaggacactgacaatctgggagaagcgaggccgctgcgcccggtccttgtgccaacagtcgagcatgagctggtgcagggcgtgggggcagcccatgggtgcgggcaggcggtacccctcctccacagagctgatgacctgcaggggatcagcgctgggctcagccgtccctccctgcaccctgaggctccaccgcccgcggacctgccagggcttggcactcacatcccggttggtcatgttccagtagggccgctccccataggccagcacctcccacatgaccacgccgaagctccacacgtcgctggccgaggagaaggtgcggaaggcgatggcctctggggccgtccagcggatggggatcttcccgccctgcgacggacacacaagagttgaggggctgccc

SEQ ID NO: 20165 - DNA, 195 bp, Homo sapiens
  MAP TO AC009974.3; EXPRESSED IN FETAL LIVER, SIGNAL = 1.1; EXPRESSED IN BRAIN, SIGNAL = 1.2; EXPRESSED IN HBL100, SIGNAL = 0.99; EXPRESSED IN PLACENTA, SIGNAL = 1.1; EXPRESSED IN ADULT LIVER, SIGNAL = 0.96; EXPRESSED IN BT474, SIGNAL = 1.1; EXPRESSED IN BONE MARROW, SIGNAL =   1; EXPRESSED IN HEART, SIGNAL = 0.98; NT HIT: AB033104.1, EVALUE 1.00e-106; EST_HUMAN HIT: AU125582.1, EVALUE 1.00e-106; SWISSPROT HIT: P28683, EVALUE 9.60e-01
gtctgctgctaccatcttccgttgatgcaagtggagctgcccatcagccttctcacacgcctggccctcatggatcccacctctctcaaccagtttgtgaacacagtgtctgcctcccctagaaccatcgtctcgtttctctcagttgccctcctgagtgaccagccactgttgacctccgaccttctctctctg

SEQ ID NO: 20166 - DNA, 259 bp, Homo sapiens; identical to SEQ ID NO: 18646
  MAP TO AL096801.16; EXPRESSED IN PLACENTA, SIGNAL = 2.5; EXPRESSED IN BT474, SIGNAL = 1.9; EXPRESSED IN BONE MARROW, SIGNAL = 2.1; EXPRESSED IN BRAIN, SIGNAL = 2.4; EXPRESSED IN HBL100, SIGNAL = 2.2; EXPRESSED IN HEART, SIGNAL = 2.1; EXPRESSED IN ADULT LIVER, SIGNAL = 2.5; EXPRESSED IN FETAL LIVER, SIGNAL = 2.4; EXPRESSED IN LUNG, SIGNAL = 2.6; EXPRESSED IN HELA, SIGNAL = 2.8; EST_HUMAN HIT: AA155873.1, EVALUE 0.00e+00; SWISSPROT HIT: P46590, EVALUE 2.00e-01; NT HIT: gi11419183, EVALUE 0.00e+00

SEQ ID NO: 20167 - DNA, 482 bp, Homo sapiens
  MAP TO AC010826.2; EXPRESSED IN BRAIN, SIGNAL = 2.2; EXPRESSED IN HEART, SIGNAL = 1.5; EXPRESSED IN HELA, SIGNAL = 1.4; EXPRESSED IN HBL100, SIGNAL = 1.4; EXPRESSED IN PLACENTA, SIGNAL = 1.8; EXPRESSED IN ADULT LIVER, SIGNAL = 1.5; EXPRESSED IN FETAL LIVER, SIGNAL = 2.6; EXPRESSED IN BT474, SIGNAL = 1.3; EXPRESSED IN LUNG, SIGNAL = 1.2; EXPRESSED IN BONE MARROW, SIGNAL = 1.8; EST_HUMAN HIT: AV711714.1, EVALUE 3.00e-64; NT HIT: AF157623.1, EVALUE 4.00e-03; SWISSPROT HIT: P39731, EVALUE 2.60e-01
ttcaggactctgcggatccctttcttcctcttccaccttgacctcagttaaggatccacctgcatccctgaaatctgccacattttgccagtcaaaatttgcatcatttcggaatccaatcttttcatctatctcttcagtgagagagtcatccaaatcagaggagggaaggggaaatcctgaaccaaccagcttaatgttggccttcatcctctttctcttcataagtgctcgccagtcaaggtaccttcttttcacctctgtccctgtcctctgttctccttctcctacagcattcacacactgtgcaatctcttcccaagccattcgcttcatcacattaattgttgtattgagctgcttggaaaaaatgacttctttccttttcgtaatttctttcaaaagggtctgagtttcttgaacactaaaattgcttttcctttttcttttcaactgcttcattttcaatttcaatgcagttt

SEQ ID NO: 20168 - DNA, 217 bp, Homo sapiens
  MAP TO AC007614.2; EXPRESSED IN HELA, SIGNAL = 2.3; EXPRESSED IN HEART, SIGNAL = 1.9; EXPRESSED IN FETAL LIVER, SIGNAL = 2.5; EXPRESSED IN ADULT LIVER, SIGNAL = 2.3; EXPRESSED IN LUNG, SIGNAL = 2.2; EXPRESSED IN BRAIN, SIGNAL = 2.3; EXPRESSED IN PLACENTA, SIGNAL =   2; EXPRESSED IN HBL100, SIGNAL = 2.5; EXPRESSED IN BT474, SIGNAL = 2.2; EXPRESSED IN BONE MARROW, SIGNAL = 2.7; SWISSPROT HIT: P41555, EVALUE 6.90e-01
tttgatgcaggaggttattgaggcctacatgctggtgaacctgccaagtaagtccccacttgggaggcatcgagagcccagagcaggaggaagaaaatgcaccagacacccagatgccatgtgaggatgagctgtgagttcgcacccacagctcaattagtattgctaacatgccctctccctcagcaccttcagaataagtaaataatccatctac

SEQ ID NO: 20169 - DNA, 484 bp, Homo sapiens
  MAP TO AL096814.11; EXPRESSED IN BONE MARROW, SIGNAL =   1; EXPRESSED IN HBL100, SIGNAL = 0.96; EXPRESSED IN HEART, SIGNAL = 1.5; EXPRESSED IN BT474, SIGNAL = 1.2; EST_HUMAN HIT: BE062715.1, EVALUE 0.00e+00; SWISSPROT HIT: P22814, EVALUE 8.70e-02; NT HIT: AJ277275.1, EVALUE 0.00e+00
acagcatctgtggggcctgcagtggctgtcctccctgcactggcacctgagccagaggctgctggtagtcataatacaggtgcccttgggtagggtgctgcccgacctgaagagctggtttggacagcccaccagtgaaaccagggtgaggctgctggggcacctgctggtagcgggaagggatagccggtgctgggggctccatgggcttctgagacagcagctggcggagagcactgtcaggggctccatccatcactgctgactgagtgtgcagcacctgggccatattgttgacctgaattcgcaggttttggttggcaaacacctgggtgaaagagtccagcttgtgtaagacaccgctggtaagcttctgggtccggatctcgctggcctgggagtaggtgtattggtagccatcagtgggctcagcctgggctggtgccccccacatcatgtttgagttggccaggtttccacgtag

SEQ ID NO: 20170 - DNA, 97 bp, Homo sapiens
  MAP TO AC009453.1; EXPRESSED IN PLACENTA, SIGNAL =  16; EXPRESSED IN HEART, SIGNAL = 0.85; EST_HUMAN HIT: BF701038.1, EVALUE 1.20e+00
atctccaccagtttcaggatcagtatgtagtaggaacttgatcattctgatgataatgatgatgatgatgctgttaaagataatggtaataaaacac

SEQ ID NO: 20171 - DNA, 343 bp, Homo sapiens
  MAP TO AL049542.5; EXPRESSED IN FETAL LIVER, SIGNAL = 5.9; EXPRESSED IN HEART, SIGNAL = 5.5; EXPRESSED IN PLACENTA, SIGNAL = 5.5; EXPRESSED IN ADULT LIVER, SIGNAL = 5.9; EXPRESSED IN BT474, SIGNAL = 4.7; EXPRESSED IN BRAIN, SIGNAL = 5.5; EXPRESSED IN LUNG, SIGNAL =   6; EXPRESSED IN BONE MARROW, SIGNAL = 5.6; EXPRESSED IN HELA, SIGNAL = 6.1; EXPRESSED IN HBL100, SIGNAL = 4.8; EST_HUMAN HIT: AI933048.1, EVALUE 2.20e-01; SWISSPROT HIT: P17547, EVALUE 2.20e+00; NT HIT: K02380.1, EVALUE 0.00e+00
tgtaagctcatcgccctcgtacaggaattggtatccaataccaccatattcaggcacattagggaataactcatcacttaccgaagaacaaatcacaccaatgcagcgatcaacgccttctcgttcttcagtgctgaaaaaatcctcttcggtaagaacatgagtacattgctcatcagcataggtcggaaatacatgctcaatgcaatccgggtgttttaaaccaagctgatcggcaagctcgaaagcacgacggtattgttcagatcctggcttgccaacagtgatttgctcaattttgtagattgaagtcgctttgttgatagtttgctttactgttact

SEQ ID NO: 20172 - DNA, 84 bp, Homo sapiens
  MAP TO AC010961.2; EXPRESSED IN FETAL LIVER, SIGNAL = 1.3; EXPRESSED IN LUNG, SIGNAL = 1.5; EXPRESSED IN HELA, SIGNAL = 1.5; EXPRESSED IN PLACENTA, SIGNAL = 1.5; EXPRESSED IN BT474, SIGNAL = 1.3; EXPRESSED IN BRAIN, SIGNAL = 1.7; EXPRESSED IN BONE MARROW, SIGNAL = 1.5; EXPRESSED IN HEART, SIGNAL =   2; EXPRESSED IN HBL100, SIGNAL = 1.6; EXPRESSED IN ADULT LIVER, SIGNAL = 2.1; EST_HUMAN HIT: AA725547.1, EVALUE 6.90e-01; NT HIT: AJ269505.1, EVALUE 1.70e-01
cttacagtattgcccataaaaaggaagcttctgatcatcctatgggagtgtactttgtcataactaaagacaaaaatgtgtcca

SEQ ID NO: 20173 - DNA, 258 bp, Homo sapiens
  MAP TO AL049812.4; EXPRESSED IN BT474, SIGNAL = 1.2; EXPRESSED IN BRAIN, SIGNAL = 1.5; EXPRESSED IN HBL100, SIGNAL = 1.1; EXPRESSED IN HELA, SIGNAL = 0.95; EXPRESSED IN PLACENTA, SIGNAL = 1.4; EXPRESSED IN FETAL LIVER, SIGNAL = 1.2; EXPRESSED IN LUNG, SIGNAL = 1.2; EXPRESSED IN BONE MARROW, SIGNAL = 1.3; EXPRESSED IN HEART, SIGNAL = 1.2; EXPRESSED IN ADULT LIVER, SIGNAL = 1.5; NT HIT: AB006621.1, EVALUE 0.00e+00; SWISSPROT HIT: Q03211, EVALUE 2.40e+00
tgaatgctggacggtcaaggcccaggctggggaaggggtacagaatggttgtgggcgaagccccatgcaggttaggtgtgaggatggggggcctctcttgtggcctagggaacatcgtaaggtcacactggtccagactgcaaatgtctggtgccagaggcccctgaaggaggttgcagggggcagcagagcagtgacccccaagagcctcaatcttttccatgacgtagaggagcagaacacacatctcctccactc

SEQ ID NO: 20174 - DNA, 439 bp, Homo sapiens
  MAP TO AL035419.9; EXPRESSED IN BONE MARROW, SIGNAL = 1.3; EXPRESSED IN LUNG, SIGNAL = 1.2; EXPRESSED IN HELA, SIGNAL =   1; EXPRESSED IN BRAIN, SIGNAL = 1.4; EXPRESSED IN HBL100, SIGNAL = 1.1; EXPRESSED IN PLACENTA, SIGNAL = 1.5; EXPRESSED IN ADULT LIVER, SIGNAL = 1.6; EXPRESSED IN HEART, SIGNAL = 1.5; EXPRESSED IN BT474, SIGNAL = 1.5; EXPRESSED IN FETAL LIVER, SIGNAL = 1.2
ggcatcatcaccatcatcagtggcaacagcagtagcatcaccatcattatcatcaccatcagcatcatcgttattatcaccatcatcgccatcaccatcattaccattattaccctcaccatcatcatcattaccatcatcatcatcaccatcatcaccgtcagcagcatcaccatcatcataaccatcaaaaccatcagcaggatcaccaccagcagcagcagcagcatcaccatcgtaatcaccaccatcatcaccatcagcagcatcgccatcaacaccatcagcagcatcaccatcatcatcaccaccatcaccatcggcagcatcaccatcattatccccaccatcatcatcagcagcagcatcaccatcaccaccatcagcagcatcaccatcaccatcagcatcagtatctcaccatcattgcctcacagga

SEQ ID NO: 20175 - DNA, 248 bp, Homo sapiens
  MAP TO AL117374.5; EXPRESSED IN FETAL LIVER, SIGNAL = 0.99; EXPRESSED IN BONE MARROW, SIGNAL = 0.98; EXPRESSED IN BRAIN, SIGNAL = 0.98; EXPRESSED IN HELA, SIGNAL = 1.1; EXPRESSED IN HEART, SIGNAL = 0.95; EXPRESSED IN PLACENTA, SIGNAL = 1.1; EXPRESSED IN HBL100, SIGNAL =   1; EXPRESSED IN BT474, SIGNAL = 0.9; EXPRESSED IN ADULT LIVER, SIGNAL = 1.1; EST_HUMAN HIT: AI792127.1, EVALUE 3.50e+00; NT HIT: M21572.1, EVALUE 1.30e-01; SWISSPROT HIT: P45442, EVALUE 1.20e+00
caccgacagcattgaagttgccaatttctggtcaagagatgagtgacaagataccttctggaataaatctcagagccagttctgctccctttctgagcttccaaagaatgacatgcagccccatcagcatttccatcccagcactgcccgtcaccctaagaaacacttatttctctgttgaagcgaaagacccttccctgatacaggccagaattttccgaagtaaggtctttgtttttaatgaaaca

SEQ ID NO: 20176 - DNA, 217 bp, Homo sapiens
  MAP TO AL109614.15; EXPRESSED IN LUNG, SIGNAL = 1.4; EXPRESSED IN HELA, SIGNAL = 1.6; EXPRESSED IN PLACENTA, SIGNAL = 1.5; EXPRESSED IN HEART, SIGNAL = 1.5; EXPRESSED IN FETAL LIVER, SIGNAL = 1.6; EXPRESSED IN BT474, SIGNAL = 1.4; EXPRESSED IN BONE MARROW, SIGNAL = 1.3; EXPRESSED IN BRAIN, SIGNAL = 1.2; EXPRESSED IN HBL100, SIGNAL = 1.5; EXPRESSED IN ADULT LIVER, SIGNAL = 1.4; NT HIT: X62135.1, EVALUE 1.10e-01; SWISSPROT HIT: P54876, EVALUE 3.50e+00
agtcctggacctcgccagacataggcactggatgcagaaagacaagcccgctaaggatgttgatgaaggcccacaagggggtcctaggggagcaggagaaggtaccaaggagactgatgaaggtcctcaagggggtcccaggggaacaggagaaggtgctctgggaagcaagggaggagggcgtttccagcaggtggacagggtcacccatgggctg

SEQ ID NO: 20177 - DNA, 344 bp, Homo sapiens
  MAP TO AC009802.8; EXPRESSED IN BONE MARROW, SIGNAL = 2.4; EXPRESSED IN HELA, SIGNAL =   3; EXPRESSED IN FETAL LIVER, SIGNAL =   3; EXPRESSED IN LUNG, SIGNAL =   3; EXPRESSED IN BRAIN, SIGNAL = 2.6; EXPRESSED IN PLACENTA, SIGNAL = 2.4; EXPRESSED IN HEART, SIGNAL = 2.1; EXPRESSED IN HBL100, SIGNAL = 2.8; EXPRESSED IN BT474, SIGNAL = 2.2; EXPRESSED IN ADULT LIVER, SIGNAL = 2.4; EST_HUMAN HIT: BF208502.1, EVALUE 1.30e+00; SWISSPROT HIT: P25794, EVALUE 1.00e+00
tgcggggctactatagcctctgcgaagggcatccagaagtgtttttcaatggcatgggtcttgttacagtgtaccaaacctgccagatctgtcggagcccaagtagtacccagctgaggaccaatgatccccctcggaaccgaaaagcttctgtaaacaacacattagcacactctaagggtgccctgcggggtccactggcacctcccagacaccccgtggcatggctggcaagtgttctgcggtaccctcagactcttgcagatgaaccaccagcacctctactgtgccctgaaggacttttaggctttttgtttttccaaaaaggcattgtgcttaattga

SEQ ID NO: 20178 - DNA, 208 bp, Homo sapiens
  MAP TO AL121959.4; EXPRESSED IN BT474, SIGNAL = 1.1; EXPRESSED IN LUNG, SIGNAL = 1.1; EXPRESSED IN BRAIN, SIGNAL = 0.98; EXPRESSED IN HELA, SIGNAL = 1.1; EXPRESSED IN PLACENTA, SIGNAL =   2; EXPRESSED IN HBL100, SIGNAL =   1; EXPRESSED IN HEART, SIGNAL = 1.1; NT HIT: AL163246.2, EVALUE 9.00e-46; EST_HUMAN HIT: BE064410.1, EVALUE 3.00e-67; SWISSPROT HIT: P25059, EVALUE 2.00e-05
tgtggatatgggtctgcctattctgcacgcaatgcttctgccaagactaccatccacggactcacggaatgccttttccactgtcttggtattccacacagcattgcctctgaccgaggcactcactttatggataaagaagtgcgacaatgggctcatgctcacagaattcactggtctcaccatgtaccccatcatcctgaagcag

SEQ ID NO: 20179 - DNA, 282 bp, Homo sapiens
  MAP TO AP000075.1; EXPRESSED IN HEART, SIGNAL = 1.1; EXPRESSED IN BT474, SIGNAL = 1.1; EXPRESSED IN BONE MARROW, SIGNAL =   1; EXPRESSED IN BRAIN, SIGNAL = 1.2; EXPRESSED IN PLACENTA, SIGNAL = 0.91; EXPRESSED IN HBL100, SIGNAL = 1.2; EST_HUMAN HIT: BE964655.2, EVALUE 4.00e+00; NT HIT: gi6680541, EVALUE 3.70e-02; SWISSPROT HIT: P52519, EVALUE 8.00e+00
ccaagataattcctgttcccttgatgatttgccattttttaacagatctccagatcagcctgaagatcaacaggatgatgagtccactgaagaaggtcacaaaggaagagagaatgaatgctgcttggatctcagttgtgcaggacatttttggcaagtcttcccaagtttcatttcgtagcttagtctgaaacatgttcgagacatcagtagacggaattgccaggtcatttgatgacgccgtggtcgcctggtaacaattccaggaatcagagttcactg

SEQ ID NO: 20180 - DNA, 368 bp, Homo sapiens
  MAP TO AL049553.15; EXPRESSED IN PLACENTA, SIGNAL = 4.2; EXPRESSED IN HEART, SIGNAL = 3.7; EXPRESSED IN ADULT LIVER, SIGNAL =   4; EXPRESSED IN BT474, SIGNAL = 4.2; EXPRESSED IN LUNG, SIGNAL = 4.6; EXPRESSED IN BRAIN, SIGNAL = 3.5; EXPRESSED IN HELA, SIGNAL = 4.1; EXPRESSED IN HBL100, SIGNAL = 4.1; EXPRESSED IN FETAL LIVER, SIGNAL = 3.9; EXPRESSED IN BONE MARROW, SIGNAL = 5.1; SWISSPROT HIT: Q62718, EVALUE 2.00e-04; EST_HUMAN HIT: AI935159.1, EVALUE 0.00e+00
ctgtctcagaggagatgttgacctcgacgctgaggtcgggcacgggtgcccctgggaaagaagccatgcacaggtaggtgccatagtcactgaagtgcaggtcaatgagctctaggctgctggtgactgcgggcagctcaggatcattgcgggtcaccagcagccgcttggacatgcgtgccggcttgccattcttgaaccactggtaggtcaccttctcctggggcactgcatccacgtggcacgatagcttcaggtcctggcccagctggatgttctcactctctttgatcacgtcaggagtgatctggaatgtagcgttcttcatggctgtgagtggatggggagggaagggtagttggggttgg

SEQ ID NO: 20181 - DNA, 91 bp, Homo sapiens
  MAP TO AC010808.2; EXPRESSED IN PLACENTA, SIGNAL = 4.4; EXPRESSED IN HEART, SIGNAL = 2.5; EXPRESSED IN FETAL LIVER, SIGNAL = 3.8; EXPRESSED IN ADULT LIVER, SIGNAL = 1.4; EXPRESSED IN HELA, SIGNAL = 2.9; EXPRESSED IN HBL100, SIGNAL = 3.7; EXPRESSED IN BT474, SIGNAL = 3.3; EXPRESSED IN BRAIN, SIGNAL = 2.2; EXPRESSED IN LUNG, SIGNAL = 4.4; EXPRESSED IN BONE MARROW, SIGNAL = 3.3; NT HIT: M11486.1, EVALUE 7.50e-01
gaaaatggtaaaataaatgggagaggtgtcagcactagtggaggtgatgagttggatgatgtgtactgtcacaaaatagggacagggagag

SEQ ID NO: 20182 - DNA, 214 bp, Homo sapiens
  MAP TO AL109659.18; EXPRESSED IN HELA, SIGNAL =   5; EXPRESSED IN PLACENTA, SIGNAL = 5.3; EXPRESSED IN BT474, SIGNAL =   4; EXPRESSED IN BONE MARROW, SIGNAL = 3.9; EXPRESSED IN BRAIN, SIGNAL = 3.6; EXPRESSED IN HBL100, SIGNAL =   5; EXPRESSED IN HEART, SIGNAL = 3.8; EXPRESSED IN ADULT LIVER, SIGNAL = 5.7; EXPRESSED IN FETAL LIVER, SIGNAL = 6.7; EXPRESSED IN LUNG, SIGNAL = 4.4; SWISSPROT HIT: Q16653, EVALUE 4.00e-16; NT HIT: Z48051.1, EVALUE 2.00e-03; EST_HUMAN HIT: AV726999.1, EVALUE 3.00e-03
cgacctgtttacctgtataaggatggtaaagacctgtatggagaaactatctccaagtatgtggagcggacagagctcctgaaagaagccattggagaaggtaaagtgaccctcaggatccttaatgtcagtgctgatgatgacgggcagtaccactgcttcttcaaagacagaaatgtctatgaagagtccatcacagaagtgaaggtcacag

SEQ ID NO: 20183 - DNA, 111 bp, Homo sapiens
  MAP TO AC009972.3; EXPRESSED IN BONE MARROW, SIGNAL = 3.7; EXPRESSED IN BRAIN, SIGNAL = 3.1; EXPRESSED IN HEART, SIGNAL = 2.8; EXPRESSED IN FETAL LIVER, SIGNAL =   3; EXPRESSED IN ADULT LIVER, SIGNAL = 3.4; EXPRESSED IN PLACENTA, SIGNAL = 2.8; EXPRESSED IN HELA, SIGNAL = 3.1; EXPRESSED IN HBL100, SIGNAL = 2.8; EXPRESSED IN BT474, SIGNAL = 2.5; EXPRESSED IN LUNG, SIGNAL = 3.4; NT HIT: AF055066.1, EVALUE 8.10e-01; SWISSPROT HIT: P76527, EVALUE 5.30e+00; EST_HUMAN HIT: BE730099.1, EVALUE 1.40e+00
tgccggacagagagaacggaagacacccaatccatttcgacagacaagtgggaatggaggcagcaaaaagggtggctcaagggaagtgggcactagaggggatggggcatc

SEQ ID NO: 20184 - DNA, 635 bp, Homo sapiens
  MAP TO AC005828.1; EXPRESSED IN FETAL LIVER, SIGNAL = 2.1; EXPRESSED IN BONE MARROW, SIGNAL = 1.7; EXPRESSED IN LUNG, SIGNAL = 3.7; EXPRESSED IN BRAIN, SIGNAL = 2.5; EXPRESSED IN PLACENTA, SIGNAL = 1.9; EXPRESSED IN HELA, SIGNAL = 2.6; EXPRESSED IN HEART, SIGNAL = 2.7; EXPRESSED IN HBL100, SIGNAL = 1.6; EXPRESSED IN BT474, SIGNAL = 2.5; EXPRESSED IN ADULT LIVER, SIGNAL = 1.4; EST_HUMAN HIT: AA169742.1, EVALUE 6.00e-68; NT HIT: AJ278120.1, EVALUE 0.00e+00; SWISSPROT HIT: P16356, EVALUE 1.00e-05
acagttcgcagcagccttagaggacctgaacgaggccatcaagctgtgtcccaacaaccgtgagatccagagacttctgctgagagtggaagaagagtgtagacagatgcagcagccacagcagccaccgccgccaccgcagcctcagcagcagttgccggaagaagcagaacctgagccacagcatgaagacatatactctgtacaggatatattcgaggaggagtacctggaacaggatgttgaaaatgtttccattggcctccagacagaggcccggcccagccaggggctcccggtcatccagagcccaccctcctctcccccgcatcgggactcagcctacatctccagctcacctcttggctctcatcaggtttttgacttccggtccagtagttctgtaggctctcccactagacagacctatcagtccacctcacctgccctttctccaactcatcagaactcacattacaggcctagcccaccacacacttccccggctcatcagggaggatcttaccgtttcagcccccctcctgtgggaggacagggcaaagaatacccaagccctcccccttcccctctccggagaggccctcagtatcgggccagccctccagctgaaagta

SEQ ID NO: 20185 - DNA, 186 bp, Homo sapiens
  MAP TO AC010812.2; EXPRESSED IN LUNG, SIGNAL =  13; EXPRESSED IN ADULT LIVER, SIGNAL =  12; EXPRESSED IN BONE MARROW, SIGNAL =  12; EXPRESSED IN BRAIN, SIGNAL = 9.6; EXPRESSED IN HELA, SIGNAL =  10; EXPRESSED IN PLACENTA, SIGNAL =  11; EXPRESSED IN HBL100, SIGNAL =  10; EXPRESSED IN HEART, SIGNAL = 9.5; EXPRESSED IN BT474, SIGNAL = 8.5; EXPRESSED IN FETAL LIVER, SIGNAL =  11; SWISSPROT HIT: O14123, EVALUE 3.70e+00; NT HIT: AF109465.1, EVALUE 6.80e+00
gctgatgtctcagcctgggcactaagctctgcaccccagccatgtctagttcttcagtatttctgtcctggtcttgtgtgtgtgacaacaaacttccctggtacccgaagctcaggatgtctgtagaggagaccccagaattggctgtgctattcttttcttcatctgggttatttccaccaacac

SEQ ID NO: 20186 - DNA, 454 bp, Homo sapiens
  MAP TO AL109752.7; EXPRESSED IN ADULT LIVER, SIGNAL =   4; EXPRESSED IN HELA, SIGNAL = 4.1; EXPRESSED IN HEART, SIGNAL = 3.8; EXPRESSED IN FETAL LIVER, SIGNAL = 4.6; EXPRESSED IN BT474, SIGNAL = 3.3; EXPRESSED IN BRAIN, SIGNAL =   3; EXPRESSED IN LUNG, SIGNAL = 5.1; EXPRESSED IN BONE MARROW, SIGNAL = 3.4; EXPRESSED IN PLACENTA, SIGNAL = 4.3; EXPRESSED IN HBL100, SIGNAL = 4.9; NT HIT: AF198349.1, EVALUE 8.00e-63; SWISSPROT HIT: Q60698, EVALUE 6.00e-04; EST_HUMAN HIT: AA909203.1, EVALUE 9.00e-14
agtctttcctggtgatgagtttgcagcggtttaccccgggctggatggcccccagcccgcggaggatccggacctgctcaacagtacacaccacgggggatatatccagtctcttcagcttggtgtacacagtgtgcaagcctcccaccaggtgcttgagaaaaagatcaaagacttgcggcaggcagatcagttcctggccgtccatcaggaacgaagccaccttcatcccgtgcatgtcgaccatgcggcactcgttggtgttggtgttgcccctgccgccgcctccggcactgttgctgtggttattaaccacgaaactattgatcatattaggagtaagacgagggggctctctgggagtcgagtacaggggttcggcccggaataagccccccgggacgccggcgccgctggaagttgcagagatcactggagatgcggagacagccat

SEQ ID NO: 20187 - DNA, 194 bp, Homo sapiens
  MAP TO AC009974.3; EXPRESSED IN LUNG, SIGNAL =   4; EXPRESSED IN BRAIN, SIGNAL = 3.4; EXPRESSED IN HELA, SIGNAL = 3.2; EXPRESSED IN HEART, SIGNAL =   3; EXPRESSED IN BT474, SIGNAL =   3; EXPRESSED IN ADULT LIVER, SIGNAL = 3.5; EXPRESSED IN FETAL LIVER, SIGNAL = 3.2; EXPRESSED IN BONE MARROW, SIGNAL = 3.8; EXPRESSED IN PLACENTA, SIGNAL = 4.8; EXPRESSED IN HBL100, SIGNAL = 3.6; SWISSPROT HIT: P10169, EVALUE 3.30e-01; NT HIT: AB033104.1, EVALUE 3.00e-91
taataactgagccagcaggcccagatttggggaccccattcaccagccgcctacccccagaacttcaggtcctaaaggacgaacaggcccatcggttggcccccaagggtaatcagtctcgcatcttgactcaggcctataaacgcatggctgaggaggccatgcagaaggtgtgtggggcagaggaaaatatg

SEQ ID NO: 20188 - DNA, 91 bp, Homo sapiens
  MAP TO AL121748.2; EXPRESSED IN HBL100, SIGNAL = 0.91; EXPRESSED IN HEART, SIGNAL = 0.98; EXPRESSED IN ADULT LIVER, SIGNAL = 1.6; NT HIT: U34374.1, EVALUE 2.00e-04; EST_HUMAN HIT: BE086854.1, EVALUE 3.00e-03; SWISSPROT HIT: P06861, EVALUE 4.10e+00
agtggggtggggggcggctcattttgctcagcagagcttaaaccccttgtgggaggaggagcatgcaggtgagcgggtgaaagagccaggg

SEQ ID NO: 20189 - DNA, 117 bp, Homo sapiens
  MAP TO AL035070.3; EXPRESSED IN BT474, SIGNAL =   9; EXPRESSED IN FETAL LIVER, SIGNAL = 9.7; EXPRESSED IN BONE MARROW, SIGNAL =  11; EXPRESSED IN LUNG, SIGNAL =  11; EXPRESSED IN BRAIN, SIGNAL =  11; EXPRESSED IN HBL100, SIGNAL = 9.7; EXPRESSED IN HELA, SIGNAL =  10; EXPRESSED IN PLACENTA, SIGNAL =  12; EXPRESSED IN ADULT LIVER, SIGNAL =  11; EXPRESSED IN HEART, SIGNAL = 8.6; EST_HUMAN HIT: R64306.1, EVALUE 6.60e-02
ccatccggccccgcagcaggctgtggtttccctccctgtcaaccacagggcccttgtacatactttcctgtttcaggaaggtctctgcctggctcatcttgctctccttctcttctt

SEQ ID NO: 20190 - DNA, 163 bp, Homo sapiens
  MAP TO AL049698.3; EXPRESSED IN BONE MARROW, SIGNAL = 1.6; EXPRESSED IN HELA, SIGNAL = 1.4; EXPRESSED IN HEART, SIGNAL = 2.2; EXPRESSED IN ADULT LIVER, SIGNAL = 1.6; EXPRESSED IN LUNG, SIGNAL = 2.3; EXPRESSED IN BRAIN, SIGNAL = 1.8; EXPRESSED IN PLACENTA, SIGNAL = 3.6; EXPRESSED IN HBL100, SIGNAL = 1.9; EXPRESSED IN BT474, SIGNAL = 1.8; EXPRESSED IN FETAL LIVER, SIGNAL = 1.8; NT HIT: gi11419159, EVALUE 4.00e-87; EST_HUMAN HIT: BE710291.1, EVALUE 7.00e-87; SWISSPROT HIT: P55196, EVALUE 1.00e-24
tcgctctcctcggcgctgcggtccggtttgctctggagctcctggatctccttgctcagcatgtccacgatgtgcatctgctgctgcttctccagcttctccttggcgtcccgcttccacgggtcgggggacagactgtcccccgaggaaagctcctctttgc

SEQ ID NO: 20191 - DNA, 642 bp, Homo sapiens
  MAP TO AF111167.2; EXPRESSED IN BONE MARROW, SIGNAL = 6.2; EXPRESSED IN PLACENTA, SIGNAL = 5.4; EXPRESSED IN HEART, SIGNAL = 2.9; EXPRESSED IN HBL100, SIGNAL = 5.2; EXPRESSED IN HELA, SIGNAL = 2.8; EXPRESSED IN BT474, SIGNAL = 4.5; EXPRESSED IN FETAL LIVER, SIGNAL = 2.1; EXPRESSED IN LUNG, SIGNAL =  36; EXPRESSED IN BRAIN, SIGNAL = 1.8; EST_HUMAN HIT: BE220350.1, EVALUE 0.00e+00; SWISSPROT HIT: P01100, EVALUE 7.00e-98; NT HIT: gi11434939, EVALUE 0.00e+00
gagacagaccaactagaagatgagaagtctgctttgcagaccgagattgccaacctgctgaaggagaaggaaaaactagagttcatcctggcagctcaccgacctgcctgcaagatccctgatgacctgggcttcccagaagagatgtctgtggcttcccttgatctgactgggggcctgccagaggttgccaccccggagtctgaggaggccttcaccctgcctctcctcaatgaccctgagcccaagccctcagtggaacctgtcaagagcatcagcagcatggagctgaagaccgagccctttgatgacttcctgttcccagcatcatccaggcccagtggctctgagacagcccgctccgtgccagacatggacctatctgggtccttctatgcagcagactgggagcctctgcacagtggctccctggggatggggcccatggccacagagctggagcccctgtgcactccggtggtcacctgtactcccagctgcactgcttacacgtcttccttcgtcttcacctaccccgaggctgactccttccccagctgtgcagctgcccaccgcaagggcagcagcagcaatgagccttcctctgactcgctcagctcacccacgctgctggccctgtga

SEQ ID NO: 20192 - DNA, 243 bp, Homo sapiens
  MAP TO AP000126.1; EXPRESSED IN PLACENTA, SIGNAL = 0.93; EXPRESSED IN HBL100, SIGNAL = 0.75; EXPRESSED IN BONE MARROW, SIGNAL = 0.85; EXPRESSED IN FETAL LIVER, SIGNAL = 0.67; EXPRESSED IN LUNG, SIGNAL = 1.1; EXPRESSED IN HELA, SIGNAL = 0.75; EXPRESSED IN ADULT LIVER, SIGNAL = 0.93; EXPRESSED IN HEART, SIGNAL =   1; EXPRESSED IN BT474, SIGNAL = 0.87; NT HIT: gi6754495, EVALUE 2.00e-12; EST_HUMAN HIT: AW130577.1, EVALUE 5.90e-01
aagaggaatagcatcttctgtagcaaagtggtcggtagccacagcagctagagctgtatccacagccatatccacagccagagccgtatccacagccatagccacagccagttccatagccagagccatatctacagccagagccgtatccacagccatagccacaaccatatccacagccggaactccagccagagccatatccacagcccccacagcagtttctgtagtagttgcaacaca

SEQ ID NO: 20193 - DNA, 174 bp, Homo sapiens
  MAP TO AC010896.2; EXPRESSED IN HBL100, SIGNAL = 3.7; EXPRESSED IN PLACENTA, SIGNAL = 3.8; EXPRESSED IN HELA, SIGNAL = 4.8; EXPRESSED IN HEART, SIGNAL = 3.9; EXPRESSED IN BT474, SIGNAL = 3.9; EXPRESSED IN FETAL LIVER, SIGNAL = 4.5; EXPRESSED IN ADULT LIVER, SIGNAL = 4.5; EXPRESSED IN BRAIN, SIGNAL = 3.8; EXPRESSED IN BONE MARROW, SIGNAL = 3.8; EXPRESSED IN LUNG, SIGNAL = 4.8; EST_HUMAN HIT: AA625755.1, EVALUE 2.00e-67; SWISSPROT HIT: P01133, EVALUE 8.90e-02; NT HIT: AF029318.1, EVALUE 8.70e-02
gaagacaaggcagccacaaggctggtggttgtggaggctttgacaaggagggtaatggaggcagatgctggtgttccactggtagccagagaggcaagcacaatagaaattccccttgtggttgacattacactctgacagagagaagagaagagggggtgggcaggctgtctg

SEQ ID NO: 20194 - DNA, 383 bp, Homo sapiens; identical to SEQ ID NO: 3423
  MAP TO AC011310.2; EXPRESSED IN BT474, SIGNAL =   1; EXPRESSED IN FETAL LIVER, SIGNAL = 1.1; EXPRESSED IN ADULT LIVER, SIGNAL = 1.1; EXPRESSED IN HELA, SIGNAL =   1; EXPRESSED IN HEART, SIGNAL =   1; EXPRESSED IN BRAIN, SIGNAL =   1; EXPRESSED IN BONE MARROW, SIGNAL = 1.1; SWISSPROT HIT: P11369, EVALUE 2.00e-13; NT HIT: X87344.1, EVALUE 2.00e-07; EST_HUMAN HIT: AW296817.1, EVALUE 5.00e-15

SEQ ID NO: 20195 - DNA, 184 bp, Homo sapiens
  MAP TO AC010361.2; EXPRESSED IN BONE MARROW, SIGNAL =   2; EXPRESSED IN LUNG, SIGNAL = 2.1; EXPRESSED IN HBL100, SIGNAL = 1.8; EXPRESSED IN HEART, SIGNAL = 1.9; EXPRESSED IN PLACENTA, SIGNAL =   2; EXPRESSED IN HELA, SIGNAL = 2.9; EXPRESSED IN FETAL LIVER, SIGNAL = 2.2; EXPRESSED IN BT474, SIGNAL = 2.1; EXPRESSED IN ADULT LIVER, SIGNAL = 1.9; EXPRESSED IN BRAIN, SIGNAL = 2.2; NT HIT: X76758.1, EVALUE 3.60e-01; SWISSPROT HIT: P43298, EVALUE 6.40e+00
agcactcattaccctcatgctctctcgtttcaaaaactatctggaaaaaatgctcctttcttcagttttaccaatgcgtttgctctgccagaggtgtctgttttccatatctctaatgatgatactaaagagttgtaccttctggcaaaggttcgtcttgatattgaagtgcaaaacaatatga

SEQ ID NO: 20196 - DNA, 91 bp, Homo sapiens
  MAP TO D87675.1; EXPRESSED IN BT474, SIGNAL = 1.6; EXPRESSED IN BRAIN, SIGNAL = 1.1; EXPRESSED IN BONE MARROW, SIGNAL = 1.2; EXPRESSED IN LUNG, SIGNAL = 1.3; EXPRESSED IN HELA, SIGNAL = 1.1; EXPRESSED IN PLACENTA, SIGNAL = 1.3; EXPRESSED IN HBL100, SIGNAL =   2; EXPRESSED IN HEART, SIGNAL = 1.4; EXPRESSED IN FETAL LIVER, SIGNAL = 1.3; NT HIT: D87675.1, EVALUE 2.00e-44; EST_HUMAN HIT: AW779741.1, EVALUE 4.00e-18; SWISSPROT HIT: P52712, EVALUE 7.10e+00
caatgataatggggccttggctatcgggggaaacatggttattatctgggttgatgattttggctggtatgttgatagaggtgtgagttta

SEQ ID NO: 20197 - DNA, 1814 bp, Homo sapiens
  MAP TO AC006078.1; EXPRESSED IN PLACENTA, SIGNAL = 1.4; EXPRESSED IN HBL100, SIGNAL = 1.1; EXPRESSED IN HELA, SIGNAL = 1.9; EXPRESSED IN HEART, SIGNAL = 1.1; EXPRESSED IN BT474, SIGNAL = 1.7; EXPRESSED IN ADULT LIVER, SIGNAL = 1.6; EXPRESSED IN FETAL LIVER, SIGNAL = 1.4; EXPRESSED IN BRAIN, SIGNAL = 1.3; EXPRESSED IN BONE MARROW, SIGNAL = 1.1; EXPRESSED IN LUNG, SIGNAL = 2.7; NT HIT: M14123.1, EVALUE 0.00e+00; EST_HUMAN HIT: AW665466.1, EVALUE 0.00e+00; SWISSPROT HIT: P10266, EVALUE 0.00e+00
aatatagaaaaattaagctacaaaaaatagaaataagaaaagacacattaaaaacattaaatgactttcaaaaattgctaggagatattaattggattcggccaactctaggcattcctacttatgtcacgtcaaatttgttctctatcttaagaggagacccagatttaaatagtaaaagaatattcactccagaggcaacaaaaaaaattaaattagtggaagaaaaaattcaaccagcacaaataaatagaatagatcccttagccccactccaacttttgatttttgctactgcacattctccagcaggcatcaatgttcaaaatactgatcttgtggagtggtcattccttcctcacagtacaattaagacttttacattgtacttggatcaaatagttacattaattggtcaggcaaaattacgaataataaaattgtgtggaaatgacccagacaaaatagttgttcctttaaacaaggaacgagttagacaagcctttatcaattctggtgcatggcagattggtcttactgattttgtgggaattactgataatcattaccccaaaacaaaaatcgtccagttcttaaaattgactacttggattttacctaaaattacgagacatgaacctttagaaaatgctctgacggtgtttactgatggttccagcaatggaaaggcagcttacatagggccaaaagagcaagtaatcaaaactcattatcaatcggctcaaagagctgagttggttgcagtctttacagtgttacaagattttaatcaacctattaatattgtatcagattctgcatatgtagtacaggctacaagggatgttgagacagctctaattaaatatagcatggatgatcagttaaaccagctgttcaatttattacaacaaactgtaagaaacagaaatttcccattttacattactcatattcgggcacacactaatttaccagggcctttaactaaagcaaatgaacaagctgacttactggtaccatctgcattcataaaagcacaagaacttcatgctttgactcatataaatgcagcaggattaaaaaacaaatttgacgtcacatggaaacaggcaaaaaatattgtacaacattgcacccagtgtcaagtcctacacctgcccactcaagaggcaggagttaatcccagaggtctatgtcctaatgtgttatggcaaatggatgtcacgcatgtaccttcatttggaagattatcatatgttcatgtaacagttgatacttattcacatttcatatgggcagcttgccaaacaggagaaagtacttcccatgttaaaaaacatttattgtcttgttttgctgtaatgggagttccagaaaaaatcaaaactgacaatggaccaggatattgtagtaaagctttccaaaaattcttaaatcagtggaaaattacacatacaacaggaattccctataattcccaaggacaggccatagttgaaagaactaatagaacactcaaaactcaattagttaaacaaaacgaagggggagacagtaaggagtgtaccactcctcagatgcaacttaatctagcactctatactttaaattttttaaacatttatagaaatcagactactacttctgcagaacatcttactggtaaaaagaacagcccacatgaaggaaaactgatttggtggaaagacaacaaaaataagacatgggaaatagggaaggtggtaacgtgggggaaaggttttgcttgtttcactaggagaaaatcagcttcctgtttggatacccactag

SEQ ID NO: 20198 - DNA, 210 bp, Homo sapiens; identical to SEQ ID NO: 18537
  MAP TO AC010680.3; EXPRESSED IN ADULT LIVER, SIGNAL =   2; EXPRESSED IN BONE MARROW, SIGNAL = 2.1; EXPRESSED IN BT474, SIGNAL =   2; EXPRESSED IN FETAL LIVER, SIGNAL = 2.1; EXPRESSED IN BRAIN, SIGNAL = 1.6; EXPRESSED IN LUNG, SIGNAL = 2.2; EXPRESSED IN PLACENTA, SIGNAL = 1.8; EXPRESSED IN HEART, SIGNAL =   4; EXPRESSED IN HELA, SIGNAL = 2.1; EXPRESSED IN HBL100, SIGNAL = 2.1; NT HIT: AJ277892.1, EVALUE 1.00e-115; EST_HUMAN HIT: AA211337.1, EVALUE 2.00e-80

SEQ ID NO: 20199 - DNA, 114 bp, Homo sapiens; identical to SEQ ID NO: 18685
  MAP TO AL035414.23; EXPRESSED IN HEART, SIGNAL =  13; EXPRESSED IN FETAL LIVER, SIGNAL =  17; EXPRESSED IN ADULT LIVER, SIGNAL =  16; EXPRESSED IN LUNG, SIGNAL =  17; EXPRESSED IN BONE MARROW, SIGNAL =  17; EXPRESSED IN HELA, SIGNAL =  15; EXPRESSED IN BRAIN, SIGNAL =  15; EXPRESSED IN PLACENTA, SIGNAL =  15; EXPRESSED IN HBL100, SIGNAL =  16; EXPRESSED IN BT474, SIGNAL =  13; SWISSPROT HIT: P21522, EVALUE 1.10e-02; NT HIT: gi11427711, EVALUE 7.00e-51; EST_HUMAN HIT: BE764527.1, EVALUE 1.50e+00

SEQ ID NO: 20200 - DNA, 273 bp, Homo sapiens
  MAP TO AC011493.2; EXPRESSED IN BT474, SIGNAL = 2.1; EXPRESSED IN HEART, SIGNAL = 1.5; EXPRESSED IN PLACENTA, SIGNAL = 1.8; EXPRESSED IN FETAL LIVER, SIGNAL = 1.5; EXPRESSED IN ADULT LIVER, SIGNAL = 1.6; EXPRESSED IN BRAIN, SIGNAL = 1.9; EXPRESSED IN LUNG, SIGNAL = 1.3; EXPRESSED IN BONE MARROW, SIGNAL = 1.7; EXPRESSED IN HELA, SIGNAL = 1.9; EXPRESSED IN HBL100, SIGNAL = 2.3; NT HIT: AF091557.1, EVALUE 1.40e-01; SWISSPROT HIT: P25625, EVALUE 1.90e+00; EST_HUMAN HIT: AU121585.1, EVALUE 3.00e-87
ctggtttgttccaccttggaactttttcacactgatgatgaggaggaaggagagtataacgaattaacagaagaggttacagagcaggtttatttgccagctaaagctaaagcggcaaaggagggagaggttcattcctacccttctgcaccccctcattattattttgaagaaaaagaccctccagatctttcttttctggaggacactgggcaaaaagtagttgccccagtgactgttcgagcggcgccccgagtgactgctcttagttct

SEQ ID NO: 20201 - DNA, 187 bp, Homo sapiens
  MAP TO AL132661.2; EXPRESSED IN LUNG, SIGNAL = 0.96; EXPRESSED IN PLACENTA, SIGNAL = 1.1; EXPRESSED IN BT474, SIGNAL = 1.2; EXPRESSED IN BONE MARROW, SIGNAL = 1.5; EXPRESSED IN HBL100, SIGNAL = 1.2; EXPRESSED IN HEART, SIGNAL = 1.5; EXPRESSED IN FETAL LIVER, SIGNAL = 0.96; EXPRESSED IN BRAIN, SIGNAL = 2.5; SWISSPROT HIT: Q01033, EVALUE 5.00e-10
gctgccttcaccagcgccctcgcacgctggctgccttcaccagtgcccttgtcgtgctggctgccttcaccagcaccctcgtcccactggctgccttcatcagcgccctcgtcgcactggctgccttcatcagcgccctcgtcgcactggctgccttcatcagcacccttgtcagcaccttgatgcc

SEQ ID NO: 20202 - DNA, 361 bp, Homo sapiens
  MAP TO AC010940.2; EXPRESSED IN BRAIN, SIGNAL = 5.4; EXPRESSED IN BONE MARROW, SIGNAL = 6.8; EXPRESSED IN LUNG, SIGNAL = 6.6; EXPRESSED IN HBL100, SIGNAL = 6.6; EXPRESSED IN HEART, SIGNAL = 6.2; EXPRESSED IN PLACENTA, SIGNAL = 5.8; EXPRESSED IN HELA, SIGNAL = 7.1; EXPRESSED IN FETAL LIVER, SIGNAL = 6.5; EXPRESSED IN BT474, SIGNAL = 5.7; EXPRESSED IN ADULT LIVER, SIGNAL =   7; NT HIT: U43293.1, EVALUE 0.00e+00; EST_HUMAN HIT: BE259767.1, EVALUE 2.30e-01; SWISSPROT HIT: P05844, EVALUE 3.20e+00
ataatgagtgtgtatatggcaactaccctgaaatacctttggaagaaatgccagatgcagatggagtagccagcactccctccctcaatattcaagagccatgctctcctgccacatccagtgaagcattcactccaaaggagggttctccttacaaagcccccatctacatccctgatgatatccccattcctgctgagtttgaacttcgagagtcaaatatgcctggggcaggactaggaatatggaccaaaaggaagatcgaagtaggtgaaaagtttgggccttatgtgggagagcagaggtcaaacctgaaagaccccagttatggatgggaggtaagaatgtattttgagttaac

SEQ ID NO: 20203 - DNA, 136 bp, Homo sapiens
  MAP TO AC011561.2; EXPRESSED IN HEART, SIGNAL = 2.2; EXPRESSED IN PLACENTA, SIGNAL = 3.1; EXPRESSED IN HBL100, SIGNAL = 2.6; EXPRESSED IN BT474, SIGNAL = 2.5; EXPRESSED IN FETAL LIVER, SIGNAL = 3.2; EXPRESSED IN ADULT LIVER, SIGNAL = 3.6; EXPRESSED IN LUNG, SIGNAL = 2.8; EXPRESSED IN BONE MARROW, SIGNAL = 2.1; EXPRESSED IN BRAIN, SIGNAL = 2.6; EXPRESSED IN HELA, SIGNAL = 2.8; SWISSPROT HIT: P28812, EVALUE 1.80e+00; NT HIT: gi7108355, EVALUE 7.70e-02
cctcgacgcccacgtgtcctgccctcagaggccacgccctgcagagccgccctgctcttggatcttcacctccagagtgggacactacacaccaaccaacgtcctcttgccaccactgacatctaccctgtgttag

SEQ ID NO: 20204 - DNA, 225 bp, Homo sapiens
  MAP TO AC007463.3; EXPRESSED IN ADULT LIVER, SIGNAL = 0.66; EXPRESSED IN HBL100, SIGNAL = 0.71; EXPRESSED IN HEART, SIGNAL = 0.79; EXPRESSED IN PLACENTA, SIGNAL = 0.66; EXPRESSED IN BT474, SIGNAL = 0.61; EXPRESSED IN BONE MARROW, SIGNAL =   1; EXPRESSED IN FETAL LIVER, SIGNAL = 0.62; EXPRESSED IN LUNG, SIGNAL = 0.78; EXPRESSED IN HELA, SIGNAL = 0.71; EXPRESSED IN BRAIN, SIGNAL = 0.8; NT HIT: Z99118.1, EVALUE 1.20e-01; SWISSPROT HIT: P46530, EVALUE 1.70e+00
acacggctggaccacccgttgacaattgaaccatcagaggaaactgatgtggagaatacccacagggagatggtgggatgcaaactcatcctcccagaacatcctcttggagatgccgggctgagggtccacaggaccagggagatggtgagatgcaacctcatcctcccagaacatcctcttggaggtgccgggctgagggtccacaggaccagggagatggtg

SEQ ID NO: 20205 - DNA, 89 bp, Homo sapiens
  MAP TO AC011032.2; EXPRESSED IN LUNG, SIGNAL = 5.9; EXPRESSED IN BONE MARROW, SIGNAL = 5.4; EXPRESSED IN BRAIN, SIGNAL = 4.4; EXPRESSED IN PLACENTA, SIGNAL = 4.9; EXPRESSED IN HBL100, SIGNAL = 4.9; EXPRESSED IN HELA, SIGNAL = 5.6; EXPRESSED IN HEART, SIGNAL = 4.6; EXPRESSED IN FETAL LIVER, SIGNAL = 5.2; EXPRESSED IN BT474, SIGNAL = 4.3; EXPRESSED IN ADULT LIVER, SIGNAL =   7; NT HIT: U38306.1, EVALUE 7.30e-01; EST_HUMAN HIT: AV731337.1, EVALUE 2.80e-01; SWISSPROT HIT: Q03172, EVALUE 4.10e+00
agtgaagagagggctgtctatgaggaagtggtcccttagcagacgacatatcttctggctggttgatcttagacttttcacccctaaaa

SEQ ID NO: 20206 - DNA, 158 bp, Homo sapiens
  MAP TO AC010684.2; EXPRESSED IN BT474, SIGNAL = 5.3; EXPRESSED IN ADULT LIVER, SIGNAL = 5.3; EXPRESSED IN BONE MARROW, SIGNAL = 5.7; EXPRESSED IN PLACENTA, SIGNAL = 4.8; EXPRESSED IN HELA, SIGNAL = 5.6; EXPRESSED IN FETAL LIVER, SIGNAL = 5.7; EXPRESSED IN BRAIN, SIGNAL = 4.6; EXPRESSED IN LUNG, SIGNAL = 5.1; EXPRESSED IN HEART, SIGNAL =   5; EXPRESSED IN HBL100, SIGNAL = 5.2; EST_HUMAN HIT: BE327112.1, EVALUE 9.00e-33; SWISSPROT HIT: Q50709, EVALUE 2.90e+00; NT HIT: gi7706500, EVALUE 2.00e-30
cttgattcggcaacccaaggtggatgatatgagtgtggccaccattgagaagaaagccacaacaaccaccagtgccaagccacagatcactgctaattccaaggcagagcttacttgatttgtgcccatggcattgagagtagatcgggaaaatgaaa

SEQ ID NO: 20207 - DNA, 523 bp, Homo sapiens
  MAP TO AC012122.1; EXPRESSED IN BRAIN, SIGNAL = 1.2; EXPRESSED IN HEART, SIGNAL =   1; EXPRESSED IN HBL100, SIGNAL = 0.99; EXPRESSED IN BT474, SIGNAL = 0.96; EXPRESSED IN FETAL LIVER, SIGNAL = 0.94; EXPRESSED IN LUNG, SIGNAL = 1.2; EST_HUMAN HIT: AW051903.1, EVALUE 2.00e-99; SWISSPROT HIT: Q07342, EVALUE 9.70e-02; NT HIT: gi9558718, EVALUE 0.00e+00
ctcctgcttcaggtgcagaaatacagcgatttccagtgccagctgttgagccagtgccagcaccaggggcagattcccctccagggacagcgctggagctagaggaagctccagagccctcctgccgctgccctgggactgcccaggaccagcccagtgaggagctgcctgacttcatggcacctcctgtagagccaccggcctcagccctggagctgaaagtgtggctggagctagaggtggcagagaggggtggccagcacagctccagccagcagctcccacactgctcccagtcctgggcacagtggaagctatggaggcagagaccagggtttgcaatctgggctcctctgcctcactggagagggacttctctcattcagcagagcagcagccctgctgctgaagggcctgctgctactgctgctggggctgtttgcctgcctgcaggaggtgctggagagcaagaaaaggagcctgtgagcaggggttccagcaggtcctcctgctcccagaggcg

SEQ ID NO: 20208 - DNA, 222 bp, Homo sapiens
  MAP TO AC011851.2; EXPRESSED IN BT474, SIGNAL =  39; EXPRESSED IN FETAL LIVER, SIGNAL =  12; EXPRESSED IN ADULT LIVER, SIGNAL = 3.4; EXPRESSED IN LUNG, SIGNAL = 7.5; EXPRESSED IN BONE MARROW, SIGNAL =  15; EXPRESSED IN BRAIN, SIGNAL =  20; EXPRESSED IN HELA, SIGNAL =  20; EXPRESSED IN PLACENTA, SIGNAL =  10; EXPRESSED IN HBL100, SIGNAL =  37; EXPRESSED IN HEART, SIGNAL =  26; NT HIT: X01111.1, EVALUE 7.00e-96; EST_HUMAN HIT: BE782608.1, EVALUE 4.00e-89; SWISSPROT HIT: P04406, EVALUE 1.00e-36
gttgttgtagccaaattcattgtcataccaggaaatgagcttgacaaagtggtcgttgagggcagtgccagccccagcattgaaggtggaagagtgggtgtcactgttgaagtcggaggagaccacctggtgcccagtgtagcccaggatgcctttgagggggccctctgatgcctgcttcaccaccttcttgatgtcatcatatttggcaggtttttccag

SEQ ID NO: 20209 - DNA, 193 bp, Homo sapiens
  MAP TO AC010958.2; EXPRESSED IN ADULT LIVER, SIGNAL =  10; EXPRESSED IN BONE MARROW, SIGNAL = 9.2; EXPRESSED IN PLACENTA, SIGNAL = 8.7; EXPRESSED IN BT474, SIGNAL = 7.8; EXPRESSED IN FETAL LIVER, SIGNAL = 9.8; EXPRESSED IN BRAIN, SIGNAL =   8; EXPRESSED IN LUNG, SIGNAL =  11; EXPRESSED IN HEART, SIGNAL = 7.8; EXPRESSED IN HELA, SIGNAL = 9.1; EXPRESSED IN HBL100, SIGNAL = 8.3; SWISSPROT HIT: P44953, EVALUE 6.40e+00
cacggtgtctgtattccgcatttcaggctcctccccatctgtcaacaccaacgcacccccgctgccctcatcatctacacccacctcaccctccaatccttgtcagggaacagtcttcaaatccagtaaaaactggaggaagaggaatgcaaacactctcagaaaatccgcccttcggagcctgctgtgttaa

SEQ ID NO: 20210 - DNA, 119 bp, Homo sapiens
  MAP TO AC011112.2; EXPRESSED IN PLACENTA, SIGNAL = 6.9; EXPRESSED IN HBL100, SIGNAL = 6.1; EXPRESSED IN HEART, SIGNAL = 5.2; EXPRESSED IN LUNG, SIGNAL = 6.4; EXPRESSED IN BRAIN, SIGNAL = 6.3; EXPRESSED IN HELA, SIGNAL = 6.6; EXPRESSED IN BT474, SIGNAL = 5.9; EXPRESSED IN ADULT LIVER, SIGNAL =   7; EXPRESSED IN FETAL LIVER, SIGNAL = 5.7; EXPRESSED IN BONE MARROW, SIGNAL = 6.3; EST_HUMAN HIT: AI167339.1, EVALUE 9.80e-02; NT HIT: AL161586.2, EVALUE 1.40e-02; SWISSPROT HIT: Q04440, EVALUE 6.20e-01
cctcgatttttcccttctttctgtgatgggtttttggatatttttccttggcaatttgttttattttactcttcattcttttggtggttttctgctcctgtgttccacagagatagaag

SEQ ID NO: 20211 - DNA, 819 bp, Homo sapiens
  MAP TO AC006460.2; EXPRESSED IN LUNG, SIGNAL = 4.5; EXPRESSED IN PLACENTA, SIGNAL = 2.6; EXPRESSED IN HEART, SIGNAL = 2.1; EXPRESSED IN HBL100, SIGNAL = 2.7; EXPRESSED IN HELA, SIGNAL =   3; EXPRESSED IN FETAL LIVER, SIGNAL = 2.5; EXPRESSED IN BT474, SIGNAL = 2.4; EXPRESSED IN ADULT LIVER, SIGNAL = 2.3; EXPRESSED IN BONE MARROW, SIGNAL = 1.8; EXPRESSED IN BRAIN, SIGNAL = 1.8; NT HIT: gi11430846, EVALUE 0.00e+00; EST_HUMAN HIT: AU131373.1, EVALUE 0.00e+00; SWISSPROT HIT: Q62722, EVALUE 0.00e+00
ctcatgaagtgtgagatgtttcccatccttcctctttgagtcaaatctgccatatattgcactgtatttccgaatttcctcctctttgtgtggatcatcatcgttcatctcaaagatgtgaccaatcattttggccaacttcttgttggtttttagcagctctttcacttcattcaagtcactttttggcagtgtgggggccatccgctccacacactcagccacagagagcgcagcagcagcatccagcgcctcactgctctcctttggggacgcgggggagcccaggtctgctggggagaggctgtgctcgctctcagtggcatggtggccttgccagagtctggactcaccaacactctgcagtgctaggctcccaaccacatctgacttcccctgtcccaagctctgcacacaggtggtggcagcacatttggggatttttaaatgaggttcccgggcattgctactcctttcataactactgcaggatattcccagccatgttggtgatccctctggtaatttatagatgggtatgctactgacaggaagggaagtcagtggctgattgaaaagcccagggtttgtgacccagtctctcaaagccttctgcagccttctaacatgaaggggcttgctagccatgcccacgagtgccatgatttccaaaaactcctcttctcctgcttcacagagttgctggacatcatcaccaccttgttggataaaggcatcaaaataagaaagtagattggctttttgtaatattctatacagctgcaactcccccagggtcctgggtaaggccgcagccat

SEQ ID NO: 20212 - DNA, 149 bp, Homo sapiens
  MAP TO AP000095.1; EXPRESSED IN HBL100, SIGNAL = 0.72; EXPRESSED IN ADULT LIVER, SIGNAL = 0.89; EXPRESSED IN BRAIN, SIGNAL = 1.1; EXPRESSED IN PLACENTA, SIGNAL =   1; EXPRESSED IN BT474, SIGNAL = 0.7; EXPRESSED IN HEART, SIGNAL = 0.93; EXPRESSED IN FETAL LIVER, SIGNAL = 0.84; EXPRESSED IN HELA, SIGNAL = 0.85; EXPRESSED IN LUNG, SIGNAL = 0.83; EXPRESSED IN BONE MARROW, SIGNAL = 0.79; SWISSPROT HIT: P16427, EVALUE 6.70e+00; EST_HUMAN HIT: BF664962.1, EVALUE 2.00e+00; NT HIT: gi8922641, EVALUE 1.10e+00
aaaatgtggcatcttttctccactatacatatctgtgtagccccaacaagcctctgacctttagacttctccagaatgatttagaggtcaatgtctatgtctccaaaactctggcagatacaagcaattctttcccaacaactaactag

SEQ ID NO: 20213 - DNA, 156 bp, Homo sapiens
  MAP TO AP000055.1; EXPRESSED IN HBL100, SIGNAL = 0.68; EXPRESSED IN FETAL LIVER, SIGNAL = 0.7; EXPRESSED IN ADULT LIVER, SIGNAL = 0.86; EXPRESSED IN HEART, SIGNAL = 0.8; EXPRESSED IN PLACENTA, SIGNAL = 0.72; EXPRESSED IN BRAIN, SIGNAL = 0.8; EXPRESSED IN HELA, SIGNAL = 1.8; EXPRESSED IN LUNG, SIGNAL = 0.81; EXPRESSED IN BONE MARROW, SIGNAL = 0.74; NT HIT: M65002.1, EVALUE 3.60e-01; SWISSPROT HIT: P46607, EVALUE 2.00e-01
ggacagatgtgtggctttaagaactgttgtgcaccctgcgccagacagccaactcatcggagaccccgaggaaacagtcagtcaattggtaaaggtgaccatacatatccttattcccatgggaattcaggtgcttggtttatcagagtagattgt

SEQ ID NO: 20214 - DNA, 98 bp, Homo sapiens
  MAP TO AL035534.1; EXPRESSED IN HELA, SIGNAL = 1.1; EXPRESSED IN ADULT LIVER, SIGNAL = 0.95; EXPRESSED IN BT474, SIGNAL = 0.91; EXPRESSED IN HBL100, SIGNAL = 1.3; EXPRESSED IN HEART, SIGNAL = 1.2; EXPRESSED IN PLACENTA, SIGNAL = 0.94; EXPRESSED IN BONE MARROW, SIGNAL = 0.83; EXPRESSED IN FETAL LIVER, SIGNAL = 0.81; EXPRESSED IN LUNG, SIGNAL =   1; EXPRESSED IN BRAIN, SIGNAL = 0.96; NT HIT: AL163246.2, EVALUE 1.00e-48; EST_HUMAN HIT: BE974332.1, EVALUE 4.80e+00
ttaacatctctgtaatagtattgcatctcaattattgacggcttgccagtagttgtgccatggtagttgcgattaattgcctatgcataagcatgaaa

SEQ ID NO: 20215 - DNA, 193 bp, Homo sapiens
  MAP TO AC010099.2; EXPRESSED IN HEART, SIGNAL = 1.1; NT HIT: AJ277662.1, EVALUE 5.00e-04; EST_HUMAN HIT: AI911465.1, EVALUE 3.00e-03; SWISSPROT HIT: P08548, EVALUE 1.00e-03
aaagttgaaattttacaaaagaaacataatgtcagtaatcatcaaagaaatacaaatcaaaaccacaatgaacaatcacctcgtacctgtcaggatgattattatcaaaaagaaagaaagaaagaaagaaaacaagataagtgttggtaagaatgtggagaacttagaacattgtacatggctggtgggaatg

SEQ ID NO: 20216 - DNA, 94 bp, Homo sapiens
  MAP TO AC010130.3; EXPRESSED IN BONE MARROW, SIGNAL = 1.4; EXPRESSED IN LUNG, SIGNAL = 1.2; EXPRESSED IN PLACENTA, SIGNAL = 1.2; EXPRESSED IN HBL100, SIGNAL = 0.93; EXPRESSED IN HEART, SIGNAL =   1; EXPRESSED IN FETAL LIVER, SIGNAL = 1.4; EXPRESSED IN HELA, SIGNAL = 1.2; EXPRESSED IN BT474, SIGNAL =   1; EXPRESSED IN ADULT LIVER, SIGNAL = 1.2; SWISSPROT HIT: Q10283, EVALUE 7.00e+00; NT HIT: gi11417342, EVALUE 7.80e-01
cttcattaccacatcccacaccaaggtgccacagtactcacatttaagctctgccatgacactatcaccttggctgtgctttacttcactcccc

SEQ ID NO: 20217 - DNA, 226 bp, Homo sapiens
  MAP TO AP000156.1; EXPRESSED IN BT474, SIGNAL = 0.84; EXPRESSED IN HBL100, SIGNAL = 0.74; EXPRESSED IN FETAL LIVER, SIGNAL = 0.72; EXPRESSED IN LUNG, SIGNAL = 0.71; EXPRESSED IN BRAIN, SIGNAL = 1.3; EXPRESSED IN PLACENTA, SIGNAL = 1.1; EXPRESSED IN BONE MARROW, SIGNAL = 0.81; EXPRESSED IN HELA, SIGNAL = 0.73; EXPRESSED IN ADULT LIVER, SIGNAL = 1.2; EXPRESSED IN HEART, SIGNAL = 0.96; NT HIT: S78684.1, EVALUE 1.00e-124; SWISSPROT HIT: P48051, EVALUE 1.00e-32
tctccctcacgttgccgtgatgaacattgcactttccgtctttcctcacgtacctctggattttccttttggtccgatctcggctgatgtgtcttggcaggtcatccctggcctgcttaggcaactttggctggtgaatggccactgggctttcgacgtcctgatccatggagtcgccctccaggacgttagctggtggtttggagaaaagaaaagaaacactgaa

SEQ ID NO: 20218 - DNA, 93 bp, Homo sapiens
  MAP TO AP000045.1; EXPRESSED IN BT474, SIGNAL = 0.87; EXPRESSED IN BONE MARROW, SIGNAL = 0.84; EXPRESSED IN LUNG, SIGNAL = 1.2; EXPRESSED IN HBL100, SIGNAL = 0.79; EXPRESSED IN HELA, SIGNAL = 0.69; EXPRESSED IN ADULT LIVER, SIGNAL = 0.91; EXPRESSED IN BRAIN, SIGNAL = 1.4; EXPRESSED IN PLACENTA, SIGNAL = 0.85; EXPRESSED IN HEART, SIGNAL =   1; EXPRESSED IN FETAL LIVER, SIGNAL = 0.88; SWISSPROT HIT: P56557, EVALUE 5.00e-11; EST_HUMAN HIT: AU122747.1, EVALUE 2.00e-45; NT HIT: gi8659558, EVALUE 1.00e-45
tttgggtaacatatgcaccaaaaagaatccacatggaagcaataagtgacccaaacatcaacatgaaaccaatgaaaagccaaactcgagcac

SEQ ID NO: 20219 - DNA, 416 bp, Homo sapiens
  MAP TO AP000039.1; EXPRESSED IN HBL100, SIGNAL =   1; EXPRESSED IN FETAL LIVER, SIGNAL = 1.2; EXPRESSED IN LUNG, SIGNAL = 1.1; EXPRESSED IN BRAIN, SIGNAL = 1.1; EXPRESSED IN HEART, SIGNAL = 1.2; EXPRESSED IN PLACENTA, SIGNAL = 1.2; EXPRESSED IN BT474, SIGNAL = 0.97; EXPRESSED IN BONE MARROW, SIGNAL = 0.99; EXPRESSED IN ADULT LIVER, SIGNAL = 1.3; EXPRESSED IN HELA, SIGNAL = 1.1; EST_HUMAN HIT: H11666.1, EVALUE 1.00e-128; SWISSPROT HIT: Q00078, EVALUE 6.10e-01; NT HIT: gi11526194, EVALUE 0.00e+00
gggaagggatgcttggcctccatgttgatgcgcagcctcttcagaccacaaatagccaggtattcagtggggagagtgttggtgctgcacagggaaagcttcaggtcttggaccagcgtgaagttcagcaggtggcccagcgcagatgtgtccgtgaaccagatggtcagatggccattgtagctggttcgctctactgcaaggggcaggacggttttacagttgcacatcaggttggccaaactgtagtcacaatcccggatgtccgcagaacagctgcagttccgaatggtgttttcccttgtgaagatgagcgtgctgttcttctgacctttggtgaagcagttaagtgcaaagacacccagagtgctgatcagaagaagacagtgcctggaaggtggtgccatgcttgccca

SEQ ID NO: 20220 - DNA, 154 bp, Homo sapiens
  MAP TO AL049649.4; EXPRESSED IN HBL100, SIGNAL = 0.69; EXPRESSED IN FETAL LIVER, SIGNAL = 0.72; EXPRESSED IN LUNG, SIGNAL = 0.86; EXPRESSED IN ADULT LIVER, SIGNAL = 0.77; EXPRESSED IN BRAIN, SIGNAL = 0.71; EXPRESSED IN HEART, SIGNAL =   1; EXPRESSED IN PLACENTA, SIGNAL = 0.87; EXPRESSED IN BT474, SIGNAL = 0.62; EXPRESSED IN HELA, SIGNAL = 0.69; EXPRESSED IN BONE MARROW, SIGNAL = 0.7; EST_HUMAN HIT: AI525056.1, EVALUE 9.00e-05; NT HIT: AJ400878.1, EVALUE 4.00e-04
atcttggtgtttctggatccctgccaacatttggcattgtcagttttataataataatggtgatggtgatgatgataatgttgatgacaactttagctattctaacagatgtgtattgttagttctttgtggctttaatttgtattcctaatgg

SEQ ID NO: 20221 - DNA, 168 bp, Homo sapiens
  MAP TO AC011236.2; EXPRESSED IN BONE MARROW, SIGNAL = 1.3; EXPRESSED IN BRAIN, SIGNAL = 1.1; EXPRESSED IN HBL100, SIGNAL =   1; EXPRESSED IN HELA, SIGNAL = 0.97; EXPRESSED IN PLACENTA, SIGNAL =   1; EXPRESSED IN HEART, SIGNAL = 1.1; EXPRESSED IN BT474, SIGNAL = 1.2; EXPRESSED IN FETAL LIVER, SIGNAL = 0.99; EXPRESSED IN ADULT LIVER, SIGNAL = 1.7; EXPRESSED IN LUNG, SIGNAL = 1.2; SWISSPROT HIT: P53868, EVALUE 6.50e+00; NT HIT: AB012922.1, EVALUE 3.30e-01
cacaactgtctcccttaagaacccttcctggtacaaagcctccataaaactcatttgctcttgagtcttagttctggtggaacatatccctgagtttttgcacactgggcctccatccaggccttttcctgggagagtagaaaacccatgggctctgtggggtgggga

SEQ ID NO: 20222 - DNA, 419 bp, Homo sapiens
  MAP TO AC010196.5; EXPRESSED IN BONE MARROW, SIGNAL = 1.1; EXPRESSED IN LUNG, SIGNAL = 0.96; EXPRESSED IN PLACENTA, SIGNAL =   1; EXPRESSED IN HBL100, SIGNAL = 0.94; EXPRESSED IN HEART, SIGNAL = 0.95; EXPRESSED IN FETAL LIVER, SIGNAL =   1; EXPRESSED IN BRAIN, SIGNAL =   1; SWISSPROT HIT: P23890, EVALUE 7.00e+00; EST_HUMAN HIT: AW880885.1, EVALUE 7.00e-09; NT HIT: X90761.1, EVALUE 3.00e-07
attggaaccaatcctctccaatcctgccacagctttatcaattatgtttattctaaattttttgttgtcaatttgaaactgttcatagcatctttaccagcagtttgtttcatctcaaaaaagcactttctttgttcatccgtaagaagcaattcctcatctatttacgtgtgatcatgagatttcaacaattcagtcaaatcttctagctctagttcccttgccatttttaccacatccacgattacttcctccactgccgacttgaaagtctcaaaattgtctatgagggttggaatcaacttatttcaaactcctattcatacttatattttgacctccattcacaaatcataaatgttcttagtgccatttataaaaatgaattctttctagaaggttttcaatatactttgcct

SEQ ID NO: 20223 - DNA, 118 bp, Homo sapiens
  MAP TO AC011257.2; EXPRESSED IN BT474, SIGNAL = 1.3; EXPRESSED IN ADULT LIVER, SIGNAL = 1.3; EXPRESSED IN LUNG, SIGNAL = 1.5; EXPRESSED IN BONE MARROW, SIGNAL = 1.4; EXPRESSED IN BRAIN, SIGNAL = 1.3; EXPRESSED IN PLACENTA, SIGNAL = 1.2; EXPRESSED IN FETAL LIVER, SIGNAL = 0.97; EXPRESSED IN HEART, SIGNAL = 1.6; EXPRESSED IN HBL100, SIGNAL =   1; NT HIT: AF097732.1, EVALUE 6.00e-11; EST_HUMAN HIT: BE468263.1, EVALUE 8.00e-14
  unsure 51
gtggctcctgctgccccccacacctgcagctgcatggctggctctcccctngccttcagggtcagcagcttaactctttctctgggcacaagcaagcagagctatgccctggctccct

SEQ ID NO: 20224 - DNA, 78 bp, Homo sapiens
  MAP TO AL033379.2; EXPRESSED IN PLACENTA, SIGNAL = 0.95; EXPRESSED IN BT474, SIGNAL = 0.71; EXPRESSED IN HBL100, SIGNAL = 0.93; EXPRESSED IN FETAL LIVER, SIGNAL = 0.83; EXPRESSED IN LUNG, SIGNAL = 1.4; EXPRESSED IN ADULT LIVER, SIGNAL = 1.2; EXPRESSED IN BRAIN, SIGNAL = 1.2; EXPRESSED IN HEART, SIGNAL = 1.3; EXPRESSED IN BONE MARROW, SIGNAL = 0.8; EXPRESSED IN HELA, SIGNAL = 1.1; SWISSPROT HIT: Q08823, EVALUE 5.40e+00; EST_HUMAN HIT: BE004315.1, EVALUE 1.00e-11; NT HIT: AL163247.2, EVALUE 6.00e-10
agggaaagatctgtccaggcctctcgccttggcttgtggatggccgtcttctccctgtgtctctgcacatcatctttc

SEQ ID NO: 20225 - DNA, 1001 bp, Homo sapiens
  MAP TO AC006116.1; EXPRESSED IN LUNG, SIGNAL =   1; EXPRESSED IN HEART, SIGNAL = 0.94; EXPRESSED IN FETAL LIVER, SIGNAL = 0.95; EXPRESSED IN BT474, SIGNAL = 1.1; NT HIT: AB037817.1, EVALUE 7.00e-59; SWISSPROT HIT: Q14585, EVALUE 1.00e-88; EST_HUMAN HIT: AA626677.1, EVALUE 0.00e+00
attgggagtatgtatttaaaaacagtgaattttcatcaaagcaagagacatatgaagaatcatccaaagttgtgacagtgggagcaagacatcttagttatagccttgactatcccagtttgagagaagactgtcaaagtgaggactggtataagaaccagctgggaagtcaagaggtacatcttagtcaattaatcatcactcataaagaaatccttccagaagttcaaaataaagaatataacaaatcttggcaaacattccaccaggatacaatctttgatatacaacagagttttcccaccaaagaaaaagcacataagcatgaaccacaaaagaaaagttaccgaaaaaaatctgttgaaatgaaacataggaaagtctatgtagaaaagaaacttttgaaatgtaatgattgtgagaaagtcttcaaccagagctcatcccttactcttcatcagagaattcatactggagagaaaccctatgcatgtgttgaatgtgggaaaacgttcagccagagtgcaaacttggcgcaacataagagaatacatactggagagaaaccctatgaatgtaaagaatgtaggaaagccttcagccagaatgcacacctggcccaacatcagagagttcatactggagagaaaccttatcagtgtaaagaatgtaaaaaagccttcagccagattgcacacctgactcagcatcagagagttcatactggagagagacctttcgaatgtattgaatgtggaaaggcctttagtaatggttcatttcttgctcagcatcagagaattcatacaggagagaaaccttatgtgtgtaatgtgtgtgggaaagcctttagccatcgtggatacctaattgtacatcagagaattcatactggagagagaccctacgaatgtaaggaatgtaggaaagccttcagccagtatgcacaccttgctcaacatcagagagttcatactggagaaaaaccttatgaatgtaaa

SEQ ID NO: 20226 - DNA, 187 bp, Homo sapiens
  MAP TO AC009238.1; EXPRESSED IN HELA, SIGNAL = 0.87; EXPRESSED IN ADULT LIVER, SIGNAL = 0.95; EXPRESSED IN BRAIN, SIGNAL = 0.89; EXPRESSED IN HEART, SIGNAL = 0.89; EXPRESSED IN PLACENTA, SIGNAL = 0.9; EXPRESSED IN HBL100, SIGNAL = 0.69; EXPRESSED IN FETAL LIVER, SIGNAL = 0.73; EXPRESSED IN LUNG, SIGNAL = 1.1; EXPRESSED IN BT474, SIGNAL =   2; EXPRESSED IN BONE MARROW, SIGNAL = 0.64; NT HIT: gi7305318, EVALUE 6.00e-03; EST_HUMAN HIT: AW832912.1, EVALUE 1.00e-10; SWISSPROT HIT: P04258, EVALUE 4.00e-03
ctgaacgaggaagtcggggtagtggatgcgctgaagcccactgctctgcagggcctccaggtcccggcgggcggctgagctcagcaggtccaggctctgtgtgtctactttcaggctctgcaactcctgccgtagcttgttggtatactgggagagcaggcgcagggtgggagtcatgcccagttgc

SEQ ID NO: 20227 - DNA, 186 bp, Homo sapiens
  MAP TO AC011012.2; EXPRESSED IN BT474, SIGNAL =   2; EXPRESSED IN LUNG, SIGNAL = 1.8; EXPRESSED IN BRAIN, SIGNAL = 2.5; EXPRESSED IN PLACENTA, SIGNAL = 1.6; EXPRESSED IN HBL100, SIGNAL = 2.4; EXPRESSED IN HELA, SIGNAL =   2; EXPRESSED IN HEART, SIGNAL = 1.2; EXPRESSED IN FETAL LIVER, SIGNAL = 1.2; EST_HUMAN HIT: BE783045.1, EVALUE 2.00e-71; SWISSPROT HIT: Q15181, EVALUE 2.00e-33; NT HIT: gi11056043, EVALUE 2.00e-71
cttgcttccaatttcacacacatcaattgggtcactgtcaccacaacagccagtatgttcatcattgtgccctgggtctttccaagtctgagggatggcaccatagttccagatatatcctttatacgggaacaaattcgcaacataacgaagtttttcttttttcacatcttgtttaatggggtt

SEQ ID NO: 20228 - DNA, 1380 bp, Homo sapiens
  MAP TO AC006213.1; EXPRESSED IN HEART, SIGNAL = 1.1; EXPRESSED IN HBL100, SIGNAL = 1.4; EXPRESSED IN BT474, SIGNAL =   1; EXPRESSED IN LUNG, SIGNAL = 1.2; EXPRESSED IN HELA, SIGNAL = 1.2; NT HIT: gi11426220, EVALUE 0.00e+00; EST_HUMAN HIT: AA205298.1, EVALUE 0.00e+00; SWISSPROT HIT: Q02386, EVALUE 0.00e+00
gagccaagaatctaaaagagatggagactcttcaagaagtaggattaaggtacctgcctcatgaagagcttttctgctcccagatctggcaacagattacaagagagttaatcaagtatcaagattctgtggtaaatattcaaagaacaggctgccagttggaaaaacgagatgatttgcactataaagatgagggattcagtaatcagagttcccatcttcaagttcacagagtccacactggtgaaaaaccctacaaaggagaacattgtgtgaaaagtttcagctggagctctcatcttcaaattaaccaaagggctcatgcaggagagaagccctacaaatgtgaaaaatgtgataatgccttccgtcggttttcaagtcttcaagcccatcagagagtccacagtagagcaaaatcatacacaaatgatgcaagttacaggagttttagtcagaggtcacatcttccccatcatcagagagttcccactggagagaatccatacaaatatgaagagtgtgggaggaatgttgggaaaagctcacattgtcaagctcctctgatagttcatacgggagagaaaccctataaatgtgaggagtgtggggtgggcttcagtcagagatcatatcttcaagttcatctgaaagttcacactggaaagaaaccatataagtgtgaagagtgtgggaagagcttcagttggcgttcacgactgcaggctcatgagcgaatccacactggcgagaaaccatacaaatgcaatgcatgtggcaagagctttagttacagctcacaccttaatattcattgtagaatccacacaggagagaaaccctataagtgtgaggagtgtgggaaaggtttcagtgtgggttcacaccttcaggcccatcagataagccacactggagagaagccatacaaatgtgaggagtgtgggaaaggcttctgccgggcctcaaatctgctggaccatcaaagaggccatactggagagaaaccgtatcagtgtgatgcatgtggtaagggcttcagtcgtagctcagattttaacattcattttagagtccatacaggggaaaaaccctataaatgtgaggagtgtggcaagggcttcagccaggcctcaaatcttctggcccatcaaagaggccacactggagagaaaccctacaaatgtggtacatgtgggaagggcttcagtcggagctcagatcttaatgtacactgtagaatccacacaggagagaaaccctataaatgcgagaggtgtggtaaggccttcagtcagttctccagccttcaggtgcatcagagagttcacactggagagaaaccatatcagtgtgcagagtgtgggaagggcttcagtg

SEQ ID NO: 20229 - DNA, 131 bp, Homo sapiens
  MAP TO AF002223.1; EXPRESSED IN PLACENTA, SIGNAL =   5; EXPRESSED IN HBL100, SIGNAL = 4.3; EXPRESSED IN HEART, SIGNAL = 3.9; EXPRESSED IN ADULT LIVER, SIGNAL = 5.4; EXPRESSED IN BT474, SIGNAL = 5.3; EXPRESSED IN FETAL LIVER, SIGNAL = 4.8; EXPRESSED IN BONE MARROW, SIGNAL = 4.6; EXPRESSED IN LUNG, SIGNAL = 5.5; EXPRESSED IN BRAIN, SIGNAL = 4.6; EXPRESSED IN HELA, SIGNAL = 4.3; EST_HUMAN HIT: AW899204.1, EVALUE 4.60e+00; NT HIT: X64518.1, EVALUE 3.90e+00
ggttctcaaagatggagcctcatgtacacagtccttacttggcagtcatatgttatggtcctggcacacaacaatggcaacaagaacaatggcaacaacaacaacaacagtgggtctcggttttgttttca

SEQ ID NO: 20230 - DNA, 279 bp, Homo sapiens
  MAP TO AC011750.2; EXPRESSED IN FETAL LIVER, SIGNAL = 2.6; EXPRESSED IN BT474, SIGNAL = 2.5; EXPRESSED IN ADULT LIVER, SIGNAL = 3.7; EXPRESSED IN LUNG, SIGNAL = 2.7; EXPRESSED IN BRAIN, SIGNAL = 2.8; EXPRESSED IN PLACENTA, SIGNAL = 2.8; EXPRESSED IN BONE MARROW, SIGNAL = 2.8; EXPRESSED IN HEART, SIGNAL = 2.4; EXPRESSED IN HELA, SIGNAL = 3.1; EXPRESSED IN HBL100, SIGNAL = 2.4; NT HIT: AL161500.2, EVALUE 2.70e+00; EST_HUMAN HIT: BF057707.1, EVALUE 1.00e+00; SWISSPROT HIT: P91679, EVALUE 3.50e+00
atgaacacattgtattttcaactcaggtagaaataacaagaattatctgtggtttagagttttctgcttcattggttcctccatcagtacagccttccatgagagtgagaatattgctaactttcaggaaaaaggcacctatcttaactgtattaccagaaggaatttctcttcgtgtttgatgttaaccatgcgaccaaatgtcaggactcctgccagacaaagaaatgctaaaagggtgggttgttctgttcaacacaatcagattaagattagtac

SEQ ID NO: 20231 - DNA, 489 bp, Homo sapiens
  MAP TO AF030453.1; EXPRESSED IN HBL100, SIGNAL =   2; EXPRESSED IN HELA, SIGNAL =   2; EXPRESSED IN PLACENTA, SIGNAL = 3.3; EXPRESSED IN HEART, SIGNAL = 2.2; EXPRESSED IN ADULT LIVER, SIGNAL = 2.3; EXPRESSED IN BT474, SIGNAL = 2.4; EXPRESSED IN FETAL LIVER, SIGNAL = 1.5; EXPRESSED IN BRAIN, SIGNAL = 2.2; EXPRESSED IN BONE MARROW, SIGNAL = 2.3; EXPRESSED IN LUNG, SIGNAL = 3.7; SWISSPROT HIT: Q09511, EVALUE 5.80e-01; NT HIT: AF193803.1, EVALUE 6.60e-02; EST_HUMAN HIT: BF341828.1, EVALUE 0.00e+00
ctcctccaactcctctggggaaacccaagccctgcagctcatggaacagaagaagtggaaccgtcgtttctggaacaggactatctgagagcggttcttcctggccctcgagttcatggaacggtataactggaaccgacgcttacagagcaagggtatgcgagagcggttcttcctggccctcgggttcgtggaacggtataactggaaccgacgcttacggagcaagggtatgcgagagcggttcttcctggccctcgggttcatggaatggcctaactggaaccaacgcttacggagcaagggtatgcgagagcggttcttcctatacaggaagtggaagatgttttgtttggagtcctcgtcgtcctcctccatgtcattggccaggtagctgaggacagaaatcaggttgctgctcaggggcaccaccaggagaggcctccggctgaggtcagcttcccagagaggaaggtaagggaccgtccc

SEQ ID NO: 20232 - DNA, 1023 bp, Homo sapiens
  MAP TO AC009237.1; EXPRESSED IN LUNG, SIGNAL = 0.72; EXPRESSED IN BT474, SIGNAL = 0.7; EXPRESSED IN HBL100, SIGNAL = 0.93; EXPRESSED IN FETAL LIVER, SIGNAL = 0.7; EXPRESSED IN BRAIN, SIGNAL = 0.74; EXPRESSED IN PLACENTA, SIGNAL = 0.84; EXPRESSED IN BONE MARROW, SIGNAL = 0.7; EXPRESSED IN HELA, SIGNAL = 0.65; EXPRESSED IN ADULT LIVER, SIGNAL =   1; EXPRESSED IN HEART, SIGNAL = 0.79; SWISSPROT HIT: P25977, EVALUE 2.00e-61; NT HIT: X56687.1, EVALUE 5.00e-14; EST_HUMAN HIT: AU118634.1, EVALUE 7.00e-14
cattggtccaacgcagacatcttgaggttactggaatgcatggagaataatctcccatctgatgacaacggcacgttcagctcaactcagtcacacatggactggggaaaagtagcttttaaaaacttttctggtgaaatgtgcagactcaaatggttagagatttcttgcagcttgagaaaattcagcactttgaaaaaattagtcctggaagctaagaaatgtgttaaaaatacaaacaaaagccaaaaaggcaggaaccatccagactttccaaagaggccccttactgcttatatccgcttcttcaaggagaattggccccagtactcccaaatgtaccctgggatgagaagccaggaactgaccaaaatcctgtcaaagaaatacaaggagctcccagagcagatgaaacagaaatatattcaggatttccagaaggaaaagcaagaatttgaggaaaaacttgttcgattcagggaagagcaccctgatttagaccagaagggcaagaaatctgatatctccaagaggattcaaaccaaagtgcaaaagaaagttcagaaaaatattgaagaagtgacgtctcttccaaaaacggatcaatttttcaagaaggtaaaatttcatggagagcctcagaaaccccccatgaatggataccacaagtttcaccaagattcctggtcaagtaaggagctgcaacatttgtccctgagggagcgcatggtagagattggcagacgctggcagcgcatcccgcagagccagaaggatcattacaagagccaggctgagttgctgcagaaggaatacaaagtggaattggatctctggctcaagactttgtcacctgaagattatgctgcgtacaaagaatcgacctatgctaagggtaagaatatggcgatgatgggaggcccggcccccagcttgaaacaaacagatccgcagtcctcatcagcaaagggtctgcaagaagggtttggggaggggcaggggctccaggctgcaggaacagag

SEQ ID NO: 20233 - DNA, 312 bp, Homo sapiens
  MAP TO AP000052.1; EXPRESSED IN BONE MARROW, SIGNAL = 1.1; EXPRESSED IN HBL100, SIGNAL = 1.1; EXPRESSED IN ADULT LIVER, SIGNAL = 1.3; EXPRESSED IN BRAIN, SIGNAL = 0.92; EXPRESSED IN HEART, SIGNAL = 1.4; EXPRESSED IN PLACENTA, SIGNAL =   1; EXPRESSED IN FETAL LIVER, SIGNAL = 1.1; EXPRESSED IN HELA, SIGNAL = 1.2; EXPRESSED IN LUNG, SIGNAL = 0.94; EXPRESSED IN BT474, SIGNAL = 0.88; EST_HUMAN HIT: AI246239.1, EVALUE 0.00e+00; SWISSPROT HIT: Q9Y6J6, EVALUE 3.00e-55; NT HIT: AF302095.1, EVALUE 0.00e+00
ttttattacttatatggacaattggcgccagaacacaacagctgagcaagaggccctccaagccaaagttgatgctgagaacttctactatgtcatcctgtacctcatggtgatgattggaatgttctctttcatcatcgtggccatcctggtgagcactgtgaaatccaagagacgggaacactccaatgacccctaccaccagtacattgtagaggactggcaggaaaagtacaagagccaaatcttgaatctagaagaatcgaaggccaccatccatgagaacattggtgcggctgggttcaaaatgtc

SEQ ID NO: 20234 - DNA, 243 bp, Homo sapiens
  MAP TO AL035682.16; EXPRESSED IN FETAL LIVER, SIGNAL = 0.83; EXPRESSED IN LUNG, SIGNAL = 0.72; EXPRESSED IN BT474, SIGNAL = 0.64; EXPRESSED IN BONE MARROW, SIGNAL = 0.65; EXPRESSED IN ADULT LIVER, SIGNAL = 0.75; EXPRESSED IN HEART, SIGNAL = 0.99; EXPRESSED IN PLACENTA, SIGNAL = 0.7; NT HIT: AE000845.1, EVALUE 3.70e-02; EST_HUMAN HIT: AA701634.1, EVALUE 8.70e-01; SWISSPROT HIT: P33485, EVALUE 2.00e+00
aagagacagaaaaaagagaaaacacgcctttagctatattctagtactactacaactccaagtgcaggccaggggccttggcatcactggagagcttgtcagacatgcagtacacctcaggccccaccccagacctgcccagcccaggtctgcagttttacaaggagcccatgtgattcttgcgcactatcaagtttgagaagctctgttcagccctggccaattagaatgggaatgggaagt

SEQ ID NO: 20235 - DNA, 203 bp, Homo sapiens; identical to SEQ ID NO: 17174
  MAP TO AP000111.1; EXPRESSED IN HBL100, SIGNAL = 0.91; EXPRESSED IN FETAL LIVER, SIGNAL = 0.73; EXPRESSED IN LUNG, SIGNAL =   1; EXPRESSED IN ADULT LIVER, SIGNAL = 1.4; EXPRESSED IN BRAIN, SIGNAL = 0.71; EXPRESSED IN BONE MARROW, SIGNAL = 3.2; EXPRESSED IN PLACENTA, SIGNAL = 0.72; EXPRESSED IN HEART, SIGNAL =   1; EXPRESSED IN HELA, SIGNAL = 0.62; EXPRESSED IN BT474, SIGNAL = 0.61; NT HIT: AF223391.1, EVALUE 2.00e-15; EST_HUMAN HIT: AW995965.1, EVALUE 9.00e-12; SWISSPROT HIT: Q46339, EVALUE 2.80e+00

SEQ ID NO: 20236 - DNA, 125 bp, Homo sapiens
  MAP TO AF196779.1; EXPRESSED IN LUNG, SIGNAL =   6; EXPRESSED IN BRAIN, SIGNAL = 5.7; EXPRESSED IN HEART, SIGNAL = 5.6; EXPRESSED IN FETAL LIVER, SIGNAL = 5.9; EXPRESSED IN ADULT LIVER, SIGNAL = 6.1; EXPRESSED IN BONE MARROW, SIGNAL = 5.7; EXPRESSED IN PLACENTA, SIGNAL = 5.5; EXPRESSED IN HELA, SIGNAL = 5.9; EXPRESSED IN HBL100, SIGNAL =   5; EXPRESSED IN BT474, SIGNAL = 4.5; EST_HUMAN HIT: BE900417.1, EVALUE 2.00e-64; NT HIT: gi11420017, EVALUE 2.00e-64; SWISSPROT HIT: Q92917, EVALUE 1.00e-16
tgtctctgcccggggttcgctgtctgccccttccccgctgggggtgcatcctttctggatcatggggatagcgagcgtggggtcgacacccgcattctctctctcttccagagacttcttggatt

SEQ ID NO: 20237 - DNA, 427 bp, Homo sapiens; identical to SEQ ID NO: 3467
  MAP TO AC011153.2; EXPRESSED IN BONE MARROW, SIGNAL = 5.5; EXPRESSED IN LUNG, SIGNAL = 5.1; EXPRESSED IN BRAIN, SIGNAL = 4.7; EXPRESSED IN HELA, SIGNAL = 4.9; EXPRESSED IN PLACENTA, SIGNAL = 4.6; EXPRESSED IN HBL100, SIGNAL = 4.8; EXPRESSED IN HEART, SIGNAL = 4.2; EXPRESSED IN FETAL LIVER, SIGNAL = 4.3; EXPRESSED IN BT474, SIGNAL = 4.3; EXPRESSED IN ADULT LIVER, SIGNAL = 5.9; SWISSPROT HIT: O95985, EVALUE 4.20e+00; EST_HUMAN HIT: BF514710.1, EVALUE 1.00e-01; NT HIT: AJ404883.1, EVALUE 1.70e-02

SEQ ID NO: 20238 - DNA, 124 bp, Homo sapiens
  MAP TO AC011897.2; EXPRESSED IN BT474, SIGNAL =   1; EXPRESSED IN ADULT LIVER, SIGNAL = 1.4; EXPRESSED IN BONE MARROW, SIGNAL = 1.3; EXPRESSED IN LUNG, SIGNAL = 1.1; EXPRESSED IN BRAIN, SIGNAL = 1.2; EXPRESSED IN HELA, SIGNAL = 1.1; EXPRESSED IN HBL100, SIGNAL = 0.99; EXPRESSED IN HEART, SIGNAL = 0.98; EXPRESSED IN FETAL LIVER, SIGNAL =   1; NT HIT: AJ289609.1, EVALUE 4.30e+00; SWISSPROT HIT: P92623, EVALUE 3.00e+00; EST_HUMAN HIT: BF033991.1, EVALUE 1.00e-01
gagggaggatatggttgctgaaaagagtacattcacccaggtcgagggggtccagttgcaatacaaggagttggtggttggtgggtctcctaagagcatccatgagacaaagatccaactctaa

SEQ ID NO: 20239 - DNA, 255 bp, Homo sapiens
  MAP TO AL031283.15; EXPRESSED IN BONE MARROW, SIGNAL =   1; EXPRESSED IN FETAL LIVER, SIGNAL = 1.1; EXPRESSED IN ADULT LIVER, SIGNAL = 1.1; EXPRESSED IN HBL100, SIGNAL = 1.1; EXPRESSED IN HEART, SIGNAL = 0.96; EST_HUMAN HIT: BE888078.1, EVALUE 4.00e-83; NT HIT: AL114033.1, EVALUE 1.30e-01; SWISSPROT HIT: P42567, EVALUE 3.70e-02
atcatggtggaagagcggctaatcctgcagcagaagatggtaaaggccctccaggatgagcaggaatcacagagacacgggtttgaagaagagatcatggaatataaggagcaaatcaaacagcacgcccagacaattgtgagcctcgaagagaaactccagaaagtcactcagcaccataaaaaaatagaaggcgagattgcaacattgaaggacaatgacccaggtaagtccgaagggaggccaaggaaatct

SEQ ID NO: 20240 - DNA, 334 bp, Homo sapiens
  MAP TO AL033392.5; EXPRESSED IN ADULT LIVER, SIGNAL = 0.75; EXPRESSED IN HEART, SIGNAL = 0.92; EXPRESSED IN BONE MARROW, SIGNAL = 0.88; EXPRESSED IN FETAL LIVER, SIGNAL = 0.93; EXPRESSED IN BRAIN, SIGNAL = 0.89; EXPRESSED IN PLACENTA, SIGNAL = 0.89; EXPRESSED IN BT474, SIGNAL = 0.62; EXPRESSED IN HBL100, SIGNAL = 0.83; EXPRESSED IN LUNG, SIGNAL =   1; EXPRESSED IN HELA, SIGNAL = 0.74; NT HIT: AF001504.1, EVALUE 3.00e-83; EST_HUMAN HIT: AI384007.1, EVALUE 0.00e+00; SWISSPROT HIT: Q02952, EVALUE 1.00e-22
ctcctacagaagaatggtcagctgtccaccatcaatggcgtagctgagcaagatgagctcagcctccaggagggtgacctaaatggccagaaaggagccctgaacggtcaaggagccctaaacagccaggaggaagaagaagtcattgtcacagagggtaagccgcccctccaggaactggaaggcacacagcacttgcaacaaactttggactcagcagaaaatactctgtcatactgcctggtggtggattggtgttaacagcaaaaacaatcaattggttacaaaaggaagtatttatctgaccatttggataccccctatacttagacct

SEQ ID NO: 20241 - DNA, 1635 bp, Homo sapiens
  MAP TO AC006547.9; EXPRESSED IN LUNG, SIGNAL =  17; EXPRESSED IN PLACENTA, SIGNAL =  11; EXPRESSED IN HELA, SIGNAL = 8.6; EXPRESSED IN HEART, SIGNAL =   9; EXPRESSED IN HBL100, SIGNAL =  12; EXPRESSED IN BT474, SIGNAL =  11; EXPRESSED IN FETAL LIVER, SIGNAL =  10; EXPRESSED IN ADULT LIVER, SIGNAL = 8.4; EXPRESSED IN BONE MARROW, SIGNAL =  10; EXPRESSED IN BRAIN, SIGNAL =  12
ttacatcatcaccactgtcaccatgagcatggccataaccaccatcatggtcagctccaccagcatcaccaccaccaccaccaccatcaccatcactgccaccaccaccgccaccatgactaccaccaccatcaccaccaccaccaccatcactaccaccaccaccatcactaccaccaccaccaccacgatcactaccaccaccaccaccatcaccatcactaccaccaccaccaccatcaccatcaccaccaccatcactaccaccaccaccaccaccaccatcaccatcactaccaccaccatcactaccaccaccaccaccaccaccaccatcactacaaccactaccaccaccaccaccatcactacgaccaccaccataaccatcactaccaccatcaccaccaccaccatcaccatcaccaccaccatcaccatcactaccaccaccaccaccaccaccatcactaccaccaccaccatcactaccaccatcaccatcactaccaccaccaccaccaccaccatcactaccaccaccaccaccaccatcatcaccaccaccaccaccaccaccaccatcactaccaccaccaccaccatcactaccactaccaccaccatcactgccaccaccaccaccaccaccatcactaccaccaccaccaccatcactgccaccaccaccaccaccaccatcactaccaccaccaccatcaccaccaccaccaccatcactaccaccaccaccaccaccatcactaccaccaccaccaccaccatcactaccaccaccaccatcaccaccaccaccaccatcactaccaccaccaccaccaccaccatcactaccaccaccaccaccaccatcactaccaccaccaccaccatcactaccaccaccaccaccaccaccatcactaccaccaccaccaccatcaccatcactaccaccatcaccaccaccaccaccatcaccaccaccaccatcaccatcactaccaccaccaccatcaccaccaccaccaccatcactaccaccaccaccaccaccaccaccatcactaccaccaccaccaccaccatcactaccaccaccaccaccatcactaccaccaccaccaccaccatcactaccaccaccaccaccatcaccatcactaccaccatcaccaccaccaccaccatcaccaccaccaccatcaccatcactaccaccaccaccaccaccatcactaccaccatcaccaccatcaccaccaccatcactacaaccaccatcactaccaccatcaccactaccaccatcactaccaccaccaccaccaccatcaccatcacttccaccaccaccaccaccaccatcactaccaccaccaccaccaccatcaccatcacttccaccaccaccaccaccaccatcactaccaccaccaccaccaccatcaccatcacttccaccaccaccaccaccaccatcactaccaccactaccaccaggaccaccatcactaccaccaccaccaccaccatcactaccaccatcaccaccaccaccaccaccatcactaccaccaccaccaccaccatcactaccaccaccaccatcaccatcaccaccaccaccaccac

SEQ ID NO: 20242 - DNA, 109 bp, Homo sapiens
  MAP TO AC011994.2; EXPRESSED IN HELA, SIGNAL = 2.7; EXPRESSED IN HBL100, SIGNAL = 2.9; EXPRESSED IN HEART, SIGNAL = 2.8; EXPRESSED IN FETAL LIVER, SIGNAL = 2.3; EXPRESSED IN ADULT LIVER, SIGNAL = 3.2; EXPRESSED IN LUNG, SIGNAL = 2.8; EXPRESSED IN PLACENTA, SIGNAL = 3.6; EXPRESSED IN BT474, SIGNAL = 2.8; EXPRESSED IN BRAIN, SIGNAL =   3; EXPRESSED IN BONE MARROW, SIGNAL =   3; NT HIT: AE000688.1, EVALUE 9.30e-01; EST_HUMAN HIT: BE395247.1, EVALUE 5.40e+00; SWISSPROT HIT: P54259, EVALUE 9.10e+00
ctgaatactggtttttgtgctggaccctgcacactgctgcaggactcgcagcaggaacctacaaatcatggtccctgccctcccggagcttttggctttgaagaggaca

SEQ ID NO: 20243 - DNA, 657 bp, Homo sapiens
  MAP TO AL023280.1; EXPRESSED IN BRAIN, SIGNAL = 1.1; EXPRESSED IN BONE MARROW, SIGNAL = 1.1; EXPRESSED IN LUNG, SIGNAL = 2.2; EXPRESSED IN HBL100, SIGNAL = 1.1; EXPRESSED IN HEART, SIGNAL = 0.96; EXPRESSED IN BT474, SIGNAL = 1.2; EXPRESSED IN FETAL LIVER, SIGNAL = 1.5; EXPRESSED IN ADULT LIVER, SIGNAL = 1.1; EST_HUMAN HIT: AW867015.1, EVALUE 1.00e-124; NT HIT: M10976.1, EVALUE 0.00e+00; SWISSPROT HIT: P10262, EVALUE 3.00e-30
ggcatttgttcttccaatgtcctatttctttacaataagcacactgattacgctgcaagctctgacaaccaggctgaatttctttcccggggccccccttcccttgcctctttggggggacccctgtgattgctgcagctaacaggtcggcatttcgccggacctgatgttcattctctctgcggttttccttagggcttactgcatccctgtttacaaacacctggttagctatttctaataactgtgatgtgttcatccctgcaaacccagcctgtttctgcagttttcttctaatgtcttctgcactttgactaactaaagccatgttaatcatgcgctgattttcaggactattgggatcaaagggagtatacatacaataggcctcacacagcctctcgtagaattgtgctggactttcttcttttccctgaatggccacgtttgtggccttctgggctcccctctttaatccttccaagagagcttccctgtatcggtttagcctttgcatatcctctctttcatttgggtcccactgggggtcggttcccggtaactgggtccttacatactcttgggggttttggtaatcagccggtgcatgttcctctagccacttagttgctgcttggagcactctccgcctttcat

SEQ ID NO: 20244 - DNA, 200 bp, Homo sapiens
  MAP TO AC008177.1; EXPRESSED IN LUNG, SIGNAL =  12; EXPRESSED IN HELA, SIGNAL = 1.1; EXPRESSED IN PLACENTA, SIGNAL = 1.1; EXPRESSED IN BT474, SIGNAL = 1.1; EXPRESSED IN BONE MARROW, SIGNAL = 1.7; EXPRESSED IN HBL100, SIGNAL =   1; EXPRESSED IN FETAL LIVER, SIGNAL = 0.9; EXPRESSED IN ADULT LIVER, SIGNAL = 0.9; EXPRESSED IN BRAIN, SIGNAL = 1.2; EXPRESSED IN HEART, SIGNAL = 1.2; NT HIT: AF240698.1, EVALUE 1.00e-109; EST_HUMAN HIT: AW794617.1, EVALUE 1.00e-109; SWISSPROT HIT: P55006, EVALUE 3.00e-11
ctctgctttctgtttcaacaataaaaagtcttgcaaagctgctggcatgtgagacagaggtatccagaaaattttggcatcttttccagcggcataatgagtcttagggaagagacttgttagagcgtggtccatgcactctaccaccggagagaggtccatgttcacataggatttattgcctttcagtttgtctagac

SEQ ID NO: 20245 - DNA, 144 bp, Homo sapiens
  MAP TO AC011235.2; EXPRESSED IN BRAIN, SIGNAL = 1.1; EXPRESSED IN HELA, SIGNAL = 1.1; EXPRESSED IN HBL100, SIGNAL = 1.1; EXPRESSED IN HEART, SIGNAL = 1.1; EXPRESSED IN FETAL LIVER, SIGNAL =   1; EXPRESSED IN LUNG, SIGNAL = 1.1; EXPRESSED IN BONE MARROW, SIGNAL = 1.3; EXPRESSED IN PLACENTA, SIGNAL = 0.9; EXPRESSED IN ADULT LIVER, SIGNAL = 1.4; EXPRESSED IN BT474, SIGNAL =   1; NT HIT: AL163303.2, EVALUE 7.00e-05; EST_HUMAN HIT: AV657555.1, EVALUE 2.00e-06; SWISSPROT HIT: P37173, EVALUE 8.80e+00
gaggtggctgtggatgttgacaatgtgcctttcatggaatactttttcatcctggatgacagcctaatgcctaagtgtctaaccctgaagtttcctctcccaggaaacttgtttatactggcagatgcccttgtggctcttgtc

SEQ ID NO: 20246 - DNA, 116 bp, Homo sapiens
  MAP TO AL049562.7; EXPRESSED IN BT474, SIGNAL = 1.2; EXPRESSED IN HELA, SIGNAL = 0.59; EXPRESSED IN PLACENTA, SIGNAL = 0.75; EXPRESSED IN FETAL LIVER, SIGNAL = 0.68; EXPRESSED IN LUNG, SIGNAL = 0.6; EXPRESSED IN ADULT LIVER, SIGNAL = 0.95; EXPRESSED IN HEART, SIGNAL = 0.98; NT HIT: M11723.1, EVALUE 1.60e-02; EST_HUMAN HIT: AA679130.1, EVALUE 5.90e+00; SWISSPROT HIT: P25185, EVALUE 9.00e+00
gctgctctgcaaattgagcctaataatccagcagatccaatgctatgtgaaatgtcagtggtggatggggatactgtttggagctttacacaggaccttataggtaattgcagcac

SEQ ID NO: 20247 - DNA, 232 bp, Homo sapiens; identical to SEQ ID NO: 19755
  MAP TO AP000121.1; EXPRESSED IN FETAL LIVER, SIGNAL = 0.82; EXPRESSED IN HEART, SIGNAL = 1.1; EXPRESSED IN BRAIN, SIGNAL = 0.82; EXPRESSED IN ADULT LIVER, SIGNAL = 0.95; EXPRESSED IN HELA, SIGNAL = 0.8; EXPRESSED IN LUNG, SIGNAL = 0.85; EXPRESSED IN HBL100, SIGNAL = 0.67; EXPRESSED IN BONE MARROW, SIGNAL = 0.86; EXPRESSED IN BT474, SIGNAL = 1.2; EXPRESSED IN PLACENTA, SIGNAL = 1.1; NT HIT: X56882.1, EVALUE 1.20e-01; SWISSPROT HIT: P43873, EVALUE 2.70e-01

SEQ ID NO: 20248 - DNA, 85 bp, Homo sapiens
  MAP TO AC007094.2; EXPRESSED IN FETAL LIVER, SIGNAL = 2.9; EXPRESSED IN ADULT LIVER, SIGNAL = 2.6; EXPRESSED IN BT474, SIGNAL = 2.3; EXPRESSED IN BRAIN, SIGNAL =   3; EXPRESSED IN BONE MARROW, SIGNAL = 2.7; EXPRESSED IN LUNG, SIGNAL =   3; EXPRESSED IN HELA, SIGNAL = 3.1; EXPRESSED IN PLACENTA, SIGNAL = 3.6; EXPRESSED IN HBL100, SIGNAL = 3.1; EXPRESSED IN HEART, SIGNAL = 2.5; EST_HUMAN HIT: AI653508.1, EVALUE 1.10e-02; NT HIT: U64315.1, EVALUE 4.40e-02
attccctgacctggagctgaagaacttgagccaaatgctcatccatgagtttgactttctaaagaaattaagcatgaagaacaag

SEQ ID NO: 20249 - DNA, 187 bp, Homo sapiens
  MAP TO AC008268.1; EXPRESSED IN PLACENTA, SIGNAL = 1.2; EXPRESSED IN HBL100, SIGNAL = 0.71; EXPRESSED IN FETAL LIVER, SIGNAL = 1.2; EXPRESSED IN LUNG, SIGNAL = 1.1; EXPRESSED IN HELA, SIGNAL = 0.84; EXPRESSED IN BRAIN, SIGNAL = 0.99; EXPRESSED IN HEART, SIGNAL = 0.81; EXPRESSED IN BT474, SIGNAL = 0.9; EXPRESSED IN BONE MARROW, SIGNAL = 0.88; EXPRESSED IN ADULT LIVER, SIGNAL = 0.92; SWISSPROT HIT: P16750, EVALUE 6.60e+00
cttcattgggatttgcaacgtcctcccggtacctgcagaatccattttgtaccccatcttaccgttcttttgtatcagggtgcctgtccacatcgagatcctgagactctgacgctgaaaaacgaaaaatatagactttcacttcgaagttgtaagttgcctcctaagagtgcagacttgaatttac

SEQ ID NO: 20250 - DNA, 166 bp, Homo sapiens
  MAP TO AC008074.1; EXPRESSED IN HBL100, SIGNAL = 0.75; EXPRESSED IN FETAL LIVER, SIGNAL = 0.91; EXPRESSED IN LUNG, SIGNAL = 0.82; EXPRESSED IN BRAIN, SIGNAL = 0.88; EXPRESSED IN BT474, SIGNAL = 1.1; EXPRESSED IN HELA, SIGNAL = 0.65; EXPRESSED IN ADULT LIVER, SIGNAL = 1.1; EXPRESSED IN HEART, SIGNAL = 0.84; NT HIT: gi11430511, EVALUE 7.00e-89; EST_HUMAN HIT: N90645.1, EVALUE 1.00e-84; SWISSPROT HIT: Q29058, EVALUE 1.50e-01
cttgacctgtggggactcagaagaccctcctgccgatgtggcaatcgaactcaaagctgtgttcacagatcggcagctactcagaaattcttgtatatctggggagaggggtgaagaacagtcagcaatcccttactttccattcattccagaccagccattcagg

SEQ ID NO: 20251 - DNA, 114 bp, Homo sapiens
  MAP TO AC007460.1; EXPRESSED IN HELA, SIGNAL = 5.7; EXPRESSED IN PLACENTA, SIGNAL = 5.3; EXPRESSED IN HBL100, SIGNAL = 5.1; EXPRESSED IN HEART, SIGNAL = 3.8; EXPRESSED IN ADULT LIVER, SIGNAL = 6.8; EXPRESSED IN BT474, SIGNAL = 4.4; EXPRESSED IN BONE MARROW, SIGNAL = 4.5; EXPRESSED IN BRAIN, SIGNAL = 5.9; EXPRESSED IN FETAL LIVER, SIGNAL = 5.6; EXPRESSED IN LUNG, SIGNAL = 5.8; EST_HUMAN HIT: AW850649.1, EVALUE 2.40e-02
caacagcagcagcaagaagacacgagtttgctgtgcaccaggcatcttttttcagagcagcatcaagctaccttgagtttgcttcacaccaggtactctaataagtgctttaag

SEQ ID NO: 20252 - DNA, 249 bp, Homo sapiens
  MAP TO AP000260.1; EXPRESSED IN BONE MARROW, SIGNAL = 0.76; EXPRESSED IN HBL100, SIGNAL = 0.78; EXPRESSED IN FETAL LIVER, SIGNAL = 0.82; EXPRESSED IN LUNG, SIGNAL = 0.86; EXPRESSED IN ADULT LIVER, SIGNAL = 0.66; EXPRESSED IN BRAIN, SIGNAL = 0.99; EXPRESSED IN PLACENTA, SIGNAL = 1.2; EXPRESSED IN HEART, SIGNAL = 0.87; EXPRESSED IN HELA, SIGNAL = 0.67; EXPRESSED IN BT474, SIGNAL = 1.1; SWISSPROT HIT: O88866, EVALUE 2.00e-25; EST_HUMAN HIT: AA418916.1, EVALUE 7.00e-87; NT HIT: gi11526180, EVALUE 7.00e-87
gatttctctggaagatctgagcccgagcgtcgtgctgcacatgaccgagaagctgggttacaagaacagcgacgtgatcaacactgtgctctccaaccgcgcctgccacatcctggccatctacttcctcttaaacaagaaactggagcgctatttgtcaggggtaagtgcgaccctagaggcgatcgtctctgctgtctgtggaaaaaagagctcctacacccaaagtgcttctcagttgctgacact

SEQ ID NO: 20253 - DNA, 141 bp, Homo sapiens
  MAP TO AJ010598.1; EXPRESSED IN PLACENTA, SIGNAL = 1.1; EXPRESSED IN HBL100, SIGNAL = 0.81; EXPRESSED IN FETAL LIVER, SIGNAL = 1.1; EXPRESSED IN LUNG, SIGNAL = 1.2; EXPRESSED IN HELA, SIGNAL = 1.5; EXPRESSED IN BRAIN, SIGNAL = 0.82; EXPRESSED IN HEART, SIGNAL = 0.93; EXPRESSED IN BT474, SIGNAL = 0.83; EXPRESSED IN ADULT LIVER, SIGNAL = 0.87; EST_HUMAN HIT: W52737.1, EVALUE 2.00e-55; NT HIT: gi11526132, EVALUE 5.00e-74; SWISSPROT HIT: Q9UHP3, EVALUE 5.00e-21
cacaagcagcaggagacccagaatatctagagcagccatcaagaagtgatttctcaaagcacttgaaagaagaaactattcaaataattaccaaggcatcacatgagcatgaagataaaagtcctgaaacagttttgcagt

SEQ ID NO: 20254 - DNA, 94 bp, Homo sapiens
  MAP TO AC007097.2; EXPRESSED IN HELA, SIGNAL = 1.9; EXPRESSED IN HEART, SIGNAL = 1.1; EXPRESSED IN BT474, SIGNAL = 1.3; EXPRESSED IN ADULT LIVER, SIGNAL = 1.6; EXPRESSED IN BRAIN, SIGNAL = 1.1; EXPRESSED IN PLACENTA, SIGNAL = 1.2; EXPRESSED IN HBL100, SIGNAL = 1.1; EXPRESSED IN FETAL LIVER, SIGNAL = 1.4; EXPRESSED IN LUNG, SIGNAL = 1.4; EXPRESSED IN BONE MARROW, SIGNAL =   1; NT HIT: AB011536.1, EVALUE 6.60e-01; EST_HUMAN HIT: BE677194.1, EVALUE 5.00e-46
caggatacagaaaccacccgtgactcggaaaacccaaacccctcgcacgtgctgtgccagctgccccaaaagcaggtaagatgctcctgggcat

SEQ ID NO: 20255 - DNA, 116 bp, Homo sapiens
  MAP TO AC010903.1; EXPRESSED IN HEART, SIGNAL = 0.94; EST_HUMAN HIT: BE217816.1, EVALUE 2.60e-01
atccttcagctgaaggaaagtcatgatctactggtggcggagttgaacattaatcatgacatttcgttgaaggtcaagatgaaagaaagagaggtgattattgaaacaatgaagta

SEQ ID NO: 20256 - DNA, 132 bp, Homo sapiens
  MAP TO AC009237.1; EXPRESSED IN HELA, SIGNAL = 0.96; EXPRESSED IN ADULT LIVER, SIGNAL = 0.99; EXPRESSED IN BRAIN, SIGNAL = 1.1; EXPRESSED IN PLACENTA, SIGNAL = 0.74; EXPRESSED IN HEART, SIGNAL = 0.99; EXPRESSED IN FETAL LIVER, SIGNAL = 0.84; EXPRESSED IN LUNG, SIGNAL = 0.82; EXPRESSED IN HBL100, SIGNAL = 0.9; EXPRESSED IN BONE MARROW, SIGNAL = 0.8; EXPRESSED IN BT474, SIGNAL = 0.66; NT HIT: AF247734.1, EVALUE 2.50e-01; EST_HUMAN HIT: BE394321.1, EVALUE 7.00e-64; SWISSPROT HIT: P08175, EVALUE 3.00e+00
ttagagaggttaaatagcatcctcaaagtcacccaggtcatgctctgcttctggagaggctgggatgcagcatgggagtgtgacctcctgagcacggactgcacgggccgcctcgcagccggcatggtgagg

SEQ ID NO: 20257 - DNA, 105 bp, Homo sapiens
  MAP TO AL049696.8; EXPRESSED IN BT474, SIGNAL = 0.74; EXPRESSED IN BONE MARROW, SIGNAL = 0.8; EXPRESSED IN LUNG, SIGNAL = 0.78; EXPRESSED IN HBL100, SIGNAL = 0.92; EXPRESSED IN HELA, SIGNAL = 0.96; EXPRESSED IN ADULT LIVER, SIGNAL = 0.93; EXPRESSED IN PLACENTA, SIGNAL = 0.83; EXPRESSED IN HEART, SIGNAL = 0.94; EXPRESSED IN BRAIN, SIGNAL = 0.97; EXPRESSED IN FETAL LIVER, SIGNAL = 0.85; NT HIT: AF029308.1, EVALUE 1.40e-02; EST_HUMAN HIT: AW188426.1, EVALUE 4.00e-03
actgatgctgtgcccatgtttcttttgttaggtgtttcaggctctggggccttcttgatcaggggctgcaggaggaagatatgcctcactatctctggatcaact

SEQ ID NO: 20258 - DNA, 172 bp, Homo sapiens
  MAP TO AC007100.2; EXPRESSED IN BONE MARROW, SIGNAL = 3.4; EXPRESSED IN BRAIN, SIGNAL = 3.5; EXPRESSED IN LUNG, SIGNAL = 6.6; EXPRESSED IN PLACENTA, SIGNAL = 4.5; EXPRESSED IN HELA, SIGNAL = 4.9; EXPRESSED IN HEART, SIGNAL = 3.5; EXPRESSED IN BT474, SIGNAL = 5.4; EXPRESSED IN HBL100, SIGNAL = 4.4; EXPRESSED IN FETAL LIVER, SIGNAL = 4.8; EXPRESSED IN ADULT LIVER, SIGNAL =   5; SWISSPROT HIT: P15083, EVALUE 6.50e+00; NT HIT: AJ243211.1, EVALUE 1.60e+00
cctgtcagttgttttgaggacatcagcaatggagggtgcctgctcctcctcagtcatcagcaggctctgaggaacagctcttccctttgttaaatgactgccaagtgtgtattctctgctttctaaggcagcctcagggtagggtctggagcctctgctctcaggtagcctc

SEQ ID NO: 20259 - DNA, 148 bp, Homo sapiens
  MAP TO AC008854.2; EXPRESSED IN LUNG, SIGNAL = 1.5; EXPRESSED IN HELA, SIGNAL = 1.1; EXPRESSED IN PLACENTA, SIGNAL = 1.3; EXPRESSED IN HEART, SIGNAL = 1.1; EXPRESSED IN ADULT LIVER, SIGNAL = 1.8; EXPRESSED IN BT474, SIGNAL = 1.1; EXPRESSED IN BONE MARROW, SIGNAL = 1.2; EXPRESSED IN HBL100, SIGNAL = 1.3; EXPRESSED IN FETAL LIVER, SIGNAL = 1.3; EXPRESSED IN BRAIN, SIGNAL = 1.6; NT HIT: Z75059.1, EVALUE 1.80e-02; EST_HUMAN HIT: AV703184.1, EVALUE 2.00e-56; SWISSPROT HIT: P34725, EVALUE 8.70e+00
gcaaaattgaggagagtgctgaaacacctgccctagaagactcctcatcatcccccgtagatagtcagcaacattcctggcaggtttccacagacattgagaacactgaaaggtaagtgggaagttaccctgaatagactgccaatcc

SEQ ID NO: 20260 - DNA, 133 bp, Homo sapiens
  MAP TO AC008064.1; EXPRESSED IN LUNG, SIGNAL = 0.77; EXPRESSED IN BONE MARROW, SIGNAL = 0.87; EXPRESSED IN HBL100, SIGNAL = 1.1; EXPRESSED IN FETAL LIVER, SIGNAL = 0.84; EXPRESSED IN BRAIN, SIGNAL = 1.2; EXPRESSED IN BT474, SIGNAL = 1.2; EXPRESSED IN HELA, SIGNAL = 0.77; EXPRESSED IN HEART, SIGNAL = 0.86; NT HIT: AF233875.1, EVALUE 2.50e-01; EST_HUMAN HIT: AW452314.1, EVALUE 3.00e-01
ttactcccaacttcacagtaaaaactggtcttatgggctttttttttctgagcttccaatccccaagctacaaatttatctctgtccagcccatcctcatctttcttctccatctcaaagaaatgggtctacc

SEQ ID NO: 20261 - DNA, 292 bp, Homo sapiens
  MAP TO AP000049.1; EXPRESSED IN FETAL LIVER, SIGNAL = 0.76; EXPRESSED IN HELA, SIGNAL = 0.66; EXPRESSED IN HEART, SIGNAL = 0.91; EXPRESSED IN ADULT LIVER, SIGNAL = 0.82; EXPRESSED IN LUNG, SIGNAL = 0.67; EXPRESSED IN HBL100, SIGNAL = 0.7; EXPRESSED IN BT474, SIGNAL = 0.87; EXPRESSED IN PLACENTA, SIGNAL = 0.75; EST_HUMAN HIT: BE538712.1, EVALUE 8.00e-88; NT HIT: AF114488.1, EVALUE 5.00e-88; SWISSPROT HIT: P34216, EVALUE 2.00e-04
gggtaagagtgctaattattttgttttcgtgttggtgggagtggtggttttggaaaggttcttttatggtcacagttgttctcaggccatgctgttggtttgcagggcactagctgacatgaataatgatggaagaatggatcaagtggagttttccatagctatgaaacttatcaaactgaagctacaaggatatcagctaccctctgcacttccccctgtcatgaaacagcaaccagttgctatttctagcgcaccagcatttggtaagtctgaaaatgaattggtttct

SEQ ID NO: 20262 - DNA, 259 bp, Homo sapiens
  MAP TO AL031735.9; EXPRESSED IN PLACENTA, SIGNAL = 1.2; EXPRESSED IN HBL100, SIGNAL = 0.84; EXPRESSED IN FETAL LIVER, SIGNAL = 0.94; EXPRESSED IN LUNG, SIGNAL = 1.2; EXPRESSED IN HELA, SIGNAL =   1; EXPRESSED IN ADULT LIVER, SIGNAL = 1.2; EXPRESSED IN BRAIN, SIGNAL = 1.2; EXPRESSED IN HEART, SIGNAL = 1.1; EXPRESSED IN BONE MARROW, SIGNAL = 0.84; EXPRESSED IN BT474, SIGNAL =   1; NT HIT: AL117236.1, EVALUE 1.00e-121; SWISSPROT HIT: P02674, EVALUE 1.80e+00
ctggtagactgcttggccagcatggccacgtaggtgaccacgaagctctgaaacttagcccgttgttcctcccagcggtcatctactgagtagtagttgggcaggggtgctccaaacaggatctcactgcgcaggagggagctcttcagattgtctgcagagaggccctcatccacataccagtagaactcagggtgagtcatggccagctccagggagcctgcaaggacaggggtgggggccccaagagttcagctgg

SEQ ID NO: 20263 - DNA, 115 bp, Homo sapiens
  MAP TO AC007554.1; EXPRESSED IN FETAL LIVER, SIGNAL = 0.62; EXPRESSED IN LUNG, SIGNAL = 0.68; EXPRESSED IN HELA, SIGNAL = 0.63; EXPRESSED IN BRAIN, SIGNAL = 0.88; EXPRESSED IN PLACENTA, SIGNAL = 0.93; EXPRESSED IN BONE MARROW, SIGNAL = 1.2; EXPRESSED IN HEART, SIGNAL = 0.98; EST_HUMAN HIT: AU137695.1, EVALUE 2.00e-58; SWISSPROT HIT: P13611, EVALUE 1.00e-19; NT HIT: U16306.1, EVALUE 1.00e-58
cttgctcacaaagtgcaccaacataacttggaaggcagaggcacctgaatgtgttaaaaccatcaacacaagtggctccattacgacagggattagagtgacattcatcaaaatc

SEQ ID NO: 20264 - DNA, 163 bp, Homo sapiens
  MAP TO AL049565.3; EXPRESSED IN FETAL LIVER, SIGNAL = 0.59; EXPRESSED IN ADULT LIVER, SIGNAL = 0.69; EXPRESSED IN BRAIN, SIGNAL = 0.79; EXPRESSED IN HEART, SIGNAL = 0.79; EXPRESSED IN PLACENTA, SIGNAL = 1.1; EXPRESSED IN BT474, SIGNAL = 0.92; EXPRESSED IN HELA, SIGNAL = 0.75; EXPRESSED IN LUNG, SIGNAL = 0.62; EXPRESSED IN HBL100, SIGNAL = 0.77; EXPRESSED IN BONE MARROW, SIGNAL = 0.75; NT HIT: AL161549.2, EVALUE 5.80e+00; SWISSPROT HIT: P52452, EVALUE 2.90e+00
aagacttgtcttgatttttctttgtattcaaaggaaacccaggaagaggtcactaaaattactgtgtcctgagttggaagtaaaaacagtcatggagttgagacatttgaaaaataccatcaagatattcaaggatgtcataatcaagctgaagatcatctac

SEQ ID NO: 20265 - DNA, 535 bp, Homo sapiens
  MAP TO AL035551.6; EXPRESSED IN HEART, SIGNAL = 0.91; EXPRESSED IN LUNG, SIGNAL = 0.67; EXPRESSED IN ADULT LIVER, SIGNAL = 0.74; EXPRESSED IN BRAIN, SIGNAL = 0.7; EXPRESSED IN PLACENTA, SIGNAL = 0.67; EXPRESSED IN BT474, SIGNAL = 1.2; EXPRESSED IN BONE MARROW, SIGNAL = 0.81; EXPRESSED IN HBL100, SIGNAL = 0.97; EXPRESSED IN FETAL LIVER, SIGNAL = 0.62; EXPRESSED IN HELA, SIGNAL = 0.68; EST_HUMAN HIT: AL041685.1, EVALUE 1.00e-10; NT HIT: gi11423025, EVALUE 2.00e-08; SWISSPROT HIT: O08770, EVALUE 7.50e+00
gcctccagagaaatcagtaggcattatttttgttgacattcccaatcttcttaaaacaattaaagaatgggggcaaggaaatgagcacatcaatgacatgcaaaaaaaaggaaagagttctgttgttgaggtcctaaatagtaacgatcactctgttattatctaactcttcttccccagaagctattgtctttgaatttgcacaacaacaaagtttgctggctggatgacctgtctaacattataaagaaggccccgaaagtcaagatcctgaacctctccaaaaatgaggtgacaagaaagggccagatcaaatttgggttgagggtaaattatagtgcacatcaggatgataacaagaaataggatccccagcagacacaggccagctcctggaaatgccctcactggccagaccacccactgctgctcttctttttctcctaggagcagcttgtgcaagtacttcaaggatagcagaaatataaaaactctcaagcttgtgatggggaagactgggcaaggtaagggggtg

SEQ ID NO: 20266 - DNA, 1377 bp, Homo sapiens
  MAP TO AL049767.9; EXPRESSED IN BT474, SIGNAL = 0.87; EXPRESSED IN HELA, SIGNAL = 5.3; EXPRESSED IN FETAL LIVER, SIGNAL = 0.73; EXPRESSED IN LUNG, SIGNAL = 0.77; EXPRESSED IN ADULT LIVER, SIGNAL = 1.2; EXPRESSED IN PLACENTA, SIGNAL = 4.5; EXPRESSED IN BONE MARROW, SIGNAL = 0.92; EXPRESSED IN HBL100, SIGNAL = 1.1; EXPRESSED IN BRAIN, SIGNAL = 0.85; EXPRESSED IN HEART, SIGNAL = 0.82; NT HIT: gi11420872, EVALUE 0.00e+00; SWISSPROT HIT: Q02383, EVALUE 0.00e+00; EST_HUMAN HIT: BF678746.1, EVALUE 0.00e+00
gatcatcttgggcaacctcatgctcagtaattacaatattatgtgactcactggattcctgtttgtatctgcctttttgttcatgactgagtaggtcttgtttgctatctgcagattgaccagactttccttttgcattttggccagaccattgatcttgattaggatttggtgtctggatttgagacttgccttctactagcttttcaatttggaaagaaatactgctttgggatacatctttctgcgtgctctttcctccatagttgagtcgtctttcttctgtacttgaagattggtatgacattttattttccttatggccatgctcttgatcttgactaggaattgttacctggttttgagacttgccatgtattttctcttcagtttggatagaaatactgcctttggatacacctttctgtacatccttttctccactgttgagacgtctttcttctgtactcgaagattggtatgatattttattttccttatggccatactcttgagcttgactaggaattcttacctggttttgagacttgccatgtatttgctcttcagtttggatcgaaatactgcctttggatacacctttctggatgcccttttctccacagttgagatgtctttcttctgtacttgaagattggtatgatattttattttccttatggccatgctcttgatcttgactatgaattgttacctggttttgagacttgccatgtattttctcttcagtttggatagaaatgctgcctttggatacatctttctgtacactcttttctccatggtgaagttgtctttcttctgtacgtgaagacgggtatgatattttatgtgccttccggccatgctcttgatcttgactgagattttttgtctggtgttgattcttgttatatactaggagctcatcttgggtagtaaaaatgtctttgggtccatgttggagtctgtcttgatgtgcaggatggagtgaagtttgtagtttacttgaatgttcctctctcacgtcaaccacattttggtaatgccctttattttgatgagaatttttagtctcacgttgttgtttgttaactactagttcttcagtttggagaacataactgctttgggatccaccttgtgttctacctttttgtgcaccagaggctgaagcttgttctttacttagtccatgaacccatagccttttttctgtgtttgaacattgactggataatccctttccagatgggctattcccctgatcttgagaaggattttgtgtcccatgatgagcttggcctcctttatgatgtataactatcatgtgaaaatgaccttttgatttatcatggtctctgccttcttgtttat

SEQ ID NO: 20267 - DNA, 143 bp, Homo sapiens
  MAP TO AC009237.1; EXPRESSED IN PLACENTA, SIGNAL = 0.94; EXPRESSED IN BONE MARROW, SIGNAL = 0.92; EXPRESSED IN HEART, SIGNAL = 0.79; EXPRESSED IN BT474, SIGNAL = 0.8; EXPRESSED IN HBL100, SIGNAL = 0.76; EXPRESSED IN FETAL LIVER, SIGNAL = 0.65; EXPRESSED IN LUNG, SIGNAL = 0.68; NT HIT: X66401.1, EVALUE 1.00e-03; EST_HUMAN HIT: AA852063.1, EVALUE 4.80e-01; SWISSPROT HIT: Q9X2A2, EVALUE 2.30e+00
ttcagggaagcttcttatatcgagagtggtccagaagaattctaccaaagatttaagaagtgtttttctacaactcatatcttcataagtatgaagggtaaagattctcagaatacagttcatggatatctgattcttaacag

SEQ ID NO: 20268 - DNA, 519 bp, Homo sapiens
  MAP TO AL021878.1; EXPRESSED IN PLACENTA, SIGNAL = 1.2; EXPRESSED IN HELA, SIGNAL = 2.2; EXPRESSED IN HEART, SIGNAL = 1.3; EXPRESSED IN FETAL LIVER, SIGNAL = 1.5; EXPRESSED IN BT474, SIGNAL = 2.2; EXPRESSED IN BRAIN, SIGNAL = 1.7; EXPRESSED IN LUNG, SIGNAL = 1.7; EXPRESSED IN HBL100, SIGNAL = 2.8; EXPRESSED IN BONE MARROW, SIGNAL =   1; EST_HUMAN HIT: BE882408.1, EVALUE 0.00e+00; NT HIT: gi9558756, EVALUE 0.00e+00; SWISSPROT HIT: P91917, EVALUE 8.00e-59
aattttatttcttcttcagttgttaaggtgtgttaaatttgaagaagataatatctccatcttcaacaatataatttctgccttgttgtctgtactttccagcagccttgactgcattttcagaaccttcctctttaaaatcttcatatttcattacttcagccataatgaatcccttttcaaaatctgtgtgaatctttcctgcagcctgaggagccttagtccctttcctgatggtccgtgcacgcacttcatctgggcctgcagtgaaaaagtattttagttggagtgctgcaaacccagccttaatgatctttggcaaagcactttgtgtcatgttcgcttccagatactgctgtctctcctcagcactcaattcttgcaacttgagttccaaggccccactaaaaggaatgaccaaggcacctgggtcatacttgtccacccactctttaatttttatcagccatttgtttttctttctaatgtagtctttttcagaaagattaaccaagtaga

SEQ ID NO: 20269 - DNA, 91 bp, Homo sapiens
  MAP TO AC012143.1; EXPRESSED IN PLACENTA, SIGNAL = 1.6; EXPRESSED IN HELA, SIGNAL = 1.6; EXPRESSED IN HBL100, SIGNAL = 1.7; EXPRESSED IN HEART, SIGNAL = 1.4; EXPRESSED IN FETAL LIVER, SIGNAL =   1; EXPRESSED IN BT474, SIGNAL = 1.6; EXPRESSED IN ADULT LIVER, SIGNAL = 1.2; EXPRESSED IN LUNG, SIGNAL = 1.7; EXPRESSED IN BONE MARROW, SIGNAL = 2.1; EXPRESSED IN BRAIN, SIGNAL = 1.5; EST_HUMAN HIT: BE795469.1, EVALUE 8.00e-08; NT HIT: AL163218.2, EVALUE 4.80e-02
atccaagaaccctctctgggaatctggatcgagatccctttttccaataacatagggaagatactcattctataatataaagttttttaaa

SEQ ID NO: 20270 - DNA, 155 bp, Homo sapiens
  MAP TO AF031078.1; EXPRESSED IN LUNG, SIGNAL = 1.5; EXPRESSED IN ADULT LIVER, SIGNAL = 1.4; EXPRESSED IN FETAL LIVER, SIGNAL = 1.1; EXPRESSED IN BT474, SIGNAL = 1.1; EXPRESSED IN BRAIN, SIGNAL = 1.2; EXPRESSED IN BONE MARROW, SIGNAL = 1.3; EXPRESSED IN PLACENTA, SIGNAL = 1.1; EXPRESSED IN HEART, SIGNAL = 1.1; EXPRESSED IN HELA, SIGNAL = 1.3; EXPRESSED IN HBL100, SIGNAL = 1.1; NT HIT: AJ400877.1, EVALUE 1.20e+00; EST_HUMAN HIT: W37985.1, EVALUE 6.00e-03; SWISSPROT HIT: Q64336, EVALUE 5.20e+00
taacaacatgaaggtcatcactggagacctcatggagcagcttggcagagctgtggcagcaaaggaacaactggagaaggttgaagagggtgtggagacagggactggagtcttgctggtaaaggaaaacagagatgctagacaggtggggggtt

SEQ ID NO: 20271 - DNA, 107 bp, Homo sapiens
  MAP TO AC009227.1; EXPRESSED IN BT474, SIGNAL = 0.83; EXPRESSED IN LUNG, SIGNAL = 0.68; EXPRESSED IN HELA, SIGNAL = 0.73; EXPRESSED IN ADULT LIVER, SIGNAL = 0.81; EXPRESSED IN PLACENTA, SIGNAL = 0.96; EXPRESSED IN BONE MARROW, SIGNAL = 0.95; EXPRESSED IN HBL100, SIGNAL = 0.75; EXPRESSED IN FETAL LIVER, SIGNAL = 0.72; EXPRESSED IN BRAIN, SIGNAL = 0.71; EXPRESSED IN HEART, SIGNAL = 0.92; EST_HUMAN HIT: AV730554.1, EVALUE 6.00e-12; NT HIT: Z00015.1, EVALUE 2.00e-04
ttccctggcaatactcatcgtcttggtgattgaatttctgtgcagcaaccagcaggacctaagactgaatttctggtgtcttggtaagatattgagagtcagtacaa

SEQ ID NO: 20272 - DNA, 132 bp, Homo sapiens
  MAP TO AC012267.1; EXPRESSED IN BT474, SIGNAL = 8.8; EXPRESSED IN ADULT LIVER, SIGNAL = 1.8; EXPRESSED IN BRAIN, SIGNAL = 3.2; EXPRESSED IN HELA, SIGNAL = 6.7; EXPRESSED IN HBL100, SIGNAL = 7.3; EXPRESSED IN HEART, SIGNAL = 4.1; EXPRESSED IN FETAL LIVER, SIGNAL = 5.1; EXPRESSED IN LUNG, SIGNAL =   5; EXPRESSED IN BONE MARROW, SIGNAL = 5.4; EXPRESSED IN PLACENTA, SIGNAL = 6.1; EST_HUMAN HIT: AA532925.1, EVALUE 2.00e-54; NT HIT: gi4506616, EVALUE 1.00e-52; SWISSPROT HIT: P24049, EVALUE 5.30e-02
gccttactgaaaaggaacagattgctcctaaaccagaagaagaagttgcccagaagaaaaagatatcccagaagaaactgatgaaacaaaaacttatggcatgggagtaaattcagcattaaaataaatgca

SEQ ID NO: 20273 - DNA, 130 bp, Homo sapiens
  MAP TO AC007502.2; EXPRESSED IN BRAIN, SIGNAL = 7.5; EXPRESSED IN LUNG, SIGNAL = 7.9; EXPRESSED IN HELA, SIGNAL = 8.8; EXPRESSED IN PLACENTA, SIGNAL = 7.2; EXPRESSED IN HEART, SIGNAL = 7.9; EXPRESSED IN ADULT LIVER, SIGNAL = 8.3; EXPRESSED IN BT474, SIGNAL = 6.5; EXPRESSED IN BONE MARROW, SIGNAL = 7.9; EXPRESSED IN HBL100, SIGNAL = 6.3; EXPRESSED IN FETAL LIVER, SIGNAL =   8; NT HIT: AL161517.2, EVALUE 2.50e-01; SWISSPROT HIT: P15594, EVALUE 3.00e+00
aactgaaatccagaaacatcagcaattaaattttttacaatatgtgtgaagatgggcattgctgtctccttgagtgcaaattgggcatgatctgcctcaaggtgagagtctggtgtagccttttcttcca

SEQ ID NO: 20274 - DNA, 140 bp, Homo sapiens
  MAP TO AL035697.18; EXPRESSED IN PLACENTA, SIGNAL = 0.68; EXPRESSED IN LUNG, SIGNAL = 0.76; EXPRESSED IN HELA, SIGNAL = 0.94; EXPRESSED IN BT474, SIGNAL = 0.63; EXPRESSED IN FETAL LIVER, SIGNAL = 0.68; EXPRESSED IN BRAIN, SIGNAL = 0.91; EXPRESSED IN BONE MARROW, SIGNAL = 0.77; EXPRESSED IN ADULT LIVER, SIGNAL = 0.73; EXPRESSED IN HEART, SIGNAL = 0.96; NT HIT: gi7669537, EVALUE 2.00e-73; EST_HUMAN HIT: BE273776.1, EVALUE 7.30e+00; SWISSPROT HIT: Q04833, EVALUE 1.00e+00
aggccattgcccccttcgcaggtgactttcctctggtcaggctccggcagcagccccgctccacagccagggcgggggcataacacgccccccatctgcaggacacactcctctgcaccatactgctggtaccggttgta

SEQ ID NO: 20275 - DNA, 113 bp, Homo sapiens
  MAP TO Z84476.6; EXPRESSED IN BONE MARROW, SIGNAL = 0.65; EXPRESSED IN HBL100, SIGNAL = 0.68; EXPRESSED IN FETAL LIVER, SIGNAL = 0.71; EXPRESSED IN LUNG, SIGNAL = 0.61; EXPRESSED IN BT474, SIGNAL = 0.7; EXPRESSED IN HEART, SIGNAL = 0.84; EXPRESSED IN PLACENTA, SIGNAL = 0.72; EXPRESSED IN ADULT LIVER, SIGNAL = 0.67; NT HIT: X72069.1, EVALUE 2.10e-01; EST_HUMAN HIT: R07702.1, EVALUE 2.00e-57
cgtcctctggcgctctcggtctcttcgacccctttttactgtgttgatgataaatggggcaggattcccctcctgcaccacctgcagcatcctgtccaggatccatctgggag

SEQ ID NO: 20276 - DNA, 269 bp, Homo sapiens
  MAP TO AL023799.5; EXPRESSED IN ADULT LIVER, SIGNAL = 1.3; EXPRESSED IN BRAIN, SIGNAL = 1.5; EXPRESSED IN BT474, SIGNAL = 0.95; EXPRESSED IN PLACENTA, SIGNAL = 1.3; EXPRESSED IN HEART, SIGNAL = 1.4; EXPRESSED IN HELA, SIGNAL = 1.7; EXPRESSED IN LUNG, SIGNAL = 1.4; EXPRESSED IN FETAL LIVER, SIGNAL = 1.1; EXPRESSED IN HBL100, SIGNAL = 1.1; EXPRESSED IN BONE MARROW, SIGNAL = 0.82; NT HIT: AL133204.1, EVALUE 0.00e+00; EST_HUMAN HIT: BE084571.1, EVALUE 6.60e-01; SWISSPROT HIT: Q12231, EVALUE 4.50e-02
cttatgttcttcaaagcaaggctcattttattttttctgttgcgctgtcgcttttgcttgtaagagggttttgctttggacttagctatacgtccccttggcttacttgtattaactttacttgcagtggatgtagttgcatgaagcttacttgtcttagatctactggcattagattttctaggatttctagcagttgtattttgagatgtcggaggtgtgacctgaagaaaagaagtgcctggagcgcaaccgaaaggtgcagttgg

SEQ ID NO: 20277 - DNA, 274 bp, Homo sapiens
  MAP TO AC008277.1; EXPRESSED IN BT474, SIGNAL = 1.2; EXPRESSED IN HELA, SIGNAL = 0.84; EXPRESSED IN FETAL LIVER, SIGNAL = 0.89; EXPRESSED IN LUNG, SIGNAL =   1; EXPRESSED IN ADULT LIVER, SIGNAL = 1.2; EXPRESSED IN PLACENTA, SIGNAL = 1.2; EXPRESSED IN BONE MARROW, SIGNAL = 1.2; EXPRESSED IN HBL100, SIGNAL = 0.77; EXPRESSED IN BRAIN, SIGNAL = 1.2; EXPRESSED IN HEART, SIGNAL = 0.96; EST_HUMAN HIT: T07822.1, EVALUE 6.70e-01; SWISSPROT HIT: P13608, EVALUE 1.00e+00; NT HIT: gi11430990, EVALUE 0.00e+00
gtgaaaggtggagtatctatgatgggacttcagttttgtggatggcccactggtgtggttacttctaatattccatttacatcatctgtacctagtctaggatcggggttagggttatcagaaggaaatggtaattcattcttgacttccaatgttgcttcaagtaaaagtgaatctccagtaccacagaatgaaaaggccacttcagctcaacctgcagctgttgaagtagcaaaaccagtagattttcctagtccaaaacctattccagaag

SEQ ID NO: 20278 - DNA, 308 bp, Homo sapiens
  MAP TO AL009029.1; EXPRESSED IN PLACENTA, SIGNAL = 3.6; EXPRESSED IN HELA, SIGNAL = 3.7; EXPRESSED IN HEART, SIGNAL = 3.9; EXPRESSED IN FETAL LIVER, SIGNAL = 4.6; EXPRESSED IN BT474, SIGNAL = 3.4; EXPRESSED IN BRAIN, SIGNAL = 3.5; EXPRESSED IN LUNG, SIGNAL = 3.6; EXPRESSED IN HBL100, SIGNAL = 3.5; EXPRESSED IN ADULT LIVER, SIGNAL = 4.1; EXPRESSED IN BONE MARROW, SIGNAL = 3.9; NT HIT: AF111168.2, EVALUE 5.00e-08; EST_HUMAN HIT: BF342555.1, EVALUE 2.00e-14; SWISSPROT HIT: P39188, EVALUE 6.00e-20
ggtgttgatctttcacccaggttaaagtgcagtggcatgctcatgtctcactgcagtcttgaaattctgggcttaagtgatcctcctgtctcagtgtctcaagcaactggggctactggcacatgccaccatgactggatttttttttttaattatatgtttggagagatagtgtctcatcatgttgcacaggctggtcttgaagacttggcctcaaggaatcctttcacttcagcctcccaaagtgttgggattataaacatgagccaccgcatccagaaaattttaaattatattactatcaccat

SEQ ID NO: 20279 - DNA, 101 bp, Homo sapiens
  MAP TO AL035086.12; EXPRESSED IN FETAL LIVER, SIGNAL = 0.78; EXPRESSED IN BRAIN, SIGNAL = 0.82; EXPRESSED IN HEART, SIGNAL = 0.83; EXPRESSED IN BONE MARROW, SIGNAL = 0.7; EXPRESSED IN ADULT LIVER, SIGNAL = 0.73; EXPRESSED IN HELA, SIGNAL = 0.75; EXPRESSED IN LUNG, SIGNAL = 1.1; EXPRESSED IN PLACENTA, SIGNAL = 0.73; SWISSPROT HIT: Q64096, EVALUE 9.40e+00; EST_HUMAN HIT: BF359947.1, EVALUE 9.00e-48; NT HIT: AF036959.1, EVALUE 7.20e-01
ctattgaagtggtagatatcctgtatgtttccaaaaagggctgatctttcttcggtccccaggggaagttttgtttggtccctgatgcagtcaaggtaatc

SEQ ID NO: 20280 - DNA, 143 bp, Homo sapiens
  MAP TO AL079306.2; EXPRESSED IN ADULT LIVER, SIGNAL = 4.9; EXPRESSED IN HBL100, SIGNAL = 2.4; EXPRESSED IN HEART, SIGNAL = 1.3; EXPRESSED IN BRAIN, SIGNAL = 5.2; EXPRESSED IN LUNG, SIGNAL = 1.9; EXPRESSED IN BONE MARROW, SIGNAL = 4.6; EXPRESSED IN FETAL LIVER, SIGNAL = 5.3; EXPRESSED IN PLACENTA, SIGNAL = 2.7; EXPRESSED IN HELA, SIGNAL =   6; SWISSPROT HIT: P43423, EVALUE 3.90e+00; NT HIT: U91640.1, EVALUE 5.00e+00
ggcatcagaagctactctggaacaagccacctatctacttccctatgactatgaccaatcctagtgttgccatagaaaatcgcccaactctgaagattcatgccattctgatgacattttacaacaggctagcaacaacacct

SEQ ID NO: 20281 - DNA, 98 bp, Homo sapiens
  MAP TO AC008266.1; EXPRESSED IN BT474, SIGNAL =   1; EXPRESSED IN LUNG, SIGNAL = 0.88; EXPRESSED IN HELA, SIGNAL = 1.1; EXPRESSED IN BRAIN, SIGNAL = 0.94; EXPRESSED IN PLACENTA, SIGNAL = 0.77; EXPRESSED IN HBL100, SIGNAL = 0.84; EXPRESSED IN FETAL LIVER, SIGNAL = 0.85; EXPRESSED IN ADULT LIVER, SIGNAL = 0.94; EXPRESSED IN BONE MARROW, SIGNAL = 1.1; EXPRESSED IN HEART, SIGNAL = 0.88; NT HIT: AB020702.1, EVALUE 2.00e-35; EST_HUMAN HIT: AL040336.1, EVALUE 2.00e-35
acttggatggaattcttcaaatcctccgatacagagataccatagacttccatctgctgactgctctcgggaaggtgagtagaagccatggcacatag

SEQ ID NO: 20282 - DNA, 155 bp, Homo sapiens
  MAP TO AC008275.1; EXPRESSED IN FETAL LIVER, SIGNAL = 0.67; EXPRESSED IN BRAIN, SIGNAL = 0.71; EXPRESSED IN HEART, SIGNAL = 0.93; EXPRESSED IN PLACENTA, SIGNAL = 0.96; EXPRESSED IN LUNG, SIGNAL = 0.6; EXPRESSED IN HELA, SIGNAL = 0.66; SWISSPROT HIT: Q61292, EVALUE 2.20e+00; NT HIT: AJ400877.1, EVALUE 7.60e-02
actacctgctactgctcaccaggttcaatcagcatgtcatcatcaacatgatgggtcggcacaatgtcttgtggaagggaaaagccatcaagctccctgtggaccgaatgttgatagagtctgaagagttagtacaccctgactgcagaaaagag

SEQ ID NO: 20283 - DNA, 115 bp, Homo sapiens
  MAP TO AC006229.14; EXPRESSED IN BONE MARROW, SIGNAL = 0.85; EXPRESSED IN HEART, SIGNAL = 0.87; EXPRESSED IN PLACENTA, SIGNAL = 0.84; EXPRESSED IN BRAIN, SIGNAL =   1; EXPRESSED IN ADULT LIVER, SIGNAL = 0.8; EXPRESSED IN HELA, SIGNAL = 0.67; EXPRESSED IN LUNG, SIGNAL = 0.83; EXPRESSED IN FETAL LIVER, SIGNAL = 0.8; EXPRESSED IN HBL100, SIGNAL = 1.4; EXPRESSED IN BT474, SIGNAL = 0.74
tacagtgaaatgacactggacatgatgatgatggtgatgatgatcatgttgatggtggtggtggtggtggcagcagtggctgtggctacgtttctatcgagtgcttacgtatgct

SEQ ID NO: 20284 - DNA, 184 bp, Homo sapiens
  MAP TO AC009650.2; EXPRESSED IN BRAIN, SIGNAL = 1.7; EXPRESSED IN HELA, SIGNAL = 2.6; EXPRESSED IN PLACENTA, SIGNAL =   1; EXPRESSED IN HBL100, SIGNAL = 1.7; EXPRESSED IN HEART, SIGNAL = 1.1; EXPRESSED IN FETAL LIVER, SIGNAL = 0.93; SWISSPROT HIT: P54105, EVALUE 5.00e-09; EST_HUMAN HIT: BF034818.1, EVALUE 5.00e-57; NT HIT: gi4502890, EVALUE 3.00e-57
  unsure 137
tggtgaatgacaaatttgaagaatccaaagaatctgttgctgatgaagaagaggaagacagtgatgatgttgaacttattactgaatttatatttgtacctagtgataaatcagcactgggggcaatgttcactgcnaatgtgtgaatgccaggccttgcatccagatcctgaggatgaggatg

SEQ ID NO: 20285 - DNA, 156 bp, Homo sapiens
  MAP TO AC008179.1; EXPRESSED IN ADULT LIVER, SIGNAL = 3.8; EXPRESSED IN BT474, SIGNAL = 0.75; EXPRESSED IN PLACENTA, SIGNAL = 0.92; EXPRESSED IN HEART, SIGNAL = 0.95; EXPRESSED IN HELA, SIGNAL = 0.91; EXPRESSED IN LUNG, SIGNAL = 1.1; EXPRESSED IN FETAL LIVER, SIGNAL = 1.2; EXPRESSED IN HBL100, SIGNAL = 0.82; EXPRESSED IN BONE MARROW, SIGNAL = 2.5; NT HIT: gi11430241, EVALUE 6.00e-83; EST_HUMAN HIT: BF701826.1, EVALUE 6.00e-78; SWISSPROT HIT: Q52877, EVALUE 1.70e+00
ggatgaatacaagtttggtccaaaggatttggcttcagtaaaacattcactgcagttttgctcttctttttgccctgcttctcatttgtgacctcaacgtctgctgaagatgtcacagcaactccttgaatttggcctgaagtttcagtttgctga

SEQ ID NO: 20286 - DNA, 167 bp, Homo sapiens
  MAP TO AL034406.1; EXPRESSED IN FETAL LIVER, SIGNAL =   1; EXPRESSED IN LUNG, SIGNAL = 0.78; EXPRESSED IN ADULT LIVER, SIGNAL = 0.87; EXPRESSED IN BRAIN, SIGNAL = 0.92; EXPRESSED IN HEART, SIGNAL = 0.85; EXPRESSED IN PLACENTA, SIGNAL = 0.85; EXPRESSED IN BT474, SIGNAL = 1.4; EXPRESSED IN HELA, SIGNAL = 0.76; EXPRESSED IN BONE MARROW, SIGNAL = 0.78; EST_HUMAN HIT: AA385542.1, EVALUE 7.00e-06; SWISSPROT HIT: P29098, EVALUE 2.90e+00; NT HIT: gi11434874, EVALUE 2.50e-02
ttaagggagaaattacagttgtaaaatactacactaaaaatgaagacagaaagacatcctgtgttcatgatttggaaaacaatattgttaagatgtcagtgctcaccacagcaattaacagactcaatgcaattcgaatcaatatcgcaattgcctttttgcagaac

SEQ ID NO: 20287 - DNA, 177 bp, Homo sapiens
  MAP TO AF051976.2; EXPRESSED IN PLACENTA, SIGNAL = 3.6; EXPRESSED IN HELA, SIGNAL =   3; EXPRESSED IN HBL100, SIGNAL = 2.8; EXPRESSED IN HEART, SIGNAL = 2.8; EXPRESSED IN FETAL LIVER, SIGNAL =   3; EXPRESSED IN ADULT LIVER, SIGNAL = 4.2; EXPRESSED IN BT474, SIGNAL = 2.8; EXPRESSED IN BRAIN, SIGNAL = 3.1; EXPRESSED IN BONE MARROW, SIGNAL = 2.9; EXPRESSED IN LUNG, SIGNAL = 3.3; SWISSPROT HIT: Q13402, EVALUE 2.00e-03; NT HIT: gi11427875, EVALUE 2.00e-95
ctgttccttaaggaacacctataccagctgctggagagtatgcgagagcatgtcctgaatctggcagccctcactctgcagcgctgcctccgtggcttcttcattaagcggcgattccgctctctgcgccacaagatcatcctgctgcaaagccgggcccgtggctaccttgccagg

SEQ ID NO: 20288 - DNA, 234 bp, Homo sapiens
  MAP TO AL022097.1; EXPRESSED IN HEART, SIGNAL = 1.1; EXPRESSED IN BT474, SIGNAL = 1.1; EXPRESSED IN FETAL LIVER, SIGNAL = 1.2; EXPRESSED IN ADULT LIVER, SIGNAL = 1.2; EXPRESSED IN BONE MARROW, SIGNAL = 0.91; EXPRESSED IN LUNG, SIGNAL = 1.1; EXPRESSED IN HBL100, SIGNAL = 0.95; EXPRESSED IN HELA, SIGNAL = 1.2; NT HIT: M94176.1, EVALUE 3.00e-02; SWISSPROT HIT: P17196, EVALUE 2.10e-01
ggagagggagctggtacctttgaagttcccctcgatgagcagaggattcgtgcctgaagcacctttgtcattccctgagcaacttatcaacacccttgttccttcagttctttgtttaaatttatgttgtgaattggtttttctgtgttttctttctgtactttattagaatctggtgcgataacagggataaagaccacagacttcttgataaatttgtttctcccttccttc

SEQ ID NO: 20289 - DNA, 290 bp, Homo sapiens
  MAP TO AL035466.3; EXPRESSED IN PLACENTA, SIGNAL =   1; EXPRESSED IN HBL100, SIGNAL = 1.1; EXPRESSED IN HEART, SIGNAL =   1; EXPRESSED IN BT474, SIGNAL = 0.99; EXPRESSED IN HELA, SIGNAL = 0.83; EXPRESSED IN BONE MARROW, SIGNAL = 1.1; EXPRESSED IN FETAL LIVER, SIGNAL = 0.89; EXPRESSED IN LUNG, SIGNAL = 1.3; EXPRESSED IN ADULT LIVER, SIGNAL = 1.2; EXPRESSED IN BRAIN, SIGNAL = 1.3; EST_HUMAN HIT: AW572769.1, EVALUE 3.00e-13; NT HIT: AF224669.1, EVALUE 1.00e-17; SWISSPROT HIT: P08548, EVALUE 9.00e-06
atggatattcaacagcatgttgttaaatttccatgtacttgtacagtttgcaaagttcttgttattgatttctagctttattccattgcagtttgagaagatatttaatatgatttcaatttttaaatatttgtccatgtcccttgagacccaggtggtcgtactggtggtggtggtgtctacagagggctgggtgcaccagtcctcaggcccacaggtgctgcacatgagtggtttgcaagctgtggtggtagtgaaaggtggcatggacctgatctcaaatgctgaaa

SEQ ID NO: 20290 - DNA, 95 bp, Homo sapiens
  MAP TO AC008166.1; EXPRESSED IN BT474, SIGNAL = 0.84; EXPRESSED IN HELA, SIGNAL = 0.7; EXPRESSED IN BRAIN, SIGNAL = 0.71; EXPRESSED IN BONE MARROW, SIGNAL = 0.82; EXPRESSED IN HBL100, SIGNAL = 0.67; EXPRESSED IN FETAL LIVER, SIGNAL = 0.82; EXPRESSED IN LUNG, SIGNAL = 0.83; EXPRESSED IN ADULT LIVER, SIGNAL = 1.2; EXPRESSED IN PLACENTA, SIGNAL = 0.91; EXPRESSED IN HEART, SIGNAL = 0.89; NT HIT: AE000394.1, EVALUE 6.70e-01; EST_HUMAN HIT: AW238005.1, EVALUE 2.00e-01
aattcacatttttcaatgttctgtacatgtccgtgaattacagcaaacacaccatgagtattggcctggggattatcaacatatttcatagtgag

SEQ ID NO: 20291 - DNA, 222 bp, Homo sapiens
  MAP TO AC007967.2; EXPRESSED IN BT474, SIGNAL = 0.65; EXPRESSED IN BONE MARROW, SIGNAL = 0.78; EXPRESSED IN LUNG, SIGNAL = 0.67; EXPRESSED IN ADULT LIVER, SIGNAL = 0.95; EXPRESSED IN PLACENTA, SIGNAL = 0.86; EXPRESSED IN FETAL LIVER, SIGNAL = 0.67; EXPRESSED IN HEART, SIGNAL = 0.93; SWISSPROT HIT: O35479, EVALUE 1.00e-12; NT HIT: AF026564.1, EVALUE 2.00e-49; EST_HUMAN HIT: AA789285.1, EVALUE 4.00e-17
atgtttcacgaggagcagggtgcaccctacctagagaaggtggattccttaggtcttttctgccaacatgctcatgaccacaggaataaaaatcaccacatctccttgcgtaactctcttgacttctgccgtatctatctcatgtattgttataatcatggcggcttcttccaccgtaagacaactgaggccctcatgctggtggtgcaccatgagaggtac

SEQ ID NO: 20292 - DNA, 310 bp, Homo sapiens
  MAP TO AL022397.1; EXPRESSED IN HBL100, SIGNAL = 2.6; EXPRESSED IN LUNG, SIGNAL = 0.84; EXPRESSED IN BRAIN, SIGNAL = 0.69; EXPRESSED IN PLACENTA, SIGNAL = 0.85; EXPRESSED IN BONE MARROW, SIGNAL = 0.7; EXPRESSED IN HEART, SIGNAL = 0.87; EXPRESSED IN ADULT LIVER, SIGNAL = 0.72; EXPRESSED IN HELA, SIGNAL = 0.76; EXPRESSED IN FETAL LIVER, SIGNAL = 0.63; EST_HUMAN HIT: AA188940.1, EVALUE 4.90e-02; SWISSPROT HIT: P34272, EVALUE 2.50e+00; NT HIT: AL163302.2, EVALUE 1.90e-01
aacatgtaagcactcaaactatagacacaatccacaaaattacctaatgaatgctaggaattgttacatttacctatttgacaagctacctattactgttcaactaaaccaaacaattttcctgcctcaacagttaactcatcttcctgcctctcatttccaccagctccaatccattcttcatagacttaatagggttatcttcctaaagcaaaagtcaggtcatgtaaagcttttagtttaaaatcttctaatggccttcactgcctaaaaagcagtcctaattgcttggcccatcagttaagaccct

SEQ ID NO: 20293 - DNA, 133 bp, Homo sapiens
  MAP TO AL034406.1; EXPRESSED IN BT474, SIGNAL = 0.6; EXPRESSED IN HELA, SIGNAL = 0.65; EXPRESSED IN PLACENTA, SIGNAL = 0.74; EXPRESSED IN FETAL LIVER, SIGNAL = 0.64; EXPRESSED IN LUNG, SIGNAL = 0.7; EXPRESSED IN ADULT LIVER, SIGNAL = 0.87; EXPRESSED IN BONE MARROW, SIGNAL = 0.73; EXPRESSED IN BRAIN, SIGNAL = 0.79; EXPRESSED IN HEART, SIGNAL = 0.84; NT HIT: AF198349.1, EVALUE 8.00e-23; SWISSPROT HIT: P45016, EVALUE 1.80e+00; EST_HUMAN HIT: AU118230.1, EVALUE 2.00e-12
atctgtgctgcagcagccatgttggcaatagtattgagatggttcatctgattcattgccatggcaactgatgcaggaggtaagctgactggaagtaggggatgaggcatcatcataaatggcagatccagtc

SEQ ID NO: 20294 - DNA, 89 bp, Homo sapiens
  MAP TO AC007480.1; EXPRESSED IN BT474, SIGNAL = 1.1; EXPRESSED IN FETAL LIVER, SIGNAL = 1.3; EXPRESSED IN BRAIN, SIGNAL = 1.3; EXPRESSED IN LUNG, SIGNAL = 1.4; EXPRESSED IN HBL100, SIGNAL = 1.3; EXPRESSED IN HELA, SIGNAL = 1.5; EXPRESSED IN PLACENTA, SIGNAL = 1.2; EXPRESSED IN HEART, SIGNAL =   1; EXPRESSED IN ADULT LIVER, SIGNAL = 1.6; EXPRESSED IN BONE MARROW, SIGNAL = 1.3; SWISSPROT HIT: Q03112, EVALUE 2.00e-11; EST_HUMAN HIT: AA186658.1, EVALUE 3.00e-43; NT HIT: S69002.1, EVALUE 3.00e-43
ctctcctccacattcctgggagattggctgccatggttgctgttcccaatgaaatttcgaatttctgtgaagtaagcatcttctttgtc

SEQ ID NO: 20295 - DNA, 82 bp, Homo sapiens
  MAP TO AJ010597.1; EXPRESSED IN HBL100, SIGNAL = 0.7; EXPRESSED IN FETAL LIVER, SIGNAL = 0.75; EXPRESSED IN LUNG, SIGNAL = 0.95; EXPRESSED IN ADULT LIVER, SIGNAL = 0.92; EXPRESSED IN BRAIN, SIGNAL = 0.97; EXPRESSED IN HEART, SIGNAL = 0.96; EXPRESSED IN PLACENTA, SIGNAL = 0.9; EXPRESSED IN BT474, SIGNAL = 0.71; EXPRESSED IN HELA, SIGNAL = 0.94; EXPRESSED IN BONE MARROW, SIGNAL = 0.92; EST_HUMAN HIT: Z43082.1, EVALUE 9.80e-01; NT HIT: AL163210.2, EVALUE 4.00e-39
tctgggacatgtcgttgaagtggtatgggtgctcatgatgatccttagccccttagcacctttccatttggatgccgagaag

SEQ ID NO: 20296 - DNA, 93 bp, Homo sapiens
  MAP TO AC006009.2; EXPRESSED IN BRAIN, SIGNAL = 1.2; EXPRESSED IN HEART, SIGNAL = 0.81; EXPRESSED IN BT474, SIGNAL = 0.72; EXPRESSED IN PLACENTA, SIGNAL = 0.69; EXPRESSED IN FETAL LIVER, SIGNAL = 0.68; EXPRESSED IN LUNG, SIGNAL = 0.93; EXPRESSED IN ADULT LIVER, SIGNAL = 0.79; SWISSPROT HIT: Q95126, EVALUE 7.30e+00; EST_HUMAN HIT: BF355350.1, EVALUE 4.00e-25; NT HIT: AB046811.1, EVALUE 1.00e-45
tccagggccagaactccagtgctttctgtgaagagtttcactttgaccacaggccgaggatgggtggtggtgaaatctccttgagtcccccat

SEQ ID NO: 20297 - DNA, 369 bp, Homo sapiens; identical to SEQ ID NO: 3527
  MAP TO AC008009.4; EXPRESSED IN HBL100, SIGNAL = 1.7; EXPRESSED IN ADULT LIVER, SIGNAL = 0.84; EXPRESSED IN HEART, SIGNAL = 0.98; EXPRESSED IN BT474, SIGNAL = 1.4; EXPRESSED IN FETAL LIVER, SIGNAL = 1.1; EXPRESSED IN LUNG, SIGNAL = 0.74; EXPRESSED IN HELA, SIGNAL = 1.1; EXPRESSED IN BRAIN, SIGNAL = 0.69; EST_HUMAN HIT: AI081907.1, EVALUE 0.00e+00

SEQ ID NO: 20298 - DNA, 583 bp, Homo sapiens
  MAP TO AC007539.8; EXPRESSED IN HELA, SIGNAL = 1.3; EXPRESSED IN BRAIN, SIGNAL = 1.1; EXPRESSED IN PLACENTA, SIGNAL = 0.88; EXPRESSED IN HBL100, SIGNAL = 0.7; EXPRESSED IN LUNG, SIGNAL = 1.2; EXPRESSED IN ADULT LIVER, SIGNAL = 1.3; EXPRESSED IN HEART, SIGNAL = 1.1; EXPRESSED IN BT474, SIGNAL = 0.7; EXPRESSED IN BONE MARROW, SIGNAL = 0.7; EXPRESSED IN FETAL LIVER, SIGNAL = 0.7; SWISSPROT HIT: P15305, EVALUE 7.00e-08; EST_HUMAN HIT: BF671637.1, EVALUE 8.60e+00
gtaacgcttccggaaagagagcgtggcactgtgtgatctggagagtgtggcacactgtgatccggagagtgtggtacagtgtgatcttgaggttgtgatacagtgttatctggagagtgcggtacgacgtaatctggagaaggtggcacactgtgatctggagagtttggtatgctgtgaattggagagtgtggtacatcatgatcttgagggtgtggtacagtgtggtctggagagtgtgacacactgtgatccagaaggtgtggtacggtgtgatcttgaggttgtgatacagtgttatctggagagtgcggtacgacgtaatctggagaaggtggcacactgtgatctggagagtttggtatggtgtgaattggagagtgtggtacattgtgatcttgagggtgtggtacagtgtgatctgcagagtgtggcacactgtgatccagaaggtgtggtacggtgtgagcttgaggttgtgatacagtgttatctggagagtgtggtacgatgtaatctggagagggtggtacactgtgatctggagagtttggtatggtgtgaattggagagtgtggtacat

SEQ ID NO: 20299 - DNA, 285 bp, Homo sapiens
  MAP TO AL021917.1; EXPRESSED IN BT474, SIGNAL = 1.1; EXPRESSED IN BONE MARROW, SIGNAL = 1.1; EXPRESSED IN HBL100, SIGNAL =   1; EXPRESSED IN HELA, SIGNAL = 1.1; EXPRESSED IN FETAL LIVER, SIGNAL = 1.3; EXPRESSED IN BRAIN, SIGNAL =   1; EXPRESSED IN LUNG, SIGNAL = 2.4; EXPRESSED IN PLACENTA, SIGNAL = 1.1; EXPRESSED IN HEART, SIGNAL = 1.3; NT HIT: gi6325463, EVALUE 0.00e+00; EST_HUMAN HIT: BE814862.1, EVALUE 0.00e+00; SWISSPROT HIT: P18892, EVALUE 4.00e-21
ctgcgatggatatgctggctgtcttttccaggccgaggagggaatttctgatgatgcaggatacacccccaccagagctgcctctcatgatcacagatgctgctactgcatacaggcccactccatctgcaaccacaggtgcttccacagccgggatgttctctcccttggtgtcgctccactttatttggggttgggggtaccagccagtggacctgcactccagatggatccctccatcctcataacccttcacttcaatgtgaagatcagaacccaatgctg

SEQ ID NO: 20300 - DNA, 235 bp, Homo sapiens
  MAP TO AC008177.1; EXPRESSED IN PLACENTA, SIGNAL =   1; EXPRESSED IN FETAL LIVER, SIGNAL = 0.96; EXPRESSED IN LUNG, SIGNAL = 1.3; EXPRESSED IN HELA, SIGNAL = 1.1; EXPRESSED IN BRAIN, SIGNAL = 1.1; EXPRESSED IN HEART, SIGNAL = 1.1; EXPRESSED IN BT474, SIGNAL = 0.8; EXPRESSED IN BONE MARROW, SIGNAL = 1.3; EXPRESSED IN ADULT LIVER, SIGNAL = 0.87; EXPRESSED IN HBL100, SIGNAL = 0.78; NT HIT: AF240698.1, EVALUE 1.00e-130; SWISSPROT HIT: P50169, EVALUE 1.00e-21; EST_HUMAN HIT: W17165.1, EVALUE 1.00e-124
actgcatatttggatggagtatagccccctccaacgattgcaaggcgacctccaacactggagacattaataactctcccttgagctttcttgaccaaaggaagcatatttagtgtcacactgatgagtccaaacaggttcacttcaataggttctctgtagtcctctagtgtcagccagtcagtgggagccagcacgccgggaacaccagcattattgatcagaccccagagac

SEQ ID NO: 20301 - DNA, 122 bp, Homo sapiens
  MAP TO AC007717.1; EXPRESSED IN HBL100, SIGNAL = 0.93; EXPRESSED IN LUNG, SIGNAL = 1.2; EXPRESSED IN BRAIN, SIGNAL =   1; EXPRESSED IN PLACENTA, SIGNAL = 0.99; EXPRESSED IN BT474, SIGNAL = 0.92; EXPRESSED IN BONE MARROW, SIGNAL = 3.3; EXPRESSED IN HEART, SIGNAL = 0.99; EXPRESSED IN ADULT LIVER, SIGNAL =   1; EXPRESSED IN HELA, SIGNAL = 1.2; EXPRESSED IN FETAL LIVER, SIGNAL = 1.1; NT HIT: AF154836.1, EVALUE 4.20e+00; EST_HUMAN HIT: AI808360.1, EVALUE 1.10e+00
ctcttcatacctctgacaacttttggaagcacgtaattgattacctcctgaaatctctgggtagaatagttacatgttaggcggcacttttcatgatttgggtaaataatccaggtttccat

SEQ ID NO: 20302 - DNA, 135 bp, Homo sapiens
  MAP TO AC007630.3; EXPRESSED IN FETAL LIVER, SIGNAL = 0.86; EXPRESSED IN HEART, SIGNAL = 1.1; EXPRESSED IN BONE MARROW, SIGNAL =   1; EXPRESSED IN PLACENTA, SIGNAL = 0.84; EXPRESSED IN BT474, SIGNAL = 0.82; EXPRESSED IN LUNG, SIGNAL = 1.2; EXPRESSED IN HELA, SIGNAL =   1; EXPRESSED IN ADULT LIVER, SIGNAL =   1; EXPRESSED IN BRAIN, SIGNAL =   9; EST_HUMAN HIT: BF512285.1, EVALUE 1.80e+00; SWISSPROT HIT: Q08372, EVALUE 6.80e+00; NT HIT: M22342.1, EVALUE 2.60e-01
ttaacacacagaaatgtgtctgacaccaagattattgttaagggctgttctttcctttttattcagcattgtacgcatgtaccatttacatttattacgtggataatgggaattcatggtcttgaaggcatagag

SEQ ID NO: 20303 - DNA, 404 bp, Homo sapiens
  MAP TO AL008730.1; EXPRESSED IN BONE MARROW, SIGNAL = 4.7; EXPRESSED IN HBL100, SIGNAL = 4.6; EXPRESSED IN BT474, SIGNAL = 4.5; EXPRESSED IN ADULT LIVER, SIGNAL = 5.1; EXPRESSED IN FETAL LIVER, SIGNAL = 5.4; EXPRESSED IN BRAIN, SIGNAL = 4.2; EXPRESSED IN LUNG, SIGNAL = 5.3; EXPRESSED IN PLACENTA, SIGNAL = 4.3; EXPRESSED IN HEART, SIGNAL = 4.5; EXPRESSED IN HELA, SIGNAL = 5.3; NT HIT: S65091.1, EVALUE 1.00e+00; EST_HUMAN HIT: AW852217.1, EVALUE 0.00e+00; SWISSPROT HIT: P49811, EVALUE 3.40e-01
agaagcaccctccctccctccagctggttctgagctgccagtcactgcactcgactgccctgtcttctgcgtgtacacattagcacagtcagtaggaacagacccttcagcacaaagcaaacatcaggctgcagacaaaaggaaaagtgcaacaccccagcctgctgagactcccgtcccccactggctccctccaaaagaagcagccgacacggacacgctggcagcaatcaatttcgatcttgttaaagcacaacgtgtcccagtggccggtatagattctgtcagtggagaacaaatcacggggctgcacgtgggcacctcgggggtggtgtgctgtgcagcctgcgaggctgcctaggaaacctcttcagcccaattctacaaaacacttggggtggcct

SEQ ID NO: 20304 - DNA, 208 bp, Homo sapiens
  MAP TO AL035667.12; EXPRESSED IN PLACENTA, SIGNAL = 0.7; EXPRESSED IN FETAL LIVER, SIGNAL = 0.8; EXPRESSED IN LUNG, SIGNAL = 0.98; EXPRESSED IN HELA, SIGNAL = 0.94; EXPRESSED IN BRAIN, SIGNAL = 0.77; EXPRESSED IN HEART, SIGNAL = 0.94; EXPRESSED IN BT474, SIGNAL = 0.78; EXPRESSED IN ADULT LIVER, SIGNAL = 0.96; EXPRESSED IN HBL100, SIGNAL = 0.8; EXPRESSED IN BONE MARROW, SIGNAL = 0.8; NT HIT: Y07695.1, EVALUE 1.10e-01; SWISSPROT HIT: O08808, EVALUE 1.60e+00; EST_HUMAN HIT: W39378.1, EVALUE 2.90e+00
ggactgttctgggcaccatatgtttttttctcaccgtcatccttctcagcatgaaggaagaggttgggcaggagctgtgcaaagaaggagaataagttcagggggcaggggaaaggcacttgaaaaggcaagagatgggtgcggctcttctggaaaacaggcagatctttcttctgcctcttcagctcagcttgtccctggctggctc

SEQ ID NO: 20305 - DNA, 141 bp, Homo sapiens
  MAP TO AJ009614.1; EXPRESSED IN BONE MARROW, SIGNAL = 0.98; EXPRESSED IN LUNG, SIGNAL = 1.1; EXPRESSED IN PLACENTA, SIGNAL =   1; EXPRESSED IN HELA, SIGNAL =   1; EXPRESSED IN HBL100, SIGNAL = 0.94; EXPRESSED IN HEART, SIGNAL = 1.2; EXPRESSED IN FETAL LIVER, SIGNAL = 1.5; EXPRESSED IN ADULT LIVER, SIGNAL = 1.3; EXPRESSED IN BT474, SIGNAL = 1.2; EXPRESSED IN BRAIN, SIGNAL =   1; EST_HUMAN HIT: N55962.1, EVALUE 3.00e-02; NT HIT: AL161549.2, EVALUE 2.70e-01; SWISSPROT HIT: P32863, EVALUE 5.90e-01
ttgtccagttccagcgcacctgcatcctgatttcagagctgctaacctgtacacccatgagaaacaacctcatcagctactatgccatgcttggacgcagttacccatgtctttagtctcacagactaatattccgaaagt

SEQ ID NO: 20306 - DNA, 125 bp, Homo sapiens
  MAP TO AC008167.1; EXPRESSED IN BONE MARROW, SIGNAL = 1.4; EXPRESSED IN HBL100, SIGNAL = 1.5; EXPRESSED IN PLACENTA, SIGNAL = 1.1; EXPRESSED IN BRAIN, SIGNAL = 1.3; EXPRESSED IN HELA, SIGNAL = 1.4; EXPRESSED IN LUNG, SIGNAL = 1.4; EXPRESSED IN BT474, SIGNAL = 1.2; EXPRESSED IN HEART, SIGNAL = 1.3; EXPRESSED IN ADULT LIVER, SIGNAL = 1.1; EXPRESSED IN FETAL LIVER, SIGNAL = 1.1; EST_HUMAN HIT: AU125186.1, EVALUE 2.00e-64; NT HIT: AF228527.1, EVALUE 1.00e-64; SWISSPROT HIT: P41411, EVALUE 8.90e+00
agctgcacgtgttcgttcccaaccagtgagctggagaaggtgctcccccagaccatcctgtataagtactatgagcgaaaagccgaggaggaggttgcggcagcctacgccgacgagcttgtcag

SEQ ID NO: 20307 - DNA, 183 bp, Homo sapiens
  MAP TO AL035417.15; EXPRESSED IN FETAL LIVER, SIGNAL = 1.2; EXPRESSED IN HELA, SIGNAL = 1.5; EXPRESSED IN ADULT LIVER, SIGNAL = 1.2; EXPRESSED IN HEART, SIGNAL = 1.1; EXPRESSED IN PLACENTA, SIGNAL = 1.1; EXPRESSED IN BT474, SIGNAL = 1.1; EXPRESSED IN LUNG, SIGNAL = 1.3; EXPRESSED IN BRAIN, SIGNAL = 1.3; EXPRESSED IN BONE MARROW, SIGNAL = 1.3; EXPRESSED IN HBL100, SIGNAL = 1.1; NT HIT: U27268.1, EVALUE 1.10e-01; SWISSPROT HIT: Q01723, EVALUE 2.90e+00
ctgcttcatcaaaggcttgaaggcatgaaacagcaatcccaggacttggtgggcagtaaggaagaggaaggaatcaagattgactcccacatttctggcctggtagaccaggtagatggtaatagctttcactgcaatttgggagcccaggagaagaagcagtttgaagaggagatgttgaaa

SEQ ID NO: 20308 - DNA, 157 bp, Homo sapiens
  MAP TO AL009048.1; EXPRESSED IN BT474, SIGNAL = 1.9; EXPRESSED IN BONE MARROW, SIGNAL = 2.1; EXPRESSED IN HBL100, SIGNAL = 2.6; EXPRESSED IN HELA, SIGNAL = 2.8; EXPRESSED IN ADULT LIVER, SIGNAL = 2.1; EXPRESSED IN FETAL LIVER, SIGNAL = 2.6; EXPRESSED IN BRAIN, SIGNAL =   2; EXPRESSED IN LUNG, SIGNAL = 2.3; EXPRESSED IN PLACENTA, SIGNAL =   2; EXPRESSED IN HEART, SIGNAL = 2.1; NT HIT: AJ238093.1, EVALUE 7.70e-02; EST_HUMAN HIT: BE964575.2, EVALUE 2.10e+00; SWISSPROT HIT: P24413, EVALUE 1.30e+00
aatatggggcatctccatgctcttccataggtacccagtgtacaaacagatgtggttcacacacagccaatcgtttttgtgtgtttcctacagcatgggcatctatgatgacatttcccacaaatgttttttcccgatgctgagaatacctaacagg

SEQ ID NO: 20309 - DNA, 216 bp, Homo sapiens
  MAP TO AC007952.1; EXPRESSED IN BT474, SIGNAL = 0.76; EXPRESSED IN BONE MARROW, SIGNAL = 0.83; EXPRESSED IN HELA, SIGNAL = 1.2; EXPRESSED IN ADULT LIVER, SIGNAL = 0.85; EXPRESSED IN HEART, SIGNAL = 1.2; EXPRESSED IN PLACENTA, SIGNAL = 1.2; EXPRESSED IN FETAL LIVER, SIGNAL = 0.65; EXPRESSED IN LUNG, SIGNAL = 1.1; EXPRESSED IN BRAIN, SIGNAL = 1.1; EXPRESSED IN HBL100, SIGNAL = 0.83; EST_HUMAN HIT: AW449366.1, EVALUE 2.10e+00
aagctgaaggaggaggaggaggaggaggaggaggaggaggtggcagcagtagcaaggagaaggagaagaagaaggaggaggagaaggagaaggatgaggaggagggagaggagaagaagaagaagacgaagaagaagaggaggaggagaaagaggaggaggagaaaacaaagaaaaaaagtggttaggagccagggagaatacaacaggaagagct

SEQ ID NO: 20310 - DNA, 456 bp, Homo sapiens; identical to SEQ ID NO: 3540
  MAP TO AL033397.7; EXPRESSED IN PLACENTA, SIGNAL = 1.3; EXPRESSED IN BONE MARROW, SIGNAL = 1.4; EXPRESSED IN HBL100, SIGNAL = 5.8; EXPRESSED IN ADULT LIVER, SIGNAL = 0.85; EXPRESSED IN BRAIN, SIGNAL = 0.78; EXPRESSED IN BT474, SIGNAL = 0.92; EXPRESSED IN FETAL LIVER, SIGNAL = 1.7; EXPRESSED IN LUNG, SIGNAL = 0.94; EXPRESSED IN HELA, SIGNAL = 0.6; EXPRESSED IN HEART, SIGNAL = 0.95; NT HIT: AF118846.1, EVALUE 0.00e+00; EST_HUMAN HIT: AA815366.1, EVALUE 8.00e-42

SEQ ID NO: 20311 - DNA, 446 bp, Homo sapiens
  MAP TO AL021997.1; EXPRESSED IN PLACENTA, SIGNAL = 7.6; EXPRESSED IN HELA, SIGNAL = 8.3; EXPRESSED IN HEART, SIGNAL = 7.4; EXPRESSED IN BONE MARROW, SIGNAL =  11; EXPRESSED IN HBL100, SIGNAL = 7.8; EXPRESSED IN BT474, SIGNAL = 6.8; EXPRESSED IN ADULT LIVER, SIGNAL =   9; EXPRESSED IN FETAL LIVER, SIGNAL = 8.3; EXPRESSED IN BRAIN, SIGNAL = 6.5; EXPRESSED IN LUNG, SIGNAL = 9.5; NT HIT: gi7662109, EVALUE 7.00e-51; EST_HUMAN HIT: BF676393.1, EVALUE 0.00e+00; SWISSPROT HIT: O43309, EVALUE 3.00e-45
ccagagtaagccttccaaattaaccccaggaatggcttcaacagaggaacagtacgatcttaagattgtgaaagtggaggaagaccctatctgggaccaagaaacccaccttcgagggaacaacttttctggccaagaagcctcccgacaactttttaggcagttttgttaccaagagactcctggtccccgagaagctctgagccggctccgagaactctgtcatcagtggctaaggccagaaatccacaccaaagagcaaatcttggagctgctggtgctggagcaattcctgactatcctgcctgaggagctccaggcctgggtgcgggagcaccatccggagagtggggaggaggctgtggctgtagttgaagatctggaacaagagcttagtgagccagggaaccaggtgagaggagaaagatggacttctagacattaaa

SEQ ID NO: 20312 - DNA, 158 bp, Homo sapiens
  MAP TO AB026898.1; EXPRESSED IN HBL100, SIGNAL = 0.97; EXPRESSED IN HELA, SIGNAL = 1.1; EXPRESSED IN HEART, SIGNAL = 1.2; EXPRESSED IN LUNG, SIGNAL = 0.97; EXPRESSED IN BONE MARROW, SIGNAL = 1.1; EXPRESSED IN BRAIN, SIGNAL = 1.1; NT HIT: AB026898.1, EVALUE 3.00e-84; SWISSPROT HIT: Q28998, EVALUE 5.80e-01
ccctggccccacaagccaggacctgctgtgtgaaatcgaagactcgccctcgccagtggtgttacacattgaggctgtctttaaggtgctgcaggtggagctgggcagtggggtgggcccagagaggtggcagggctgggacactgagccatccccag

SEQ ID NO: 20313 - DNA, 91 bp, Homo sapiens
  MAP TO AC007966.2; EXPRESSED IN BT474, SIGNAL = 0.61; EXPRESSED IN BONE MARROW, SIGNAL = 0.96; EXPRESSED IN HBL100, SIGNAL = 0.71; EXPRESSED IN ADULT LIVER, SIGNAL = 0.88; EXPRESSED IN PLACENTA, SIGNAL = 0.78; EXPRESSED IN FETAL LIVER, SIGNAL = 0.91; EXPRESSED IN LUNG, SIGNAL =   1; EXPRESSED IN HELA, SIGNAL = 1.1; EXPRESSED IN BRAIN, SIGNAL = 0.99; EXPRESSED IN HEART, SIGNAL = 1.2; SWISSPROT HIT: P21675, EVALUE 5.40e+00
tttgatgtttgtctttatatttagaagattcttatccttttcctctttagaaggttgtttctctgttccattctcttcctcttctgggatc

SEQ ID NO: 20314 - DNA, 207 bp, Homo sapiens
  MAP TO AL021154.1; EXPRESSED IN BT474, SIGNAL =   7; EXPRESSED IN FETAL LIVER, SIGNAL =   9; EXPRESSED IN LUNG, SIGNAL = 7.6; EXPRESSED IN HELA, SIGNAL = 6.4; EXPRESSED IN HEART, SIGNAL = 6.2; EXPRESSED IN HBL100, SIGNAL = 5.8; EXPRESSED IN ADULT LIVER, SIGNAL = 8.4; EXPRESSED IN BRAIN, SIGNAL = 6.9; EXPRESSED IN BONE MARROW, SIGNAL = 6.1; EXPRESSED IN PLACENTA, SIGNAL = 7.8; SWISSPROT HIT: P75334, EVALUE 8.30e-02; NT HIT: M26533.1, EVALUE 1.90e+00
tcacgcggggcacttggggtacgtcccccgacctgtggagtttgtcatcgaagagacctcgaggccccccaaaacggtccctcgggccttcccccgcctcgacggtgaggacgcagctgttggagatgcgctcggtcctcccagacctagggagggggcaggtttcggggcgcggtgaagggccatcgcagctcgggtgcgacacgc

SEQ ID NO: 20315 - DNA, 130 bp, Homo sapiens
  MAP TO AC006034.2; EXPRESSED IN PLACENTA, SIGNAL = 1.2; EXPRESSED IN BT474, SIGNAL =   1; EXPRESSED IN HBL100, SIGNAL = 0.77; EXPRESSED IN LUNG, SIGNAL = 0.79; EXPRESSED IN BRAIN, SIGNAL = 0.86; EXPRESSED IN BONE MARROW, SIGNAL = 0.78; EXPRESSED IN FETAL LIVER, SIGNAL = 0.84; EXPRESSED IN HELA, SIGNAL = 0.77; EXPRESSED IN ADULT LIVER, SIGNAL = 0.81; EXPRESSED IN HEART, SIGNAL = 0.89; NT HIT: AL163283.2, EVALUE 2.50e-01; SWISSPROT HIT: P38086, EVALUE 5.20e+00; EST_HUMAN HIT: H02549.1, EVALUE 1.10e-01
cttgccttcagcgtcgatttctgtcctgtgttcttcttttatgtgttgtaggtttctgataccgcacagattacctttccaaatttttattgccagccgtattttagttagatcttgccagtgagaggtc

SEQ ID NO: 20316 - DNA, 137 bp, Homo sapiens
  MAP TO AC010092.2; EXPRESSED IN BONE MARROW, SIGNAL = 5.1; EXPRESSED IN LUNG, SIGNAL = 7.2; EXPRESSED IN ADULT LIVER, SIGNAL = 8.7; EXPRESSED IN BT474, SIGNAL = 5.8; EXPRESSED IN BRAIN, SIGNAL = 5.9; EXPRESSED IN HEART, SIGNAL = 4.7; EXPRESSED IN HELA, SIGNAL = 7.3; EXPRESSED IN HBL100, SIGNAL = 5.3; EXPRESSED IN PLACENTA, SIGNAL = 6.6; EXPRESSED IN FETAL LIVER, SIGNAL = 6.2; SWISSPROT HIT: P34314, EVALUE 5.00e-09; NT HIT: gi11430348, EVALUE 1.00e-71; EST_HUMAN HIT: AA424123.1, EVALUE 2.00e-71
gaaacatcctactggtagatggaacagcatgtggtgaaatcaaaatcactgattttggtctgtccaagattatggatgatgatagctatggtgtagatggaatggatctaacttcccagggggcaggcacttactgg

SEQ ID NO: 20317 - DNA, 168 bp, Homo sapiens
  MAP TO AL031657.2; EXPRESSED IN LUNG, SIGNAL = 1.1; EXPRESSED IN PLACENTA, SIGNAL = 1.1; EXPRESSED IN BT474, SIGNAL = 0.82; EXPRESSED IN BONE MARROW, SIGNAL =   1; EXPRESSED IN HBL100, SIGNAL = 0.68; EXPRESSED IN FETAL LIVER, SIGNAL = 0.91; EXPRESSED IN HELA, SIGNAL = 0.65; EXPRESSED IN ADULT LIVER, SIGNAL = 0.68; EXPRESSED IN BRAIN, SIGNAL = 0.89; EXPRESSED IN HEART, SIGNAL =   1; NT HIT: AF016494.1, EVALUE 1.30e+00; EST_HUMAN HIT: R89374.1, EVALUE 1.60e+00; SWISSPROT HIT: Q19954, EVALUE 6.50e+00
gttggtggtggctacttggtgcactgtgaggagagggattacgaagccatgtgtgataacagggagaacgtgtgttgtgatcaattagcaaagcctgccatggctgaagaggtgggaagtggctgcatgcacactgagtacgcaattctgttctacatcatccagtag

SEQ ID NO: 20318 - DNA, 106 bp, Homo sapiens
  MAP TO AL024509.1; EXPRESSED IN BONE MARROW, SIGNAL = 3.8; EXPRESSED IN LUNG, SIGNAL = 4.2; EXPRESSED IN BRAIN, SIGNAL =   4; EXPRESSED IN HBL100, SIGNAL = 3.7; EXPRESSED IN PLACENTA, SIGNAL = 3.9; EXPRESSED IN HELA, SIGNAL = 4.2; EXPRESSED IN HEART, SIGNAL = 4.5; EXPRESSED IN ADULT LIVER, SIGNAL = 4.6; EXPRESSED IN BT474, SIGNAL = 3.7; EXPRESSED IN FETAL LIVER, SIGNAL = 4.8; SWISSPROT HIT: P48764, EVALUE 5.30e+00; NT HIT: gi11432561, EVALUE 9.00e-01; EST_HUMAN HIT: BF219419.1, EVALUE 1.30e+00
cttgtctgggagcatgaccttcatctccttgctttattggacacttgggtctctcctggcagtactgcccctccttcagctgtctcaagtggccaccctttttcat

SEQ ID NO: 20319 - DNA, 213 bp, Homo sapiens
  MAP TO AC006160.9; EXPRESSED IN BONE MARROW, SIGNAL = 0.9; EXPRESSED IN LUNG, SIGNAL = 0.62; EXPRESSED IN HELA, SIGNAL = 0.91; EXPRESSED IN ADULT LIVER, SIGNAL = 0.85; EXPRESSED IN BRAIN, SIGNAL = 0.79; EXPRESSED IN PLACENTA, SIGNAL = 0.65; EXPRESSED IN FETAL LIVER, SIGNAL = 0.63; EXPRESSED IN HEART, SIGNAL = 0.99; NT HIT: AB033102.1, EVALUE 1.00e-104; SWISSPROT HIT: P24127, EVALUE 2.20e-01
gctctggagcagtgcaccagcaactacagggaggacctgcaggcactcaagcagctctcggacctggagagggagaagctgcagcgtgagctccaggagaccactcagcagaaccacgccatgaaagcccagctcgaggcttcccaccagagagccctgcgcatgctggagaaggccagacatcaggaactcaaggtgagggaatgactgtgc

SEQ ID NO: 20320 - DNA, 242 bp, Homo sapiens
  MAP TO AC007320.2; EXPRESSED IN BT474, SIGNAL = 1.2; EXPRESSED IN BONE MARROW, SIGNAL = 1.2; EXPRESSED IN HBL100, SIGNAL = 1.1; EXPRESSED IN HELA, SIGNAL = 4.5; EXPRESSED IN BRAIN, SIGNAL = 1.3; EXPRESSED IN PLACENTA, SIGNAL =   1; EXPRESSED IN FETAL LIVER, SIGNAL = 1.2; EXPRESSED IN LUNG, SIGNAL =   1; EXPRESSED IN ADULT LIVER, SIGNAL = 1.7; EXPRESSED IN HEART, SIGNAL = 0.95; SWISSPROT HIT: P38159, EVALUE 3.00e-15; NT HIT: U94387.1, EVALUE 8.00e-80; EST_HUMAN HIT: AA789285.1, EVALUE 9.00e-34
ccacataacttgagctaccatatgcttcacgacgagcagggtgcaccctatccagagaaagtggattcctttggtcttttctgccaacgtgctcatgaccacaaaaataaaaatcaccgcagcttcttgagtaactctcctgacttctgccatatctatctagtgtattgttataatcagggcggctgcttccaccataagacatccgaggccctcgtgcaggtggtgcaccatgagaggtc

SEQ ID NO: 20321 - DNA, 221 bp, Homo sapiens
  MAP TO AC010885.2; EXPRESSED IN BONE MARROW, SIGNAL = 2.8; EXPRESSED IN LUNG, SIGNAL =   3; EXPRESSED IN ADULT LIVER, SIGNAL = 2.9; EXPRESSED IN BT474, SIGNAL = 2.1; EXPRESSED IN BRAIN, SIGNAL = 2.4; EXPRESSED IN HEART, SIGNAL = 2.1; EXPRESSED IN HELA, SIGNAL = 2.9; EXPRESSED IN HBL100, SIGNAL = 2.6; EXPRESSED IN PLACENTA, SIGNAL = 2.3; EXPRESSED IN FETAL LIVER, SIGNAL = 2.4; NT HIT: M31223.1, EVALUE 1.10e-01; EST_HUMAN HIT: BE672890.1, EVALUE 7.80e-01; SWISSPROT HIT: P37092, EVALUE 6.30e-02
tgagggcattaagttctgaagtcatgttgattctaatgtaaataaatggtgtcattacttcatagttgggagtgccactaatgcagaccttaaaattaagggttatcttgttgattgggggaaaattaaagtaatcaactttcaaggctttaataaatgagattgcacacttaaaaatcattttcaaaccagctttaaaagtagatgactagaaaatcaat

SEQ ID NO: 20322 - DNA, 131 bp, Homo sapiens
  MAP TO AC007377.3; EXPRESSED IN PLACENTA, SIGNAL =   1; EXPRESSED IN BT474, SIGNAL = 8.6; EXPRESSED IN BONE MARROW, SIGNAL = 1.1; EXPRESSED IN HEART, SIGNAL = 1.2; EXPRESSED IN BRAIN, SIGNAL = 0.97; EXPRESSED IN HELA, SIGNAL = 1.1; EXPRESSED IN LUNG, SIGNAL = 1.3; EXPRESSED IN FETAL LIVER, SIGNAL = 0.94; EXPRESSED IN HBL100, SIGNAL = 0.82; EXPRESSED IN ADULT LIVER, SIGNAL = 0.95; EST_HUMAN HIT: BF304211.1, EVALUE 1.70e+00; NT HIT: AF174585.1, EVALUE 9.90e-01; SWISSPROT HIT: Q10993, EVALUE 3.00e+00
atgcctccaagtatctttcctttgctaaatttccacataatgactatcacttcagcattgatgactttcccatctatacctttagctctaatcatttttgtaaacttcaggtctacatttttagctgtcta

SEQ ID NO: 20323 - DNA, 205 bp, Homo sapiens
  MAP TO AC010896.2; EXPRESSED IN BT474, SIGNAL = 1.8; EXPRESSED IN FETAL LIVER, SIGNAL = 1.9; EXPRESSED IN BONE MARROW, SIGNAL = 1.9; EXPRESSED IN HELA, SIGNAL = 2.2; EXPRESSED IN ADULT LIVER, SIGNAL = 2.5; EXPRESSED IN BRAIN, SIGNAL = 1.7; EXPRESSED IN LUNG, SIGNAL =   2; EXPRESSED IN PLACENTA, SIGNAL =   2; EXPRESSED IN HEART, SIGNAL = 1.7; EXPRESSED IN HBL100, SIGNAL = 1.6; NT HIT: D86842.1, EVALUE 7.00e-09; SWISSPROT HIT: P57359, EVALUE 9.80e-01; EST_HUMAN HIT: BF229505.1, EVALUE 1.80e-01
gagaagcatttcacaaattgcaaatttaaagttaacttttggttccatagcaggtctcaagagcatttgtatgccattcacctccaggacggacagcaagaggataaataaactgaccaacgaggtttatggaacctccatgactccagcaggttcaaatcccagaaaacagcctcccattaacatcctcaagcctaatcctaaa

SEQ ID NO: 20324 - DNA, 164 bp, Homo sapiens
  MAP TO AC007617.10; EXPRESSED IN BONE MARROW, SIGNAL = 0.79; EXPRESSED IN FETAL LIVER, SIGNAL = 0.78; EXPRESSED IN PLACENTA, SIGNAL = 0.76; EXPRESSED IN LUNG, SIGNAL = 0.77; EXPRESSED IN HELA, SIGNAL = 0.67; EXPRESSED IN ADULT LIVER, SIGNAL =   1; EXPRESSED IN BRAIN, SIGNAL = 0.77; EXPRESSED IN HEART, SIGNAL = 0.96; NT HIT: X14672.1, EVALUE 3.80e-01; SWISSPROT HIT: P15435, EVALUE 1.70e+00
catggagctggtattctgggtgcaagaccaacaatcaacaaacacataagcaccgtcatgtaatgttaggtggtgccaagtgcctggtgaaaacaatgaaacacatcatggggcagtggattatggtggaggaccaaggatgggagagggtgaaatattttaga

SEQ ID NO: 20325 - DNA, 97 bp, Homo sapiens
  MAP TO AC010361.2; EXPRESSED IN HBL100, SIGNAL = 1.2; EXPRESSED IN HEART, SIGNAL =   1; EXPRESSED IN ADULT LIVER, SIGNAL = 1.1; EXPRESSED IN BRAIN, SIGNAL =   1; NT HIT: gi11693124, EVALUE 2.10e-01; EST_HUMAN HIT: AI354998.1, EVALUE 2.10e-01
cctctccttctccttgtccttcttccctcttcttccctctccccttctgcacatagcctacccccaacccctgcccctggtaatgtggcttctccat

SEQ ID NO: 20326 - DNA, 211 bp, Homo sapiens
  MAP TO AL031055.1; EXPRESSED IN BT474, SIGNAL = 4.2; EXPRESSED IN FETAL LIVER, SIGNAL = 4.9; EXPRESSED IN BONE MARROW, SIGNAL = 4.4; EXPRESSED IN LUNG, SIGNAL = 4.5; EXPRESSED IN HBL100, SIGNAL = 3.8; EXPRESSED IN HELA, SIGNAL = 5.3; EXPRESSED IN HEART, SIGNAL = 4.8; EXPRESSED IN ADULT LIVER, SIGNAL = 6.2; EXPRESSED IN BRAIN, SIGNAL = 4.4; EXPRESSED IN PLACENTA, SIGNAL = 4.1; SWISSPROT HIT: P34708, EVALUE 7.20e-01; NT HIT: AJ298054.1, EVALUE 7.80e+00
tcagcatcccatctgcaatcagcatcaatggcttcccatctccaatcagcatcaatcctaaggtctttgccatgacttctagggctccaaataaaccaaagcgcttttgtccattgaccctactgagccatcctcgttccatccaccccaccccagttaccagtcagacaacatttcctaacacagtaagtgttggctactgtttcaattt

SEQ ID NO: 20327 - DNA, 260 bp, Homo sapiens
  MAP TO AL031075.1; EXPRESSED IN HEART, SIGNAL = 2.9; EXPRESSED IN FETAL LIVER, SIGNAL = 3.4; EXPRESSED IN BT474, SIGNAL = 3.2; EXPRESSED IN BONE MARROW, SIGNAL = 2.8; EXPRESSED IN PLACENTA, SIGNAL = 2.6; EXPRESSED IN HBL100, SIGNAL = 2.6; EXPRESSED IN HELA, SIGNAL = 3.6; EXPRESSED IN ADULT LIVER, SIGNAL = 2.8; EXPRESSED IN BRAIN, SIGNAL = 2.8; EXPRESSED IN LUNG, SIGNAL = 3.3; NT HIT: M61755.1, EVALUE 9.00e-06; SWISSPROT HIT: P40500, EVALUE 2.40e+00; EST_HUMAN HIT: AA412550.1, EVALUE 1.00e-03
acggggtgcagtatagaaatggctggttgtaacttaaacctaaaccagattatatttttatctttcaataggaaacataatatgaagctgtatttatgtcatagactgagaatgacaacatgaaggaagatattgaaactgtactgcagcctcacacacagtatgacccaaggcagagtagacttctatacaaggtgttgcatcttgaatcttgtcactataaaggtgcaaaccaaaaataaaattcgaaggccccaaat

SEQ ID NO: 20328 - DNA, 133 bp, Homo sapiens
  MAP TO AC007280.2; EXPRESSED IN BT474, SIGNAL = 1.1; EXPRESSED IN BONE MARROW, SIGNAL = 1.4; EXPRESSED IN FETAL LIVER, SIGNAL = 1.1; EXPRESSED IN HELA, SIGNAL = 1.1; EXPRESSED IN PLACENTA, SIGNAL = 1.1; EXPRESSED IN HBL100, SIGNAL = 0.91; EXPRESSED IN LUNG, SIGNAL = 1.5; EXPRESSED IN ADULT LIVER, SIGNAL =   1; EXPRESSED IN BRAIN, SIGNAL = 1.2; EXPRESSED IN HEART, SIGNAL = 1.2; NT HIT: gi11466673, EVALUE 1.20e+00; EST_HUMAN HIT: N52250.1, EVALUE 1.90e-02
tgaacgtcataaagtccaccgagccttccaggtccactgcttgacaattgcttttatctaagccaaacaggccaagcctggcactgtcagtcacggaaattttgtgtgcctggaacacaaaagtatattgtta

SEQ ID NO: 20329 - DNA, 109 bp, Homo sapiens
  MAP TO AC010903.2; EXPRESSED IN LUNG, SIGNAL =   2; EXPRESSED IN HBL100, SIGNAL = 1.4; EXPRESSED IN HELA, SIGNAL = 2.1; EXPRESSED IN PLACENTA, SIGNAL = 3.2; EXPRESSED IN HEART, SIGNAL =   2; EXPRESSED IN ADULT LIVER, SIGNAL = 2.5; EXPRESSED IN BT474, SIGNAL = 1.6; EXPRESSED IN FETAL LIVER, SIGNAL = 1.1; EXPRESSED IN BONE MARROW, SIGNAL = 1.3; EXPRESSED IN BRAIN, SIGNAL = 1.5; EST_HUMAN HIT: AW864948.1, EVALUE 5.00e-24; SWISSPROT HIT: P35228, EVALUE 1.00e+00; NT HIT: AL163246.2, EVALUE 2.00e-32
ctgagtggtgtccacagaacaggtcattctatccacttgattattaaaatcttcctctgctgaggtcacctgttggtgaacactcacatggaatacaaatgtcttcaca

SEQ ID NO: 20330 - DNA, 197 bp, Homo sapiens
  MAP TO AP000178.1; EXPRESSED IN PLACENTA, SIGNAL =   1; EXPRESSED IN ADULT LIVER, SIGNAL = 0.91; EXPRESSED IN BONE MARROW, SIGNAL = 1.2; EXPRESSED IN HBL100, SIGNAL = 1.2; EXPRESSED IN FETAL LIVER, SIGNAL = 1.1; EXPRESSED IN LUNG, SIGNAL = 0.89; EXPRESSED IN HELA, SIGNAL = 1.3; EXPRESSED IN BRAIN, SIGNAL = 2.6; EXPRESSED IN BT474, SIGNAL = 1.2; EXPRESSED IN HEART, SIGNAL =   1; SWISSPROT HIT: Q9QYM0, EVALUE 5.00e+00; NT HIT: AF231919.1, EVALUE 2.00e-92
ctgcttcattgcctgtcccaaggagcaacttattcctggcttccagggccgcagggactaccgcactgaatgggaacgtgagcaggatcatgtcttcactcaacgtgaaccctatttcctcatccaagccttcactgccctccaccaggacatccaccatgtcgagaacatctgagacagaaagaggagaatccagc

SEQ ID NO: 20331 - DNA, 276 bp, Homo sapiens
  MAP TO AC006512.12; EXPRESSED IN PLACENTA, SIGNAL = 1.3; EXPRESSED IN LUNG, SIGNAL =   1; EXPRESSED IN ADULT LIVER, SIGNAL = 1.1; EXPRESSED IN BONE MARROW, SIGNAL = 1.4; EXPRESSED IN HBL100, SIGNAL = 1.7; EXPRESSED IN FETAL LIVER, SIGNAL =   1; EXPRESSED IN HELA, SIGNAL = 1.1; EXPRESSED IN BRAIN, SIGNAL = 1.1; EXPRESSED IN HEART, SIGNAL = 0.96; SWISSPROT HIT: O14709, EVALUE 5.00e-08; EST_HUMAN HIT: BE249900.1, EVALUE 1.00e-92
taattctctaacctcacatctctgtagagttccctctgaacaaggtccaggtatctccattcctcttgagtaaggtgcacagccacatcctcagatgtcacaaactgctgatacctggctgtcaggagcgcagctgcctgatctcctgggctgtcctcatggggaaaggcaggcacctggggaacaggtggaaccctagtgagtccctgttccatgtcggtgtcctgcacaaaatgaggctttggagtcagactctcagactgggtctccaaaaac

SEQ ID NO: 20332 - DNA, 256 bp, Homo sapiens
  MAP TO AC007406.1; EXPRESSED IN BRAIN, SIGNAL = 0.95; EXPRESSED IN HBL100, SIGNAL = 1.1; EXPRESSED IN LUNG, SIGNAL = 1.2; EXPRESSED IN HELA, SIGNAL = 1.2; EXPRESSED IN ADULT LIVER, SIGNAL = 1.2; EXPRESSED IN PLACENTA, SIGNAL = 0.99; EXPRESSED IN BT474, SIGNAL = 1.3; EXPRESSED IN BONE MARROW, SIGNAL = 0.84; EXPRESSED IN FETAL LIVER, SIGNAL = 1.3; EXPRESSED IN HEART, SIGNAL = 1.1; NT HIT: gi11436400, EVALUE 0.00e+00; EST_HUMAN HIT: BE882996.1, EVALUE 1.00e-128; SWISSPROT HIT: P29375, EVALUE 6.00e-43
ccattgctttctccacagcatggtggggtgccaaccctaccccagagtctatcagcttcttcatgacatccaaagtgacttgttgcggatctgataaggtcagtcttacttcgtccaaccaccgagcctgttgtagctcttgcttcagtcgtggtaattcagggagttccacatagagactagagcccatatctatcaacatctggagtttggaagaatctggggtttcatccatcatggcctcctgagcacgttc

SEQ ID NO: 20333 - DNA, 177 bp, Homo sapiens
  MAP TO AC007566.1; EXPRESSED IN BT474, SIGNAL = 2.2; EXPRESSED IN BONE MARROW, SIGNAL = 0.93; EXPRESSED IN FETAL LIVER, SIGNAL = 0.72; EXPRESSED IN HELA, SIGNAL = 1.3; EXPRESSED IN PLACENTA, SIGNAL = 0.81; EXPRESSED IN HBL100, SIGNAL = 1.2; EXPRESSED IN LUNG, SIGNAL = 0.82; EXPRESSED IN ADULT LIVER, SIGNAL = 1.3; EXPRESSED IN BRAIN, SIGNAL = 1.3; EXPRESSED IN HEART, SIGNAL = 0.96; SWISSPROT HIT: P45444, EVALUE 2.90e+00; EST_HUMAN HIT: AU133852.1, EVALUE 3.00e-95; NT HIT: AB037807.1, EVALUE 2.00e-95
agacctagaaatggtcactgaagaccttgcccagaaagtcaataggccttaccttcgcacaccccgccacaagatcatcaaagcagcatgccttgtacagcagaagaggcaagaattcctggcatctgtggctcggggagtagctcctgcagactcaccagaagctccaaggcgcag

SEQ ID NO: 20334 - DNA, 706 bp, Homo sapiens
  MAP TO AP000168.1; EXPRESSED IN BONE MARROW, SIGNAL = 0.84; EXPRESSED IN HEART, SIGNAL = 0.98; EXPRESSED IN BRAIN, SIGNAL = 1.1; EXPRESSED IN ADULT LIVER, SIGNAL = 0.97; EXPRESSED IN HELA, SIGNAL = 0.7; EXPRESSED IN LUNG, SIGNAL = 0.8; EXPRESSED IN FETAL LIVER, SIGNAL = 0.96; EXPRESSED IN HBL100, SIGNAL = 0.75; EXPRESSED IN BT474, SIGNAL = 0.72; EXPRESSED IN PLACENTA, SIGNAL = 0.76; EST_HUMAN HIT: AW664693.1, EVALUE 0.00e+00; SWISSPROT HIT: P46486, EVALUE 1.10e-01; NT HIT: gi7019502, EVALUE 4.50e-01
ttaatgttctccacttgcttgcgtttatcctttcaattcctttgctaattaaattgctgaaaagtatacattggtaagaatagccactgtcaatggactgcaaacaaaactcgtttctgttattgatgataaaccatttcagagaagaccaggctgagtctaaagggttcagataattacaaggggaaggcagagagagtagttcatggccacaggacttggccacctctgggcaacacataatgcttgctaagctaatgactgtagggatatagaactggccctcagcctctctgtcttcctttggcctctgctcttcctgctgccttctctctttgaccacgatgacacactttccataggccttcctcaccacatcacagaactcagagaagaggctgtcttcttgtttgatacacagctcgtctcttaggaacacccgatatttccaaggcacccatccttgactacccgcagcatgcacaatacaccaagttggggtttgtatgaaatatccatcactaatatcttccccagttacgagactttctgggatattggtttccccaaaatatacggtcttaaatccatcatattgcagtgttctcagggttttcagatattggaggcattgcttcctcttgatgccatcaaattgacttctgataatgacatttcttaaaagagggcttgcaaagcgaggcat

SEQ ID NO: 20335 - DNA, 143 bp, Homo sapiens
  MAP TO AC006840.13; EXPRESSED IN HELA, SIGNAL = 0.67; EXPRESSED IN ADULT LIVER, SIGNAL = 0.82; EXPRESSED IN BRAIN, SIGNAL = 0.83; EXPRESSED IN HEART, SIGNAL = 0.88; EXPRESSED IN PLACENTA, SIGNAL = 0.75; EXPRESSED IN LUNG, SIGNAL = 2.3; EXPRESSED IN FETAL LIVER, SIGNAL = 0.68; EXPRESSED IN BONE MARROW, SIGNAL = 0.66; SWISSPROT HIT: P52388, EVALUE 2.30e+00; EST_HUMAN HIT: AI436797.1, EVALUE 8.30e-02
tctcagtccagttcattctcaaccagcaaatagtggaaatgaactggattcccagccatgaacccttgttttctgactctaggactggcttttgttgtttacaagtgtttttcaaagaatttaaagggctacctgctaccaag

SEQ ID NO: 20336 - DNA, 116 bp, Homo sapiens
  MAP TO AC007387.2; EXPRESSED IN HELA, SIGNAL = 1.1; EXPRESSED IN ADULT LIVER, SIGNAL = 0.9; EXPRESSED IN HEART, SIGNAL = 0.81; EXPRESSED IN PLACENTA, SIGNAL = 0.85; EXPRESSED IN BRAIN, SIGNAL = 0.85; EXPRESSED IN HBL100, SIGNAL = 0.72; EXPRESSED IN LUNG, SIGNAL = 0.92; EXPRESSED IN FETAL LIVER, SIGNAL = 0.78; EXPRESSED IN BONE MARROW, SIGNAL = 0.87; EXPRESSED IN BT474, SIGNAL = 0.66; NT HIT: AL161565.2, EVALUE 8.60e-01; SWISSPROT HIT: P48700, EVALUE 7.10e+00
gtcagtcagggcctcttgtgctccctgggggtattcatggtggaggaggatattagcagcatggctgtctacaccagcaattcttacagcaggtcatggtggagttcacgggcgtg

SEQ ID NO: 20337 - DNA, 924 bp, Homo sapiens
  MAP TO AC006230.11; EXPRESSED IN HEART, SIGNAL = 1.1; EXPRESSED IN BRAIN, SIGNAL = 1.4; EXPRESSED IN BT474, SIGNAL = 0.71; EXPRESSED IN LUNG, SIGNAL = 1.2; EXPRESSED IN PLACENTA, SIGNAL = 0.89; EXPRESSED IN BONE MARROW, SIGNAL = 0.83; EXPRESSED IN FETAL LIVER, SIGNAL = 0.8; NT HIT: gi11437117, EVALUE 0.00e+00; SWISSPROT HIT: P52849, EVALUE 7.00e-27; EST_HUMAN HIT: AI971626.1, EVALUE 0.00e+00
ctgccaacaagctcgaagaacttcttatttggctcatgaaaatattcgtgcagtttattgagtagtttgggatcgacttgggggtgcgcccggcctttggactcatgtaagcagcggtcccggccgctgtcccgcaggcagtaaaagcccttggttttgttaaagtagaagttcgaagcattgatctgcggcgacagctttaggaacctctcgaccttttggatctcagggaaggggtccctgatgaggcggtcgccgtccacaatgtggatgtggcgcagcgggaaaaagcgcagccagttctgcatgtgcacgtggtagaggctgcggttgagggccttgtagtccacattgagcctgccatcgcgcaccaggaactcctcgatggacgggtagggcttgtgcttctgcatgtggttgtagaacacttgggtgtagtcagatagcacgcgctccgacgggtctcgcaggatgagcagcagccggatggacgggttcatgctgtagactcgctcaggcactttgggcgacgtgaaatacgcgggggtcttctccactgtgagctggtgtggccaggagaagggcatctggctgaggtaccagcccaagccgtggctgtaatgctcctcccagtcgaagaagtggacctcgttctccgcggccgccacgtcggggtgcaggctgagcatctccagcagtgcgcgcgtgccgcccttgcgcacgccgatgatgatggtctgcggcaactgctgggcagagccgtttggggccacgccatcgcggacgtcatcctggagggtccccgctttccgcagaagctcctgctggcctagctcggcggggcgggaaggcactagctggggctgggccaccagcagcaccgcgcccaggagcagcgcggccatgctggacaccacggtggct

SEQ ID NO: 20338 - DNA, 85 bp, Homo sapiens
  MAP TO AC006516.10; EXPRESSED IN HBL100, SIGNAL = 0.78; EXPRESSED IN ADULT LIVER, SIGNAL = 0.86; EXPRESSED IN BRAIN, SIGNAL = 0.88; EXPRESSED IN HEART, SIGNAL = 1.1; EXPRESSED IN PLACENTA, SIGNAL = 0.87; EXPRESSED IN BT474, SIGNAL = 0.78; EXPRESSED IN HELA, SIGNAL = 0.97; EXPRESSED IN LUNG, SIGNAL =   1; EXPRESSED IN FETAL LIVER, SIGNAL = 0.79; EXPRESSED IN BONE MARROW, SIGNAL = 1.7; EST_HUMAN HIT: R81381.1, EVALUE 2.60e-01
agtcctgactctatgtcaggcatgatatcaggtgctggtactacagcagtgaacacaacagacaccttctgtatcctcatggaat

SEQ ID NO: 20339 - DNA, 297 bp, Homo sapiens
  MAP TO AC006286.12; EXPRESSED IN BONE MARROW, SIGNAL =   1; EXPRESSED IN LUNG, SIGNAL = 1.1; EXPRESSED IN PLACENTA, SIGNAL = 0.93; EXPRESSED IN BT474, SIGNAL = 1.1; EXPRESSED IN HBL100, SIGNAL = 0.72; EXPRESSED IN FETAL LIVER, SIGNAL = 0.91; EXPRESSED IN HELA, SIGNAL = 0.82; EXPRESSED IN ADULT LIVER, SIGNAL = 0.77; EXPRESSED IN BRAIN, SIGNAL = 0.93; EXPRESSED IN HEART, SIGNAL = 0.98; EST_HUMAN HIT: AA021387.1, EVALUE 8.00e-04; SWISSPROT HIT: P43146, EVALUE 5.00e-04; NT HIT: gi11526083, EVALUE 0.00e+00
gagaataattagaaccaaagtgattagtaacaatacactgatattttccttcatctgtgaaattcacattgaaaagatgtaagatactagtatattccagagcttctccagcttgctgccaataacgaacaaaattctcagtatccacgtcatacaggatttcactgtctttgcgccacacagtggacatgggtgaatcactgctgctcactgcagtgcacgtcagagtcacattcatgcctcttagagcaattatggtttcaggatgtgtccttatctgtggcttgagaaaatcat

SEQ ID NO: 20340 - DNA, 88 bp, Homo sapiens
  MAP TO AL050339.4; EXPRESSED IN PLACENTA, SIGNAL = 0.64; EXPRESSED IN BONE MARROW, SIGNAL = 0.64; EXPRESSED IN FETAL LIVER, SIGNAL = 0.63; EXPRESSED IN ADULT LIVER, SIGNAL = 0.68; EXPRESSED IN BRAIN, SIGNAL = 0.73; EXPRESSED IN LUNG, SIGNAL = 0.77; EXPRESSED IN HELA, SIGNAL = 0.69; EXPRESSED IN HEART, SIGNAL = 0.8; EXPRESSED IN HBL100, SIGNAL =   1; SWISSPROT HIT: Q13606, EVALUE 4.00e-03
ttctacactattgccttcatgggaaatatggccatcatcctattgtctttcctagatgaccatctccaagtccccatgtacttcttcc

SEQ ID NO: 20341 - DNA, 373 bp, Homo sapiens
  MAP TO AC006427.10; EXPRESSED IN PLACENTA, SIGNAL = 0.83; EXPRESSED IN BRAIN, SIGNAL = 0.73; EXPRESSED IN HELA, SIGNAL = 0.6; EXPRESSED IN ADULT LIVER, SIGNAL = 0.72; EXPRESSED IN HEART, SIGNAL = 0.88; EXPRESSED IN FETAL LIVER, SIGNAL = 0.65; EXPRESSED IN LUNG, SIGNAL = 0.82; SWISSPROT HIT: P04929, EVALUE 1.70e-02; NT HIT: D10082.1, EVALUE 3.60e+00
cagatccaagagttattctccacagagtcattgaggatagaagagatcacccccacagggccaatcaagaccaaaaagaccatccctacagtgccaatcaagatctcaaacaccacccccacagagccaatcaccaccaagataccaccaccatagagcaaactgaagagtccactcccactgagacaatcaagacagaaaagatcactaccacagagcaggtggaagtggaaaagaccatccctacagagctaatggaggtcccagagaccattctgaaatatcggatagagatgagagagttcacaaagccaaaccaggacttagaaagcaccctcaccagctcaacacagacacaaatcttgaccactgc

SEQ ID NO: 20342 - DNA, 164 bp, Homo sapiens
  MAP TO AJ006998.1; EXPRESSED IN BT474, SIGNAL =   1; EXPRESSED IN BONE MARROW, SIGNAL = 0.99; EXPRESSED IN HELA, SIGNAL = 1.2; EXPRESSED IN HEART, SIGNAL = 1.1; EXPRESSED IN PLACENTA, SIGNAL =   1; EXPRESSED IN FETAL LIVER, SIGNAL = 1.7; EXPRESSED IN LUNG, SIGNAL = 1.4; EXPRESSED IN ADULT LIVER, SIGNAL =   1; EXPRESSED IN BRAIN, SIGNAL = 1.3; EXPRESSED IN HBL100, SIGNAL = 0.89; NT HIT: AL163209.2, EVALUE 9.00e-88; EST_HUMAN HIT: AW238445.1, EVALUE 6.00e-03; SWISSPROT HIT: O36979, EVALUE 5.00e+00
gatgtctgcctggggtataagcttctcaaatcggggaggatccacttccaagctcacttgtgtcactttggcagccctcaaatgctcaaggttatctccagattttactgccatgttatgtggttcctccatagggctattcacaacttgatagcttgtttttc

SEQ ID NO: 20343 - DNA, 110 bp, Homo sapiens
  MAP TO AC006314.2; EXPRESSED IN ADULT LIVER, SIGNAL =   1; EXPRESSED IN HBL100, SIGNAL = 1.5; EXPRESSED IN HEART, SIGNAL = 1.1; EXPRESSED IN BONE MARROW, SIGNAL =   1; EXPRESSED IN LUNG, SIGNAL = 2.4; EXPRESSED IN BRAIN, SIGNAL =   1; NT HIT: AJ271735.1, EVALUE 9.00e-13; EST_HUMAN HIT: AI285527.1, EVALUE 1.00e-12; SWISSPROT HIT: P08547, EVALUE 1.60e-01
ttcttaatttcctcattgacccagtggtcattcaggagtttattatttaatttccatgtgtttgtgaagtttacagtgttcctcttgtaactaatttctagtttcattcc

SEQ ID NO: 20344 - DNA, 160 bp, Homo sapiens
  MAP TO AC007382.2; EXPRESSED IN BT474, SIGNAL = 0.99; EXPRESSED IN BONE MARROW, SIGNAL = 0.89; EXPRESSED IN ADULT LIVER, SIGNAL = 0.71; EXPRESSED IN PLACENTA, SIGNAL = 0.89; EXPRESSED IN BRAIN, SIGNAL = 0.98; EXPRESSED IN HBL100, SIGNAL = 0.78; EXPRESSED IN HEART, SIGNAL = 1.2; EXPRESSED IN LUNG, SIGNAL = 0.76; EXPRESSED IN FETAL LIVER, SIGNAL = 0.98; SWISSPROT HIT: P70483, EVALUE 2.00e-19; NT HIT: gi11430548, EVALUE 1.00e-71; EST_HUMAN HIT: AW004608.1, EVALUE 4.00e-81
attgttaggaaaaaagcattgcctgacagcggtgaagatcgagatacaaaagaagctctaaaggagtttgacttcttggttacatcagaggaaggagacaatgaatctagaagtgcaggcgatggaacagactggggtaaggaagcatactggatccaac

SEQ ID NO: 20345 - DNA, 229 bp, Homo sapiens
  MAP TO AL049831.2; EXPRESSED IN BT474, SIGNAL = 1.2; EXPRESSED IN HBL100, SIGNAL = 0.75; EXPRESSED IN PLACENTA, SIGNAL = 0.87; EXPRESSED IN HEART, SIGNAL = 1.2; EXPRESSED IN BRAIN, SIGNAL = 1.1; EXPRESSED IN ADULT LIVER, SIGNAL = 1.6; EXPRESSED IN HELA, SIGNAL = 0.94; EXPRESSED IN LUNG, SIGNAL = 0.97; EXPRESSED IN FETAL LIVER, SIGNAL = 0.98; EXPRESSED IN BONE MARROW, SIGNAL = 0.75; NT HIT: X53941.1, EVALUE 1.00e-126; EST_HUMAN HIT: AA359674.1, EVALUE 1.00e-29; SWISSPROT HIT: P00169, EVALUE 3.00e-23
tcagttttcaggagcatcacctacagcttgttccctgaagacttcttccccacagaaatgctcatcaaaaaatctggtcacatcatataccttgtggtgcaagatcacccaggtgcttttgctgtgattgtgcttcttaatctctcccagggtgtagtattttatgcccttgtctgactgctcagccatctcagtatgaagcgagccaggtcctgcacacacagacatg

SEQ ID NO: 20346 - DNA, 349 bp, Homo sapiens
  MAP TO AC008008.2; EXPRESSED IN HEART, SIGNAL = 0.79; EXPRESSED IN BONE MARROW, SIGNAL = 0.67; EXPRESSED IN PLACENTA, SIGNAL = 0.74; EXPRESSED IN BT474, SIGNAL = 1.2; EXPRESSED IN FETAL LIVER, SIGNAL = 0.72; EXPRESSED IN LUNG, SIGNAL = 0.93; EXPRESSED IN HELA, SIGNAL = 1.1; EXPRESSED IN BRAIN, SIGNAL = 0.82; EXPRESSED IN HBL100, SIGNAL = 2.1; EST_HUMAN HIT: AU118123.1, EVALUE 0.00e+00; NT HIT: gi11421724, EVALUE 0.00e+00; SWISSPROT HIT: P18892, EVALUE 6.00e-08
tcagccccgaagcatgaatggattgggaagaactctgcttcctgggcgctctgccgctgcaacaataactgggtggtgagacacaatagcaaggaaatccccattgagcctgccccccacctccggcgcgtgggcatcctgctggactatgataacggctctatcgccttttatgatgctttgaactccatccacctctacaccttcgacgtcgcatttgcgcagcctgtttgccccaccttcaccgtgtggaacaagtgtctgacgattatcactgggctccctatcccagaccatttggactgcacagagcagctgccgtgagcgtctggccacatggagctgcttt

SEQ ID NO: 20347 - DNA, 168 bp, Homo sapiens
  MAP TO AP000159.1; EXPRESSED IN PLACENTA, SIGNAL = 0.9; EXPRESSED IN BONE MARROW, SIGNAL = 0.75; EXPRESSED IN ADULT LIVER, SIGNAL = 1.2; EXPRESSED IN BRAIN, SIGNAL = 0.75; EXPRESSED IN BT474, SIGNAL = 0.7; EXPRESSED IN FETAL LIVER, SIGNAL = 0.76; EXPRESSED IN LUNG, SIGNAL = 1.1; EXPRESSED IN HELA, SIGNAL = 0.78; EXPRESSED IN HEART, SIGNAL = 0.88; SWISSPROT HIT: Q09268, EVALUE 6.50e+00; NT HIT: AF057019.1, EVALUE 3.90e-01; EST_HUMAN HIT: AW664531.1, EVALUE 3.00e-48
ccttctatagcatgagggaaaatcaagatttcttttttttcctcttctatgttcatttccttcttcctccagtcactctttttgattgctatgattgtatccttggatggctcaattgcagtctgttgaaattaaagaaaaagattctacgaaaaactataaaatgga

SEQ ID NO: 20348 - DNA, 255 bp, Homo sapiens
  MAP TO AC007263.3; EXPRESSED IN BT474, SIGNAL = 1.3; EXPRESSED IN BONE MARROW, SIGNAL =   1; EXPRESSED IN HBL100, SIGNAL = 0.79; EXPRESSED IN HELA, SIGNAL = 0.6; EXPRESSED IN ADULT LIVER, SIGNAL =   1; EXPRESSED IN BRAIN, SIGNAL = 0.76; EXPRESSED IN PLACENTA, SIGNAL = 0.77; EXPRESSED IN HEART, SIGNAL = 1.1; EXPRESSED IN LUNG, SIGNAL = 0.88; EXPRESSED IN FETAL LIVER, SIGNAL = 0.92; NT HIT: X74507.1, EVALUE 6.10e-01; SWISSPROT HIT: P56558, EVALUE 8.70e+00
tcctgcccagtttaaaccttgtcgcatacttgtcacttttaaattctgtaagcaccatcctcagcattccagggctggtaaccccaaagatggcagcagccaagctcctagcaaggggcacccagtcagggataagatctgtagtcgttaagcacatcatataataatggtagataaatatttggagcattcttctctccttagtgtacttcttcatatttcagttgctttgtatataaatctcaccttttctaa

SEQ ID NO: 20349 - DNA, 308 bp, Homo sapiens
  MAP TO AC007465.2; EXPRESSED IN PLACENTA, SIGNAL = 1.2; EXPRESSED IN BT474, SIGNAL =   1; EXPRESSED IN BONE MARROW, SIGNAL = 1.2; EXPRESSED IN HBL100, SIGNAL = 1.2; EXPRESSED IN LUNG, SIGNAL = 1.1; EXPRESSED IN HELA, SIGNAL = 1.2; EXPRESSED IN BRAIN, SIGNAL = 1.2; EXPRESSED IN FETAL LIVER, SIGNAL = 1.3; EXPRESSED IN ADULT LIVER, SIGNAL = 1.1; EXPRESSED IN HEART, SIGNAL = 1.3; NT HIT: AJ003165.1, EVALUE 1.60e-01; SWISSPROT HIT: P39415, EVALUE 4.40e+00; EST_HUMAN HIT: AW373315.1, EVALUE 1.90e-01
ctttcgtttacatctcccatggcagtgattccggattttatgctgctatcaaactgcatgtcctacagcaccccactctcagttgcatgcagtacttgaacacatcagccatgattttgcttaaagtccccaccattacccctagatttcttgacagaaaccagcagactaaagcttcatccctccccaacttctcccaatacctcacgtcattagatcactttactgtttgtttgcttgggcttctcccatcctcagacatcatcgctgctctcccagcctctgtcgtccaacccatggaatcttag

SEQ ID NO: 20350 - DNA, 77 bp, Homo sapiens
  MAP TO AC007091.3; EXPRESSED IN LUNG, SIGNAL = 0.61; EXPRESSED IN PLACENTA, SIGNAL = 0.87; EXPRESSED IN HEART, SIGNAL = 1.1; EST_HUMAN HIT: AI656329.1, EVALUE 3.60e+00; NT HIT: U82671.2, EVALUE 5.20e-01
aagagcatgttaaacccccacaacaattataagctaaatctgtttgccacagactgtgtaggattcttcaataacaa

SEQ ID NO: 20351 - DNA, 260 bp, Homo sapiens
  MAP TO AL031121.5; EXPRESSED IN PLACENTA, SIGNAL = 0.76; EXPRESSED IN HBL100, SIGNAL = 2.9; EXPRESSED IN FETAL LIVER, SIGNAL =   1; EXPRESSED IN LUNG, SIGNAL = 0.62; EXPRESSED IN HELA, SIGNAL =   1; EXPRESSED IN ADULT LIVER, SIGNAL = 1.2; EXPRESSED IN BRAIN, SIGNAL = 0.72; EXPRESSED IN HEART, SIGNAL = 0.9; NT HIT: gi4502952, EVALUE 5.30e-01; EST_HUMAN HIT: BE964443.2, EVALUE 6.00e-02
agggaagcctgtgcaggcattcatgtgtgcagaagtactggtttgcacacgcatctgcgtgtggctgtgtaggctgtgctgtgttagcaagaagaaagaagatcacggagagcattcagacgcccttcagctggacattcagctttttcttcttcttctttttcttcttcttctttttcttcttcttcttcttcttcttttttttttttttttttttttttttgcctgcttggctgcaaaagtccagaggaagtgaatcc

SEQ ID NO: 20352 - DNA, 170 bp, Homo sapiens
  MAP TO AC009241.1; EXPRESSED IN FETAL LIVER, SIGNAL = 0.83; EXPRESSED IN PLACENTA, SIGNAL = 0.77; EXPRESSED IN BT474, SIGNAL = 1.3; EXPRESSED IN BONE MARROW, SIGNAL = 0.83; EXPRESSED IN HBL100, SIGNAL =  14; EXPRESSED IN LUNG, SIGNAL = 0.67; EXPRESSED IN ADULT LIVER, SIGNAL = 1.2; EXPRESSED IN BRAIN, SIGNAL = 0.85; EXPRESSED IN HEART, SIGNAL = 0.85; EXPRESSED IN HELA, SIGNAL = 0.97; SWISSPROT HIT: P38739, EVALUE 5.70e-01; EST_HUMAN HIT: BE165980.1, EVALUE 3.00e-18; NT HIT: AL163303.2, EVALUE 1.00e-10
tatgtgaggaggtcaaaacagcaacattaacaagagtttggaagaaactgattccaatcctcatggatgactttgatgggttaaagacttcagtggaggaagtaactgagtatgtaacagcaagagaactagaattagaaatagagcctggtgttgtgactgaattgctg

SEQ ID NO: 20353 - DNA, 177 bp, Homo sapiens
  MAP TO AC007879.2; EXPRESSED IN HEART, SIGNAL = 1.1; EXPRESSED IN BONE MARROW, SIGNAL =   1; EXPRESSED IN FETAL LIVER, SIGNAL =   1; EXPRESSED IN PLACENTA, SIGNAL = 1.1; EXPRESSED IN BT474, SIGNAL = 0.97; EXPRESSED IN HBL100, SIGNAL = 2.9; EXPRESSED IN LUNG, SIGNAL =   1; EXPRESSED IN HELA, SIGNAL =   1; EXPRESSED IN ADULT LIVER, SIGNAL = 1.1; EXPRESSED IN BRAIN, SIGNAL = 1.4; NT HIT: AF020787.1, EVALUE 1.60e+00; SWISSPROT HIT: P39341, EVALUE 1.70e+00; EST_HUMAN HIT: AI280338.1, EVALUE 4.20e-01
aaactttcaaaatgggagccagctactgcaaaggaaaactgtaggcaatggaagcagggcatcaacaatgctcttaatggcacagagcatgatgttgggtggaaaaatgtggatgttgatggcaatgggtcagataaactgtacaaaccatgacatgcatagcaaactaaacataag

SEQ ID NO: 20354 - DNA, 156 bp, Homo sapiens
  MAP TO AL049733.3; EXPRESSED IN BONE MARROW, SIGNAL = 0.97; EXPRESSED IN HELA, SIGNAL = 1.2; EXPRESSED IN ADULT LIVER, SIGNAL = 0.93; EXPRESSED IN HEART, SIGNAL = 0.92; EXPRESSED IN PLACENTA, SIGNAL = 0.91; EXPRESSED IN BT474, SIGNAL = 2.1; EXPRESSED IN HBL100, SIGNAL = 1.1; EXPRESSED IN FETAL LIVER, SIGNAL = 0.98; EXPRESSED IN LUNG, SIGNAL = 0.95; EXPRESSED IN BRAIN, SIGNAL = 1.2; NT HIT: AF207881.1, EVALUE 6.00e-83; EST_HUMAN HIT: AW961297.1, EVALUE 6.00e-83; SWISSPROT HIT: P39624, EVALUE 5.10e+00
ttggatttggagggaagagcgtgcagcttttacagtgtatgatctcttttactactggcatatctggaggaattggtggaggtactattcccaaaccaggcatcattggagttattggtggaattccagtcatcattccaagagcaggatcaaagt

SEQ ID NO: 20355 - DNA, 77 bp, Homo sapiens
  MAP TO AL049844.6; EXPRESSED IN PLACENTA, SIGNAL = 0.59; EXPRESSED IN BONE MARROW, SIGNAL = 1.9; EXPRESSED IN HBL100, SIGNAL = 1.2; EXPRESSED IN ADULT LIVER, SIGNAL = 0.84; EXPRESSED IN BRAIN, SIGNAL = 0.71; EXPRESSED IN HEART, SIGNAL = 0.91; EXPRESSED IN BT474, SIGNAL = 0.81; EXPRESSED IN HELA, SIGNAL = 0.66; EXPRESSED IN FETAL LIVER, SIGNAL = 0.98; SWISSPROT HIT: Q10191, EVALUE 2.10e-01; EST_HUMAN HIT: BF515101.1, EVALUE 6.00e-36; NT HIT: AF176228.1, EVALUE 1.30e-01
tggtccaccggagccaacgagatcctttagcagcagatgagagtgcaccccagagggttctattgcccacacaaaaa

SEQ ID NO: 20356 - DNA, 96 bp, Homo sapiens
  MAP TO AC010978.2; EXPRESSED IN HEART, SIGNAL = 1.9; EXPRESSED IN ADULT LIVER, SIGNAL =   2; EXPRESSED IN LUNG, SIGNAL = 1.7; EXPRESSED IN BRAIN, SIGNAL =   2; EXPRESSED IN HELA, SIGNAL = 1.8; EXPRESSED IN HBL100, SIGNAL = 1.8; EXPRESSED IN PLACENTA, SIGNAL = 1.7; EXPRESSED IN BT474, SIGNAL =   2; EXPRESSED IN FETAL LIVER, SIGNAL = 1.5; EXPRESSED IN BONE MARROW, SIGNAL =   2; NT HIT: AF159160.1, EVALUE 4.40e-02; SWISSPROT HIT: P54631, EVALUE 7.00e+00
ctgagcgcctccgtgtcctgcgggaccgaaagagacatgctcagggaggtcctccctgacctcctcctctttattgcgattgtcaccgttggtcat

SEQ ID NO: 20357 - DNA, 166 bp, Homo sapiens
  MAP TO AC011743.2; EXPRESSED IN BONE MARROW, SIGNAL = 7.3; EXPRESSED IN HEART, SIGNAL =   6; EXPRESSED IN PLACENTA, SIGNAL = 7.5; EXPRESSED IN ADULT LIVER, SIGNAL =  11; EXPRESSED IN BRAIN, SIGNAL = 6.4; EXPRESSED IN HELA, SIGNAL =   8; EXPRESSED IN HBL100, SIGNAL = 8.2; EXPRESSED IN BT474, SIGNAL = 6.4; EXPRESSED IN FETAL LIVER, SIGNAL = 7.6; EXPRESSED IN LUNG, SIGNAL =  10; EST_HUMAN HIT: AW246442.1, EVALUE 7.00e-43; SWISSPROT HIT: P42588, EVALUE 2.90e+00
ctttctgtgcgattagacaaaattcttcttgcagctttgtataatctgttgaactttccagagggtcagtgaggtggctagggggagtctgaaattcaatatctgcacaaaggttggggttggaggaatgcaagcgaactggtgacatggtagcactgaaaggaac

SEQ ID NO: 20358 - DNA, 142 bp, Homo sapiens
  MAP TO AC011036.2; EXPRESSED IN FETAL LIVER, SIGNAL = 1.2; EXPRESSED IN LUNG, SIGNAL = 1.3; EXPRESSED IN BONE MARROW, SIGNAL = 1.3; EXPRESSED IN HELA, SIGNAL = 1.2; EXPRESSED IN HEART, SIGNAL = 1.1; EXPRESSED IN PLACENTA, SIGNAL = 1.9; EXPRESSED IN BT474, SIGNAL = 1.2; EXPRESSED IN ADULT LIVER, SIGNAL = 1.4; EXPRESSED IN BRAIN, SIGNAL = 1.3; EXPRESSED IN HBL100, SIGNAL = 1.4; NT HIT: AB000381.1, EVALUE 5.00e-06; EST_HUMAN HIT: BE326522.1, EVALUE 3.00e-17; SWISSPROT HIT: P02719, EVALUE 3.00e+00
gaaacattttgccagctttgtctttacatggaattgttgtaagctggaagacaccaactttacaaagaggttaaacaagcaagggccaaaaattagtagcaacacaacagataacaaaggtcctaggaaaggtcaaaaccag

SEQ ID NO: 20359 - DNA, 137 bp, Homo sapiens
  MAP TO AC011186.2; EXPRESSED IN LUNG, SIGNAL = 2.1; EXPRESSED IN BONE MARROW, SIGNAL = 2.1; EXPRESSED IN HEART, SIGNAL = 1.7; EXPRESSED IN PLACENTA, SIGNAL = 1.7; EXPRESSED IN ADULT LIVER, SIGNAL = 2.2; EXPRESSED IN BRAIN, SIGNAL =   2; EXPRESSED IN HELA, SIGNAL = 1.9; EXPRESSED IN HBL100, SIGNAL = 2.2; EXPRESSED IN BT474, SIGNAL = 2.1; EXPRESSED IN FETAL LIVER, SIGNAL = 2.1; SWISSPROT HIT: P36079, EVALUE 3.90e+00
ccccactggcttctgctccttccatgtcagactcggcctctgcactggctacatcagacccacaaacccaggtggcctctgttcacagcagttctgtcattggagttattctttctgtttcttgaaggacagcttag

SEQ ID NO: 20360 - DNA, 193 bp, Homo sapiens
  MAP TO AL049798.7; EXPRESSED IN HEART, SIGNAL = 1.3; EXPRESSED IN LUNG, SIGNAL = 0.64; EXPRESSED IN ADULT LIVER, SIGNAL =   1; SWISSPROT HIT: Q07507, EVALUE 2.00e-21; EST_HUMAN HIT: AL048453.2, EVALUE 1.00e-103; NT HIT: gi11425532, EVALUE 1.00e-105
tagttccattgtctgtcagaaccttccttcttgctgaagatgctcctcacggccactatcacctgcccctggggacactggtagctgaagccttgccggttcaaattcacccacccatcatcgctgtagtcatgatactgctggtatgggtatccataatcgccatactggccccaggccatggtgactaggg

SEQ ID NO: 20361 - DNA, 172 bp, Homo sapiens
  MAP TO AC011257.2; EXPRESSED IN FETAL LIVER, SIGNAL =   4; EXPRESSED IN LUNG, SIGNAL = 4.1; EXPRESSED IN BONE MARROW, SIGNAL = 4.4; EXPRESSED IN HELA, SIGNAL = 3.3; EXPRESSED IN HEART, SIGNAL = 3.1; EXPRESSED IN PLACENTA, SIGNAL = 3.7; EXPRESSED IN BT474, SIGNAL = 3.7; EXPRESSED IN ADULT LIVER, SIGNAL = 5.4; EXPRESSED IN BRAIN, SIGNAL = 3.8; EXPRESSED IN HBL100, SIGNAL =   4; EST_HUMAN HIT: BF590745.1, EVALUE 5.90e-01; NT HIT: AF088979.2, EVALUE 4.00e-01
cttttagttcaaatatagataatgatgatgatgttgatgtagatagagagagagagaaagagtattagatagccagactcattactaagcagttgccatggccaagcgctgttctttgtaatgaaatggataacaaacgtggatatgacattgcccctaacttccaaggctt

SEQ ID NO: 20362 - DNA, 102 bp, Homo sapiens
  MAP TO AC012061.2; EXPRESSED IN HBL100, SIGNAL = 1.4; EXPRESSED IN ADULT LIVER, SIGNAL = 2.2; EXPRESSED IN FETAL LIVER, SIGNAL = 1.4; EXPRESSED IN LUNG, SIGNAL = 1.3; EXPRESSED IN HEART, SIGNAL = 1.3; EXPRESSED IN HELA, SIGNAL = 1.2; EXPRESSED IN PLACENTA, SIGNAL = 1.3; EXPRESSED IN BT474, SIGNAL = 1.3; EXPRESSED IN BRAIN, SIGNAL = 1.2; EXPRESSED IN BONE MARROW, SIGNAL = 1.2; EST_HUMAN HIT: AW663302.1, EVALUE 9.00e-35; SWISSPROT HIT: P08566, EVALUE 7.00e+00; NT HIT: AL161590.2, EVALUE 3.40e+00
gatgtttcagtttcccagggatttcgcatgttgttttacacgatgaaacccagtgaaacttcattccaaacattagaagaggtgcctgattatgtaaaaaag

SEQ ID NO: 20363 - DNA, 171 bp, Homo sapiens
  MAP TO AC011012.2; EXPRESSED IN BT474, SIGNAL = 4.1; EXPRESSED IN FETAL LIVER, SIGNAL = 3.6; EXPRESSED IN LUNG, SIGNAL = 3.8; EXPRESSED IN BONE MARROW, SIGNAL = 3.5; EXPRESSED IN PLACENTA, SIGNAL = 4.1; EXPRESSED IN HEART, SIGNAL = 3.3; EXPRESSED IN ADULT LIVER, SIGNAL = 4.5; EXPRESSED IN BRAIN, SIGNAL =   4; EXPRESSED IN HELA, SIGNAL = 3.4; EXPRESSED IN HBL100, SIGNAL = 3.6; NT HIT: D49707.1, EVALUE 2.50e-02; EST_HUMAN HIT: AW377413.1, EVALUE 2.30e+00; SWISSPROT HIT: O51757, EVALUE 9.80e-01
agagaggtggaatatattcccctgcccctgaagtttgtctgtgtagctttctttggccaattgaatgttagcataaatgatgtgaccaagaatttcaaagacgcttgcacaattggagttgctcttctgggcctctgccttggccttgaggacaacatgcctgagatagcc

SEQ ID NO: 20364 - DNA, 525 bp, Homo sapiens
  MAP TO AP000014.2; EXPRESSED IN PLACENTA, SIGNAL = 2.4; EXPRESSED IN ADULT LIVER, SIGNAL = 2.5; EXPRESSED IN LUNG, SIGNAL = 2.6; EXPRESSED IN HBL100, SIGNAL = 2.3; EXPRESSED IN HEART, SIGNAL = 1.5; EXPRESSED IN FETAL LIVER, SIGNAL = 1.5; EXPRESSED IN BT474, SIGNAL = 2.9; EXPRESSED IN BRAIN, SIGNAL = 2.7; EXPRESSED IN BONE MARROW, SIGNAL = 3.1; EXPRESSED IN HELA, SIGNAL = 1.9; SWISSPROT HIT: P48051, EVALUE 5.00e-95; EST_HUMAN HIT: BE253863.1, EVALUE 8.50e-02; NT HIT: D87327.1, EVALUE 0.00e+00
ctgtggcttccaccattccttctaggatgaccacaatttccagttcctctttgggcagctgggctttggagatctcccagaaaggactctgttggttaatttcatggctaatgatcagcggtgacaccagaaacagacggtcatcccccgtgtaataccctacgttgatatccgtctggttcaacgggatgaactccccctccgaggtctgtttggatttgatcaacttggctctgatggaagcctccacaatgtgggaattcctaaggtcccctacccggaacatcaggcacagtttcccatcccgcatggagatcactgcatgggtggaaaagaccagggtctctgccctcttcttgggttgagagatttttacaaacatgcatcccaccatgaatgcattgacaatggaccccaacacagattggattaagagaagaataattccctctgggcatttatctgtgatgacccggtagccataaccaatggtggtttctgtctctattgagaataaaaaagcag

SEQ ID NO: 20365 - DNA, 137 bp, Homo sapiens
  MAP TO AC007785.1; EXPRESSED IN PLACENTA, SIGNAL = 0.9; EXPRESSED IN LUNG, SIGNAL = 0.78; EXPRESSED IN HELA, SIGNAL = 0.89; EXPRESSED IN HEART, SIGNAL = 0.94; EXPRESSED IN BT474, SIGNAL = 0.83; EXPRESSED IN BONE MARROW, SIGNAL = 1.2; EXPRESSED IN HBL100, SIGNAL = 0.73; EXPRESSED IN FETAL LIVER, SIGNAL = 0.95; EXPRESSED IN BRAIN, SIGNAL = 0.98; EXPRESSED IN ADULT LIVER, SIGNAL = 0.9; EST_HUMAN HIT: BE122850.1, EVALUE 1.00e-71; SWISSPROT HIT: P52958, EVALUE 3.90e+00; NT HIT: U22304.1, EVALUE 7.80e-02
ggagataagtgacactgagacttcatacccagaaccctcaacttcacaagaaacttctgctgggggccaaaagactcgggacagcagagctcaaagcagggccagaaggtgcaggtggagccacagcggcgggtctc

SEQ ID NO: 20366 - DNA, 229 bp, Homo sapiens
  MAP TO AC010197.7; EXPRESSED IN PLACENTA, SIGNAL = 1.2; EXPRESSED IN HBL100, SIGNAL = 1.2; EXPRESSED IN BRAIN, SIGNAL = 1.5; EXPRESSED IN HELA, SIGNAL = 3.4; EXPRESSED IN HEART, SIGNAL =   3; NT HIT: X13794.1, EVALUE 1.00e-124; EST_HUMAN HIT: AA075862.1, EVALUE 5.00e-72; SWISSPROT HIT: P07195, EVALUE 1.00e-17
aggtgcccaaagaaactgtgtatacatgctgaacttctctatcatctatggtgttcttgaaatgtacctttcccagaatgctgatagcacacgccataccaacttgtccaacacccactacagtgatcttattgtttggaactgttgcctcttcttccgcaactggtgcaatgagtttttccttaagagttgccattttgcactgcaaggaaagaatcaaaacattaca

SEQ ID NO: 20367 - DNA, 105 bp, Homo sapiens
  MAP TO AC011174.2; EXPRESSED IN BT474, SIGNAL = 1.8; EXPRESSED IN HEART, SIGNAL = 1.7; EXPRESSED IN ADULT LIVER, SIGNAL = 2.1; EXPRESSED IN BRAIN, SIGNAL = 1.9; EXPRESSED IN LUNG, SIGNAL = 1.9; EXPRESSED IN BONE MARROW, SIGNAL = 1.9; EXPRESSED IN PLACENTA, SIGNAL = 1.7; EXPRESSED IN HELA, SIGNAL =   2; EXPRESSED IN HBL100, SIGNAL =   2; EXPRESSED IN FETAL LIVER, SIGNAL = 1.9; NT HIT: M94383.1, EVALUE 2.00e-05; EST_HUMAN HIT: AW206822.1, EVALUE 3.30e-01
cagcagcagcagtaataacaacaactacaaaagcagcatcaaaaactatccacttctcagttacctttctgccaataaacaaatgtaaaatattgatcgcaatgg

SEQ ID NO: 20368 - DNA, 457 bp, Homo sapiens
  MAP TO AL121782.4; EXPRESSED IN BT474, SIGNAL =  40; EXPRESSED IN HBL100, SIGNAL =  14; EXPRESSED IN HELA, SIGNAL =  31; EXPRESSED IN PLACENTA, SIGNAL = 6.3; EXPRESSED IN ADULT LIVER, SIGNAL = 2.8; EXPRESSED IN FETAL LIVER, SIGNAL =  20; EXPRESSED IN BRAIN, SIGNAL =  33; EXPRESSED IN LUNG, SIGNAL = 6.8; EXPRESSED IN BONE MARROW, SIGNAL =  11; EXPRESSED IN HEART, SIGNAL =  29; SWISSPROT HIT: P04406, EVALUE 7.00e-67; EST_HUMAN HIT: BF337211.1, EVALUE 0.00e+00; NT HIT: AF261085.1, EVALUE 0.00e+00
aaatgagcttgacaaggtggttgttgagggcattgccagccccagcatggaagatggaagagtgggtatcactgttggaggagacaatctggtgctcagtgtagtccaggatgcccttgagggggccctctgacacctgcttcaccaccttcttgatatcatcatatttggcaggtttctccagacggtaggtcaggtccataactgacacattggcaatggggacatggaaggccatgccattgagcttcctgttcagctcggggatgaccttgcccacagccttggcagtgccagtagatgcagggatgatgttctggagagccacacagccctcatgccacagtttcccggaggggccatccacagtcttctgggtggcagtgatagcgtggactgtggtcatgaatccttccatgataccaaagttgtcatagatggctttggccaggggtgc

SEQ ID NO: 20369 - DNA, 267 bp, Homo sapiens
  MAP TO AC011208.2; EXPRESSED IN PLACENTA, SIGNAL =  12; EXPRESSED IN HEART, SIGNAL =   6; EXPRESSED IN HBL100, SIGNAL =  20; EXPRESSED IN FETAL LIVER, SIGNAL = 8.7; EXPRESSED IN BT474, SIGNAL = 9.7; EXPRESSED IN ADULT LIVER, SIGNAL =   3; EXPRESSED IN LUNG, SIGNAL =   7; EXPRESSED IN BONE MARROW, SIGNAL = 9.2; EXPRESSED IN BRAIN, SIGNAL = 7.4; EXPRESSED IN HELA, SIGNAL =  16; NT HIT: gi4504444, EVALUE 1.00e-88; SWISSPROT HIT: P09651, EVALUE 7.00e-03; EST_HUMAN HIT: BF690630.1, EVALUE 3.00e-93
ctactgctgctactggaaccaccccagccaccttggttttgtggtttggcaaagtactggcttccaccaccataggggccagagcttctgcctccaaaatttactctcttcatgggtccaaaatttgaagactgttgcaattgccaaaatcactgtagcttccaccacctccaaaattgcttccatcattaccaaatccatgatgaccatccccgctgccaccatatccaccatcaccatggctgccaccaaagccaccatgaccac

SEQ ID NO: 20370 - DNA, 182 bp, Homo sapiens
  MAP TO AL121838.2; EXPRESSED IN HELA, SIGNAL = 1.3; EXPRESSED IN HBL100, SIGNAL = 1.4; EXPRESSED IN FETAL LIVER, SIGNAL = 2.1; EXPRESSED IN HEART, SIGNAL =   2; EXPRESSED IN LUNG, SIGNAL = 1.6; EXPRESSED IN PLACENTA, SIGNAL = 2.5; EXPRESSED IN BRAIN, SIGNAL = 1.1; NT HIT: gi11437415, EVALUE 1.00e-81; EST_HUMAN HIT: AI418540.1, EVALUE 2.00e-81; SWISSPROT HIT: P40305, EVALUE 8.00e-09
ttgtggctgtgcccatggtgctcagtgccatgggcttcactgcggcgggaatcgcctcgtcctccatagcagccaagatgatgtccgcggcggccattgccaatgggggtggagttgcctcgggcagccttgtggctactctgcagtcactgggtaagtatcctggcggggcttgctgggga

SEQ ID NO: 20371 - DNA, 198 bp, Homo sapiens
  MAP TO AC011235.2; EXPRESSED IN BONE MARROW, SIGNAL = 2.8; EXPRESSED IN LUNG, SIGNAL = 3.1; EXPRESSED IN HELA, SIGNAL = 2.8; EXPRESSED IN PLACENTA, SIGNAL = 2.8; EXPRESSED IN HBL100, SIGNAL = 2.9; EXPRESSED IN HEART, SIGNAL = 2.6; EXPRESSED IN FETAL LIVER, SIGNAL = 3.1; EXPRESSED IN ADULT LIVER, SIGNAL = 3.2; EXPRESSED IN BT474, SIGNAL = 2.5; EXPRESSED IN BRAIN, SIGNAL = 2.8; SWISSPROT HIT: P41737, EVALUE 2.50e-01; NT HIT: AF247644.1, EVALUE 3.00e-02
agagcattcggacaccggcatcatcctcctctctggcaagcaccactgctctcttatctgcttctgcagggagggagccatcagcactctccctgttccattgccaggcgccaccaaggcccctctggcttggtgcctcctcacaggcggagtagcagaggccggagtcccgacttctggccccagcttcacccctaa

SEQ ID NO: 20372 - DNA, 274 bp, Homo sapiens
  MAP TO AC006549.20; EXPRESSED IN HELA, SIGNAL = 0.78; EXPRESSED IN HEART, SIGNAL = 0.85; EXPRESSED IN PLACENTA, SIGNAL = 0.82; EXPRESSED IN BT474, SIGNAL = 0.77; EXPRESSED IN BONE MARROW, SIGNAL =   1; EXPRESSED IN HBL100, SIGNAL = 0.8; EXPRESSED IN FETAL LIVER, SIGNAL = 0.82; EXPRESSED IN LUNG, SIGNAL = 0.91; EXPRESSED IN BRAIN, SIGNAL = 1.4; EXPRESSED IN ADULT LIVER, SIGNAL = 0.88; NT HIT: X73221.1, EVALUE 3.60e-02; EST_HUMAN HIT: BE772866.1, EVALUE 2.50e-01; SWISSPROT HIT: P21263, EVALUE 6.60e-01
tcacgtgttgggtgccagagacaccctcctgggcctcggattcctcctctgtgatgaaggcgggggctgctggctcctccataccatgctcggcccccagcagacaggcaacaggggccttgtcccactgtagctgtggtcaggtggtccagggctagacggtcctacggggagctgaggcccccacctcgagatctccctgcccaagacaccagtggggttggggtgggtcaaaggcctgttcctccagggcccataggaggggcttcttaat

SEQ ID NO: 20373 - DNA, 228 bp, Homo sapiens
  MAP TO AL096801.16; EXPRESSED IN LUNG, SIGNAL = 2.6; EXPRESSED IN BRAIN, SIGNAL = 1.6; EXPRESSED IN HELA, SIGNAL = 1.4; EXPRESSED IN PLACENTA, SIGNAL = 2.5; EXPRESSED IN HEART, SIGNAL =   2; EXPRESSED IN FETAL LIVER, SIGNAL =   2; EXPRESSED IN ADULT LIVER, SIGNAL = 2.6; EXPRESSED IN BT474, SIGNAL = 2.3; EXPRESSED IN BONE MARROW, SIGNAL = 2.1; EXPRESSED IN HBL100, SIGNAL =   2; EST_HUMAN HIT: AU133604.1, EVALUE 1.00e-123; NT HIT: gi11419183, EVALUE 1.00e-125
agccagtggaaagatatctatcagtttctttgcaatgccagtgagagggaggttgctgctttctccaatgggtacacagccgaccacgagcgggcctacgcagctctgcagcactggaccatccggggccccgaggccagcctcgcccagctaattagcgccctgcgccagcaccggagaaacgatgttgtggagaagattcgtgggctgatggaagacaccacccag

SEQ ID NO: 20374 - DNA, 118 bp, Homo sapiens
  MAP TO AL096814.11; EXPRESSED IN BT474, SIGNAL = 7.7; EXPRESSED IN BRAIN, SIGNAL = 8.6; EXPRESSED IN HEART, SIGNAL = 6.2; EXPRESSED IN ADULT LIVER, SIGNAL = 6.3; EXPRESSED IN FETAL LIVER, SIGNAL = 6.3; EXPRESSED IN LUNG, SIGNAL = 8.3; EXPRESSED IN BONE MARROW, SIGNAL = 6.7; EXPRESSED IN HELA, SIGNAL = 7.9; EXPRESSED IN PLACENTA, SIGNAL =  12; EXPRESSED IN HBL100, SIGNAL =  10; NT HIT: AF123500.1, EVALUE 1.70e-02; SWISSPROT HIT: P50820, EVALUE 2.70e-01; EST_HUMAN HIT: AA380159.1, EVALUE 3.80e-01
ccccggagcctgggctgcagggagagtgtgaggaccaaatcctagctaaaggttttacaggcccagacacgcatacttctgtttgttggaaacattaccccaccaagctcagtcacct

SEQ ID NO: 20375 - DNA, 184 bp, Homo sapiens
  MAP TO AC011997.2; EXPRESSED IN ADULT LIVER, SIGNAL = 1.2; EXPRESSED IN BT474, SIGNAL = 0.93; EXPRESSED IN BRAIN, SIGNAL = 1.7; EXPRESSED IN HELA, SIGNAL = 0.97; EXPRESSED IN HEART, SIGNAL = 0.99; EXPRESSED IN PLACENTA, SIGNAL = 0.98; EXPRESSED IN HBL100, SIGNAL = 1.2; EXPRESSED IN FETAL LIVER, SIGNAL = 0.97
gatagaagtatgactccttcttcttcttcttcttcttcttcttcttcttcttcttcttcttcttcttcttcttcttcttcttcttcttcttcttcttcttcttcttctccttctccttcttctttcttcttcctcttcttcctcttcttcttcctccttcttcctcttcctcttcttttttgtt

SEQ ID NO: 20376 - DNA, 94 bp, Homo sapiens
  MAP TO AC007092.3; EXPRESSED IN PLACENTA, SIGNAL = 4.6; EXPRESSED IN FETAL LIVER, SIGNAL = 3.4; EXPRESSED IN HELA, SIGNAL =   4; EXPRESSED IN ADULT LIVER, SIGNAL = 2.9; EXPRESSED IN BRAIN, SIGNAL = 4.6; EXPRESSED IN BT474, SIGNAL = 3.8; EXPRESSED IN HEART, SIGNAL = 3.1; EXPRESSED IN LUNG, SIGNAL = 3.9; EXPRESSED IN HBL100, SIGNAL = 3.5; EXPRESSED IN BONE MARROW, SIGNAL = 4.4; NT HIT: gi6755942, EVALUE 3.10e+00
ctttgtctcaagaaatggcaccaccatggagacccatgaccatcagaacctgggaatcactctaaacttcttctactcctttgccactgtatgg

SEQ ID NO: 20377 - DNA, 95 bp, Homo sapiens
  MAP TO AC011242.2; EXPRESSED IN HBL100, SIGNAL = 1.2; EXPRESSED IN FETAL LIVER, SIGNAL = 1.1; EXPRESSED IN BT474, SIGNAL =   1; EXPRESSED IN LUNG, SIGNAL = 1.2; EXPRESSED IN PLACENTA, SIGNAL = 1.2; EXPRESSED IN HELA, SIGNAL =   1; EXPRESSED IN HEART, SIGNAL = 1.1; EXPRESSED IN ADULT LIVER, SIGNAL = 1.3; EXPRESSED IN BRAIN, SIGNAL = 1.4; EXPRESSED IN BONE MARROW, SIGNAL = 1.3; NT HIT: AF060568.1, EVALUE 4.30e-02; EST_HUMAN HIT: AL041522.2, EVALUE 8.10e-01; SWISSPROT HIT: P33329, EVALUE 2.40e+00
tacatctctgatatacaagaacatgaccaccccagtgtatacaactttgaagggggtaactcattattgttattgttaaaacatgtgcttctctt

SEQ ID NO: 20378 - DNA, 110 bp, Homo sapiens
  MAP TO AL121752.2; EXPRESSED IN PLACENTA, SIGNAL = 3.7; EXPRESSED IN HEART, SIGNAL = 3.6; EXPRESSED IN BT474, SIGNAL = 4.1; EXPRESSED IN LUNG, SIGNAL =   3; EXPRESSED IN HELA, SIGNAL = 2.2; EXPRESSED IN HBL100, SIGNAL = 5.1; EXPRESSED IN ADULT LIVER, SIGNAL = 2.5; EXPRESSED IN FETAL LIVER, SIGNAL = 2.6; EXPRESSED IN BRAIN, SIGNAL = 3.7; EXPRESSED IN BONE MARROW, SIGNAL = 4.5; NT HIT: U67563.1, EVALUE 1.50e-02; EST_HUMAN HIT: BF510986.1, EVALUE 6.00e-03; SWISSPROT HIT: P41951, EVALUE 4.00e+00
ggtatgttccaataatatttgttccattccattttgtaaaattaatttctgcactgagaacatagttttgctttttcttgcagagaagggagtagtgatggtaattgtgc

SEQ ID NO: 20379 - DNA, 410 bp, Homo sapiens
  MAP TO AL121755.4; EXPRESSED IN BONE MARROW, SIGNAL =   5; EXPRESSED IN LUNG, SIGNAL = 3.3; EXPRESSED IN BRAIN, SIGNAL = 5.4; EXPRESSED IN HELA, SIGNAL = 5.5; EXPRESSED IN HBL100, SIGNAL = 7.2; EXPRESSED IN PLACENTA, SIGNAL = 3.5; EXPRESSED IN HEART, SIGNAL = 5.6; EXPRESSED IN ADULT LIVER, SIGNAL = 2.7; EXPRESSED IN BT474, SIGNAL = 5.8; EXPRESSED IN FETAL LIVER, SIGNAL = 2.6; SWISSPROT HIT: P97295, EVALUE 6.00e-09; NT HIT: gi10946717, EVALUE 4.00e-68
ctgtcaatggcaatggccagcaaggcattggtggagacgtagagggagacggtgcgcaggtagttgacggaggcacagagcacgtggccatgctcccaggagagctgccgtaccacgtagtagtccatctcgaaggggcagcagatgatggccaccaggaagtcggagatggccaggttggcaatgagcagattggtgaggttgcgcaacttcttatagcgggtgagggcagcgataaagacaaagttaccgatgccgcagaccagcatgatgcctgccagtgcaatgccaatgacgatcttggctgcgaagaaggtccgggtcttggtcatgtcctcatcctcatccatagggaggtcataatcaccataactgaagttaaaggagagggaggaggcatggtcttgggg

SEQ ID NO: 20380 - DNA, 83 bp, Homo sapiens
  MAP TO AC007313.3; EXPRESSED IN PLACENTA, SIGNAL = 0.9; EXPRESSED IN HELA, SIGNAL = 0.84; EXPRESSED IN BRAIN, SIGNAL = 0.88; EXPRESSED IN HEART, SIGNAL = 0.8; EXPRESSED IN BT474, SIGNAL = 0.65; EXPRESSED IN ADULT LIVER, SIGNAL = 0.88; EXPRESSED IN LUNG, SIGNAL = 0.95; EXPRESSED IN FETAL LIVER, SIGNAL = 0.87; EXPRESSED IN HBL100, SIGNAL = 0.73; EXPRESSED IN BONE MARROW, SIGNAL = 0.75; NT HIT: AL096806.1, EVALUE 3.60e-02; EST_HUMAN HIT: H11472.1, EVALUE 6.80e-01
gggtggcttcaggagggtttcatagaagaagtcagtctcagccgtttggtgctccaattcagagctgaagcggagccagactg

SEQ ID NO: 20381 - DNA, 121 bp, Homo sapiens
  MAP TO AC012143.1; EXPRESSED IN BONE MARROW, SIGNAL = 1.3; EXPRESSED IN HELA, SIGNAL =  14; EXPRESSED IN PLACENTA, SIGNAL = 1.7; EXPRESSED IN HEART, SIGNAL = 1.4; EXPRESSED IN HBL100, SIGNAL = 1.8; EXPRESSED IN FETAL LIVER, SIGNAL = 1.4; EXPRESSED IN BT474, SIGNAL = 1.7; EXPRESSED IN ADULT LIVER, SIGNAL = 1.4; EXPRESSED IN LUNG, SIGNAL = 1.8; SWISSPROT HIT: P03588, EVALUE 9.00e+00; NT HIT: AE001775.1, EVALUE 5.80e-02; EST_HUMAN HIT: AW513296.1, EVALUE 1.10e+00
gtccgatggcaccatttacctcttatggtcctcactgctacacgtacagatagatgtcttcccactgaaagtcaaaaatctgctgatgggcaggaaaatgtcagcacattgctgtagctct

SEQ ID NO: 20382 - DNA, 370 bp, Homo sapiens
  MAP TO AC012271.1; EXPRESSED IN FETAL LIVER, SIGNAL = 1.3; EXPRESSED IN ADULT LIVER, SIGNAL = 1.7; EXPRESSED IN BT474, SIGNAL = 1.5; EXPRESSED IN BRAIN, SIGNAL = 1.7; EXPRESSED IN BONE MARROW, SIGNAL = 1.5; EXPRESSED IN LUNG, SIGNAL = 1.3; EXPRESSED IN HELA, SIGNAL = 1.3; EXPRESSED IN PLACENTA, SIGNAL = 1.4; EXPRESSED IN HBL100, SIGNAL = 1.5; EXPRESSED IN HEART, SIGNAL = 1.2; EST_HUMAN HIT: AV731680.1, EVALUE 6.00e-03; NT HIT: AB044400.1, EVALUE 1.00e-03
aaacagaatctcttaggttgcaggtttttcatttctgtttttgtttttgttttgctttgcttttcatttaaactgtgaagacaagatctgttcaccaagaaagatcactaaggaaaaccaaattcagtgagtatatgtaaacttcagaccaagatctgcccgtttgtataggcattgttggtgatgatgatgatgatgatggtaatgatgatccccaggcaacctgctaagtgcttttcataatgatctcttttaacccttacaaaaacctggggcataggtaaagccattttatagatgaggaggccaagactcagagaggttaccataactttcccaaaataactcttgtttcttctcactcaactcc

SEQ ID NO: 20383 - DNA, 190 bp, Homo sapiens
  MAP TO AC012277.1; EXPRESSED IN HBL100, SIGNAL = 5.6; EXPRESSED IN FETAL LIVER, SIGNAL = 5.9; EXPRESSED IN BT474, SIGNAL = 5.5; EXPRESSED IN LUNG, SIGNAL = 5.6; EXPRESSED IN PLACENTA, SIGNAL = 5.5; EXPRESSED IN HEART, SIGNAL = 4.9; EXPRESSED IN HELA, SIGNAL = 5.6; EXPRESSED IN ADULT LIVER, SIGNAL =   7; EXPRESSED IN BRAIN, SIGNAL = 6.6; EXPRESSED IN BONE MARROW, SIGNAL = 6.1; NT HIT: X87344.1, EVALUE 2.00e-03; SWISSPROT HIT: P33450, EVALUE 2.20e+00
agagatctaccttaaggaatccactcccacaattgtggataccagcaagtacaacatctgcaaaacaggctgtcaggctgcagatctaggaaacagctggtgctgcaacttgaacccaaacacagtcgggaggcagaattccctcttcctcagggtacctcagtctttttgctatatgaccttcaactga

SEQ ID NO: 20384 - DNA, 511 bp, Homo sapiens; identical to SEQ ID NO: 18441
  MAP TO AL096774.8; EXPRESSED IN LUNG, SIGNAL = 9.4; EXPRESSED IN BRAIN, SIGNAL = 2.6; EXPRESSED IN HBL100, SIGNAL = 3.4; EXPRESSED IN HELA, SIGNAL = 2.3; EXPRESSED IN PLACENTA, SIGNAL =   4; EXPRESSED IN ADULT LIVER, SIGNAL = 2.1; EXPRESSED IN BONE MARROW, SIGNAL =  16; EXPRESSED IN HEART, SIGNAL = 4.3; EXPRESSED IN BT474, SIGNAL = 4.7; EXPRESSED IN FETAL LIVER, SIGNAL = 2.5; NT HIT: gi11386182, EVALUE 0.00e+00; EST_HUMAN HIT: AW499926.1, EVALUE 0.00e+00; SWISSPROT HIT: Q92558, EVALUE 6.20e-01

SEQ ID NO: 20385 - DNA, 79 bp, Homo sapiens
  MAP TO AC008170.1; EXPRESSED IN BRAIN, SIGNAL = 1.2; EXPRESSED IN PLACENTA, SIGNAL = 0.66; EXPRESSED IN HELA, SIGNAL = 1.1; EXPRESSED IN ADULT LIVER, SIGNAL = 0.83; EXPRESSED IN HEART, SIGNAL = 0.92; EXPRESSED IN BT474, SIGNAL = 0.62; EXPRESSED IN FETAL LIVER, SIGNAL = 0.8; EXPRESSED IN LUNG, SIGNAL = 1.1; EXPRESSED IN BONE MARROW, SIGNAL = 0.87; NT HIT: J05184.1, EVALUE 9.00e-03; EST_HUMAN HIT: AA679171.1, EVALUE 2.40e-01
ttcaactgctatgctgtctctgcccttgttgtcctcatcgtaacacaacaggatgctgaaacggaattaaaccccaaag

SEQ ID NO: 20386 - DNA, 155 bp, Homo sapiens
  MAP TO AF001549.1; EXPRESSED IN BT474, SIGNAL = 0.94; EXPRESSED IN FETAL LIVER, SIGNAL = 0.95; EXPRESSED IN ADULT LIVER, SIGNAL = 1.4; EXPRESSED IN BONE MARROW, SIGNAL = 0.96; EXPRESSED IN LUNG, SIGNAL = 0.99; EXPRESSED IN PLACENTA, SIGNAL = 0.97; EXPRESSED IN HEART, SIGNAL = 1.1; EXPRESSED IN HBL100, SIGNAL = 0.93; NT HIT: U83867.1, EVALUE 1.40e+00; SWISSPROT HIT: Q9Z183, EVALUE 1.30e+00
cacatggagatgtgccacagggactcagagactggaaggaattccccagggccagagttctcctgggaaactacagcctccaccattgcctcccagatttcatcagcatctctgtagtctggctcatcagaggccacaacggagataaaggcaaa

SEQ ID NO: 20387 - DNA, 342 bp, Homo sapiens; identical to SEQ ID NO: 18767
  MAP TO AL109613.11; EXPRESSED IN BT474, SIGNAL = 4.1; EXPRESSED IN BRAIN, SIGNAL = 3.4; EXPRESSED IN HBL100, SIGNAL = 4.2; EXPRESSED IN HELA, SIGNAL = 3.6; EXPRESSED IN PLACENTA, SIGNAL = 5.2; EXPRESSED IN FETAL LIVER, SIGNAL = 2.6; EXPRESSED IN LUNG, SIGNAL = 4.1; EXPRESSED IN BONE MARROW, SIGNAL =   4; EXPRESSED IN HEART, SIGNAL = 3.3; EXPRESSED IN ADULT LIVER, SIGNAL = 3.7; SWISSPROT HIT: P11279, EVALUE 1.70e+00; NT HIT: gi11426951, EVALUE 0.00e+00; EST_HUMAN HIT: Z42399.1, EVALUE 0.00e+00

SEQ ID NO: 20388 - DNA, 134 bp, Homo sapiens
  MAP TO AC007126.5; EXPRESSED IN BONE MARROW, SIGNAL = 1.3; EXPRESSED IN HBL100, SIGNAL = 1.3; EXPRESSED IN HEART, SIGNAL = 1.5; EXPRESSED IN BT474, SIGNAL = 1.5; EXPRESSED IN ADULT LIVER, SIGNAL = 1.6; EXPRESSED IN LUNG, SIGNAL = 1.7; EXPRESSED IN BRAIN, SIGNAL = 1.5; EXPRESSED IN PLACENTA, SIGNAL = 1.6; EXPRESSED IN HELA, SIGNAL = 1.4; EXPRESSED IN FETAL LIVER, SIGNAL = 1.4; EST_HUMAN HIT: AW857140.1, EVALUE 1.00e-19; NT HIT: AL163252.2, EVALUE 2.00e-14; SWISSPROT HIT: P03388, EVALUE 5.90e-01
ctggatgtccaggcagaattttgctgcaagggcagggatctcatcaagaaactctactagggcagtggggaagggaaatgtggggttggagcccctacacagagtctccactgtggcagtgcctagcagagctg

SEQ ID NO: 20389 - DNA, 133 bp, Homo sapiens
  MAP TO AF001905.1; EXPRESSED IN PLACENTA, SIGNAL = 2.5; EXPRESSED IN FETAL LIVER, SIGNAL = 1.2; EXPRESSED IN HEART, SIGNAL = 1.5; EXPRESSED IN HELA, SIGNAL = 1.4; EXPRESSED IN HBL100, SIGNAL = 1.3; EXPRESSED IN ADULT LIVER, SIGNAL = 1.9; EXPRESSED IN BT474, SIGNAL = 1.4; EXPRESSED IN BRAIN, SIGNAL = 1.3; EXPRESSED IN LUNG, SIGNAL = 1.3; EXPRESSED IN BONE MARROW, SIGNAL = 1.3; NT HIT: AL163246.2, EVALUE 2.00e-27; SWISSPROT HIT: P25362, EVALUE 3.00e+00; EST_HUMAN HIT: AA714294.1, EVALUE 4.00e-20
tcaccctaccagtcagggagccaatgggggggttctgctagctgctaagtatttctatgccaattatgcattctggcactggggaaatgaccataagaggagtctggggacccactggatccactgtaagtca

SEQ ID NO: 20390 - DNA, 175 bp, Homo sapiens
  MAP TO AC012140.1; EXPRESSED IN BONE MARROW, SIGNAL = 2.1; EXPRESSED IN FETAL LIVER, SIGNAL = 1.7; EXPRESSED IN PLACENTA, SIGNAL = 1.8; EXPRESSED IN HEART, SIGNAL = 1.8; EXPRESSED IN HELA, SIGNAL = 1.8; EXPRESSED IN HBL100, SIGNAL = 2.3; EXPRESSED IN BT474, SIGNAL = 1.8; EXPRESSED IN ADULT LIVER, SIGNAL = 1.7; EXPRESSED IN BRAIN, SIGNAL = 2.1; EXPRESSED IN LUNG, SIGNAL = 2.3; EST_HUMAN HIT: AW589833.1, EVALUE 1.00e-56; SWISSPROT HIT: Q92125, EVALUE 8.50e+00; NT HIT: AE004836.1, EVALUE 1.60e+00
agtccttgtgagtcagactcctgagtcaggaccaccaccgtcaaggttgccaccgccgcctcctgacacgcgccaccaggctccgcgctcatggcctggcctggcatctcaccaggcttttcaatggactagagtgcggggctgctctgcctgtggcaagggttgtcctgctgct

SEQ ID NO: 20391 - DNA, 243 bp, Homo sapiens
  MAP TO AC012668.1; EXPRESSED IN ADULT LIVER, SIGNAL = 1.6; EXPRESSED IN LUNG, SIGNAL = 4.1; EXPRESSED IN PLACENTA, SIGNAL =  32; EXPRESSED IN HBL100, SIGNAL =   1; EXPRESSED IN HEART, SIGNAL = 1.5; EXPRESSED IN FETAL LIVER, SIGNAL = 2.6; SWISSPROT HIT: P02751, EVALUE 1.00e-41; EST_HUMAN HIT: AU140720.1, EVALUE 0.00e+00; NT HIT: X02761.1, EVALUE 1.00e-130
tggggctctcttggttgccctttatggccacgagggatacggtgtactcagatgcaggctgcagattcctcagtgggtacttggagacagagggacccacattgtactgcctgggctgtcctcttcgggtaaggcccacggtcagtcggtatcctgttatctgggcccgaggtggagtccatctcaccaggacagtagaatcagtttcattgacaaactggaggttagtgggagcatccagtt

SEQ ID NO: 20392 - DNA, 252 bp, Homo sapiens
  MAP TO AC012678.1; EXPRESSED IN PLACENTA, SIGNAL = 8.2; EXPRESSED IN HEART, SIGNAL = 6.6; EXPRESSED IN ADULT LIVER, SIGNAL = 9.9; EXPRESSED IN LUNG, SIGNAL = 9.3; EXPRESSED IN HELA, SIGNAL = 8.8; EXPRESSED IN HBL100, SIGNAL =   8; EXPRESSED IN BT474, SIGNAL = 7.9; EXPRESSED IN FETAL LIVER, SIGNAL = 8.8; EXPRESSED IN BRAIN, SIGNAL = 7.4; EXPRESSED IN BONE MARROW, SIGNAL = 8.6; EST_HUMAN HIT: AW148608.1, EVALUE 9.00e-01; NT HIT: gi11525786, EVALUE 1.00e-121; SWISSPROT HIT: Q10283, EVALUE 5.00e-04
taatgatgatgccagcagctgcttttctttctcctctttagattgggtaagaacttgagattgatcctttttagttatagcttgatctacattctccattatactctcttgaggaacaggcagagctccactttcatcaccagttttgctttccttcttgggaagatagccttctttcccccacaatttctttataccttccagcttcaagctatttgtcctaaggaggttgataataaaatcaagtcaact

SEQ ID NO: 20393 - DNA, 204 bp, Homo sapiens
  MAP TO AL109654.16; EXPRESSED IN BT474, SIGNAL = 2.3; EXPRESSED IN FETAL LIVER, SIGNAL = 2.3; EXPRESSED IN BONE MARROW, SIGNAL = 3.1; EXPRESSED IN LUNG, SIGNAL = 3.4; EXPRESSED IN BRAIN, SIGNAL = 2.7; EXPRESSED IN HBL100, SIGNAL = 2.5; EXPRESSED IN HELA, SIGNAL = 2.6; EXPRESSED IN PLACENTA, SIGNAL = 3.4; EXPRESSED IN ADULT LIVER, SIGNAL = 3.2; EXPRESSED IN HEART, SIGNAL = 2.8; SWISSPROT HIT: P19922, EVALUE 4.80e+00; NT HIT: AF223391.1, EVALUE 6.00e-31; EST_HUMAN HIT: AW367898.1, EVALUE 4.00e-26
tacagagcctgcaatggcaagctgcctcctgcatagggtgtgtggattctctgggcttttctgatatgttcctgtagtagttcttggaacaaaagttcgtgatgtgagtctccgcatgctgctctgtctgtccaagcaggagctgcaagttagccttgcttcctatctgccatttttctctaattttcaattcattattttatt

SEQ ID NO: 20394 - DNA, 428 bp, Homo sapiens
  MAP TO AL109748.2; EXPRESSED IN PLACENTA, SIGNAL = 1.9; EXPRESSED IN HEART, SIGNAL = 2.2; EXPRESSED IN BT474, SIGNAL = 1.6; EXPRESSED IN LUNG, SIGNAL = 1.5; EXPRESSED IN BRAIN, SIGNAL = 1.9; EXPRESSED IN HELA, SIGNAL = 1.6; EXPRESSED IN HBL100, SIGNAL = 1.8; EXPRESSED IN FETAL LIVER, SIGNAL = 1.7; EXPRESSED IN BONE MARROW, SIGNAL = 1.6; NT HIT: AL163204.2, EVALUE 0.00e+00; EST_HUMAN HIT: AW131856.1, EVALUE 0.00e+00; SWISSPROT HIT: P31381, EVALUE 8.30e-01
aaaccgggtcctttcttcctcgagaaactgctgtctctgggctgcactcatccggctgagctctgagggccagggcttgttgctctccctgctgcaggcctggcgccggctgccagcctcaagccccagtagctcaggcagggcatccctgagcgggtgcaggtcccccaccaccatcctggccctctacctccgctcctccctgtgcttctgctcagccagttttatggcttcgattttctgcaaccattgctcacgcctcagcttcattttctccttgggcaaaacggtcttggcctctgcacctctcctgatggaagtgacgctccttacgtccagctccagcttttgcaccaaggcactggggtctatcttggtcctggcaaagatgttggtgttgacgaacggaggtataattcttattagtc

SEQ ID NO: 20395 - DNA, 136 bp, Homo sapiens
  MAP TO AL079338.13; EXPRESSED IN BONE MARROW, SIGNAL = 1.3; EXPRESSED IN HBL100, SIGNAL = 1.7; EXPRESSED IN PLACENTA, SIGNAL = 1.6; EXPRESSED IN HEART, SIGNAL = 1.4; EXPRESSED IN LUNG, SIGNAL = 1.5; EXPRESSED IN HELA, SIGNAL = 1.8; EXPRESSED IN ADULT LIVER, SIGNAL =   2; EXPRESSED IN BT474, SIGNAL = 1.4; EXPRESSED IN FETAL LIVER, SIGNAL = 1.6; EXPRESSED IN BRAIN, SIGNAL =   1; NT HIT: X13607.1, EVALUE 1.20e+00; EST_HUMAN HIT: BF337977.1, EVALUE 1.80e+00
agtagacagaaacagtccgatggtggagggatgatagagcacactacccgtaaggcagactgcaggagaacaatcttacagcaacagcttgagaaaggttttcaggtctttctatcttctcagcagtttgcttata

SEQ ID NO: 20396 - DNA, 157 bp, Homo sapiens
  MAP TO AC007158.5; EXPRESSED IN HBL100, SIGNAL = 5.4; EXPRESSED IN HELA, SIGNAL = 7.2; EXPRESSED IN LUNG, SIGNAL = 8.2; EXPRESSED IN BRAIN, SIGNAL = 6.2; EXPRESSED IN PLACENTA, SIGNAL =   7; EXPRESSED IN HEART, SIGNAL = 4.8; EXPRESSED IN BT474, SIGNAL = 5.2; EXPRESSED IN ADULT LIVER, SIGNAL = 5.6; EXPRESSED IN FETAL LIVER, SIGNAL = 6.2; EXPRESSED IN BONE MARROW, SIGNAL = 4.2; NT HIT: Z35861.1, EVALUE 7.70e-02; EST_HUMAN HIT: BE294532.1, EVALUE 5.30e-01; SWISSPROT HIT: O43524, EVALUE 2.20e+00
gtagccaggaacagggtgcacagtcaaggcaaccccaaaaatggcctctctcccggccgcgcctgcaaagtcgtcctgagcgtcctgaacgttcctcagctggaggggcttttccctactcagtgtctggaccattgccaagaagatctgtccagct

SEQ ID NO: 20397 - DNA, 107 bp, Homo sapiens
  MAP TO AL132719.1; EXPRESSED IN BT474, SIGNAL = 9.1; EXPRESSED IN FETAL LIVER, SIGNAL = 5.6; EXPRESSED IN BONE MARROW, SIGNAL =  14; EXPRESSED IN LUNG, SIGNAL = 5.6; EXPRESSED IN BRAIN, SIGNAL = 5.8; EXPRESSED IN HBL100, SIGNAL = 7.1; EXPRESSED IN HELA, SIGNAL = 4.5; EXPRESSED IN PLACENTA, SIGNAL = 5.9; EXPRESSED IN ADULT LIVER, SIGNAL = 6.1; EXPRESSED IN HEART, SIGNAL = 5.5; SWISSPROT HIT: Q22943, EVALUE 4.00e+00; NT HIT: D50561.1, EVALUE 9.10e-01; EST_HUMAN HIT: AI032927.1, EVALUE 2.40e-01
ggtgtctcagtgtttctgcgatgaggactcaagtgccccagggtggtttctgtggcagcatggaacccctgggtgccctgaaccatctttgcctgatttttcttcat

SEQ ID NO: 20398 - DNA, 343 bp, Homo sapiens
  MAP TO AL121752.2; EXPRESSED IN BONE MARROW, SIGNAL = 2.9; EXPRESSED IN HELA, SIGNAL = 1.6; EXPRESSED IN PLACENTA, SIGNAL = 2.4; EXPRESSED IN HEART, SIGNAL = 1.8; EXPRESSED IN ADULT LIVER, SIGNAL = 2.1; EXPRESSED IN LUNG, SIGNAL = 2.1; EXPRESSED IN BRAIN, SIGNAL = 1.5; EXPRESSED IN HBL100, SIGNAL = 1.9; EXPRESSED IN BT474, SIGNAL = 2.2; EXPRESSED IN FETAL LIVER, SIGNAL = 1.4; EST_HUMAN HIT: AU119732.1, EVALUE 3.00e-35; NT HIT: gi5729928, EVALUE 0.00e+00; SWISSPROT HIT: P51512, EVALUE 3.00e-48
cattcacaactataccccaaaagtgggtgagctagacacgcggaaagctattcgccaggctttcgatgtgtggcagaaggtgaccccactgacctttgaagaggtgccataccatgagatcaaaagtgaccggaaggaggcagacatcatgatcttttttgcttctggtttccatggcgacagctccccatttgatggagaagggggattcctggcccatgcctacttccctggcccagggattggaggagacacccactttgactccgatgagccatggacgctaggaaatgccaaccatgacggtaaggccatgaggggacaggggtcagtcttgggctgc

SEQ ID NO: 20399 - DNA, 212 bp, Homo sapiens
  MAP TO AL035451.5; EXPRESSED IN BRAIN, SIGNAL = 5.6; EXPRESSED IN BONE MARROW, SIGNAL = 5.3; EXPRESSED IN HBL100, SIGNAL = 5.9; EXPRESSED IN PLACENTA, SIGNAL =   7; EXPRESSED IN LUNG, SIGNAL = 5.5; EXPRESSED IN HEART, SIGNAL =   5; EXPRESSED IN HELA, SIGNAL = 5.1; EXPRESSED IN ADULT LIVER, SIGNAL = 7.7; EXPRESSED IN BT474, SIGNAL =   6; EXPRESSED IN FETAL LIVER, SIGNAL = 6.1; EST_HUMAN HIT: BE541109.1, EVALUE 4.00e-92; NT HIT: gi5803180, EVALUE 2.00e-92; SWISSPROT HIT: P31948, EVALUE 2.00e-30
agtgcctggggggtccttctgcatctgctccaggataaggtgcatggctatgtcactcatgatctgctgcacctcggggtcggccatggctcgtcgcttcacatcttcggggctgtggtgccggttgtactgcgccatcatacagcgctggtagccgtctgccgcctccttacagctggagtccgggtctagcgccttccggtacacatcca

SEQ ID NO: 20400 - DNA, 297 bp, Homo sapiens
  MAP TO AL078582.7; EXPRESSED IN BT474, SIGNAL = 1.1; EXPRESSED IN BRAIN, SIGNAL = 1.8; EXPRESSED IN BONE MARROW, SIGNAL = 1.4; EXPRESSED IN HBL100, SIGNAL = 1.1; EXPRESSED IN HEART, SIGNAL = 1.3; EXPRESSED IN PLACENTA, SIGNAL = 1.1; EXPRESSED IN FETAL LIVER, SIGNAL = 1.2; EXPRESSED IN LUNG, SIGNAL = 1.7; EXPRESSED IN HELA, SIGNAL = 1.5; EXPRESSED IN ADULT LIVER, SIGNAL = 1.8; SWISSPROT HIT: P29122, EVALUE 4.60e-01; NT HIT: AB018339.1, EVALUE 0.00e+00; EST_HUMAN HIT: AW961883.1, EVALUE 0.00e+00
gtcatcctgaccttcttcatcctcagagggcagagctctggacattgcagactccaggtcccgactgaggtcatagtcgtgatcccactccagggggatggagtccacactagccggggtgtctcgtcctgaccgctcgctccggaggggctgagcgagcgagagggagagattggaggaaggctgtggagaaagcaggctgtctgcagagcggtcgtgccagtgcaggtccgacagagctgcagagtcttccagctccagctccctgtctgagaggtcgtgctcatcgtctgggag

SEQ ID NO: 20401 - DNA, 115 bp, Homo sapiens
  MAP TO AL078594.14; EXPRESSED IN PLACENTA, SIGNAL =  22; EXPRESSED IN ADULT LIVER, SIGNAL =  26; EXPRESSED IN LUNG, SIGNAL =  24; EXPRESSED IN BRAIN, SIGNAL =  16; EXPRESSED IN BONE MARROW, SIGNAL =  18; EXPRESSED IN HEART, SIGNAL =  15; EXPRESSED IN HELA, SIGNAL =  22; EXPRESSED IN HBL100, SIGNAL =  20; EXPRESSED IN BT474, SIGNAL =  18; EXPRESSED IN FETAL LIVER, SIGNAL =  22; NT HIT: AF125348.1, EVALUE 2.00e-07; EST_HUMAN HIT: AU117855.1, EVALUE 2.00e-03; SWISSPROT HIT: P23996, EVALUE 3.10e+00
acatgtattttctcactttctggaagctagatgttcaaaatcaaggtgtcagcagggccgtgttcccgctgaaactggtagaagaatccttccttttctcttcctaacttctgtt

SEQ ID NO: 20402 - DNA, 286 bp, Homo sapiens
  MAP TO AL121755.4; EXPRESSED IN PLACENTA, SIGNAL = 1.3; EXPRESSED IN ADULT LIVER, SIGNAL = 1.2; EXPRESSED IN HEART, SIGNAL = 1.3; EXPRESSED IN BT474, SIGNAL = 2.1; EXPRESSED IN FETAL LIVER, SIGNAL = 0.97; EXPRESSED IN BONE MARROW, SIGNAL = 2.2; EXPRESSED IN LUNG, SIGNAL = 1.3; EXPRESSED IN BRAIN, SIGNAL = 1.7; EXPRESSED IN HBL100, SIGNAL = 1.4; EXPRESSED IN HELA, SIGNAL = 1.2; NT HIT: AF026276.1, EVALUE 2.70e+00; EST_HUMAN HIT: BE143699.1, EVALUE 7.10e-01; SWISSPROT HIT: P48755, EVALUE 5.50e-01
accagatggaactacccgggatgcggggagaggagacctgagatctgtaagttgggaaaccctccgtggctgcccagctgtcaggaaggacagcataggatggatcagactgtccagaactctcaagaagaatgtgcacctttgccctttgcccaggggccagggcctctttgtctgcccagtcacatcctccagcccccaacacatcagctcccacaggggcttctggaacatttccaaggatgctcccatgagctggccaggctcctacagctgtcacaacgtt

SEQ ID NO: 20403 - DNA, 162 bp, Homo sapiens
  MAP TO AC011308.2; EXPRESSED IN BONE MARROW, SIGNAL = 1.1; EXPRESSED IN HBL100, SIGNAL = 0.93; EXPRESSED IN HEART, SIGNAL =   1; EXPRESSED IN PLACENTA, SIGNAL =   1; EXPRESSED IN ADULT LIVER, SIGNAL = 1.1; EXPRESSED IN BT474, SIGNAL = 1.1; EXPRESSED IN BRAIN, SIGNAL = 1.1; EST_HUMAN HIT: BE069189.1, EVALUE 6.00e-06; SWISSPROT HIT: Q02487, EVALUE 4.40e-01; NT HIT: AB016625.1, EVALUE 1.50e+00
cctcttgcccatgctttcctcccactccgtctgcctcctgactgccctggtgcttccccttgaggacctgcatggagttctgtgccccattctcttgagaactgtgaataacaactgttttttcaatgacaattgtctcctgatctgttagtgtcagcatac

SEQ ID NO: 20404 - DNA, 175 bp, Homo sapiens
  MAP TO AL035467.21; EXPRESSED IN BONE MARROW, SIGNAL = 3.8; EXPRESSED IN PLACENTA, SIGNAL = 4.2; EXPRESSED IN BRAIN, SIGNAL = 3.7; EXPRESSED IN LUNG, SIGNAL = 3.9; EXPRESSED IN HEART, SIGNAL =   3; EXPRESSED IN HELA, SIGNAL =   5; EXPRESSED IN HBL100, SIGNAL = 4.6; EXPRESSED IN ADULT LIVER, SIGNAL = 4.7; EXPRESSED IN BT474, SIGNAL = 4.2; EXPRESSED IN FETAL LIVER, SIGNAL = 3.9; NT HIT: U82695.2, EVALUE 8.70e-02; SWISSPROT HIT: O00214, EVALUE 9.80e-01
caaattcactgcgtgggaggggagggttgctggaaagagctactggctgctgagtgctactgactactgtagactgcagaaactggacattggtgatgctgtgagtaccataagcacccagtgctggaacctgctgagtgagtaccctggaaccagaaagcaaaattcttttcct

SEQ ID NO: 20405 - DNA, 200 bp, Homo sapiens
  MAP TO AL078623.24; EXPRESSED IN BT474, SIGNAL =   2; EXPRESSED IN FETAL LIVER, SIGNAL = 2.2; EXPRESSED IN BRAIN, SIGNAL =   2; EXPRESSED IN BONE MARROW, SIGNAL = 2.3; EXPRESSED IN HBL100, SIGNAL = 2.7; EXPRESSED IN PLACENTA, SIGNAL = 1.9; EXPRESSED IN LUNG, SIGNAL = 2.2; EXPRESSED IN HEART, SIGNAL = 1.6; EXPRESSED IN HELA, SIGNAL = 2.2; EXPRESSED IN ADULT LIVER, SIGNAL = 2.5; NT HIT: AJ006216.1, EVALUE 4.70e-01; SWISSPROT HIT: P33467, EVALUE 2.10e+00
gtcttgtcaatgccatgcattaattggctattgccataataatgctgtataatcaaccatctcaaaactgggtgtcttacaacaactagcatttcccaagtctgcaggtctgtatctggggtggctttggctgggctcagcaggcagttctgctttaagctaaacatcaggtagacttgacatggcttgggtttgagcat

SEQ ID NO: 20406 - DNA, 153 bp, Homo sapiens
  MAP TO AL035554.1; EXPRESSED IN ADULT LIVER, SIGNAL = 1.3; EXPRESSED IN BT474, SIGNAL = 1.8; EXPRESSED IN BRAIN, SIGNAL = 2.2; EXPRESSED IN BONE MARROW, SIGNAL = 1.2; EXPRESSED IN HBL100, SIGNAL = 1.6; EXPRESSED IN HEART, SIGNAL = 1.1; EXPRESSED IN PLACENTA, SIGNAL = 1.5; EXPRESSED IN FETAL LIVER, SIGNAL = 1.4; EXPRESSED IN LUNG, SIGNAL = 1.4; EXPRESSED IN HELA, SIGNAL = 1.9; NT HIT: AJ001309.1, EVALUE 3.00e-38; EST_HUMAN HIT: AU130510.1, EVALUE 5.00e-38; SWISSPROT HIT: P54102, EVALUE 1.00e-03
ctttacataaagtttgatgtgaagtgtcctgaaaacaactggaacaacccagacaaacgttctcaactagaagatccgctgccatctagatcagaagtttcaaacacaattggagaaaaagtggcggtagagcttcaggaatgtgataacact

SEQ ID NO: 20407 - DNA, 147 bp, Homo sapiens
  MAP TO AL078634.20; EXPRESSED IN PLACENTA, SIGNAL =  51; EXPRESSED IN HELA, SIGNAL =  43; EXPRESSED IN ADULT LIVER, SIGNAL =  87; EXPRESSED IN BT474, SIGNAL =  81; EXPRESSED IN LUNG, SIGNAL =  41; EXPRESSED IN BRAIN, SIGNAL =  62; EXPRESSED IN BONE MARROW, SIGNAL =  26; EXPRESSED IN HEART, SIGNAL = 1.2e+02; EXPRESSED IN HBL100, SIGNAL =  31; EXPRESSED IN FETAL LIVER, SIGNAL =  60; SWISSPROT HIT: Q57661, EVALUE 8.70e+00; NT HIT: AF072706.1, EVALUE 3.30e-01; EST_HUMAN HIT: AW853964.1, EVALUE 3.00e-57
ctcaataaccttcccgtgaccagggtgagatacaatctgtgtcttcacatcaaactttctgaaaggatattctcatgggtcaccttcaacagctcaccgccctgtgactccatgtccatctgtttggcttccgacctgctcctcacc

SEQ ID NO: 20408 - DNA, 121 bp, Homo sapiens
  MAP TO AL109741.3; EXPRESSED IN HBL100, SIGNAL = 8.1; EXPRESSED IN BT474, SIGNAL =  15; EXPRESSED IN FETAL LIVER, SIGNAL = 5.7; EXPRESSED IN ADULT LIVER, SIGNAL = 2.2; EXPRESSED IN BRAIN, SIGNAL = 5.4; EXPRESSED IN BONE MARROW, SIGNAL = 3.5; EXPRESSED IN LUNG, SIGNAL = 8.8; EXPRESSED IN PLACENTA, SIGNAL = 4.2; EXPRESSED IN HELA, SIGNAL =  15; EXPRESSED IN HEART, SIGNAL = 1.9; NT HIT: X52858.1, EVALUE 3.00e-62; EST_HUMAN HIT: BE786450.1, EVALUE 2.00e-06; SWISSPROT HIT: P04374, EVALUE 5.00e-07
catggtcaattccactgtgttctttgacatcgccatcaacagccagtccttgggcctcatctttttcaagctgtttgcagacaaatttccaaaaacaacgaaaactttcatgctctgagca

SEQ ID NO: 20409 - DNA, 165 bp, Homo sapiens
  MAP TO AC007114.7; EXPRESSED IN BONE MARROW, SIGNAL =   4; EXPRESSED IN HBL100, SIGNAL = 3.7; EXPRESSED IN HELA, SIGNAL = 4.2; EXPRESSED IN BRAIN, SIGNAL =   4; EXPRESSED IN LUNG, SIGNAL = 4.6; EXPRESSED IN PLACENTA, SIGNAL = 5.3; EXPRESSED IN HEART, SIGNAL = 4.2; EXPRESSED IN BT474, SIGNAL = 3.6; EXPRESSED IN ADULT LIVER, SIGNAL = 6.5; EXPRESSED IN FETAL LIVER, SIGNAL = 4.9; SWISSPROT HIT: P80198, EVALUE 3.90e+00; NT HIT: AF147449.2, EVALUE 5.00e-03; EST_HUMAN HIT: BE968044.1, EVALUE 8.80e+00
ggtttgtgttaacggcggcaggaaggcgccgccacccaggacatcccccaggagaggaagatcccgaaacgcccagggctcccatgccgttccgagtcgccacagcaccgcctaccacgatcagcacctttcttctcctatccctccctggaagggaaacaggaa

SEQ ID NO: 20410 - DNA, 204 bp, Homo sapiens
  MAP TO AL110502.1; EXPRESSED IN HELA, SIGNAL = 0.93; EXPRESSED IN HEART, SIGNAL = 1.2; EXPRESSED IN BT474, SIGNAL = 1.1; SWISSPROT HIT: Q01441, EVALUE 2.20e+00; EST_HUMAN HIT: BE256221.1, EVALUE 1.00e-111; NT HIT: gi6912641, EVALUE 1.00e-111
tgaagctagaagctgtggacaggaagaaccctcatttcatttgcccagccactattggggaggttcggggctcagaggtgcttgtcacttttgatgggtggcgaggggcctttgactactggtgccgcttcgactcccgagacatcttccctgtgggctggtgttccttgactggagacaacctgcagcctcctggcaccaaag

SEQ ID NO: 20411 - DNA, 110 bp, Homo sapiens
  MAP TO AP000014.2; EXPRESSED IN ADULT LIVER, SIGNAL = 0.98; EXPRESSED IN HEART, SIGNAL = 1.8; EXPRESSED IN BT474, SIGNAL = 1.6; EXPRESSED IN FETAL LIVER, SIGNAL = 1.1; EXPRESSED IN BONE MARROW, SIGNAL = 2.4; EXPRESSED IN BRAIN, SIGNAL = 1.5; EXPRESSED IN HBL100, SIGNAL = 1.2; EST_HUMAN HIT: BE150900.1, EVALUE 5.50e+00; NT HIT: U82701.1, EVALUE 9.40e-01
gcaaggacattggtgctgatgctggcggcagttgtggtggtgctgggctgggtgtgggttgatggtctcaagtgtgggatggggaaggggtgtgggatggtgggggtgga

SEQ ID NO: 20412 - DNA, 94 bp, Homo sapiens
  MAP TO AL035692.10; EXPRESSED IN BT474, SIGNAL = 9.1; EXPRESSED IN FETAL LIVER, SIGNAL = 6.8; EXPRESSED IN BRAIN, SIGNAL = 9.6; EXPRESSED IN BONE MARROW, SIGNAL = 8.2; EXPRESSED IN HBL100, SIGNAL = 8.8; EXPRESSED IN PLACENTA, SIGNAL = 8.1; EXPRESSED IN LUNG, SIGNAL = 7.6; EXPRESSED IN HEART, SIGNAL = 5.8; EXPRESSED IN HELA, SIGNAL = 8.9; EXPRESSED IN ADULT LIVER, SIGNAL = 5.5; EST_HUMAN HIT: BE738088.1, EVALUE 1.90e-02
ttaaggacttgaaagatgtccttttttccttccacctcatcctccactactataaatagagaatgtgctgtcctagttttctgcttgagtagtc

SEQ ID NO: 20413 - DNA, 456 bp, Homo sapiens
  MAP TO AL096776.12; EXPRESSED IN ADULT LIVER, SIGNAL = 5.1; EXPRESSED IN BRAIN, SIGNAL = 4.4; EXPRESSED IN BONE MARROW, SIGNAL = 4.6; EXPRESSED IN PLACENTA, SIGNAL = 5.4; EXPRESSED IN HELA, SIGNAL =   5; EXPRESSED IN HBL100, SIGNAL = 4.5; EXPRESSED IN BT474, SIGNAL = 4.6; EXPRESSED IN FETAL LIVER, SIGNAL = 4.7; EXPRESSED IN LUNG, SIGNAL = 5.8; EXPRESSED IN HEART, SIGNAL = 3.5; NT HIT: AB051826.1, EVALUE 0.00e+00; EST_HUMAN HIT: AW298134.1, EVALUE 0.00e+00; SWISSPROT HIT: P25763, EVALUE 7.00e-39
gatgaatttgacaagctgaggcctctctgctacaccaacacagacatcttcctgctctgcttcagtgtcgtgagcccctcatccttccagaacgtcagtgagaaatgggtgccggagattcgatgccactgtcccaaagcccccatcatcctagttggaacgcagtcggatctcagagaagatgtcaaagtcctcattgagttggacaaatgcaaagaaaagccagtgcctgaagaggcggctaagctgtgcgccgaggaaatcaaagccgcctcctacatcgagtgttcagccttgactcaaaaaaacctcaaagaggtctttgatgcagccatcgtcgctggcattcaatactcggacactcagcaacagccaaagaagtctaaaagcaggactccagataaaatgaaaaacctctccaagtcctggtggaagaagtactgctgtttcgtatga

SEQ ID NO: 20414 - DNA, 141 bp, Homo sapiens
  MAP TO AP000051.1; EXPRESSED IN PLACENTA, SIGNAL = 0.86; EXPRESSED IN BT474, SIGNAL = 0.64; EXPRESSED IN BONE MARROW, SIGNAL = 0.79; EXPRESSED IN HBL100, SIGNAL = 0.7; EXPRESSED IN LUNG, SIGNAL =   1; EXPRESSED IN HEART, SIGNAL = 0.81; EXPRESSED IN FETAL LIVER, SIGNAL = 0.8; EXPRESSED IN HELA, SIGNAL = 0.99; EXPRESSED IN ADULT LIVER, SIGNAL = 0.84; EXPRESSED IN BRAIN, SIGNAL = 0.89; SWISSPROT HIT: P34641, EVALUE 2.00e-01; EST_HUMAN HIT: H16771.1, EVALUE 1.90e+00; NT HIT: D83390.1, EVALUE 2.70e-01
aaagtgaactgctggtgcactattgcaatgaggacatgcacagagatcccaaccagagctcaagagtaataatgctgtggtaccttttggaaaatgctgttgtcaggcagccccggtgcggtgggaaccatgagttggttt

SEQ ID NO: 20415 - DNA, 88 bp, Homo sapiens
  MAP TO AL049539.19; EXPRESSED IN BT474, SIGNAL = 2.3; EXPRESSED IN FETAL LIVER, SIGNAL = 2.9; EXPRESSED IN BONE MARROW, SIGNAL = 2.4; EXPRESSED IN LUNG, SIGNAL = 2.5; EXPRESSED IN BRAIN, SIGNAL = 2.6; EXPRESSED IN PLACENTA, SIGNAL = 3.3; EXPRESSED IN HBL100, SIGNAL = 2.3; EXPRESSED IN HELA, SIGNAL = 2.2; EXPRESSED IN HEART, SIGNAL = 2.2; EXPRESSED IN ADULT LIVER, SIGNAL = 2.4; EST_HUMAN HIT: AV659818.1, EVALUE 3.00e-38; NT HIT: gi11420944, EVALUE 1.00e-42; SWISSPROT HIT: Q28269, EVALUE 7.10e+00
gaggtaccgctctccaaggtgtgctagcagtgggccctgcccaacttcaggcagaacagggaggcccagagattacagatcccctcct

SEQ ID NO: 20416 - DNA, 223 bp, Homo sapiens
  MAP TO AL109755.14; EXPRESSED IN PLACENTA, SIGNAL = 1.3; EXPRESSED IN HELA, SIGNAL = 1.9; EXPRESSED IN FETAL LIVER, SIGNAL = 1.6; EXPRESSED IN ADULT LIVER, SIGNAL = 1.8; EXPRESSED IN BT474, SIGNAL = 1.3; EXPRESSED IN BRAIN, SIGNAL = 1.5; EXPRESSED IN HEART, SIGNAL = 1.2; EXPRESSED IN HBL100, SIGNAL = 1.4; EXPRESSED IN LUNG, SIGNAL = 1.3; EXPRESSED IN BONE MARROW, SIGNAL = 1.2; SWISSPROT HIT: P48748, EVALUE 9.30e-01; EST_HUMAN HIT: AA481361.1, EVALUE 7.90e-01; NT HIT: X52708.1, EVALUE 1.10e-01
actggttctttttacatgagatgaacccaagaccaaatcggattaccctagacacaaatttgatgggcagttttaaagtaacgtgcagtaacttttcaagctcgatgtagaaatatccagaacttatagtaaactgtgtacatgcatggttatgtgagaaaagtgaagctgctgcacctgttcccaagctcactccacttcctccagaagcatgcctgtctgc

SEQ ID NO: 20417 - DNA, 219 bp, Homo sapiens
  MAP TO AL109614.15; EXPRESSED IN PLACENTA, SIGNAL = 5.2; EXPRESSED IN HELA, SIGNAL =  17; EXPRESSED IN HEART, SIGNAL = 3.2; EXPRESSED IN HBL100, SIGNAL =  13; EXPRESSED IN BT474, SIGNAL =  13; EXPRESSED IN FETAL LIVER, SIGNAL = 6.1; EXPRESSED IN ADULT LIVER, SIGNAL = 3.6; EXPRESSED IN BRAIN, SIGNAL = 6.2; EXPRESSED IN BONE MARROW, SIGNAL = 4.1; EXPRESSED IN LUNG, SIGNAL = 8.4; NT HIT: X52851.1, EVALUE 2.00e-87; SWISSPROT HIT: Q28462, EVALUE 6.70e+00; EST_HUMAN HIT: BE796110.1, EVALUE 2.00e-84
tttttatttcataatcataaactctgcaatccacctgggcatggaagggaacaaggaaaacatgaaacccaaagggaactgcagcgagagcacaaagattctaggatactgggagcaaatggggtggaagggtgctctcctgagctacagaaggaatggtctggtggtgaagataaaacacaagtcaaacttattggagttgtctacagtcagcaatgg

SEQ ID NO: 20418 - DNA, 158 bp, Homo sapiens
  MAP TO AC007198.6; EXPRESSED IN BT474, SIGNAL = 7.1; EXPRESSED IN ADULT LIVER, SIGNAL =  10; EXPRESSED IN PLACENTA, SIGNAL = 9.2; EXPRESSED IN HBL100, SIGNAL = 8.4; EXPRESSED IN HELA, SIGNAL = 7.6; EXPRESSED IN FETAL LIVER, SIGNAL = 8.7; EXPRESSED IN BRAIN, SIGNAL = 6.7; EXPRESSED IN LUNG, SIGNAL = 9.7; EXPRESSED IN BONE MARROW, SIGNAL = 8.5; EXPRESSED IN HEART, SIGNAL = 7.3; NT HIT: U75902.1, EVALUE 1.20e+00; EST_HUMAN HIT: AA223949.1, EVALUE 2.10e+00; SWISSPROT HIT: P35448, EVALUE 2.90e+00
ctggtagtgcagagagagaaactatgttgtagaaaagttgaccatctaggttctctggggtccacaggtctgcttctagttcccctggtctggacacagttccttgtccctggggtgaatctaatctctttggaggtcaaggcaatacgtctggaaat

SEQ ID NO: 20419 - DNA, 134 bp, Homo sapiens
  MAP TO AF178220.1; EXPRESSED IN HEART, SIGNAL = 0.9; NT HIT: AB017446.1, EVALUE 2.60e-01; EST_HUMAN HIT: AI491853.1, EVALUE 3.00e-01; SWISSPROT HIT: P31352, EVALUE 6.80e+00
tcactgctgggcagaataagacagtggaaattcccctggatcaggggagccaaaataagccatctctaaataatcccacccaagagcattccacgggaattgagggtctccagcagaaagatgctgtgtgtggt

SEQ ID NO: 20420 - DNA, 165 bp, Homo sapiens
  MAP TO AC007321.1; EXPRESSED IN LUNG, SIGNAL = 1.6; EXPRESSED IN HBL100, SIGNAL = 1.4; EXPRESSED IN HEART, SIGNAL = 2.6; EXPRESSED IN BONE MARROW, SIGNAL = 1.3; EXPRESSED IN PLACENTA, SIGNAL = 1.2; EXPRESSED IN HELA, SIGNAL = 1.6; EXPRESSED IN BT474, SIGNAL = 1.4; EXPRESSED IN ADULT LIVER, SIGNAL = 1.4; EXPRESSED IN FETAL LIVER, SIGNAL = 1.6; EXPRESSED IN BRAIN, SIGNAL = 1.3; NT HIT: gi11420122, EVALUE 6.00e-74; EST_HUMAN HIT: BE048846.1, EVALUE 6.00e-74; SWISSPROT HIT: P11553, EVALUE 3.80e+00
aacacactaaatataacaaacaataactattactctgtcgaagttgaaaacatcactgcccaagttcaattttcaaaaacagttattggaaaggcacgcttaaacaacataaccattattggtccacttgatatgaaacaagtaagaatcaatcatgaaatactt

SEQ ID NO: 20421 - DNA, 76 bp, Homo sapiens
  MAP TO AC008109.1; EXPRESSED IN PLACENTA, SIGNAL = 0.94; EXPRESSED IN BT474, SIGNAL = 1.2; EXPRESSED IN HBL100, SIGNAL = 1.3; EXPRESSED IN HELA, SIGNAL = 1.8; EXPRESSED IN LUNG, SIGNAL = 0.62; EXPRESSED IN FETAL LIVER, SIGNAL = 1.3; EXPRESSED IN ADULT LIVER, SIGNAL = 1.4; EXPRESSED IN BRAIN, SIGNAL = 0.92; EXPRESSED IN HEART, SIGNAL = 1.1; NT HIT: AL163203.2, EVALUE 3.20e-02; SWISSPROT HIT: O91744, EVALUE 7.20e+00; EST_HUMAN HIT: H19991.1, EVALUE 3.90e-02
caaagtgttggggagcccctttgcccttgcgaccctgggcaatgctgtcagtggagatttgggagacaatctctgt

SEQ ID NO: 20422 - DNA, 134 bp, Homo sapiens
  MAP TO AC007567.1; EXPRESSED IN PLACENTA, SIGNAL = 0.83; EXPRESSED IN HEART, SIGNAL = 0.98; EXPRESSED IN BT474, SIGNAL = 0.72; EXPRESSED IN BONE MARROW, SIGNAL = 0.69; EXPRESSED IN HBL100, SIGNAL = 0.74; EXPRESSED IN BRAIN, SIGNAL = 0.95; EST_HUMAN HIT: AI301183.1, EVALUE 1.90e-02; NT HIT: AE001601.1, EVALUE 1.20e+00; SWISSPROT HIT: Q44845, EVALUE 3.90e+00
tagtagtgtcatcagtgttgggcacatgggaggcactcaagaaatggttgttgaattaaatgccatcaatacctatgtcacagaaattcaggctttatttaaagccttatctagattcctcactagcaagaatc

SEQ ID NO: 20423 - DNA, 128 bp, Homo sapiens
  MAP TO AL118499.5; EXPRESSED IN BT474, SIGNAL = 3.7; EXPRESSED IN HELA, SIGNAL = 4.5; EXPRESSED IN FETAL LIVER, SIGNAL = 3.9; EXPRESSED IN BRAIN, SIGNAL = 3.3; EXPRESSED IN LUNG, SIGNAL = 3.5; EXPRESSED IN BONE MARROW, SIGNAL =   3; EXPRESSED IN PLACENTA, SIGNAL = 3.5; EXPRESSED IN HEART, SIGNAL =   3; EXPRESSED IN HBL100, SIGNAL = 4.1; EXPRESSED IN ADULT LIVER, SIGNAL =   6; EST_HUMAN HIT: AW855162.1, EVALUE 4.00e-23; NT HIT: AJ271735.1, EVALUE 8.00e-20
ttcagtcacatcttcaggctctgcttcgaattctagttatcttactgtttccaccacatctgcagttagttcttccactgaaatcttgaacccctcaaagacatccacgaggattggaatcaacttct

SEQ ID NO: 20424 - DNA, 166 bp, Homo sapiens
  MAP TO AL118508.9; EXPRESSED IN PLACENTA, SIGNAL = 4.5; EXPRESSED IN FETAL LIVER, SIGNAL = 4.6; EXPRESSED IN ADULT LIVER, SIGNAL =   5; EXPRESSED IN BT474, SIGNAL = 4.2; EXPRESSED IN HEART, SIGNAL = 3.5; EXPRESSED IN HELA, SIGNAL = 5.1; EXPRESSED IN HBL100, SIGNAL = 4.6; EXPRESSED IN BRAIN, SIGNAL = 4.5; EXPRESSED IN LUNG, SIGNAL = 4.9; EXPRESSED IN BONE MARROW, SIGNAL = 4.3; SWISSPROT HIT: P17278, EVALUE 6.70e-02; NT HIT: L41624.1, EVALUE 6.00e+00
tcttggcacaaagcttgtccccacccctcccagggcctgcagctctggccccactgaacacctcagctttgcggggctgggcaatgagcactggcctttggttcatgagatccaggtggatgctggtggccctttggacgggtgtgacttccctgcagcgaacagg

SEQ ID NO: 20425 - DNA, 146 bp, Homo sapiens
  MAP TO AL109837.15; EXPRESSED IN BONE MARROW, SIGNAL = 1.5; EXPRESSED IN FETAL LIVER, SIGNAL = 1.4; EXPRESSED IN ADULT LIVER, SIGNAL = 1.8; EXPRESSED IN BT474, SIGNAL = 1.5; EXPRESSED IN LUNG, SIGNAL = 1.4; EXPRESSED IN PLACENTA, SIGNAL = 1.2; EXPRESSED IN HEART, SIGNAL = 1.2; EXPRESSED IN HELA, SIGNAL = 1.5; EXPRESSED IN HBL100, SIGNAL = 1.3; EXPRESSED IN BRAIN, SIGNAL =   1; NT HIT: AY005305.1, EVALUE 1.30e+00; EST_HUMAN HIT: AW839334.1, EVALUE 1.30e+00; SWISSPROT HIT: Q48727, EVALUE 3.00e+00
ctttgcctgaggactttctttggctaccagagcccactttgtccatgcatgtgatgggaagtactgggaaaaaaattcccttcatgatcaactcgcaaccagtaatatctgggattggtaggataaatattccagctcccttaccc

SEQ ID NO: 20426 - DNA, 123 bp, Homo sapiens
  MAP TO AC008085.1; EXPRESSED IN HELA, SIGNAL =   1; EXPRESSED IN FETAL LIVER, SIGNAL = 0.82; EXPRESSED IN LUNG, SIGNAL = 0.81; EXPRESSED IN HEART, SIGNAL =   1; EXPRESSED IN BT474, SIGNAL = 0.92; EXPRESSED IN ADULT LIVER, SIGNAL = 0.98; EXPRESSED IN BRAIN, SIGNAL =   1; EXPRESSED IN PLACENTA, SIGNAL = 1.1; EXPRESSED IN BONE MARROW, SIGNAL = 0.68; EXPRESSED IN HBL100, SIGNAL = 0.87; EST_HUMAN HIT: BF239818.1, EVALUE 1.00e-01; NT HIT: Z74263.1, EVALUE 9.20e-01; SWISSPROT HIT: Q43876, EVALUE 1.80e+00
catccaacaaggcaggtactatgttatcaccatggagaaaatggtgcctacagagttacatgaattcatccaaggctattcagagaataagtggcaggagattagctaagtccaatggcaggt

SEQ ID NO: 20427 - DNA, 115 bp, Homo sapiens
  MAP TO AC007557.1; EXPRESSED IN BT474, SIGNAL = 0.77; EXPRESSED IN FETAL LIVER, SIGNAL = 0.57; EXPRESSED IN BONE MARROW, SIGNAL = 0.7; EXPRESSED IN LUNG, SIGNAL = 0.61; EXPRESSED IN ADULT LIVER, SIGNAL = 0.66; EXPRESSED IN HEART, SIGNAL = 0.84; EXPRESSED IN PLACENTA, SIGNAL = 0.66; SWISSPROT HIT: P09430, EVALUE 9.00e-06; NT HIT: gi11430421, EVALUE 1.00e-58; EST_HUMAN HIT: AW002616.1, EVALUE 2.00e-58
tcaggttgcccttacggtattttcttttgctgccacctctcttgactcccttgtgaggagatcggctcttgctcctcctcatgccatgactctttaatttgcggctggtcgacat

SEQ ID NO: 20428 - DNA, 324 bp, Homo sapiens
  MAP TO AC007993.8; EXPRESSED IN HEART, SIGNAL = 0.98; EXPRESSED IN HBL100, SIGNAL = 1.2; EXPRESSED IN BT474, SIGNAL = 1.5; EXPRESSED IN FETAL LIVER, SIGNAL = 1.2; EXPRESSED IN ADULT LIVER, SIGNAL = 1.5; EXPRESSED IN BRAIN, SIGNAL = 0.99; EXPRESSED IN BONE MARROW, SIGNAL = 1.6; EXPRESSED IN LUNG, SIGNAL = 1.8; EXPRESSED IN PLACENTA, SIGNAL = 1.1; EXPRESSED IN HELA, SIGNAL = 1.2; EST_HUMAN HIT: AI000692.1, EVALUE 3.00e-65; SWISSPROT HIT: Q92793, EVALUE 8.00e+00; NT HIT: gi11426006, EVALUE 6.00e-20
agttccctcaggaggtagaaccatctctaactcagcaggagattccagctcagattccagagccccctatggaggcagaaccttctccaacccagcaagaggccacagttcagactccagagccccctaaggaggtagaaccttcaagccagcagatggtcccatctcagcctccagagccacctaaggaggttgcagctcaacctccagctcattatgaggtgacagttccaacacaaggtcaggatcaagctcagcattcaatattgcccagtatcacagttcaacctttggacctgggacttaccatcactccagaatcca

SEQ ID NO: 20429 - DNA, 78 bp, Homo sapiens
  MAP TO AC007160.3; EXPRESSED IN BT474, SIGNAL = 1.4; EXPRESSED IN HBL100, SIGNAL = 0.81; EXPRESSED IN FETAL LIVER, SIGNAL = 1.2; EXPRESSED IN HELA, SIGNAL = 0.81; EXPRESSED IN PLACENTA, SIGNAL = 0.85; EXPRESSED IN HEART, SIGNAL = 1.2; EXPRESSED IN ADULT LIVER, SIGNAL = 0.78; EXPRESSED IN LUNG, SIGNAL = 0.75; EXPRESSED IN BONE MARROW, SIGNAL = 0.91; EST_HUMAN HIT: BE745345.1, EVALUE 2.30e-01; NT HIT: AP000001.1, EVALUE 1.30e-01
aggggcacctgtgtgactgatggaaaggtagattcctgggcctcctccgctggagccactgaatcaaaatccctaggg

SEQ ID NO: 20430 - DNA, 99 bp, Homo sapiens
  MAP TO AC007336.2; EXPRESSED IN PLACENTA, SIGNAL =   5; EXPRESSED IN HELA, SIGNAL = 4.7; EXPRESSED IN HEART, SIGNAL = 3.8; EXPRESSED IN HBL100, SIGNAL = 3.8; EXPRESSED IN BT474, SIGNAL = 4.2; EXPRESSED IN FETAL LIVER, SIGNAL = 3.8; EXPRESSED IN ADULT LIVER, SIGNAL = 5.7; EXPRESSED IN BONE MARROW, SIGNAL = 4.4; EXPRESSED IN BRAIN, SIGNAL = 3.7; EXPRESSED IN LUNG, SIGNAL = 2.8; EST_HUMAN HIT: AI808031.1, EVALUE 4.80e+00
agtctttgcagatgtaagcagttaaggacttcaagatgcagtcatcctggatttcaggtgggcctaaagaaaatgtatagcgagaaccacagacaagaa

SEQ ID NO: 20431 - DNA, 265 bp, Homo sapiens
  MAP TO AL050327.6; EXPRESSED IN PLACENTA, SIGNAL = 1.1; EXPRESSED IN FETAL LIVER, SIGNAL = 0.96; EXPRESSED IN LUNG, SIGNAL = 0.94; EXPRESSED IN HBL100, SIGNAL = 0.88; EXPRESSED IN ADULT LIVER, SIGNAL = 0.88; EXPRESSED IN HEART, SIGNAL = 0.9; EXPRESSED IN BT474, SIGNAL = 0.9; EXPRESSED IN BONE MARROW, SIGNAL = 1.1; EXPRESSED IN HELA, SIGNAL = 1.1; EXPRESSED IN BRAIN, SIGNAL = 0.98; NT HIT: X61109.1, EVALUE 3.50e-02; EST_HUMAN HIT: BF092942.1, EVALUE 1.50e-02; SWISSPROT HIT: P19601, EVALUE 4.20e+00
gccaagccagagccccccaggctcccagctcaaggctgaccgaagcttggtgttaggtccgggtttcttgggggtgcatgagctgctggcgcgtccgcagtcggaggctgctttgtctctctcgctgtgtcttttcctcttgactctcttgttctcactccctcctgctgtgtctttgcccttgtgtctgctctccctcatcttctttctctttcttttgttctttcttctcctccttgcctctctttttcttcctttccttcct

SEQ ID NO: 20432 - DNA, 171 bp, Homo sapiens
  MAP TO AC008018.18; EXPRESSED IN LUNG, SIGNAL = 5.3; EXPRESSED IN HBL100, SIGNAL = 4.2; EXPRESSED IN HEART, SIGNAL = 5.1; EXPRESSED IN BONE MARROW, SIGNAL =   3; EXPRESSED IN PLACENTA, SIGNAL =   3; EXPRESSED IN HELA, SIGNAL = 4.7; EXPRESSED IN BT474, SIGNAL = 4.6; EXPRESSED IN ADULT LIVER, SIGNAL = 2.8; EXPRESSED IN FETAL LIVER, SIGNAL = 4.1; EXPRESSED IN BRAIN, SIGNAL = 3.7; NT HIT: gi5729973, EVALUE 2.00e-42; EST_HUMAN HIT: AA455869.1, EVALUE 1.00e-44; SWISSPROT HIT: P10950, EVALUE 9.80e-01
ttcgggcacgctcgtcgtgtgcagagacacggccgcagagtcctggggctcgctcgccatcctctgcccggcacacatcgacttgagcatctggaagacggccacgggggccacgttcaacttcacctggctctgaagctggccgctgtgggctgcatgagaatggtgttt

SEQ ID NO: 20433 - DNA, 103 bp, Homo sapiens
  MAP TO AL031297.4; EXPRESSED IN FETAL LIVER, SIGNAL = 0.93; EXPRESSED IN PLACENTA, SIGNAL = 0.97; EXPRESSED IN BONE MARROW, SIGNAL =  19; EXPRESSED IN HBL100, SIGNAL = 0.87; EXPRESSED IN ADULT LIVER, SIGNAL = 1.4; EXPRESSED IN HEART, SIGNAL = 1.2; EXPRESSED IN BT474, SIGNAL = 1.1; EXPRESSED IN LUNG, SIGNAL = 0.71; EXPRESSED IN HELA, SIGNAL = 0.59; NT HIT: U28410.1, EVALUE 8.70e-01
tcccatactgcacctcttcagaaatgactgtctcagctacaaacacccaacaacatttgatttgtgcctcagttttggcattcatcacaaaccactctttaat

SEQ ID NO: 20434 - DNA, 132 bp, Homo sapiens
  MAP TO AL109855.8; EXPRESSED IN ADULT LIVER, SIGNAL = 9.1; EXPRESSED IN BT474, SIGNAL = 6.3; EXPRESSED IN BRAIN, SIGNAL =   5; EXPRESSED IN HELA, SIGNAL = 6.3; EXPRESSED IN FETAL LIVER, SIGNAL = 6.7; EXPRESSED IN LUNG, SIGNAL = 6.3; EXPRESSED IN BONE MARROW, SIGNAL = 6.8; EXPRESSED IN PLACENTA, SIGNAL = 7.4; EXPRESSED IN HEART, SIGNAL = 5.9; EXPRESSED IN HBL100, SIGNAL = 7.1; NT HIT: AJ271736.1, EVALUE 5.00e-12; SWISSPROT HIT: Q03210, EVALUE 8.90e+00
gcatcagcagcctggtattgcaaattgggttgtgtgttggggacagcttctgcaccagctctatcatcattaggattataagcatgagcgtcatctgcccaagctggaactaaagaccatatgtgtgatttt

SEQ ID NO: 20435 - DNA, 75 bp, Homo sapiens
  MAP TO AL031057.10; EXPRESSED IN FETAL LIVER, SIGNAL = 0.8; EXPRESSED IN PLACENTA, SIGNAL = 1.6; EXPRESSED IN BT474, SIGNAL = 0.7; EXPRESSED IN BONE MARROW, SIGNAL = 0.89; EXPRESSED IN HELA, SIGNAL = 0.63; EXPRESSED IN HEART, SIGNAL = 0.78; EXPRESSED IN LUNG, SIGNAL = 0.63; NT HIT: AF028025.1, EVALUE 1.50e-01; EST_HUMAN HIT: BF686626.1, EVALUE 3.50e+00
cctaacgtgaagtctgacctagcgtcaacacggagcaagggaaacagacatgcaagcacattgatcaccaagtaa

SEQ ID NO: 20436 - DNA, 314 bp, Homo sapiens
  MAP TO AL118519.5; EXPRESSED IN PLACENTA, SIGNAL =   1; EXPRESSED IN HEART, SIGNAL = 0.99; EXPRESSED IN ADULT LIVER, SIGNAL = 1.4; EXPRESSED IN BT474, SIGNAL =   1; EXPRESSED IN HELA, SIGNAL = 1.3; EXPRESSED IN HBL100, SIGNAL = 1.2; EXPRESSED IN FETAL LIVER, SIGNAL = 1.1; EXPRESSED IN LUNG, SIGNAL = 1.2; EXPRESSED IN BONE MARROW, SIGNAL = 1.5; NT HIT: AB004630.1, EVALUE 0.00e+00; EST_HUMAN HIT: AA224120.1, EVALUE 2.00e-01; SWISSPROT HIT: P13944, EVALUE 7.00e-07
atttctatagtagttgatggtggaaagaaggtggtggaatttatgtttcaagccacagagggagatgtgttgaactacatttttagaaatcgagaactccgtcctttgtttgatcgtcagtggcacaaacttggcattagtatacaatcccaggtcatttcactttatatggattgtaatttaattgcgaggaggcagactgatgaaaaggacactgtggatttccatggacggacagttattgctacgcgagcttcagatggcaagcctgtggatgtaagttgtgatgttagttgtgaaagagaactaaaatt

SEQ ID NO: 20437 - DNA, 268 bp, Homo sapiens
  MAP TO AC007455.7; EXPRESSED IN HBL100, SIGNAL = 0.9; EXPRESSED IN FETAL LIVER, SIGNAL = 0.87; EXPRESSED IN BRAIN, SIGNAL = 1.1; EXPRESSED IN HEART, SIGNAL =   1; EXPRESSED IN BT474, SIGNAL = 0.9; EXPRESSED IN BONE MARROW, SIGNAL = 1.1; EXPRESSED IN LUNG, SIGNAL = 1.2; EXPRESSED IN PLACENTA, SIGNAL = 1.2; EXPRESSED IN ADULT LIVER, SIGNAL = 1.2; EXPRESSED IN HELA, SIGNAL = 1.1; SWISSPROT HIT: P02445, EVALUE 4.00e-35; EST_HUMAN HIT: BE887504.1, EVALUE 0.00e+00; NT HIT: M21103.1, EVALUE 9.00e-80
tcgaggctgcagtgtccccaccgggcctgccaccaccatctgctcctctgacaaatcctgccgctgtggagtctgcctgcccagcacctgcccacacacagtttggttactggagcccacctgctgtgacaactgtcccccaccctgccacattcctcagccctgcgtgcccacctgcttcctgctcaactcctgccagccaactccaggcctggagaccctcaacctcaccaccttcactcagccctgctgtgagccctgcctccca

SEQ ID NO: 20438 - DNA, 118 bp, Homo sapiens
  MAP TO AL121572.6; EXPRESSED IN BT474, SIGNAL = 0.99; EXPRESSED IN BONE MARROW, SIGNAL =   1; EXPRESSED IN PLACENTA, SIGNAL = 1.2; EXPRESSED IN HBL100, SIGNAL = 1.9; EXPRESSED IN HELA, SIGNAL = 1.7; EXPRESSED IN HEART, SIGNAL = 1.3; EXPRESSED IN FETAL LIVER, SIGNAL = 1.2; EXPRESSED IN ADULT LIVER, SIGNAL = 1.1; EST_HUMAN HIT: AI056672.1, EVALUE 5.00e-53; NT HIT: AB033010.1, EVALUE 6.00e-14; SWISSPROT HIT: O75360, EVALUE 2.30e+00
catctgtttcacacggtccttgtccacttcctgcttggtgaggatgaagagaaggataccacaagggaagccgatggcccaggccagtcccacagctttcatggggttcttgcccctc

SEQ ID NO: 20439 - DNA, 120 bp, Homo sapiens
  MAP TO AL121749.7; EXPRESSED IN PLACENTA, SIGNAL = 1.2; EXPRESSED IN HEART, SIGNAL = 1.5; EXPRESSED IN BT474, SIGNAL = 1.5; EXPRESSED IN LUNG, SIGNAL = 1.2; EXPRESSED IN BRAIN, SIGNAL = 1.2; EST_HUMAN HIT: F07042.1, EVALUE 2.00e-61; NT HIT: AF164623.1, EVALUE 1.00e+00; SWISSPROT HIT: P34624, EVALUE 2.00e-08
cagggtgacgatggcacattcagccgtcagctgagcagcactgaacagtgtccgaacgaaccggtaaatctgcttctgctctgggttgtgtttgtcataatctggtggcacttcggattt

SEQ ID NO: 20440 - DNA, 103 bp, Homo sapiens
  MAP TO AL109938.4; EXPRESSED IN BT474, SIGNAL = 2.5; EXPRESSED IN BRAIN, SIGNAL = 1.6; EXPRESSED IN BONE MARROW, SIGNAL = 2.5; EXPRESSED IN HELA, SIGNAL = 3.1; EXPRESSED IN ADULT LIVER, SIGNAL = 3.8; EXPRESSED IN FETAL LIVER, SIGNAL = 2.7; EXPRESSED IN LUNG, SIGNAL =   3; EXPRESSED IN PLACENTA, SIGNAL =   3; EXPRESSED IN HEART, SIGNAL = 2.2; EXPRESSED IN HBL100, SIGNAL = 2.9; EST_HUMAN HIT: AI492415.1, EVALUE 2.00e-51; NT HIT: AF170344.1, EVALUE 7.40e-01; SWISSPROT HIT: P36417, EVALUE 6.10e-01
agcagcagcaaagtcacggggaggaagaccccaaagaacaggaaccagccagggagctccctcatgaaagctgacagcacagagctcattgccaaccacacag

SEQ ID NO: 20441 - DNA, 219 bp, Homo sapiens
  MAP TO AC008045.4; EXPRESSED IN BT474, SIGNAL =   3; EXPRESSED IN ADULT LIVER, SIGNAL =   2; EXPRESSED IN BRAIN, SIGNAL = 2.4; EXPRESSED IN PLACENTA, SIGNAL = 2.3; EXPRESSED IN HBL100, SIGNAL = 2.3; EXPRESSED IN FETAL LIVER, SIGNAL = 2.7; EXPRESSED IN LUNG, SIGNAL =   3; EXPRESSED IN BONE MARROW, SIGNAL =   2; EXPRESSED IN HEART, SIGNAL = 2.5; EXPRESSED IN HELA, SIGNAL = 2.7; EST_HUMAN HIT: BE796798.1, EVALUE 2.00e-20; NT HIT: gi4758827, EVALUE 1.00e-87; SWISSPROT HIT: Q05793, EVALUE 1.00e-02
gtgacaatctctgtggatggcattcttaccacgacgggctacactcaagaggactataccatgctgggctcggacgacttcttctatgtaggaggaagcccaagtaccgctgacttgcctggctcccctgtcagcaacaacttcatgggctgccttaaagaggtaaagttcacccaattctatttaatgcaccatgtgattgtttcatttataaacaaa

SEQ ID NO: 20442 - DNA, 192 bp, Homo sapiens
  MAP TO AL078600.11; EXPRESSED IN FETAL LIVER, SIGNAL = 2.2; EXPRESSED IN HEART, SIGNAL = 1.3; EST_HUMAN HIT: BF375508.1, EVALUE 6.70e-01; NT HIT: U33434.1, EVALUE 1.80e+00; SWISSPROT HIT: Q9ZCF7, EVALUE 1.30e+00
tgatcatttgcatttcttccttgtgagttgtatagatagaacaaggaaattttgaaaggaggaagatagagaagatggcagagcttggaggcctaaggagtgaaatccaccaggggagatggatctggcaagccggctcaatgaacgtggactcctgtgggaggcaaagtcctgaaggcgagagttaggatt

SEQ ID NO: 20443 - DNA, 179 bp, Homo sapiens
  MAP TO AL049837.3; EXPRESSED IN ADULT LIVER, SIGNAL = 0.9; EXPRESSED IN HEART, SIGNAL = 1.1; EXPRESSED IN BONE MARROW, SIGNAL = 0.93; EXPRESSED IN HBL100, SIGNAL = 0.72; EXPRESSED IN BRAIN, SIGNAL = 0.91; EXPRESSED IN PLACENTA, SIGNAL = 0.86; EXPRESSED IN BT474, SIGNAL = 0.71; EXPRESSED IN FETAL LIVER, SIGNAL = 2.7; EXPRESSED IN LUNG, SIGNAL = 0.88; EXPRESSED IN HELA, SIGNAL = 0.82; NT HIT: U80017.1, EVALUE 2.30e-02; EST_HUMAN HIT: AI440282.1, EVALUE 1.00e-04; SWISSPROT HIT: P02564, EVALUE 4.30e-01
tcttctgcagtgtcaaatctgttgttaatttcatccagttcatgttttatgtcagaaatggtttgattcaagtcattttggtatattacctttttctcctcaccgtgctcattttttccctctaccttcttaaacatattgaggatatttacagtagctgttacaatattcttatctac

SEQ ID NO: 20444 - DNA, 126 bp, Homo sapiens
  MAP TO AC007597.2; EXPRESSED IN BRAIN, SIGNAL = 0.94; EXPRESSED IN HEART, SIGNAL = 0.85; EXPRESSED IN HBL100, SIGNAL = 0.8; EXPRESSED IN FETAL LIVER, SIGNAL = 0.79; EXPRESSED IN HELA, SIGNAL = 1.2; EXPRESSED IN ADULT LIVER, SIGNAL = 0.92; EXPRESSED IN PLACENTA, SIGNAL = 0.93; EXPRESSED IN BT474, SIGNAL = 1.1; EXPRESSED IN BONE MARROW, SIGNAL = 0.69; EXPRESSED IN LUNG, SIGNAL =   1; NT HIT: AL163285.2, EVALUE 6.00e-33; EST_HUMAN HIT: BE149334.1, EVALUE 2.00e-27; SWISSPROT HIT: P27401, EVALUE 8.00e-03
ccaagatccatctgtcttctgcacaggccaaatgggcaaactgaatgggaatgtggtgggaatcatcacccctgcatccttcatgtccttgatggtggcactaatctctgcagtccctctaggaat

SEQ ID NO: 20445 - DNA, 378 bp, Homo sapiens
  MAP TO AC008132.26; EXPRESSED IN LUNG, SIGNAL = 7.8; EXPRESSED IN PLACENTA, SIGNAL = 3.2; EXPRESSED IN HELA, SIGNAL = 4.3; EXPRESSED IN HEART, SIGNAL = 3.3; EXPRESSED IN HBL100, SIGNAL = 4.2; EXPRESSED IN BT474, SIGNAL = 3.8; EXPRESSED IN FETAL LIVER, SIGNAL = 4.1; EXPRESSED IN ADULT LIVER, SIGNAL = 4.6; EXPRESSED IN BONE MARROW, SIGNAL = 3.9; EXPRESSED IN BRAIN, SIGNAL = 3.3; EST_HUMAN HIT: AL042278.1, EVALUE 0.00e+00; SWISSPROT HIT: P52591, EVALUE 1.00e-04; NT HIT: gi11417834, EVALUE 0.00e+00
gttgagggccctcaaggagagcggggcagggatgcctgagcaggacaaggaccctagagtccaagagaatcctggtgatcagagaagggtccccgaggtcaccggggatgcaccgtctgcatttcggcccctgcgggacaatagaggcctctctccctttgtgcccgggcccgggcctctgcagacagacctccatgcccagaggtcagaaatcagatataaccagacatcccagacctcctggacgagctcctgcaccaaccgaaatgccatctccagctcctacagctccacgggaggcttgccggggctaaagcggaggagggggccagcctcatcccactgccagctgaccctcagttcctcaaagacagtgag

SEQ ID NO: 20446 - DNA, 139 bp, Homo sapiens
  MAP TO AP000409.1; EXPRESSED IN HEART, SIGNAL =  18; EXPRESSED IN ADULT LIVER, SIGNAL =   2; NT HIT: gi11422558, EVALUE 1.20e+00; EST_HUMAN HIT: AA758580.1, EVALUE 1.80e+00; SWISSPROT HIT: Q55029, EVALUE 6.70e+00
tcaaagatatcattcgtcatcctggttacaggacacccatttcctagagacagctcattatgcttaggttgcaggttttccacaagaggtgctcctctaatttcaaccagaagccaagattcagtacactctacaaaca

SEQ ID NO: 20447 - DNA, 136 bp, Homo sapiens
  MAP TO AC007426.1; EXPRESSED IN BRAIN, SIGNAL = 2.1; EXPRESSED IN LUNG, SIGNAL = 2.4; EXPRESSED IN HBL100, SIGNAL = 3.2; EXPRESSED IN HEART, SIGNAL = 2.5; EXPRESSED IN BONE MARROW, SIGNAL = 2.8; EXPRESSED IN PLACENTA, SIGNAL = 2.1; EXPRESSED IN HELA, SIGNAL = 2.6; EXPRESSED IN BT474, SIGNAL = 2.6; EXPRESSED IN ADULT LIVER, SIGNAL = 3.3; EXPRESSED IN FETAL LIVER, SIGNAL = 2.5; NT HIT: AJ289880.1, EVALUE 1.00e-03; EST_HUMAN HIT: AW900048.1, EVALUE 9.00e-17; SWISSPROT HIT: P10044, EVALUE 1.00e+00
gcttgatatgtacggaagattgaggtctgcagctgcagttgcccatcacttcaagagaaatgaatccagcataaggaccattgtaaaaaaagaaaaggaaattcatgaagccatggctgtagctacaccaccagag

SEQ ID NO: 20448 - DNA, 114 bp, Homo sapiens
  MAP TO AC008430.2; EXPRESSED IN BT474, SIGNAL =   1; EXPRESSED IN ADULT LIVER, SIGNAL = 1.1; EXPRESSED IN BRAIN, SIGNAL = 1.3; EXPRESSED IN LUNG, SIGNAL = 1.2; EXPRESSED IN HBL100, SIGNAL = 1.1; EXPRESSED IN FETAL LIVER, SIGNAL = 1.3; EXPRESSED IN BONE MARROW, SIGNAL =   1; EXPRESSED IN PLACENTA, SIGNAL =   1; EXPRESSED IN HEART, SIGNAL = 2.1; EXPRESSED IN HELA, SIGNAL = 1.2; NT HIT: gi11417138, EVALUE 5.00e-58; EST_HUMAN HIT: AA297258.1, EVALUE 8.00e-54; SWISSPROT HIT: P10040, EVALUE 1.00e-08
acataaatgaatgcgaagttgagccttgcaaaaatggtggaatatgtacagatcttgttgctaactattcctgtgagtgcccaggcgaatttatgggaagaaattgtcaataca

SEQ ID NO: 20449 - DNA, 137 bp, Homo sapiens
  MAP TO AL132773.1; EXPRESSED IN BRAIN, SIGNAL =   2; EXPRESSED IN BONE MARROW, SIGNAL = 1.6; EXPRESSED IN HEART, SIGNAL = 1.9; EXPRESSED IN BT474, SIGNAL = 2.5; EXPRESSED IN ADULT LIVER, SIGNAL = 2.1; EXPRESSED IN LUNG, SIGNAL =   2; EXPRESSED IN PLACENTA, SIGNAL = 2.2; EXPRESSED IN HELA, SIGNAL = 1.5; EXPRESSED IN HBL100, SIGNAL = 1.7; EXPRESSED IN FETAL LIVER, SIGNAL = 2.1; EST_HUMAN HIT: BF672370.1, EVALUE 2.00e-71; NT HIT: AB011120.1, EVALUE 1.00e-71; SWISSPROT HIT: Q19981, EVALUE 3.00e-11
ctgacatttccctccattggtgggatcaccgtagaagccagatatgcaggtctcgcagtgcttgcctgtggtcaggttctcacacttctcacagatgctctgattgatgcatttactgtggccgttgcattggcaag

SEQ ID NO: 20450 - DNA, 149 bp, Homo sapiens
  MAP TO AJ010597.1; EXPRESSED IN FETAL LIVER, SIGNAL = 1.2; EXPRESSED IN PLACENTA, SIGNAL = 1.2; EXPRESSED IN BT474, SIGNAL = 1.1; EXPRESSED IN BONE MARROW, SIGNAL = 1.3; EXPRESSED IN HBL100, SIGNAL = 0.91; EXPRESSED IN HELA, SIGNAL = 0.82; EXPRESSED IN ADULT LIVER, SIGNAL = 0.9; EXPRESSED IN BRAIN, SIGNAL = 0.91; EXPRESSED IN HEART, SIGNAL = 1.2; EXPRESSED IN LUNG, SIGNAL = 1.1; NT HIT: AL163210.2, EVALUE 8.00e-79; EST_HUMAN HIT: BF224377.1, EVALUE 2.00e+00; SWISSPROT HIT: O14166, EVALUE 2.30e+00
gcaagtgggctaccaagtcatgttcttcttaagcaggttgcagaagttcaactgggctagcccagcgatgcaggtagtttcatgtctgcttgcatgctggctgctaacatgccattggtcaaatcccatcatccatgacaaaaggaaat

SEQ ID NO: 20451 - DNA, 137 bp, Homo sapiens
  MAP TO AL121580.6; EXPRESSED IN PLACENTA, SIGNAL = 1.6; EXPRESSED IN HBL100, SIGNAL = 1.6; EXPRESSED IN HEART, SIGNAL = 1.3; EXPRESSED IN ADULT LIVER, SIGNAL = 2.2; EXPRESSED IN BT474, SIGNAL = 1.5; EXPRESSED IN BRAIN, SIGNAL = 1.6; EXPRESSED IN HELA, SIGNAL = 1.6; EXPRESSED IN FETAL LIVER, SIGNAL = 1.7; EXPRESSED IN LUNG, SIGNAL = 1.5; EXPRESSED IN BONE MARROW, SIGNAL = 1.5; SWISSPROT HIT: P38090, EVALUE 3.90e+00; EST_HUMAN HIT: BF693300.1, EVALUE 4.60e-01
aagtttcaggaaataaacagcatggtatcattgctggtgtggacaacggatccactgatgccgtcatcaaagacgcatcaaacacgcaaagcaacaccacacaccagaggcctgctattagcaactggctttcccta

SEQ ID NO: 20452 - DNA, 194 bp, Homo sapiens
  MAP TO AC007740.1; EXPRESSED IN HBL100, SIGNAL = 0.72; EXPRESSED IN FETAL LIVER, SIGNAL = 0.79; EXPRESSED IN BRAIN, SIGNAL = 0.74; EXPRESSED IN PLACENTA, SIGNAL = 0.93; EXPRESSED IN BT474, SIGNAL = 0.82; EXPRESSED IN BONE MARROW, SIGNAL = 0.98; EXPRESSED IN HELA, SIGNAL = 0.62; EXPRESSED IN ADULT LIVER, SIGNAL = 0.78; EXPRESSED IN HEART, SIGNAL = 0.96; EXPRESSED IN LUNG, SIGNAL = 0.79; SWISSPROT HIT: P57517, EVALUE 2.20e+00; NT HIT: M37463.1, EVALUE 1.80e+00; EST_HUMAN HIT: AW820223.1, EVALUE 3.00e-02
gcatcttcatcaatcctggcatatgtaactaacaactttttggttcttaaccaagaaaacatagatagtcccatcatctttctctgtgaaaagtctataattatcactttaatctatacatgcaaaaatgttaaatattttgccaaattcatgcagaaaattcacgtcaggttagcacaaaacagcagtttccg

SEQ ID NO: 20453 - DNA, 167 bp, Homo sapiens
  MAP TO AL109942.4; EXPRESSED IN HBL100, SIGNAL = 2.6; EXPRESSED IN HELA, SIGNAL = 3.1; EXPRESSED IN PLACENTA, SIGNAL = 2.3; EXPRESSED IN HEART, SIGNAL = 2.2; EXPRESSED IN ADULT LIVER, SIGNAL = 3.3; EXPRESSED IN FETAL LIVER, SIGNAL = 2.9; EXPRESSED IN BT474, SIGNAL = 2.8; EXPRESSED IN BRAIN, SIGNAL = 3.5; EXPRESSED IN BONE MARROW, SIGNAL = 2.6; EXPRESSED IN LUNG, SIGNAL = 2.8; NT HIT: gi9910391, EVALUE 2.00e-86; EST_HUMAN HIT: BF527726.1, EVALUE 3.00e-86; SWISSPROT HIT: P38226, EVALUE 9.00e-04
ggctccaaggtcctggccaagaaagagctggcctatgtcccaattatcggctggatgtggtacttcaccgagatggtcttctgttcgcgcaagtgggagcaggatcgcaagacggttgccaccagtttgcagcacctccgggactaccccgagaagtattttgtatg

SEQ ID NO: 20454 - DNA, 276 bp, Homo sapiens
  MAP TO AC007404.2; EXPRESSED IN FETAL LIVER, SIGNAL = 0.95; EXPRESSED IN LUNG, SIGNAL = 0.99; EXPRESSED IN HELA, SIGNAL =   1; EXPRESSED IN BRAIN, SIGNAL = 0.82; EXPRESSED IN HEART, SIGNAL = 0.91; EXPRESSED IN ADULT LIVER, SIGNAL = 0.72; EXPRESSED IN PLACENTA, SIGNAL = 0.83; EXPRESSED IN BT474, SIGNAL = 0.92; EXPRESSED IN BONE MARROW, SIGNAL = 0.77; EST_HUMAN HIT: BE938008.1, EVALUE 4.00e-71; NT HIT: AB037835.1, EVALUE 0.00e+00; SWISSPROT HIT: P35999, EVALUE 1.50e+00
ttgtagggtttcgaagtttagcagaacgtgccaaggcaagatcaaagtgagcctggtctgcattctcacacaaattgatgattcgacacaggcaatcggcagcaaatactcgagtggcccagcgaggggccacaaagggctttgatttatcttcttcacctaacgtggtaaacatggtatcatcatccatctcatctttcttttcagcttcttcatcttttccactacttaagagagttgcagtactcatatctataacaagaataaggaatattg

SEQ ID NO: 20455 - DNA, 75 bp, Homo sapiens
  MAP TO AC007717.1; EXPRESSED IN LUNG, SIGNAL = 0.7; EXPRESSED IN PLACENTA, SIGNAL = 0.85; EXPRESSED IN BONE MARROW, SIGNAL = 0.8; EXPRESSED IN FETAL LIVER, SIGNAL = 0.65; EXPRESSED IN BT474, SIGNAL = 0.77; EXPRESSED IN HELA, SIGNAL = 0.64; EXPRESSED IN HEART, SIGNAL = 0.84; NT HIT: U72725.1, EVALUE 9.10e+00; EST_HUMAN HIT: BF362837.1, EVALUE 8.70e-01; SWISSPROT HIT: Q27409, EVALUE 7.20e+00
  unsure 3
aangagttgaaataactgtaaatattccaactagttatgcccacgacatcacaggtggttgttgctataaagcac

SEQ ID NO: 20456 - DNA, 158 bp, Homo sapiens
  MAP TO AL109798.13; EXPRESSED IN BRAIN, SIGNAL = 5.2; EXPRESSED IN BONE MARROW, SIGNAL = 6.3; EXPRESSED IN FETAL LIVER, SIGNAL = 5.9; EXPRESSED IN ADULT LIVER, SIGNAL = 7.1; EXPRESSED IN BT474, SIGNAL =   6; EXPRESSED IN LUNG, SIGNAL = 4.5; EXPRESSED IN PLACENTA, SIGNAL = 5.5; EXPRESSED IN HEART, SIGNAL = 4.1; EXPRESSED IN HELA, SIGNAL = 5.3; EXPRESSED IN HBL100, SIGNAL = 5.6; EST_HUMAN HIT: AW847082.1, EVALUE 1.50e+00; NT HIT: AF018962.1, EVALUE 4.00e-84; SWISSPROT HIT: O15537, EVALUE 4.00e-26
ggttacagatagatctgaaggagatcaaagtgatttcagggatcctcacccaggggcgctgtgacatcgatgagtggatgaccaagtacagcgtgcagtacaggaccgatgagcgcctgaactggatttactacaaggaccagactggaaacaaccgg

SEQ ID NO: 20457 - DNA, 135 bp, Homo sapiens
  MAP TO AL035633.15; EXPRESSED IN BONE MARROW, SIGNAL = 3.3; EXPRESSED IN ADULT LIVER, SIGNAL =   1; EXPRESSED IN PLACENTA, SIGNAL =   3; EXPRESSED IN BRAIN, SIGNAL = 2.5; EXPRESSED IN HELA, SIGNAL = 2.3; EXPRESSED IN HBL100, SIGNAL = 1.3; EXPRESSED IN HEART, SIGNAL = 2.7; EXPRESSED IN BT474, SIGNAL = 3.3; EXPRESSED IN FETAL LIVER, SIGNAL = 2.8; EXPRESSED IN LUNG, SIGNAL =   5; NT HIT: AL161513.2, EVALUE 2.60e-01; EST_HUMAN HIT: BE250048.1, EVALUE 7.80e-02; SWISSPROT HIT: P27898, EVALUE 4.50e-01
gaaacctgcatatgcggagggatagctttgattttggtatacatggtggtcatcctggagtcaatccccaacgtttactgtcggacgactgtagaagtgatttgtctattactttgcaacctcccttttcctttc

SEQ ID NO: 20458 - DNA, 177 bp, Homo sapiens
  MAP TO AL031770.12; EXPRESSED IN HBL100, SIGNAL =   1; EXPRESSED IN ADULT LIVER, SIGNAL = 0.68; EXPRESSED IN BRAIN, SIGNAL = 0.68; EXPRESSED IN HEART, SIGNAL =   1; EXPRESSED IN PLACENTA, SIGNAL = 0.62; EXPRESSED IN BT474, SIGNAL = 3.8; EXPRESSED IN BONE MARROW, SIGNAL = 1.1; EXPRESSED IN LUNG, SIGNAL = 0.68; EXPRESSED IN HELA, SIGNAL = 0.85; EXPRESSED IN FETAL LIVER, SIGNAL = 0.64; EST_HUMAN HIT: AI290264.1, EVALUE 2.00e-95; NT HIT: AF032666.1, EVALUE 1.00e-71; SWISSPROT HIT: P23629, EVALUE 4.90e+00
ctattttctcaggtttgagtagcttgaaagagactgttgaggttcctctgccacctgacttagtggtgacaataatgtctcctttgtcatttttggcttgtcccactcgacatactattttacttgcagacatccattctgccgtcaggaggcaattatgtccacaaatggtcaagc

SEQ ID NO: 20459 - DNA, 183 bp, Homo sapiens
  MAP TO AC007445.1; EXPRESSED IN HELA, SIGNAL =   3; EXPRESSED IN HEART, SIGNAL = 2.1; EXPRESSED IN BT474, SIGNAL = 2.5; EXPRESSED IN ADULT LIVER, SIGNAL = 2.9; EXPRESSED IN BRAIN, SIGNAL = 2.5; EXPRESSED IN PLACENTA, SIGNAL = 2.8; EXPRESSED IN HBL100, SIGNAL = 2.5; EXPRESSED IN FETAL LIVER, SIGNAL = 2.9; EXPRESSED IN LUNG, SIGNAL =   3; EXPRESSED IN BONE MARROW, SIGNAL = 2.5; NT HIT: AB023135.1, EVALUE 6.70e+00; EST_HUMAN HIT: AA720851.1, EVALUE 1.00e-84; SWISSPROT HIT: P15607, EVALUE 2.90e+00
  unsure 83
  unsure 92
  unsure 98
gatttctcatcagcgagggtttccaggacctcatattctgccaggccgggaatgatcttcatggactctggtatttctttctnccattttcntgaagntgcttctgtagtggagggctgctccactttctcaccctctttagctttcccagtcatagtaacaattctcccggagacagtgtca

SEQ ID NO: 20460 - DNA, 101 bp, Homo sapiens
  MAP TO AC008496.2; EXPRESSED IN PLACENTA, SIGNAL = 0.9; EXPRESSED IN HELA, SIGNAL =   1; EXPRESSED IN HEART, SIGNAL = 4.6; EXPRESSED IN FETAL LIVER, SIGNAL = 0.93; EXPRESSED IN BRAIN, SIGNAL = 1.1; EXPRESSED IN LUNG, SIGNAL =   1; EST_HUMAN HIT: AW755254.1, EVALUE 3.00e-50; NT HIT: Z71303.1, EVALUE 3.40e+00
agtaaacctgaaatgaatcaatgacatcttccttgttcatgctccagtaaactgcaattgttgtgctggtggcagaatttggttcctgaggttctaatcta

SEQ ID NO: 20461 - DNA, 225 bp, Homo sapiens
  MAP TO AL031656.10; EXPRESSED IN PLACENTA, SIGNAL = 0.73; EXPRESSED IN BT474, SIGNAL = 0.65; EXPRESSED IN LUNG, SIGNAL = 0.87; EXPRESSED IN HELA, SIGNAL = 0.88; EXPRESSED IN ADULT LIVER, SIGNAL = 0.92; EXPRESSED IN HEART, SIGNAL = 0.94; EXPRESSED IN BONE MARROW, SIGNAL =   1; EXPRESSED IN HBL100, SIGNAL = 0.88; EXPRESSED IN FETAL LIVER, SIGNAL = 0.84; EXPRESSED IN BRAIN, SIGNAL = 0.87; NT HIT: U62556.1, EVALUE 6.00e-07; EST_HUMAN HIT: AI206322.1, EVALUE 9.00e-07; SWISSPROT HIT: P27727, EVALUE 1.70e+00
aattgacctggtttcctgttctgctatgaatgcatactgctccagtccttccataagctcatcaccaatgcttgccatgtcatctacaggcactttttctgcagtgttaacaatgtcatcttcattggtggtatcgtgttggcactcagtaagtttcagattctggagcattttggatttccgaggttcaggttaggaatattccacctggatggatgcatttct

SEQ ID NO: 20462 - DNA, 246 bp, Homo sapiens
  MAP TO AC010951.3; EXPRESSED IN BRAIN, SIGNAL = 1.6; EXPRESSED IN LUNG, SIGNAL = 1.9; EXPRESSED IN HELA, SIGNAL = 2.7; EXPRESSED IN PLACENTA, SIGNAL =   6; EXPRESSED IN FETAL LIVER, SIGNAL = 1.7; EXPRESSED IN ADULT LIVER, SIGNAL = 4.2; EXPRESSED IN BT474, SIGNAL =   2; EXPRESSED IN BONE MARROW, SIGNAL = 2.1; EXPRESSED IN HEART, SIGNAL = 1.2; EXPRESSED IN HBL100, SIGNAL = 2.4; NT HIT: AB026898.1, EVALUE 4.00e-57; EST_HUMAN HIT: AI492055.1, EVALUE 3.00e-49; SWISSPROT HIT: Q02279, EVALUE 7.30e-01
gagcacagtggacacccttccagatctggagtgatggaagtctgcgacgcagtggtggatggcgagcgaaagctcagctcaagcgtaacaaacacggaccagaagagtacagttgcaagatttaatagagtgaagatagagctcccatacaaagggaggggacccaaagggggttaccgttgccagctcgaatgcttgggtttatatcctgataattgtccctcccgctgtgctctcaggcaacag

SEQ ID NO: 20463 - DNA, 302 bp, Homo sapiens
  MAP TO AL109810.4; EXPRESSED IN PLACENTA, SIGNAL = 5.5; EXPRESSED IN HBL100, SIGNAL =   9; EXPRESSED IN HEART, SIGNAL = 2.4; EXPRESSED IN ADULT LIVER, SIGNAL = 1.9; EXPRESSED IN BT474, SIGNAL =  15; EXPRESSED IN BRAIN, SIGNAL = 8.6; EXPRESSED IN HELA, SIGNAL =  25; EXPRESSED IN FETAL LIVER, SIGNAL = 6.8; EXPRESSED IN LUNG, SIGNAL = 5.2; EXPRESSED IN BONE MARROW, SIGNAL = 5.3; SWISSPROT HIT: P05092, EVALUE 4.00e-40; NT HIT: AF023861.1, EVALUE 1.00e-103; EST_HUMAN HIT: AA828948.1, EVALUE 1.00e-100
ccatggcctccacaatattcagtttcttctttcaccttgccagagaccacatgcttgccatccagccactcagtcttggcagtgcagatgaaaaactgggaaccgtttgtgttgggtccagcatttgccgtgaaaaagatgccaggacctgtaggcttcaggatgaagttctcgtcatgaaatttctctccacagatgggctcgccaccagtgtcattatggcatgtgaagtcaccaccctgccacataagccctggaataattctgtgaaagcaggaatccttaaaaccatatcttttctc

SEQ ID NO: 20464 - DNA, 84 bp, Homo sapiens
  MAP TO AP000013.2; EXPRESSED IN BRAIN, SIGNAL = 2.1; EXPRESSED IN BONE MARROW, SIGNAL = 2.2; EXPRESSED IN HEART, SIGNAL = 1.3; EXPRESSED IN BT474, SIGNAL = 2.5; EXPRESSED IN ADULT LIVER, SIGNAL = 2.5; EXPRESSED IN FETAL LIVER, SIGNAL = 2.1; EXPRESSED IN LUNG, SIGNAL =   2; EXPRESSED IN PLACENTA, SIGNAL = 2.4; EXPRESSED IN HELA, SIGNAL = 1.6; EXPRESSED IN HBL100, SIGNAL =   2; NT HIT: U09964.1, EVALUE 1.50e-01
actttcgagatcacataccaagaccttcagctggatggtccctgtagctgctgtgaccactagaagcagggttaggggcgagac

SEQ ID NO: 20465 - DNA, 273 bp, Homo sapiens
  MAP TO AC007870.3; EXPRESSED IN LUNG, SIGNAL = 0.9; EXPRESSED IN PLACENTA, SIGNAL = 1.1; EXPRESSED IN HBL100, SIGNAL = 0.82; EXPRESSED IN FETAL LIVER, SIGNAL = 0.87; EXPRESSED IN BRAIN, SIGNAL = 0.93; EXPRESSED IN BT474, SIGNAL = 0.93; EXPRESSED IN BONE MARROW, SIGNAL =   1; EXPRESSED IN HELA, SIGNAL = 0.64; EXPRESSED IN ADULT LIVER, SIGNAL = 0.8; EXPRESSED IN HEART, SIGNAL = 0.91; SWISSPROT HIT: P08548, EVALUE 3.00e-07; NT HIT: AF128893.1, EVALUE 3.00e-30; EST_HUMAN HIT: BE145672.1, EVALUE 4.00e-27
ctcaacccagtaatatgtataataagtatacacaacctacccacagctggtatgctgaatgaggaaaacctgaaagcctttcctctaagatatggaacaagacaaggatgctcatcttcaccattgttactcaacaaagtactgaaagtcctatctacagcaatcagacaaaagaaagaaataaaaggcatccaaattggaaaggaagacctaagtatccttgttgtattagttcgtttccatgctgctgataaagacatagccaagactggg

SEQ ID NO: 20466 - DNA, 148 bp, Homo sapiens
  MAP TO AC007385.2; EXPRESSED IN BT474, SIGNAL = 0.7; EXPRESSED IN HBL100, SIGNAL = 0.67; EXPRESSED IN FETAL LIVER, SIGNAL = 0.68; EXPRESSED IN LUNG, SIGNAL = 0.7; EXPRESSED IN BRAIN, SIGNAL = 0.85; EXPRESSED IN PLACENTA, SIGNAL = 0.81; EXPRESSED IN BONE MARROW, SIGNAL =   1; EXPRESSED IN HELA, SIGNAL = 0.74; EXPRESSED IN ADULT LIVER, SIGNAL = 0.71; EXPRESSED IN HEART, SIGNAL = 0.83; NT HIT: U38914.1, EVALUE 5.00e-03; SWISSPROT HIT: P16154, EVALUE 1.30e+00; EST_HUMAN HIT: BE970010.1, EVALUE 3.20e-02
caccaggtattcagtgttctgggaatagtcaagatcatccaattgggcttttttctcaaaatggtacttcttcttgcaaaatatatgctcttctccttgatgctctgccagctgctggaagcctctgccgtgttagcaaggcatgcct

SEQ ID NO: 20467 - DNA, 298 bp, Homo sapiens
  MAP TO AC010130.3; EXPRESSED IN LUNG, SIGNAL = 6.7; EXPRESSED IN HELA, SIGNAL =  11; EXPRESSED IN PLACENTA, SIGNAL = 5.7; EXPRESSED IN HBL100, SIGNAL = 7.9; EXPRESSED IN HEART, SIGNAL = 3.9; EXPRESSED IN ADULT LIVER, SIGNAL =   7; EXPRESSED IN BT474, SIGNAL = 5.5; EXPRESSED IN BONE MARROW, SIGNAL = 5.6; EXPRESSED IN BRAIN, SIGNAL = 4.9; EXPRESSED IN FETAL LIVER, SIGNAL = 7.9; NT HIT: gi7662183, EVALUE 0.00e+00; EST_HUMAN HIT: AI973112.1, EVALUE 0.00e+00; SWISSPROT HIT: P36197, EVALUE 2.00e-04
tggtgaactatgacaatgtagtggacacaggttctgaaacagatgaggaagacaagcttcatattgctgaggatgacggtattgccaaccctctggaccaggagacgagtccagctagtgtgcccaaccatgagtcctccccacacgtgagccaagctctgttgccaagagaggaagaggaagatgaaataagggagggtggagtggaacacccctggcacaacaacgagattctacaagcctctgtagatggtccaggtaagtgtctaaaatcacttggcctcttcctgtaccatct

SEQ ID NO: 20468 - DNA, 197 bp, Homo sapiens
  MAP TO AL118509.3; EXPRESSED IN BRAIN, SIGNAL = 1.6; EXPRESSED IN BONE MARROW, SIGNAL = 1.6; EXPRESSED IN ADULT LIVER, SIGNAL = 2.2; EXPRESSED IN FETAL LIVER, SIGNAL = 1.9; EXPRESSED IN BT474, SIGNAL = 1.7; EXPRESSED IN LUNG, SIGNAL = 1.8; EXPRESSED IN PLACENTA, SIGNAL = 1.5; EXPRESSED IN HEART, SIGNAL = 1.5; EXPRESSED IN HELA, SIGNAL = 1.2; EXPRESSED IN HBL100, SIGNAL = 1.7; EST_HUMAN HIT: AL135179.1, EVALUE 6.90e-01; SWISSPROT HIT: P25351, EVALUE 3.30e-01
tcaagagttgaagcagaggacatggaaacattcactgtgcaccctgtagattggccagaaccactccatggtcgatggtttcttatcaggaggcaatgctggtccattgtgtggaaaccacagaaggtaggggcagtgacagttggttgaagtcagcagtgaaacaagtctttccaatgggctggtttctgttgaac

SEQ ID NO: 20469 - DNA, 308 bp, Homo sapiens
  MAP TO AL121778.4; EXPRESSED IN BONE MARROW, SIGNAL =  20; EXPRESSED IN HBL100, SIGNAL =  75; EXPRESSED IN BT474, SIGNAL =  36; EXPRESSED IN ADULT LIVER, SIGNAL = 6.9; EXPRESSED IN BRAIN, SIGNAL = 4.3; EXPRESSED IN LUNG, SIGNAL =  43; EXPRESSED IN PLACENTA, SIGNAL =  18; EXPRESSED IN HEART, SIGNAL = 7.9; EXPRESSED IN HELA, SIGNAL =  34; EXPRESSED IN FETAL LIVER, SIGNAL =  23; EST_HUMAN HIT: BE746020.1, EVALUE 0.00e+00; NT HIT: gi4506718, EVALUE 0.00e+00; SWISSPROT HIT: P46791, EVALUE 1.00e-53
aagattatgccagtgcagaagcagacccgtgctggccagcgcaccaggttcaaggtgtttgttgctatcggggactacaatggccacgtcggtctgggtgttaagtgctccaaggaggtggccaccgccatccgtggggccatcatcctggccaagctctccattgtccccgtgtgcagaggctactggggcaacaagatcggcaagccccacaccgtcccttgcaaggtgacaggccgctgcggctctgtgctggtgcgcctcatccctgcacccaggggcactggcatcgtctccgcacctgtgcc

SEQ ID NO: 20470 - DNA, 193 bp, Homo sapiens
  MAP TO AC007790.1; EXPRESSED IN BONE MARROW, SIGNAL = 0.93; EXPRESSED IN HBL100, SIGNAL = 0.92; EXPRESSED IN FETAL LIVER, SIGNAL = 0.91; EXPRESSED IN BRAIN, SIGNAL = 0.8; EXPRESSED IN PLACENTA, SIGNAL = 0.71; EXPRESSED IN BT474, SIGNAL = 0.72; EXPRESSED IN LUNG, SIGNAL = 0.7; EXPRESSED IN HELA, SIGNAL = 0.87; EXPRESSED IN ADULT LIVER, SIGNAL = 0.97; EXPRESSED IN HEART, SIGNAL = 1.3; EST_HUMAN HIT: BE617196.1, EVALUE 2.70e+00; SWISSPROT HIT: Q9W5G6, EVALUE 1.70e+00; NT HIT: gi9964314, EVALUE 7.10e+00
atatttattgagcatctactgtgtacattatattgttctaggctctggagttatattagtgacaaaacagaaaaaaattttgttcttttggaacttgcagggaaatacagatattaataatatcatatctattattttattaatgaatcataagatacagataatagatcatttggtgacaagcaccatgaag

SEQ ID NO: 20471 - DNA, 146 bp, Homo sapiens
  MAP TO AC006427.10; EXPRESSED IN ADULT LIVER, SIGNAL = 1.2; EXPRESSED IN PLACENTA, SIGNAL = 0.95; EXPRESSED IN BT474, SIGNAL = 0.78; EXPRESSED IN BONE MARROW, SIGNAL = 0.7; EXPRESSED IN FETAL LIVER, SIGNAL = 0.64; EXPRESSED IN HEART, SIGNAL = 0.88; EST_HUMAN HIT: BF128551.1, EVALUE 1.20e-01; NT HIT: X13830.1, EVALUE 3.30e-01; SWISSPROT HIT: P43920, EVALUE 2.30e+00
tttgggatcataacaggatcatcaatgcctgcttctactcaaacactgtttctttgattcacacatacattgaaatacacctgtgccttgatgatatctaccaccactacccctcaaccaagacatctgtcagcactggggagtcc

SEQ ID NO: 20472 - DNA, 473 bp, Homo sapiens
  MAP TO AP000021.2; EXPRESSED IN BT474, SIGNAL = 1.2; EXPRESSED IN ADULT LIVER, SIGNAL =   1; EXPRESSED IN FETAL LIVER, SIGNAL =   1; EXPRESSED IN BRAIN, SIGNAL = 1.1; EXPRESSED IN BONE MARROW, SIGNAL = 0.97; EXPRESSED IN PLACENTA, SIGNAL = 1.5; EXPRESSED IN HBL100, SIGNAL = 1.4; EXPRESSED IN HEART, SIGNAL =   1; EST_HUMAN HIT: R87572.1, EVALUE 0.00e+00; SWISSPROT HIT: P11308, EVALUE 6.00e-88; NT HIT: M17254.1, EVALUE 0.00e+00
gtgttggggtatatacccccagttggtgaattccagtatgggtttggggcagcaaaaaaactggaagatgtcacggggagggctggagggtggggcgccacaaagttcatcttctgtgggtgggcgtgataggagcccatgtacgggaggtctgaggggtacttgtacagagatgactccggggggtggggctggagggcctgggcgatcccgtggaagtcgaacttgtaggcgtagcgcttcccatggaccttggtcatgatgttcttgtcatagtagtaacggagggcgcggctgagcttatcgtagttcatgttgggtttgctcttccgctctccccagcgccgggccacctcgtcgggatccgtcatcttgaactccccgttggtgccttcccaggtgatgcagctggagttggagctgtccgacaggagctccaggaggaactgccaaagctggatctggccactgcc

SEQ ID NO: 20473 - DNA, 85 bp, Homo sapiens
  MAP TO AC007790.1; EXPRESSED IN HBL100, SIGNAL =   1; EXPRESSED IN FETAL LIVER, SIGNAL = 0.94; EXPRESSED IN LUNG, SIGNAL = 0.98; EXPRESSED IN HELA, SIGNAL = 0.59; EXPRESSED IN BRAIN, SIGNAL = 0.74; EXPRESSED IN PLACENTA, SIGNAL = 0.83; EXPRESSED IN BT474, SIGNAL = 1.3; EXPRESSED IN BONE MARROW, SIGNAL = 0.8; EXPRESSED IN ADULT LIVER, SIGNAL = 0.77; EXPRESSED IN HEART, SIGNAL = 1.9e+02; NT HIT: gi7108358, EVALUE 1.50e-01; EST_HUMAN HIT: AI739582.1, EVALUE 1.80e-01
cagaggaggctcaaaggctcgaggactcttccatagtggctctcattaggctgtttgactctgataatccagtcaaacagtttat

SEQ ID NO: 20474 - DNA, 335 bp, Homo sapiens
  MAP TO AL022320.23; EXPRESSED IN PLACENTA, SIGNAL = 0.8; EXPRESSED IN FETAL LIVER, SIGNAL = 0.75; EXPRESSED IN LUNG, SIGNAL = 0.86; EXPRESSED IN BT474, SIGNAL = 0.8; EXPRESSED IN HEART, SIGNAL = 0.98; EXPRESSED IN BRAIN, SIGNAL = 0.71; EXPRESSED IN ADULT LIVER, SIGNAL = 0.78; EXPRESSED IN HELA, SIGNAL = 0.83; EXPRESSED IN HBL100, SIGNAL = 0.93; EXPRESSED IN BONE MARROW, SIGNAL = 0.88; EST_HUMAN HIT: AW611542.1, EVALUE 2.00e-81; NT HIT: AF123535.1, EVALUE 1.80e-01; SWISSPROT HIT: P55067, EVALUE 3.70e+00
ctggagaagttgtcttgcagctcctttagatgcttgtcaaaataattccattcagtccaatgatgctggtacaactgattgaggttgtctttccgcttcttcatgctgcacagggtctcgctgatgacatcagtatacgttggggtgcagtcagtggcttccgctgtcaaggaaatccccgtactgtggaactgtgttgacgctgcattattagtggcatgagcgcagtgcatggggaagaggggcatggaggacagaacagggaaaatgccctgcgtttctggataagatacctgaaatctgagcaagagatgactctcctgctctttgaccat

SEQ ID NO: 20475 - DNA, 173 bp, Homo sapiens
  MAP TO AJ006996.1; EXPRESSED IN PLACENTA, SIGNAL = 0.94; EXPRESSED IN HBL100, SIGNAL = 0.74; EXPRESSED IN FETAL LIVER, SIGNAL = 0.78; EXPRESSED IN LUNG, SIGNAL = 0.94; EXPRESSED IN HELA, SIGNAL = 0.63; EXPRESSED IN BRAIN, SIGNAL = 0.7; EXPRESSED IN BT474, SIGNAL = 0.7; EXPRESSED IN BONE MARROW, SIGNAL = 0.87; EXPRESSED IN ADULT LIVER, SIGNAL = 0.76; EXPRESSED IN HEART, SIGNAL =   1; NT HIT: AL163202.2, EVALUE 2.00e-83; SWISSPROT HIT: P11369, EVALUE 1.00e-03; EST_HUMAN HIT: AA835891.1, EVALUE 6.00e-07
aagtgaaagacttgtacactgaaaactacaaaacactgctaaaaaagttaaagaagatctacataaatgaaaatattgggagacttagtattgttatgtttccaattctacccaaagtgatctacaagttcaaagcaattcttatcaaaattccaacagcctctttgcagaaa

SEQ ID NO: 20476 - DNA, 157 bp, Homo sapiens
  MAP TO AC006459.2; EXPRESSED IN BRAIN, SIGNAL = 0.7; EXPRESSED IN HBL100, SIGNAL = 0.7; EXPRESSED IN FETAL LIVER, SIGNAL = 0.68; EXPRESSED IN LUNG, SIGNAL = 0.79; EXPRESSED IN HELA, SIGNAL = 0.78; EXPRESSED IN HEART, SIGNAL = 1.1; EXPRESSED IN PLACENTA, SIGNAL = 0.81; EXPRESSED IN BT474, SIGNAL = 0.85; EST_HUMAN HIT: BE839514.1, EVALUE 3.40e-02; NT HIT: AF229122.1, EVALUE 3.00e-01
atggagccgtgcttcttggaggaagacaagctgaagctagctttgcagctccaacttggaaaagcccccagtggggatgggccgatgttgtagaggacaagcacttctaggtttaagagaaagttcatgaagattcggctaaagtggagagaaaata

SEQ ID NO: 20477 - DNA, 186 bp, Homo sapiens
  MAP TO AC010930.2; EXPRESSED IN BONE MARROW, SIGNAL = 1.7; EXPRESSED IN LUNG, SIGNAL = 1.5; EXPRESSED IN HELA, SIGNAL = 1.7; EXPRESSED IN PLACENTA, SIGNAL = 1.7; EXPRESSED IN HBL100, SIGNAL = 1.8; EXPRESSED IN HEART, SIGNAL = 1.5; EXPRESSED IN BT474, SIGNAL = 1.4; EXPRESSED IN BRAIN, SIGNAL = 1.8; EXPRESSED IN ADULT LIVER, SIGNAL = 2.3; EXPRESSED IN FETAL LIVER, SIGNAL = 1.7; EST_HUMAN HIT: BF674130.1, EVALUE 2.00e-04; NT HIT: gi11464994, EVALUE 2.00e-06; SWISSPROT HIT: P30953, EVALUE 2.00e-06
catccaactcagtggagttatggctatgatagctctgatggtgatggccatactcattcccagcatcacttgaggcgtgagaattctcttgtagtgtagaggcttgcagatggctacatagcggtcaaaagccatggtcagcagcagccccgtctccacagctgtggctaagtggacaaaaaacat

SEQ ID NO: 20478 - DNA, 179 bp, Homo sapiens
  MAP TO AC007736.3; EXPRESSED IN BT474, SIGNAL = 1.2; EXPRESSED IN BONE MARROW, SIGNAL = 1.2; EXPRESSED IN ADULT LIVER, SIGNAL =   1; EXPRESSED IN HEART, SIGNAL = 1.3; EXPRESSED IN PLACENTA, SIGNAL = 1.3; EXPRESSED IN LUNG, SIGNAL = 1.1; EXPRESSED IN HBL100, SIGNAL = 1.2; EXPRESSED IN FETAL LIVER, SIGNAL = 1.1; EXPRESSED IN HELA, SIGNAL = 1.1; EXPRESSED IN BRAIN, SIGNAL = 1.2; NT HIT: AF160355.1, EVALUE 7.00e-03; SWISSPROT HIT: P06126, EVALUE 4.90e+00
ctcagcctcaacaccttttactctcttaagctccacacagcccagctggcccattacacatgaacttgtgtaggatttcttcttcctgcatctcatgtcattgagcatgatccacaccatcctgaagcccttgtcttccttaagatcttctgaatttccttctccttgaccattgttca

SEQ ID NO: 20479 - DNA, 159 bp, Homo sapiens
  MAP TO AL132780.1; EXPRESSED IN PLACENTA, SIGNAL = 1.4; EXPRESSED IN HBL100, SIGNAL = 1.2; EXPRESSED IN BT474, SIGNAL = 1.2; EXPRESSED IN BRAIN, SIGNAL =   1; EXPRESSED IN LUNG, SIGNAL = 1.3; EXPRESSED IN BONE MARROW, SIGNAL = 1.1; EXPRESSED IN HEART, SIGNAL = 1.2; EXPRESSED IN HELA, SIGNAL = 1.4; EXPRESSED IN ADULT LIVER, SIGNAL = 1.8; EXPRESSED IN FETAL LIVER, SIGNAL = 1.5; NT HIT: gi6754399, EVALUE 1.00e-19; EST_HUMAN HIT: AA152464.1, EVALUE 3.00e-26; SWISSPROT HIT: Q90923, EVALUE 1.30e+00
caaactgagaatgatgggtggtactccaatgggccaccaagaagggggtcagtatggaaaccaattccaggtccaggtgacccttactcaccagataatcttcctcacagtacacagagccattgacactgtagaaagccttgcaacgcaaagttcgcc

SEQ ID NO: 20480 - DNA, 196 bp, Homo sapiens
  MAP TO AC007716.1; EXPRESSED IN HBL100, SIGNAL = 1.6; EXPRESSED IN LUNG, SIGNAL = 1.4; EXPRESSED IN ADULT LIVER, SIGNAL = 1.1; EXPRESSED IN BRAIN, SIGNAL = 1.3; EXPRESSED IN HEART, SIGNAL =   1; EXPRESSED IN PLACENTA, SIGNAL = 1.2; EXPRESSED IN BT474, SIGNAL = 1.2; EXPRESSED IN BONE MARROW, SIGNAL = 1.6; EXPRESSED IN FETAL LIVER, SIGNAL = 1.2; EXPRESSED IN HELA, SIGNAL = 1.4; EST_HUMAN HIT: AA743586.1, EVALUE 5.00e-14; NT HIT: AL163267.2, EVALUE 5.00e-16; SWISSPROT HIT: P08547, EVALUE 2.90e-02
  unsure 129
aaaaaatggtagttctatttttagttttttgaggaaattctatacattttctgtagtggttatactaatttacatcctcaccagcagtgtacaagggttcccttttctccacatcctcagcagcacttngttcactttcatctttttgataaaaactgttctaacagttgtgaagtgatatctcattgtagtttga

SEQ ID NO: 20481 - DNA, 80 bp, Homo sapiens
  MAP TO AC010947.2; EXPRESSED IN FETAL LIVER, SIGNAL = 1.9; EXPRESSED IN BRAIN, SIGNAL =   2; EXPRESSED IN LUNG, SIGNAL =   2; EXPRESSED IN HELA, SIGNAL = 2.1; EXPRESSED IN PLACENTA, SIGNAL = 2.1; EXPRESSED IN HEART, SIGNAL = 1.6; EXPRESSED IN ADULT LIVER, SIGNAL = 2.5; EXPRESSED IN BT474, SIGNAL = 1.9; EXPRESSED IN BONE MARROW, SIGNAL = 2.4; EXPRESSED IN HBL100, SIGNAL = 2.1; EST_HUMAN HIT: BE902340.1, EVALUE 9.50e-01; NT HIT: AJ277661.1, EVALUE 2.50e+00
cccactgctgcttgcgtgcactttctccagctggcaccatccagggcagtttgtgttgaggcatcaggtgacaatgcttc

SEQ ID NO: 20482 - DNA, 84 bp, Homo sapiens
  MAP TO AP000010.2; EXPRESSED IN HBL100, SIGNAL = 1.7; EXPRESSED IN HELA, SIGNAL = 1.4; EXPRESSED IN HEART, SIGNAL = 1.3; EXPRESSED IN FETAL LIVER, SIGNAL = 1.1; EXPRESSED IN BRAIN, SIGNAL = 1.1; EXPRESSED IN PLACENTA, SIGNAL = 1.5; EXPRESSED IN ADULT LIVER, SIGNAL = 1.4; EXPRESSED IN BT474, SIGNAL = 1.4; EXPRESSED IN LUNG, SIGNAL =   1; EXPRESSED IN BONE MARROW, SIGNAL = 1.1; NT HIT: Y09912.1, EVALUE 5.80e-01; EST_HUMAN HIT: BE047094.1, EVALUE 3.00e-06
cctcacaccacggctgcagtggctttccccttcacgtttgctcatgaggctgatgcagggcaggtgagacccaaaatcggggct

SEQ ID NO: 20483 - DNA, 203 bp, Homo sapiens
  MAP TO AC007546.5; EXPRESSED IN PLACENTA, SIGNAL =   1; EXPRESSED IN BT474, SIGNAL = 0.78; EXPRESSED IN FETAL LIVER, SIGNAL = 0.78; EXPRESSED IN LUNG, SIGNAL = 0.9; EXPRESSED IN HELA, SIGNAL = 0.7; EXPRESSED IN ADULT LIVER, SIGNAL = 0.9; EXPRESSED IN BONE MARROW, SIGNAL = 0.9; EXPRESSED IN HBL100, SIGNAL = 0.88; EXPRESSED IN BRAIN, SIGNAL = 0.83; EXPRESSED IN HEART, SIGNAL = 0.89; EST_HUMAN HIT: AU116935.1, EVALUE 2.00e-87; NT HIT: AF203431.1, EVALUE 1.00e-53; SWISSPROT HIT: O35594, EVALUE 3.00e-24
gtttaatgaagaggctagaggaggagataaaatttaatttatatatggtaactgaaaaatttcctaaagaattagaaaataagaaaaaggaattacattttttacaaaaagtagtttcagagccagctatgggccattctgatcttcttgaacttgaatctaaagtaagtgagaatcatctttttatagctctcaattttatc

SEQ ID NO: 20484 - DNA, 202 bp, Homo sapiens
  MAP TO AL121760.4; EXPRESSED IN PLACENTA, SIGNAL = 2.1; EXPRESSED IN HEART, SIGNAL = 1.7; EXPRESSED IN HBL100, SIGNAL = 1.8; EXPRESSED IN HELA, SIGNAL = 1.3; EXPRESSED IN FETAL LIVER, SIGNAL = 1.6; EXPRESSED IN BT474, SIGNAL = 1.6; EXPRESSED IN ADULT LIVER, SIGNAL = 1.5; EXPRESSED IN BRAIN, SIGNAL = 1.5; EXPRESSED IN BONE MARROW, SIGNAL = 1.9; EXPRESSED IN LUNG, SIGNAL = 1.4; EST_HUMAN HIT: BE890577.1, EVALUE 1.00e-17; NT HIT: AB023430.1, EVALUE 6.00e-13; SWISSPROT HIT: P01691, EVALUE 9.50e-01
cagacaactcagtgcctggtccagatttaagctccatgtcagggccccctttccagaacttcacacagttgtaggtgccagtgttggctcttgtgatgctagtgatgcacatggaaaagtctgtattgtttctctttgtgatgtctgaaatgcaagctatcttgggaaagtggcctccttttgaactgtagattagttcctg

SEQ ID NO: 20485 - DNA, 145 bp, Homo sapiens
  MAP TO AC007077.2; EXPRESSED IN PLACENTA, SIGNAL = 0.98; EXPRESSED IN BT474, SIGNAL = 0.65; EXPRESSED IN FETAL LIVER, SIGNAL = 0.63; EXPRESSED IN LUNG, SIGNAL = 0.59; EXPRESSED IN BRAIN, SIGNAL = 0.78; EXPRESSED IN BONE MARROW, SIGNAL = 0.67; EXPRESSED IN HEART, SIGNAL = 1.3; NT HIT: U22376.1, EVALUE 2.80e-01; EST_HUMAN HIT: AW958145.1, EVALUE 2.00e-64; SWISSPROT HIT: O06400, EVALUE 1.70e+00
gcttccagccaacactttgtgcaggagaaagtcctcgaactggctccaaaacttttcaattcctgacaaatgcactggcccctctccaaggagctgggcagcaatctgtgctttatgctggtgtgtggtggtggcaataccactg

SEQ ID NO: 20486 - DNA, 191 bp, Homo sapiens
  MAP TO AC005076.2; EXPRESSED IN HEART, SIGNAL = 0.83; EXPRESSED IN ADULT LIVER, SIGNAL = 0.72; EXPRESSED IN PLACENTA, SIGNAL = 0.93; EXPRESSED IN BONE MARROW, SIGNAL = 1.5; EXPRESSED IN LUNG, SIGNAL = 0.95; EXPRESSED IN HELA, SIGNAL = 0.97; EXPRESSED IN BT474, SIGNAL = 2.2; EXPRESSED IN HBL100, SIGNAL = 1.6; EXPRESSED IN FETAL LIVER, SIGNAL = 1.2; EXPRESSED IN BRAIN, SIGNAL = 1.5; SWISSPROT HIT: Q92075, EVALUE 9.60e-01; NT HIT: AF202145.1, EVALUE 3.00e-91; EST_HUMAN HIT: AU138152.1, EVALUE 5.00e-91
acagttacatgagaaccaaaaaaacaacccaacgcttttggagaataaatcaggatctggagttccaaacagtaataccaattccagtgtgcagcatgttcagataagagttgcccgcttggaagataatacagccatctcttctagccccatggcagcattgcagattccagtccagatcacccatgttt

SEQ ID NO: 20487 - DNA, 133 bp, Homo sapiens
  MAP TO AC012064.1; EXPRESSED IN BT474, SIGNAL = 2.2; EXPRESSED IN FETAL LIVER, SIGNAL = 2.2; EXPRESSED IN BONE MARROW, SIGNAL = 2.1; EXPRESSED IN BRAIN, SIGNAL = 2.3; EXPRESSED IN LUNG, SIGNAL = 2.2; EXPRESSED IN HELA, SIGNAL = 1.8; EXPRESSED IN PLACENTA, SIGNAL = 1.9; EXPRESSED IN HBL100, SIGNAL = 2.2; EXPRESSED IN HEART, SIGNAL = 2.1; EXPRESSED IN ADULT LIVER, SIGNAL = 2.7; NT HIT: U59486.1, EVALUE 7.50e-02; EST_HUMAN HIT: AW206581.1, EVALUE 2.00e-30; SWISSPROT HIT: O75949, EVALUE 6.90e-02
ggcctgtgaggatgaagctgtctgtgacagctaccacaaaggttactataggtggacaaatttcaaacaagtttatcaccactaccatccccaccataaaactgtctcaatcaagggcaacacaattcaatat

SEQ ID NO: 20488 - DNA, 106 bp, Homo sapiens
  MAP TO AP000020.2; EXPRESSED IN HBL100, SIGNAL = 2.5; EXPRESSED IN BT474, SIGNAL =   2; EXPRESSED IN FETAL LIVER, SIGNAL = 1.3; EXPRESSED IN ADULT LIVER, SIGNAL = 1.3; EXPRESSED IN BONE MARROW, SIGNAL = 1.8; EXPRESSED IN LUNG, SIGNAL = 1.3; EXPRESSED IN BRAIN, SIGNAL = 1.7; EXPRESSED IN PLACENTA, SIGNAL = 1.9; EXPRESSED IN HELA, SIGNAL = 1.4; EXPRESSED IN HEART, SIGNAL = 2.3; EST_HUMAN HIT: BF449010.1, EVALUE 3.40e-01; NT HIT: AF179287.1, EVALUE 9.00e-01
actggctctttccagcatcacgcctgtactgatgccacagtggacagcctttgatgccacaggaccacagctcaatctcctgattgtgaggagaagagtgggggtg

SEQ ID NO: 20489 - DNA, 105 bp, Homo sapiens
  MAP TO AC006387.3; EXPRESSED IN LUNG, SIGNAL = 0.76; EXPRESSED IN FETAL LIVER, SIGNAL = 1.1; EXPRESSED IN ADULT LIVER, SIGNAL = 0.82; EXPRESSED IN BRAIN, SIGNAL = 1.1; EXPRESSED IN HEART, SIGNAL =   1; EXPRESSED IN PLACENTA, SIGNAL = 0.69; EXPRESSED IN BONE MARROW, SIGNAL = 0.9; EXPRESSED IN HBL100, SIGNAL = 1.3; EXPRESSED IN HELA, SIGNAL = 0.85; NT HIT: gi11421940, EVALUE 1.00e-52; EST_HUMAN HIT: AI915939.1, EVALUE 2.00e-52; SWISSPROT HIT: P31323, EVALUE 5.00e-14
gcagatgtctcaagtattagatgccatgtttgaaaaattggtcaaagatggggagcatgtaattgatcaaggtgacgatggtgacaacttttatgtaattgatag

SEQ ID NO: 20490 - DNA, 130 bp, Homo sapiens
  MAP TO AC007344.2; EXPRESSED IN FETAL LIVER, SIGNAL = 1.2; EXPRESSED IN HELA, SIGNAL = 1.5; EXPRESSED IN ADULT LIVER, SIGNAL = 1.4; EXPRESSED IN BRAIN, SIGNAL = 1.4; EXPRESSED IN HEART, SIGNAL = 1.4; EXPRESSED IN BT474, SIGNAL = 1.1; EXPRESSED IN PLACENTA, SIGNAL = 1.3; EXPRESSED IN LUNG, SIGNAL = 1.5; EXPRESSED IN HBL100, SIGNAL =   1; EXPRESSED IN BONE MARROW, SIGNAL = 1.4; EST_HUMAN HIT: AW241836.1, EVALUE 1.20e+00; SWISSPROT HIT: Q06364, EVALUE 6.90e-02
aagtgggactgggggaaaatccccacaggcaggtcccagtccttgctggctgttggtagggctttgggatgtgggcctgacagcatggagctactgacaacatggcaacttgcttctttgagggcaagaa

SEQ ID NO: 20491 - DNA, 190 bp, Homo sapiens
  MAP TO AC007374.3; EXPRESSED IN PLACENTA, SIGNAL = 0.9; EXPRESSED IN BT474, SIGNAL = 1.9; EXPRESSED IN LUNG, SIGNAL = 0.96; EXPRESSED IN HELA, SIGNAL = 1.1; EXPRESSED IN HBL100, SIGNAL = 1.2; EXPRESSED IN FETAL LIVER, SIGNAL = 1.2; EXPRESSED IN ADULT LIVER, SIGNAL = 1.3; EXPRESSED IN BRAIN, SIGNAL = 1.2; EXPRESSED IN BONE MARROW, SIGNAL = 1.3; EXPRESSED IN HEART, SIGNAL = 1.2; NT HIT: U07563.1, EVALUE 6.00e-37; EST_HUMAN HIT: AA485663.1, EVALUE 1.00e-103; SWISSPROT HIT: P49847, EVALUE 9.70e-01
agccattccagagggcagagtctgcagcaagtacgtgtttgaaatgcttgttccccggtgccgtaaagaaatagtacttgaacataaatttaatttcctcagcaaggccatttttacactttctgcagaaagggtacactcgccagtagttgtgccccatgagtatatagaacaaaggagacagggtcat

SEQ ID NO: 20492 - DNA, 181 bp, Homo sapiens
  MAP TO AC011330.4; EXPRESSED IN BONE MARROW, SIGNAL = 6.4; EXPRESSED IN PLACENTA, SIGNAL = 6.4; EXPRESSED IN HEART, SIGNAL =   5; EXPRESSED IN BT474, SIGNAL = 6.3; EXPRESSED IN LUNG, SIGNAL = 7.7; EXPRESSED IN BRAIN, SIGNAL = 6.9; EXPRESSED IN HELA, SIGNAL = 7.1; EXPRESSED IN HBL100, SIGNAL =   6; EXPRESSED IN ADULT LIVER, SIGNAL =  12; EXPRESSED IN FETAL LIVER, SIGNAL = 7.2; SWISSPROT HIT: P30275, EVALUE 2.00e-21; NT HIT: gi11641403, EVALUE 9.00e-98; EST_HUMAN HIT: BE873170.1, EVALUE 1.00e-97
tagagtcagaactggccgaagcatccgaggactcagtctgcctccagcttgcactcgagcagagcgacgagaggtggaacgtgttgtggtggatgcactgagtggcctgaagggtgacctggctggacgttactataggctcagtgagatgacagaggctgaacagcagcagcttattgat

SEQ ID NO: 20493 - DNA, 170 bp, Homo sapiens
  MAP TO AC012073.1; EXPRESSED IN BONE MARROW, SIGNAL =   4; EXPRESSED IN HELA, SIGNAL = 4.5; EXPRESSED IN PLACENTA, SIGNAL = 3.6; EXPRESSED IN HEART, SIGNAL = 2.8; EXPRESSED IN BRAIN, SIGNAL = 3.8; EXPRESSED IN LUNG, SIGNAL = 3.7; EXPRESSED IN HBL100, SIGNAL = 4.1; EXPRESSED IN BT474, SIGNAL = 3.4; EXPRESSED IN ADULT LIVER, SIGNAL = 4.2; EXPRESSED IN FETAL LIVER, SIGNAL = 3.6; EST_HUMAN HIT: BE901209.1, EVALUE 7.00e-84; NT HIT: U46080.1, EVALUE 2.10e-02; SWISSPROT HIT: P79293, EVALUE 3.00e+00
tagagacccaagtgagcagatcccgtaaacagtctgaagagctgcagagcgtgcaggcccaggaaggtgctcttggaaccaagattcataaactaaggcgtctgcgagatgagctgagggctgtggtgcggcaccggcgagccagcgtgagtagaagggtggtatcagca

SEQ ID NO: 20494 - DNA, 152 bp, Homo sapiens
  MAP TO AC011440.4; EXPRESSED IN BT474, SIGNAL = 6.6; EXPRESSED IN FETAL LIVER, SIGNAL = 7.2; EXPRESSED IN BONE MARROW, SIGNAL = 7.2; EXPRESSED IN LUNG, SIGNAL = 7.7; EXPRESSED IN BRAIN, SIGNAL = 6.8; EXPRESSED IN HELA, SIGNAL = 7.1; EXPRESSED IN HBL100, SIGNAL = 7.3; EXPRESSED IN PLACENTA, SIGNAL = 7.4; EXPRESSED IN ADULT LIVER, SIGNAL = 8.9; EXPRESSED IN HEART, SIGNAL = 5.2; NT HIT: D14547.1, EVALUE 9.00e-14; EST_HUMAN HIT: AA626621.1, EVALUE 6.00e-13; SWISSPROT HIT: P43558, EVALUE 6.60e+00
tggatcatcataaaggtcttcatcatcattgtcttcatgttgagcaggttgaggaggaggaagagagaagttagtcttgctgtctcaggcatggcagaggtggaagatatggaggaggtggaaggagaggcgaaggaggcagtatattcagt

SEQ ID NO: 20495 - DNA, 130 bp, Homo sapiens
  MAP TO AC000105.17; EXPRESSED IN HELA, SIGNAL = 0.88; EXPRESSED IN BRAIN, SIGNAL =   1; EXPRESSED IN HBL100, SIGNAL = 0.78; EXPRESSED IN FETAL LIVER, SIGNAL = 0.82; EXPRESSED IN ADULT LIVER, SIGNAL = 0.81; EXPRESSED IN HEART, SIGNAL =   1; EXPRESSED IN PLACENTA, SIGNAL = 0.82; EXPRESSED IN BT474, SIGNAL = 0.88; EXPRESSED IN BONE MARROW, SIGNAL = 0.89; EXPRESSED IN LUNG, SIGNAL = 1.2; NT HIT: U01149.1, EVALUE 6.30e-02; EST_HUMAN HIT: AW898189.1, EVALUE 2.00e-24
gagatgagatttaagtcaattccaagcatggaaatcggtgaaattaccctccaccgctccaacaacatctctgggcaggcaaggttgggtgggtggaggtgttggttaagggtttggggggttttgacaa

SEQ ID NO: 20496 - DNA, 117 bp, Homo sapiens
  MAP TO AC012113.1; EXPRESSED IN PLACENTA, SIGNAL = 1.3; EXPRESSED IN ADULT LIVER, SIGNAL = 1.5; EXPRESSED IN BT474, SIGNAL = 1.3; EXPRESSED IN FETAL LIVER, SIGNAL = 1.4; EXPRESSED IN BONE MARROW, SIGNAL = 1.4; EXPRESSED IN LUNG, SIGNAL = 1.4; EXPRESSED IN BRAIN, SIGNAL = 1.6; EXPRESSED IN HELA, SIGNAL = 1.5; EXPRESSED IN HBL100, SIGNAL =   1; EXPRESSED IN HEART, SIGNAL = 1.3; NT HIT: AF030001.1, EVALUE 4.00e+00; EST_HUMAN HIT: BE871995.1, EVALUE 1.50e+00; SWISSPROT HIT: P46040, EVALUE 9.00e+00
cagaggacagtgaaggaaggaacagatccacgctccacacctcctgcttgaccggcaggaagaactctacaagctggccctggtgtgcttttgtaatgcattaccagtcgtccctgg

SEQ ID NO: 20497 - DNA, 103 bp, Homo sapiens
  MAP TO AC011589.2; EXPRESSED IN HBL100, SIGNAL = 2.2; EXPRESSED IN HELA, SIGNAL = 2.3; EXPRESSED IN HEART, SIGNAL = 1.8; EXPRESSED IN PLACENTA, SIGNAL = 2.3; EXPRESSED IN ADULT LIVER, SIGNAL = 3.2; EXPRESSED IN BT474, SIGNAL = 2.1; EXPRESSED IN FETAL LIVER, SIGNAL = 2.4; EXPRESSED IN BRAIN, SIGNAL = 2.4; EXPRESSED IN BONE MARROW, SIGNAL = 2.5; EXPRESSED IN LUNG, SIGNAL = 2.7; NT HIT: gi8922700, EVALUE 1.90e-01; SWISSPROT HIT: P06290, EVALUE 7.00e+00; EST_HUMAN HIT: AL042585.1, EVALUE 8.20e-02
ccttctgggtctgggccacagctcctccccgcaattccttgccattgtgaaaggagtttgggtgaagaatggtgggcacaatcaactccttgttggctgcccc

SEQ ID NO: 20498 - DNA, 82 bp, Homo sapiens
  MAP TO AC007380.3; EXPRESSED IN PLACENTA, SIGNAL = 0.67; EXPRESSED IN FETAL LIVER, SIGNAL = 0.61; EXPRESSED IN LUNG, SIGNAL = 0.61; EXPRESSED IN HEART, SIGNAL = 0.82; EXPRESSED IN HELA, SIGNAL = 0.63; EST_HUMAN HIT: BE957439.2, EVALUE 9.80e-01
tgcttcttaccgtcccttatcaagcgctgttgtgtgggggggataatctgctcaaaggcaccaatttcctccttccaacaga

SEQ ID NO: 20499 - DNA, 166 bp, Homo sapiens
  MAP TO AC012123.1; EXPRESSED IN BONE MARROW, SIGNAL = 1.6; EXPRESSED IN LUNG, SIGNAL = 1.5; EXPRESSED IN ADULT LIVER, SIGNAL = 2.1; EXPRESSED IN BT474, SIGNAL = 1.3; EXPRESSED IN BRAIN, SIGNAL = 1.4; EXPRESSED IN HEART, SIGNAL = 1.3; EXPRESSED IN HELA, SIGNAL = 1.7; EXPRESSED IN HBL100, SIGNAL = 1.4; EXPRESSED IN PLACENTA, SIGNAL = 1.3; EXPRESSED IN FETAL LIVER, SIGNAL = 1.7; NT HIT: AL161498.2, EVALUE 8.20e-02; SWISSPROT HIT: Q28172, EVALUE 1.30e+00
acagttgtacccagtgatttttctcaccatgatatccatttctgtctttctactcttctatctcagtttccttatcagccactggaccttcttggtaccagcacctgtatcagtcggggtaggcggtgaccacaatccccaaatcttagtggtttatgtaagtaaa

SEQ ID NO: 20500 - DNA, 247 bp, Homo sapiens
  MAP TO AC007540.3; EXPRESSED IN PLACENTA, SIGNAL = 0.66; EXPRESSED IN BT474, SIGNAL = 0.67; EXPRESSED IN BONE MARROW, SIGNAL = 0.74; EXPRESSED IN FETAL LIVER, SIGNAL = 0.74; EXPRESSED IN LUNG, SIGNAL = 0.63; EXPRESSED IN HELA, SIGNAL = 0.89; EXPRESSED IN ADULT LIVER, SIGNAL = 0.67; EXPRESSED IN HEART, SIGNAL = 0.85; NT HIT: J00734.1, EVALUE 1.50e-01
agtccagaaggagattcaagagggaaaatggacactgtgtaatagaaagtataatgggagctgggcaactgtgctgagcaggagcagggaggatgtcacatggcgagacttccattttagaagtttcagcctggtagctgtgaggaagatggagctcatcagagggttgtggttgttgttgttcttcttcttcctcttcctcttcttcctccccctccccctcccccttctccttcttctccttctt

SEQ ID NO: 20501 - DNA, 104 bp, Homo sapiens
  MAP TO AC007437.16; EXPRESSED IN PLACENTA, SIGNAL = 1.1; EXPRESSED IN BT474, SIGNAL = 0.77; EXPRESSED IN BONE MARROW, SIGNAL = 0.87; EXPRESSED IN HBL100, SIGNAL = 0.77; EXPRESSED IN FETAL LIVER, SIGNAL = 0.76; EXPRESSED IN LUNG, SIGNAL = 0.75; EXPRESSED IN HELA, SIGNAL = 0.72; EXPRESSED IN ADULT LIVER, SIGNAL = 0.75; EXPRESSED IN HEART, SIGNAL = 0.93; NT HIT: AF264017.1, EVALUE 1.90e-01
gtccaactttgtgacccagtgtttcactgtgaacatcattaattgcaataatgttataaaagtaacctttctgcaaataaatcctcctcaggagtatgtgcttg

SEQ ID NO: 20502 - DNA, 100 bp, Homo sapiens
  MAP TO AC011421.2; EXPRESSED IN BT474, SIGNAL = 6.3; EXPRESSED IN FETAL LIVER, SIGNAL = 6.6; EXPRESSED IN BONE MARROW, SIGNAL = 6.5; EXPRESSED IN HELA, SIGNAL = 6.6; EXPRESSED IN PLACENTA, SIGNAL = 5.6; EXPRESSED IN ADULT LIVER, SIGNAL = 7.5; EXPRESSED IN BRAIN, SIGNAL = 6.1; EXPRESSED IN LUNG, SIGNAL = 6.6; EXPRESSED IN HEART, SIGNAL = 5.1; EXPRESSED IN HBL100, SIGNAL = 6.2; EST_HUMAN HIT: BF573751.1, EVALUE 4.90e+00; NT HIT: gi9838361, EVALUE 2.10e-01
tattttgaagtctggagatttcaaagagagcattttctttgggaatagagtcactttctctgctttggctgtgcaagtccaagtgagagtcccttgttct

SEQ ID NO: 20503 - DNA, 373 bp, Homo sapiens
  MAP TO AL080239.11; EXPRESSED IN PLACENTA, SIGNAL = 0.81; EXPRESSED IN FETAL LIVER, SIGNAL = 0.67; EXPRESSED IN LUNG, SIGNAL = 0.86; EXPRESSED IN HEART, SIGNAL = 0.85; EXPRESSED IN BONE MARROW, SIGNAL = 0.69; EXPRESSED IN HELA, SIGNAL = 1.3; EXPRESSED IN ADULT LIVER, SIGNAL = 0.67; EXPRESSED IN BRAIN, SIGNAL = 0.78; NT HIT: Z12822.1, EVALUE 2.00e-01; EST_HUMAN HIT: AL039107.1, EVALUE 2.00e-05; SWISSPROT HIT: Q26264, EVALUE 8.00e-05
aagacaaaaacaatagaatatctaacaataatagtgtattactacaggaagcatacgaaaataaattcaaatcaactggagaaggaccagtcccgagagaactccatcaatcccgtccaagaggaggaggacgaaggcctagactcagctgaaggatcttcacaggaggacgaagacctggactcatctgaaggatcttcacaggaggacgaagacctggactcatctgaaggatcttcacaggaggacgaagacctggactcatctgaaggatcttcacaggaggacgaagacctggactcatctgaaggatcttcacaggaggacgaagacctggacccacctgaaggatcttcacaggaggacgaagacc

SEQ ID NO: 20504 - DNA, 226 bp, Homo sapiens
  MAP TO AC011561.2; EXPRESSED IN PLACENTA, SIGNAL = 2.7; EXPRESSED IN HBL100, SIGNAL = 1.9; EXPRESSED IN HEART, SIGNAL = 2.2; EXPRESSED IN ADULT LIVER, SIGNAL = 2.5; EXPRESSED IN BT474, SIGNAL = 1.9; EXPRESSED IN FETAL LIVER, SIGNAL = 2.1; EXPRESSED IN BONE MARROW, SIGNAL = 2.2; EXPRESSED IN HELA, SIGNAL = 2.2; EXPRESSED IN BRAIN, SIGNAL = 2.1; EXPRESSED IN LUNG, SIGNAL = 2.8; NT HIT: X16236.1, EVALUE 8.40e+00; SWISSPROT HIT: O84645, EVALUE 3.30e-01
tgggtcccagcagttacactcacaacatgctctccagacatttgcagtcctgatttttagccttgctcgagtacccaatatctctctccgaacttacctcaaaagcatgtctttagcagtatctgctgactaccccatctgcaaagcagtccccttcccatcattagctgtagccttcataatcctgctaatcctcaaaagctggtccttagactacgagcagtag

SEQ ID NO: 20505 - DNA, 113 bp, Homo sapiens
  MAP TO AP000134.1; EXPRESSED IN BONE MARROW, SIGNAL = 0.83; EXPRESSED IN FETAL LIVER, SIGNAL = 0.66; EXPRESSED IN HELA, SIGNAL = 0.71; EXPRESSED IN ADULT LIVER, SIGNAL = 0.81; EXPRESSED IN BRAIN, SIGNAL = 0.79; EXPRESSED IN PLACENTA, SIGNAL = 0.69; EXPRESSED IN LUNG, SIGNAL = 0.83; EXPRESSED IN HEART, SIGNAL =   1; SWISSPROT HIT: P40872, EVALUE 6.90e+00; EST_HUMAN HIT: AW235254.1, EVALUE 1.40e+00
ataactcataacccacaaaactgtaatgaagggcaatcccatccgactgaaaaatgggactggaaacaggcactgaacattccagaaggaaagagaggggcacaggggagcgc

SEQ ID NO: 20506 - DNA, 230 bp, Homo sapiens
  MAP TO AL049610.9; EXPRESSED IN BRAIN, SIGNAL = 1.2; EXPRESSED IN HEART, SIGNAL = 0.88; EXPRESSED IN BT474, SIGNAL =   1; EXPRESSED IN BONE MARROW, SIGNAL = 0.81; EXPRESSED IN HBL100, SIGNAL =  17; EXPRESSED IN FETAL LIVER, SIGNAL = 0.75; EXPRESSED IN HELA, SIGNAL = 1.2; EXPRESSED IN ADULT LIVER, SIGNAL = 0.9; EXPRESSED IN PLACENTA, SIGNAL = 0.7; EXPRESSED IN LUNG, SIGNAL = 0.67; NT HIT: gi11419789, EVALUE 1.00e-127; EST_HUMAN HIT: AV721459.1, EVALUE 1.00e-126
gcccaagaccgatgaggagaggcctccggtggagcactctcccgaaaagcagtcccccgaggagcagtcttcggaggagcagtcctcggaggaggagttctttcctgaggagctcttgcctgagctcctgcctgagatgctcctctcggaggagcgccctccgcaggagggtctttccaggaaggacctgtttgaggggcgccctcccatggagcagcctccttgtggag

SEQ ID NO: 20507 - DNA, 214 bp, Homo sapiens
  MAP TO AC005973.2; EXPRESSED IN FETAL LIVER, SIGNAL =   1; EXPRESSED IN PLACENTA, SIGNAL = 1.1; EXPRESSED IN BT474, SIGNAL = 0.86; EXPRESSED IN BONE MARROW, SIGNAL = 1.5; EXPRESSED IN HBL100, SIGNAL = 0.78; EXPRESSED IN LUNG, SIGNAL =   1; EXPRESSED IN HELA, SIGNAL = 0.81; EXPRESSED IN ADULT LIVER, SIGNAL = 0.99; EXPRESSED IN BRAIN, SIGNAL = 1.3; EXPRESSED IN HEART, SIGNAL =   1; NT HIT: AF196344.1, EVALUE 7.00e-03; SWISSPROT HIT: Q44772, EVALUE 1.90e+00
cctctttacctggatgcctcgtgcctgtgcctcccgacctccactgagacaatgtcacctccaggaagtgcccctcacaatcctctcctcccacaataccctgtactgactctttcgtgacaccaattacatttttgtgattgattctcttatctgtctcctctgctagactaagttcttggaggtcagggctgccctcaatacctgtctgtgg

SEQ ID NO: 20508 - DNA, 222 bp, Homo sapiens
  MAP TO AB020867.1; EXPRESSED IN HELA, SIGNAL =   1; EXPRESSED IN HEART, SIGNAL = 0.92; EXPRESSED IN ADULT LIVER, SIGNAL = 1.2; EST_HUMAN HIT: AU130730.1, EVALUE 1.00e-108; NT HIT: gi5453855, EVALUE 1.00e-108; SWISSPROT HIT: O42490, EVALUE 6.30e-02
gattcactggcaaaatttgctggcagaaaactgaaagactgtggagaagatcttcttgtagagatatctgaagtgttgttcaatgaattggctttctttaagcttatgcaagatttggataataatagtataactgttaaacagagatgcaaaaggaaaatagaagcaactggagtgatacaatcttgtgccaaagaggtaaataacgttcattttgatgtt

SEQ ID NO: 20509 - DNA, 116 bp, Homo sapiens
  MAP TO AC009315.1; EXPRESSED IN ADULT LIVER, SIGNAL = 1.1; EXPRESSED IN BT474, SIGNAL = 1.5; EXPRESSED IN BONE MARROW, SIGNAL = 0.66; EXPRESSED IN HBL100, SIGNAL = 1.6; EXPRESSED IN FETAL LIVER, SIGNAL = 1.2; EXPRESSED IN HELA, SIGNAL = 1.6; EXPRESSED IN BRAIN, SIGNAL = 1.1; EXPRESSED IN HEART, SIGNAL =   1; NT HIT: AF155728.1, EVALUE 2.20e-01; EST_HUMAN HIT: BF327032.1, EVALUE 3.80e-01
ttgtccagatggtggtagtgacactacacaaaatccattgtctcaaatctcatgtaatggctagacaatgttcagaaatcccactcgagcatttcaccattttcataataatcatt

SEQ ID NO: 20510 - DNA, 290 bp, Homo sapiens
  MAP TO AF111169.2; EXPRESSED IN BRAIN, SIGNAL = 0.92; EXPRESSED IN HBL100, SIGNAL = 0.81; EXPRESSED IN LUNG, SIGNAL = 0.89; EXPRESSED IN HEART, SIGNAL =   1; EXPRESSED IN PLACENTA, SIGNAL = 0.87; EXPRESSED IN BT474, SIGNAL = 0.82; EXPRESSED IN BONE MARROW, SIGNAL = 0.9; EXPRESSED IN FETAL LIVER, SIGNAL = 0.86; EXPRESSED IN HELA, SIGNAL = 0.92; EXPRESSED IN ADULT LIVER, SIGNAL = 0.93; SWISSPROT HIT: P29315, EVALUE 1.30e+00
atggctgttaccaaactggagctggaagacaattgcatcatggaggagggcgtcttgagcctggtggagatgctacaagagaactactacctccaggagatggtactgtgcccccctgtgctggctcttaccatcatccctggggattcacaacccactggagacaagccagaggccctgccaggacccaggctgcctccaggctcctgcccgcccctgcccttcccacacgacttcttagaggagggccacatgtgagaggctgtgtttcctatggctgtaggaaaacc

SEQ ID NO: 20511 - DNA, 148 bp, Homo sapiens
  MAP TO AP000038.1; EXPRESSED IN ADULT LIVER, SIGNAL = 0.9; EXPRESSED IN BRAIN, SIGNAL = 0.72; EXPRESSED IN BONE MARROW, SIGNAL = 0.68; EXPRESSED IN LUNG, SIGNAL = 0.93; EXPRESSED IN HELA, SIGNAL = 0.77; EXPRESSED IN PLACENTA, SIGNAL = 0.78; EXPRESSED IN BT474, SIGNAL = 0.74; EXPRESSED IN FETAL LIVER, SIGNAL = 0.76; EXPRESSED IN HEART, SIGNAL = 0.93; SWISSPROT HIT: O43426, EVALUE 8.00e-22; NT HIT: gi4507334, EVALUE 3.00e-78; EST_HUMAN HIT: AW375813.1, EVALUE 1.30e+00
ctttcccttcaagagctccagttcctgcatatatcttactgattgaatcaccattcacggaccacattgaccgaaaaacttcttgaaagcgagtcaccaactgaggcttttcagctaaaccaagagcttccaactgtttagctagcat

SEQ ID NO: 20512 - DNA, 139 bp, Homo sapiens
  MAP TO AP000159.1; EXPRESSED IN BT474, SIGNAL = 0.73; EXPRESSED IN BONE MARROW, SIGNAL = 6.6; EXPRESSED IN HBL100, SIGNAL = 0.73; EXPRESSED IN FETAL LIVER, SIGNAL = 0.59; EXPRESSED IN LUNG, SIGNAL = 0.89; EXPRESSED IN HELA, SIGNAL = 0.84; EXPRESSED IN ADULT LIVER, SIGNAL = 0.65; EXPRESSED IN BRAIN, SIGNAL =   1; EXPRESSED IN PLACENTA, SIGNAL = 0.93; EXPRESSED IN HEART, SIGNAL = 0.84; EST_HUMAN HIT: AW966118.1, EVALUE 8.00e-02; SWISSPROT HIT: P55740, EVALUE 3.90e+00
tgtacaacacaggtcagagagctcccgttttgcttctgtgagtgtagatgggatggcccacttcatcctgaggcctttctccagtgttgtgctgtgagacccagtgggtcctcttgccttcaatgtctttgtccttgca

SEQ ID NO: 20513 - DNA, 319 bp, Homo sapiens
  MAP TO AL121748.2; EXPRESSED IN PLACENTA, SIGNAL =   2; EXPRESSED IN HEART, SIGNAL = 1.1; EXPRESSED IN ADULT LIVER, SIGNAL = 1.1; EXPRESSED IN LUNG, SIGNAL = 1.3; EST_HUMAN HIT: AA987327.1, EVALUE 0.00e+00; SWISSPROT HIT: O14786, EVALUE 1.00e-51; NT HIT: AF280547.1, EVALUE 0.00e+00
cccagatcacatcatccaaccaaggggacagaaactggatgcctgaaaacatccgcctggtaaccagtcgctctggctgggcacttccacccgcacctcattcctacatcaatgagtggctccaaatagacctgggggaggagaagatcgtgaggggcatcatcattcagggtgggaagcaccgagagaacaaggtgttcatgaggaagttcaagatcgggtacagcaacaacggctcggactggaagatgatcatggatgacagcaaacgcaaggcgaaggtgagggctggggactgggaggaggtcatcccttatgt

SEQ ID NO: 20514 - DNA, 246 bp, Homo sapiens
  MAP TO AL049780.2; EXPRESSED IN PLACENTA, SIGNAL = 0.73; EXPRESSED IN HBL100, SIGNAL = 0.98; EXPRESSED IN LUNG, SIGNAL = 0.72; EXPRESSED IN HELA, SIGNAL = 0.68; EXPRESSED IN HEART, SIGNAL =   1; EXPRESSED IN BT474, SIGNAL = 0.95; EXPRESSED IN ADULT LIVER, SIGNAL = 0.66; EXPRESSED IN BRAIN, SIGNAL = 0.71; NT HIT: AF195658.1, EVALUE 0.00e+00; SWISSPROT HIT: Q35242, EVALUE 1.60e+00
catatctgagacagaatttgggaggcagaagcaagaggacttggtgagcaatcaaacgtgaaaggaataaaggagaaaacaaaagcaacagtgattctgagggttgtagcatggatggctggaaggatggtggtgccattgacagagaagggacacagatgaggaggaacaaacctgcctaggagttccatcgtgaaggtgggtttagacacagtgaatgtgcctgcaggtggaatgcccagtgga

SEQ ID NO: 20515 - DNA, 333 bp, Homo sapiens
  MAP TO AE000658.1; EXPRESSED IN LUNG, SIGNAL = 2.5; EXPRESSED IN BRAIN, SIGNAL = 2.9; EXPRESSED IN BONE MARROW, SIGNAL = 3.2; EXPRESSED IN HEART, SIGNAL = 2.3; EXPRESSED IN FETAL LIVER, SIGNAL = 2.7; EXPRESSED IN ADULT LIVER, SIGNAL = 2.9; EXPRESSED IN PLACENTA, SIGNAL = 2.4; EXPRESSED IN HELA, SIGNAL = 2.5; EXPRESSED IN HBL100, SIGNAL = 2.8; EXPRESSED IN BT474, SIGNAL = 2.6; NT HIT: AF179733.1, EVALUE 0.00e+00; EST_HUMAN HIT: AA992783.1, EVALUE 3.00e-03; SWISSPROT HIT: Q60888, EVALUE 2.00e-27
gtagactgtgaccacgattaggtgggagccacaggtggagaaggcccggcgcctcccatcagtggtgcgtatcttcaggatggcatttactatgttggcatacgagagcagaattaacatgaagcaactggcggccactaccccgatgtccacaaaggtcacaagctcattgacagttgtgtcagcacaggccagtctcaatactgcggggatgtcacagataaagtaatctacctgattgggcccacagtagggcaggcggaaggtcagggtggcctggatagacccatgcatggagccggcgacccaagctccagccacaaggactgtgca

SEQ ID NO: 20516 - DNA, 199 bp, Homo sapiens
  MAP TO AL023804.1; EXPRESSED IN HEART, SIGNAL = 0.79; EXPRESSED IN PLACENTA, SIGNAL = 1.1; EXPRESSED IN BT474, SIGNAL = 0.98; EXPRESSED IN FETAL LIVER, SIGNAL = 0.93; EXPRESSED IN LUNG, SIGNAL = 0.68; EXPRESSED IN HELA, SIGNAL = 0.92; EXPRESSED IN ADULT LIVER, SIGNAL = 0.98; EXPRESSED IN BONE MARROW, SIGNAL = 1.2; EXPRESSED IN HBL100, SIGNAL = 2.2; SWISSPROT HIT: P95334, EVALUE 2.20e+00; EST_HUMAN HIT: BE278865.1, EVALUE 2.00e-47; NT HIT: AF037349.1, EVALUE 6.00e-31
agatgtgctggagaacaaagagccccgcatccaggcgccggaggtagaactcctcctcggtgtcattgtcgatgatctctcctcgccggaccatgtcctagaaacaaatgaacgtttaggaataaaagctggacagtgaatgggaggaaagaatggactcctagtctggccataatacacacaacaatagcaactataa

SEQ ID NO: 20517 - DNA, 138 bp, Homo sapiens
  MAP TO AE000661.1; EXPRESSED IN BONE MARROW, SIGNAL = 2.5; EXPRESSED IN HEART, SIGNAL = 2.5; EXPRESSED IN PLACENTA, SIGNAL = 2.5; EXPRESSED IN FETAL LIVER, SIGNAL = 2.7; EXPRESSED IN ADULT LIVER, SIGNAL = 2.5; EXPRESSED IN LUNG, SIGNAL = 2.5; EXPRESSED IN HELA, SIGNAL = 2.1; EXPRESSED IN HBL100, SIGNAL =   3; EXPRESSED IN BT474, SIGNAL = 2.8; EXPRESSED IN BRAIN, SIGNAL = 2.7; SWISSPROT HIT: P06310, EVALUE 4.50e-01; NT HIT: X15207.1, EVALUE 3.00e-72
gagtcatgtcagccattgagttggtgcctgaacaccaaacagtgcctgtgtcaataggggtccctgccaccctcaggtgctccatgaaaggagaagcgatcggtaactactatatcaactggtacaggaagacccaag

SEQ ID NO: 20518 - DNA, 383 bp, Homo sapiens
  MAP TO AC012330.5; EXPRESSED IN BT474, SIGNAL = 2.1; EXPRESSED IN LUNG, SIGNAL = 1.6; EXPRESSED IN BRAIN, SIGNAL = 2.3; EXPRESSED IN BONE MARROW, SIGNAL = 2.8; EXPRESSED IN HEART, SIGNAL = 1.7; EXPRESSED IN FETAL LIVER, SIGNAL = 1.6; EXPRESSED IN ADULT LIVER, SIGNAL = 2.1; EXPRESSED IN PLACENTA, SIGNAL = 2.4; EXPRESSED IN HELA, SIGNAL = 2.3; EXPRESSED IN HBL100, SIGNAL = 2.4; NT HIT: gi11417834, EVALUE 0.00e+00; EST_HUMAN HIT: AL042278.1, EVALUE 0.00e+00; SWISSPROT HIT: P52591, EVALUE 1.00e-06
aactgagggtcagctggcagtgggatgaggctggccccctcctccgctttagccccggcaagcctcccgtggagctgtaggagctggagatggcatttcggttggtgcaggagctcgtccaggaggtctgggatgtctggttatatctgatttctgacctctgggcatggaggtctgtctgcagaggcccgggcccgggcacaaagggagagaggcctccattgtcccgcaggggccgaaatgcagacggtgcatccccggtgacctcggggacccttctctgatcaccaggattctcttggactctagggtccttgtcctgctcaggcatccctgccccgctctccttgagggccctcaacactatcttccctggacacaag

SEQ ID NO: 20519 - DNA, 274 bp, Homo sapiens
  MAP TO AF001548.1; EXPRESSED IN BT474, SIGNAL = 1.3; EXPRESSED IN LUNG, SIGNAL = 1.3; EXPRESSED IN HEART, SIGNAL = 1.4; EXPRESSED IN PLACENTA, SIGNAL = 1.7; EXPRESSED IN HBL100, SIGNAL = 1.2; SWISSPROT HIT: P35749, EVALUE 3.00e-28; NT HIT: AF013570.1, EVALUE 0.00e+00; EST_HUMAN HIT: BE835639.1, EVALUE 1.00e-126
ctctccgactcgaagaagaagctgcaggactttgccagcaccgtggaagctctggaagaggggaagaagaggttccagaaggagatcgagaacctcacccagcagtacgaggagaaggcggccgcttatgataaactggaaaagaccaagaacaggcttcagcaggagctggacgacctggttgttgatttggacaaccagcggcaactcgtgtccaacctggaaaagaagcagaggaaatttgatcaggtagagggcgtggggtgtcccccac

SEQ ID NO: 20520 - DNA, 116 bp, Homo sapiens
  MAP TO AF001550.1; EXPRESSED IN BONE MARROW, SIGNAL = 1.3; EXPRESSED IN PLACENTA, SIGNAL = 1.2; EXPRESSED IN ADULT LIVER, SIGNAL = 1.3; EXPRESSED IN LUNG, SIGNAL = 1.1; EXPRESSED IN HEART, SIGNAL = 1.2; EXPRESSED IN HELA, SIGNAL = 1.2; EXPRESSED IN HBL100, SIGNAL = 1.3; EXPRESSED IN BT474, SIGNAL = 1.7; EXPRESSED IN FETAL LIVER, SIGNAL = 1.1; EXPRESSED IN BRAIN, SIGNAL = 1.4; SWISSPROT HIT: Q05996, EVALUE 4.00e-18; NT HIT: gi11525823, EVALUE 3.00e-59
cttctgatacaaaggcaaaagccttcatgtcaaacctctgatagtgatcaggatgggtcacagaggagccgactggatggaaggtggtctggtagttgtccaggtcatatgcacag

SEQ ID NO: 20521 - DNA, 197 bp, Homo sapiens
  MAP TO AF002223.1; EXPRESSED IN BT474, SIGNAL = 4.4; EXPRESSED IN LUNG, SIGNAL =   5; EXPRESSED IN BRAIN, SIGNAL = 5.1; EXPRESSED IN BONE MARROW, SIGNAL = 4.8; EXPRESSED IN HEART, SIGNAL = 3.9; EXPRESSED IN ADULT LIVER, SIGNAL = 6.5; EXPRESSED IN FETAL LIVER, SIGNAL = 4.7; EXPRESSED IN PLACENTA, SIGNAL = 4.9; EXPRESSED IN HELA, SIGNAL = 4.5; EXPRESSED IN HBL100, SIGNAL = 5.3; SWISSPROT HIT: Q13496, EVALUE 1.00e-26; NT HIT: AF020671.1, EVALUE 1.00e-107; EST_HUMAN HIT: AV763090.1, EVALUE 8.00e-90
aaaataagacggtcattgtgcgttgcagtcagcctcttgtcggtatgagtgggaaacgaaataaagatgatgagaaatatctcgatgttatcagggagactaataaacaaatttctaaactcaccatttatgatgcaagacccagcgtaaatgcagtggccaacaaggtgagtggacttaatgatgtgctggacact

SEQ ID NO: 20522 - DNA, 198 bp, Homo sapiens
  MAP TO AF030453.1; EXPRESSED IN PLACENTA, SIGNAL = 3.2; EXPRESSED IN HBL100, SIGNAL = 3.4; EXPRESSED IN LUNG, SIGNAL = 3.3; EXPRESSED IN BRAIN, SIGNAL = 3.4; EXPRESSED IN BONE MARROW, SIGNAL = 3.3; EXPRESSED IN HELA, SIGNAL = 3.3; EXPRESSED IN HEART, SIGNAL = 3.2; EXPRESSED IN BT474, SIGNAL = 3.2; EXPRESSED IN ADULT LIVER, SIGNAL = 4.7; EXPRESSED IN FETAL LIVER, SIGNAL =   3; SWISSPROT HIT: P03103, EVALUE 1.60e+00; NT HIT: AF083501.3, EVALUE 1.80e+00
ctgcggaggtgagcagtaacacgggcttgaaaaccaacgcccacgtattcagcagtgaagcagagactgcgctgtgtgctgtgttcctgaatctgcaggggagagagagactcatacctagtcagcgggtgggagtcactccaggccggagggatgacctgcccaaagagcatctgtgtcctgcccagggaggggtgc

SEQ ID NO: 20523 - DNA, 407 bp, Homo sapiens
  MAP TO AF110324.1; EXPRESSED IN BRAIN, SIGNAL =   1; EXPRESSED IN LUNG, SIGNAL =   1; EXPRESSED IN HEART, SIGNAL = 1.1; EXPRESSED IN HELA, SIGNAL = 0.99; EXPRESSED IN ADULT LIVER, SIGNAL =   1; EST_HUMAN HIT: BE252133.1, EVALUE 3.00e-16; SWISSPROT HIT: Q64127, EVALUE 7.50e-01; NT HIT: gi10181139, EVALUE 0.00e+00
atgagcagaattagttccagcgatgccaactccacgatcagctttggcgatgtagattgtgatttttgcccggtggaagaccacgtggacgccaccaccacggaaacctacatgggcgagtggaagaacgacaagcgcaacggcttcggcgttagcgagcgctccaatggcatgaagtatgaaggggagtgggcaaataacaagaggcatggatatggctgtaccgtgtttcctgacggctccaaagaagagggaaaatacaaaaataatattctggtccgtgggataaggaagcagcttataccaataagacatacaaaaactagggagaaggtggacagagcaattgaaggcgcccaaagggcagctgccatggccagaaccaaagtggaaatagcaaattcaag

SEQ ID NO: 20524 - DNA, 190 bp, Homo sapiens
  MAP TO AL121748.2; EXPRESSED IN PLACENTA, SIGNAL = 1.5; EXPRESSED IN ADULT LIVER, SIGNAL = 1.4; EXPRESSED IN BT474, SIGNAL = 1.9; EXPRESSED IN BONE MARROW, SIGNAL = 3.2; EXPRESSED IN HBL100, SIGNAL = 1.3; EXPRESSED IN HEART, SIGNAL = 1.4; EXPRESSED IN BRAIN, SIGNAL = 1.7; EXPRESSED IN LUNG, SIGNAL = 1.2; NT HIT: gi11430876, EVALUE 1.00e-103; EST_HUMAN HIT: R61632.1, EVALUE 8.00e-80; SWISSPROT HIT: O14786, EVALUE 6.00e-34
gtgataaagtcccccggattccctgaaaaatatcccaacagccttgaatgcacttatattgtctttgtgccaaagatgtcagagattatcctggaatttgaaagctttgacctggagcctgactcaaatcctccaggggggatgttctgtcgctacgaccggctagaaatctgggatggattccctgatg

SEQ ID NO: 20525 - DNA, 979 bp, Homo sapiens
  MAP TO AC004129.1; EXPRESSED IN LUNG, SIGNAL = 1.6; EXPRESSED IN HBL100, SIGNAL = 1.2; EXPRESSED IN HELA, SIGNAL = 1.3; EXPRESSED IN HEART, SIGNAL = 1.1; EXPRESSED IN PLACENTA, SIGNAL = 1.3; EXPRESSED IN ADULT LIVER, SIGNAL = 1.1; EXPRESSED IN FETAL LIVER, SIGNAL = 1.3; EXPRESSED IN BRAIN, SIGNAL =   1; EXPRESSED IN BONE MARROW, SIGNAL =   1; SWISSPROT HIT: P10659, EVALUE 4.10e+00; EST_HUMAN HIT: BF240303.1, EVALUE 0.00e+00
tttcaatgtctttaaattagtatcaaagagcattgcaatgtacactcctatgcccatctcgtgtactcagacaatgaaaatgggtatgacttttgacctaccatttgtggcaatatccctgatcaatttttttctcctttttatcccacaactacagcaagaaaaattccaccctgtcttcaaacctcccagaccgttggaaggacgaattgcccgattaattcagaaccgacgttctctggaggctatagtccagcaaagaccacgttcctgtccagattgtactcctagagttttgtgtaattttcatacctttgtacccagttctaaagaaatggtggcacttagtgataacataccagccggtgtgacccataaaaaccaggatattgaagagaagatcatagaagaacagagcttgctgtctacctatgaactcccatcttgttacccaacaaaagacctaactagcatttatgacataaagccatttccaaaaatcacagatactaaaaagacagaagatttatactggagacagcagtcactaaaaacccaacccacaccttactgtaaaccagaccactggattcactatgaaaatcttaaatctcccctacgtgatcagtataatatgtgtccagaccctgttagccttagtaaacctagtgttttacaaaataaacaagacacggaagctttcactttagaacattttttaagtaagccagaagaagagttgttcttgaatatggaaaacaatgaagaaacaagacctgttcttggttggattcctagagctggagtgaccaaacctcagaccaacctgctggagcttaagaactctttttcaaaaactggtgcacaaaagcgtttccataaatcaattctagaagaccataaagacctcagggataatgagcattcggggatgaagcaccaattctatggccataattcctattatttctataattga

SEQ ID NO: 20526 - DNA, 618 bp, Homo sapiens
  MAP TO AC005754.1; EXPRESSED IN PLACENTA, SIGNAL =   1; EXPRESSED IN HEART, SIGNAL = 1.7; EXPRESSED IN HELA, SIGNAL = 1.2; EXPRESSED IN HBL100, SIGNAL = 1.2; EXPRESSED IN FETAL LIVER, SIGNAL = 1.1; EXPRESSED IN BT474, SIGNAL = 1.3; EXPRESSED IN LUNG, SIGNAL = 2.4; EXPRESSED IN BRAIN, SIGNAL =   2; EXPRESSED IN BONE MARROW, SIGNAL = 1.8; EST_HUMAN HIT: AU127985.1, EVALUE 2.00e-06; SWISSPROT HIT: P33450, EVALUE 8.00e-24; NT HIT: gi11416799, EVALUE 0.00e+00
aaaattctctacagatggtttcaggaagaaggggagattgttctcaatggaacacatcactcttccgttgtctccagagtctagatcagaaacactgaaaacagccagtacagtctctcccgagttctcaggaatagggctgtttactgaagacaaggtcagttccggtgggttgtcgttgacatcaaccacctggactatgactgtagactttccggataggcctccgccatccttggcctcgatgtcgacttcataactattaatcgcttcaaaattcaaatatttgaccagttgcatatcaccagtaattggatttagctgaaaagttttgcgaatttcttcagaagcatgaaaaaatgcatatgatattgtcccaaaacttcctgtatctaagtcagaagccgagacagtgacaatgacagagttaacgggggtattctctagaactgcaacctcatagagcggctgtgcaaattctggtgcattgtcgtttatatctaagacctggatgtttatctgggctgtcccagaccgagggggagagccgccgtccagcgcggtgagcgttaagctgagttccggctgctcctcccgatcgagcgctttatccagtac

SEQ ID NO: 20527 - DNA, 759 bp, Homo sapiens
  MAP TO AL031058.1; EXPRESSED IN LUNG, SIGNAL = 1.6; EXPRESSED IN BRAIN, SIGNAL = 1.1; EXPRESSED IN HELA, SIGNAL = 3.9; EXPRESSED IN PLACENTA, SIGNAL = 2.6; EXPRESSED IN BT474, SIGNAL = 3.8; EXPRESSED IN ADULT LIVER, SIGNAL = 1.2; EXPRESSED IN BONE MARROW, SIGNAL = 0.97; EXPRESSED IN HEART, SIGNAL = 4.5; EXPRESSED IN HBL100, SIGNAL = 1.3; EXPRESSED IN FETAL LIVER, SIGNAL = 2.3; SWISSPROT HIT: P15924, EVALUE 1.00e-112; NT HIT: gi11418893, EVALUE 0.00e+00; EST_HUMAN HIT: AW265328.1, EVALUE 0.00e+00
aaagggtttcccaggagaggactgtgaaggaccaggatatcacgcggttccagaactctctgaaagagctgcagctgcagaagcagaaggtggaagaggagctgaatcggctgaagaggaccgcgtcagaagactcctgcaagaggaagaagctggaggaagagctggaaggcatgaggaggtcgctgaaggagcaagccatcaaaatcaccaacctgacccagcagctggagcaggcatccattgttaagaagaggagtgaggatgacctccggcagcagagggacgtgctggatggccacctgagggaaaagcagaggacccaggaagagctgaggaggctctcttctgaggtcgaggccctgaggcggcagttactccaggaacaggaaagtgtcaaacaagctcacttgaggaatgagcatttccagaaggcgatagaagataaaagcagaagcttaaatgaaagcaaaatagaaattgagaggctgcagtctctcacagagaacctgaccaaggagcacttgatgttagaagaagaactgcggaacctgaggctggagtacgatgacctgaggagaggacgaagcgaagcggacagtgataaaaatgcaaccatcttggaactaaggagccagctgcagatcagcaacaaccggaccctggaactgcaggggctgattaatgatttacagagagagagggaaaatttgagacaggaaattgagaaattccaaaagcaggctttagaggtattca

SEQ ID NO: 20528 - DNA, 111 bp, Homo sapiens
  MAP TO AF055066.1; EXPRESSED IN BT474, SIGNAL = 2.8; EXPRESSED IN BRAIN, SIGNAL = 1.6; EXPRESSED IN BONE MARROW, SIGNAL = 1.7; EXPRESSED IN LUNG, SIGNAL = 2.1; EXPRESSED IN HELA, SIGNAL = 2.3; EXPRESSED IN PLACENTA, SIGNAL = 2.8; EXPRESSED IN HBL100, SIGNAL =   2; EXPRESSED IN HEART, SIGNAL = 1.4; EXPRESSED IN FETAL LIVER, SIGNAL = 2.4; EXPRESSED IN ADULT LIVER, SIGNAL = 1.4; NT HIT: AF055066.1, EVALUE 3.00e-56; SWISSPROT HIT: P94364, EVALUE 1.40e+00; EST_HUMAN HIT: AI693280.1, EVALUE 9.70e-01
tcacctcttctgactggggtcattggccacttgacaggctgtgccctccttgtcagtcagcctgtctacctggtttcctctcagggtgtgtggcttgactgggttaaccat

SEQ ID NO: 20529 - DNA, 576 bp, Homo sapiens
  MAP TO AL121756.6; EXPRESSED IN BONE MARROW, SIGNAL = 2.3; EXPRESSED IN BRAIN, SIGNAL = 1.3; EXPRESSED IN HBL100, SIGNAL =   1; EXPRESSED IN HEART, SIGNAL = 0.96; NT HIT: AB033596.1, EVALUE 3.10e-01; SWISSPROT HIT: P39768, EVALUE 1.90e-01
ccatttcaggcatgctgcagcaaagtgatgctctccactcggccctgagagaggtgcccttgggtaaagcccgtggtgatggtggtgggcctctcctgggcggtctgcttggtggaagtggaagtggaggtggtgggggaggtggtctcctggggggcctgcttggtggtgggggtggagggggtggcagtgatctgttgggtggaggcttactgggtggcagtggcagcagtggtggggagttgctgggtggaggaggtggcagtggtggggggttgctgggtggcagtggtggggggctgctgggtggcagtggtggggggttgctgggtggcagtagaggggggctgctgggtggcagtggtggtggtcttttgggtggtggccgacaccattacaatgactacagacgcattgaattcccccgaggtgttggtgatattccctacaatgacttccatgtccgaggaccccccccagtatataccaacggcaaaaaacttgatggtatttaccagtatggtcacattgagaccaacgacaacactgctcagctggggggcaaataccgatatg

SEQ ID NO: 20530 - DNA, 309 bp, Homo sapiens
  MAP TO AP000014.2; EXPRESSED IN PLACENTA, SIGNAL =  16; EXPRESSED IN HBL100, SIGNAL =  36; EXPRESSED IN ADULT LIVER, SIGNAL = 4.1; EXPRESSED IN BT474, SIGNAL =  21; EXPRESSED IN BONE MARROW, SIGNAL =  16; EXPRESSED IN BRAIN, SIGNAL =  10; EXPRESSED IN HEART, SIGNAL =  12; EXPRESSED IN FETAL LIVER, SIGNAL =  11; EXPRESSED IN LUNG, SIGNAL =  14; EXPRESSED IN HELA, SIGNAL =  15; NT HIT: S78685.1, EVALUE 0.00e+00; EST_HUMAN HIT: AW015600.1, EVALUE 8.00e-07; SWISSPROT HIT: P48051, EVALUE 1.00e-40
catttctttctgtttgctcttcgaggttcttttcttcctcttcagtctccagttctgcatgttggttgagtttgctggatacagaccaactcaggggcagctctgccctgctggctaactcggccagctctttggcactaagggatggggtgctggtctcataggtctcatggaagctgttgtagtcaacttcgtagaacccgtcctccagggtcaggacaggtgtgaaccggtaaccccacaggatctcactggtgatgtaggagcttcgagcttggcatgtcatccctgcagagagaagaatggagg

SEQ ID NO: 20531 - DNA, 292 bp, Homo sapiens
  MAP TO AF031078.1; EXPRESSED IN BRAIN, SIGNAL = 2.2; EXPRESSED IN HELA, SIGNAL = 2.4; EXPRESSED IN HBL100, SIGNAL = 2.7; EXPRESSED IN FETAL LIVER, SIGNAL = 2.2; EXPRESSED IN ADULT LIVER, SIGNAL = 2.4; EXPRESSED IN LUNG, SIGNAL = 2.4; EXPRESSED IN BONE MARROW, SIGNAL = 2.3; EXPRESSED IN PLACENTA, SIGNAL = 2.1; EXPRESSED IN HEART, SIGNAL =   2; EXPRESSED IN BT474, SIGNAL = 2.2; NT HIT: Y12643.1, EVALUE 0.00e+00; SWISSPROT HIT: P51608, EVALUE 2.00e-33; EST_HUMAN HIT: BE797838.1, EVALUE 0.00e+00
ttgatcaaatacacatcatacttcccagcagagcggccagatttcctttgcttaagcttccgtgtccagccttcaggcagggtggggtcatcatacatgggtccccggtcacggatgatggagcgccgctgtttgggggaggcagaagcttccggcacagccggggcggagcctgacccttctgatgtctctgctttgcctgcctctgcgggctcagcagagtggtgggctgatggctgcacgggctcatgcttgccctctttctcttctttcttatctttcttcacctttt

SEQ ID NO: 20532 - DNA, 574 bp, Homo sapiens; identical to SEQ ID NO: 18330
  MAP TO AC010130.3; EXPRESSED IN FETAL LIVER, SIGNAL = 2.7; EXPRESSED IN LUNG, SIGNAL = 3.2; EXPRESSED IN BRAIN, SIGNAL =   6; EXPRESSED IN HELA, SIGNAL = 1.7; EXPRESSED IN PLACENTA, SIGNAL = 1.8; EXPRESSED IN BT474, SIGNAL = 0.95; EXPRESSED IN ADULT LIVER, SIGNAL = 1.4; EXPRESSED IN BONE MARROW, SIGNAL = 1.5; EXPRESSED IN HEART, SIGNAL = 2.4; EXPRESSED IN HBL100, SIGNAL = 1.3; NT HIT: gi11430273, EVALUE 0.00e+00; SWISSPROT HIT: P37275, EVALUE 2.00e-33; EST_HUMAN HIT: BF245591.1, EVALUE 0.00e+00

SEQ ID NO: 20533 - DNA, 120 bp, Homo sapiens
  MAP TO AC012330.5; EXPRESSED IN ADULT LIVER, SIGNAL = 0.99; EXPRESSED IN HEART, SIGNAL = 1.1; EXPRESSED IN BT474, SIGNAL =   1; EXPRESSED IN FETAL LIVER, SIGNAL =   1; EXPRESSED IN BONE MARROW, SIGNAL = 1.1; EXPRESSED IN BRAIN, SIGNAL =   1; EXPRESSED IN PLACENTA, SIGNAL = 0.98; NT HIT: S82821.1, EVALUE 2.30e-01; SWISSPROT HIT: Q03495, EVALUE 6.90e+00; EST_HUMAN HIT: BF244931.1, EVALUE 1.50e+00
gcctcctcagagccccctcccttctcctcgctctccccttaccactgctattcatcatcttactcctacagataccccctcttcgtggtggcaccgggcactagtaactcatggctgtaa

SEQ ID NO: 20534 - DNA, 417 bp, Homo sapiens
  MAP TO AL121838.2; EXPRESSED IN HELA, SIGNAL = 1.4; EXPRESSED IN PLACENTA, SIGNAL = 1.3; EXPRESSED IN HBL100, SIGNAL = 2.8; EXPRESSED IN BT474, SIGNAL = 1.3; EXPRESSED IN BONE MARROW, SIGNAL = 2.3; EXPRESSED IN BRAIN, SIGNAL = 2.6; EXPRESSED IN HEART, SIGNAL = 1.5; EXPRESSED IN FETAL LIVER, SIGNAL = 0.93; EXPRESSED IN LUNG, SIGNAL = 1.4; EST_HUMAN HIT: AI262287.1, EVALUE 1.00e-109; SWISSPROT HIT: P40305, EVALUE 2.00e-07; NT HIT: AF208232.1, EVALUE 8.00e-88
aagacccaggaagctgagggtcacggaacttcagggtgagaagagcttccctcgggctcagcctcagggctggatcttctcgcagctctggtggtcctgtctaggacacttacccacggactgcagagtagccaccaggctccccgcagaaacaccacccccgttggcaatggctgctgcggacatcatcttggctgctatggaggacgcggcgattcctgccccagtgaagcccatggcactgagcaccacgggcacagcccccactgccagggctgtggggagagagaagctgagtgcagaggtgggctcaggagaagggacccttccccccgccccccgcttaggaattccttgacagtttccggagactgtcagcttgagcaatacagagatggcaacttagtggtcttctgg

SEQ ID NO: 20535 - DNA, 346 bp, Homo sapiens
  MAP TO AF042089.1; EXPRESSED IN PLACENTA, SIGNAL = 1.6; EXPRESSED IN HBL100, SIGNAL = 1.1; EXPRESSED IN FETAL LIVER, SIGNAL = 1.1; EXPRESSED IN BT474, SIGNAL = 0.95; EXPRESSED IN BRAIN, SIGNAL = 1.2; EXPRESSED IN LUNG, SIGNAL = 1.3; EXPRESSED IN HEART, SIGNAL = 1.3; NT HIT: AF069601.2, EVALUE 0.00e+00; SWISSPROT HIT: Q15746, EVALUE 2.00e-52; EST_HUMAN HIT: AI425007.1, EVALUE 2.00e-47
ctggccagcaagagggcagggttggccagaggaggaagacggcgaggacatgcgaggggtgctgaagaggtgcatggagacgaggcagcacactgaggaggcgatccaccaggaagagatggagcagctggacttccgagacctcctggggaagaaggtgagtaccaagacactatcggaagatgacctgaaggagatcccagccaagcagatggatctccgtgccaacctgcagtggcaagtgaagccaaagactgtgtgcgaggaagagaggaaggtgcacagcccccagcaggtcgatttctgctctgtcctggccaagaaggggactccaagaccccatgcc

SEQ ID NO: 20536 - DNA, 803 bp, Homo sapiens
  MAP TO AL049576.15; EXPRESSED IN BONE MARROW, SIGNAL = 1.1; EXPRESSED IN HBL100, SIGNAL =   1; EXPRESSED IN HEART, SIGNAL =   2; SWISSPROT HIT: P28221, EVALUE 0.00e+00; NT HIT: gi11423040, EVALUE 0.00e+00; EST_HUMAN HIT: BF196846.1, EVALUE 0.00e+00
cttgccgaaactcttcattaaacacagtgtagattattggattgatgagggagtttaaatagcctagccaggtgaagaagtcaaagagcgccgggtggatccagcaggagtcccggcagatggggaggaccagagacaccacgaagaagggcagccagcagatgataaaggcccccagaatgatgcccaggattttagtggctttcctttctcgagcagcagaaatcctcttgcgttccagggcactgtcagcaagcttgattttcacgtggttgaaaaagagaggggagccagccgagtgcgagtgcccctcatggaggctggagttgagcgagcagagcgaggacccggcagagcctgtgatgaggtgggccgtggtgaagcgcttcccatagagtgagggtggattcaggatgcggttccgggcagcccggtagatccggccatataggatgatgagcaacaccgagggaatgtagaaggccccacaggtggagtagatggtgtaggagatctgagaggtgttcaccagacagtccgacatctcctcctgggccttggcctgccgccagaagagcggggggatggagatgcagatggagatggcccagacaatggcgatcatggtggccgcgtggccagccgtcctgcgtttactgtattccagggcatctgtgattgcccagtacctgtccagagcaatgacacagagatgcaggatggaggctgtgcagcacgtgatgtcagaggacagccagatgtcacacaagatttggccaaagttccaggtgtgggtgatggta

SEQ ID NO: 20537 - DNA, 945 bp, Homo sapiens
  MAP TO AC010930.2; EXPRESSED IN LUNG, SIGNAL = 2.3; EXPRESSED IN BONE MARROW, SIGNAL =   2; EXPRESSED IN BRAIN, SIGNAL = 1.7; EXPRESSED IN HELA, SIGNAL = 2.3; EXPRESSED IN PLACENTA, SIGNAL =   3; EXPRESSED IN BT474, SIGNAL = 1.8; EXPRESSED IN HEART, SIGNAL = 2.8; EXPRESSED IN HBL100, SIGNAL = 1.9; EXPRESSED IN ADULT LIVER, SIGNAL = 2.5; EXPRESSED IN FETAL LIVER, SIGNAL = 2.4; EST_HUMAN HIT: AI138213.1, EVALUE 2.00e-90; SWISSPROT HIT: P23275, EVALUE 2.00e-41; NT HIT: AF079864.1, EVALUE 2.00e-10
tcacggatttgcttggtcttgacaccatagattatgggattgaccatgggtgggaagagcagatagaaattggcaaggaggatgtggacatgaggggcagcatggcgggctacacggtgcatgactgaagagatgaccacagttgtgtagaaggctaagatggcacctatatgagagacacatgtcccaaatgccttgtagcgggcctcctgagaggcaagcagtagaactgcctgaagaataaagatataagacaggataacaaggagcaggtccaacaccacaataaacatggccacagcgatgccatagatattgttgaagctagtgtccccacacgccagcctcaccacagccatgtgttcacagtagcagtgagcgatcactgggcctcggcagtagtggaaacatctcagcaggaaggggagtggagtcattagtgtcacagcccgggccacagcagccatgccaatcttggtgatgagggacccagtcaggaccttggtgtagtgcagtggcttgcagatagccacatagcggtcaaaggccatggccagcagcactgctgactccatgatggagaaggagtgaaggaagaacatctgggccagacaggcaaagaagtttatctcccgatccctgaaccagaatatggcaagcattttgggcagtgctgaggaggaaaggaccaggtcgatggctgccaacatggccagaaagaggtacatgggttcatggagggctgcatcagcctggatgatgagaaggagagtgcagtttccaagcagggccagtgtatatgctaagcagaaagggatggagatccagatgtgcaggtgttccaggcctggaatccccaccaacaagaaggcagttggatgtgttaaggtgatattggaggctgacatggctcctgggaattctcttcctccttatctgcttcca

SEQ ID NO: 20538 - DNA, 155 bp, Homo sapiens
  MAP TO AP000090.1; EXPRESSED IN LUNG, SIGNAL = 1.4; EXPRESSED IN HELA, SIGNAL = 1.4; EXPRESSED IN ADULT LIVER, SIGNAL = 1.2; EXPRESSED IN BRAIN, SIGNAL = 1.2; EXPRESSED IN HEART, SIGNAL = 1.1; EXPRESSED IN BONE MARROW, SIGNAL = 1.1; EXPRESSED IN PLACENTA, SIGNAL = 0.93; EXPRESSED IN BT474, SIGNAL =   1; EXPRESSED IN FETAL LIVER, SIGNAL =   1; EXPRESSED IN HBL100, SIGNAL = 0.85; NT HIT: D87675.1, EVALUE 2.00e-82; EST_HUMAN HIT: AW850332.1, EVALUE 3.60e-01; SWISSPROT HIT: P25448, EVALUE 3.90e+00
ataacaggtgactgtggagggaactggaggttacgaagatcacacaggaacttctgactaccatataaagaagcatatctgtgaagagacagagcgagggtggaagttaaaggaatacacagagttgaatgactggagtgagggatcagggagct

SEQ ID NO: 20539 - DNA, 487 bp, Homo sapiens
  MAP TO AF121781.1; EXPRESSED IN HEART, SIGNAL = 1.6; SWISSPROT HIT: O95447, EVALUE 1.00e-86; EST_HUMAN HIT: BF210479.1, EVALUE 1.00e-103; NT HIT: AL163279.2, EVALUE 0.00e+00
tttgttgtgataatagataatttatgagtgagttcttccctttctgcaaggtttttgtcttcagaaagtttctgcagtgcctgcaagatatctttagtcttcagtaactggctgtcagtttctctaagtttcctagatagagttctttccttttcctgggatttcctaagtagttgccttaaattttttacttcattctgatgtttagccataatttgaggtagattattttgtgaattctcatattttcctatagctttcaaatgcctaagctgaagttgtttcaaaaattggttttctgtaaggatggcttccaatttatgatgcatatcagctaattcattttttagtcctttaattttatgaagccttgctgagagtattcgatgagccatagcatctcttctttgggcaatcatatggatttgagaattaaagagtgatgcattccaggtgtgctttttttcaactgatatttccttctggc

SEQ ID NO: 20540 - DNA, 114 bp, Homo sapiens
  MAP TO AP000070.1; EXPRESSED IN BONE MARROW, SIGNAL = 1.1; EXPRESSED IN BRAIN, SIGNAL = 1.5; EXPRESSED IN HBL100, SIGNAL = 1.5; EXPRESSED IN PLACENTA, SIGNAL = 1.2; EXPRESSED IN HEART, SIGNAL = 1.2; EXPRESSED IN BT474, SIGNAL = 1.5; NT HIT: AF045555.1, EVALUE 9.90e-01; SWISSPROT HIT: P40072, EVALUE 9.00e+00
tgcacagtgacctccttgagggcagaaactttgcctctccaaggcctggtgcagtgctgggcatacatccggtgcccatacttttgttgagttgattctcttgtgctcatttcc

SEQ ID NO: 20541 - DNA, 367 bp, Homo sapiens
  MAP TO AL049563.4; EXPRESSED IN LUNG, SIGNAL = 1.1; EXPRESSED IN HELA, SIGNAL = 1.1; EXPRESSED IN ADULT LIVER, SIGNAL = 1.1; EXPRESSED IN HEART, SIGNAL = 1.1; EXPRESSED IN BONE MARROW, SIGNAL = 0.77; EXPRESSED IN BRAIN, SIGNAL = 1.1; EXPRESSED IN PLACENTA, SIGNAL = 0.9; EXPRESSED IN BT474, SIGNAL = 0.7; EXPRESSED IN FETAL LIVER, SIGNAL = 0.84; EXPRESSED IN HBL100, SIGNAL = 0.81; SWISSPROT HIT: Q9UL62, EVALUE 1.00e-58; EST_HUMAN HIT: AV703092.1, EVALUE 8.60e-02; NT HIT: gi11420764, EVALUE 0.00e+00
ttgtgtacattggctctgaactgggttcagacatatgaccattaaatttggagaataggagacccagtttcttgagagaaggacccatgaaggagcgtttgcttgatgactcagcttttgactttccttgggcaccactggaccttggcatggttctgatgagaggtggcccatggcaagtctttttcttgcagcctaaattaaaagagacactcttggatttggcccgagccccaccactgccatcattattatcgtctctctgagacagttcagtgctgctagtggaaaagctccttggatgttttctatttcccaagaggtcaagcacttcataccgaaagctggagatgtcttgctttaattc

SEQ ID NO: 20542 - DNA, 577 bp, Homo sapiens
  MAP TO AC005291.1; EXPRESSED IN HELA, SIGNAL =   3; EXPRESSED IN PLACENTA, SIGNAL = 4.5; EXPRESSED IN BT474, SIGNAL = 4.5; EXPRESSED IN BRAIN, SIGNAL =   5; EXPRESSED IN HBL100, SIGNAL =   5; EXPRESSED IN HEART, SIGNAL = 3.3; EXPRESSED IN ADULT LIVER, SIGNAL = 3.3; EXPRESSED IN FETAL LIVER, SIGNAL =   3; EXPRESSED IN LUNG, SIGNAL = 4.7; EXPRESSED IN BONE MARROW, SIGNAL = 5.7; EST_HUMAN HIT: BE616139.1, EVALUE 5.40e-01; NT HIT: X61479.1, EVALUE 9.30e-02
ggtgatggtgatgatggtgatagtggtggtgatgatgatgatggtgatggtgatcttgagaaggtggtggtggtggtgatgatggtgatggtggtggtgatgatggtgatggtgatcttgagaaggtggtggtggtggtgatgatggtgatggtggtgatcttgagaaggtggtggtgatgatgatggtgatggtggtggtgatgatgatgatggtgatggtgatcttgagaaggtggtggtggtgatgatgatggtgatgatggtgatcttgagaaggtggcggtgatgatgatgatggtgatgatggtgatcttgagaagatggtgatggtgatgatgatgatggtgatagtggtgatagtgatggtggtgattttaatagtgatgaaggtgatgatggtgataatgatgacggtgatgatgatgatgatgatggtgatgatgacagtcataataatggtagtggtgaagttagaggaaggtgacctcagaatcattttctgctgccaccgctgctgccaatcctcctcaatttccaaccccactgtgtcaaaggcatttggggtgggctggtga

SEQ ID NO: 20543 - DNA, 205 bp, Homo sapiens
  MAP TO AC007629.3; EXPRESSED IN FETAL LIVER, SIGNAL = 0.98; EXPRESSED IN LUNG, SIGNAL = 0.93; EXPRESSED IN HELA, SIGNAL = 1.5; EXPRESSED IN ADULT LIVER, SIGNAL = 1.1; EXPRESSED IN HEART, SIGNAL = 1.2; EXPRESSED IN PLACENTA, SIGNAL = 0.59; EXPRESSED IN BT474, SIGNAL = 0.95; EXPRESSED IN BONE MARROW, SIGNAL = 0.72; EXPRESSED IN HBL100, SIGNAL = 0.99; NT HIT: AB020710.1, EVALUE 1.00e-90; EST_HUMAN HIT: Z21249.1, EVALUE 6.00e-87; SWISSPROT HIT: Q59536, EVALUE 6.40e-02
gcatagaggtacttgctcatatccacaggtcttatattttttctttttgtagactggggaggagaatcctttatggtcacaaatgcttctggctcatcgaatgggttcaaatactgtggagtctgcacctctttaaagggattatagctgttattataaaaagagtcttctgtttttctaggtgaagctgtttcagtgataggtt

SEQ ID NO: 20544 - DNA, 681 bp, Homo sapiens
  MAP TO AL035423.4; EXPRESSED IN PLACENTA, SIGNAL =   1; EXPRESSED IN HBL100, SIGNAL = 0.98; EXPRESSED IN HEART, SIGNAL = 1.7; EXPRESSED IN BT474, SIGNAL =   1; EXPRESSED IN FETAL LIVER, SIGNAL = 1.6; EXPRESSED IN ADULT LIVER, SIGNAL = 1.1; EXPRESSED IN BONE MARROW, SIGNAL = 1.4; EXPRESSED IN HELA, SIGNAL =   1; EXPRESSED IN BRAIN, SIGNAL =   1; EST_HUMAN HIT: AU144507.1, EVALUE 6.50e-01; SWISSPROT HIT: Q28997, EVALUE 3.00e-19; NT HIT: Y09472.1, EVALUE 1.10e-01
cagccacaggtaccgttccagcactaggtagaggtgacactcctggcaggccacctgcacaatgccagtgataaggaagggggtccaggatagagcaaagctcccaatgagaacagacacagtacggagagctttgaagtcgctgggagtccgtggggatcgataacctccagccatggctcctgcatgttccatctttcgaatctgctggctgtgcatggaggcaatcttgagcatgtcgcagtagaagaagacaaagaggagcatggctgggaagaagccaacgcaggagagggtcagcacgaagtgagggtgaaatacagcaaagaagctgcactgccctttgtaggcagtctgctggaacatggggattccgagtgggaggaagccaatgaggtaagacactaaccacagcccggcaatgcaggccccggccacgaacccactcatgatcttcaagtagcggaagggctgcttgatggcaaggtacctgtcaaaggtgatcagcatgaccgtgaggacagaggcagctgcggaggaagtgacaaatgccatccgcaggctgcacagggtcttctgtgtgggccgagaagggctggagagctggtctgtgagtaggccagagatggccacaccaatcaaggtgtcagccacagccagattcaaggtgaagcagagact

SEQ ID NO: 20545 - DNA, 150 bp, Homo sapiens
  MAP TO AJ009612.1; EXPRESSED IN HBL100, SIGNAL = 1.2; EXPRESSED IN PLACENTA, SIGNAL = 0.98; EXPRESSED IN HEART, SIGNAL = 1.1; EXPRESSED IN BT474, SIGNAL = 1.2; EXPRESSED IN FETAL LIVER, SIGNAL = 1.1; EXPRESSED IN ADULT LIVER, SIGNAL = 1.2; EXPRESSED IN BRAIN, SIGNAL = 1.3; EXPRESSED IN BONE MARROW, SIGNAL = 1.3; EXPRESSED IN LUNG, SIGNAL = 0.96; SWISSPROT HIT: O77638, EVALUE 5.90e-01; NT HIT: X52889.1, EVALUE 2.90e-01; EST_HUMAN HIT: AW601317.1, EVALUE 2.20e-02
gcgtgccaggctgatgatgaggtcgtgtgtgatggggtccaccaggttccggaagctggcgtacggatacagaacgtcgtctagcgaggtcgactccatgcccaggtcctgcaagagcaaaggatgcccagaggtcagggctggctgccc

SEQ ID NO: 20546 - DNA, 643 bp, Homo sapiens
  MAP TO AC003037.1; EXPRESSED IN ADULT LIVER, SIGNAL = 8.6; EXPRESSED IN LUNG, SIGNAL =   8; EXPRESSED IN BRAIN, SIGNAL = 6.2; EXPRESSED IN HBL100, SIGNAL = 7.3; EXPRESSED IN HELA, SIGNAL = 6.5; EXPRESSED IN HEART, SIGNAL = 5.7; EXPRESSED IN PLACENTA, SIGNAL =   7; EXPRESSED IN BT474, SIGNAL = 6.4; EXPRESSED IN FETAL LIVER, SIGNAL = 6.1; EXPRESSED IN BONE MARROW, SIGNAL = 7.2; SWISSPROT HIT: P22016, EVALUE 1.90e+00; NT HIT: gi11421055, EVALUE 0.00e+00; EST_HUMAN HIT: AA610816.1, EVALUE 0.00e+00
ccctagagaatgaagtgtactgcaatccaaagcagtctgtgatcgatcgttctgtcaatggattaataaatggcaatgtggtgccttgcaatggtgagataagtggggatttcttgaacaatccttttaaacaggaaaacgttctagcacgtatggttgcatcaaggatcacaaattatccaactgcatgggtggagggtagttcccctgattctgaccttgagtttgtagccaatactaaggcaagggtcaaagagcttcagcaagaggccgaacgcttggaaaaggctttcagaagttaccatcggagagtcattaaaaactctgccaaaagcccactagcagcaaagagcccaccatctctgcacttgctggaagccttcaaaaacattacttccagttccccggaaagacatatttttggagaggacagagttgtctctgagcagcctcaagtgggcacacttgaagaaaggaatgacgtcgtggaagcactgacaggcagtgcagcctcgaggctccgcgggggcacttcctccagacgcctctcttccacaccccttccaaaagcaaaaagaagcctcgaaagtgaaatgtatctggaaggtaagccacccgcacaaagggttgcggggtgctctgg

SEQ ID NO: 20547 - DNA, 577 bp, Homo sapiens
  MAP TO AC005521.1; EXPRESSED IN PLACENTA, SIGNAL = 2.5; EXPRESSED IN ADULT LIVER, SIGNAL = 2.2; EXPRESSED IN BRAIN, SIGNAL = 1.8; EXPRESSED IN HEART, SIGNAL = 1.7; EXPRESSED IN HELA, SIGNAL = 1.6; EXPRESSED IN HBL100, SIGNAL = 1.6; EXPRESSED IN BT474, SIGNAL = 1.5; EXPRESSED IN FETAL LIVER, SIGNAL = 2.1; EXPRESSED IN LUNG, SIGNAL = 2.2; EXPRESSED IN BONE MARROW, SIGNAL = 1.7; EST_HUMAN HIT: AU134583.1, EVALUE 6.00e-07; NT HIT: gi7661831, EVALUE 5.00e-09; SWISSPROT HIT: P53538, EVALUE 3.00e-38
ctccccactcagggtggctgtggtgtgtgtgagcaacatcaacaggagcatggaggcccacagcatcctcaggagaaaagggctaagtgtccggtctttcggaactgaatctcatgtgaggctaccaggacgaagacccaatcatcctgtagtttacgattttgcaacaacatataaggagatgtacaatgacctcctcaggaaagatagagaatgctacacccacaatggaatcttacacatcttgggaagaaatgagagaatcaagcctggcccagaaagatttcaggaatgcactgaattctttgatgtcatctttacctgtgaggagcgtgtctatgacacagtggtggaagatctgtgttccagagaacagcagacctttcagcctgtgcacgtgatcaacatggacatcaaagataccctggaaggtgccatcctgggagctttcctcatctgtgagatttgccagtgcctgcagcagtccgacgacatggaagacagtctggaggagctgctgttgcaaatggaggagaaggcaggaaaaagctttcttcacaccgtctgcttctactga

SEQ ID NO: 20548 - DNA, 1244 bp, Homo sapiens
  MAP TO AC003682.1; EXPRESSED IN BONE MARROW, SIGNAL = 4.3; EXPRESSED IN HELA, SIGNAL = 3.6; EXPRESSED IN PLACENTA, SIGNAL = 4.9; EXPRESSED IN BT474, SIGNAL = 4.2; EXPRESSED IN ADULT LIVER, SIGNAL = 4.7; EXPRESSED IN BRAIN, SIGNAL =   4; EXPRESSED IN HEART, SIGNAL = 3.9; EXPRESSED IN HBL100, SIGNAL = 4.2; EXPRESSED IN FETAL LIVER, SIGNAL = 4.1; EXPRESSED IN LUNG, SIGNAL = 4.8; SWISSPROT HIT: P52741, EVALUE 0.00e+00; EST_HUMAN HIT: BE880254.1, EVALUE 0.00e+00; NT HIT: U09412.1, EVALUE 0.00e+00
gttgttggcatgaagtgaaggatgaagagtcatcttctgaacagagcatttctatagcagtgtcacatgttaatacttccaaggcaggtttgcccgcacagacggctctcccttgtgacatatgtggccccatcttgaaagatattttgcacctggatgaacaccagggtacacaccatggactgaaacttcacacatgtggggcatgtgggagacaattctggttcagtgcaaaccttcatcagtaccagaagtgttacagtatagagcaacccttaagaagggataaaagtgaggcctcaattgtgaagaactgcacagttagcaaagaacctcatccgtcagagaagccctttacgtgtaaggaggagcagaaaaacttccaggctactttgggtggctgccaacaaaaggccatccacagtaagaggaagacacacaggagcactgagagtggggatgcatttcatggtgaacaaatgcattacaagtgcagtgaatgtgggaaagctttcagccgcaaagacacacttgtccagcaccagagaattcatagtggagagaagccttatgagtgcagcgaatgtgggaaagccttcagccgcaaagctacacttgtccagcatcagagaatccatactggagaaaggccttatgaatgcagcgaatgtggaaaaaccttcagtcgaaaagacaaccttactcagcacaagagaatccacactggagaaatgccttataagtgcaatgaatgtgggaaatattttagccatcactccaatctaattgtacaccagagagttcacaatggagcaaggccttataagtgcagtgattgtgggaaagtcttcagacacaaatctacacttgttcagcatgagagtattcacactggagaaaatccttatgattgcagtgattgtgggaaatcctttggccacaaatacaccctcattaaacatcagcgaattcacactgagtcaaagccgtttgagtgcattgaatgcgggaaattctttagtcgaagttctgactatattgcacaccagagggttcacactggtgaaaggccttttgtgtgcagtaaatgtgggaaagactttatcagaacctcccaccttgttcgacaccaaagagttcacactggagaaaggccatatgagtgcagtgaatgtgggaaggcctacagcttaagctcccacctcaatcggcaccagaaagttcacactgcaggcaggctttag

SEQ ID NO: 20549 - DNA, 442 bp, Homo sapiens; identical to SEQ ID NO: 3783
  MAP TO AL009178.4; EXPRESSED IN BONE MARROW, SIGNAL = 1.6; EXPRESSED IN LUNG, SIGNAL = 1.7; EXPRESSED IN PLACENTA, SIGNAL = 1.6; EXPRESSED IN FETAL LIVER, SIGNAL = 1.9; EXPRESSED IN HEART, SIGNAL = 1.7; EXPRESSED IN HELA, SIGNAL = 1.6; EXPRESSED IN HBL100, SIGNAL = 1.6; EXPRESSED IN ADULT LIVER, SIGNAL = 2.7; EXPRESSED IN BT474, SIGNAL = 1.6; EXPRESSED IN BRAIN, SIGNAL = 1.8; SWISSPROT HIT: O35083, EVALUE 3.80e-01; EST_HUMAN HIT: AW338508.1, EVALUE 3.00e-08; NT HIT: AF224669.1, EVALUE 2.80e-01

SEQ ID NO: 20550 - DNA, 1340 bp, Homo sapiens
  MAP TO AL035685.17; EXPRESSED IN HELA, SIGNAL = 1.3; EXPRESSED IN PLACENTA, SIGNAL = 1.2; EXPRESSED IN FETAL LIVER, SIGNAL = 1.5; EXPRESSED IN BRAIN, SIGNAL =   3; EXPRESSED IN LUNG, SIGNAL = 1.3; EXPRESSED IN BONE MARROW, SIGNAL = 1.3; EXPRESSED IN HEART, SIGNAL = 1.6; EXPRESSED IN HBL100, SIGNAL = 1.2; EXPRESSED IN ADULT LIVER, SIGNAL = 1.4; EXPRESSED IN BT474, SIGNAL = 1.2; NT HIT: gi11420793, EVALUE 0.00e+00; EST_HUMAN HIT: T06218.1, EVALUE 3.00e-65; SWISSPROT HIT: Q14721, EVALUE 0.00e+00
atccttgccataatttccatcatgttcatcgtcctctccaccattgccctgtccctcaacacgctgcctgagctacagagcctcgatgagttcggccagtccacagacaacccccagctggcccacgtggaggccgtgtgcatcgcatggttcaccatggagtacctgctgaggttcctctcctcgcccaagaagtggaagttcttcaagggcccactcaatgccattgacttgttggccattctgccatactatgtcaccattttcctcaccgaatccaacaagagcgtgctgcaattccagaatgtccgccgcgtggtccagatcttccgcatcatgcgaattctccgcatccttaagcttgcacgccactccactggcctccagtctctgggcttcactttgcggaggagctacaatgagttgggcttgctcatcctcttccttgccatgggcattatgatcttctccagccttgtcttctttgctgagaaggatgaggacgacaccaagttcaaaagcatcccagcctctttctggtgggccaccatcaccatgactactgttgggtatggagacatctaccccaagactctcctggggaaaattgttgggggactctgctgcattgcaggagtcctggtgattgctcttcccatccccatcatcgtcaataacttctctgagttctataaggagcagaagagacaggagaaagcaatcaaacggcgagaggctctggagagagccaagaggaatggcagcatcgtatccatgaacatgaaggatgcttttgcccggagcattgagatgatggacattgtggttgagaaaaatggggagaatatgggtaagaaagacaaagtacaagataaccacttgtctcctaacaaatggaaatggacaaagaggacactgtctgaaaccagctcaagtaagtcctttgaaaccaaggaacagggatcccctgaaaaagccagatcgtcttctagtcctcagcacctgaacgttcagcagttggaagacatgtacaataagatggccaagacccaatcccaacccatcctcaataccaaggagtcagcagcacagagcaaaccaaaggaagaacttgaaatggagagtatccccagccccgtagcccctctgcccactcgcacagaaggggtcattgacatgcgaagtatgtcaagcattgatagtttcattagctgtgccacagacttccctgaggccaccagattctcccacagccctttgacatcactccccagcaagactgggggcagcacagccccagaagtgggctggcggggagctctgggtgccagtggtggtag

SEQ ID NO: 20551 - DNA, 80 bp, Homo sapiens
  MAP TO AC007444.1; EXPRESSED IN PLACENTA, SIGNAL = 1.5; EXPRESSED IN ADULT LIVER, SIGNAL = 1.4; EXPRESSED IN BRAIN, SIGNAL = 1.1; EXPRESSED IN HEART, SIGNAL = 1.3; EXPRESSED IN FETAL LIVER, SIGNAL = 1.3; EXPRESSED IN BT474, SIGNAL = 1.2; EXPRESSED IN LUNG, SIGNAL = 1.5; EXPRESSED IN BONE MARROW, SIGNAL = 1.3; EXPRESSED IN HBL100, SIGNAL = 1.2; SWISSPROT HIT: P22460, EVALUE 2.40e+00; NT HIT: AB046827.1, EVALUE 6.40e-01
atgaccagatgtcccaccccaattgggctttctgcaggagccaaagagcctggaccttcaggcctgatggtcttcatcag

SEQ ID NO: 20552 - DNA, 90 bp, Homo sapiens
  MAP TO AJ011929.1; EXPRESSED IN PLACENTA, SIGNAL = 2.7; EXPRESSED IN HBL100, SIGNAL = 2.7; EXPRESSED IN HEART, SIGNAL = 2.3; EXPRESSED IN ADULT LIVER, SIGNAL = 3.8; EXPRESSED IN LUNG, SIGNAL = 3.3; EXPRESSED IN BRAIN, SIGNAL = 2.5; EXPRESSED IN HELA, SIGNAL = 2.9; EXPRESSED IN BT474, SIGNAL = 2.5; EXPRESSED IN FETAL LIVER, SIGNAL = 2.8; EXPRESSED IN BONE MARROW, SIGNAL = 2.5; NT HIT: AL163284.2, EVALUE 7.00e-44; EST_HUMAN HIT: AW024518.1, EVALUE 4.80e-02
gggaggatccttccttccctcttcttagtgtctgatggctgctggcatttcttgacccttggccgcatgactccaatctctcccctccat

SEQ ID NO: 20553 - DNA, 1044 bp, Homo sapiens
  MAP TO AC005731.2; EXPRESSED IN PLACENTA, SIGNAL = 1.4; EXPRESSED IN ADULT LIVER, SIGNAL = 1.4; EXPRESSED IN BT474, SIGNAL = 0.91; EXPRESSED IN FETAL LIVER, SIGNAL = 1.1; EXPRESSED IN LUNG, SIGNAL = 0.94; EXPRESSED IN BONE MARROW, SIGNAL = 1.3; EXPRESSED IN BRAIN, SIGNAL = 1.1; EXPRESSED IN HEART, SIGNAL = 0.99; EST_HUMAN HIT: AA808138.1, EVALUE 0.00e+00; SWISSPROT HIT: P51816, EVALUE 0.00e+00; NT HIT: AF012615.1, EVALUE 0.00e+00
cctgagccaccctcaaccaacaagtggcaactggataaatggcttaacaaagtgacatcccagaacaagtcttttatttgtggccaaaatgaaacacccatggagactatttctctgcctcctccaatcatccaaccaatggaagtccagatgaaagtgaagacgaatgccagtcaggtcccagctgaacccaaagaaaggcctctcctcagtctcattagggagaaagcccgtccacggcccactcagaaaattccagaaacaaaggctttgaagcataagttgtcaacaactagtgagacagtgtctcaaaggacaattgggaaaaaacagcccaaaaaagttgagaagaacaccagcactgacgagtttacctggcccaaaccaaatattaccagcagcactcccaaagaaaaagaaagtgtggagcttcatgacccaccaagaggccgcaacaaagccactgcccacaaaccagcccctaggaaagaaccaagacctaacatccctttggctcccgagaagaagaagtacagagggcctggcaagattgtgccaaagtctcgggaattcattgaaacagattcatctacatctgactccaacacagatcaggaagagaccctgcaaatcaaagtcctgcctccgtgcattatttctggaggtaatactgccaaatccaaggaaatctgtggtgccagcctgaccctcagcaccttaatgagtagcagtggcagcaacaacaacttatccatcagtaatgaagagccaacattttcacctattcctgtcatgcaaactgaaatcctgtcccctctgcgagatcatgagaacctgaaaaacctctgggtgaagattgaccttgacttactctctagagtacctggccacagctcactccatgcagcacctgccaagccagaccacaaggagactgccacaaaacccaagcgtcagacagctgtcacagctgtggagaaaccagcccctaagggcaaacgtaagcacaaggtaagctgtctaaagtggcctgccaagtgcttg

SEQ ID NO: 20554 - DNA, 783 bp, Homo sapiens
  MAP TO AC000015.2; EXPRESSED IN PLACENTA, SIGNAL = 2.9; EXPRESSED IN ADULT LIVER, SIGNAL = 1.8; EXPRESSED IN BRAIN, SIGNAL = 1.4; EXPRESSED IN HEART, SIGNAL = 1.9; EXPRESSED IN HELA, SIGNAL = 2.5; EXPRESSED IN HBL100, SIGNAL =   2; EXPRESSED IN BT474, SIGNAL = 2.5; EXPRESSED IN FETAL LIVER, SIGNAL = 1.9; EXPRESSED IN LUNG, SIGNAL = 2.6; EXPRESSED IN BONE MARROW, SIGNAL = 2.4; SWISSPROT HIT: P19246, EVALUE 1.00e-06; EST_HUMAN HIT: AI986247.1, EVALUE 0.00e+00; NT HIT: gi11436660, EVALUE 0.00e+00
agggggacctagaatgagatctggacctagaccactttctggttctcctttctctctctctcctctgcccatctctatcactttctcgttctctgctctgggacctggatttttctcctggggaagaatctttcactcttggctgagatcttttgttctctctagaagtttctcttcttggggacagtgattcagatcttctgctttccctagtagtatccctttttggagaccgagactgagattgcctcctttctcttgcaatatccttttttggggactgagaacgggattttttccggcctctggctgactcattcttaggagatggtgattgagacttcctgctttctttcccagtttctcttctgggagatggagactggggccgcttcttttcttgtggagtgtctttgttgggtgaccaagttgtagatggagaatgaaatctagatcttcgagtacgaggctttttggttttatctatggtatcttttgggctttcagatggttgagaaacagtttcaaccttttcatccgcaagatcagaagacggcatattattttcagaacagtgtgtcacagaattttcattcatttgtttaagatcagcatttacagatggttcaacttcagattcattttggtcactgcaaaatgaatcacactccataggtatcatttcattgttgtcctcactaaaatgcttctgaatctgttcaatgtgtgttttaggcaactctgtagatctaggatgttcggtcagcgattcattcttttctt

SEQ ID NO: 20555 - DNA, 131 bp, Homo sapiens
  MAP TO AL121588.14; EXPRESSED IN BRAIN, SIGNAL = 1.5; EXPRESSED IN BONE MARROW, SIGNAL = 1.5; EXPRESSED IN HBL100, SIGNAL = 1.6; EXPRESSED IN PLACENTA, SIGNAL = 1.6; EXPRESSED IN HEART, SIGNAL = 1.3; EXPRESSED IN LUNG, SIGNAL = 1.4; EXPRESSED IN HELA, SIGNAL = 1.7; EXPRESSED IN ADULT LIVER, SIGNAL = 1.8; EXPRESSED IN BT474, SIGNAL = 1.7; EXPRESSED IN FETAL LIVER, SIGNAL = 2.1; SWISSPROT HIT: P37001, EVALUE 8.90e+00; NT HIT: M74785.1, EVALUE 1.10e+00; EST_HUMAN HIT: AW817785.1, EVALUE 3.00e-01
atgacatcagagctgagctggctggagtctgtgtgtaacgatggagatgagagtctgtggagacccttgaaagatccaaataatcacagaaaaggcttgaaccgggatcttcaagtctatgaggctgaaag

SEQ ID NO: 20556 - DNA, 253 bp, Homo sapiens
  MAP TO AC007245.3; EXPRESSED IN HELA, SIGNAL = 0.8; EXPRESSED IN BRAIN, SIGNAL = 0.74; EXPRESSED IN HEART, SIGNAL = 0.82; EXPRESSED IN BT474, SIGNAL = 0.6; EXPRESSED IN FETAL LIVER, SIGNAL = 1.1; EXPRESSED IN LUNG, SIGNAL = 0.89; EXPRESSED IN ADULT LIVER, SIGNAL = 0.73; EXPRESSED IN PLACENTA, SIGNAL = 0.77; EXPRESSED IN BONE MARROW, SIGNAL = 0.73; NT HIT: AF099117.1, EVALUE 0.00e+00; SWISSPROT HIT: Q03311, EVALUE 6.50e+00
gggagcttcttcaatggggaggatgaacacagcatcatcaagttcagaacgatcaacactgaaaacggcttctgctggcccgtgctttcatggtcattgcaaacacactttaacttgcaaagtatgaggaagggaagtagagaaaagagcaagaagagtaaacccaaaaccaaaagaaagagcttcatccagggaaaccataaaatgtatcctgtaaacctgaacagttctgagtgcaacgtgggcactggta

SEQ ID NO: 20557 - DNA, 236 bp, Homo sapiens
  MAP TO AC009819.2; EXPRESSED IN PLACENTA, SIGNAL = 2.4; EXPRESSED IN HELA, SIGNAL = 2.7; EXPRESSED IN HEART, SIGNAL = 2.4; EXPRESSED IN ADULT LIVER, SIGNAL = 2.8; EXPRESSED IN FETAL LIVER, SIGNAL = 2.7; EXPRESSED IN BRAIN, SIGNAL = 2.5; EXPRESSED IN BT474, SIGNAL = 2.2; EXPRESSED IN LUNG, SIGNAL = 2.3; EXPRESSED IN BONE MARROW, SIGNAL = 2.3; EXPRESSED IN HBL100, SIGNAL = 2.4; NT HIT: gi11421222, EVALUE 8.80e+00; SWISSPROT HIT: P43809, EVALUE 7.30e+00; EST_HUMAN HIT: AA683483.1, EVALUE 2.10e-01
tatcaccagcagcagtaaccaccaccactccaagcctcctctctctgattagactcccaaaaggagacaacagaggatagtgaaaggagaccagtgggaggtgggagagaaggaactggaactgaaaagcccagctcttggggagataaagaaagttgaagctcagaaacttaggaaccaagttcttgccattcggaggaacctggtcacaatgttccaccaagttctgctgtgcc

SEQ ID NO: 20558 - DNA, 234 bp, Homo sapiens
  MAP TO AL035691.17; EXPRESSED IN HEART, SIGNAL = 1.1; NT HIT: AF058764.1, EVALUE 8.00e-03; SWISSPROT HIT: P97929, EVALUE 5.40e+00; EST_HUMAN HIT: BE909656.1, EVALUE 8.30e-01
ctgagaccttagctggaatgcctgcatatagcctccacatgtggccggagtttcttcagctgtggtagctgggttccaagtcaagcaaaaggagagagaaggaagagtaagcgaggtggaagctacatccttcttatgactcattcttggatcacaggacaccaattttgccattgtgatcaggacagtcaccaagccctacccagcttcaaaaagaggaaacctagactctag

SEQ ID NO: 20559 - DNA, 605 bp, Homo sapiens
  MAP TO AC002431.1; EXPRESSED IN LUNG, SIGNAL = 4.3; EXPRESSED IN BONE MARROW, SIGNAL = 3.3; EXPRESSED IN HELA, SIGNAL = 5.4; EXPRESSED IN PLACENTA, SIGNAL = 7.8; EXPRESSED IN BT474, SIGNAL = 7.2; EXPRESSED IN ADULT LIVER, SIGNAL = 3.7; EXPRESSED IN BRAIN, SIGNAL = 3.9; EXPRESSED IN HEART, SIGNAL = 3.5; EXPRESSED IN HBL100, SIGNAL = 5.3; EXPRESSED IN FETAL LIVER, SIGNAL = 5.6; NT HIT: AF053768.1, EVALUE 1.00e-83; SWISSPROT HIT: Q01484, EVALUE 5.20e-02; EST_HUMAN HIT: AW402356.1, EVALUE 1.50e+00
tcaactcgtgctacaccatgagtctttaaactggtccgaccaactggagggtgggtgccaacatcccctgttgggggcactccaggccttgagggagcacctgcttgagggcttgtaaatcttgacagtgcttgggtcacagtattccgagctagttgtttggccactaggttgtcacgacttgtaggcgagacatctcttgacggaggactttgggtagtatttccattttggtctgggtcgttagcattgccctgaaatctaaatctagctgcttggattcgtgggtttagacctggatgcaaagaggtgttggcacatggtgaatgtaaactgtgcataggtggagcttgcgagttctgaggagctatgcctggtgtttgagcggtgggaggggcagcgttactgggaagtgggggtgtgctactggttggatctggtgttgagccagtgcttggtccattttcctcaattttgtttgcacttggaggtgggaaagcgggtacagaagcgccaatcaagtcaccataggaagcctgcctgtcaatacctggtctggccatggtggcactggtgcacacgctcccttttgcatttgcagaaac

SEQ ID NO: 20560 - DNA, 224 bp, Homo sapiens
  MAP TO AC009886.2; EXPRESSED IN BONE MARROW, SIGNAL = 4.2; EXPRESSED IN HBL100, SIGNAL = 4.8; EXPRESSED IN HELA, SIGNAL = 5.8; EXPRESSED IN ADULT LIVER, SIGNAL = 6.6; EXPRESSED IN BRAIN, SIGNAL =   5; EXPRESSED IN LUNG, SIGNAL = 7.1; EXPRESSED IN PLACENTA, SIGNAL = 5.8; EXPRESSED IN HEART, SIGNAL =   5; EXPRESSED IN BT474, SIGNAL = 5.2; EXPRESSED IN FETAL LIVER, SIGNAL = 5.4; SWISSPROT HIT: Q58556, EVALUE 1.00e-11; NT HIT: AF183921.1, EVALUE 4.50e-01; EST_HUMAN HIT: AA209456.1, EVALUE 8.00e-68
  unsure 217
cttctcactatgaaggagggcatgcatggcagcctccctacagagtgctgtcaggtcggcaccaacatagccaactgtcatttctgcaagaaggcccaaatcaacatgactggagatgggcatcttcgaggtaatcacttgcagaatttcctttctttgtttaagtgtgggagtcccaatgaccacctatatgcaaagcaaaacaaaaaaaagaagnaagaagt

SEQ ID NO: 20561 - DNA, 205 bp, Homo sapiens
  MAP TO AC007016.5; EXPRESSED IN FETAL LIVER, SIGNAL = 1.8; EXPRESSED IN ADULT LIVER, SIGNAL = 0.97; EXPRESSED IN LUNG, SIGNAL = 1.1; EXPRESSED IN PLACENTA, SIGNAL = 1.6; EXPRESSED IN HBL100, SIGNAL = 2.4; EXPRESSED IN HEART, SIGNAL = 1.3; SWISSPROT HIT: P12868, EVALUE 2.10e+00; EST_HUMAN HIT: BF338350.1, EVALUE 7.20e-01
tcacattttggggatcacaggagagatgatggtgggtatcagaaggtcttgaaccataaggcctggccctggtacttttttacctaaggcatccccaagtgccttaggatagatatcggcacccaaggggattctcattattaaagacaatttgaacacctcaactgtttcccaaaagaacttgagtaggactgtcttaaaatgt

SEQ ID NO: 20562 - DNA, 145 bp, Homo sapiens
  MAP TO AC007035.2; EXPRESSED IN PLACENTA, SIGNAL = 0.94; EXPRESSED IN BT474, SIGNAL = 1.1; EXPRESSED IN BONE MARROW, SIGNAL = 1.4; EXPRESSED IN HBL100, SIGNAL = 0.93; EXPRESSED IN FETAL LIVER, SIGNAL = 1.2; EXPRESSED IN HEART, SIGNAL = 1.3; EXPRESSED IN LUNG, SIGNAL = 1.5; EXPRESSED IN HELA, SIGNAL = 1.3; EXPRESSED IN ADULT LIVER, SIGNAL =   1; EXPRESSED IN BRAIN, SIGNAL = 1.5; NT HIT: U08988.1, EVALUE 3.00e-16; SWISSPROT HIT: P38138, EVALUE 3.00e+00; EST_HUMAN HIT: AW978843.1, EVALUE 6.00e-19
cactgaagtcgaacttttaattttcttcaagaacttttcctttgcattcacaacttggctaactgtttcatgcaaaatgtctagctttaagcctatcatggcttttgacatgccttcctcactaagcttagtaatttccaccttt

SEQ ID NO: 20563 - DNA, 75 bp, Homo sapiens
  MAP TO AC007221.1; EXPRESSED IN PLACENTA, SIGNAL = 2.7; EXPRESSED IN HBL100, SIGNAL =   3; EXPRESSED IN HEART, SIGNAL = 3.4; EXPRESSED IN BT474, SIGNAL =   3; EXPRESSED IN FETAL LIVER, SIGNAL = 3.1; EXPRESSED IN ADULT LIVER, SIGNAL = 3.7; EXPRESSED IN LUNG, SIGNAL = 3.3; EXPRESSED IN BONE MARROW, SIGNAL = 2.7; EXPRESSED IN BRAIN, SIGNAL = 2.7; EXPRESSED IN HELA, SIGNAL = 3.3; NT HIT: AB033010.1, EVALUE 5.00e-01
tccacatgtctcacagccacacacaaggccatcaactcagacatggtggccaggattctcctagtcttgcaaact

SEQ ID NO: 20564 - DNA, 98 bp, Homo sapiens
  MAP TO AC007029.2; EXPRESSED IN BRAIN, SIGNAL =  26; EXPRESSED IN HELA, SIGNAL =  41; EXPRESSED IN PLACENTA, SIGNAL =  40; EXPRESSED IN HBL100, SIGNAL =  29; EXPRESSED IN HEART, SIGNAL =  28; EXPRESSED IN BT474, SIGNAL =  28; EXPRESSED IN FETAL LIVER, SIGNAL =  39; EXPRESSED IN ADULT LIVER, SIGNAL =  46; EXPRESSED IN BONE MARROW, SIGNAL =  32; EXPRESSED IN LUNG, SIGNAL =  45; EST_HUMAN HIT: AU132248.1, EVALUE 1.00e-12; NT HIT: AJ289880.1, EVALUE 4.00e-09; SWISSPROT HIT: P39188, EVALUE 2.00e-03
ctgaggtgagaaggtcacttgagcccaggtgtttgaggacacagtgagatgcaatggtaccactgtactccagcctgggtgacaaaatgagaccctgt

SEQ ID NO: 20565 - DNA, 1460 bp, Homo sapiens
  MAP TO AC003002.1; EXPRESSED IN HEART, SIGNAL = 2.5; EXPRESSED IN ADULT LIVER, SIGNAL =   2; EXPRESSED IN FETAL LIVER, SIGNAL = 2.5; EXPRESSED IN LUNG, SIGNAL = 2.5; EXPRESSED IN BRAIN, SIGNAL = 2.2; EXPRESSED IN HBL100, SIGNAL = 2.5; EXPRESSED IN HELA, SIGNAL = 2.5; EXPRESSED IN PLACENTA, SIGNAL = 3.2; EXPRESSED IN BT474, SIGNAL = 2.8; EXPRESSED IN BONE MARROW, SIGNAL = 2.3; NT HIT: AB040941.1, EVALUE 5.00e-15; EST_HUMAN HIT: AV683451.1, EVALUE 0.00e+00; SWISSPROT HIT: P52740, EVALUE 1.00e-127
gttcttggcatggagctgaggatgaggaggcaccttcacagcaaggtttttctgtaggagtgtcagaggttacagcttcaaagccctgtctgtccagccagaaggtccaccctagtgagacatgtggcccacccttgaaagacattctgtgcctggttgagcacaatggaattcatcctgagcaacacatatatatttgtgaggcagagctttttcagcacccaaagcagcaaattggagaaaatctttccagaggggatgattggataccttcatttgggaagaaccacagagttcacatggcagaggagatcttcacatgcatggagggctggaaggacttaccagccacctcatgccttctccagcaccagggccctcaaagcgagtggaagccatacagggacacagaggacagagaagcctttcagactggacaaaatgattacaaatgtagtgaatgtgggaaaaccttcacctgcagctattcatttgttgagcaccagaaaatccacacaggagaaaggtcttatgaatgtaacaaatgtgggaaattctttaagtacagtgccaatttcatgaaacatcagacagttcacactagtgaaaggacttatgagtgcagagaatgtggaaaatcctttatgtacaactaccgactcatgagacataagcgagttcacactggagaaaggccttatgagtgcaacacatgtgggaaattctttcggtacagctccacatttgttagacatcagagagttcacaccggagaaaggccgtatgagtgcagggaatgtgggaaattctttatggacagctccacactcattaaacatcagagagttcacaccggagaaagaccttataagtgcaatgattgtgggaaattttttaggtatatctccacactcattagacatcagagaattcacactggagaaaggccttatgagtgcagtgtatgtggggaattgtttaggtacaactccagccttgttaaacattggagaaatcacactggagaaaggccttataaatgcagtgaatgtgggaaatcatttaggtaccactgcaggctcattagacaccagagagtccacacgggagaaaggccttatgagtgcagcgaatgcgggaaattctttcgttacaactccaacctcattaaacattggagaaatcacactggagaaaggccttacgagtgcagagagtgtgggaaagcctttagccacaagcatatacttgttgagcaccagaaaatccacagtggagaaagaccttatgagtgcagcgaatgccagaaggcctttattagaaagtctcacctggttcatcaccagaaaatccacagtgaagagaggcttgtgtgctccatgaatgtggggaattctttagctaaaactccaacctcattaaacatcagagatttcacaatggagaaagtttaccattga

SEQ ID NO: 20566 - DNA, 186 bp, Homo sapiens
  MAP TO AP000065.1; EXPRESSED IN BONE MARROW, SIGNAL = 4.6; EXPRESSED IN LUNG, SIGNAL = 4.1; EXPRESSED IN PLACENTA, SIGNAL = 3.8; EXPRESSED IN HELA, SIGNAL = 5.2; EXPRESSED IN HEART, SIGNAL = 4.8; EXPRESSED IN HBL100, SIGNAL = 5.1; EXPRESSED IN FETAL LIVER, SIGNAL = 4.3; EXPRESSED IN BT474, SIGNAL = 4.6; EXPRESSED IN ADULT LIVER, SIGNAL = 5.1; EXPRESSED IN BRAIN, SIGNAL = 3.7; SWISSPROT HIT: P24077, EVALUE 2.50e-01; NT HIT: gi11423167, EVALUE 1.00e-100; EST_HUMAN HIT: BE782367.1, EVALUE 1.00e-100
tacaagcaggctctgtagaggtctccaggaataggttttcctgcccagcagtcaagttccagcttctcggggtcaggggcgtgcggatcaggctcagctagaatataccgatagccatctttgttaaacgggtgttccaatgggtagccatgagggggaaggcgctgagcagaaaacaaagggtca

SEQ ID NO: 20567 - DNA, 112 bp, Homo sapiens
  MAP TO AP000556.2; EXPRESSED IN BT474, SIGNAL = 1.6; EXPRESSED IN FETAL LIVER, SIGNAL = 2.3; EXPRESSED IN BRAIN, SIGNAL = 1.4; EXPRESSED IN BONE MARROW, SIGNAL = 2.6; EXPRESSED IN HBL100, SIGNAL = 2.1; EXPRESSED IN PLACENTA, SIGNAL = 3.1; EXPRESSED IN LUNG, SIGNAL = 2.1; EXPRESSED IN HEART, SIGNAL = 2.2; EXPRESSED IN HELA, SIGNAL = 2.3; EXPRESSED IN ADULT LIVER, SIGNAL = 1.8; EST_HUMAN HIT: BE670661.1, EVALUE 1.00e-56; NT HIT: AF012872.1, EVALUE 7.00e-57; SWISSPROT HIT: P42356, EVALUE 6.00e-16
ggtgtggcctccatcttgccccccatgatcatcaccatctcatccgtcagcttgatgtcgggttcccagccgagattgccgcccggcgagctttcaaacatgaagccaaagt

SEQ ID NO: 20568 - DNA, 674 bp, Homo sapiens
  MAP TO AB019441.1; EXPRESSED IN HEART, SIGNAL = 6.1; EXPRESSED IN HBL100, SIGNAL =  20; EXPRESSED IN BT474, SIGNAL =  13; EXPRESSED IN FETAL LIVER, SIGNAL =  17; EXPRESSED IN ADULT LIVER, SIGNAL = 3.9; EXPRESSED IN BRAIN, SIGNAL = 4.2; EXPRESSED IN BONE MARROW, SIGNAL =  14; EXPRESSED IN LUNG, SIGNAL =  31; EXPRESSED IN PLACENTA, SIGNAL =  18; EXPRESSED IN HELA, SIGNAL =  15; NT HIT: gi4506742, EVALUE 0.00e+00; EST_HUMAN HIT: AU133202.1, EVALUE 0.00e+00; SWISSPROT HIT: P09058, EVALUE 1.00e-107
cgccgagcgatgggcacctctcgggacaactggcacaagggccgcaaagctgggggcaagagaaggccctgccacaagaagcggaagtatgagttggggcgcccagctgccaacagcaagactgacccgtgccgcatccacacagtccgtgtgcgaggaggtaacaagaaatactgtgccccgaggctggacgtggggaatttctcctggggctcagaatgctgcgctggtgaaacaagggtcatcgatgttgtctacaatgcatccaataacgagctggttcgtaccaagaccgtggtgaagaattgcatcgtgcccatcgacagcacgccctaccgacagtggtacgagtcccactgtgcactgcccctgggccgcaagaagggagccaagctgactcctgaggaagaagagattttaaacaaaaaacgatctaaaaaaattcagaagaaatatgatgaaaggaagaagaatgccaaaatgagcagtctcctgggggagcagttccagcagggcaagcttcttgcgtgcatggcttcaaggccgggacagtgtggccgagcagatggctatgtgctagagggcaaagagttggagttctatcttaggaaaatcaaggcccagaaaggcaaataaatccttgttttgtcttcacccatgtaataaaggtgttt

SEQ ID NO: 20569 - DNA, 179 bp, Homo sapiens
  MAP TO AC006387.3; EXPRESSED IN PLACENTA, SIGNAL = 0.74; EXPRESSED IN BONE MARROW, SIGNAL = 0.69; EXPRESSED IN BT474, SIGNAL = 0.62; EXPRESSED IN FETAL LIVER, SIGNAL = 0.73; EXPRESSED IN LUNG, SIGNAL = 0.65; EXPRESSED IN HEART, SIGNAL = 0.96; SWISSPROT HIT: P13837, EVALUE 6.70e+00; NT HIT: M80588.1, EVALUE 1.60e+00; EST_HUMAN HIT: AW835527.1, EVALUE 4.20e-01
ttttgaaggttattcctaaccataagacagttccctataccgcctgttatgcattcatagatggcattagcacagctgctgtttgttcagtatgccccaccgacgtccatgaaatctttgcattgacatttactattgctttcaaggactacttgaaagcaattacttgttctaataag

SEQ ID NO: 20570 - DNA, 188 bp, Homo sapiens
  MAP TO AC009965.3; EXPRESSED IN FETAL LIVER, SIGNAL = 5.6; EXPRESSED IN BONE MARROW, SIGNAL = 4.9; EXPRESSED IN HBL100, SIGNAL = 5.1; EXPRESSED IN BT474, SIGNAL = 5.1; EXPRESSED IN ADULT LIVER, SIGNAL = 6.8; EXPRESSED IN BRAIN, SIGNAL = 4.4; EXPRESSED IN LUNG, SIGNAL = 5.9; EXPRESSED IN PLACENTA, SIGNAL = 4.6; EXPRESSED IN HEART, SIGNAL = 4.3; EXPRESSED IN HELA, SIGNAL = 5.6; EST_HUMAN HIT: BF184645.1, EVALUE 6.50e-01; NT HIT: Z97344.2, EVALUE 1.70e+00; SWISSPROT HIT: Q92597, EVALUE 6.40e+00
cttcttctctaagcctcctgttctgaaactccataccccttcttgagaaagttcccatttctagattttttaggttctttattaggctagtgggccatatgccaagtctgagtctgacagtcatgagcagagctttagactccagcccactgggcagctgaagcttattattcttagtaatgcaggtg

SEQ ID NO: 20571 - DNA, 75 bp, Homo sapiens
  MAP TO AC006317.3; EXPRESSED IN BT474, SIGNAL = 0.78; EXPRESSED IN BONE MARROW, SIGNAL = 0.75; EXPRESSED IN BRAIN, SIGNAL = 0.79; EXPRESSED IN PLACENTA, SIGNAL = 0.85; EXPRESSED IN HEART, SIGNAL = 0.79; EXPRESSED IN ADULT LIVER, SIGNAL = 0.66; EXPRESSED IN LUNG, SIGNAL = 0.94; EXPRESSED IN FETAL LIVER, SIGNAL = 0.68; NT HIT: L77885.1, EVALUE 5.00e-01; EST_HUMAN HIT: AI065086.1, EVALUE 1.00e-02
taccttaagacacagagctacattctcatttggattgtaaacagtagtgtgttggtaatacttaacaaccagctc

SEQ ID NO: 20572 - DNA, 281 bp, Homo sapiens
  MAP TO AC007746.1; EXPRESSED IN HEART, SIGNAL = 0.8; EXPRESSED IN PLACENTA, SIGNAL = 0.68; EXPRESSED IN BONE MARROW, SIGNAL = 0.71; EXPRESSED IN FETAL LIVER, SIGNAL = 0.9; EXPRESSED IN LUNG, SIGNAL = 0.68; SWISSPROT HIT: Q10223, EVALUE 3.70e+00; NT HIT: AJ003165.1, EVALUE 1.50e-01; EST_HUMAN HIT: AW373315.1, EVALUE 1.80e-01
gtgattccggattttatgctgctatcaaactgcatgtcctacagcaccccactctcagttgcatgcagtacttgaacacatcagccatgattttgcttaaagtccccaccattacccctagatttcttgacagaaaccagcagactaaagcttcatccctccccaacttctcccaatacctcacgtcattagatcactttactgtttgtttgcttgggcttctcccatcctcagacatcatcgctgctcaaggatctgccattcttcctaggggtgggtaa

SEQ ID NO: 20573 - DNA, 252 bp, Homo sapiens
  MAP TO AC010807.2; EXPRESSED IN PLACENTA, SIGNAL = 1.3; EXPRESSED IN HELA, SIGNAL = 1.8; EXPRESSED IN HEART, SIGNAL = 1.4; EXPRESSED IN ADULT LIVER, SIGNAL = 1.7; EXPRESSED IN FETAL LIVER, SIGNAL = 1.8; EXPRESSED IN HBL100, SIGNAL = 1.5; EXPRESSED IN BT474, SIGNAL = 1.8; EXPRESSED IN BRAIN, SIGNAL = 1.3; EXPRESSED IN LUNG, SIGNAL = 1.7; EXPRESSED IN BONE MARROW, SIGNAL = 1.4; NT HIT: AL161579.2, EVALUE 8.00e-03; EST_HUMAN HIT: AL040338.1, EVALUE 0.00e+00; SWISSPROT HIT: P42945, EVALUE 3.00e-03
cttttcgccataggcagccgccagcactgtttttgtgacatactgttcaaaaagcaagatgaggagaatccagaggaatttctctgcacccagtgtatcaacaagttgaacaaggatgggcaggcgcctgtgctccgggacgtgtggcagcgcatccacaaatacactaatgatttttaccacaatctcttcaacgtttcttgaaacttctatagaatctccactatcagactgcaaaacagcaagcagaga

SEQ ID NO: 20574 - DNA, 82 bp, Homo sapiens
  MAP TO AB016897.1; EXPRESSED IN HELA, SIGNAL = 1.7; EXPRESSED IN LUNG, SIGNAL = 0.67; EXPRESSED IN BRAIN, SIGNAL = 0.97; EXPRESSED IN BONE MARROW, SIGNAL = 1.5; EXPRESSED IN HEART, SIGNAL = 0.83; EXPRESSED IN ADULT LIVER, SIGNAL = 0.85; EXPRESSED IN PLACENTA, SIGNAL = 0.59; EXPRESSED IN FETAL LIVER, SIGNAL = 3.3; NT HIT: AL161501.2, EVALUE 5.60e-01; EST_HUMAN HIT: AW992151.1, EVALUE 2.60e+00
cacagcagagctctgataacattttaatatgcgccgatgccagatattcaggctgcctacccaaaagtgaaagttttagttg

SEQ ID NO: 20575 - DNA, 205 bp, Homo sapiens
  MAP TO AC009307.1; EXPRESSED IN ADULT LIVER, SIGNAL = 0.68; EXPRESSED IN BT474, SIGNAL = 0.66; EXPRESSED IN HELA, SIGNAL = 0.78; EXPRESSED IN HEART, SIGNAL = 0.83; EXPRESSED IN PLACENTA, SIGNAL = 0.63; EXPRESSED IN BONE MARROW, SIGNAL = 0.69; EXPRESSED IN HBL100, SIGNAL = 0.71; EXPRESSED IN FETAL LIVER, SIGNAL = 0.74; EXPRESSED IN LUNG, SIGNAL = 0.81; EXPRESSED IN BRAIN, SIGNAL = 0.74; NT HIT: U57843.1, EVALUE 1.60e+00; EST_HUMAN HIT: BE076073.1, EVALUE 1.00e-112; SWISSPROT HIT: Q91739, EVALUE 7.30e-01
cacatacactattgtcacctacgtccttgtccatgtcccccagcagactcaactcctgggtgtctctggcatctctggcatctgtacaaagatgctatctctgaagtcaggagtagcccacagtcctgttgcacatggtcagaaggctggcatgtcagaccacatgcaaggggcctctaacaatcccacaacaggctgcacctga

SEQ ID NO: 20576 - DNA, 127 bp, Homo sapiens
  MAP TO AC007720.1; EXPRESSED IN PLACENTA, SIGNAL = 0.63; EXPRESSED IN BONE MARROW, SIGNAL = 0.74; EXPRESSED IN FETAL LIVER, SIGNAL = 0.59; EXPRESSED IN LUNG, SIGNAL = 0.78; EXPRESSED IN ADULT LIVER, SIGNAL = 0.72; EXPRESSED IN BT474, SIGNAL = 0.64; EXPRESSED IN HBL100, SIGNAL = 1.6; EXPRESSED IN HELA, SIGNAL = 0.69; EXPRESSED IN BRAIN, SIGNAL = 0.95; EXPRESSED IN HEART, SIGNAL = 0.82; NT HIT: X97398.1, EVALUE 2.40e-01; SWISSPROT HIT: O69552, EVALUE 4.00e+00; EST_HUMAN HIT: AW298322.1, EVALUE 7.20e-02
tttgccagttctgggctgtgcctttgagacaactgtcagcatccttttctttgctcttgggagaccccttttcataagccatgatagaggaagtctggctccccttctggaaataccacgtggagcg

SEQ ID NO: 20577 - DNA, 282 bp, Homo sapiens
  MAP TO AC010812.2; EXPRESSED IN BRAIN, SIGNAL = 1.7; EXPRESSED IN BONE MARROW, SIGNAL = 1.7; EXPRESSED IN LUNG, SIGNAL = 2.4; EXPRESSED IN HBL100, SIGNAL = 1.7; EXPRESSED IN HEART, SIGNAL =   2; EXPRESSED IN PLACENTA, SIGNAL = 1.7; EXPRESSED IN HELA, SIGNAL =   2; EXPRESSED IN ADULT LIVER, SIGNAL =   2; EXPRESSED IN BT474, SIGNAL = 1.8; EXPRESSED IN FETAL LIVER, SIGNAL = 2.1; EST_HUMAN HIT: AA682994.1, EVALUE 1.00e-14; SWISSPROT HIT: Q06577, EVALUE 4.10e-01
tcctgaattggatggggaggatggggaaggtgacatgtaccatccatgtggagccccttctcccacctcggaggatgaagagtatcttaccatcaactctacatgccaaggccagctaccctgtgaagaatgtttggaggcagattctgggaccattcccttgccacagttctgctcttggggcactgtcccagagtctttgcctccagaagagtccccagagagtgggagtgaatgggaagacctggaggagcctgtggccctggaatacggtgccctcag

SEQ ID NO: 20578 - DNA, 125 bp, Homo sapiens
  MAP TO AC007052.4; EXPRESSED IN HELA, SIGNAL = 1.1; EXPRESSED IN PLACENTA, SIGNAL = 1.1; EXPRESSED IN HBL100, SIGNAL = 0.91; EXPRESSED IN HEART, SIGNAL = 1.1; EXPRESSED IN FETAL LIVER, SIGNAL = 1.1; EXPRESSED IN ADULT LIVER, SIGNAL = 1.1; EXPRESSED IN LUNG, SIGNAL = 1.1; EXPRESSED IN BONE MARROW, SIGNAL =   1; EST_HUMAN HIT: AW879122.1, EVALUE 1.80e-02; SWISSPROT HIT: O31046, EVALUE 5.20e+00; NT HIT: X69776.1, EVALUE 2.40e-01
gctgtggtcatcaacaagatgccccaagtgatgaagcagggagaatttgccaggcttccaatgggctggaaaaaatctctctcaagcctatcatcctcagctgtgactccacactcaccatctaa

SEQ ID NO: 20579 - DNA, 672 bp, Homo sapiens
  MAP TO AC004099.1; EXPRESSED IN PLACENTA, SIGNAL = 1.9; EXPRESSED IN FETAL LIVER, SIGNAL =   1; EXPRESSED IN ADULT LIVER, SIGNAL = 1.2; EXPRESSED IN BONE MARROW, SIGNAL = 1.3; EXPRESSED IN LUNG, SIGNAL = 1.3; EXPRESSED IN BRAIN, SIGNAL = 1.3; EXPRESSED IN HEART, SIGNAL =   1; EXPRESSED IN HELA, SIGNAL = 0.98; EXPRESSED IN HBL100, SIGNAL = 0.97; EXPRESSED IN BT474, SIGNAL = 2.4; NT HIT: gi11428008, EVALUE 0.00e+00; EST_HUMAN HIT: AW502213.1, EVALUE 0.00e+00; SWISSPROT HIT: O42726, EVALUE 1.00e-01
ctgcagcaggaggatgctggccactaactgttggtaaatccaaagagctatcagacatgacatgcttaagatctcctcccacatcagccaatttcatgtcaaactgaacagagagtgcatcttcagagtcctccttgccaacactgctgccaccaatggaagggagatctaaggacttcactgatgcagagtcttctttggtgtgtctgaaagccactgctttctctcccagggatttgtccgagtttatggaagaaaatttactggagtggaagtcagcaaaatcatcatcactttttcctgaaggagtgttatctttcaggtcttcaacacctagtccagacccttccagagaaagttgtctgaagacatcgtacttggtagacgcagcagtcgagttttgtccacccttcactgtgctgcccacgttgctggttagaggaacaggactggcttcctctttaagggcatcatatttgtcatccggcttttgctcagatgaaatagagctattactgaaagccataaaatctgcaaagtcatcctgctccccaacaggtgctagaccagaatattccccaaaaaggctgaattctccaaaatcatcagccaaactagaagtttttgttgctgccaatgctgtcatagtagcagcagaacctgttgactgtg

SEQ ID NO: 20580 - DNA, 672 bp, Homo sapiens
  MAP TO AC000382.1; EXPRESSED IN LUNG, SIGNAL = 1.9; EXPRESSED IN PLACENTA, SIGNAL = 2.8; EXPRESSED IN HEART, SIGNAL = 1.9; EXPRESSED IN BT474, SIGNAL = 1.6; EXPRESSED IN ADULT LIVER, SIGNAL = 1.8; EXPRESSED IN BRAIN, SIGNAL = 1.1; NT HIT: AL163202.2, EVALUE 2.00e-79; EST_HUMAN HIT: AW976364.1, EVALUE 6.00e-99; SWISSPROT HIT: P18175, EVALUE 8.00e-12
tcagaccacagcaggagagttctggaatcctatgtgagggacaaactttcagaccaaagcaggagtgttcttaaatcctatatgaagaacaaacattcagaccccaggagcactgttctgaaatcctatgataagggcaaacattcagaccccaacatgaatgttctggaatcctatgtgagggacaaacattcagaccctcgtagcactgttctggaatcctatgtgaggtacaaacattcagaccacgacaacaatgctcaggaatcctatgtgagggacaaacattcagaccctcgtagcactgttctggaatcctatgtgaggtacaaacattcagaccacagcaacaatgctcaggaatcctatgtgagggacaaacattcagaccctcgtagcagtgttctggaatcttatgtgagggacaaacattcaaaccacagcagcagtgttctggaatcctacgtgaaggacaaactttcagaccacagcaggagagttctggaatcctatgtgagggacaaactttcagaccaaagcaggagtgttcttaaatcctatatgaagaacaaacattcagaccccaggagcactgttctgaaatcctatgataagggcaaacattcagaccccaacatgaatgttctggaatcctatgtgagggacaagcat

SEQ ID NO: 20581 - DNA, 591 bp, Homo sapiens
  MAP TO AC002081.1; EXPRESSED IN ADULT LIVER, SIGNAL = 3.5; EXPRESSED IN BRAIN, SIGNAL = 3.2; EXPRESSED IN BONE MARROW, SIGNAL = 1.8; EXPRESSED IN PLACENTA, SIGNAL = 3.9; EXPRESSED IN HELA, SIGNAL = 2.9; EXPRESSED IN HBL100, SIGNAL =   2; EXPRESSED IN BT474, SIGNAL = 2.1; EXPRESSED IN FETAL LIVER, SIGNAL = 2.9; EXPRESSED IN LUNG, SIGNAL = 3.2; EXPRESSED IN HEART, SIGNAL = 2.4; SWISSPROT HIT: Q14832, EVALUE 1.00e-112; NT HIT: gi11419226, EVALUE 0.00e+00; EST_HUMAN HIT: AW953443.1, EVALUE 0.00e+00
cacaacaacacacccttggtcaaagcatcgggccgagaactctgctacatcttattgtttggggttggcctgtcatactgcatgacattcttcttcattgccaagccatcaccagtcatctgtgcattgcgccgactcgggctggggagttccttcgctatctgttactcagccctgctgaccaagacaaactgcattgcccgcatcttcgatggggtcaagaatggcgctcagaggccaaaattcatcagccccagttctcaggttttcatctgcctgggtctgatcctggtgcaaattgtgatggtgtctgtgtggctcatcctggaggccccaggcaccaggaggtatacccttgcagagaagcgggaaacagtcatcctaaaatgcaatgtcaaagattccagcatgttgatctctcttacctacgatgtgatcctggtgatcttatgcactgtgtacgccttcaaaacgcggaagtgcccagaaaatttcaacgaagctaagttcataggttttaccatgtacaccacgtgcatcatctggttggccttcctccctatattttatgtgacatcaagtgactacaga

SEQ ID NO: 20582 - DNA, 537 bp, Homo sapiens
  MAP TO AC005185.1; EXPRESSED IN PLACENTA, SIGNAL = 2.3; EXPRESSED IN HELA, SIGNAL = 1.9; EXPRESSED IN HEART, SIGNAL = 1.8; EXPRESSED IN HBL100, SIGNAL = 1.9; EXPRESSED IN BT474, SIGNAL = 1.7; EXPRESSED IN FETAL LIVER, SIGNAL = 2.2; EXPRESSED IN ADULT LIVER, SIGNAL = 2.6; EXPRESSED IN BRAIN, SIGNAL = 1.8; EXPRESSED IN BONE MARROW, SIGNAL = 1.8; EXPRESSED IN LUNG, SIGNAL = 2.4; NT HIT: U93163.1, EVALUE 0.00e+00; EST_HUMAN HIT: AI479347.1, EVALUE 1.00e-117; SWISSPROT HIT: P43366, EVALUE 5.00e-74
atgatggaaacctgagcaatgattgggactttcccaggaatgggcttctgatgcctctcctgggtgtgatcttcttaaagggcaactctgccaccgaggaagagatctggaaattcatgaatgtgttgggagcctatgatggagaggagcacttaatctatggggaaccccgtaagttcatcacccaagatctggtgcaggaaaaatatctgaagtacgagcaggtgcccaacagtgatcccccacgctatcaattcctatggggtccgagagcctatgctgaaaccaccaagatgaaagtcctcgagtttttggccaagatgaatggtgccactccccgtgacttcccatcccattatgaagaggctttgagagatgaggaagagagagcccaagtccgatccagtgttagagccaggcgtcgcactactgccacgacttttagagcgcgttctagagccccattcagcaggtcctcccaccccatgtgagaactcaggcagattgttcactttgtttttgtggcaagatgccaac

SEQ ID NO: 20583 - DNA, 133 bp, Homo sapiens
  MAP TO AC009296.1; EXPRESSED IN ADULT LIVER, SIGNAL = 0.91; EXPRESSED IN PLACENTA, SIGNAL = 0.78; EXPRESSED IN BT474, SIGNAL = 0.83; EXPRESSED IN HBL100, SIGNAL =   3; EXPRESSED IN LUNG, SIGNAL = 0.74; EXPRESSED IN HELA, SIGNAL =   1; EXPRESSED IN BRAIN, SIGNAL = 0.87; EXPRESSED IN HEART, SIGNAL = 0.87; EXPRESSED IN BONE MARROW, SIGNAL = 0.88; EXPRESSED IN FETAL LIVER, SIGNAL = 0.7; EST_HUMAN HIT: R02594.1, EVALUE 7.00e-06; NT HIT: AL163280.2, EVALUE 8.00e-17
atctttagagaaaggcatagacatgtctttcagcacatccttaactttgacaaataaacctcctaaaatgattgagactttcttggtcattttcgttgattgacagtacctatgagtcacgtgggaaacctgt

SEQ ID NO: 20584 - DNA, 89 bp, Homo sapiens
  MAP TO AC009974.3; EXPRESSED IN BT474, SIGNAL = 5.6; EXPRESSED IN FETAL LIVER, SIGNAL =   7; EXPRESSED IN BONE MARROW, SIGNAL = 5.2; EXPRESSED IN PLACENTA, SIGNAL = 6.7; EXPRESSED IN HBL100, SIGNAL = 4.9; EXPRESSED IN HELA, SIGNAL = 6.5; EXPRESSED IN ADULT LIVER, SIGNAL = 7.1; EXPRESSED IN BRAIN, SIGNAL = 4.8; EXPRESSED IN LUNG, SIGNAL = 8.1; EXPRESSED IN HEART, SIGNAL = 5.1; NT HIT: gi4503210, EVALUE 2.00e-37; EST_HUMAN HIT: AI444640.1, EVALUE 3.00e-37; SWISSPROT HIT: Q02318, EVALUE 5.00e-09
tctctaccctgtggtccccacaaactcccggatcatagaaaaggaaattgaagttgatggcttcctcttccccaagaacgtgagtgggc

SEQ ID NO: 20585 - DNA, 116 bp, Homo sapiens
  MAP TO AC010825.2; EXPRESSED IN FETAL LIVER, SIGNAL = 1.4; EXPRESSED IN BONE MARROW, SIGNAL = 1.1; EXPRESSED IN PLACENTA, SIGNAL = 0.99; EXPRESSED IN HBL100, SIGNAL = 1.1; EXPRESSED IN BT474, SIGNAL = 1.1; EXPRESSED IN ADULT LIVER, SIGNAL = 1.3; EXPRESSED IN BRAIN, SIGNAL = 1.1; EXPRESSED IN LUNG, SIGNAL = 1.3; EXPRESSED IN HEART, SIGNAL = 1.8; EXPRESSED IN HELA, SIGNAL = 1.3; NT HIT: AL163283.2, EVALUE 2.20e-01; EST_HUMAN HIT: AW848295.1, EVALUE 4.00e-06; SWISSPROT HIT: Q01839, EVALUE 6.90e+00
tggggcatgtcagcttctaccaaggtttcaaaagtgtttcaaacagtctggggcctcaggcagagacttgtcacaggggtggagccattgcagagagcccctgtgaagacaatgtc

SEQ ID NO: 20586 - DNA, 432 bp, Homo sapiens
  MAP TO AC005674.9; EXPRESSED IN FETAL LIVER, SIGNAL =   1; EXPRESSED IN HELA, SIGNAL = 1.3; EXPRESSED IN BRAIN, SIGNAL = 1.2; EXPRESSED IN HEART, SIGNAL = 0.87; EXPRESSED IN PLACENTA, SIGNAL = 0.97; EXPRESSED IN BONE MARROW, SIGNAL = 1.1; EXPRESSED IN BT474, SIGNAL = 1.2; EXPRESSED IN ADULT LIVER, SIGNAL = 0.9; EXPRESSED IN LUNG, SIGNAL = 1.2; EXPRESSED IN HBL100, SIGNAL = 0.87; EST_HUMAN HIT: BF037713.1, EVALUE 0.00e+00; NT HIT: AF149412.1, EVALUE 0.00e+00; SWISSPROT HIT: P42674, EVALUE 2.40e+00
atgaagatctgtagcctcaccctgctctccttcctcctactggctgctcaggtgctcctggtggaggggaaaaaaaaagtgaagaatggacttcacagcaaagtggtctcagaacaaaaggacactctgggcaacacccagattaagcagaaaagcaggcccgggaacaaaggcaagtttgtcaccaaagaccaagccaactgcagatgggctgctactgagcaggaggagggcatctctctcaaggttgagtgcactcaattggaccatgaattttcctgtgtctttgctggcaatccaacctcatgcctaaagctcaaggatgagagagtctattggaaacaagttgcccggaatctgcgctcacagaaagacatctgtagatattccaagacagctgtgaaaaccagagtgtgcagaaaggattttcca

SEQ ID NO: 20587 - DNA, 129 bp, Homo sapiens
  MAP TO AC005497.2; EXPRESSED IN BT474, SIGNAL = 0.93; EXPRESSED IN BONE MARROW, SIGNAL =   1; EXPRESSED IN HBL100, SIGNAL = 0.7; EXPRESSED IN LUNG, SIGNAL = 0.93; EXPRESSED IN BRAIN, SIGNAL = 0.72; EXPRESSED IN PLACENTA, SIGNAL = 1.1; EXPRESSED IN FETAL LIVER, SIGNAL = 0.71; EXPRESSED IN ADULT LIVER, SIGNAL = 0.92; EXPRESSED IN HEART, SIGNAL = 1.3; EST_HUMAN HIT: AA232771.1, EVALUE 4.30e-01; SWISSPROT HIT: O02799, EVALUE 4.00e+00
ggactgctccacttcctcatccccttcaaaaggcttgaacctgctctctacattcaccgtgtgccttcctcatgcctcatgcatatttcaaaccacctcaacacagatggcttccaaatcttcatcctc

SEQ ID NO: 20588 - DNA, 123 bp, Homo sapiens
  MAP TO AP000337.1; EXPRESSED IN LUNG, SIGNAL = 0.87; EXPRESSED IN BRAIN, SIGNAL = 0.74; EXPRESSED IN HEART, SIGNAL =   1; EXPRESSED IN PLACENTA, SIGNAL = 0.65; EXPRESSED IN BT474, SIGNAL = 0.83; EXPRESSED IN BONE MARROW, SIGNAL = 0.96; EXPRESSED IN ADULT LIVER, SIGNAL = 1.5; EXPRESSED IN HELA, SIGNAL = 0.97; EXPRESSED IN FETAL LIVER, SIGNAL = 1.7; EXPRESSED IN HBL100, SIGNAL = 0.82; NT HIT: AF146340.1, EVALUE 1.10e+00; SWISSPROT HIT: P20169, EVALUE 9.00e+00; EST_HUMAN HIT: AA815438.1, EVALUE 7.00e-02
ggctccatgtatattctcaccttgggctacttcttccacaaaaaagtggacgaccaggagctctgcctgaaattctgcctattgagaggatatgcccttatcaccatttttcaaggtcacccc

SEQ ID NO: 20589 - DNA, 228 bp, Homo sapiens
  MAP TO AL121959.4; EXPRESSED IN BT474, SIGNAL =   1; EXPRESSED IN BONE MARROW, SIGNAL = 0.93; EXPRESSED IN BRAIN, SIGNAL = 0.96; EXPRESSED IN HBL100, SIGNAL = 1.2; EXPRESSED IN HEART, SIGNAL =   1; EXPRESSED IN ADULT LIVER, SIGNAL = 1.3; EST_HUMAN HIT: R59232.1, EVALUE 1.40e-01; SWISSPROT HIT: Q14524, EVALUE 1.00e+00; NT HIT: AJ249902.1, EVALUE 1.40e-01
gccaaaaggccccttgaaggggctccaggggtgttttttgctccctgggaccaccgtcccaagtagtagttctggggacgattcctcttccttctccctcagtcctgttccattgttctcgccattctctcgccctgtcagcagcctcacactgtcctgcagccagagcccgggacctgtacatgagtctcctgtgagggtacaagcagggctgagggctatacttgc

SEQ ID NO: 20590 - DNA, 79 bp, Homo sapiens
  MAP TO AC005100.2; EXPRESSED IN ADULT LIVER, SIGNAL = 0.69; EXPRESSED IN HEART, SIGNAL = 0.86; EXPRESSED IN PLACENTA, SIGNAL = 0.61; NT HIT: X82943.1, EVALUE 2.50e+00; SWISSPROT HIT: P13033, EVALUE 1.40e+00; EST_HUMAN HIT: BE250198.1, EVALUE 6.00e-02
ccccttcccccaccatgcacacagcagcctgaggaggaggccaaagtgtaccttcgggagaagacagagaaaatttcag

SEQ ID NO: 20591 - DNA, 232 bp, Homo sapiens
  MAP TO AP000247.1; EXPRESSED IN ADULT LIVER, SIGNAL = 0.87; EXPRESSED IN BRAIN, SIGNAL =   1; EXPRESSED IN HEART, SIGNAL = 1.1; EXPRESSED IN BT474, SIGNAL = 0.8; EXPRESSED IN LUNG, SIGNAL = 0.95; EXPRESSED IN PLACENTA, SIGNAL = 0.64; EXPRESSED IN HELA, SIGNAL = 0.7; EXPRESSED IN FETAL LIVER, SIGNAL = 0.66; EXPRESSED IN HBL100, SIGNAL = 0.88; EXPRESSED IN BONE MARROW, SIGNAL = 0.84; NT HIT: gi11526176, EVALUE 1.00e-124; EST_HUMAN HIT: AW197823.1, EVALUE 3.00e-58; SWISSPROT HIT: Q13009, EVALUE 8.00e-28
atctaatattgttttctttttctttgagtcagtgactgaagacagctgcatttcacccattttcttcatcttttcatccatgtcaatcttctgttccagttttttgatctctgatttcaggagtcggagcgtgtcttccttgtggtggtgcctcgcgaccgcagtggcgcaggcagagtggatggcggtgatccagttttcaagctccgtctggctagtggtctgtaccagg

SEQ ID NO: 20592 - DNA, 127 bp, Homo sapiens
  MAP TO AL049797.8; EXPRESSED IN PLACENTA, SIGNAL = 0.66; EXPRESSED IN BONE MARROW, SIGNAL = 0.74; EXPRESSED IN HELA, SIGNAL = 0.73; EXPRESSED IN LUNG, SIGNAL = 0.67; EXPRESSED IN HEART, SIGNAL = 0.9; EXPRESSED IN ADULT LIVER, SIGNAL = 0.8; NT HIT: M68874.1, EVALUE 1.00e-65; SWISSPROT HIT: P47713, EVALUE 8.00e-20; EST_HUMAN HIT: AU120946.1, EVALUE 1.00e-65
tttagtccatacgaaattggcatggctaaatatggtacttttatggctcccgacttatttggaagcaaattttttatgggaacagtcgttaagaagtatgaagaaaaccccttgcatttcttaatgg

SEQ ID NO: 20593 - DNA, 174 bp, Homo sapiens
  MAP TO AL122035.1; EXPRESSED IN BT474, SIGNAL = 0.92; EXPRESSED IN BRAIN, SIGNAL = 1.2; EXPRESSED IN BONE MARROW, SIGNAL = 1.5; EXPRESSED IN PLACENTA, SIGNAL = 1.1; EXPRESSED IN HBL100, SIGNAL =   2; EXPRESSED IN HELA, SIGNAL = 1.8; EXPRESSED IN HEART, SIGNAL = 1.1; EXPRESSED IN FETAL LIVER, SIGNAL = 0.95; EXPRESSED IN ADULT LIVER, SIGNAL = 1.5; NT HIT: gi11434599, EVALUE 5.00e-25; SWISSPROT HIT: P13532, EVALUE 6.50e+00; EST_HUMAN HIT: AU143389.1, EVALUE 1.00e-60
cgccatggcctttattagtccgctgcccacgatggacaccaccaatatcgaggttccactccctccgcagccaagcaggacaacccaacccacgtgcttagggactggccaggggatcacactactgcgcctgcgcccctgcccgcttctccccctgcagacgcggtggcgcat

SEQ ID NO: 20594 - DNA, 150 bp, Homo sapiens
  MAP TO AC010787.2; EXPRESSED IN PLACENTA, SIGNAL = 1.1; EXPRESSED IN HBL100, SIGNAL = 1.2; EXPRESSED IN HEART, SIGNAL = 0.96; EXPRESSED IN BT474, SIGNAL = 0.99; EXPRESSED IN FETAL LIVER, SIGNAL = 1.1; EXPRESSED IN ADULT LIVER, SIGNAL = 1.2; EXPRESSED IN BRAIN, SIGNAL =   1; EXPRESSED IN BONE MARROW, SIGNAL =   1; EXPRESSED IN LUNG, SIGNAL = 0.94; EST_HUMAN HIT: AA299128.1, EVALUE 8.80e-02
ttagttgctaagggagaaaatgcttccaatagggaacatagttgcagactcgttaagttggaagctaagactgctcagttgccattttgttttcctcatgccgctgagccaataggcagagatgtgggttactctatcggctgggataac

SEQ ID NO: 20595 - DNA, 276 bp, Homo sapiens
  MAP TO AC010682.1; EXPRESSED IN FETAL LIVER, SIGNAL = 3.1; EXPRESSED IN HEART, SIGNAL = 1.7; EXPRESSED IN HELA, SIGNAL = 1.8; EXPRESSED IN BONE MARROW, SIGNAL = 1.1; EXPRESSED IN LUNG, SIGNAL = 0.88; NT HIT: AF011581.1, EVALUE 5.70e-01; EST_HUMAN HIT: AW160823.1, EVALUE 6.80e-01
atgcacatacttccagaaaatagtttctattccttttacacagggagcttcagtgtgcttcagtgagcacttttcttcttcttcttcttcttcttcttcttcttcttcttcttcttcttcttcttcttcttcttcttcctcttcctcttcttcttcttcttcttcttcttcttcttcttcttcttcttcttcttcttcttcttcttcttcttcttcttctgcttcttcttcttcttcttcttcttcttttttctggatatgctttctactgtgagc

SEQ ID NO: 20596 - DNA, 323 bp, Homo sapiens
  MAP TO AC010809.2; EXPRESSED IN BRAIN, SIGNAL = 1.2; EXPRESSED IN BONE MARROW, SIGNAL = 1.2; EXPRESSED IN LUNG, SIGNAL = 1.8; EXPRESSED IN HBL100, SIGNAL = 1.7; EXPRESSED IN PLACENTA, SIGNAL = 2.6; EXPRESSED IN HELA, SIGNAL = 1.1; EXPRESSED IN HEART, SIGNAL = 1.3; EXPRESSED IN BT474, SIGNAL = 1.6; EXPRESSED IN FETAL LIVER, SIGNAL = 1.9; SWISSPROT HIT: P30957, EVALUE 8.00e-47; EST_HUMAN HIT: BF209206.1, EVALUE 3.00e-01; NT HIT: AB001025.1, EVALUE 0.00e+00
attggcaagcagatggttgacacactggtagaatcatctaccaatgtagaaatgatcttgaaattctttgacatgttcttgaaacttaaagacttaaccagctcagacaccttcaaagaatatgacccagatggtaaaggaattatctccaaaaaagaattccagaaggccatggaagggcaaaaacagtacacgcagtcagagattgactttctcctgtcgtgtgcagaagctgatgagaatgacatgtttaattacgttgattttgtagaccggttccatgagccagccaaggacatagggtttaatgtggctgtgttatt

SEQ ID NO: 20597 - DNA, 123 bp, Homo sapiens
  MAP TO L39891.1; EXPRESSED IN BRAIN, SIGNAL = 3.7; EXPRESSED IN BONE MARROW, SIGNAL = 3.6; EXPRESSED IN FETAL LIVER, SIGNAL = 2.1; EXPRESSED IN ADULT LIVER, SIGNAL = 2.9; EXPRESSED IN BT474, SIGNAL =   3; EXPRESSED IN LUNG, SIGNAL = 2.1; EXPRESSED IN PLACENTA, SIGNAL = 3.2; EXPRESSED IN HEART, SIGNAL = 1.9; EXPRESSED IN HELA, SIGNAL = 2.4; EXPRESSED IN HBL100, SIGNAL = 1.4; NT HIT: L39891.1, EVALUE 2.00e-63; EST_HUMAN HIT: AI338396.1, EVALUE 2.80e-01; SWISSPROT HIT: Q61789, EVALUE 5.20e+00
cttggggtgcctctccccctgctcgtgggggagaccctgcctgggatctgctttccagcaaggaatatactttggagggagacacacatgttcttttctggagctctgcagtggccacggcag

SEQ ID NO: 20598 - DNA, 159 bp, Homo sapiens
  MAP TO AC006536.2; EXPRESSED IN PLACENTA, SIGNAL = 0.94; EXPRESSED IN BONE MARROW, SIGNAL = 0.93; EXPRESSED IN HBL100, SIGNAL = 0.89; EXPRESSED IN LUNG, SIGNAL = 0.82; EXPRESSED IN ADULT LIVER, SIGNAL = 0.95; EXPRESSED IN BRAIN, SIGNAL = 0.8; EXPRESSED IN HEART, SIGNAL = 1.1; EXPRESSED IN BT474, SIGNAL = 1.2; EXPRESSED IN HELA, SIGNAL =   1; EXPRESSED IN FETAL LIVER, SIGNAL = 0.91; NT HIT: AJ251586.1, EVALUE 3.10e-01; SWISSPROT HIT: P16050, EVALUE 6.60e+00; EST_HUMAN HIT: BE934007.1, EVALUE 2.10e+00
ccactggtcccagcaggaggcgggagacgcatggaagaggggcatccccaactgacccagcctaaggcagctgatcacctagatcaaagctcattagagatgaggagaaccagtcaagctcagcctgaatcagccaacacccagctgactgacagacat

SEQ ID NO: 20599 - DNA, 1656 bp, Homo sapiens
  MAP TO AC005261.1; EXPRESSED IN FETAL LIVER, SIGNAL = 1.8; EXPRESSED IN BRAIN, SIGNAL = 1.5; EXPRESSED IN BONE MARROW, SIGNAL = 1.3; EXPRESSED IN HEART, SIGNAL = 1.6; EXPRESSED IN BT474, SIGNAL = 2.2; EXPRESSED IN ADULT LIVER, SIGNAL = 1.8; EXPRESSED IN LUNG, SIGNAL =   4; EXPRESSED IN PLACENTA, SIGNAL = 1.9; EXPRESSED IN HELA, SIGNAL = 2.3; EXPRESSED IN HBL100, SIGNAL = 2.3; NT HIT: gi11426566, EVALUE 0.00e+00; EST_HUMAN HIT: AA130717.1, EVALUE 0.00e+00; SWISSPROT HIT: Q99676, EVALUE 0.00e+00
gcccttttgtgtgctggatttctttcaggcgacaaaggaaaacctaagaccacagaacctaccacttgtgagccagccttgtcagagggaatctcacttcagggacaagtgacacaaggaaactcagtggactcacagttggggcaagccgaggatcaggatgggctatcagaaatgcaggaaggacacttcagaccaggaatagatccccaggagaagtctcctgggaagatgagccctgaatgtgatggtttagggacagctgatggtgtgtgttcaaggattggacaggagcaagtctctccaggagatagagtccgtagccataactcatgtgagtcaggtaaagatcccatgattcaggaagaggaaaataactttaaatgcagtgaatgtggaaaagtatttaacaagaaacacctccttgctggacatgagaaaattcactctggagttaagccctatgaatgcacagaatgtgggaaaacctttattaagagcacacatctcctgcaacatcacatgatccacactggggagaggccctatgagtgcatggagtgtggaaaggccttcaaccgcaagtcataccttacccagcaccagcggattcacagtggagagaagccttacaagtgcaatgaatgcggaaaggccttcacccaccgctccaattttgtcttgcataacaggagacacactggagaaaaatcctttgtgtgcacagaatgtggccaagtctttcgacataggccaggctttctccggcactatgttgtccacagtggtgagaatccctatgagtgcttggagtgtggcaaggtcttcaaacacaggtcatatctcatgtggcaccagcagactcataccggggagaagccctatgagtgcagtgaatgtgggaaggtcttcttggagagtgcagccctgattcaccactatgtcatccacactggagagaagccctttgagtgcctcgagtgtgggaaggctttcaaccaccgatcctacctcaagaggcaccagcggattcacactggggagaagcccttcgtgtgcagtgaatgtggaaaggccttcacccactgctctacttttatcttgcataaaagggcccacactggagaaaagcctttcgagtgcaaagagtgtgggaaagcctttagcaatcggaaggacctcattcgccacttcagcatccacactggagagaagccctatgagtgcgtggagtgtggaaaggccttcacccgcatgtcgggcctcacgaggcacaagcggattcatagtggagagaagccctatgaatgtgttgagtgtgggaaatcgttttgctggagcacaaacctcattcgacatgccattatccacactggagagaagccctataaatgtagtgaatgtggaaaggccttcagtcgcagctcgtccctcactcagcatcaaaggatgcatactgggaaaaatcccatcagtgtaacagatgtgggaagaccttttacaagtggacaaacctcagttacccttcgagaacttcttttagggaaggactttttgaatgtaaccactgaggcaaatattttgccagaggaaacatcttcctctgcatctgatcaaccataccaaagagaaaccccacaagtgtcttcactgtga

SEQ ID NO: 20600 - DNA, 251 bp, Homo sapiens
  MAP TO AP000279.1; EXPRESSED IN BT474, SIGNAL = 1.2; EXPRESSED IN HELA, SIGNAL = 0.88; EXPRESSED IN HEART, SIGNAL = 0.95; EXPRESSED IN LUNG, SIGNAL = 0.93; EXPRESSED IN PLACENTA, SIGNAL = 1.2; EXPRESSED IN BONE MARROW, SIGNAL = 1.1; EXPRESSED IN HBL100, SIGNAL = 1.2; EXPRESSED IN FETAL LIVER, SIGNAL = 0.99; EXPRESSED IN ADULT LIVER, SIGNAL = 0.83; EXPRESSED IN BRAIN, SIGNAL = 0.74; EST_HUMAN HIT: BF184889.1, EVALUE 7.00e-91; NT HIT: AF231920.1, EVALUE 7.00e-96
ttagtttagttctgagaaatacttttgagtacacacctggacgaagaacattcaatgaagataaagcatttgaaaaagctccaccagtctttggcttttcttcctctttttcactttccatatccatttcatcttcaccatgttcactgatgataactccatcttcttgatttgtatccttaacatgtcctgttttgtccaaaggttgttcacctaaatttttgaagaattaaaatatatgtaaaataaaa

SEQ ID NO: 20601 - DNA, 90 bp, Homo sapiens
  MAP TO AL078584.17; EXPRESSED IN BONE MARROW, SIGNAL = 1.4; EXPRESSED IN FETAL LIVER, SIGNAL = 0.86; EXPRESSED IN LUNG, SIGNAL = 1.2; EXPRESSED IN PLACENTA, SIGNAL = 0.85; EXPRESSED IN HEART, SIGNAL = 1.1; EXPRESSED IN BRAIN, SIGNAL = 0.78; EXPRESSED IN ADULT LIVER, SIGNAL = 0.88; EXPRESSED IN HELA, SIGNAL = 0.69; EXPRESSED IN HBL100, SIGNAL = 0.81; EXPRESSED IN BT474, SIGNAL = 0.77; EST_HUMAN HIT: BE247575.1, EVALUE 2.00e-35
tgctgcttctcgcgcctgtcctctccaagatgcagttttttgatgctgaggagctcctggtcgatgaagaggatgatgtttttggtgaag

SEQ ID NO: 20602 - DNA, 107 bp, Homo sapiens
  MAP TO AL050308.9; EXPRESSED IN BONE MARROW, SIGNAL = 1.2; EXPRESSED IN LUNG, SIGNAL = 0.94; EXPRESSED IN HELA, SIGNAL = 0.7; EXPRESSED IN PLACENTA, SIGNAL = 0.98; EXPRESSED IN BT474, SIGNAL = 0.87; EXPRESSED IN HBL100, SIGNAL =   1; EXPRESSED IN FETAL LIVER, SIGNAL = 0.85; EXPRESSED IN ADULT LIVER, SIGNAL = 0.75; EXPRESSED IN BRAIN, SIGNAL = 0.79; EXPRESSED IN HEART, SIGNAL = 0.78; EST_HUMAN HIT: AA476878.1, EVALUE 4.00e-04; NT HIT: J04990.1, EVALUE 4.00e-03
ctcacagttatagagattgagaaatctaagatcaaagcactagcagattcattgtctggtaagggctcactctctgtttccacgatggtgctttgttgctgaatcct

SEQ ID NO: 20603 - DNA, 150 bp, Homo sapiens
  MAP TO AC003666.1; EXPRESSED IN FETAL LIVER, SIGNAL = 0.65; EXPRESSED IN LUNG, SIGNAL = 0.74; EXPRESSED IN PLACENTA, SIGNAL = 0.69; EXPRESSED IN BONE MARROW, SIGNAL = 0.83; EXPRESSED IN BRAIN, SIGNAL = 0.83; EXPRESSED IN HEART, SIGNAL = 0.86; SWISSPROT HIT: P51793, EVALUE 2.00e-27; EST_HUMAN HIT: AI146752.1, EVALUE 2.00e-77; NT HIT: gi11421729, EVALUE 2.00e-79
ctctgactgattcaccagcagctccgaccatttctgccacaggggacacttgtctctgtcctcaaaagtggtctcgttagaagtccagcaacactgctcatggctataccagaaggcagacaggcagaccccctccttcaggtccgtcat

SEQ ID NO: 20604 - DNA, 148 bp, Homo sapiens
  MAP TO AP000268.1; EXPRESSED IN FETAL LIVER, SIGNAL = 0.78; EXPRESSED IN LUNG, SIGNAL = 1.6; EXPRESSED IN PLACENTA, SIGNAL = 0.73; EXPRESSED IN BT474, SIGNAL = 0.86; EXPRESSED IN BONE MARROW, SIGNAL = 0.83; EXPRESSED IN HBL100, SIGNAL = 0.8; EXPRESSED IN HELA, SIGNAL = 0.86; EXPRESSED IN ADULT LIVER, SIGNAL = 0.72; EXPRESSED IN BRAIN, SIGNAL = 0.73; EXPRESSED IN HEART, SIGNAL = 0.78; NT HIT: AF231919.1, EVALUE 2.00e-60; SWISSPROT HIT: Q43089, EVALUE 3.00e+00
ctttcaggagcttgctgaagtcaaagttgtactgcatgaccacgtgggggaccaccttctggtagaggcatatgacctggagcaaaacagctttcaaaagaatggtttctgcatcatctgcacaaaaaaaagaaaaagaaagaaaaag

SEQ ID NO: 20605 - DNA, 806 bp, Homo sapiens
  MAP TO AC004534.1; EXPRESSED IN BONE MARROW, SIGNAL = 1.6; EXPRESSED IN LUNG, SIGNAL = 2.6; EXPRESSED IN HELA, SIGNAL =   4; EXPRESSED IN PLACENTA, SIGNAL = 5.1; EXPRESSED IN HEART, SIGNAL = 1.8; EXPRESSED IN ADULT LIVER, SIGNAL = 1.4; EXPRESSED IN FETAL LIVER, SIGNAL = 1.9; EXPRESSED IN BT474, SIGNAL = 3.2; EXPRESSED IN BRAIN, SIGNAL = 1.2; SWISSPROT HIT: P07799, EVALUE 2.80e-01; EST_HUMAN HIT: BF355295.1, EVALUE 0.00e+00
gattcagccctgatggaggctgaggaggcccagcgtggagcctctcctcccatctctgccatagaggaattcagcattatccctgaggctcccatgaggagcagccaggtctctgccttggggcttgaagctcaagaagatgaggacccatcctataagtggagagaggaacacagactctcagcaactcagcagagtgagttaagggatgtgtgtgactatgcgattgagacgatgccctcttttcccaaggaaggttctgcagatgtggagcccaatcaggaaagccttgtggctgaggcctgtgacactccggaacactgggaggcagtaccccagagcctagcaggccgacaagcaaggactctagctcccccagagctctgggcctgccccattcagagtgagcatctagacatggccccattttccagtgacctgggaagcgaagaagaggaggtggaattttggccaggacttacttctttgacattgggatctggacaggcagaagaagaagaggaaacctcttcagataactctggtcagaccagatattattctccctgcgaagagcatcctgcagagaccaaccagaatgaaggctctgaaagtgggactatcaggcagggggaagagctgccacctgaggagctgcaggaaagtcaagggctcttgcatccccaggaggtccaagttctggaggagcagggacagcaggaagcaggatttcggggggaaggaactctgagggaggatgtttgtgccgatgggctattaggggaggaacagatgatagagcaggt

SEQ ID NO: 20606 - DNA, 190 bp, Homo sapiens
  MAP TO AC005193.2; EXPRESSED IN FETAL LIVER, SIGNAL = 0.8; EXPRESSED IN LUNG, SIGNAL = 0.59; EXPRESSED IN HELA, SIGNAL = 0.69; EXPRESSED IN PLACENTA, SIGNAL = 0.65; EXPRESSED IN ADULT LIVER, SIGNAL = 0.98; EXPRESSED IN BRAIN, SIGNAL = 0.97; EXPRESSED IN HEART, SIGNAL = 0.85; SWISSPROT HIT: P16788, EVALUE 5.60e-01
ggggcagaagtggctggcaccacccctctcctttctgtgccaaatgcaagagatgtgatgctgaattgtcacaaccatacagtgaccacagcccaaggctctggcagacacacaacagtcagtgagtcaacagatgcagccattcttttcaacaaatatggcagtgagaaggctgaagtaatcacctgtt

SEQ ID NO: 20607 - DNA, 694 bp, Homo sapiens
  MAP TO AC004616.1; EXPRESSED IN FETAL LIVER, SIGNAL =   1; EXPRESSED IN ADULT LIVER, SIGNAL = 1.2; EXPRESSED IN BT474, SIGNAL = 2.9; EXPRESSED IN BRAIN, SIGNAL =   1; EXPRESSED IN LUNG, SIGNAL = 1.4; EXPRESSED IN BONE MARROW, SIGNAL = 1.1; EXPRESSED IN PLACENTA, SIGNAL = 1.4; EXPRESSED IN HEART, SIGNAL = 1.4; NT HIT: AF245505.1, EVALUE 0.00e+00; SWISSPROT HIT: P35331, EVALUE 5.00e-17; EST_HUMAN HIT: AW888221.1, EVALUE 0.00e+00
actcccacgtgatgtcagctttgggaatccccatagccatgcagttcagtttcacggtgttcccgggccgggtgtagatgaccggggtgggctcgctggtgatccggggaggataggcgatcacaatcacggggatgctggtgaccgaagggccgtactccgtctccatcctgcatacataggtacccctgtcaaacaccgaggcctcacgaaccgtgagggtgccattgtccagaagagaaacgcgtcccagggtttgggggccctccagatgcatgccattggggagcgtccaggagaaacgtccctgcccagccccgggaggggtgcaggggagcttcagggtctcaccattgatgatgctgaccaggttatgatactgcttgtttgcttctggcttcagtcccaccttcagggagaccagcctctccgtgtggccagcggcattgcgggccacgcagcggtaggccccggcgtccaccgaggagagaccgctaatgtgtagcatgccgtcagccttgtggtagaagcgctgcagctgctgtccactctgcagatcggtgccattgggaaggacccacaccaggctgggtgtcggggtccccgcggcagagcagttgaggctgatggtgtggcccgccatggccgtgatcttctcgctgatcgggtcgtggaagatgggtttctccatggg

SEQ ID NO: 20608 - DNA, 96 bp, Homo sapiens
  MAP TO AL049859.7; EXPRESSED IN BONE MARROW, SIGNAL = 0.64; EXPRESSED IN ADULT LIVER, SIGNAL = 0.65; EXPRESSED IN HEART, SIGNAL = 1.3; NT HIT: AF223391.1, EVALUE 3.00e-03; EST_HUMAN HIT: T95152.1, EVALUE 1.00e-03
accagcaatagaacttggaagcttgttagaagtgcagaatctcagccctgtcccaggccttgtaattcagaatctgtattttaccaagatccacag

SEQ ID NO: 20609 - DNA, 177 bp, Homo sapiens
  MAP TO AP000169.1; EXPRESSED IN ADULT LIVER, SIGNAL = 0.65; EXPRESSED IN BONE MARROW, SIGNAL = 0.74; EXPRESSED IN LUNG, SIGNAL =   1; EXPRESSED IN HELA, SIGNAL = 0.63; EXPRESSED IN PLACENTA, SIGNAL = 0.99; EXPRESSED IN BT474, SIGNAL = 0.88; EXPRESSED IN HBL100, SIGNAL = 0.68; EXPRESSED IN FETAL LIVER, SIGNAL = 0.85; EXPRESSED IN BRAIN, SIGNAL = 0.75; EXPRESSED IN HEART, SIGNAL = 0.99; EST_HUMAN HIT: AV704678.1, EVALUE 6.10e-01; NT HIT: Z74292.1, EVALUE 2.60e-02; SWISSPROT HIT: P16794, EVALUE 2.90e+00
atggtggctgccgaggtggtgaataccgaggatcccaaaatgaaaaattacggagggaaacttagaaaagtagtactctctcacagccagagtggtgctggtgaccctccagtccaggctaaaacaggtaagcaaaatatttgccttgtttttaatatacatcaagcaaaacaaggt

SEQ ID NO: 20610 - DNA, 218 bp, Homo sapiens
  MAP TO AC011994.2; EXPRESSED IN PLACENTA, SIGNAL = 3.7; EXPRESSED IN HELA, SIGNAL = 3.9; EXPRESSED IN HEART, SIGNAL = 3.2; EXPRESSED IN BRAIN, SIGNAL = 3.2; EXPRESSED IN LUNG, SIGNAL = 3.8; EXPRESSED IN BT474, SIGNAL = 3.8; EXPRESSED IN ADULT LIVER, SIGNAL = 4.5; EXPRESSED IN FETAL LIVER, SIGNAL = 4.3; EXPRESSED IN BONE MARROW, SIGNAL = 3.7; EXPRESSED IN HBL100, SIGNAL = 3.3; NT HIT: U57355.1, EVALUE 2.00e+00; EST_HUMAN HIT: AW794952.1, EVALUE 3.40e-02; SWISSPROT HIT: Q99087, EVALUE 1.20e+00
tcatagggcccaggactccccaggtctaagggtaattctggggacaatcatggcttctggtctcctggggctgacggaactgcttaagttgctcatgtcagccagaatggtctggaaagagctcgggtcaggagtagcactgaatgtttcctgtgggtttaagaggctggctctgaagccagatgacatgtgtttgagccagttccaccacctcccag

SEQ ID NO: 20611 - DNA, 152 bp, Homo sapiens
  MAP TO AC007263.3; EXPRESSED IN LUNG, SIGNAL = 0.79; EXPRESSED IN PLACENTA, SIGNAL = 0.6; EXPRESSED IN BT474, SIGNAL = 1.2; EXPRESSED IN BONE MARROW, SIGNAL = 0.87; EXPRESSED IN FETAL LIVER, SIGNAL = 0.83; EXPRESSED IN ADULT LIVER, SIGNAL = 0.65; EXPRESSED IN BRAIN, SIGNAL = 0.76; EXPRESSED IN HEART, SIGNAL = 0.93; NT HIT: AF256215.1, EVALUE 3.50e-01; EST_HUMAN HIT: AW847284.1, EVALUE 6.00e-03; SWISSPROT HIT: P47086, EVALUE 6.60e+00
ctgtaaacttttcagcatgaagctcagaacaaagacatccttttctataaccccacgctattgtcacacctaagaaagtttcaaataattcagttcgatgtctgtcatctagtccatattcagatttctccagttgtccactaagaccttta

SEQ ID NO: 20612 - DNA, 213 bp, Homo sapiens
  MAP TO AC012458.2; EXPRESSED IN BRAIN, SIGNAL = 3.3; EXPRESSED IN LUNG, SIGNAL = 2.7; EXPRESSED IN HELA, SIGNAL = 7.2; EXPRESSED IN PLACENTA, SIGNAL = 3.4; EXPRESSED IN ADULT LIVER, SIGNAL = 1.5; EXPRESSED IN FETAL LIVER, SIGNAL = 1.7; EXPRESSED IN BT474, SIGNAL = 4.4; EXPRESSED IN BONE MARROW, SIGNAL = 2.4; EXPRESSED IN HEART, SIGNAL = 2.4; EXPRESSED IN HBL100, SIGNAL = 4.6; EST_HUMAN HIT: BE396541.1, EVALUE 8.00e-40; SWISSPROT HIT: P18669, EVALUE 1.00e-22; NT HIT: gi4505752, EVALUE 2.00e-37
tggcatctggcactgtccagagggtccggattgttctcttaagcagatatcaaactcgtagccagcatctggcagcgcctgctcccagcgctttgcctcctcgtcgcctgctgggttcaggttggcatcgtaccagccaccgaagcggttctccaggttccacgcaacctcgccgtgccggatcagcacctgtttgtaggcggcgtggcggcg

SEQ ID NO: 20613 - DNA, 643 bp, Homo sapiens
  MAP TO AC004763.1; EXPRESSED IN BONE MARROW, SIGNAL = 1.9; EXPRESSED IN LUNG, SIGNAL = 2.4; EXPRESSED IN HELA, SIGNAL = 2.5; EXPRESSED IN PLACENTA, SIGNAL = 3.1; EXPRESSED IN HBL100, SIGNAL = 1.9; EXPRESSED IN HEART, SIGNAL = 1.8; EXPRESSED IN ADULT LIVER, SIGNAL = 3.2; EXPRESSED IN BT474, SIGNAL = 1.7; EXPRESSED IN FETAL LIVER, SIGNAL = 2.6; EXPRESSED IN BRAIN, SIGNAL = 1.8; NT HIT: AF129533.1, EVALUE 0.00e+00; EST_HUMAN HIT: W88455.1, EVALUE 5.00e-10; SWISSPROT HIT: Q9Z507, EVALUE 5.60e+00
ggaaccatactcttcccaggtatttggagacttcagtgtgaatttcatctaggctataatcctcatcagggatcaaaacttcctccattacagagagctgtgttaaccttctctcacacagtcttacaaacctgatgaaggcactgcagctaacttcacatttgctgaggcccaaggctgttaggtttgtacagtgttcagcaatacaaataagttcattatcaagaggctgaagatcattagcacacaccactaactcaatcagtcgaggacagttgagacctacccgtcctaaaaccactttgctgactgaacgaccaaaataaaggtgagtaacaggggtttcttctttgaagaacgtctcgaattcctcttcatatagaaagaagtgcataacaacattaactctaggggaatgtttaataagtgcatcccaactgtgttttttaacagcatgaaatttaatctgtccaggattttcactcacaacgtcaattcgaagatgttcaaggttaacatgagtctcgcttgagagtgcaaggaaaagttcatcagttaggatgtaataattcaacgccagttctctaaggccttgacaacggtcagctacacaaagaattcctgtgggaagttggggaaaatt

SEQ ID NO: 20614 - DNA, 88 bp, Homo sapiens
  MAP TO AF015262.1; EXPRESSED IN HELA, SIGNAL = 1.1; EXPRESSED IN PLACENTA, SIGNAL = 0.99; EXPRESSED IN HBL100, SIGNAL = 1.1; EXPRESSED IN HEART, SIGNAL =   1; EXPRESSED IN FETAL LIVER, SIGNAL = 1.1; EXPRESSED IN ADULT LIVER, SIGNAL = 1.6; EXPRESSED IN BT474, SIGNAL = 1.1; EXPRESSED IN BRAIN, SIGNAL = 1.2; EXPRESSED IN BONE MARROW, SIGNAL =   1; EXPRESSED IN LUNG, SIGNAL = 1.3; NT HIT: AL163267.2, EVALUE 1.00e-42
gagttgcagatgactcctgccatcgtggaactaaaccacagtctagaagaggagagcaagtttatgtgggttatgcattacactaaag

SEQ ID NO: 20615 - DNA, 104 bp, Homo sapiens
  MAP TO AP000208.1; EXPRESSED IN PLACENTA, SIGNAL = 0.77; EXPRESSED IN LUNG, SIGNAL = 0.61; EXPRESSED IN HBL100, SIGNAL = 0.81; EXPRESSED IN FETAL LIVER, SIGNAL = 0.62; EXPRESSED IN HELA, SIGNAL = 0.6; EXPRESSED IN ADULT LIVER, SIGNAL = 0.65; EXPRESSED IN BRAIN, SIGNAL = 0.99; EXPRESSED IN BT474, SIGNAL = 0.77; EXPRESSED IN HEART, SIGNAL = 0.82; EST_HUMAN HIT: AA326765.1, EVALUE 4.00e-52; SWISSPROT HIT: Q13009, EVALUE 6.00e-14; NT HIT: gi11526176, EVALUE 4.00e-52
cttgctgctgtgatcagtctcatctgaggattccaagtctggcccctcggtctcctctggagcggtctcagcactgctgccctgctcgctgcaaaggctgtgcc

SEQ ID NO: 20616 - DNA, 192 bp, Homo sapiens
  MAP TO AP000134.1; EXPRESSED IN LUNG, SIGNAL = 0.83; EXPRESSED IN HELA, SIGNAL = 0.79; EXPRESSED IN ADULT LIVER, SIGNAL = 0.81; EXPRESSED IN BRAIN, SIGNAL = 0.89; EXPRESSED IN PLACENTA, SIGNAL = 0.81; EXPRESSED IN BT474, SIGNAL = 0.71; EXPRESSED IN BONE MARROW, SIGNAL = 0.72; EXPRESSED IN HBL100, SIGNAL = 1.4; EXPRESSED IN FETAL LIVER, SIGNAL = 0.69; EXPRESSED IN HEART, SIGNAL = 0.92; EST_HUMAN HIT: H72805.1, EVALUE 2.90e-02; SWISSPROT HIT: P49716, EVALUE 9.60e-01
atgaatgtggctgagaccttgccatctaagagtttgcggtctggcaagtgtccacagagacccaagctagactataacaacacacagaaaagaaacattgtaacgattcagaagggaagggacgacttcaagtcacggaggaagcagaacatcgaggaaaactgtaagaagatggctgatttcaaccacacc

SEQ ID NO: 20617 - DNA, 122 bp, Homo sapiens
  MAP TO AC007370.7; EXPRESSED IN ADULT LIVER, SIGNAL = 0.8; EXPRESSED IN BRAIN, SIGNAL = 0.73; EXPRESSED IN HEART, SIGNAL = 0.85; EXPRESSED IN LUNG, SIGNAL = 0.67; EXPRESSED IN PLACENTA, SIGNAL = 0.72; EXPRESSED IN HELA, SIGNAL = 0.77; EST_HUMAN HIT: AI733741.1, EVALUE 7.00e-02; SWISSPROT HIT: Q60299, EVALUE 1.40e+00; NT HIT: AF060868.1, EVALUE 4.00e-03
ttttcttaagacccatggcatactttgtaaaaagaacttcttgaactttcttgagtgaatttttattgttcactagctccttatttaagcagacattgatggttactaacacaataaccatt

SEQ ID NO: 20618 - DNA, 1239 bp, Homo sapiens
  MAP TO AL033520.9; EXPRESSED IN PLACENTA, SIGNAL = 3.5; EXPRESSED IN HBL100, SIGNAL = 3.6; EXPRESSED IN HELA, SIGNAL = 4.3; EXPRESSED IN BRAIN, SIGNAL = 2.8; EXPRESSED IN BONE MARROW, SIGNAL = 3.4; EXPRESSED IN HEART, SIGNAL = 3.2; EXPRESSED IN BT474, SIGNAL = 3.9; EXPRESSED IN ADULT LIVER, SIGNAL =   5; EXPRESSED IN FETAL LIVER, SIGNAL = 4.1; EXPRESSED IN LUNG, SIGNAL = 4.7; EST_HUMAN HIT: BE378602.1, EVALUE 0.00e+00; SWISSPROT HIT: Q09769, EVALUE 3.20e-02; NT HIT: gi8923282, EVALUE 1.00e-08
ttggctgggggcagggacaacatcttgtgcatggtggaggtcattcgatctctgcccaaactgaaggcatccttagtcagggacacagcttccttggtgaggtccatggtggcatgtagagcctccttggtggcatccttggtcatgtgaatagcacttgacaattctccctcaatgttcttcaaggggatgagctcaccctgtccattcacagcagtctccctgccagctgggggcttcaatgcagctggtgagctggaggcttgggttctgctcagtttcttggcctgtagggactctactgcctcatggcccttccctgccagctgctgggcaagtggacctgagtcctgcagttctccattgctatgtggcctctcctgggatacatcctgattttcaatgctactttcctccaagaccttctcagggcttgctgggccctggtctgatgaggcatcagacttcagttcccgatcctctgaaggagatagctctgaatctacgaggctagtgctatctgagcctgcagagtcagcatcgacagcaccgggtgcaggatgcataagcagagccacttcagcactgggaaagagaactccaatgcaagctgtctgattctgcaggggagacccagtcattgactctgtatccttagtcagctgctcctgaagcctctgcagcacctccttcaggcgaagcagagccaagtactggtagtggtcaagcctcacgcggacatgggccggggaatgtacaagcatatgaacatctgctacatcctccagctctgtcagaggccctttgttgtccataccactactgccttctttcagaatttccatgacttctgtaagtcctgataagcttttcaagtcatgttcagtctttgaccgcggatgggacatagagtcaggggcaagagcctcagactggacaggacttccaaaactggctgatggtttcagcctcccctctgaggccaaaagaagcttccgtgcctgggcttgctgccagcggaggggtaggcaggcccaaatggacagggggaagggggctacaaaattcaaggtatggcctttgaagttttctgttccctcaaagtccaaggagatctgggtaaagtggacagaccagagatcccaggaagccttaggtctctggggagggagggtattaggctgaggcaggcaggaatccatctgaaaggcatgatgcaaaaaaagcatgtgcagaagg

SEQ ID NO: 20619 - DNA, 293 bp, Homo sapiens
  MAP TO AL078474.2; EXPRESSED IN PLACENTA, SIGNAL = 1.2; EXPRESSED IN HEART, SIGNAL = 1.3; EXPRESSED IN ADULT LIVER, SIGNAL = 0.76; EST_HUMAN HIT: AU125569.1, EVALUE 0.00e+00; NT HIT: AF029308.1, EVALUE 2.80e+00; SWISSPROT HIT: P22897, EVALUE 4.00e-04
tccatcagaccactggtagagatctgggcaggcaccagatgtttgcccatctccattcctccaaagccctatccagaaatcaccatcagaaatccctgtcccgggttttgtcaggttttgcaacatgctctctattaacttctgttctgcttcattctcaaggctgaggaggactcctccctcactctcacaagccaggcgtgcctcctgaaagctcactcggctggacagttcatggaagtaggccattttgtagcagggatgcttgaagtcagcaaaacacaccttttggc

SEQ ID NO: 20620 - DNA, 152 bp, Homo sapiens
  MAP TO AP000124.1; EXPRESSED IN BONE MARROW, SIGNAL = 1.1; EXPRESSED IN ADULT LIVER, SIGNAL = 0.74; EXPRESSED IN BT474, SIGNAL = 0.65; EXPRESSED IN LUNG, SIGNAL =   1; EXPRESSED IN HELA, SIGNAL = 0.63; EXPRESSED IN PLACENTA, SIGNAL = 0.91; EXPRESSED IN HBL100, SIGNAL = 0.76; EXPRESSED IN FETAL LIVER, SIGNAL = 0.81; EXPRESSED IN HEART, SIGNAL =   1; EST_HUMAN HIT: AI198966.1, EVALUE 3.50e-01; SWISSPROT HIT: Q10197, EVALUE 3.90e+00; NT HIT: Z49649.1, EVALUE 1.00e-03
agtccatgtatatggctctcatgcaccattcctgacaagggcagaccagtttttcttcagctaccacagtttccacctgagtggattcttcatagttgtactggaagaaatcttgaagagcattgagttcagggttcccttctgccccacta

SEQ ID NO: 20621 - DNA, 123 bp, Homo sapiens
  MAP TO AF027390.1; EXPRESSED IN FETAL LIVER, SIGNAL = 5.1; EXPRESSED IN BRAIN, SIGNAL = 5.2; EXPRESSED IN LUNG, SIGNAL = 5.5; EXPRESSED IN HELA, SIGNAL = 5.2; EXPRESSED IN PLACENTA, SIGNAL = 5.2; EXPRESSED IN HEART, SIGNAL = 3.7; EXPRESSED IN ADULT LIVER, SIGNAL = 6.6; EXPRESSED IN BT474, SIGNAL = 5.1; EXPRESSED IN BONE MARROW, SIGNAL =   5; EXPRESSED IN HBL100, SIGNAL = 5.3; EST_HUMAN HIT: AI792160.1, EVALUE 6.30e+00; NT HIT: gi11422707, EVALUE 2.70e-01
gaagcatgagcctggggctcctcagtgtcctcggcatcctgaggcttcgtgcagacacagacatctgtccagtgcttctacttgacttcaacccgagggttggcccaattatctataccaggg

SEQ ID NO: 20622 - DNA, 260 bp, Homo sapiens
  MAP TO AC012443.1; EXPRESSED IN HBL100, SIGNAL = 1.5; EXPRESSED IN HEART, SIGNAL = 1.1; EXPRESSED IN BRAIN, SIGNAL = 1.9; EXPRESSED IN LUNG, SIGNAL = 1.6; EXPRESSED IN HELA, SIGNAL = 1.6; EXPRESSED IN PLACENTA, SIGNAL = 1.8; EXPRESSED IN ADULT LIVER, SIGNAL = 1.9; EXPRESSED IN FETAL LIVER, SIGNAL = 1.6; EXPRESSED IN BT474, SIGNAL = 1.3; EXPRESSED IN BONE MARROW, SIGNAL = 1.4; SWISSPROT HIT: P34489, EVALUE 2.00e-04; NT HIT: AF056116.1, EVALUE 1.00e-04; EST_HUMAN HIT: AW503580.1, EVALUE 1.00e-130
atttgacttgaagacactgcctgtggactttgtggaatgcttgatgcggttcctaccaactgagaatgaagtgaaagtgcttcggctctacgagcgggaaaggaagcctctggaaaacttgtcagatgaagatcggttcatgatgcagtttagtaaaatcgagaggctcatgcagaagatgaccatcatggccttcattgggaactttgctgaaagcattcagatgctgactcctgtgagtggactgactctggcagggg

SEQ ID NO: 20623 - DNA, 785 bp, Homo sapiens
  MAP TO AC010896.2; EXPRESSED IN BONE MARROW, SIGNAL = 3.7; EXPRESSED IN LUNG, SIGNAL =   4; EXPRESSED IN PLACENTA, SIGNAL =   3; EXPRESSED IN HEART, SIGNAL = 3.7; EXPRESSED IN HBL100, SIGNAL = 3.1; EXPRESSED IN HELA, SIGNAL = 3.7; EXPRESSED IN FETAL LIVER, SIGNAL = 4.1; EXPRESSED IN BT474, SIGNAL = 3.2; EXPRESSED IN ADULT LIVER, SIGNAL = 4.3; EXPRESSED IN BRAIN, SIGNAL =   3; SWISSPROT HIT: O60241, EVALUE 2.00e-09; NT HIT: AF127033.1, EVALUE 5.00e-01; EST_HUMAN HIT: AU141729.1, EVALUE 7.50e-01
agcagggcggcgtggcggaaataggagatcttgttccgcaccacgactctccacaccagccagtacacacccaggcacacaagcagcgccagtatggaagctcccaagcccacttgagtcagcagcgccagagcgggttcttccggaacagtgtgtggggacatgaggacggagaaggcagtgaggtgctggcagaggcactgagcagtggggctggcactggccacctgtgcctggcacccttctttggaccaaccccccctgccctggaagagactgtgatcccagaagacacagtgaggggaaccatctgtgttcccaaagtccatgatgacctctccctggctgaaggcccggtcacctgccatgatggaaatgacaaggaccaggccaggagtggcatagagggaatcccccagcccttgtccatagtttgagggcagaaggtggtccagttttcgcagcaccaggctagtaatacttatttcagttccattacggaccaatggggccagtgagtgcctgggaatctgagcctgcagtgggggccgagtagggaaggagatgctgtagtcagcaggaaacgtgggtccaaacagctggctctgcagcagcacattgggtaagctgaaggcgaaggggtggtcctgtgggcacaggctgcatgccagggtctccacagccagcaggagagtcgagcctgcccagggcttccgggcttgggccagggtccacagagacctggtgtccatatctaggaccttgtctgtggcaatcaggagatt

SEQ ID NO: 20624 - DNA, 94 bp, Homo sapiens
  MAP TO AC012447.2; EXPRESSED IN BONE MARROW, SIGNAL = 5.7; EXPRESSED IN LUNG, SIGNAL = 5.6; EXPRESSED IN HELA, SIGNAL = 5.8; EXPRESSED IN PLACENTA, SIGNAL = 6.1; EXPRESSED IN HBL100, SIGNAL = 6.2; EXPRESSED IN HEART, SIGNAL = 4.4; EXPRESSED IN BT474, SIGNAL = 5.4; EXPRESSED IN BRAIN, SIGNAL = 4.8; EXPRESSED IN ADULT LIVER, SIGNAL = 6.7; EXPRESSED IN FETAL LIVER, SIGNAL =   5; NT HIT: AF061154.1, EVALUE 2.00e-01; EST_HUMAN HIT: BE178257.1, EVALUE 2.00e-01
tgggataagcaggagaatgcaggtggacaaggggactgccactgtcagagaaaagaagttgtatacacaggtggggaaagacgaggaggaggcc

SEQ ID NO: 20625 - DNA, 256 bp, Homo sapiens
  MAP TO AL049844.6; EXPRESSED IN BT474, SIGNAL = 1.3; EXPRESSED IN BONE MARROW, SIGNAL = 1.1; EXPRESSED IN HELA, SIGNAL = 0.91; EXPRESSED IN ADULT LIVER, SIGNAL = 1.1; EXPRESSED IN BRAIN, SIGNAL = 0.92; EXPRESSED IN HBL100, SIGNAL = 2.1; EXPRESSED IN FETAL LIVER, SIGNAL = 1.3; EXPRESSED IN LUNG, SIGNAL = 0.94; EXPRESSED IN PLACENTA, SIGNAL = 1.3; EXPRESSED IN HEART, SIGNAL = 0.97; EST_HUMAN HIT: AW580740.1, EVALUE 0.00e+00; SWISSPROT HIT: Q10191, EVALUE 5.10e-02; NT HIT: AF302764.1, EVALUE 6.20e-01
gaaatctgagaatgaagatgacagcgagtgggaagatgtggatgatgagaagggagatagcaatgatgactatgactctgcaggcctattgtcagatgaagactgtatgtctgtgcccggaaaaactcacagagctatagcagatcacttgttctggagtgaggaaacaaagagtcgcttcacggagtattcgatgacttcctcagtcatgaggagaaatgaacagctgaccctacatgatgagaggtttgagaag

SEQ ID NO: 20626 - DNA, 191 bp, Homo sapiens
  MAP TO AP000135.1; EXPRESSED IN FETAL LIVER, SIGNAL = 1.2; EXPRESSED IN LUNG, SIGNAL =   1; EXPRESSED IN HEART, SIGNAL = 0.91; EXPRESSED IN BONE MARROW, SIGNAL = 0.94; EXPRESSED IN HBL100, SIGNAL = 1.1; EXPRESSED IN PLACENTA, SIGNAL = 0.71; EXPRESSED IN BRAIN, SIGNAL = 0.76; EXPRESSED IN ADULT LIVER, SIGNAL = 1.2; EXPRESSED IN HELA, SIGNAL =   1; EXPRESSED IN BT474, SIGNAL =   1; NT HIT: AB032998.1, EVALUE 1.00e-104; EST_HUMAN HIT: AW408071.1, EVALUE 5.00e-13; SWISSPROT HIT: Q58281, EVALUE 1.70e+00
cacttgcagtttccggtttcacttgagggaggcctttttgtcgacgttctctctctttttctcgatcccgtctttcttgagatcgagatcggggagaatgtcggcgtctatccctggaccgagatcgagaacgtcgatgccgagaccttcgagatctagaaccagatctagatcgcctcctttttggtgac

SEQ ID NO: 20627 - DNA, 150 bp, Homo sapiens
  MAP TO AP000199.1; EXPRESSED IN PLACENTA, SIGNAL =   1; EXPRESSED IN BT474, SIGNAL =   1; EXPRESSED IN BONE MARROW, SIGNAL = 0.87; EXPRESSED IN FETAL LIVER, SIGNAL = 0.67; EXPRESSED IN LUNG, SIGNAL = 1.1; EXPRESSED IN ADULT LIVER, SIGNAL = 0.67; EXPRESSED IN HBL100, SIGNAL = 0.95; EXPRESSED IN HELA, SIGNAL =   1; EXPRESSED IN HEART, SIGNAL = 0.99; EST_HUMAN HIT: BF131998.1, EVALUE 2.00e+00; NT HIT: Y15758.1, EVALUE 1.30e+00; SWISSPROT HIT: P16427, EVALUE 6.70e+00
gaaaatgtggcatcttttctccactatacatatctgtgtagccccaacaagcctctgacctttagacttctccagaatgatttagaggtcaatgtctatgtctccaaaactctggcagatacaagcaattctttcccaacaactaactag

SEQ ID NO: 20628 - DNA, 102 bp, Homo sapiens
  MAP TO AC012513.2; EXPRESSED IN BONE MARROW, SIGNAL = 1.8; EXPRESSED IN HEART, SIGNAL = 1.1; EXPRESSED IN ADULT LIVER, SIGNAL = 1.4; EXPRESSED IN LUNG, SIGNAL = 1.3; EXPRESSED IN BRAIN, SIGNAL = 1.5; EXPRESSED IN HELA, SIGNAL = 2.4; EXPRESSED IN HBL100, SIGNAL = 3.7; EXPRESSED IN PLACENTA, SIGNAL = 1.3; EXPRESSED IN BT474, SIGNAL = 1.6; EXPRESSED IN FETAL LIVER, SIGNAL = 1.2; EST_HUMAN HIT: AW852198.1, EVALUE 9.00e-51; NT HIT: X57500.1, EVALUE 6.00e-51
agtcctcctttgcctgatcctccaacagctgtcacaacttgtgttgagcaagcagtagcatttgcttcctcccaacaagcagctgggttaggaaaaccatgg

SEQ ID NO: 20629 - DNA, 162 bp, Homo sapiens
  MAP TO AC009309.1; EXPRESSED IN BONE MARROW, SIGNAL =   1; EXPRESSED IN HBL100, SIGNAL = 1.2; EXPRESSED IN FETAL LIVER, SIGNAL = 0.96; EXPRESSED IN HEART, SIGNAL =  11; EXPRESSED IN BT474, SIGNAL = 0.99; EXPRESSED IN HELA, SIGNAL = 0.97; EXPRESSED IN ADULT LIVER, SIGNAL = 0.83; EXPRESSED IN BRAIN, SIGNAL = 0.88; EST_HUMAN HIT: AV757110.1, EVALUE 3.00e-86; SWISSPROT HIT: P12978, EVALUE 1.30e+00; NT HIT: gi11430039, EVALUE 2.00e-86
tggcatcttcaacctaccgcaactgtgtcaagaatgcctctcttatttctgcattgtccactggacgttttagtcatattcagacaccagttgtttcctccactcccagacttaccacatctgagagaaacctgacatgtgggcatacctcagtgatcctta

SEQ ID NO: 20630 - DNA, 107 bp, Homo sapiens
  MAP TO AC007832.1; EXPRESSED IN PLACENTA, SIGNAL = 1.2; EXPRESSED IN BONE MARROW, SIGNAL = 0.96; EXPRESSED IN HBL100, SIGNAL = 0.85; EXPRESSED IN FETAL LIVER, SIGNAL = 0.91; EXPRESSED IN LUNG, SIGNAL = 0.83; EXPRESSED IN HELA, SIGNAL = 0.83; EXPRESSED IN ADULT LIVER, SIGNAL =   1; EXPRESSED IN BT474, SIGNAL = 0.9; EXPRESSED IN HEART, SIGNAL = 1.2; EXPRESSED IN BRAIN, SIGNAL = 0.96; NT HIT: AB029900.1, EVALUE 9.00e-13; EST_HUMAN HIT: AW895405.1, EVALUE 6.00e-12
cgtgttctaaaatccgaaaaaatctgaaattcaaaacctttctggttccaagcatttcagataaggaatactcaacctgtaccttgaaaatgtaagtgttcagtttc

SEQ ID NO: 20631 - DNA, 199 bp, Homo sapiens
  MAP TO AL034395.6; EXPRESSED IN PLACENTA, SIGNAL = 0.94; EXPRESSED IN BT474, SIGNAL = 1.1; EXPRESSED IN BONE MARROW, SIGNAL = 1.4; EXPRESSED IN LUNG, SIGNAL =   1; EXPRESSED IN HELA, SIGNAL = 0.89; EXPRESSED IN ADULT LIVER, SIGNAL = 0.95; EXPRESSED IN BRAIN, SIGNAL = 1.4; EXPRESSED IN FETAL LIVER, SIGNAL = 0.74; EXPRESSED IN HEART, SIGNAL = 1.2; SWISSPROT HIT: P01419, EVALUE 2.80e+00
tcctttggctgtgacatgtctgaacttcaggtcgaatttcccctccaacacatcagcttgcatttggagcaggagggtaagatcactttggttatttcctcttttgattccctttggtcttatttctcccctcctaaggaggatggtatctcacaaattagcttcattcaaaaatcaaattaccatgctgtttagattc

SEQ ID NO: 20632 - DNA, 87 bp, Homo sapiens
  MAP TO AC008111.1; EXPRESSED IN BT474, SIGNAL = 0.98; EXPRESSED IN BONE MARROW, SIGNAL = 1.3; EXPRESSED IN HELA, SIGNAL = 1.3; EXPRESSED IN PLACENTA, SIGNAL = 1.1; EXPRESSED IN FETAL LIVER, SIGNAL = 1.3; EXPRESSED IN LUNG, SIGNAL = 1.4; EXPRESSED IN ADULT LIVER, SIGNAL = 1.2; EXPRESSED IN BRAIN, SIGNAL = 1.5; EXPRESSED IN HEART, SIGNAL = 1.2; EXPRESSED IN HBL100, SIGNAL = 1.1; EST_HUMAN HIT: W52414.1, EVALUE 1.10e+00; SWISSPROT HIT: Q59757, EVALUE 9.30e+00; NT HIT: AL163247.2, EVALUE 3.00e-18
  unsure 44
atgtcgtggccacattgccaacccagaatcagcagggaccaaanggctcgcccaccttgggatcctgttcgtgatgccaattgtcag

SEQ ID NO: 20633 - DNA, 162 bp, Homo sapiens
  MAP TO AL049838.2; EXPRESSED IN PLACENTA, SIGNAL = 0.93; EXPRESSED IN BT474, SIGNAL = 0.65; EXPRESSED IN LUNG, SIGNAL = 0.98; EXPRESSED IN FETAL LIVER, SIGNAL = 0.61; EXPRESSED IN HEART, SIGNAL = 0.97; NT HIT: AF071237.1, EVALUE 3.70e-01; EST_HUMAN HIT: N53553.1, EVALUE 2.20e+00
gttgggaatatcgtagtagaagatgcagactctgggaccagaaagacaggtttcatcctttactatctgagagtcatgggttcctttgcaaaagggtaataacaatatgctgcacttcacacatttgttttatgaatcaaatgaaacaatgaatgtcaaaca

SEQ ID NO: 20634 - DNA, 259 bp, Homo sapiens
  MAP TO AP000104.1; EXPRESSED IN PLACENTA, SIGNAL = 0.62; EXPRESSED IN BONE MARROW, SIGNAL = 0.65; EXPRESSED IN LUNG, SIGNAL = 2.8; EXPRESSED IN ADULT LIVER, SIGNAL = 0.65; EXPRESSED IN FETAL LIVER, SIGNAL = 0.89; EXPRESSED IN HEART, SIGNAL = 0.92; SWISSPROT HIT: P15712, EVALUE 7.90e-01; NT HIT: AB040802.1, EVALUE 2.00e-03; EST_HUMAN HIT: BF528833.1, EVALUE 2.40e-01
gccccttccgtcccctggccacactcagcctgctgctcctttttgttcctaacacacaacccggccatggtcctgtggcagctgctgtgactgtcacctctctgggcactgctgctgctgttaactccccttcctttgtgccctgaaaagggtgtgaccaccttggagagcctaaagggctcctttttcctgaccctgcagccatctgcaccccaggaacattcgagagaaacctcaggccagatcttttcctctcacc

SEQ ID NO: 20635 - DNA, 267 bp, Homo sapiens
  MAP TO AP000095.1; EXPRESSED IN BT474, SIGNAL = 1.1; EXPRESSED IN PLACENTA, SIGNAL = 1.2; EXPRESSED IN HEART, SIGNAL = 1.2; EXPRESSED IN BRAIN, SIGNAL = 1.4; EXPRESSED IN ADULT LIVER, SIGNAL =   1; EXPRESSED IN HELA, SIGNAL = 0.87; EXPRESSED IN LUNG, SIGNAL = 0.84; EXPRESSED IN FETAL LIVER, SIGNAL = 1.1; EXPRESSED IN HBL100, SIGNAL = 0.86; EXPRESSED IN BONE MARROW, SIGNAL = 1.1; NT HIT: gi11526170, EVALUE 1.00e-119; EST_HUMAN HIT: AI659715.1, EVALUE 5.00e-91; SWISSPROT HIT: P39086, EVALUE 4.00e-38
tcttcaactccaagaagaagggaagctgcatatgatgaaagagaagtggtggcgtgggaatggctgccccgaggaagacaacaaagaagccagtgccctgggagtggaaaatattggaggcatcttcattgttctggctgccggactggtcctttctgtatttgtagctattggagaattcatatacaaatcacggaagaataatgatattgaacaggtgagtcatctctttctaggactggttagtttatagtttgcattatctgt

SEQ ID NO: 20636 - DNA, 125 bp, Homo sapiens
  MAP TO AF130866.1; EXPRESSED IN BT474, SIGNAL = 2.3; EXPRESSED IN FETAL LIVER, SIGNAL = 2.8; EXPRESSED IN LUNG, SIGNAL =   3; EXPRESSED IN BONE MARROW, SIGNAL = 2.7; EXPRESSED IN HEART, SIGNAL = 2.4; EXPRESSED IN PLACENTA, SIGNAL = 2.6; EXPRESSED IN ADULT LIVER, SIGNAL = 3.4; EXPRESSED IN BRAIN, SIGNAL = 2.5; EXPRESSED IN HELA, SIGNAL = 2.8; EXPRESSED IN HBL100, SIGNAL = 2.5; EST_HUMAN HIT: BF365703.1, EVALUE 1.00e-01; NT HIT: AJ009961.1, EVALUE 2.40e-01; SWISSPROT HIT: P82103, EVALUE 6.80e+00
ctggagagggaatgccatcagctctgaagacactcagactaggagcaaagaggacaatggaggcatcggcagcagcttcttgggtgagtgactgggcatgtctggggctggatgagcaactggac

SEQ ID NO: 20637 - DNA, 116 bp, Homo sapiens
  MAP TO AF070718.1; EXPRESSED IN BONE MARROW, SIGNAL = 3.5; EXPRESSED IN ADULT LIVER, SIGNAL = 4.1; EXPRESSED IN FETAL LIVER, SIGNAL = 3.3; EXPRESSED IN BRAIN, SIGNAL = 2.7; EXPRESSED IN LUNG, SIGNAL = 3.7; EXPRESSED IN HEART, SIGNAL = 2.8; EXPRESSED IN HELA, SIGNAL = 3.6; EXPRESSED IN HBL100, SIGNAL = 3.5; EXPRESSED IN PLACENTA, SIGNAL = 3.6; EXPRESSED IN BT474, SIGNAL = 3.4; NT HIT: AF003529.1, EVALUE 3.00e-13; EST_HUMAN HIT: R76269.1, EVALUE 8.00e-14; SWISSPROT HIT: Q13105, EVALUE 5.40e+00
tggagaaaagaccaggtgagacacagcaagaaggcaaccagctgcaagtcaaagaggcctcagaagaaaacaaacctgttgacaccttgatcatagacttccagcctccagaactg

SEQ ID NO: 20638 - DNA, 165 bp, Homo sapiens
  MAP TO AP000133.1; EXPRESSED IN BRAIN, SIGNAL = 1.3; EXPRESSED IN HBL100, SIGNAL = 0.86; EXPRESSED IN HEART, SIGNAL = 1.2; EXPRESSED IN PLACENTA, SIGNAL = 1.3; EXPRESSED IN BT474, SIGNAL = 0.8; EXPRESSED IN BONE MARROW, SIGNAL = 0.9; EXPRESSED IN LUNG, SIGNAL = 1.5; EXPRESSED IN HELA, SIGNAL = 0.99; EXPRESSED IN ADULT LIVER, SIGNAL = 1.3; EXPRESSED IN FETAL LIVER, SIGNAL = 0.92; EST_HUMAN HIT: BE250108.1, EVALUE 6.00e-03
agccagctgcaccggcgtcatcctgccctcaaatctgaggctgcatttagaacctgaagcagcagaaatgagcgtcccgctgtcctgcatcatcctacagggtcaggacgaaggggacaaagggtgcgtcagcacctccaccagcctgtccctccttgggcagca

SEQ ID NO: 20639 - DNA, 126 bp, Homo sapiens
  MAP TO AP000237.1; EXPRESSED IN BONE MARROW, SIGNAL = 0.77; EXPRESSED IN HBL100, SIGNAL = 0.67; EXPRESSED IN ADULT LIVER, SIGNAL = 0.65; EXPRESSED IN HEART, SIGNAL = 8.2; EST_HUMAN HIT: BF035327.1, EVALUE 5.00e-16; NT HIT: AL163300.2, EVALUE 1.00e-12
aaagttttagtggtctggatagaagctcaaaccagccgcaagagcctcttaagccaaagcctaatccacagcaaggtcatcaataacgaggcaaaaccctccaccagcaaaaagattacaacttgc

SEQ ID NO: 20640 - DNA, 144 bp, Homo sapiens
  MAP TO AC010104.1; EXPRESSED IN BONE MARROW, SIGNAL = 1.1; EXPRESSED IN ADULT LIVER, SIGNAL = 1.1; EXPRESSED IN FETAL LIVER, SIGNAL = 1.1; EXPRESSED IN HEART, SIGNAL = 0.99; EXPRESSED IN LUNG, SIGNAL = 4.2; EXPRESSED IN BRAIN, SIGNAL = 0.95; NT HIT: U03887.1, EVALUE 3.00e-16; EST_HUMAN HIT: BE144579.1, EVALUE 4.00e-16
ctggcagagaccagcttcctaattaacagtgctatcttgctgtgtcctcatatagtggaaggggcgagggagctccctggggtcccttttataaagacactgatcccattcatgaggacccaccctcatgacctcatcacctcc

SEQ ID NO: 20641 - DNA, 124 bp, Homo sapiens
  MAP TO AJ003147.1; EXPRESSED IN PLACENTA, SIGNAL = 7.2; EXPRESSED IN HBL100, SIGNAL = 8.2; EXPRESSED IN HELA, SIGNAL =   8; EXPRESSED IN BT474, SIGNAL = 7.6; EXPRESSED IN LUNG, SIGNAL = 7.9; EXPRESSED IN HEART, SIGNAL = 5.6; EXPRESSED IN ADULT LIVER, SIGNAL = 9.6; EXPRESSED IN FETAL LIVER, SIGNAL = 7.8; EXPRESSED IN BRAIN, SIGNAL = 6.7; EXPRESSED IN BONE MARROW, SIGNAL = 7.1; NT HIT: AF017433.1, EVALUE 5.00e-64; EST_HUMAN HIT: BE387480.1, EVALUE 6.00e-64; SWISSPROT HIT: P17097, EVALUE 3.00e-04
ggacctgtggcattgggagacatcccattctatttctcccgggaagaatggggcaccctggaccctgctcagcgggatctcttctgggacataaagcgggagaactcccggaacaccaccctgg

SEQ ID NO: 20642 - DNA, 228 bp, Homo sapiens
  MAP TO AL008626.1; EXPRESSED IN PLACENTA, SIGNAL = 1.6; EXPRESSED IN HBL100, SIGNAL = 1.5; EXPRESSED IN BT474, SIGNAL = 1.5; EXPRESSED IN ADULT LIVER, SIGNAL = 1.8; EXPRESSED IN HEART, SIGNAL = 1.3; EXPRESSED IN FETAL LIVER, SIGNAL = 1.6; EXPRESSED IN LUNG, SIGNAL = 1.7; EXPRESSED IN BONE MARROW, SIGNAL = 1.8; EXPRESSED IN BRAIN, SIGNAL = 1.8; EXPRESSED IN HELA, SIGNAL = 1.8; NT HIT: AF120492.1, EVALUE 4.60e-01; SWISSPROT HIT: P29275, EVALUE 1.00e+00; EST_HUMAN HIT: AI769848.1, EVALUE 8.00e-04
gaaaccatcctgaagccttctaaccagctccatcctgagcttccagctgtccaactatattacaagactgttcatcttgttaagtctgctcaccatcattatggggatgccactcaactctctctgttgtttgatcctttgtttcctggattgcacagttttctcttacatggtattactccctcattttggtggatcacaccctccactagcttcctaataaaagat

SEQ ID NO: 20643 - DNA, 127 bp, Homo sapiens
  MAP TO AC008159.1; EXPRESSED IN BT474, SIGNAL = 0.78; EXPRESSED IN HELA, SIGNAL = 1.1; EXPRESSED IN BRAIN, SIGNAL = 0.72; EXPRESSED IN HEART, SIGNAL =  23; EXPRESSED IN BONE MARROW, SIGNAL = 4.6; EXPRESSED IN HBL100, SIGNAL = 1.2; SWISSPROT HIT: P15948, EVALUE 6.80e+00; EST_HUMAN HIT: AU120566.1, EVALUE 2.00e-37; NT HIT: gi7106396, EVALUE 1.00e-37
ttatgtgaaacttcgccacctcctagcaaatagtcccaaagtcaaacaaactgacaaacagaagctggcacagagggaggtctgtatcaaactccattccttggtgattaacgatgatgtgcttcag

SEQ ID NO: 20644 - DNA, 149 bp, Homo sapiens
  MAP TO AC007784.7; EXPRESSED IN HEART, SIGNAL = 0.82; NT HIT: AF121948.1, EVALUE 2.90e-01; EST_HUMAN HIT: W87841.1, EVALUE 8.70e-02; SWISSPROT HIT: P31599, EVALUE 8.70e+00
atcacttggctggccagtggcaaagccggtctgagaggttttccactaatttatattgccacatttacacccagcattatgactgtaagaagctggaaaattgagataaagttgcagtaacatccaactcttaccctacgcaggaaata

SEQ ID NO: 20645 - DNA, 341 bp, Homo sapiens
  MAP TO AL022721.1; EXPRESSED IN LUNG, SIGNAL = 2.2; EXPRESSED IN BRAIN, SIGNAL = 1.6; EXPRESSED IN HELA, SIGNAL = 2.4; EXPRESSED IN HEART, SIGNAL = 1.7; EXPRESSED IN FETAL LIVER, SIGNAL = 2.2; EXPRESSED IN BONE MARROW, SIGNAL = 2.2; EXPRESSED IN PLACENTA, SIGNAL = 1.9; EXPRESSED IN HBL100, SIGNAL = 3.4; EXPRESSED IN BT474, SIGNAL = 1.8; EXPRESSED IN ADULT LIVER, SIGNAL = 1.9; EST_HUMAN HIT: AL047433.1, EVALUE 1.00e-93; NT HIT: AF142482.1, EVALUE 6.00e-94; SWISSPROT HIT: Q99594, EVALUE 1.00e-20
tacagcaaacacctgtttgtgcacatcggccagacgaaccccgccttctcagacccacccctggaggcagtagatgtgcgccagatctatgacaaattccccgagaaaaagggaggattgaaggagctctatgagaaggggccccctaatgccttcttccttgtcaagttctgggtgagtccccctggccttctctgctccaagcccccttccccaccccagaggtgcaacatccaggcccactgcattgacctctgaccctgctgcatcctcatggcttgtgggcagagtgccagagatggatccttgggcaggactctgatgtggtgtggcgggaatac

SEQ ID NO: 20646 - DNA, 129 bp, Homo sapiens
  MAP TO AP000107.1; EXPRESSED IN FETAL LIVER, SIGNAL = 0.68; EXPRESSED IN BRAIN, SIGNAL = 0.7; EXPRESSED IN HEART, SIGNAL = 0.83; EXPRESSED IN LUNG, SIGNAL = 0.65; EXPRESSED IN HELA, SIGNAL = 0.61; EXPRESSED IN ADULT LIVER, SIGNAL = 0.69; SWISSPROT HIT: P28947, EVALUE 8.90e+00; NT HIT: AF020503.1, EVALUE 3.00e-04; EST_HUMAN HIT: AI478617.1, EVALUE 8.00e-11
tcacacgttttcattatgtcgtctagaggcaatttttctgcagtgttaactatgttatcttcagcattgtgcacctgcattttgactgcgacccatcacacgaggtcaggtgagaaatcttccacttgt

SEQ ID NO: 20647 - DNA, 125 bp, Homo sapiens
  MAP TO AL031117.1; EXPRESSED IN BONE MARROW, SIGNAL = 2.7; EXPRESSED IN LUNG, SIGNAL = 3.5; EXPRESSED IN BRAIN, SIGNAL = 4.1; EXPRESSED IN HELA, SIGNAL = 3.4; EXPRESSED IN HEART, SIGNAL = 3.6; EXPRESSED IN FETAL LIVER, SIGNAL = 3.1; EXPRESSED IN ADULT LIVER, SIGNAL = 3.2; EXPRESSED IN PLACENTA, SIGNAL = 4.9; EXPRESSED IN HBL100, SIGNAL = 3.3; EXPRESSED IN BT474, SIGNAL = 4.2; SWISSPROT HIT: P00368, EVALUE 3.00e-04; NT HIT: AE000599.1, EVALUE 2.80e-01; EST_HUMAN HIT: AI267816.1, EVALUE 4.10e-01
aattcaagtagaaaatggggattatcaaactattcaccataatgaagatcttaatccctgctgctattggtccattaccaccttcagcagtgatttttgttttgattttgcaagcattgtgcttg

SEQ ID NO: 20648 - DNA, 625 bp, Homo sapiens
  MAP TO AL022726.1; EXPRESSED IN BT474, SIGNAL = 0.96; EXPRESSED IN BONE MARROW, SIGNAL = 0.91; EXPRESSED IN LUNG, SIGNAL = 1.2; EXPRESSED IN HEART, SIGNAL = 1.1; NT HIT: X87344.1, EVALUE 1.00e-01; SWISSPROT HIT: P03191, EVALUE 6.20e-01
tttctgctgggcaggagtgaaagttctacctctccactaacttcttctgatgccactccagtgaggtggggaggagcattttattactgcaggatgggatggaagtccatactctccatgtggtctccatgagcaccatcagtgtggtggtggtggtgaagactccttattgcctggtggagatgaagttcctagctctctgcttttcctctatgacaccacttggataggagttttggggtatctggcaaaggtggaaatggagcctcccactcagtttttgctggtgggggtggaggtgaggccacagttttctctgtggtgtttggctgttactgtccaagcatcttctgtctggctaggtagccattttgcttatcctttttctagagagggcaggtttctgttgaggctttttgggttgatacttgttggtatttctgggtttctgtcttctccagcacctaatctgggatatttgaggcaaaaaattaactcagagcactcaccacctgttgttcatcgggtcccaagttccctagctgatttgccgccctctgttcaccttgtcttcaaccttcttatgtctgaaatagatggaacactgctccatctttctgaaaat

SEQ ID NO: 20649 - DNA, 169 bp, Homo sapiens
  MAP TO AL031132.1; EXPRESSED IN PLACENTA, SIGNAL = 1.2; EXPRESSED IN HEART, SIGNAL = 1.6; EXPRESSED IN FETAL LIVER, SIGNAL = 1.5; EXPRESSED IN BT474, SIGNAL = 1.6; EXPRESSED IN BONE MARROW, SIGNAL = 1.5; EXPRESSED IN BRAIN, SIGNAL = 1.5; EXPRESSED IN LUNG, SIGNAL = 1.8; EXPRESSED IN HBL100, SIGNAL = 1.4; EXPRESSED IN HELA, SIGNAL =   2; EXPRESSED IN ADULT LIVER, SIGNAL = 1.6; EST_HUMAN HIT: AA016210.1, EVALUE 2.30e+00; SWISSPROT HIT: P20189, EVALUE 5.00e+00; NT HIT: S43653.1, EVALUE 3.90e-01
atgttagaacaactttgagtctttctcctctgtctttagtgtagtttattgccttgactagggctgtgtctacttgttcggatgccatcatttttccagcttcaatgttgattctcacaagccaattatttcttgtcatgactgttacagaaagaaagtgaaggttcat

SEQ ID NO: 20650 - DNA, 151 bp, Homo sapiens
  MAP TO AL021155.1; EXPRESSED IN BONE MARROW, SIGNAL = 6.2; EXPRESSED IN PLACENTA, SIGNAL = 6.6; EXPRESSED IN BT474, SIGNAL = 4.8; EXPRESSED IN ADULT LIVER, SIGNAL = 6.3; EXPRESSED IN FETAL LIVER, SIGNAL =   5; EXPRESSED IN BRAIN, SIGNAL = 5.8; EXPRESSED IN LUNG, SIGNAL = 5.8; EXPRESSED IN HEART, SIGNAL =   5; EXPRESSED IN HELA, SIGNAL = 6.4; EXPRESSED IN HBL100, SIGNAL = 6.7; SWISSPROT HIT: O95248, EVALUE 6.00e-10; NT HIT: U93181.1, EVALUE 3.00e-47; EST_HUMAN HIT: BE737332.1, EVALUE 6.00e-47
aagctgctgaaggcatgtgtcccgggctgccccgctgctgagcccagcccagcctccttcctgtgcttgctggaggactcggagcggctgaccccaatccacaagctgctgcaggtgccagtgctggtggtggagcccctggattcagact

SEQ ID NO: 20651 - DNA, 338 bp, Homo sapiens
  MAP TO AL023281.1; EXPRESSED IN HEART, SIGNAL = 9.2; EXPRESSED IN FETAL LIVER, SIGNAL =  12; EXPRESSED IN BT474, SIGNAL = 9.2; EXPRESSED IN BONE MARROW, SIGNAL =  10; EXPRESSED IN BRAIN, SIGNAL = 9.2; EXPRESSED IN PLACENTA, SIGNAL =  12; EXPRESSED IN HELA, SIGNAL =  11; EXPRESSED IN HBL100, SIGNAL =  10; EXPRESSED IN ADULT LIVER, SIGNAL =  16; EXPRESSED IN LUNG, SIGNAL =  13; NT HIT: gi4585863, EVALUE 1.10e-02; SWISSPROT HIT: P81274, EVALUE 1.00e-05; EST_HUMAN HIT: AA897360.1, EVALUE 2.00e-02
tcatgtcatgttactcagctttctttgttccctttctgcactgaaatagagaagcatcactctacctaaggtcttggctacatccaagtcctgctgcatatatccggtgctcttctctgtatttccaagagaccagtaagcactgctcagggcagagaaaacagaacctctcagtttgaggctgcaggtgccaatcttcagtgcggcttctaagacaaccacagaggccccatgatggccagctgtcaggagttcctgcccaaccacagacacgaccacaaagggactcttgtccagtttcattttctgaagctgctgataagtgggctcgagggagt

SEQ ID NO: 20652 - DNA, 142 bp, Homo sapiens
  MAP TO AJ229042.1; EXPRESSED IN FETAL LIVER, SIGNAL = 6.1; EXPRESSED IN BONE MARROW, SIGNAL = 5.8; EXPRESSED IN HEART, SIGNAL = 4.6; EXPRESSED IN PLACENTA, SIGNAL = 5.4; EXPRESSED IN BT474, SIGNAL = 5.5; EXPRESSED IN ADULT LIVER, SIGNAL = 5.4; EXPRESSED IN BRAIN, SIGNAL = 4.8; EXPRESSED IN LUNG, SIGNAL = 5.9; EXPRESSED IN HELA, SIGNAL =   6; EXPRESSED IN HBL100, SIGNAL =   5; SWISSPROT HIT: Q09103, EVALUE 1.00e+00; NT HIT: AL163268.2, EVALUE 1.00e-74; EST_HUMAN HIT: T48654.1, EVALUE 8.20e-02
tgcaatagtgatgagctcaccatgcacctgctgctggaagttcttgttagtttcctgctgcttctgcccaaggataagaaagaagatgatgtctctaaagaccagggcccctccaccctgtatattttaccattattgtttc

SEQ ID NO: 20653 - DNA, 392 bp, Homo sapiens; identical to SEQ ID NO: 3888
  MAP TO AL031224.1; EXPRESSED IN BONE MARROW, SIGNAL = 1.4; EXPRESSED IN BRAIN, SIGNAL = 1.3; EXPRESSED IN LUNG, SIGNAL = 1.6; EXPRESSED IN HELA, SIGNAL = 1.4; EXPRESSED IN PLACENTA, SIGNAL = 1.2; EXPRESSED IN HBL100, SIGNAL = 1.2; EXPRESSED IN HEART, SIGNAL = 1.4; EXPRESSED IN FETAL LIVER, SIGNAL = 1.7; EXPRESSED IN BT474, SIGNAL = 1.3; EXPRESSED IN ADULT LIVER, SIGNAL = 1.2; NT HIT: AF169288.1, EVALUE 1.30e-02; EST_HUMAN HIT: AA092046.1, EVALUE 1.60e-02

SEQ ID NO: 20654 - DNA, 130 bp, Homo sapiens
  MAP TO AJ229043.1; EXPRESSED IN PLACENTA, SIGNAL = 9.4; EXPRESSED IN HBL100, SIGNAL = 8.3; EXPRESSED IN BT474, SIGNAL = 7.5; EXPRESSED IN FETAL LIVER, SIGNAL = 9.1; EXPRESSED IN LUNG, SIGNAL = 8.8; EXPRESSED IN BONE MARROW, SIGNAL = 8.3; EXPRESSED IN HEART, SIGNAL = 7.2; EXPRESSED IN HELA, SIGNAL = 8.9; EXPRESSED IN ADULT LIVER, SIGNAL =  11; EXPRESSED IN BRAIN, SIGNAL = 7.9; NT HIT: AJ229043.1, EVALUE 5.00e-24; EST_HUMAN HIT: AW863068.1, EVALUE 6.00e-24
caagtcacatcaccgctttgtgcctctgcttttccacctgtaaaacagaaataacagtcatcatcaccatcatcatcatcatcatcatcatcatcatcgtaatccctgctaggaatgctgccgggcacat

SEQ ID NO: 20655 - DNA, 141 bp, Homo sapiens
  MAP TO AL021367.1; EXPRESSED IN BONE MARROW, SIGNAL =   2; EXPRESSED IN BRAIN, SIGNAL = 1.2; EXPRESSED IN HELA, SIGNAL = 1.7; EXPRESSED IN HEART, SIGNAL = 1.4; EXPRESSED IN PLACENTA, SIGNAL = 1.6; EXPRESSED IN HBL100, SIGNAL = 1.7; EXPRESSED IN BT474, SIGNAL = 1.5; EXPRESSED IN ADULT LIVER, SIGNAL = 1.9; EXPRESSED IN FETAL LIVER, SIGNAL = 1.8; EXPRESSED IN LUNG, SIGNAL =   2; EST_HUMAN HIT: AA299675.1, EVALUE 5.00e-03; SWISSPROT HIT: P24896, EVALUE 6.70e+00
tgaatatttttgatgtagttgttcaacccacagatgcagaactggcagatatgaatggccaactgtacatagcctttaagattaaaatgtttttcttcagaattgaccattttttaaaattaattatgagccatacattta

SEQ ID NO: 20656 - DNA, 294 bp, Homo sapiens
  MAP TO AL008628.1; EXPRESSED IN BONE MARROW, SIGNAL = 2.2; EXPRESSED IN PLACENTA, SIGNAL = 1.7; EXPRESSED IN BT474, SIGNAL = 1.7; EXPRESSED IN ADULT LIVER, SIGNAL =   2; EXPRESSED IN FETAL LIVER, SIGNAL = 1.8; EXPRESSED IN BRAIN, SIGNAL = 1.8; EXPRESSED IN LUNG, SIGNAL = 1.9; EXPRESSED IN HEART, SIGNAL = 1.6; EXPRESSED IN HELA, SIGNAL =   2; EXPRESSED IN HBL100, SIGNAL =   2; NT HIT: Y15994.1, EVALUE 2.00e-03; EST_HUMAN HIT: AI200877.1, EVALUE 3.00e-06; SWISSPROT HIT: P41479, EVALUE 6.00e-07
atttattgtaaaggatattgctattgcaaaggatacagatgaagagacaggtaggtcaagatataggggaaaggacacagagcttctaaggtaggtcaaggtacagggaagggacacagagcttctaaggtaggtcaaggtgtagggaagggacacagagcttctaaggtaggtcaaggtgtagggaagggacacagagcttctaaggtaggtcaaggtgtagggaagggacacagagcttctaaggtaggtcaaggtgtagggaagggacacagagcttctaaggtaggtcaa

SEQ ID NO: 20657 - DNA, 290 bp, Homo sapiens
  MAP TO AL031073.1; EXPRESSED IN PLACENTA, SIGNAL = 9.3; EXPRESSED IN HEART, SIGNAL = 4.6; EXPRESSED IN FETAL LIVER, SIGNAL =  14; EXPRESSED IN BT474, SIGNAL = 4.2; EXPRESSED IN BONE MARROW, SIGNAL = 5.2; EXPRESSED IN BRAIN, SIGNAL = 4.7; EXPRESSED IN LUNG, SIGNAL = 5.4; EXPRESSED IN HELA, SIGNAL = 5.7; EXPRESSED IN HBL100, SIGNAL = 4.2; EXPRESSED IN ADULT LIVER, SIGNAL = 4.9; EST_HUMAN HIT: BE387074.1, EVALUE 0.00e+00; NT HIT: AF116195.1, EVALUE 0.00e+00
gaccaccaagaatcagagaagaggatgtggagaaagaagagggggaaaatactaagtacaaagtggaagaggcggaggaggcttcctcctcttcctcatctgtgggatgctgtgcatctacccagtcttctaactcaactgaggtcggggagtcgttgtcaacgttgcggaatggaacgcctggaacgggaggcatgacgacttcttcaggagcagcaggtaaacgtatcaacagggatatggatgatgagatccaacaggcctgtggaagagagtgacagtgtgagtgg

SEQ ID NO: 20658 - DNA, 119 bp, Homo sapiens
  MAP TO AL022154.1; EXPRESSED IN BT474, SIGNAL = 2.5; EXPRESSED IN FETAL LIVER, SIGNAL =   3; EXPRESSED IN ADULT LIVER, SIGNAL = 3.9; EXPRESSED IN BONE MARROW, SIGNAL = 2.6; EXPRESSED IN LUNG, SIGNAL = 3.5; EXPRESSED IN BRAIN, SIGNAL = 3.6; EXPRESSED IN HEART, SIGNAL =   3; EXPRESSED IN PLACENTA, SIGNAL = 4.4; EXPRESSED IN HBL100, SIGNAL = 2.4; EXPRESSED IN HELA, SIGNAL = 3.1; EST_HUMAN HIT: BF676685.1, EVALUE 3.00e-23
atgatgaggcagattcagatgcggaagaggaggatgggtgtaaagaactaaattcagattctgaatgtgaggaacaggaaatggaggaaattaaagaaaagaaagggaaactgaacaaa

SEQ ID NO: 20659 - DNA, 182 bp, Homo sapiens
  MAP TO AL031076.1; EXPRESSED IN BT474, SIGNAL = 5.9; EXPRESSED IN ADULT LIVER, SIGNAL = 8.3; EXPRESSED IN BONE MARROW, SIGNAL = 7.2; EXPRESSED IN BRAIN, SIGNAL =   7; EXPRESSED IN LUNG, SIGNAL = 8.7; EXPRESSED IN HELA, SIGNAL = 7.4; EXPRESSED IN PLACENTA, SIGNAL = 7.8; EXPRESSED IN HBL100, SIGNAL = 7.1; EXPRESSED IN HEART, SIGNAL = 7.4; EXPRESSED IN FETAL LIVER, SIGNAL = 7.6; NT HIT: AJ277662.1, EVALUE 6.60e+00; SWISSPROT HIT: Q04912, EVALUE 2.50e-01; EST_HUMAN HIT: AV762392.1, EVALUE 3.00e-03
ctcctccgggggatcccagcggccatcctgggtgtctggatgctcgtccttgtgtgcctggtccgtctcctcccagcggccattctgagtgtctggatgctcgtcctgtgtgcctggcccctctcctctaacctccatccaggtctgcagtgcagtgatacagaggtggcacccgtgagccc

SEQ ID NO: 20660 - DNA, 322 bp, Homo sapiens
  MAP TO AL022722.1; EXPRESSED IN BT474, SIGNAL = 6.8; EXPRESSED IN BONE MARROW, SIGNAL = 3.5; EXPRESSED IN LUNG, SIGNAL = 5.8; EXPRESSED IN HELA, SIGNAL =   7; EXPRESSED IN HEART, SIGNAL = 5.2; EXPRESSED IN ADULT LIVER, SIGNAL =   1; EXPRESSED IN FETAL LIVER, SIGNAL = 6.4; EXPRESSED IN BRAIN, SIGNAL = 4.1; EXPRESSED IN PLACENTA, SIGNAL = 3.8; EXPRESSED IN HBL100, SIGNAL = 9.2; NT HIT: gi6912633, EVALUE 1.00e-42; EST_HUMAN HIT: AW161927.1, EVALUE 8.00e-42; SWISSPROT HIT: P40429, EVALUE 1.00e-28
agctgcttttcttccaatagcagatattggccttcttcctcttctcctgggtggctgtcactgcctggtacttccagccaaactcgtgaaccaggcaccccagataggcaaattttctcacaggcttcagacacacaaccttgggagcagcaggaagcatcatccactttttcttgtcatagggcagtgggatcccattaaacaccttggggtggtcagggacgtcctggcctcgcttggtcttgcgaagcagcatgcctcaagcggtctgccaaaagatgcagatggggggcctcaggaagggttggtgttcatctacttg

SEQ ID NO: 20661 - DNA, 103 bp, Homo sapiens
  MAP TO AL078624.22; EXPRESSED IN BRAIN, SIGNAL = 2.4; EXPRESSED IN BONE MARROW, SIGNAL = 3.5; EXPRESSED IN LUNG, SIGNAL = 3.6; EXPRESSED IN HBL100, SIGNAL =   4; EXPRESSED IN PLACENTA, SIGNAL = 3.2; EXPRESSED IN FETAL LIVER, SIGNAL = 3.9; EXPRESSED IN HEART, SIGNAL =   3; EXPRESSED IN HELA, SIGNAL = 3.9; EXPRESSED IN ADULT LIVER, SIGNAL = 3.8; EXPRESSED IN BT474, SIGNAL = 3.5; EST_HUMAN HIT: BF311762.1, EVALUE 5.00e-03; NT HIT: AJ251884.1, EVALUE 5.00e-05
gaaagaagtttatgttcacagtttcctagaaacaggagttacagcacaacacagagaaggaatgggtggggcagggcagggcagggcaggcaggtttagaatt

SEQ ID NO: 20662 - DNA, 114 bp, Homo sapiens
  MAP TO AL031119.1; EXPRESSED IN PLACENTA, SIGNAL = 1.7; EXPRESSED IN BT474, SIGNAL = 1.2; EXPRESSED IN BONE MARROW, SIGNAL = 1.2; EXPRESSED IN BRAIN, SIGNAL = 1.2; EXPRESSED IN LUNG, SIGNAL = 1.5; EXPRESSED IN HELA, SIGNAL = 1.4; EXPRESSED IN HBL100, SIGNAL = 1.3; EXPRESSED IN HEART, SIGNAL = 1.3; EXPRESSED IN ADULT LIVER, SIGNAL = 1.3; EXPRESSED IN FETAL LIVER, SIGNAL = 1.2; EST_HUMAN HIT: BE174878.1, EVALUE 3.00e-25; SWISSPROT HIT: P27401, EVALUE 1.20e-01; NT HIT: AL163246.2, EVALUE 1.00e-15
aagtgagaagcaatcaaactctctctgaataagattataacacaaagtcagagagttgatatacccctgaggtaggacagtaaaggtatattactggccttaccagctgaaggc

SEQ ID NO: 20663 - DNA, 414 bp, Homo sapiens; identical to SEQ ID NO: 3899
  MAP TO AL023279.1; EXPRESSED IN PLACENTA, SIGNAL = 2.2; EXPRESSED IN HEART, SIGNAL = 1.7; EXPRESSED IN FETAL LIVER, SIGNAL = 1.9; EXPRESSED IN BT474, SIGNAL = 1.5; EXPRESSED IN BONE MARROW, SIGNAL = 1.9; EXPRESSED IN BRAIN, SIGNAL = 1.8; EXPRESSED IN LUNG, SIGNAL = 2.1; EXPRESSED IN HELA, SIGNAL = 1.8; EXPRESSED IN HBL100, SIGNAL = 1.7; EXPRESSED IN ADULT LIVER, SIGNAL = 1.8; NT HIT: AL163227.2, EVALUE 5.00e-55; EST_HUMAN HIT: BE744722.1, EVALUE 4.00e-47; SWISSPROT HIT: P04328, EVALUE 1.80e+00

SEQ ID NO: 20664 - DNA, 281 bp, Homo sapiens
  MAP TO AL022166.1; EXPRESSED IN BT474, SIGNAL = 1.1; EXPRESSED IN ADULT LIVER, SIGNAL = 1.2; EXPRESSED IN FETAL LIVER, SIGNAL = 0.98; EXPRESSED IN BRAIN, SIGNAL = 0.97; EXPRESSED IN BONE MARROW, SIGNAL = 1.7; EXPRESSED IN LUNG, SIGNAL =   1; EXPRESSED IN HELA, SIGNAL = 1.2; EXPRESSED IN HEART, SIGNAL =   1; NT HIT: X52519.1, EVALUE 6.80e-01; EST_HUMAN HIT: AV652010.1, EVALUE 1.00e+00; SWISSPROT HIT: Q04886, EVALUE 4.20e-01
agtcaggaaaaggtttacttcaggtggaagaaataccattgtgctgaaggcaagcacccggtggagagacatgaaatcaatagcacaggggtggcagagagcatccttggagcagcagctttgagtaggcaggagggcgccgggaacttgtatcaaggggagagctggagcatgcaggaggagttgcaaaatagggagctactggagtgggtagatgtcagctaggcattctggccctcctgaactcttctagctgaggttaggcacctgcctatttgttg

SEQ ID NO: 20665 - DNA, 271 bp, Homo sapiens
  MAP TO AL031177.1; EXPRESSED IN LUNG, SIGNAL =   4; EXPRESSED IN HEART, SIGNAL = 3.6; EXPRESSED IN FETAL LIVER, SIGNAL = 4.8; EXPRESSED IN BT474, SIGNAL = 3.6; EXPRESSED IN BRAIN, SIGNAL = 3.5; EXPRESSED IN BONE MARROW, SIGNAL = 4.9; EXPRESSED IN PLACENTA, SIGNAL =   4; EXPRESSED IN HELA, SIGNAL = 4.1; EXPRESSED IN HBL100, SIGNAL = 3.8; EXPRESSED IN ADULT LIVER, SIGNAL = 4.8; EST_HUMAN HIT: F13706.1, EVALUE 1.70e-01; SWISSPROT HIT: Q99795, EVALUE 9.70e-02; NT HIT: AF109928.2, EVALUE 6.50e-01
atgaaacagtgttatcagaatttgagtatgtactattgatttttttatgattatcttttcaggtcaggttagtgtggtgcaagtgaccatcccagacggtttcgtgaacgtgactgttggatctaatgtcactctcatctgcatctacaccaccactgtggcctcccgagaacagctttccatccagtggtctttcttccataagaaggagatggagccaatttctgtaaggacactttttcctaaactcttccccttttgtagttctgac

SEQ ID NO: 20666 - DNA, 168 bp, Homo sapiens
  MAP TO AL023285.1; EXPRESSED IN BT474, SIGNAL = 1.1; EXPRESSED IN FETAL LIVER, SIGNAL = 1.2; EXPRESSED IN ADULT LIVER, SIGNAL = 1.2; EXPRESSED IN BONE MARROW, SIGNAL =   1; EXPRESSED IN LUNG, SIGNAL = 1.2; EXPRESSED IN HELA, SIGNAL = 0.95; EXPRESSED IN PLACENTA, SIGNAL = 1.1; EXPRESSED IN HBL100, SIGNAL = 0.97; EXPRESSED IN HEART, SIGNAL = 0.96; NT HIT: D90908.1, EVALUE 1.30e+00; SWISSPROT HIT: P39072, EVALUE 2.20e+00; EST_HUMAN HIT: BF695738.1, EVALUE 5.80e-01
atcctgttgatgttgtacctgtgtgattgtgatggccccattgtggaaccaaccatcccctgccccaagtccttcaacaatgctagtgaatctcaatccaagctgcaaatagaatcattcagggagttttataaaacaccaatgagaccaatgattaggatgaattaa

SEQ ID NO: 20667 - DNA, 521 bp, Homo sapiens
  MAP TO AL031228.1; EXPRESSED IN PLACENTA, SIGNAL = 3.5; EXPRESSED IN HBL100, SIGNAL = 4.4; EXPRESSED IN BONE MARROW, SIGNAL = 3.6; EXPRESSED IN LUNG, SIGNAL =   5; EXPRESSED IN HELA, SIGNAL = 4.8; EXPRESSED IN HEART, SIGNAL = 3.9; EXPRESSED IN BT474, SIGNAL = 3.6; EXPRESSED IN ADULT LIVER, SIGNAL = 3.4; EXPRESSED IN FETAL LIVER, SIGNAL = 4.5; EXPRESSED IN BRAIN, SIGNAL = 4.4; NT HIT: M23910.1, EVALUE 0.00e+00; EST_HUMAN HIT: AI971689.1, EVALUE 0.00e+00; SWISSPROT HIT: P04440, EVALUE 5.00e-28
acaagctccggttgggctcctcccatcaatccccagctcaaagtccccttccctcctggcactaaggtcccttaggccggcccggctgcccctactccctgggcccggcccccacggctgccccaggagccctggttcacagccctcacctcggcgctgccggatgagtggctccatcagctcgtacttgtgtctgcacaccttgtccacctcggctcgcttccgttccataaagtccttctggctattgaagtactcgcctatgggccgccccagctccatcactgctaggaactcccccactgcgctgtcaaaatgcacgtattcctcccggttgtagatgagcccgtccacaacgcgctgagtcccattgaacgcatagcattcctgccgttcctggtagacggaattctctgtgaagagcagggagagatgggggtggtgccactcccaacaacacccccctcctcaatattagctatttcctcaaatcttcccactcaggactggatttaaaaata

SEQ ID NO: 20668 - DNA, 324 bp, Homo sapiens
  MAP TO AL021069.1; EXPRESSED IN BT474, SIGNAL = 1.8; EXPRESSED IN LUNG, SIGNAL = 1.8; EXPRESSED IN BRAIN, SIGNAL = 1.8; EXPRESSED IN BONE MARROW, SIGNAL = 1.8; EXPRESSED IN HEART, SIGNAL = 1.5; EXPRESSED IN FETAL LIVER, SIGNAL = 1.9; EXPRESSED IN ADULT LIVER, SIGNAL = 2.4; EXPRESSED IN PLACENTA, SIGNAL = 1.9; EXPRESSED IN HELA, SIGNAL = 2.1; EXPRESSED IN HBL100, SIGNAL =   2; EST_HUMAN HIT: BF373570.1, EVALUE 1.20e+00; SWISSPROT HIT: P04682, EVALUE 4.70e+00
tgatatttgtatccagcagatacacactggtatcactcagcctcaatcaaggcatcagcaaggcagttgataatgtccaaattgaagatattagacctgccatagtcctgaagagttcatggggaatctcaggcttgatcttgagtggaacctccaagctacacttaggaaaatcatgggaaattcacagcattatcaaacaagggcaatggcaaaggttgctgcacaagccagtcgggctgacctttccagccacagaaatttgcatgcgaatgcgagttagtccctttgcactagtcataaatgtgccagttcatgtcattc

SEQ ID NO: 20669 - DNA, 411 bp, Homo sapiens
  MAP TO AJ011931.1; EXPRESSED IN LUNG, SIGNAL = 6.7; EXPRESSED IN BRAIN, SIGNAL = 5.7; EXPRESSED IN BONE MARROW, SIGNAL = 6.5; EXPRESSED IN HELA, SIGNAL = 5.6; EXPRESSED IN HEART, SIGNAL = 5.4; EXPRESSED IN BT474, SIGNAL = 5.7; EXPRESSED IN ADULT LIVER, SIGNAL = 7.2; EXPRESSED IN FETAL LIVER, SIGNAL =   6; EXPRESSED IN PLACENTA, SIGNAL = 7.3; EXPRESSED IN HBL100, SIGNAL =   6; NT HIT: AL163303.2, EVALUE 0.00e+00; EST_HUMAN HIT: AA666188.1, EVALUE 6.60e-02; SWISSPROT HIT: P21259, EVALUE 1.00e-06
tagacaagtcacggtgtttacagggctgtgttccttctgaacaaaagtcacggtggctgcagggctgtgttccttctgaacaaaaatcagtgtggctgcagggctgtgttccttctgaacaaaaatcagcatggctgcagggctgtgttccttccgaacagaagtcagggtggccgcagggctgtgttccttctgaacaaaaatcagcatggctgcagggctgtgttccttctgaacaaaagtcagggtggctgcagggctgtgttccttctgaacaaaagtcagggtggctacagggctgtgttccttctgaacaaaagtcagggtggctacagggctgtgttccttccgaacagaagtcagggtggctgcagggctgtgttccttctgaacaaaagtcagggtggctac

SEQ ID NO: 20670 - DNA, 247 bp, Homo sapiens
  MAP TO AL033517.1; EXPRESSED IN BONE MARROW, SIGNAL = 1.5; EXPRESSED IN BRAIN, SIGNAL = 1.4; EXPRESSED IN HBL100, SIGNAL = 1.4; EXPRESSED IN LUNG, SIGNAL = 1.5; EXPRESSED IN HELA, SIGNAL = 1.5; EXPRESSED IN PLACENTA, SIGNAL = 1.1; EXPRESSED IN HEART, SIGNAL = 1.7; EXPRESSED IN FETAL LIVER, SIGNAL = 1.3; EXPRESSED IN BT474, SIGNAL = 1.5; EXPRESSED IN ADULT LIVER, SIGNAL = 1.6; NT HIT: AL161581.2, EVALUE 1.30e-01; SWISSPROT HIT: P32938, EVALUE 6.10e+00
aagctgcgatccactggagctgaggcaccccctcttggcaggcacccctgctagtttggagggtctgcaggggaaagacagagcgggcattgtaggcctgcctgctgcttgtccggtacatctcctcgtagtgctactgaggctgggggttaagagtgaaggagcgaagaaaaaaaaaagctgtttgtttgaaatgattttgttcccagcagtaaaaacagtgctggtaactgagaaggcctttctg

SEQ ID NO: 20671 - DNA, 110 bp, Homo sapiens
  MAP TO AJ229042.1; EXPRESSED IN BONE MARROW, SIGNAL = 4.2; EXPRESSED IN PLACENTA, SIGNAL = 4.3; EXPRESSED IN ADULT LIVER, SIGNAL = 4.5; EXPRESSED IN LUNG, SIGNAL = 4.5; EXPRESSED IN HEART, SIGNAL = 3.5; EXPRESSED IN HELA, SIGNAL = 3.8; EXPRESSED IN HBL100, SIGNAL = 3.9; EXPRESSED IN BT474, SIGNAL = 3.8; EXPRESSED IN FETAL LIVER, SIGNAL = 4.1; EXPRESSED IN BRAIN, SIGNAL = 4.3; NT HIT: AJ229042.1, EVALUE 1.00e-55; EST_HUMAN HIT: AW885566.1, EVALUE 3.00e-17; SWISSPROT HIT: P33291, EVALUE 1.80e+00
tccattttctgttgcttataacagaatacctgaaacagtttataaagaaaaggaatttattttttgcagttatagaggttgagaagtccaaggtcaaggggccacatctg

SEQ ID NO: 20672 - DNA, 314 bp, Homo sapiens
  MAP TO AL096829.12; EXPRESSED IN PLACENTA, SIGNAL =   7; EXPRESSED IN HEART, SIGNAL = 3.6; EXPRESSED IN HBL100, SIGNAL =  14; EXPRESSED IN HELA, SIGNAL =  10; EXPRESSED IN FETAL LIVER, SIGNAL = 8.8; EXPRESSED IN BT474, SIGNAL = 5.6; EXPRESSED IN ADULT LIVER, SIGNAL = 2.9; EXPRESSED IN BONE MARROW, SIGNAL = 5.9; EXPRESSED IN LUNG, SIGNAL =  17; EXPRESSED IN BRAIN, SIGNAL = 2.1; NT HIT: gi4506628, EVALUE 1.00e-113; SWISSPROT HIT: P47914, EVALUE 6.00e-34; EST_HUMAN HIT: BF205012.1, EVALUE 1.00e-111
aagctggagctgcaggctgggccttggtttgatccttggtcttggcctttggcccacacagcctgagccctttggcaatgtgggcatgatcatgcttcccaagcttggagtgggcaatgtgggcaagtcgatggagcttgtggctgacaccctttgggatcttgggcttaacttccttgggctttaccagggccttgatagcctttgcacgtgcactcatggccttggcattgttggcctgcatcttctttaggcccttcttgttgtgcttcttggcaaagcgcatgttcctcaggaacttggggtccacccct

SEQ ID NO: 20673 - DNA, 449 bp, Homo sapiens; identical to SEQ ID NO: 3909
  MAP TO AL021331.1; EXPRESSED IN BRAIN, SIGNAL = 2.3; EXPRESSED IN BONE MARROW, SIGNAL =  16; EXPRESSED IN HEART, SIGNAL = 2.6; EXPRESSED IN PLACENTA, SIGNAL = 2.8; EXPRESSED IN FETAL LIVER, SIGNAL = 2.8; EXPRESSED IN ADULT LIVER, SIGNAL = 3.6; EXPRESSED IN LUNG, SIGNAL = 9.8; EXPRESSED IN HELA, SIGNAL = 2.4; EXPRESSED IN HBL100, SIGNAL = 2.2; EXPRESSED IN BT474, SIGNAL = 2.8; NT HIT: U73325.1, EVALUE 6.10e-02; EST_HUMAN HIT: BF102709.1, EVALUE 4.20e-01

SEQ ID NO: 20674 - DNA, 353 bp, Homo sapiens
  MAP TO AL022323.7; EXPRESSED IN BONE MARROW, SIGNAL = 3.9; EXPRESSED IN HELA, SIGNAL = 3.6; EXPRESSED IN HBL100, SIGNAL = 3.4; EXPRESSED IN BT474, SIGNAL = 4.1; EXPRESSED IN BRAIN, SIGNAL = 3.1; EXPRESSED IN LUNG, SIGNAL = 5.7; EXPRESSED IN PLACENTA, SIGNAL = 3.7; EXPRESSED IN HEART, SIGNAL =   3; EXPRESSED IN ADULT LIVER, SIGNAL = 4.9; EXPRESSED IN FETAL LIVER, SIGNAL = 3.9; NT HIT: AB006784.1, EVALUE 1.90e-01; SWISSPROT HIT: P20073, EVALUE 2.60e-01
atggaccagagaatggacagatggcggcggcggactttaccccccaacgtgaaatttgatacattcagttctcttgtcccagaggactctccacatgtggggcacagacgaacagattatgtgagccccacagccagtgccttaagaaaacctcaactatcccactacagggtggagacccaggaggtgaacccaggtgcttcacgggaccagacttccccagcagtgaagcaagggtcacctgtggaacccaaggcgacattttttgcagtcacctatcagattcccaatactcaaaaggcaaagggtgtggttctgtcaggagctgaaagcttgctggaacattctagaaa

SEQ ID NO: 20675 - DNA, 248 bp, Homo sapiens
  MAP TO AL008630.1; EXPRESSED IN HEART, SIGNAL = 1.5; EXPRESSED IN BT474, SIGNAL = 0.97; EXPRESSED IN BRAIN, SIGNAL = 1.4; SWISSPROT HIT: P14328, EVALUE 4.20e-01; NT HIT: AB011181.2, EVALUE 1.00e-109; EST_HUMAN HIT: Z44668.1, EVALUE 1.00e-109
ctagctgttgttctcggctgtgagatatttcagggcagcaaagccgtagcggcgggacatgtcctgctgaaactcttccttgagggttttgagacagatgcggtattgcttgttggaacggaacttggtaatgtcgaagctgggggcatgaggcatgtggatcatgtaggcgttgggcagcacaatgaactcatactcctggaagaagacaagagcagcgtgagaacccgcaagagccgagggtcatg

SEQ ID NO: 20676 - DNA, 379 bp, Homo sapiens
  MAP TO AL021396.5; EXPRESSED IN LUNG, SIGNAL = 1.1; EXPRESSED IN HBL100, SIGNAL = 0.93; EXPRESSED IN HEART, SIGNAL = 1.5; EXPRESSED IN FETAL LIVER, SIGNAL = 1.2; EXPRESSED IN BRAIN, SIGNAL = 1.3; SWISSPROT HIT: P50284, EVALUE 1.50e+00; EST_HUMAN HIT: BE785443.1, EVALUE 0.00e+00; NT HIT: gi11068138, EVALUE 0.00e+00
agcagaatcggagatcagaggaggctcatagagctgaacagttgcaggatgcggaggaggaaaaagatgattcaaatgaagaagaaaacaaagacagccttgtagatgatgaagaagagaaagaagatcttggcgatgaggatgaagcagaggaagaagaggaggaggacaacttggctgctggtgtggatgaggagagaagtgaggccaatgatcaggggcccccaggagaggacggtgtgacccgggaggaagtagagcctgaggaggctgaagaaggcatctctgagcaaccctgcccagctgacacagaggtggtggaagactccttgaggcagcgtaaaagtcagcatgctgacaagggactgtagatttaatg

SEQ ID NO: 20677 - DNA, 119 bp, Homo sapiens
  MAP TO AL009182.13; EXPRESSED IN BT474, SIGNAL = 1.6; EXPRESSED IN LUNG, SIGNAL =   2; EXPRESSED IN BRAIN, SIGNAL = 1.9; EXPRESSED IN BONE MARROW, SIGNAL = 2.1; EXPRESSED IN HEART, SIGNAL = 1.8; EXPRESSED IN ADULT LIVER, SIGNAL = 2.3; EXPRESSED IN FETAL LIVER, SIGNAL = 1.9; EXPRESSED IN PLACENTA, SIGNAL = 2.2; EXPRESSED IN HELA, SIGNAL = 1.9; EXPRESSED IN HBL100, SIGNAL = 1.7; SWISSPROT HIT: P08110, EVALUE 9.00e+00; EST_HUMAN HIT: AI918899.1, EVALUE 9.80e-02; NT HIT: AJ011712.1, EVALUE 4.00e-03
aagtagaggagcaaacaatggcggctggggaggggagggaggagacagaagcagacaaggaggagatgaattcagactcattcttcacagagaaccatgagacgaaaggtgagaaattt

SEQ ID NO: 20678 - DNA, 148 bp, Homo sapiens
  MAP TO AL031665.18; EXPRESSED IN BONE MARROW, SIGNAL = 1.7; EXPRESSED IN BRAIN, SIGNAL = 1.6; EXPRESSED IN LUNG, SIGNAL = 1.8; EXPRESSED IN HBL100, SIGNAL = 1.4; EXPRESSED IN HELA, SIGNAL = 2.9; EXPRESSED IN PLACENTA, SIGNAL = 1.7; EXPRESSED IN HEART, SIGNAL = 1.7; EXPRESSED IN ADULT LIVER, SIGNAL = 2.6; EXPRESSED IN BT474, SIGNAL = 1.6; EXPRESSED IN FETAL LIVER, SIGNAL = 2.1; NT HIT: AE001180.1, EVALUE 2.80e-01; EST_HUMAN HIT: AA381078.1, EVALUE 2.00e+00
caaagctctcagcttggaaaattagatcattgtcaaaattttctctaagagtgatttcttctggtctgctttggttctgagtaaagtgttctgaaacatcaatagcactatggagaaatagaaggttgagaaaaacatgagaacagaa

SEQ ID NO: 20679 - DNA, 499 bp, Homo sapiens
  MAP TO AJ011929.1; EXPRESSED IN PLACENTA, SIGNAL = 2.9; EXPRESSED IN HBL100, SIGNAL = 2.9; EXPRESSED IN LUNG, SIGNAL = 3.3; EXPRESSED IN BRAIN, SIGNAL = 3.2; EXPRESSED IN BONE MARROW, SIGNAL = 3.1; EXPRESSED IN HEART, SIGNAL = 2.9; EXPRESSED IN HELA, SIGNAL = 3.7; EXPRESSED IN BT474, SIGNAL =   3; EXPRESSED IN ADULT LIVER, SIGNAL = 3.7; EXPRESSED IN FETAL LIVER, SIGNAL = 3.5; NT HIT: AL163284.2, EVALUE 0.00e+00; SWISSPROT HIT: Q01955, EVALUE 1.80e+00
tcacaccaccagcagcaggaccactgccatgcacgaagctctgaaacaaacagggggtactcctgaaaggctaaggaatgaacaggaacagagtgagcttgcctgtccagggagtgggcacactggccaaacccaggctgaccctgtgtgcaggtgggcacccattgctggcctgtatcgcacaggctttcctttgggtagggatggctttgtgcatgtggctgcctgggatgcccagaaaagtgtcagcaattcctggattccccgggtgactaggcacaatatgtttggtgggattggagctgaggaaagtgaactgggagaaatctggcaacaggaggactcaccctttgtcttcccactttttgaaatggagtctcctgacattttcctcctcatctcaactttctctccaagtctttcctgtctcctgggcagagaatcagagctgaccaccaattacgttatacccgaattttatagaatcactttttattgc

SEQ ID NO: 20680 - DNA, 193 bp, Homo sapiens
  MAP TO AL034400.2; EXPRESSED IN BT474, SIGNAL = 2.1; EXPRESSED IN LUNG, SIGNAL = 2.5; EXPRESSED IN HBL100, SIGNAL = 1.9; EXPRESSED IN PLACENTA, SIGNAL = 2.1; EXPRESSED IN FETAL LIVER, SIGNAL = 1.9; EXPRESSED IN ADULT LIVER, SIGNAL = 1.8; EXPRESSED IN BRAIN, SIGNAL = 2.5; EXPRESSED IN BONE MARROW, SIGNAL = 1.7; EXPRESSED IN HEART, SIGNAL = 2.1; EXPRESSED IN HELA, SIGNAL = 1.9; NT HIT: AF064826.1, EVALUE 2.00e-65; EST_HUMAN HIT: AA046130.1, EVALUE 2.00e-65; SWISSPROT HIT: O75487, EVALUE 2.00e-14
acaccagcactgtcggctttctcattggcactcttcccagcatggtcagtggcattgtagtcaaactctgaagggcactgctgatactcacagccacttccacttccttctccactactttcatcacctagtttaaaaaaaaatggaatagaaatttcattccacttgttctcatcagaagacatacaagagc

SEQ ID NO: 20681 - DNA, 528 bp, Homo sapiens
  MAP TO AL020994.1; EXPRESSED IN BONE MARROW, SIGNAL = 1.8; EXPRESSED IN PLACENTA, SIGNAL = 1.7; EXPRESSED IN HBL100, SIGNAL = 1.9; EXPRESSED IN ADULT LIVER, SIGNAL = 1.7; EXPRESSED IN LUNG, SIGNAL = 1.7; EXPRESSED IN BRAIN, SIGNAL =   2; EXPRESSED IN HEART, SIGNAL =   2; EXPRESSED IN HELA, SIGNAL = 1.8; EXPRESSED IN BT474, SIGNAL = 1.9; EXPRESSED IN FETAL LIVER, SIGNAL = 1.9; EST_HUMAN HIT: AA885104.1, EVALUE 5.00e-07; SWISSPROT HIT: P02773, EVALUE 3.30e+00; NT HIT: AJ251973.1, EVALUE 3.30e-01
ggctggagctgctggtccccaggagagccagttccgagttaccccccaggcacagacggaggagcagagaactcggtgtgtaatgagccggcttcgaggtcaagggggtgtttaatacagatgcagatttcaaaagaaagtagtgaggagcttcttgctcctctcctgtgcagccctcccacaacaatgagtgaggatgctttggaaaaaggacagttcatgtggagcaaagtggaaaggcagcttgagtcaggcactggcctgaacaaaccaagcccctcccttctctgggcctcagtttctcgcatttatctcttgcaattctttggagacttcaatggtagttgcaggcaggaggtgataggacagggtggaatatgtttattgaatcaaacactatttattgaacacctactatatgccaggcagtgggtgggcactggctacagccctgaacaagaaaggcagctgatattaacaagatcatgtcagattgtgacaaattcccacagtgagccagtgaactaa

SEQ ID NO: 20682 - DNA, 258 bp, Homo sapiens
  MAP TO AL031674.1; EXPRESSED IN BT474, SIGNAL = 2.8; EXPRESSED IN HBL100, SIGNAL = 2.5; EXPRESSED IN ADULT LIVER, SIGNAL = 2.7; EXPRESSED IN FETAL LIVER, SIGNAL = 2.6; EXPRESSED IN BRAIN, SIGNAL = 2.5; EXPRESSED IN LUNG, SIGNAL = 2.9; EXPRESSED IN BONE MARROW, SIGNAL = 2.8; EXPRESSED IN PLACENTA, SIGNAL = 2.8; EXPRESSED IN HEART, SIGNAL = 2.6; EXPRESSED IN HELA, SIGNAL = 2.8; NT HIT: AE004413.1, EVALUE 1.60e-01; EST_HUMAN HIT: AV764640.1, EVALUE 9.30e-01; SWISSPROT HIT: P37932, EVALUE 8.90e+00
gtctcaagatccagttagaccaagatggcattgttctgaattttcattcccaagaggacatattcctgctgttccctttttcattgagaagactgaatgcacctgcctgctgcattctcttcttctatttctccctttttgttctcccctcctggatcctcttggcaaagaagggcacccatgtgtgcacctgattcttgtactgcatcttgctgtgtaccagctataggcaaaaaggcagatttagttcagccatca

SEQ ID NO: 20683 - DNA, 168 bp, Homo sapiens
  MAP TO AL031682.1; EXPRESSED IN LUNG, SIGNAL = 1.8; EXPRESSED IN BRAIN, SIGNAL = 1.8; EXPRESSED IN PLACENTA, SIGNAL = 1.8; EXPRESSED IN HEART, SIGNAL = 1.9; EXPRESSED IN ADULT LIVER, SIGNAL = 1.9; EXPRESSED IN BONE MARROW, SIGNAL =   2; EXPRESSED IN HELA, SIGNAL = 2.2; EXPRESSED IN HBL100, SIGNAL = 1.7; EXPRESSED IN BT474, SIGNAL = 1.8; EXPRESSED IN FETAL LIVER, SIGNAL =   2; NT HIT: AF200446.1, EVALUE 3.30e-01; SWISSPROT HIT: P31440, EVALUE 2.20e+00
atgggaccaccctggggtacaacctataccacctctcagagaccctcatcaggaccgagctccagttgctgacagtagtaacctgttggaaatatgctctgcactggctgcttttttggtcctatctcacttcctcatgttcttaccattcctcctgagatatctcag

SEQ ID NO: 20684 - DNA, 206 bp, Homo sapiens
  MAP TO AJ011930.1; EXPRESSED IN HBL100, SIGNAL = 2.9; EXPRESSED IN HELA, SIGNAL = 3.3; EXPRESSED IN BT474, SIGNAL = 2.4; EXPRESSED IN LUNG, SIGNAL =   3; EXPRESSED IN BRAIN, SIGNAL =   3; EXPRESSED IN BONE MARROW, SIGNAL = 2.7; EXPRESSED IN PLACENTA, SIGNAL = 3.1; EXPRESSED IN HEART, SIGNAL = 2.3; EXPRESSED IN ADULT LIVER, SIGNAL = 2.9; EXPRESSED IN FETAL LIVER, SIGNAL = 2.8; NT HIT: AL163300.2, EVALUE 2.00e-67; SWISSPROT HIT: P36044, EVALUE 1.20e+00
aaatgctaagaaagagtccagtgaaaatgctagagaggaagcccacctccaacaggctcatgaataggctcaacacagccaagaaaagaagcagtgagcttccagataagtccacagaaattatccaagctaaaaaacatgaggaaaaagtggaaaacaaacaaatgaaaacatcagacgtaaaagagcaagcagaagccctggag

SEQ ID NO: 20685 - DNA, 417 bp, Homo sapiens
  MAP TO AL034422.18; EXPRESSED IN BONE MARROW, SIGNAL = 2.9; EXPRESSED IN BRAIN, SIGNAL = 3.5; EXPRESSED IN LUNG, SIGNAL = 3.7; EXPRESSED IN HBL100, SIGNAL = 2.4; EXPRESSED IN HELA, SIGNAL = 2.7; EXPRESSED IN PLACENTA, SIGNAL = 4.6; EXPRESSED IN HEART, SIGNAL =   3; EXPRESSED IN ADULT LIVER, SIGNAL = 2.9; EXPRESSED IN BT474, SIGNAL = 2.7; EXPRESSED IN FETAL LIVER, SIGNAL = 3.6; NT HIT: AJ011033.1, EVALUE 6.60e-02; EST_HUMAN HIT: T23683.1, EVALUE 1.00e-103; SWISSPROT HIT: P33479, EVALUE 1.10e+00
aatataagctatgtcccaagtacatcctcagggttcccagcacccatcacaaggcccagatatcaccggtggataacagagagtccagctgccaactccctacccagagaacccaggggcagagcccaggagccactcccagtggcagcactgagtcctattttgcccgcgatgcccacagctctaaggtatgggtggagtgggcggaggggggagctcgctgcaaatggccaactggtaaccaaacccactccgtttctaaaactagggcacaggagagaaacgggaacagcagtattgtccccaaatagaactatgtctcatctggttccggggccttcgggaacacctggcggggtgggggtggggagggcaggaggctgctcccgaggcttcaaacacaaatctaaagtttag

SEQ ID NO: 20686 - DNA, 107 bp, Homo sapiens
  MAP TO AL021155.1; EXPRESSED IN HBL100, SIGNAL = 1.1; EXPRESSED IN LUNG, SIGNAL = 1.3; EXPRESSED IN BRAIN, SIGNAL = 1.9; EXPRESSED IN BONE MARROW, SIGNAL = 1.5; EXPRESSED IN PLACENTA, SIGNAL =  23; EXPRESSED IN HEART, SIGNAL = 2.4; EXPRESSED IN HELA, SIGNAL = 1.2; EXPRESSED IN BT474, SIGNAL = 1.1; EXPRESSED IN ADULT LIVER, SIGNAL = 3.1; EXPRESSED IN FETAL LIVER, SIGNAL =  35; EST_HUMAN HIT: AL110398.1, EVALUE 1.00e-49; SWISSPROT HIT: P51797, EVALUE 9.00e-13; NT HIT: gi11423825, EVALUE 7.00e-54
cggctttcttgggcggggtggtccgcatgaccatcagcctcacggtcatcctgatcgagtccaccaatgagatcacctacgggctccccatcatggtcacactgatg

SEQ ID NO: 20687 - DNA, 266 bp, Homo sapiens
  MAP TO AJ229042.1; EXPRESSED IN BONE MARROW, SIGNAL = 1.6; EXPRESSED IN LUNG, SIGNAL = 1.7; EXPRESSED IN BRAIN, SIGNAL = 1.7; EXPRESSED IN PLACENTA, SIGNAL = 2.1; EXPRESSED IN HELA, SIGNAL =   2; EXPRESSED IN HEART, SIGNAL = 1.5; EXPRESSED IN HBL100, SIGNAL = 2.2; EXPRESSED IN ADULT LIVER, SIGNAL = 1.8; EXPRESSED IN BT474, SIGNAL = 2.1; EXPRESSED IN FETAL LIVER, SIGNAL = 2.1; NT HIT: AL163268.2, EVALUE 0.00e+00; SWISSPROT HIT: P43146, EVALUE 1.90e+00
agcaccatccctcaaaccatttacttcaagtacttgtgcatctgtctgctgcagctgaatatgcaccctggagctgtgttttattcacttttgaatccccggggccctggctcagggcctcgcacacagcaggctcccaaggctcattcaacagatgcagaaaccacctcgaatatgaccttcgcctcctgctgtgtccctgttatgtcacctgccagggagttcatgctgccacctccaggtggggtatttgggattgcactcct

SEQ ID NO: 20688 - DNA, 159 bp, Homo sapiens
  MAP TO AC007073.2; EXPRESSED IN LUNG, SIGNAL = 1.6; EXPRESSED IN BRAIN, SIGNAL = 1.3; EXPRESSED IN HELA, SIGNAL = 1.5; EXPRESSED IN PLACENTA, SIGNAL = 1.6; EXPRESSED IN HEART, SIGNAL = 1.5; EXPRESSED IN BT474, SIGNAL = 1.2; EXPRESSED IN ADULT LIVER, SIGNAL = 1.4; EXPRESSED IN BONE MARROW, SIGNAL = 1.4; EXPRESSED IN HBL100, SIGNAL = 1.6; EXPRESSED IN FETAL LIVER, SIGNAL = 1.5; EST_HUMAN HIT: AA972966.1, EVALUE 5.40e-01; NT HIT: M18095.1, EVALUE 2.00e-02; SWISSPROT HIT: P16791, EVALUE 7.60e-01
tgtctgttccccatcaccaccacctcccaaaatgtaaactctacaatggagaattctgcctcttttttcatcacctggcaggtgtggctcctcaataaaaactttagtatttcagctgttggtggccgggctaacagctggagggaggccagaacaaga

SEQ ID NO: 20689 - DNA, 165 bp, Homo sapiens
  MAP TO AL033521.2; EXPRESSED IN PLACENTA, SIGNAL = 0.99; EXPRESSED IN HELA, SIGNAL = 1.3; EXPRESSED IN HEART, SIGNAL = 1.1; EXPRESSED IN BT474, SIGNAL = 1.2; EXPRESSED IN HBL100, SIGNAL = 1.2; EXPRESSED IN FETAL LIVER, SIGNAL = 1.3; EXPRESSED IN BRAIN, SIGNAL = 1.1; EXPRESSED IN LUNG, SIGNAL = 1.1; EXPRESSED IN BONE MARROW, SIGNAL = 1.2; EST_HUMAN HIT: BE967169.2, EVALUE 5.70e-01; NT HIT: AL161553.2, EVALUE 3.80e-01
attcttgctcatctcatcaacttcatcctcatcaactaccagcacgctaacagaggagaggctctgagagtgctgaatcccctcctctccaagaaaaaatgtaagtcaattctcagtttatttttcttccttatatccattaaattcaaaactttaatcactact

SEQ ID NO: 20690 - DNA, 541 bp, Homo sapiens
  MAP TO AC007204.1; EXPRESSED IN HELA, SIGNAL = 1.5; EXPRESSED IN HBL100, SIGNAL = 1.7; EXPRESSED IN PLACENTA, SIGNAL =  39; EXPRESSED IN HEART, SIGNAL = 1.8; EXPRESSED IN ADULT LIVER, SIGNAL = 1.5; EXPRESSED IN BT474, SIGNAL = 1.3; EXPRESSED IN FETAL LIVER, SIGNAL = 1.8; EXPRESSED IN BONE MARROW, SIGNAL = 1.5; EXPRESSED IN LUNG, SIGNAL = 1.5; EXPRESSED IN BRAIN, SIGNAL = 1.4; SWISSPROT HIT: P32497, EVALUE 3.40e+00; EST_HUMAN HIT: AU140987.1, EVALUE 7.00e-28
ttttgccaccgcaatgggaaatggtctgagattccttatgttcaggctttcttcactctccatagccacccttctctctgccagtcctgttctactttccaaatcctccttgcctgctctaaacctgatttgcctcctaccaccctccctacgaccccagccgacgactcatcccctactaccctccccatcgccccagctgatgactcctcttcctttgaccccaccaattttccccctccccgtcaacatcatgatcctctgccagagcatcatgatcctcctccgtatgcccccgctctggctctacttctttctccccctctctccaacaaccctccttctgactctgagtcctccccatcaccaccccttacccactctcaggccaagcagccagttcccttgttgcccctttgggaagcagcaggggccaaagggatcgtctgtgtccacatccccttctccctttccgatctcttccaagttgaaaaatgtctcggatttttctcctccgatcctgatacctatatcaaagaat

SEQ ID NO: 20691 - DNA, 150 bp, Homo sapiens
  MAP TO AL033532.15; EXPRESSED IN BONE MARROW, SIGNAL =   1; EXPRESSED IN BRAIN, SIGNAL = 0.95; EXPRESSED IN HBL100, SIGNAL = 0.97; EXPRESSED IN HELA, SIGNAL = 0.97; EXPRESSED IN PLACENTA, SIGNAL = 0.9; EXPRESSED IN HEART, SIGNAL = 0.95; EXPRESSED IN ADULT LIVER, SIGNAL =   1; EXPRESSED IN BT474, SIGNAL = 1.5; EST_HUMAN HIT: BF574321.1, EVALUE 2.00e-68; SWISSPROT HIT: P34274, EVALUE 3.40e-01
gttgtacctacaacagatcatatagatacagaaaaattgaaagccagagaacagattaagttttttgaagaagttctcctttttgaggatgaacttcatgatcatggagtttcaagcctgagtgtgaagattgtgagtattatttttatt

SEQ ID NO: 20692 - DNA, 121 bp, Homo sapiens
  MAP TO AL021332.1; EXPRESSED IN HBL100, SIGNAL =   2; EXPRESSED IN HELA, SIGNAL = 1.7; EXPRESSED IN FETAL LIVER, SIGNAL =   2; EXPRESSED IN BT474, SIGNAL = 1.9; EXPRESSED IN LUNG, SIGNAL =   2; EXPRESSED IN BRAIN, SIGNAL =   2; EXPRESSED IN PLACENTA, SIGNAL = 1.9; EXPRESSED IN HEART, SIGNAL = 1.9; EXPRESSED IN ADULT LIVER, SIGNAL = 2.6; EXPRESSED IN BONE MARROW, SIGNAL = 1.7; SWISSPROT HIT: O84172, EVALUE 5.20e+00
cttccagcggggtcctgctgctccctttgagtcattagttacttctgtgagggtaccaagctgggctgcactgtcctttttacaaatatttaggtctgcaatgaatggttgacttggagtt

SEQ ID NO: 20693 - DNA, 99 bp, Homo sapiens
  MAP TO AL034344.21; EXPRESSED IN BT474, SIGNAL = 2.8; EXPRESSED IN LUNG, SIGNAL = 3.1; EXPRESSED IN HBL100, SIGNAL = 2.6; EXPRESSED IN PLACENTA, SIGNAL = 3.2; EXPRESSED IN ADULT LIVER, SIGNAL = 3.5; EXPRESSED IN FETAL LIVER, SIGNAL = 3.2; EXPRESSED IN BRAIN, SIGNAL = 3.3; EXPRESSED IN BONE MARROW, SIGNAL = 3.2; EXPRESSED IN HEART, SIGNAL = 3.1; EXPRESSED IN HELA, SIGNAL = 3.8; NT HIT: Y19177.1, EVALUE 8.30e-01; EST_HUMAN HIT: AI215419.1, EVALUE 8.50e-01
cttctcactgcctgccaagttgtactccactggcacgtggatggtgtgactgcctttacacgtgactgggaatctaaaccccaccctgctcagcgccat

SEQ ID NO: 20694 - DNA, 102 bp, Homo sapiens
  MAP TO AC007223.1; EXPRESSED IN FETAL LIVER, SIGNAL =  40; EXPRESSED IN LUNG, SIGNAL =  44; EXPRESSED IN BRAIN, SIGNAL =  26; EXPRESSED IN HELA, SIGNAL =  40; EXPRESSED IN PLACENTA, SIGNAL =  43; EXPRESSED IN BT474, SIGNAL =  31; EXPRESSED IN ADULT LIVER, SIGNAL =  50; EXPRESSED IN BONE MARROW, SIGNAL =  33; EXPRESSED IN HEART, SIGNAL =  31; EXPRESSED IN HBL100, SIGNAL =  40; NT HIT: AF196779.1, EVALUE 2.00e-20; EST_HUMAN HIT: AI399992.1, EVALUE 5.00e-30; SWISSPROT HIT: P39188, EVALUE 3.00e-07
ttgggttgctgaggtcgtaggattgcttgagcccaggaggttgaggctgcagtgaaccatgatcacaccactgcattccagcctgggtaacagagcaagacc

SEQ ID NO: 20695 - DNA, 349 bp, Homo sapiens
  MAP TO AL031659.6; EXPRESSED IN HELA, SIGNAL = 2.2; EXPRESSED IN HEART, SIGNAL = 1.7; EXPRESSED IN BT474, SIGNAL = 1.5; EXPRESSED IN PLACENTA, SIGNAL =   2; EXPRESSED IN HBL100, SIGNAL = 1.5; EXPRESSED IN ADULT LIVER, SIGNAL = 1.8; EXPRESSED IN FETAL LIVER, SIGNAL = 1.8; EXPRESSED IN BRAIN, SIGNAL = 1.9; EXPRESSED IN LUNG, SIGNAL = 2.1; EXPRESSED IN BONE MARROW, SIGNAL = 1.4; EST_HUMAN HIT: AA311872.1, EVALUE 2.00e-78; NT HIT: AF129283.1, EVALUE 1.20e-02; SWISSPROT HIT: Q57564, EVALUE 4.60e-01
ggagacaggatgggacttggttaaggtcatagagcaagtagtaaaggtgagccagaggtactccatactaaaccttatcactttacacagtacggaggcatcatccagtgtctttctttcaatgttagacttggacatccctgacatccctggactccattgtgagcccctgtcacatagccccagacacctgacccaacaggacccgctcagtgaggccattgttgagaaactgatccagtccatccagaaggttttcaatggtgagctaaaggtatgcacaagcaatttttatgagttatccaacttattcctccattttaacaaatattttaaacatattatttct

SEQ ID NO: 20696 - DNA, 184 bp, Homo sapiens
  MAP TO AL008633.1; EXPRESSED IN FETAL LIVER, SIGNAL = 6.8; EXPRESSED IN ADULT LIVER, SIGNAL = 8.4; EXPRESSED IN BT474, SIGNAL =   5; EXPRESSED IN BRAIN, SIGNAL = 6.2; EXPRESSED IN BONE MARROW, SIGNAL = 6.5; EXPRESSED IN LUNG, SIGNAL = 7.2; EXPRESSED IN HELA, SIGNAL =   7; EXPRESSED IN PLACENTA, SIGNAL = 7.3; EXPRESSED IN HBL100, SIGNAL = 6.9; EXPRESSED IN HEART, SIGNAL = 5.4; NT HIT: AF213884.1, EVALUE 1.00e-10; EST_HUMAN HIT: H19383.1, EVALUE 1.00e-08
aagtcctaggacacagacacaattcagccaaggtctttgctactttataacaaggaaggttttttcttcaatttctaatattttgtttctcaaatcattctgtgaccccatcagaatggcctttgctgtccatatttctatcagcattctggtcatgaccacttcagtaatctctaagaagatt

SEQ ID NO: 20697 - DNA, 301 bp, Homo sapiens
  MAP TO AL034350.2; EXPRESSED IN BONE MARROW, SIGNAL = 1.3; EXPRESSED IN LUNG, SIGNAL = 2.2; EXPRESSED IN BRAIN, SIGNAL = 2.6; EXPRESSED IN PLACENTA, SIGNAL = 3.3; EXPRESSED IN HBL100, SIGNAL = 1.6; EXPRESSED IN HELA, SIGNAL = 1.5; EXPRESSED IN HEART, SIGNAL =   2; EXPRESSED IN BT474, SIGNAL = 1.4; EXPRESSED IN FETAL LIVER, SIGNAL = 1.8; EXPRESSED IN ADULT LIVER, SIGNAL = 1.2; NT HIT: AF149773.1, EVALUE 1.00e-114; EST_HUMAN HIT: BE150340.1, EVALUE 1.00e-112; SWISSPROT HIT: P10272, EVALUE 5.00e-26
ctgcttttttagctaccttatcagcataagagctgccctgagcgatgggatctgatgccttttgatggcccttgcagtgaatgactccagtttcctttggaagtaaagcggccttgagaagagtttttattaaagaggaattaatgatggaggacccttgcatagtgaggaaacctcttcttgcccaaataacagcatggtggtgcaggatatggaaggcatatttagagtcagtataaatattgacgcatagtccttttgcaagagtgagggctcgagttaaggcaatgagttcggcttg

SEQ ID NO: 20698 - DNA, 371 bp, Homo sapiens
  MAP TO AL109752.7; EXPRESSED IN BT474, SIGNAL =  79; EXPRESSED IN BRAIN, SIGNAL =  28; EXPRESSED IN HELA, SIGNAL =  82; EXPRESSED IN PLACENTA, SIGNAL = 1.1e+02; EXPRESSED IN FETAL LIVER, SIGNAL =  61; EXPRESSED IN ADULT LIVER, SIGNAL = 9.3; EXPRESSED IN LUNG, SIGNAL = 1e+02; EXPRESSED IN BONE MARROW, SIGNAL =  56; EXPRESSED IN HEART, SIGNAL =  26; EXPRESSED IN HBL100, SIGNAL = 1.1e+02; SWISSPROT HIT: P04720, EVALUE 3.00e-57; EST_HUMAN HIT: BE543955.1, EVALUE 0.00e+00; NT HIT: gi11418792, EVALUE 0.00e+00
agaacaccagtcttcacttgaccaccaagtacagtaccaatgccaccaattttgtggacatcctggagaggcaggcgcaagggcttgtcagttggaccagatggtggtaggatgtagtccagagcctcaagcagcgtggttccactggcattgccatctttacaggtgactttccatcccttgaacgaaggcacgttagcagttgcctccagcatgttgtcatcattccaaccagaaattggcacaaatgctactgtgttggggttgtagccaattttcttaatgtaagtgctgacttccttaacgatttcctcatatctcttctggctgcagggtggctcagtggaatccattttgttaacaccaacaat

SEQ ID NO: 20699 - DNA, 446 bp, Homo sapiens
  MAP TO AC007249.2; EXPRESSED IN HEART, SIGNAL =  10; EXPRESSED IN FETAL LIVER, SIGNAL =  14; EXPRESSED IN LUNG, SIGNAL =  13; EXPRESSED IN HBL100, SIGNAL =  12; EXPRESSED IN HELA, SIGNAL =  13; EXPRESSED IN PLACENTA, SIGNAL =  13; EXPRESSED IN ADULT LIVER, SIGNAL =  12; EXPRESSED IN BT474, SIGNAL =  13; EXPRESSED IN BRAIN, SIGNAL =  12; EXPRESSED IN BONE MARROW, SIGNAL = 9.7; NT HIT: AL161539.2, EVALUE 3.70e+00
cccagagtccctcaactcgtggtggtggtggtggcggtggcggtggcggtggtggtggcggtggcggtagtggtggcggtgatggtggcggtggcagtggcggtggtggcggcggtggtggtgatggtgatggtggcggtgatggtggtgatgatggtgatggtggtggtggtggtgatggtgatggtggtggtggtggtgatggtggtggtggtggtggtggtggtgatggtggtggtggtggtggtggtggtgatgatggtagtggtggtgatggtggtggtggtggtggtggtggtgatggtggtggtggtggtggtggtggtgatggtggtggtggtggtgatggtggtggtggtggtgatggtggtggtggtggtggtgatggtggtggtggtggtggtggtggtggtggtgcagtgatattatttgctgtgcgtgcactg

SEQ ID NO: 20700 - DNA, 280 bp, Homo sapiens
  MAP TO Z98744.1; EXPRESSED IN BONE MARROW, SIGNAL = 1.5; EXPRESSED IN LUNG, SIGNAL =   3; EXPRESSED IN FETAL LIVER, SIGNAL = 2.1; EXPRESSED IN HELA, SIGNAL =  63; EXPRESSED IN HEART, SIGNAL = 0.87; NT HIT: M95828.1, EVALUE 2.70e+00; EST_HUMAN HIT: AW811961.1, EVALUE 1.60e-02
gcctcaaataatcaggtttttcatcttcagattgattttgagatacctggaagtcatgcatgagttgaggcttcttcacaggatatctagcatccctggtccttccctaaatgtcagtagtgtgccctttcccaatcaccaggacagcaaaaaagaaaaaaaaaaaaccagcaacaacaacaataaaaacccaacttatttaatttccagaatgctccgtaagaaccagtactgctctacgagaaccatgacattaattactttcattgcagaaactaca

SEQ ID NO: 20701 - DNA, 1604 bp, Homo sapiens
  MAP TO AC010130.3; EXPRESSED IN BONE MARROW, SIGNAL = 1.1; EXPRESSED IN LUNG, SIGNAL = 1.8; EXPRESSED IN BRAIN, SIGNAL =   3; EXPRESSED IN PLACENTA, SIGNAL = 1.9; EXPRESSED IN HEART, SIGNAL = 1.2; SWISSPROT HIT: P37275, EVALUE 2.00e-45; NT HIT: gi11430273, EVALUE 0.00e+00; EST_HUMAN HIT: AI879705.1, EVALUE 0.00e+00
gtgaaaaaccttacgagtgcccaaactgcaagaaacgtttctcccattctggttcctacagttcgcacatcagcagcaagaaatgtattggtttaatctctgtaaatggccgaatgagaaacaatatcaagacgggttcttcccctaattctgtttcttcttctcctactaattcagccattacccagttaagaaacaagttggagaatggaaaaccacttagtatgtctgaacagacaggcttacttaaaattaaaacagaaccactagacttcaatgactataaagttcttatggctacacacgggtttagtggcactagtccctttatgaatggtgggcttggagccaccagccctttaggagttcatccatctgctcagagtccaatgcagcacttaggtgtagggatggaagcccctttacttgggtttcccaccatgaatagtaatttaagtgaggtacaaaaggttctacagattgtggacaatactgtttccaggcaaaaaatggactgcaaggctgaagaaatttcaaagttgaaaggttatcacatgaaggatccatgctctcaacctgaggaacaaggagttacttctcctaatattccgcctgtcggtcttccggtagtgagtcataatggtgccactaaaagtattattgactatacgttggaaaaagtcaatgaagccaaagcttgcctccagagcttgactactgactcaaggagacagatcagtaatataaagaaagagaagctacgtactttaatagatttggtcactgatgacaaaatgattgagaaccacaacatatccactccattttcatgccagttctgtaaagaaagttttcctggccccatccctttgcatcagcatgaacgttacctttgtaagatgaatgaagagatcaaggcggtcctgcagcctcatgaaaacatagtccccaacaaagccggagtttttgttgataataaagccctcctcttgtcatctgtactttctgagaaaggaatgacaagccccatcaacccatacaaggaccacatgtctgtactcaaagcatactatgctatgaacatggagcccaactccgatgaactgctgaaaatttccattgctgtgggccttcctcaggaatttgtgaaggaatggtttgaacaacgaaaagtctaccagtactcaaattccaggtccccatccctggaaagaagctccaagccgttagctcccaacagtaaccctcccacaaaagactctttattacccaggtctcctgtaaaacctatggactccataacatcaccatctatagcagaactccacaacagtgttacgaattgtgatcctcctctcaggctaacaaaaccttcccattttaccaatattaaaccagttgaaaaattggaccactccaggagtaatactccttctcccttaaatctttcctccacatcttctaaaaactcccacagtagttcatacactccaaacagcttctcttctgaggagctccaggctgagccctttagacttgtcattaccaaaacaaatgaaagaacccaaaagtattatagccacaaagaacaaaacaaaagctag

SEQ ID NO: 20702 - DNA, 1512 bp, Homo sapiens
  MAP TO AL049646.17; EXPRESSED IN BONE MARROW, SIGNAL = 1.6; EXPRESSED IN HELA, SIGNAL = 1.9; EXPRESSED IN PLACENTA, SIGNAL = 2.8; EXPRESSED IN HEART, SIGNAL =   2; EXPRESSED IN BT474, SIGNAL = 2.3; EXPRESSED IN BRAIN, SIGNAL = 2.7; EXPRESSED IN HBL100, SIGNAL = 2.6; EXPRESSED IN ADULT LIVER, SIGNAL = 0.99; EXPRESSED IN FETAL LIVER, SIGNAL = 1.9; EXPRESSED IN LUNG, SIGNAL = 1.8; EST_HUMAN HIT: AW953464.1, EVALUE 0.00e+00; NT HIT: U09366.1, EVALUE 0.00e+00; SWISSPROT HIT: P52736, EVALUE 0.00e+00
acggctcagggtcgggctgcactggcagtctgtggtggacagacgtggtcttcctgtgtctgctgaggtgagacttgaggctgaagccccgcccacacgtcttgcacacatatggcttctcccccgtatgtgtcatttgatgtaaggtgaggtgtgacttttggagaaagccttggccacactctctgcacacacaaggcttctcttccgagtgagcccgcttgtgtgtaattagagctgacttattgccaaagcccagtccacactgcctgcacatgtagggcttctccctcgagtgcttccgcttgtgcctgatgagaccggcctggtggctaaagcctcgcccgcactctcggcacacatacggcctctcccctgagtgcgtcctctggtgtgcaacaaggtttgacttctggctgaagcctcgcccgcactccccacacaccatgggcttctcgcctgagtgcgtcctctggtgtctgatgaggttggattgctggctgaagccccggccacagtccttgcacacaatgggcttctctcctgagtgtatgttctggtgtctgttgaggtgtgacttgagactaaagcctcgcccacacaccccacaaacatacggcttctccccagtgtgtgtccgcctgtgagagatgagggttgaattctggctgaagctgtgcccacacaccccgcacacatagggcttctcctttgagtgtgtcctctggtggttgacaagggtggtcctctgcctgaagcatcgcccacactccttgcaggcgtagggcttctccccagagtgcgtcctctggtgggagatgaggtttgacctgtcgctgaagcccaggccacagtcactgcacacgatggtcttctcctccaagtgtgtcctctggtgtctcacgacagctgacttctggctgaagcctttgccacattcccggcacacgtaaggcttttcccctgagtgtgtcctctggtgtatgatgaggtttgacttctggctgaagcctcgcccacactcactgcacatgtaaggtttctcaccggagtgtgtccgttcgtgtatgattagcgttgacttccggttaaagcctcgtccacactccctgcacacaattggcttctcccccgagtgtgccttctggtgtctggcgaggctcttctttaggctgaagcccttctcacataccccacacacgtagggcttctcccctgagtgtatccgctggtgactgagcaggtttgtcatcttgctgaagctcagtccacactctccacagttgactgttccaaatcctaagacttctatcctcttcaacaatttgtctgtttcctcagggttccctgactgagctgggctggcttctaactccacccctctgaggccgttccgagagctgactggctgcctctggggtggcctggagaacgctcccagagtccttttcttggttcttccaaacaaaggcatggcaccttctccctcaggaccttctgcttgatcactcc

SEQ ID NO: 20703 - DNA, 151 bp, Homo sapiens
  MAP TO AL080312.4; EXPRESSED IN BONE MARROW, SIGNAL = 0.96; EXPRESSED IN LUNG, SIGNAL = 1.2; EXPRESSED IN HEART, SIGNAL = 1.1; NT HIT: U43626.1, EVALUE 1.40e+00; EST_HUMAN HIT: AA707095.1, EVALUE 4.00e-08; SWISSPROT HIT: P08548, EVALUE 8.00e-03
attcaaaactatcccaatcaaaatcccagcaagttgctttgtggatatcaacgaagtaattctaaagtttgtgtgggaaggtaaaagactcataaaagccaacacagttgcattggctgaaatagaacaaggccagaggactgacactacc

SEQ ID NO: 20704 - DNA, 154 bp, Homo sapiens
  MAP TO AC008940.2; EXPRESSED IN HBL100, SIGNAL = 1.1; EXPRESSED IN HELA, SIGNAL = 1.3; EXPRESSED IN PLACENTA, SIGNAL = 1.2; EXPRESSED IN HEART, SIGNAL = 1.4; EXPRESSED IN BT474, SIGNAL = 1.3; EXPRESSED IN ADULT LIVER, SIGNAL = 1.4; EXPRESSED IN FETAL LIVER, SIGNAL = 1.3; EXPRESSED IN BONE MARROW, SIGNAL = 1.2; EXPRESSED IN LUNG, SIGNAL = 1.2; EXPRESSED IN BRAIN, SIGNAL = 0.95; SWISSPROT HIT: Q28247, EVALUE 4.50e-01; EST_HUMAN HIT: BF381766.1, EVALUE 2.10e+00
gggatcccgggccagaatcgccgggagataggccatggccaggatatctttccagcagagaagctctgccatctgcaggatcgcaaggtgaaccttcacagagctgcctggggcgagtgtattgttgcacccaagactctcagcttctcttact

SEQ ID NO: 20705 - DNA, 139 bp, Homo sapiens
  MAP TO AL022323.7; EXPRESSED IN BONE MARROW, SIGNAL = 2.3; EXPRESSED IN LUNG, SIGNAL = 2.6; EXPRESSED IN HELA, SIGNAL = 2.2; EXPRESSED IN HEART, SIGNAL = 2.3; EXPRESSED IN PLACENTA, SIGNAL = 2.4; EXPRESSED IN HBL100, SIGNAL = 2.3; EXPRESSED IN FETAL LIVER, SIGNAL = 2.3; EXPRESSED IN ADULT LIVER, SIGNAL = 2.7; EXPRESSED IN BT474, SIGNAL = 2.2; EXPRESSED IN BRAIN, SIGNAL = 2.1; EST_HUMAN HIT: AW025958.1, EVALUE 4.60e-01; SWISSPROT HIT: Q13233, EVALUE 3.10e+00; NT HIT: M81698.1, EVALUE 3.10e-01
acacgccaggatcttggactggcttctcgcccttagattcccagggttgggggttgaggggcagggcctgctgaagcctagagagggcagggccttggcctacgtcaccctgcaagtggagacagaggttttttggctc

SEQ ID NO: 20706 - DNA, 142 bp, Homo sapiens
  MAP TO AC010127.2; EXPRESSED IN HEART, SIGNAL = 1.1; EXPRESSED IN BRAIN, SIGNAL = 1.4; EST_HUMAN HIT: BF347024.1, EVALUE 4.00e-20; SWISSPROT HIT: P04774, EVALUE 7.00e-17; NT HIT: U79568.1, EVALUE 2.00e-27
gaaagtctgtacatgtatctttactttgttattttcatcatctttgggtccttcttcaccttgaacctgtttattggtgtcatcatagataatttcaaccagcagaaaaagaagataagtatttctaatattttctctccca

SEQ ID NO: 20707 - DNA, 107 bp, Homo sapiens
  MAP TO AC005480.3; EXPRESSED IN HBL100, SIGNAL = 0.77; EXPRESSED IN FETAL LIVER, SIGNAL = 0.68; EXPRESSED IN BT474, SIGNAL = 0.78; EXPRESSED IN ADULT LIVER, SIGNAL = 0.85; EXPRESSED IN HEART, SIGNAL = 0.8; SWISSPROT HIT: O24243, EVALUE 9.10e+00; NT HIT: AF279129.1, EVALUE 2.30e-01; EST_HUMAN HIT: AA828880.1, EVALUE 2.40e-01
gaccctcctcagatacgacctttttcacagagccttctccatcatcccagctttgaagtttcagagcatagtaactgtgctgcttgacacattttcactttatagag

SEQ ID NO: 20708 - DNA, 126 bp, Homo sapiens
  MAP TO AC009232.2; EXPRESSED IN BT474, SIGNAL = 5.8; EXPRESSED IN ADULT LIVER, SIGNAL =   7; EXPRESSED IN LUNG, SIGNAL = 6.9; EXPRESSED IN BRAIN, SIGNAL = 5.7; EXPRESSED IN FETAL LIVER, SIGNAL = 7.2; EXPRESSED IN BONE MARROW, SIGNAL = 7.1; EXPRESSED IN PLACENTA, SIGNAL =   6; EXPRESSED IN HEART, SIGNAL = 5.1; EXPRESSED IN HELA, SIGNAL = 6.4; EXPRESSED IN HBL100, SIGNAL = 5.5; EST_HUMAN HIT: BF570077.1, EVALUE 1.60e+00
tttaatgtaatagatgagaactgtaaataccggagtcaggctgttagcagctaccagctaggcaatatatctaaaaatatctctcgtatcattgatgttatggtaaattcatgctgtggccaaaga

SEQ ID NO: 20709 - DNA, 731 bp, Homo sapiens
  MAP TO AC011451.2; EXPRESSED IN ADULT LIVER, SIGNAL = 1.5; EXPRESSED IN LUNG, SIGNAL = 1.7; EXPRESSED IN BRAIN, SIGNAL =   2; EXPRESSED IN HBL100, SIGNAL = 1.5; EXPRESSED IN HELA, SIGNAL = 1.5; EXPRESSED IN HEART, SIGNAL = 1.3; EXPRESSED IN PLACENTA, SIGNAL =   2; EXPRESSED IN BT474, SIGNAL = 2.1; EXPRESSED IN FETAL LIVER, SIGNAL = 1.4; EXPRESSED IN BONE MARROW, SIGNAL = 1.3; NT HIT: gi11423665, EVALUE 4.70e-01; EST_HUMAN HIT: AA456946.1, EVALUE 2.00e-65; SWISSPROT HIT: P10264, EVALUE 8.00e-11
agcttcatctggccaccaggtcttaaactgtaaaaactgagcaggagccagacaggctcgagtaagagtgtcccatcaatgggaatcatctgactggaggtagcaacattttttgacagacccatcacgaaaggagaacgtggtccatactgattgatagcctgtttaaactcattcagtaatttaaagggaaaagcctcaaatgtagccataacattcccctgttgatctggggggtgtatcctaacagggaacttccaagcctctaaattaccctctcttctagcttgctgaattcctgcctgaatagaactgagggcggtcactcggggctctgctcgaacagttgctggggagactactttttgctcagtgtcctccagaaaagaaagatccagagggtcaggccattccctatcttcaaggtattgaggaggtgctgaggggcagggacaagcttccccttcttgggtctctttaagtggttgacggatctgttcttttatctcttctgcaacattatcacactccctctcttctttgtctccttcctcctcatcatcagtgtgaaaagcttccaaggtggaatgaatcagagcccacactgaccagacagttataggaatatcctcagcaccatccttatacgcctttttcagtgcgctgcctacctcctcccagacctctacatccatatttcctcagtcggaaaccaggggcaatatttctct

SEQ ID NO: 20710 - DNA, 229 bp, Homo sapiens
  MAP TO AC011995.2; EXPRESSED IN BONE MARROW, SIGNAL = 3.7; EXPRESSED IN HBL100, SIGNAL = 3.8; EXPRESSED IN HEART, SIGNAL = 3.2; EXPRESSED IN BT474, SIGNAL = 3.1; EXPRESSED IN BRAIN, SIGNAL = 3.6; EXPRESSED IN LUNG, SIGNAL = 5.2; EXPRESSED IN PLACENTA, SIGNAL = 5.2; EXPRESSED IN HELA, SIGNAL = 4.1; EXPRESSED IN ADULT LIVER, SIGNAL = 6.3; EXPRESSED IN FETAL LIVER, SIGNAL = 4.3; SWISSPROT HIT: O00268, EVALUE 8.80e-02; NT HIT: AF179368.1, EVALUE 1.20e-01
aacccccaaatatgccaagaccatcctctgcctctctgtctctaacctttccagactgagctctaggatgccagggaaaagcagcagggcagttaattcccgcattccttccacctacagcaggctctgggagtccagtacatgcagggcctgggggacagcagagccccacctgagacagaggctgagctcagcagccagtcaaacccggtctggttctgcttccaga

SEQ ID NO: 20711 - DNA, 124 bp, Homo sapiens
  MAP TO AC007786.1; EXPRESSED IN LUNG, SIGNAL = 0.81; EXPRESSED IN ADULT LIVER, SIGNAL = 1.4; EXPRESSED IN BRAIN, SIGNAL = 0.88; EXPRESSED IN PLACENTA, SIGNAL = 0.86; EXPRESSED IN BT474, SIGNAL = 0.78; EXPRESSED IN BONE MARROW, SIGNAL = 0.82; EXPRESSED IN HELA, SIGNAL = 0.76; EXPRESSED IN HEART, SIGNAL = 0.82; EXPRESSED IN FETAL LIVER, SIGNAL = 0.92; NT HIT: AL163206.2, EVALUE 4.30e+00; SWISSPROT HIT: P23231, EVALUE 6.80e+00
aggaaccagagatcctagaatttctaggccatgtggacatcatcaggatcctcgttgctgtctcagttgtgcttacccttgggggactttcctactggctgagagagcagaaacaagacattaa

SEQ ID NO: 20712 - DNA, 273 bp, Homo sapiens
  MAP TO AC012002.2; EXPRESSED IN PLACENTA, SIGNAL = 1.7; EXPRESSED IN HELA, SIGNAL = 1.7; EXPRESSED IN ADULT LIVER, SIGNAL = 2.1; EXPRESSED IN FETAL LIVER, SIGNAL = 1.7; EXPRESSED IN BRAIN, SIGNAL = 1.3; EXPRESSED IN HEART, SIGNAL = 1.6; EXPRESSED IN BT474, SIGNAL = 1.4; EXPRESSED IN LUNG, SIGNAL = 1.9; EXPRESSED IN BONE MARROW, SIGNAL = 1.5; EXPRESSED IN HBL100, SIGNAL = 1.6; EST_HUMAN HIT: AI792113.1, EVALUE 4.00e-03; NT HIT: AF170122.1, EVALUE 3.60e-02; SWISSPROT HIT: P10180, EVALUE 8.60e-01
gatggggaacgcttgtctcagctgcatgtggctttagctggggtgacctgcctggggtctggagggtctactttcaagatggtacacttttatggctgtcaaatgctgctggctgctggctgggagtctggctggagctgtgggttggaggaccctgtatctctccttgttggcacgtccaggggctgcttgagcttccttacatcatggcaacttggttccaagcttgagcaccccaagagcatgaggcagaagctgtgttgctgtttatga

SEQ ID NO: 20713 - DNA, 93 bp, Homo sapiens
  MAP TO AC011257.2; EXPRESSED IN HEART, SIGNAL = 1.1; EXPRESSED IN PLACENTA, SIGNAL = 1.7; EXPRESSED IN ADULT LIVER, SIGNAL =   1; EXPRESSED IN FETAL LIVER, SIGNAL = 1.1; EXPRESSED IN LUNG, SIGNAL = 1.3; NT HIT: gi4504632, EVALUE 6.50e-01; EST_HUMAN HIT: AW499834.1, EVALUE 7.90e-01
cttcacccttctcaccagctgtgtgcccaggatgctgccgtgtatgggttatactaacagtattcttcgctctggtatctgattgagtttggt

SEQ ID NO: 20714 - DNA, 196 bp, Homo sapiens
  MAP TO AL022169.1; EXPRESSED IN PLACENTA, SIGNAL = 9.2; EXPRESSED IN HEART, SIGNAL = 7.2; EXPRESSED IN LUNG, SIGNAL = 9.4; EXPRESSED IN BRAIN, SIGNAL =   8; EXPRESSED IN HELA, SIGNAL =  10; EXPRESSED IN HBL100, SIGNAL =  10; EXPRESSED IN ADULT LIVER, SIGNAL = 7.5; EXPRESSED IN BT474, SIGNAL = 7.7; EXPRESSED IN FETAL LIVER, SIGNAL = 9.1; EXPRESSED IN BONE MARROW, SIGNAL = 7.7; NT HIT: AF145229.1, EVALUE 4.60e-01; EST_HUMAN HIT: AW974650.1, EVALUE 1.00e-106; SWISSPROT HIT: P25368, EVALUE 5.60e-01
tcatctttaaaatgcctatagtctatgtcctctttaaattcttcgagagactgaagcagcctctgtctaaaattcccttctgtttgctggcgttcaaattctccatacgggcgtttttcctccctctttggcacgctgcactttggctttccttcgttttctttgcagggtttttgcatgatgttgttgttgtttc

SEQ ID NO: 20715 - DNA, 151 bp, Homo sapiens
  MAP TO AC007011.1; EXPRESSED IN PLACENTA, SIGNAL = 0.9; EXPRESSED IN ADULT LIVER, SIGNAL = 1.1; EXPRESSED IN BT474, SIGNAL = 0.97; EXPRESSED IN FETAL LIVER, SIGNAL = 0.93; EXPRESSED IN BONE MARROW, SIGNAL = 1.3; EXPRESSED IN BRAIN, SIGNAL = 1.4; EXPRESSED IN HELA, SIGNAL = 1.1; EXPRESSED IN HEART, SIGNAL = 1.1; NT HIT: gi11431072, EVALUE 6.00e-80; SWISSPROT HIT: P16661, EVALUE 4.00e-05; EST_HUMAN HIT: BE262438.1, EVALUE 6.00e-80
cacttggccagcagaacgaggggatggttggggccatgcaccagacccatgatggagtagccatagttgtgccagtcaatgacgagcttgcttccacaaaggcagcccacgaaccagcagacagcaatgctaggcagacctggggggttct

SEQ ID NO: 20716 - DNA, 183 bp, Homo sapiens
  MAP TO AC007199.1; EXPRESSED IN ADULT LIVER, SIGNAL = 3.7; EXPRESSED IN LUNG, SIGNAL = 2.5; EXPRESSED IN BRAIN, SIGNAL = 2.8; EXPRESSED IN HEART, SIGNAL = 2.4; EXPRESSED IN HELA, SIGNAL = 2.6; EXPRESSED IN HBL100, SIGNAL = 2.7; EXPRESSED IN PLACENTA, SIGNAL = 2.6; EXPRESSED IN BT474, SIGNAL = 2.5; EXPRESSED IN FETAL LIVER, SIGNAL =   3; EXPRESSED IN BONE MARROW, SIGNAL =   3; EST_HUMAN HIT: AW515742.1, EVALUE 2.00e-86; SWISSPROT HIT: Q20762, EVALUE 1.30e+00; NT HIT: gi11693157, EVALUE 4.30e-01
gcacacagaccagaggtagccagcagtacacaagactgcaaggcaacaagtacattatcaatgaattagccatctatcactcaaactatgtcccgcattggaagtgtgtcaagcaagagcaccttcgacaacacttttcggccaccactaatgatcatctccactgatgcctcagcagaaagg

SEQ ID NO: 20717 - DNA, 139 bp, Homo sapiens
  MAP TO AC007014.1; EXPRESSED IN BONE MARROW, SIGNAL = 9.3; EXPRESSED IN PLACENTA, SIGNAL = 8.8; EXPRESSED IN ADULT LIVER, SIGNAL =  12; EXPRESSED IN BRAIN, SIGNAL = 7.4; EXPRESSED IN HEART, SIGNAL = 7.4; EXPRESSED IN HELA, SIGNAL = 7.8; EXPRESSED IN HBL100, SIGNAL = 9.3; EXPRESSED IN BT474, SIGNAL = 7.6; EXPRESSED IN FETAL LIVER, SIGNAL = 9.1; EXPRESSED IN LUNG, SIGNAL = 9.8; NT HIT: AB002348.2, EVALUE 9.00e-63; EST_HUMAN HIT: BE832439.1, EVALUE 4.00e-60
aactcactcagatccaggacatcatcagtcttgatcaggtcctcctcccgagtcagcggcaactgtgtctcaggctcccctcgcaattgcagtgacagggaacgcagcatgaagaacacccggatggcctggaccaaca

SEQ ID NO: 20718 - DNA, 263 bp, Homo sapiens
  MAP TO AC007220.1; EXPRESSED IN LUNG, SIGNAL = 4.7; EXPRESSED IN BONE MARROW, SIGNAL = 4.8; EXPRESSED IN HELA, SIGNAL = 3.9; EXPRESSED IN PLACENTA, SIGNAL = 4.2; EXPRESSED IN BT474, SIGNAL = 4.5; EXPRESSED IN ADULT LIVER, SIGNAL = 4.8; EXPRESSED IN BRAIN, SIGNAL = 3.7; EXPRESSED IN HEART, SIGNAL =   4; EXPRESSED IN HBL100, SIGNAL =   5; EXPRESSED IN FETAL LIVER, SIGNAL = 4.2; NT HIT: AB002348.2, EVALUE 1.00e-115; EST_HUMAN HIT: AI432308.1, EVALUE 1.00e-112; SWISSPROT HIT: P46578, EVALUE 3.00e-10
atgccctgccagggtccagccactcaccagctattctctgcatcttcatgcgccttgcctggatgcggcctttggccaggcgctgcttggcgatgatgcagcggatgtggtctgagaagatgaaggtggcctggaggatggggaagggcttggaatgggggctggacgcaggcttgtggatggtgatgttcagggcacggctgtcgtcctccacgccagtcacctgcatgtcctgcacagtgagaagcaaaggaaaaggcatt

SEQ ID NO: 20719 - DNA, 120 bp, Homo sapiens
  MAP TO AC011032.2; EXPRESSED IN PLACENTA, SIGNAL = 5.4; EXPRESSED IN HELA, SIGNAL = 5.6; EXPRESSED IN HEART, SIGNAL =   4; EXPRESSED IN ADULT LIVER, SIGNAL = 7.5; EXPRESSED IN FETAL LIVER, SIGNAL = 5.2; EXPRESSED IN BRAIN, SIGNAL = 4.9; EXPRESSED IN BT474, SIGNAL = 4.9; EXPRESSED IN LUNG, SIGNAL = 6.3; EXPRESSED IN BONE MARROW, SIGNAL = 4.3; EXPRESSED IN HBL100, SIGNAL = 4.2; NT HIT: L44119.1, EVALUE 7.00e-08; EST_HUMAN HIT: N23712.1, EVALUE 8.00e-11; SWISSPROT HIT: Q58286, EVALUE 5.20e+00
gcttcatctcctcttatcatacttcaagaaaacgtttcaggatgttgagcccacttgtttaaaattttcattgaaagctctgctctcatctatggccaatgtgggtgcaatggttctggc

SEQ ID NO: 20720 - DNA, 122 bp, Homo sapiens
  MAP TO AC009721.9; EXPRESSED IN FETAL LIVER, SIGNAL = 1.1; EXPRESSED IN BT474, SIGNAL =   1; EXPRESSED IN ADULT LIVER, SIGNAL = 1.3; EXPRESSED IN LUNG, SIGNAL = 1.1; EXPRESSED IN BONE MARROW, SIGNAL =   1; EXPRESSED IN HELA, SIGNAL = 1.2; EXPRESSED IN PLACENTA, SIGNAL = 1.2; EXPRESSED IN HBL100, SIGNAL = 1.1; EXPRESSED IN HEART, SIGNAL = 1.2; NT HIT: AF103020.1, EVALUE 2.30e-01; EST_HUMAN HIT: AW999053.1, EVALUE 1.00e-01
agaagcagccaatcctcttaaggcccaagcttggaagtcccaagatgtccctgctactatatcctattggtcaaagcagtcacagggccagcccagagaaggggtggacatgttccacctct

SEQ ID NO: 20721 - DNA, 323 bp, Homo sapiens
  MAP TO AC008925.2; EXPRESSED IN BRAIN, SIGNAL = 6.3; EXPRESSED IN HELA, SIGNAL =  16; EXPRESSED IN PLACENTA, SIGNAL =   6; EXPRESSED IN HBL100, SIGNAL =  13; EXPRESSED IN HEART, SIGNAL = 6.2; EXPRESSED IN BT474, SIGNAL = 6.2; EXPRESSED IN FETAL LIVER, SIGNAL =  11; EXPRESSED IN ADULT LIVER, SIGNAL = 4.5; EXPRESSED IN BONE MARROW, SIGNAL = 5.9; EXPRESSED IN LUNG, SIGNAL =  11; NT HIT: AB015610.1, EVALUE 0.00e+00; EST_HUMAN HIT: BE387687.1, EVALUE 0.00e+00; SWISSPROT HIT: P12750, EVALUE 9.00e-54
ccatccaccagtcctcacaagttgagagagtgtctccccctcatcattttcctaaggaacagacttaagtatgccctgacaggagatgaagtaaagatttgcatgcaggggttcattaaggttgatggcaaggtacgaactgatataacctaccctgctggattcatggatgtcatcagcattgacaagacgggagataatttccatctgatctatgacaccaagggtcgctttgctgtacatcgtattacacccgaggaggctaagtacaaattgggtaaagtgagaaaaatctttgtgggcacaaaaggaatccctcatct

SEQ ID NO: 20722 - DNA, 152 bp, Homo sapiens
  MAP TO AC007223.1; EXPRESSED IN HEART, SIGNAL = 1.1; EXPRESSED IN ADULT LIVER, SIGNAL = 1.9; EXPRESSED IN FETAL LIVER, SIGNAL = 1.5; EXPRESSED IN LUNG, SIGNAL = 1.5; EXPRESSED IN BRAIN, SIGNAL = 1.5; EXPRESSED IN HBL100, SIGNAL = 1.5; EXPRESSED IN HELA, SIGNAL = 1.3; EXPRESSED IN PLACENTA, SIGNAL = 1.3; EXPRESSED IN BT474, SIGNAL = 1.4; EXPRESSED IN BONE MARROW, SIGNAL = 1.6; EST_HUMAN HIT: BF127854.1, EVALUE 1.30e-01; NT HIT: Z33046.1, EVALUE 1.40e+00
ccatcttccatagtaactagataaagtatctttaattgctgataacagaacagacaaattgtggttcttttttttgttgttgttgttattgagatattcatgaaatcttcctcctggaagtcaggcagaataacaccttttttctctgtctc

SEQ ID NO: 20723 - DNA, 173 bp, Homo sapiens
  MAP TO AC007248.1; EXPRESSED IN ADULT LIVER, SIGNAL =   2; EXPRESSED IN FETAL LIVER, SIGNAL = 2.1; EXPRESSED IN LUNG, SIGNAL = 2.1; EXPRESSED IN HELA, SIGNAL = 1.6; EXPRESSED IN PLACENTA, SIGNAL = 1.5; EXPRESSED IN BT474, SIGNAL = 1.5; EXPRESSED IN BONE MARROW, SIGNAL =   2; EXPRESSED IN BRAIN, SIGNAL = 1.7; EXPRESSED IN HEART, SIGNAL = 1.4; EXPRESSED IN HBL100, SIGNAL = 5.1; NT HIT: gi11430658, EVALUE 5.00e-93; EST_HUMAN HIT: AV696742.1, EVALUE 1.00e-82; SWISSPROT HIT: P14778, EVALUE 3.80e-02
gtcagtaacaggtgtaaattcaattaagattattttaatttttctttccaccaatgcttcatggagtccactttcaagttcatacctgacctcattagacatataacttttacttaggacaatgattagtcttcggcttttctctatcagtgagtggatttcatcaacaacag

SEQ ID NO: 20724 - DNA, 135 bp, Homo sapiens
  MAP TO AC011061.2; EXPRESSED IN BONE MARROW, SIGNAL = 5.6; EXPRESSED IN HBL100, SIGNAL = 4.9; EXPRESSED IN HELA, SIGNAL = 3.7; EXPRESSED IN ADULT LIVER, SIGNAL = 6.3; EXPRESSED IN BRAIN, SIGNAL = 5.1; EXPRESSED IN LUNG, SIGNAL = 5.2; EXPRESSED IN PLACENTA, SIGNAL = 5.9; EXPRESSED IN HEART, SIGNAL =   4; EXPRESSED IN BT474, SIGNAL = 4.6; EXPRESSED IN FETAL LIVER, SIGNAL = 5.1; NT HIT: M69181.1, EVALUE 2.00e-70; SWISSPROT HIT: P35580, EVALUE 4.00e-21; EST_HUMAN HIT: BE734186.1, EVALUE 3.00e-70
tagttataaacccttacaagaatcttccaatttactctgagaatattattgaaatgtacagagggaagaagcgtcatgagatgcctccacacatctatgctatatctgaatctgcttacagatgcatgcttcaag

SEQ ID NO: 20725 - DNA, 241 bp, Homo sapiens
  MAP TO AC007540.3; EXPRESSED IN LUNG, SIGNAL = 1.1; EXPRESSED IN BRAIN, SIGNAL = 1.1; EXPRESSED IN HEART, SIGNAL = 0.96; EXPRESSED IN PLACENTA, SIGNAL = 1.2; EXPRESSED IN BT474, SIGNAL = 0.98; EXPRESSED IN HBL100, SIGNAL = 0.96; EXPRESSED IN HELA, SIGNAL = 0.92; EXPRESSED IN ADULT LIVER, SIGNAL = 0.95; EXPRESSED IN BONE MARROW, SIGNAL = 2.5; EXPRESSED IN FETAL LIVER, SIGNAL = 0.82; NT HIT: gi11429282, EVALUE 2.30e+00; SWISSPROT HIT: P35347, EVALUE 1.10e+00
aaatcaaagggggctggaagaaatggagagacttcacaccagctgtcagaagcattttatgccaaggacaaacattcacatttgtcctgtcccagggatgtctcaaaaccatttccaggtaatagcaaggataccctctatagtggagactggtgtatctggcacgcttccaactgaaaatccctttccaatggaacttctgcagagtaccaggatcatttatattcataatgaaagtccc

SEQ ID NO: 20726 - DNA, 146 bp, Homo sapiens
  MAP TO AC011231.2; EXPRESSED IN BRAIN, SIGNAL = 2.4; EXPRESSED IN BONE MARROW, SIGNAL = 1.5; EXPRESSED IN LUNG, SIGNAL = 1.4; EXPRESSED IN HBL100, SIGNAL = 1.5; EXPRESSED IN HEART, SIGNAL = 1.2; EXPRESSED IN PLACENTA, SIGNAL = 1.5; EXPRESSED IN HELA, SIGNAL = 1.4; EXPRESSED IN ADULT LIVER, SIGNAL = 1.6; EXPRESSED IN BT474, SIGNAL = 1.3; EXPRESSED IN FETAL LIVER, SIGNAL = 1.6; NT HIT: AL163300.2, EVALUE 1.10e+00; EST_HUMAN HIT: AA584196.1, EVALUE 3.40e-01; SWISSPROT HIT: P17324, EVALUE 1.70e+00
tgtataagactgtgctacactacatggggtacacgctgttatatgagaagcagctcctgcccacaaggattttctggtgcatcaaatatatcaagataatctatgtgtgggttttgcatgtgtgggtgcgtgcatgagtgcatgag

SEQ ID NO: 20727 - DNA, 397 bp, Homo sapiens
  MAP TO AC011363.1; EXPRESSED IN HEART, SIGNAL = 0.92; EXPRESSED IN LUNG, SIGNAL = 3.6; EXPRESSED IN BRAIN, SIGNAL = 1.1; EXPRESSED IN FETAL LIVER, SIGNAL = 0.92; EXPRESSED IN ADULT LIVER, SIGNAL = 0.95; EST_HUMAN HIT: BE018556.1, EVALUE 1.00e-110; SWISSPROT HIT: O54827, EVALUE 2.00e-33; NT HIT: AB032963.1, EVALUE 3.00e-03
gtgctgatccccatctctttgtatgtctccattgagctggtgaagctcgggcaagtgttcttcttgagcaatgaccttgacctgtatgatgaagagaccgatttatccattcaatgtcgagccctcaacatcgcagaggacttgggccagatccagtacatcttctccgataagacggggaccctgacagagaacaagatggtgttccgacgttgcaccatcatgggcagcgagtattctcaccaagaaaatggtatagaagctcccaagggctccatccctctttctaaaaggaaataccctgctctcctaagaaacgaggagataaaagacattctcctggctctcttagaggctgtgtggcatttccacaagttgcttcctgtatccctgtggt

SEQ ID NO: 20728 - DNA, 264 bp, Homo sapiens
  MAP TO AC007249.2; EXPRESSED IN BONE MARROW, SIGNAL = 1.5; EXPRESSED IN ADULT LIVER, SIGNAL =   1; EXPRESSED IN LUNG, SIGNAL = 1.1; EXPRESSED IN BRAIN, SIGNAL = 1.1; EXPRESSED IN HEART, SIGNAL =   1; EXPRESSED IN HELA, SIGNAL = 1.2; EXPRESSED IN HBL100, SIGNAL = 1.3; EXPRESSED IN PLACENTA, SIGNAL = 1.6; EXPRESSED IN BT474, SIGNAL = 1.3; EXPRESSED IN FETAL LIVER, SIGNAL = 1.2; EST_HUMAN HIT: AA845035.1, EVALUE 9.50e-01; SWISSPROT HIT: P11675, EVALUE 2.10e-01
cagcatggggccacactgtccctggtgaggttgtccctgtgcccacctagatggctcagaaacagcaggcacccagagcaccaggaacgctgtgggggtgagagggtgggggaatacaccaagcgcttctccacgtggacgtgccccacagcagctagagccagtccccagtgcgtcaccgcatggccctcggccagtcacccttcctccaggactgcttcctccacggtaccgtgggcatcccactgctcctccatgcccttc

SEQ ID NO: 20729 - DNA, 259 bp, Homo sapiens
  MAP TO AC007073.2; EXPRESSED IN PLACENTA, SIGNAL = 3.2; EXPRESSED IN HBL100, SIGNAL = 3.6; EXPRESSED IN HEART, SIGNAL = 3.8; EXPRESSED IN ADULT LIVER, SIGNAL = 4.7; EXPRESSED IN FETAL LIVER, SIGNAL = 3.3; EXPRESSED IN BONE MARROW, SIGNAL = 3.8; EXPRESSED IN LUNG, SIGNAL =   4; EXPRESSED IN HELA, SIGNAL = 3.9; EXPRESSED IN BT474, SIGNAL = 3.4; EXPRESSED IN BRAIN, SIGNAL = 3.7; EST_HUMAN HIT: BF064197.1, EVALUE 1.00e-117; NT HIT: gi11437044, EVALUE 0.00e+00; SWISSPROT HIT: Q18953, EVALUE 6.90e-02
catgcaaactgtgagtggctatactttcagaggctttatgtcacatacaaataattacccttgtgcttacctcaatgctgcatcagccatcggaatgaagatgcaggatgtggacctgttcataaagagacttgacaggtgtttaaaggcagtaagaaaagaacgaagtaaagagagtgatgacaattatgacaaaactgaagatgtggatattgaagaaatggctttaaaactagataatgtacttcttgacacatac

SEQ ID NO: 20730 - DNA, 141 bp, Homo sapiens
  MAP TO AC011236.2; EXPRESSED IN FETAL LIVER, SIGNAL = 1.4; EXPRESSED IN BONE MARROW, SIGNAL = 1.2; EXPRESSED IN HBL100, SIGNAL = 1.3; EXPRESSED IN BT474, SIGNAL = 1.2; EXPRESSED IN ADULT LIVER, SIGNAL = 1.7; EXPRESSED IN BRAIN, SIGNAL = 1.3; EXPRESSED IN LUNG, SIGNAL = 1.3; EXPRESSED IN PLACENTA, SIGNAL = 1.4; EXPRESSED IN HEART, SIGNAL = 1.2; EXPRESSED IN HELA, SIGNAL = 1.7; NT HIT: AJ271735.1, EVALUE 3.00e-04; SWISSPROT HIT: P21139, EVALUE 3.90e+00; EST_HUMAN HIT: BF056899.1, EVALUE 4.70e-01
cggtatggaattctgaatagcattgcctctgaccaagaaacccaacttacagcaagagagtgtggcaatggccacatgacaatgggatccaccagtcccatcatataccacatcactcagaagcttctggactcaataaag

SEQ ID NO: 20731 - DNA, 106 bp, Homo sapiens
  MAP TO AC007204.1; EXPRESSED IN BT474, SIGNAL = 3.4; EXPRESSED IN LUNG, SIGNAL = 2.3; EXPRESSED IN FETAL LIVER, SIGNAL = 2.1; EXPRESSED IN ADULT LIVER, SIGNAL = 2.5; EXPRESSED IN BONE MARROW, SIGNAL = 2.8; EXPRESSED IN BRAIN, SIGNAL = 2.5; EXPRESSED IN PLACENTA, SIGNAL = 2.6; EXPRESSED IN HEART, SIGNAL = 2.1; EXPRESSED IN HELA, SIGNAL = 2.3; EXPRESSED IN HBL100, SIGNAL = 2.5; NT HIT: M61873.1, EVALUE 2.00e-53; EST_HUMAN HIT: AA587676.1, EVALUE 3.00e-53; SWISSPROT HIT: P35789, EVALUE 7.00e-15
gtggccatagaattctctctggaggagtggcattgcctggacactgcacagcggaatctatataggaatgtgatgttagagaactacagtaacctggtcttccttg

SEQ ID NO: 20732 - DNA, 240 bp, Homo sapiens
  MAP TO AC007016.5; EXPRESSED IN LUNG, SIGNAL =   2; EXPRESSED IN BT474, SIGNAL = 2.1; EXPRESSED IN ADULT LIVER, SIGNAL = 1.7; EXPRESSED IN FETAL LIVER, SIGNAL = 1.7; EXPRESSED IN BONE MARROW, SIGNAL = 2.1; EXPRESSED IN HELA, SIGNAL =   2; EXPRESSED IN BRAIN, SIGNAL = 2.1; EXPRESSED IN PLACENTA, SIGNAL = 1.7; EXPRESSED IN HEART, SIGNAL = 1.8; EXPRESSED IN HBL100, SIGNAL = 1.9; NT HIT: U57361.1, EVALUE 2.00e-03; SWISSPROT HIT: P52824, EVALUE 3.00e-01
aaaggagagaactactcccccaggtatatctgcagcattcctggcttgcctggacctccagggccccctggagcaaatggttcccctgggccccatggtcgcatcggccttccaggaagagatggtagagacggcaggaaaggagagaaaggtgaaaagggaactgcaggtaatgaatgagaagttgcataaaacaccctccttcacccccaccttaaaactgttcccctttctttgtta

SEQ ID NO: 20733 - DNA, 575 bp, Homo sapiens
  MAP TO AC005822.1; EXPRESSED IN HELA, SIGNAL =  13; EXPRESSED IN ADULT LIVER, SIGNAL =  13; EXPRESSED IN BT474, SIGNAL =  11; EXPRESSED IN BRAIN, SIGNAL =  11; EXPRESSED IN LUNG, SIGNAL =  14; EXPRESSED IN BONE MARROW, SIGNAL = 9.8; EXPRESSED IN PLACENTA, SIGNAL =  12; EXPRESSED IN HEART, SIGNAL = 9.4; EXPRESSED IN HBL100, SIGNAL =  11; EXPRESSED IN FETAL LIVER, SIGNAL =  12; NT HIT: AF185255.1, EVALUE 4.80e+00; EST_HUMAN HIT: BE071749.1, EVALUE 5.80e+00
actggcccagaagtggagcagtaagaaggtggggaacggggggagggagaggaggagaaggaggaagaggaagagggagaggaggaggaggaaggggagggggaggaggaggagtagcagtagtaggaggaggaggaagaggagggagaggaggaggaagaggaggggtaggaggaggaagaggaggggtaggaggaggaagaggaggaaggaggaggaagaggaggaggaagaggaggaagaagaggagaaaggaggagaagaaggaagaggatcaggaagaggaggaggaggaagaggaggaggaagagaaggaagaggaggaggaggaagaggagaagaaggaagaggaggaggaagagaaggaagaggaggaggaagagaaggaagaggaggaggaagagaagaaggaaaaggaggaagaggaggaggaggaagaggagcagaagaaggaagaggaggaggaagaggaagaagaggagaaggagaaagaagaggaggaggaagaggaagaggaggaggaagctggacttgacactgagacacacataccctaactcctccagtggctggaa

SEQ ID NO: 20734 - DNA, 141 bp, Homo sapiens
  MAP TO AL035534.1; EXPRESSED IN BT474, SIGNAL =   1; EXPRESSED IN BONE MARROW, SIGNAL = 1.2; EXPRESSED IN HELA, SIGNAL = 0.92; EXPRESSED IN ADULT LIVER, SIGNAL = 0.93; EXPRESSED IN PLACENTA, SIGNAL = 1.3; EXPRESSED IN HEART, SIGNAL = 1.3; EXPRESSED IN BRAIN, SIGNAL =   1; EXPRESSED IN LUNG, SIGNAL =   1; EXPRESSED IN FETAL LIVER, SIGNAL =   1; EXPRESSED IN HBL100, SIGNAL = 1.2; EST_HUMAN HIT: F07203.1, EVALUE 3.00e-08; SWISSPROT HIT: P08547, EVALUE 2.00e-05; NT HIT: AL163247.2, EVALUE 4.00e-74
acaaaattcaacaacattttagtgatacaagctctaaacaaactaggcatagaaagactttacctcaacataataaaggccatagatgaagagcccacagttgacatcatacttactggtgaaaacttggaagtttttctt

SEQ ID NO: 20735 - DNA, 150 bp, Homo sapiens
  MAP TO AL035409.15; EXPRESSED IN BT474, SIGNAL = 0.9; EXPRESSED IN BONE MARROW, SIGNAL = 0.96; EXPRESSED IN LUNG, SIGNAL = 1.1; EXPRESSED IN ADULT LIVER, SIGNAL = 0.68; EXPRESSED IN BRAIN, SIGNAL = 1.2; EXPRESSED IN PLACENTA, SIGNAL = 0.85; EXPRESSED IN FETAL LIVER, SIGNAL = 0.78; EXPRESSED IN HEART, SIGNAL = 0.9; EST_HUMAN HIT: BE083080.1, EVALUE 1.00e-74; NT HIT: AB028840.1, EVALUE 2.00e-48; SWISSPROT HIT: Q64686, EVALUE 1.00e-04
ctgtctttgccagtctcctgcttgaagagctcatcaaactgcagcatcttgtggcgagtaatcatgaaggccttcagccggggcagcacctggctcaggagatgcaggttgttgtagacctggcccttgccgtcccgccgcatgtagctg

SEQ ID NO: 20736 - DNA, 128 bp, Homo sapiens
  MAP TO AC007377.3; EXPRESSED IN LUNG, SIGNAL = 0.68; EXPRESSED IN BRAIN, SIGNAL = 0.8; EXPRESSED IN HEART, SIGNAL = 0.86; EXPRESSED IN FETAL LIVER, SIGNAL = 0.57; EXPRESSED IN HELA, SIGNAL = 0.92; EXPRESSED IN PLACENTA, SIGNAL = 0.69; NT HIT: X91216.1, EVALUE 3.00e-66; SWISSPROT HIT: P32418, EVALUE 2.00e-18; EST_HUMAN HIT: T19754.1, EVALUE 5.00e-06
aatatgatgacaagcagccactgaccagcaaagaggaagaggagaggcgcattgcagaaatggggcgccccatcctgggagagcacaccaagttggaagtgatcattgaagaatcctatgaattcaag

SEQ ID NO: 20737 - DNA, 628 bp, Homo sapiens
  MAP TO AL096814.11; EXPRESSED IN HEART, SIGNAL = 3.3; EXPRESSED IN ADULT LIVER, SIGNAL = 1.8; EXPRESSED IN BRAIN, SIGNAL = 2.7; EXPRESSED IN BONE MARROW, SIGNAL = 2.7; EXPRESSED IN PLACENTA, SIGNAL = 2.7; EXPRESSED IN HELA, SIGNAL = 3.3; EXPRESSED IN HBL100, SIGNAL = 2.6; EXPRESSED IN BT474, SIGNAL = 2.7; EXPRESSED IN FETAL LIVER, SIGNAL =   3; EXPRESSED IN LUNG, SIGNAL = 3.3; EST_HUMAN HIT: AW833678.1, EVALUE 1.00e-39; NT HIT: AJ277276.1, EVALUE 0.00e+00; SWISSPROT HIT: P13368, EVALUE 1.40e+00
ctggggccacatggcactgggagacagctgctgatgctgaggccccatgttgttgaggtggatcccactgggggataggagggggcgatgggggagggtgctgctgacccgggtcagatctgagctcgctgggtctcccattcctgtgtcaggaggccccaggtccccatgggagctcagcatggcctgggcctgtctgtcactagagtaggtcttcagctgactgtcctcacgctgctggtgctgggacaggtggctctgctggtagagggggtggctgtagggctgctggggctcctggtagtagtactgggacatggagcccaggggaatcagctggacagtgtgtgcctgctctggggtatactggtgagggtccctgtgataagaaggaggctgcaggtgcatctgttgctgctgctgctcttgcaagtgctgcatcatgggttggggctgataatactgaggtatctgcattgaaccctgccgctgctgcagctgtagctgctgcggctgctgctgctgtggcggcggctgtggctgtgatgggcgaatttgttgcggctgcgtctgtatttcttgcatggagatacgctgttgcccggcttgctgctgttgctgcggtggg

SEQ ID NO: 20738 - DNA, 200 bp, Homo sapiens
  MAP TO AC007462.2; EXPRESSED IN HELA, SIGNAL = 0.9; EXPRESSED IN ADULT LIVER, SIGNAL = 1.5; EXPRESSED IN HEART, SIGNAL = 0.83; EXPRESSED IN BT474, SIGNAL = 0.84; EXPRESSED IN HBL100, SIGNAL = 1.1; EXPRESSED IN FETAL LIVER, SIGNAL = 1.4; EXPRESSED IN BONE MARROW, SIGNAL = 1.8; EXPRESSED IN LUNG, SIGNAL = 1.4; SWISSPROT HIT: P32323, EVALUE 2.50e-01; NT HIT: AJ271735.1, EVALUE 7.30e+00
acgtgctatatgttgtcagtgctacaacacttaagctaaacctccaggatgatggaatagaagatgcaacggttgaaggtttagattttgtagcagaggctgaatttgaatgtggatttaaagaaagagtagagcttgttcattttgacctttgtctatttgagactgtattcatgtcaacagatatgtgcatcgcaatg

SEQ ID NO: 20739 - DNA, 134 bp, Homo sapiens
  MAP TO AC009298.1; EXPRESSED IN BT474, SIGNAL = 0.8; EXPRESSED IN BONE MARROW, SIGNAL = 1.2; EXPRESSED IN FETAL LIVER, SIGNAL = 1.5; EXPRESSED IN HELA, SIGNAL = 0.64; EXPRESSED IN ADULT LIVER, SIGNAL =   1; EXPRESSED IN PLACENTA, SIGNAL = 1.1; EXPRESSED IN HEART, SIGNAL = 0.86; EXPRESSED IN BRAIN, SIGNAL = 0.76; EXPRESSED IN LUNG, SIGNAL = 0.87; EXPRESSED IN HBL100, SIGNAL =   1; SWISSPROT HIT: P87110, EVALUE 5.20e+00
agaagagattcaggttgcagtctaaaatagggtggccatggtaggcttcagtgagaacatgagatttcatcaaaatcttgatggacgtgaggaagttaactctgtagatcctggaggaggaggattccaggcaa

SEQ ID NO: 20740 - DNA, 137 bp, Homo sapiens
  MAP TO AC004916.2; EXPRESSED IN BONE MARROW, SIGNAL = 0.81; EXPRESSED IN FETAL LIVER, SIGNAL = 0.62; EXPRESSED IN BRAIN, SIGNAL = 0.97; EXPRESSED IN ADULT LIVER, SIGNAL =   1; EXPRESSED IN PLACENTA, SIGNAL = 0.79; EXPRESSED IN BT474, SIGNAL = 0.75; EXPRESSED IN HEART, SIGNAL = 0.78; EXPRESSED IN HELA, SIGNAL = 0.98; EXPRESSED IN LUNG, SIGNAL = 0.86; EXPRESSED IN HBL100, SIGNAL = 0.93; SWISSPROT HIT: P31285, EVALUE 7.00e-19; EST_HUMAN HIT: AI472003.1, EVALUE 3.00e-10; NT HIT: AY009397.1, EVALUE 1.00e-34
acccccatacctttgtccagcacgggcccgaagatggccaggctgtcgtggacggtggtgcagttccaccggcggccgcggaactggtgctggcactcctggatgccaatcttgatgccctcggccacgctgggcat

SEQ ID NO: 20741 - DNA, 162 bp, Homo sapiens
  MAP TO AL079295.1; EXPRESSED IN HELA, SIGNAL = 1.7; EXPRESSED IN PLACENTA, SIGNAL = 0.74; EXPRESSED IN BT474, SIGNAL = 0.66; EXPRESSED IN FETAL LIVER, SIGNAL = 0.95; EXPRESSED IN ADULT LIVER, SIGNAL = 0.69; EXPRESSED IN BONE MARROW, SIGNAL = 2.1; EXPRESSED IN BRAIN, SIGNAL = 2.2; EXPRESSED IN HEART, SIGNAL = 1.1; EXPRESSED IN LUNG, SIGNAL = 0.61; EXPRESSED IN HBL100, SIGNAL = 0.76; NT HIT: AJ277661.1, EVALUE 3.70e-01
tatactgataaactggaaaccactgaacaaatacaagacgaggctaattgtggtatagcaagttttagggatggacaaaccacagttcaaattctaactctgacaattgcaaactgtgtgactttgcaagttactgaaatatctgctttctcatctgtaaaa

SEQ ID NO: 20742 - DNA, 632 bp, Homo sapiens
  MAP TO AE000658.1; EXPRESSED IN FETAL LIVER, SIGNAL = 8.5; EXPRESSED IN BT474, SIGNAL = 7.1; EXPRESSED IN ADULT LIVER, SIGNAL = 8.3; EXPRESSED IN BRAIN, SIGNAL = 6.3; EXPRESSED IN BONE MARROW, SIGNAL = 7.8; EXPRESSED IN LUNG, SIGNAL =  11; EXPRESSED IN PLACENTA, SIGNAL = 8.3; EXPRESSED IN HELA, SIGNAL =  11; EXPRESSED IN HEART, SIGNAL = 5.6; EXPRESSED IN HBL100, SIGNAL =  15; NT HIT: gi5032026, EVALUE 0.00e+00; SWISSPROT HIT: Q09028, EVALUE 1.00e-113; EST_HUMAN HIT: BE537587.1, EVALUE 0.00e+00
tttgactatacaaaatatccttctaaaccagatccttctggagagtgcaacccagacttgcgtctctgtggacatcagaaggaaggctatgggctttcatggaacccaaatctcagtgggcatttacttagtgcttcagatgaccacactgtctgcctgtgggacatcagtgccattccaaaggagggaaaagtggatgcaaggaccatctttacggggcatacagcagtagtagaagatgttttctggaatctgcttcatgagtctctgtttaggttagttgctgatgatcagaaacttatgatttgggatactcgttcaaaaaatacttccaaaccaagccactcagttgatgcttacactgctgaagtgaactgcctctctttcaatccttatggtgagttcattcttgctacaggatcagctgacaagactgttgccttgtgggatctgagaaatctgaaacttaaggtacattcctttgagtcacataaggatgaaatattccaggttcagtggtcacctcacaatgagactattttggcttccagtggtactgatcatggactgaatgtctgggatttaagtaaaatcacagaggaacaatccccagaagatgcagaagacaggcc

SEQ ID NO: 20743 - DNA, 189 bp, Homo sapiens
  MAP TO AL049548.6; EXPRESSED IN BT474, SIGNAL =   1; EXPRESSED IN BONE MARROW, SIGNAL = 1.1; EXPRESSED IN FETAL LIVER, SIGNAL = 0.73; EXPRESSED IN HELA, SIGNAL = 0.66; EXPRESSED IN ADULT LIVER, SIGNAL = 0.89; EXPRESSED IN PLACENTA, SIGNAL =   1; EXPRESSED IN HEART, SIGNAL = 1.1; EXPRESSED IN BRAIN, SIGNAL = 0.88; EXPRESSED IN LUNG, SIGNAL = 0.93; SWISSPROT HIT: O09006, EVALUE 1.70e+00; EST_HUMAN HIT: AI279848.1, EVALUE 6.60e-01; NT HIT: AE004869.1, EVALUE 1.70e+00
gatctctgccaggccctggagtcactgagcagcgcgatcactgccttctcagccagtgccaggaaggttgtgaacagagattcctgtgttcaggaggctgcggctctacagcagcaatacgaggacatcctaaggagggcgaaggagagacagacggcgctggagaatctgctggcccactggcagagg

SEQ ID NO: 20744 - DNA, 225 bp, Homo sapiens; identical to SEQ ID NO: 20094
  MAP TO AP000199.1; EXPRESSED IN BONE MARROW, SIGNAL = 0.95; EXPRESSED IN FETAL LIVER, SIGNAL = 0.8; EXPRESSED IN BRAIN, SIGNAL = 1.3; EXPRESSED IN ADULT LIVER, SIGNAL = 1.1; EXPRESSED IN PLACENTA, SIGNAL = 0.98; EXPRESSED IN BT474, SIGNAL = 0.73; EXPRESSED IN HEART, SIGNAL = 1.2; EXPRESSED IN HELA, SIGNAL = 0.99; EXPRESSED IN LUNG, SIGNAL = 1.3; EXPRESSED IN HBL100, SIGNAL = 0.81; EST_HUMAN HIT: R13319.1, EVALUE 5.00e-66; NT HIT: gi11526170, EVALUE 1.00e-124; SWISSPROT HIT: P22756, EVALUE 1.00e-38

SEQ ID NO: 20745 - DNA, 211 bp, Homo sapiens
  MAP TO AE000661.1; EXPRESSED IN PLACENTA, SIGNAL = 3.9; EXPRESSED IN HBL100, SIGNAL = 4.4; EXPRESSED IN HELA, SIGNAL = 4.8; EXPRESSED IN HEART, SIGNAL = 3.8; EXPRESSED IN BT474, SIGNAL = 4.8; EXPRESSED IN FETAL LIVER, SIGNAL = 4.6; EXPRESSED IN ADULT LIVER, SIGNAL = 5.4; EXPRESSED IN BRAIN, SIGNAL = 3.9; EXPRESSED IN BONE MARROW, SIGNAL = 4.8; EXPRESSED IN LUNG, SIGNAL = 5.2; SWISSPROT HIT: P33666, EVALUE 1.20e+00; NT HIT: X71133.1, EVALUE 2.00e+00
ctgcgttttctctgtgacaccaggaatcagcatttccattcaaatacagcaaactttaaaccgctttttgacaggaggaaacactttctgcctaatgaaggggatgaagcaggtaacccagagagtatctgccacacaggcctcctctacagtagctcagaattgcactgtttgattatttcttacacgtggcatctgcaaattcagaaag

SEQ ID NO: 20746 - DNA, 90 bp, Homo sapiens
  MAP TO AC008012.8; EXPRESSED IN HEART, SIGNAL = 1.4; NT HIT: X99675.1, EVALUE 6.30e-01
atttggaagcttttgctgtatgagaccacagagatcacctgggtggtggttgtcaacctggctgcatttaagaatcacctgtggggcttt

SEQ ID NO: 20747 - DNA, 129 bp, Homo sapiens
  MAP TO AP000128.1; EXPRESSED IN PLACENTA, SIGNAL = 0.62; EXPRESSED IN BT474, SIGNAL = 0.65; EXPRESSED IN BONE MARROW, SIGNAL = 0.68; EXPRESSED IN FETAL LIVER, SIGNAL = 0.57; EXPRESSED IN ADULT LIVER, SIGNAL = 0.73; EXPRESSED IN LUNG, SIGNAL = 0.6; EXPRESSED IN HEART, SIGNAL = 0.78; EST_HUMAN HIT: AI872056.1, EVALUE 3.00e-05; SWISSPROT HIT: Q95208, EVALUE 8.90e+00; NT HIT: U82668.1, EVALUE 2.00e-08
cagatgtccctggtcttgtgtctgcataactccaacctctgcctccatctccacacggccttctcctgggtgaacctcctcttctgtgtcttataaggatgcttggcattggatttaggacccacctag

SEQ ID NO: 20748 - DNA, 222 bp, Homo sapiens
  MAP TO AF001548.1; EXPRESSED IN LUNG, SIGNAL = 1.4; EXPRESSED IN HEART, SIGNAL = 1.3; EST_HUMAN HIT: BE837559.1, EVALUE 1.00e-27; NT HIT: AB020673.1, EVALUE 6.00e-28; SWISSPROT HIT: P35580, EVALUE 4.00e-07
ggcaaattcatccgcatcaacttcgacgtcacgggttacatcgtgggagccaacattgagacctgtatcctttccctgagcctgggccaaatgggtacccctgccccctaccaatctcctgcccagaggctgggagagtccaagagccacctctatctttccagcctcttaggtttcttccagaacaaatctccccttaacagcaggcattgtggtgcagtg

SEQ ID NO: 20749 - DNA, 119 bp, Homo sapiens
  MAP TO AC007014.1; EXPRESSED IN FETAL LIVER, SIGNAL = 1.5; EXPRESSED IN ADULT LIVER, SIGNAL = 1.8; EXPRESSED IN BRAIN, SIGNAL = 1.1; EXPRESSED IN BONE MARROW, SIGNAL = 1.3; EXPRESSED IN LUNG, SIGNAL = 1.6; EXPRESSED IN HBL100, SIGNAL = 1.4; EXPRESSED IN HEART, SIGNAL = 1.5; EXPRESSED IN BT474, SIGNAL = 1.3; EXPRESSED IN PLACENTA, SIGNAL = 1.5; EXPRESSED IN HELA, SIGNAL = 1.5; SWISSPROT HIT: P87387, EVALUE 6.90e+00; NT HIT: U93879.1, EVALUE 1.00e+00; EST_HUMAN HIT: BF592611.1, EVALUE 3.90e-01
cctggggtagaacaggagctgctcgccaaggtggcatacactctccaatttgccacacccctcgccactctctactgccctcacctggggcctgagtcattcatggatgttcatcgccc

SEQ ID NO: 20750 - DNA, 414 bp, Homo sapiens
  MAP TO AC007221.1; EXPRESSED IN BT474, SIGNAL = 1.7; EXPRESSED IN FETAL LIVER, SIGNAL = 1.8; EXPRESSED IN ADULT LIVER, SIGNAL = 1.9; EXPRESSED IN BRAIN, SIGNAL = 1.3; EXPRESSED IN BONE MARROW, SIGNAL = 1.4; EXPRESSED IN LUNG, SIGNAL = 1.7; EXPRESSED IN HBL100, SIGNAL = 1.5; EXPRESSED IN PLACENTA, SIGNAL = 1.6; EXPRESSED IN HELA, SIGNAL = 1.9; EXPRESSED IN HEART, SIGNAL = 1.6; EST_HUMAN HIT: AI681239.1, EVALUE 1.00e+00; SWISSPROT HIT: P42526, EVALUE 9.10e-02; NT HIT: AF260225.1, EVALUE 6.60e-02
aaagcccttgacttcagcatgtgttctctttgcttattgatcagcacacctatgctagcattgactggcatgcccatattagcattgtttagcatgctcatactagcgttcatcagcaggtttatactagcattgatcagcacacccatactagtattggtaagcacgtccgtactagcattgatcggcaggcttatactagcattgataagaacccccatactagcattgatcagcatgcccatgctagcattgatcagcatacttatattagctttgatcagcatgcccatactgtcattgatcagcatgcccataccaacattgaccagcatacccatactagcattgatcagcatgtcctttctagcattaatcagcatgcttagttctgtgatagctttgctcttccag

SEQ ID NO: 20751 - DNA, 133 bp, Homo sapiens
  MAP TO AL035530.11; EXPRESSED IN HEART, SIGNAL = 0.86; EXPRESSED IN ADULT LIVER, SIGNAL =   1; EXPRESSED IN HBL100, SIGNAL = 1.7; EXPRESSED IN HELA, SIGNAL = 1.5; EXPRESSED IN BT474, SIGNAL = 0.95; EST_HUMAN HIT: AI765888.1, EVALUE 3.00e-69; SWISSPROT HIT: P33485, EVALUE 4.00e+00
tatctggcgtgcaggctgtcacctgtgacagagaggaaaggcaggatggggacaaagaccaggatctcactatcagtttaggaaattctctggtcttcatgctggcttctgacccttgtgtcgccgagtttcc

SEQ ID NO: 20752 - DNA, 148 bp, Homo sapiens
  MAP TO AC007228.1; EXPRESSED IN HEART, SIGNAL = 1.1; EXPRESSED IN BT474, SIGNAL = 1.4; EXPRESSED IN ADULT LIVER, SIGNAL = 1.6; EXPRESSED IN LUNG, SIGNAL = 1.4; EXPRESSED IN BRAIN, SIGNAL = 1.2; EXPRESSED IN BONE MARROW, SIGNAL =   1; EXPRESSED IN PLACENTA, SIGNAL = 1.1; EXPRESSED IN HELA, SIGNAL = 1.2; EXPRESSED IN HBL100, SIGNAL = 1.1; EXPRESSED IN FETAL LIVER, SIGNAL = 1.3; NT HIT: X15723.1, EVALUE 1.00e-03; SWISSPROT HIT: P06605, EVALUE 2.30e+00; EST_HUMAN HIT: AV647727.1, EVALUE 1.00e-04
tgcatacccaggaaaccatcaccatgatcaagataaaggacatatctatcatccccaagagattcctcatcctcctttattacccctctctccccttcctcaacccccatccccagggatcccctggtctgctttatgtcactgtggt

SEQ ID NO: 20753 - DNA, 90 bp, Homo sapiens
  MAP TO AC007034.2; EXPRESSED IN BONE MARROW, SIGNAL = 1.4; EXPRESSED IN HEART, SIGNAL = 1.9; EXPRESSED IN BT474, SIGNAL = 1.4; EXPRESSED IN BRAIN, SIGNAL = 1.3; EXPRESSED IN LUNG, SIGNAL =   2; EXPRESSED IN PLACENTA, SIGNAL = 1.5; EXPRESSED IN HELA, SIGNAL = 1.6; EXPRESSED IN HBL100, SIGNAL = 1.5; EXPRESSED IN ADULT LIVER, SIGNAL =   2; EXPRESSED IN FETAL LIVER, SIGNAL = 1.9; NT HIT: gi5836030, EVALUE 2.90e+00; EST_HUMAN HIT: AW754106.1, EVALUE 1.90e-01
acccaattagagtcacagtctcccttgaagcctggtccacagttgcgatggcagcctgaatttcaggcccatgaaagacctgctcagcag

SEQ ID NO: 20754 - DNA, 252 bp, Homo sapiens; identical to SEQ ID NO: 17121
  MAP TO AP000114.1; EXPRESSED IN FETAL LIVER, SIGNAL = 0.98; EXPRESSED IN ADULT LIVER, SIGNAL = 0.7; EXPRESSED IN BONE MARROW, SIGNAL = 1.3; EXPRESSED IN HBL100, SIGNAL = 1.9; EXPRESSED IN HEART, SIGNAL = 0.81; EXPRESSED IN PLACENTA, SIGNAL = 0.64; EXPRESSED IN BT474, SIGNAL = 0.87; EXPRESSED IN LUNG, SIGNAL = 0.64; EXPRESSED IN HELA, SIGNAL =   1; EST_HUMAN HIT: AU131027.1, EVALUE 0.00e+00; NT HIT: gi11526206, EVALUE 0.00e+00; SWISSPROT HIT: P22102, EVALUE 2.00e-43

SEQ ID NO: 20755 - DNA, 130 bp, Homo sapiens
  MAP TO AC007552.4; EXPRESSED IN LUNG, SIGNAL = 0.88; EXPRESSED IN HELA, SIGNAL = 0.66; EXPRESSED IN BT474, SIGNAL = 0.65; EXPRESSED IN ADULT LIVER, SIGNAL = 0.71; EXPRESSED IN PLACENTA, SIGNAL = 0.79; EXPRESSED IN HEART, SIGNAL = 0.82; EXPRESSED IN BRAIN, SIGNAL = 0.77; EXPRESSED IN FETAL LIVER, SIGNAL = 0.67; EXPRESSED IN BONE MARROW, SIGNAL = 0.7; EST_HUMAN HIT: AW002902.1, EVALUE 2.90e-01; SWISSPROT HIT: Q05361, EVALUE 8.90e+00; NT HIT: AE001686.1, EVALUE 4.50e+00
tccactgtcacccctaactattttatgaataggattcctatttctagagaagaaaacgcagacttggagaggttgagtaagttgcctaggaatgtgaagctggggtgtagcagaagggggtcgacgtcag

SEQ ID NO: 20756 - DNA, 152 bp, Homo sapiens
  MAP TO AL049835.3; EXPRESSED IN HEART, SIGNAL = 0.8; EXPRESSED IN PLACENTA, SIGNAL = 1.1; EST_HUMAN HIT: AA299155.1, EVALUE 1.30e-01; NT HIT: AF217796.1, EVALUE 3.50e-01; SWISSPROT HIT: Q04747, EVALUE 3.40e-01
caaatttgatgaaagacatgaatgcacacaagaagttcaacaatcccaagcaggataaactaaaaaagactgacacgaagatacattataatcaaattgttgaaagtgacaaagatgaagagagaattctgatcctcaataagatttacagc

SEQ ID NO: 20757 - DNA, 126 bp, Homo sapiens
  MAP TO AC007248.1; EXPRESSED IN HELA, SIGNAL = 1.4; EXPRESSED IN ADULT LIVER, SIGNAL = 1.3; EXPRESSED IN LUNG, SIGNAL = 1.1; EXPRESSED IN BRAIN, SIGNAL = 0.99; EXPRESSED IN BONE MARROW, SIGNAL =   1; EXPRESSED IN PLACENTA, SIGNAL =   1; EXPRESSED IN HEART, SIGNAL = 1.2; EXPRESSED IN HBL100, SIGNAL = 1.1; EXPRESSED IN BT474, SIGNAL = 1.1; EXPRESSED IN FETAL LIVER, SIGNAL = 1.4; EST_HUMAN HIT: AA861446.1, EVALUE 1.80e-02; NT HIT: gi11525724, EVALUE 1.10e+00; SWISSPROT HIT: P40489, EVALUE 3.00e+00
ggaggtatccttatacctctctttctccagcacatcaatctcaagccaccaataagtcccagtgaacctactttccaaatacagccagaactcagccatgtgaccacttctcatggccatctttgc

SEQ ID NO: 20758 - DNA, 343 bp, Homo sapiens
  MAP TO AE000659.1; EXPRESSED IN BT474, SIGNAL =   9; EXPRESSED IN FETAL LIVER, SIGNAL = 9.7; EXPRESSED IN BRAIN, SIGNAL = 4.8; EXPRESSED IN LUNG, SIGNAL =  20; EXPRESSED IN HBL100, SIGNAL =  18; EXPRESSED IN HEART, SIGNAL = 7.7; EXPRESSED IN ADULT LIVER, SIGNAL = 1.1; EXPRESSED IN BONE MARROW, SIGNAL = 5.1; EXPRESSED IN PLACENTA, SIGNAL = 5.1; EXPRESSED IN HELA, SIGNAL = 7.4; NT HIT: D23660.1, EVALUE 1.00e-118; SWISSPROT HIT: P36578, EVALUE 5.00e-37; EST_HUMAN HIT: BE744099.1, EVALUE 1.00e-118
tagtcgaagataaagttgaaggctacaagaagaccaaggaggctgttttgcttcttaagaaacttaaagcctggaatgatatcgagaaggtctatgtctctcagcaaatgagatccagcaagagcaaaacgagaaaccatcaccgtatccggcgcaggggcgccgcatcatctgtaatgaggataatggtatcgtcaaggccttcagaaacatccctggaattactatgcttaatataagcaaactgaacattttgaaacttgctcctggtgggcatgtgggacatttctgcatttggactcaaagtgctttctggaagttagatgaattttctggcacttgg

SEQ ID NO: 20759 - DNA, 86 bp, Homo sapiens
  MAP TO AL035563.18; EXPRESSED IN LUNG, SIGNAL = 0.73; EXPRESSED IN PLACENTA, SIGNAL = 0.65; EXPRESSED IN FETAL LIVER, SIGNAL = 0.6; EXPRESSED IN HELA, SIGNAL = 1.4; EXPRESSED IN BRAIN, SIGNAL = 0.78; EXPRESSED IN HEART, SIGNAL = 0.85; NT HIT: gi7657072, EVALUE 1.80e-01; EST_HUMAN HIT: AW007393.1, EVALUE 1.00e+00; SWISSPROT HIT: P97347, EVALUE 5.40e+00
tgcttctggtgagagcctcagggagcacatcatggcagaagacgaagaaggagctggaatatcacatggcaagagaggaagaaatg

SEQ ID NO: 20760 - DNA, 392 bp, Homo sapiens
  MAP TO AC007066.4; EXPRESSED IN ADULT LIVER, SIGNAL = 7.7; EXPRESSED IN FETAL LIVER, SIGNAL = 7.5; EXPRESSED IN BRAIN, SIGNAL = 4.7; EXPRESSED IN BONE MARROW, SIGNAL =   5; EXPRESSED IN HBL100, SIGNAL = 4.8; EXPRESSED IN BT474, SIGNAL = 4.9; EXPRESSED IN LUNG, SIGNAL = 6.4; EXPRESSED IN PLACENTA, SIGNAL =   6; EXPRESSED IN HEART, SIGNAL = 4.9; EXPRESSED IN HELA, SIGNAL = 5.4; EST_HUMAN HIT: AA297812.1, EVALUE 1.00e-37; SWISSPROT HIT: Q99679, EVALUE 6.00e-73; NT HIT: U66580.1, EVALUE 0.00e+00
gtctgacttgcacaagaagtacacatagcccctgagaggcgctttagtcctctttggaatacactgttggagagactataaattacacagttgcagaaactgttactaatagcaagccaggtggtcaagaaggatgcgaagcggttgctgtggccagtggagctttccaacaagaagtagatgatatatggcaaccagaggatgtaaaatacactagtgattcgaaacaggaccatggcatagcgcttatcaggacaggcctgcacttccccagtctccccactctggctgctgaagcgggcttgcctttcgctgatatcctttgtgtgctgttggcagatgcggaagatgttgaaataggtgaagcagacaataagggctgctggggcata

SEQ ID NO: 20761 - DNA, 1218 bp, Homo sapiens
  MAP TO AC006115.1; EXPRESSED IN LUNG, SIGNAL =   2; EXPRESSED IN HELA, SIGNAL = 1.6; EXPRESSED IN PLACENTA, SIGNAL =  12; EXPRESSED IN HBL100, SIGNAL = 1.4; EXPRESSED IN HEART, SIGNAL = 1.9; EXPRESSED IN ADULT LIVER, SIGNAL = 1.4; EXPRESSED IN BT474, SIGNAL = 1.3; EXPRESSED IN BONE MARROW, SIGNAL = 1.3; EXPRESSED IN BRAIN, SIGNAL =   6; EXPRESSED IN FETAL LIVER, SIGNAL = 4.9; NT HIT: AF208980.1, EVALUE 0.00e+00; EST_HUMAN HIT: AU137741.1, EVALUE 0.00e+00; SWISSPROT HIT: P52742, EVALUE 2.00e-17
gtgtctggcgagggacaggcggtcattgaagagctgcccacagacgtcacatttgaagtacttctcatcagcttgattggcaccacctgtgctggtgctggcacgttcgatgtagcctgagcactccccaaaggcatttgcaggctcaaatatgatcatgctggcatgagttttcaggtgttcactgaatgctgtgctggaagtgaaggtttctgtgcattcatggcagtcatagtatggttcttctacctgaatctcttgatcttcaccttcttctgggtcttcaattcccacaccgtcaggctcgtcggcatctccctctggctcttcagcttttccctctggctcttcagctctttcttctgggtcttcaatacctgcaccatctggctcatcagcatccccatttggctgctcggcctctccatttggctgtccagcctctccaatgggctctgcagcctctccatctggcccttcagcctctccgtttggctcagcagcctccacttctggctcagcagcctccacttctggctcggcagcctccacttctggctcagcagcctctacgtttaagccctgaatcctcagaactacttgtggaacatggacattggcttcaacttcctgggctgctgctgctgcagctgctgctgcttcatcttcttcttcttcttccagatgaagctccttatgtttagtgaggactgtgctatgaataaaggacttaccacaatccttgcattcatagaatggtatagctcctttgaggggctcagtaagaaatgaggtgtgagtataggaggacccgtactcatagggctcattcttatgaacagttacgtgatctgcaagttctgctgggttgacgaaagattctccacagactgcacattcaaagagtctctcttcggtctgacttctctgaaactcagtgagggctaagcctggaatgatagcttcctcagccatctggctctgctccagtaaatcatcttccctatgaagtctcatatgctcattaagggcagagctatgaatgaagccttgtccacacaaaaggcatcgaatggccgacccagcaagagcaggattcctctctgcagcacgattcctccgtggcttcatgggcaagagggcaataaaaccatcatcacaccccttcatggaatacaactggtcttgttcatggattctctgatgctcgaaaaggaa

SEQ ID NO: 20762 - DNA, 225 bp, Homo sapiens
  MAP TO AC007073.2; EXPRESSED IN HELA, SIGNAL =  14; EXPRESSED IN ADULT LIVER, SIGNAL =  14; EXPRESSED IN LUNG, SIGNAL =  14; EXPRESSED IN BRAIN, SIGNAL =  11; EXPRESSED IN BONE MARROW, SIGNAL =  11; EXPRESSED IN PLACENTA, SIGNAL =  11; EXPRESSED IN HEART, SIGNAL =  10; EXPRESSED IN HBL100, SIGNAL =  10; EXPRESSED IN BT474, SIGNAL =  10; EXPRESSED IN FETAL LIVER, SIGNAL =  12; EST_HUMAN HIT: AU129891.1, EVALUE 9.00e-50; SWISSPROT HIT: P37484, EVALUE 3.70e+00; NT HIT: gi11437042, EVALUE 3.00e-52
gtaaggccattctcatcgatgatcaggtctttgtggtggtagcccagctcttcggtggctctcacatttacaaatacgacgagagttggaccaaatttgtcaaattccaagacatagaggtctctcgcatttccaagcccaatgacatcgagctgtttcagatcgacgacgagacgttctttgtcatcgcagacagctcaaaggctggtctgtccacagtttata

SEQ ID NO: 20763 - DNA, 514 bp, Homo sapiens
  MAP TO AL035702.7; EXPRESSED IN HBL100, SIGNAL = 0.8; EXPRESSED IN FETAL LIVER, SIGNAL = 0.66; EXPRESSED IN LUNG, SIGNAL = 0.85; EXPRESSED IN HELA, SIGNAL = 0.59; EXPRESSED IN BRAIN, SIGNAL = 1.1; EXPRESSED IN PLACENTA, SIGNAL = 1.3; EXPRESSED IN HEART, SIGNAL = 1.3; EST_HUMAN HIT: BF435513.1, EVALUE 1.00e-122; SWISSPROT HIT: P50904, EVALUE 3.00e-04; NT HIT: gi4758807, EVALUE 0.00e+00
aagccaactcctctttatttctcacactaattactggctcaaggacagaacacagcatggtgtagttgctggtgacaaattctgcaaattctttgtattgctccataggcagaatggtgatagtttggaaacgtgatttaatccgaatagaaggtcctcctgtctttcctttgttgggtgtaggtgtactcactggataccacttttctacaaattggcgaccagtcacactggcagtggggatgttgactagccctacataattattcttgtccttttttttctttttttccacatccttgtaaatgtgaactgtgatactatgaagaggtggaaggctgaagaattcaaaatgttcgccccagaaaatattgtctgctttggtcttgctggttgtacgagcaaagagggtatcatcaaggcacagttcgcagaaatatttctttttaggggcaaggtccttggcttcaatgatccataaacgaagaacattttcagctcgcctgcaattgtc

SEQ ID NO: 20764 - DNA, 366 bp, Homo sapiens
  MAP TO AC007272.2; EXPRESSED IN BT474, SIGNAL = 7.7; EXPRESSED IN ADULT LIVER, SIGNAL = 7.8; EXPRESSED IN BRAIN, SIGNAL = 5.9; EXPRESSED IN LUNG, SIGNAL =  10; EXPRESSED IN BONE MARROW, SIGNAL = 7.5; EXPRESSED IN PLACENTA, SIGNAL = 7.1; EXPRESSED IN HEART, SIGNAL = 6.1; EXPRESSED IN HELA, SIGNAL = 9.4; EXPRESSED IN HBL100, SIGNAL = 7.1; EXPRESSED IN FETAL LIVER, SIGNAL = 6.8; SWISSPROT HIT: P20839, EVALUE 5.00e-52; EST_HUMAN HIT: BE621247.1, EVALUE 1.00e-113; NT HIT: gi11419297, EVALUE 0.00e+00
ttctcagacggaatgcagctcaagaagtaccagggcatgggctcactggatgccatggagaagagcagcagcagccagaaacaatacttcaacgacggggataaggcgaagatcacgcaggatgtcttgggctccatccaggacaaagggtccattcagaagttcgtgccctacctcatagtgggcatccagcatggctgccaggatatcggggcccacagcctgtctgtccttcggtccatgatgtactcaggggagctcaagtttgagaagcagaccatgtcagcccagatcgacggtggcatccatggcctgcactcttacgagaagtggctgtactgaggacagcggtgcagggcgagatgg

SEQ ID NO: 20765 - DNA, 810 bp, Homo sapiens
  MAP TO AL021579.1; EXPRESSED IN PLACENTA, SIGNAL = 4.3; EXPRESSED IN HBL100, SIGNAL = 3.7; EXPRESSED IN HEART, SIGNAL = 1.6; EXPRESSED IN FETAL LIVER, SIGNAL = 2.9; EXPRESSED IN ADULT LIVER, SIGNAL = 2.1; EXPRESSED IN BT474, SIGNAL = 4.3; EXPRESSED IN BRAIN, SIGNAL = 1.9; EXPRESSED IN BONE MARROW, SIGNAL =   3; EXPRESSED IN LUNG, SIGNAL = 3.1; EXPRESSED IN HELA, SIGNAL = 5.9; NT HIT: AL096857.1, EVALUE 0.00e+00; EST_HUMAN HIT: AW027547.1, EVALUE 0.00e+00; SWISSPROT HIT: P48634, EVALUE 2.00e-06
gtctgaagctgcgttggaccaggaacagattactgctgcttattctgtagaacataatcaattagaggctcacccaaaggcagactttatcagagaatcaagtgaggcacaagtacaaaagtttttaagcagatctgtggaagatgttagacctcaccatactgatgcaaataatcagtctgcttgttttgaagcacctgatcaaaagaccttatccgctcctcaagaggagcggatttcagctgtagaaagtcagccttcccggaaaagaagtgtttcccatggatctaaccatacgcaaaaaccagacgagcagagaagtgaaccatctgcaggcattcctaaagtaaccagcagatgcattgattcaaaagaaccaatagaaaggccagaggagaaaccaaaaaaggaaggctttatacgatcttctgaaggaccaaaacctgaaaaagtatataaatctaaatcagaaactcgttggggcccacgaccaagctctaacagaagggaagaagttaatgatagacctgtgagaagatcaggtcccattaaaaaacctgtacttagagatatgaaagaggaacgggaacagaggaaggagaaagaaggagaaaaggccgaaaaggtcactgaaaaagtagttgtaaagcctgaaaagacggaaaagaaggatcttcctcctcccccaccaccacctcagccaccagcaccaattcagccacagtcagttccaccaccaattcaaccagaagcagagaaatttccttcaacagaaactgcaactttggctcaaaaaccatctcaggatac

SEQ ID NO: 20766 - DNA, 84 bp, Homo sapiens
  MAP TO AC008165.2; EXPRESSED IN ADULT LIVER, SIGNAL = 0.72; EXPRESSED IN PLACENTA, SIGNAL = 0.67; EXPRESSED IN HEART, SIGNAL = 0.97; NT HIT: Z12628.1, EVALUE 1.50e-01; EST_HUMAN HIT: BE966713.2, EVALUE 4.00e+00
ctttgcttccccaggcccgattcttctgggcttgctccccagccctgtcatcttcatcacccaactggcacttgggcagagcat

SEQ ID NO: 20767 - DNA, 116 bp, Homo sapiens
  MAP TO AC007735.2; EXPRESSED IN HELA, SIGNAL = 0.59; EXPRESSED IN PLACENTA, SIGNAL = 0.69; EXPRESSED IN HEART, SIGNAL = 0.81; NT HIT: U36801.1, EVALUE 2.50e-01; EST_HUMAN HIT: AA687758.1, EVALUE 2.60e-01
gactgagaggagttacgaagctctgaccatcctgactccactcaggaaaactgctcacttaagctccaaactcctcattgtcattggccagtgctgttgtcaggaccgaatcacag

SEQ ID NO: 20768 - DNA, 194 bp, Homo sapiens
  MAP TO AF001549.1; EXPRESSED IN HBL100, SIGNAL = 6.1; EXPRESSED IN PLACENTA, SIGNAL = 2.2; EXPRESSED IN HELA, SIGNAL = 2.9; EXPRESSED IN HEART, SIGNAL = 2.2; EXPRESSED IN BRAIN, SIGNAL = 2.1; EXPRESSED IN LUNG, SIGNAL = 7.3; EXPRESSED IN BT474, SIGNAL = 2.8; EXPRESSED IN ADULT LIVER, SIGNAL = 2.2; EXPRESSED IN FETAL LIVER, SIGNAL = 2.6; EXPRESSED IN BONE MARROW, SIGNAL = 3.1; EST_HUMAN HIT: AW961688.1, EVALUE 1.00e-105; SWISSPROT HIT: Q02817, EVALUE 8.80e-02; NT HIT: M22064.1, EVALUE 1.20e-01
acgatcctacacctgccacctccgatggatccactgcctctgtgcctgcctgtactgctgatgctccagtggataactcagcatcccagcctaggcccaatgccactgaagatggacctgccccctggggacccaggagtcctaccactcagctgtccccaggagtgcccagaccctcattcttatccaggacc

SEQ ID NO: 20769 - DNA, 217 bp, Homo sapiens
  MAP TO AC007220.1; EXPRESSED IN PLACENTA, SIGNAL = 4.5; EXPRESSED IN HELA, SIGNAL = 6.6; EXPRESSED IN HEART, SIGNAL = 2.2; EXPRESSED IN ADULT LIVER, SIGNAL = 1.8; EXPRESSED IN FETAL LIVER, SIGNAL = 4.5; EXPRESSED IN BRAIN, SIGNAL = 2.3; EXPRESSED IN BONE MARROW, SIGNAL =   3; EXPRESSED IN HBL100, SIGNAL =  16; EXPRESSED IN BT474, SIGNAL = 7.4; EXPRESSED IN LUNG, SIGNAL = 8.5; NT HIT: gi4758543, EVALUE 5.00e-53; SWISSPROT HIT: P07910, EVALUE 5.00e-20; EST_HUMAN HIT: BF303773.1, EVALUE 9.00e-53
ttatcctcatcatccagtaggtccctctcctcagcagagtcatctgcaccaccttcagactctatcttcacatgagtctcacgtgagctgctgctctgcttctcttctgacttaccattcttcatctctactgcttgtttgctctgtttcttttccattttttccgggtcttccaggagagaatccactttttgttttatctgggtcaactcctgct

SEQ ID NO: 20770 - DNA, 115 bp, Homo sapiens
  MAP TO AL034373.13; EXPRESSED IN PLACENTA, SIGNAL = 0.79; EXPRESSED IN HBL100, SIGNAL = 0.94; EXPRESSED IN ADULT LIVER, SIGNAL = 0.71; EXPRESSED IN BRAIN, SIGNAL = 0.96; EXPRESSED IN HEART, SIGNAL =   1; EXPRESSED IN HELA, SIGNAL = 0.8; EXPRESSED IN BT474, SIGNAL = 0.69; EXPRESSED IN FETAL LIVER, SIGNAL = 0.7; EXPRESSED IN LUNG, SIGNAL = 0.88; EST_HUMAN HIT: AA362987.1, EVALUE 3.70e-01; NT HIT: U35248.1, EVALUE 3.90e+00
tttactctgaagggagacaccaaagtatctgaacatggagctatctagttgaaaggaaagtttcaggataatgaatttttcaggaatatgcatgatggatgagcgtacggcattc

SEQ ID NO: 20771 - DNA, 212 bp, Homo sapiens
  MAP TO AC007222.1; EXPRESSED IN HELA, SIGNAL = 1.9; EXPRESSED IN ADULT LIVER, SIGNAL = 1.6; EXPRESSED IN BRAIN, SIGNAL = 2.2; EXPRESSED IN LUNG, SIGNAL = 1.7; EXPRESSED IN BONE MARROW, SIGNAL = 2.2; EXPRESSED IN PLACENTA, SIGNAL = 1.7; EXPRESSED IN HEART, SIGNAL = 2.1; EXPRESSED IN HBL100, SIGNAL =   2; EXPRESSED IN BT474, SIGNAL = 1.9; EXPRESSED IN FETAL LIVER, SIGNAL = 1.9; EST_HUMAN HIT: AW664496.1, EVALUE 2.00e+00; NT HIT: U19270.1, EVALUE 7.80e+00
ttctacttttgatgctggaggtgatggtggtgatggtggtggtgatagtggtggtgactgtggtggtgacggtagcgatgatggtgatgatgtgaaaatggtggtggtggtgattgtgaatggtgacggtggtagtagtggtgatgaaggtgatggtggtagtgctggtggtagtgacggtgctgatggtgatgtagtggtgataatggtgg

SEQ ID NO: 20772 - DNA, 583 bp, Homo sapiens
  MAP TO AL022334.1; EXPRESSED IN BT474, SIGNAL = 1.9; EXPRESSED IN BRAIN, SIGNAL = 2.1; EXPRESSED IN LUNG, SIGNAL = 1.7; EXPRESSED IN HBL100, SIGNAL = 2.3; EXPRESSED IN HELA, SIGNAL = 2.7; EXPRESSED IN PLACENTA, SIGNAL = 2.2; EXPRESSED IN ADULT LIVER, SIGNAL = 2.4; EXPRESSED IN FETAL LIVER, SIGNAL = 2.2; EXPRESSED IN BONE MARROW, SIGNAL = 2.7; EXPRESSED IN HEART, SIGNAL = 2.3; EST_HUMAN HIT: AW992395.1, EVALUE 9.50e-02
gggtggtgatgataatggtgataatgatgatgatggtgatgatgggaatgatggtgatgatggtgatgatgacagtgatgatgatgatggtgatgatggggatgatgatgacagtgatgatggtgatgatggtgatggtgatgatgatgatagtgatgatggggaagatgatgacagtgatggtggtgatgatgacgatagcgatgatggggatgatgacagtgatgattgtgatgatggtgatgatgatgatggtgatgatggggatgatgatcacagtgatgatggtgatggtgatgatgatgatggtgatgacggggatgatgatgagagtgatgatggtgatgatggtgatgatgatggtgatgatgacggtgatgattatggtgatgaaggcaatggtgatgatgaggatgatggtgatagtgatggtaatgatggtgatgatgacattagaaagagggatgcagtccaagccttaagaagacaacagggcatcataaaaaaagatcaaaggatagttgttcaaacacccagatatctttaagtccaggctctgcctctaactagtcaagtgactttg

SEQ ID NO: 20773 - DNA, 641 bp, Homo sapiens
  MAP TO AC006547.9; EXPRESSED IN PLACENTA, SIGNAL = 5.3; EXPRESSED IN HEART, SIGNAL = 2.7; EXPRESSED IN BT474, SIGNAL = 3.1; EXPRESSED IN LUNG, SIGNAL = 2.7; EXPRESSED IN BRAIN, SIGNAL = 2.7; EXPRESSED IN HELA, SIGNAL = 4.7; EXPRESSED IN HBL100, SIGNAL = 3.8; EXPRESSED IN ADULT LIVER, SIGNAL = 3.1; EXPRESSED IN FETAL LIVER, SIGNAL = 3.6; EXPRESSED IN BONE MARROW, SIGNAL = 3.3; EST_HUMAN HIT: AW964989.1, EVALUE 0.00e+00; SWISSPROT HIT: P53735, EVALUE 8.40e-01; NT HIT: AF165527.1, EVALUE 0.00e+00
gagaagcggtgatggagagccgagctcgccccttccaagcgctgccccgtgagcagtctccaccacctcccctgcaaacgtccagtggtgcagaggtaatggacgttggctctggtggtgatggacagtccgaactccctgctgaggaccccttcaacttctacggagcttctcttctctccaaaggatccttctctaagggccgcctcctcatagacccgaactgtagtggccacagcccgcgcaccgcccggcacgcacctgcggtccggaagttctcccctgaccttaagttgcttaaggatgtaaagattagcgtgagctttaccgagagctgcaggagtaaggacaggaaggtgctgtacacaggagcagagcgcgacgtgcgggcggagtgcggtctgctccttagccctgtcagtggggacgtgcatgcttgtccctttggcgggagtgttggtgacggggtaggcatagggggtgagagtgctgataagaaggatgaggagaatgagctggatcaggaaaagagagtggagtatgcagtgctcgatgagttagaagattttactgacaatttggagctagatgaagaaggagcaggcgggttcacggctaaagcaatcgttcagagagacaga

SEQ ID NO: 20774 - DNA, 122 bp, Homo sapiens
  MAP TO AL049838.2; EXPRESSED IN FETAL LIVER, SIGNAL = 0.89; EXPRESSED IN ADULT LIVER, SIGNAL = 0.75; EXPRESSED IN BRAIN, SIGNAL = 0.83; EXPRESSED IN HEART, SIGNAL = 0.94; EXPRESSED IN PLACENTA, SIGNAL = 0.75; EXPRESSED IN HELA, SIGNAL = 0.95; EXPRESSED IN LUNG, SIGNAL = 1.1; EXPRESSED IN HBL100, SIGNAL = 0.98; EXPRESSED IN BONE MARROW, SIGNAL = 1.7; EXPRESSED IN BT474, SIGNAL = 0.6; NT HIT: AL163249.2, EVALUE 1.00e-18; EST_HUMAN HIT: BE408611.1, EVALUE 6.00e-21
ctcctccaatgaagtcttgaacccctcaacgtcatccataagggttagaatcaacttcctccaaactcctgttaatgatagcttgtcctcttcccatgaatcatgaatgttctgaatggcat

SEQ ID NO: 20775 - DNA, 83 bp, Homo sapiens
  MAP TO AC007564.9; EXPRESSED IN BT474, SIGNAL = 0.64; EXPRESSED IN FETAL LIVER, SIGNAL = 0.61; EXPRESSED IN BRAIN, SIGNAL = 0.86; EXPRESSED IN HEART, SIGNAL = 0.97; EXPRESSED IN PLACENTA, SIGNAL = 0.66; EXPRESSED IN BONE MARROW, SIGNAL = 0.71; EXPRESSED IN HBL100, SIGNAL = 0.69; EXPRESSED IN LUNG, SIGNAL = 0.9; EXPRESSED IN HELA, SIGNAL = 0.85; EXPRESSED IN ADULT LIVER, SIGNAL = 0.71; EST_HUMAN HIT: AW813796.1, EVALUE 1.10e-02; NT HIT: U52111.2, EVALUE 1.40e-01
aaacacaaattaccaatatcaagattgaaagagaagccatcaatacaaatccaaaggatatttacaaaaataagggaatagga

SEQ ID NO: 20776 - DNA, 217 bp, Homo sapiens
  MAP TO AL008635.1; EXPRESSED IN ADULT LIVER, SIGNAL = 1.2; EXPRESSED IN BT474, SIGNAL = 1.1; EXPRESSED IN FETAL LIVER, SIGNAL =   1; EXPRESSED IN BONE MARROW, SIGNAL =   1; EXPRESSED IN BRAIN, SIGNAL = 1.1; EXPRESSED IN HEART, SIGNAL = 0.98; EXPRESSED IN PLACENTA, SIGNAL = 1.2; NT HIT: gi11418026, EVALUE 5.00e-41; SWISSPROT HIT: P38753, EVALUE 1.40e-01; EST_HUMAN HIT: N40068.1, EVALUE 8.00e-41
actttatgactcctggtttcttctcagagaaagccacagatggctccctgcagagcgaggactgggccctcaacatggagatctgcgacatcatcaacgagacggaggaagggtaagggccccccaaggagaggttgggggcagagacggccatcccaccacgcagcacactcctgcacccttccagggagcccctgccccagccccattgctgcca

SEQ ID NO: 20777 - DNA, 279 bp, Homo sapiens
  MAP TO AC007255.2; EXPRESSED IN HELA, SIGNAL = 1.9; EXPRESSED IN HEART, SIGNAL = 1.7; EXPRESSED IN ADULT LIVER, SIGNAL = 1.7; EXPRESSED IN FETAL LIVER, SIGNAL = 1.9; EXPRESSED IN BRAIN, SIGNAL = 1.3; EXPRESSED IN PLACENTA, SIGNAL = 2.1; EXPRESSED IN HBL100, SIGNAL =   2; EXPRESSED IN BT474, SIGNAL = 1.7; EXPRESSED IN LUNG, SIGNAL = 1.8; EXPRESSED IN BONE MARROW, SIGNAL = 1.6; EST_HUMAN HIT: AI902249.1, EVALUE 2.00e-11; NT HIT: AL163247.2, EVALUE 2.00e-13; SWISSPROT HIT: Q14690, EVALUE 3.40e+00
taccccataaatatatacacctactgtgtacccacaaaaattaataaagatgatgctaggaagaaagccaggttgcttcctacgatgacgaaattcatgtccatcaagctcatgaacacaggaaaggaagtaagggaacggtccatgggaatcttaaatatcagttctctttgcaaagcagggaaggatgaagactggatttccattgagatctccactgctacatgggcaaatgagaacagacttgcctgggaaattgagacagacaagtccaagttc

SEQ ID NO: 20778 - DNA, 320 bp, Homo sapiens
  MAP TO AC007739.1; EXPRESSED IN HEART, SIGNAL = 0.87; EXPRESSED IN PLACENTA, SIGNAL = 2.5; EXPRESSED IN HBL100, SIGNAL =   1; EXPRESSED IN LUNG, SIGNAL = 0.78; EXPRESSED IN HELA, SIGNAL = 1.2; EXPRESSED IN BT474, SIGNAL = 0.72; EXPRESSED IN BONE MARROW, SIGNAL = 0.86; EXPRESSED IN FETAL LIVER, SIGNAL = 0.67; EXPRESSED IN BRAIN, SIGNAL = 0.85; SWISSPROT HIT: P04265, EVALUE 1.60e+00; EST_HUMAN HIT: BF228455.1, EVALUE 4.60e+00; NT HIT: U91328.1, EVALUE 6.60e-01
aacagatcgctacatccctcttactgccactggcataaagcagttaactctgaatcaccaacctaggaaagaaaaaaaattttcctccaagaaaaatttgtcattaatacacctgtttagaaagtcagttaaacaagatgaagacagggcagatttctccacgctatattattttatcattcctgacctgccttaccagcagcttgatactgaattttttactcatggtcagagcagtaattcctccaattcccctgttaacacagatactcttgcagttcaggaaattaaatcatacactgaaggtgtttgttgtctca

SEQ ID NO: 20779 - DNA, 176 bp, Homo sapiens
  MAP TO AP000101.1; EXPRESSED IN BT474, SIGNAL = 0.85; EXPRESSED IN HBL100, SIGNAL =   1; EXPRESSED IN BRAIN, SIGNAL = 1.3; EXPRESSED IN HEART, SIGNAL = 1.3; EXPRESSED IN ADULT LIVER, SIGNAL =   1; EXPRESSED IN PLACENTA, SIGNAL = 1.2; EXPRESSED IN BONE MARROW, SIGNAL = 1.1; EXPRESSED IN FETAL LIVER, SIGNAL = 1.6; EXPRESSED IN LUNG, SIGNAL = 1.2; EXPRESSED IN HELA, SIGNAL =   1; NT HIT: gi7549762, EVALUE 1.40e+00; EST_HUMAN HIT: AW819412.1, EVALUE 1.10e-01; SWISSPROT HIT: P13729, EVALUE 2.90e+00
tctcatacgaccaacagatgtcccacttgcacttcatgctggagatgcacaaatgcgcgctcatccccgcccactacaggttgggctccctccgctgacaccttagttgctgtccctgtagcatcatgcactgagtcctctgggcacaaaacctcaactactcattgccactctct

SEQ ID NO: 20780 - DNA, 361 bp, Homo sapiens
  MAP TO AL021877.1; EXPRESSED IN PLACENTA, SIGNAL = 1.7; EXPRESSED IN HBL100, SIGNAL = 1.5; EXPRESSED IN BT474, SIGNAL = 1.6; EXPRESSED IN ADULT LIVER, SIGNAL = 1.4; EXPRESSED IN FETAL LIVER, SIGNAL = 1.5; EXPRESSED IN BONE MARROW, SIGNAL = 1.2; EXPRESSED IN LUNG, SIGNAL = 1.6; EXPRESSED IN BRAIN, SIGNAL = 2.6; EXPRESSED IN HELA, SIGNAL = 2.1; EXPRESSED IN HEART, SIGNAL = 5.2; EST_HUMAN HIT: BE545841.1, EVALUE 8.00e-67; NT HIT: U80040.1, EVALUE 9.00e-72; SWISSPROT HIT: Q99798, EVALUE 9.00e-34
cagcgcggcgtgctcccagcttgagcccttgccatagttctagtccccaatcaccacccaactgatgccatatttcttgtagcgggcagtgtcagggaaggggccaaactcgtgggtgacagcatcgtgcacagagttggccttgccattttcaatgttgatggcaccactgagcaagttgttggagatggtgtccaagtgcccacggaacttgagtcaggggccggcagctgagatgtggtcagtggtaccccatgcgggggtgctggtaggtgtcctgccctgggccaaactctgcttggggaagctcatctgcatccggagcctccagcttgaacttcttgccatccttgcctgtcag

SEQ ID NO: 20781 - DNA, 361 bp, Homo sapiens
  MAP TO AC007274.1; EXPRESSED IN PLACENTA, SIGNAL = 2.4; EXPRESSED IN HELA, SIGNAL = 2.3; EXPRESSED IN HBL100, SIGNAL = 2.3; EXPRESSED IN HEART, SIGNAL = 2.1; EXPRESSED IN ADULT LIVER, SIGNAL =   3; EXPRESSED IN BT474, SIGNAL = 1.7; EXPRESSED IN FETAL LIVER, SIGNAL = 2.5; EXPRESSED IN BONE MARROW, SIGNAL = 2.1; EXPRESSED IN LUNG, SIGNAL = 2.5; EXPRESSED IN BRAIN, SIGNAL =   2; SWISSPROT HIT: P03374, EVALUE 2.00e-03; NT HIT: gi11496262, EVALUE 5.70e-02; EST_HUMAN HIT: AA083029.1, EVALUE 5.80e-02
tttttggccagattatctacaaaagcagttgtttgtactgattcagtaatagatacaacagcaatgctaacagttgccataatgtctatggctgagcctgtaaagaccataagtgtaaatgtgaatcttttgtgtctgacctgggacagggcactttctaaggtggcaagggcagaagaatcttgccaattgcatgtcaaattggctggtagaagtgcctcagattgtctccttaataccacgacactggaagtttttaaactagacatatcatgaccagtgatacatgaggcaaaccaagcctgtccctgcacccgggtcacaaatgtggcatttccaggtgtaatggaaatgttagttc

SEQ ID NO: 20782 - DNA, 167 bp, Homo sapiens
  MAP TO AL031684.11; EXPRESSED IN HEART, SIGNAL =   1; EXPRESSED IN ADULT LIVER, SIGNAL = 1.2; EXPRESSED IN BRAIN, SIGNAL = 0.91; EXPRESSED IN BT474, SIGNAL = 2.2; EXPRESSED IN BONE MARROW, SIGNAL = 1.1; EXPRESSED IN HBL100, SIGNAL = 0.85; EXPRESSED IN FETAL LIVER, SIGNAL = 0.9; EXPRESSED IN HELA, SIGNAL = 1.2; EXPRESSED IN PLACENTA, SIGNAL = 1.3; EXPRESSED IN LUNG, SIGNAL =   1; EST_HUMAN HIT: AA757671.1, EVALUE 4.00e-10; SWISSPROT HIT: P76262, EVALUE 5.00e+00; NT HIT: X02722.1, EVALUE 2.00e-12
gggaagttcctctgaatgtgtagagcaccagaaacatgaggaagaggcacagggttctctcctgagtgtgaagctggctcttggcgctgctttcctgcaactgctatttgccattcgtgattgtggagagtcagagggagaggatgatgcagtctgagtggtttccg

SEQ ID NO: 20783 - DNA, 231 bp, Homo sapiens
  MAP TO AP000121.1; EXPRESSED IN HEART, SIGNAL = 1.1; EXPRESSED IN ADULT LIVER, SIGNAL = 0.94; EXPRESSED IN PLACENTA, SIGNAL = 0.59; EXPRESSED IN LUNG, SIGNAL = 0.74; EXPRESSED IN HELA, SIGNAL = 0.66; EXPRESSED IN FETAL LIVER, SIGNAL = 0.66; EXPRESSED IN BRAIN, SIGNAL = 0.7; SWISSPROT HIT: P15382, EVALUE 2.00e-39; EST_HUMAN HIT: AW847275.1, EVALUE 5.60e-01; NT HIT: AF135188.1, EVALUE 1.00e-127
agatggttttcaacgacatagcacgacctgtagctctccaggacccgggcctggacataggccttgtccttctcttgccaggcatcggactcgatgtagacgttgaatgggtcgttcgagtgctccagcttcttggagcggatgtagctcagcatgatgcccagggtgaagaagccgaagaatcccagtaccatgaggacgtagagggcctccagcttgccgtcactgctg

SEQ ID NO: 20784 - DNA, 207 bp, Homo sapiens
  MAP TO AL035090.10; EXPRESSED IN BONE MARROW, SIGNAL = 0.76; EXPRESSED IN BRAIN, SIGNAL = 0.85; EXPRESSED IN FETAL LIVER, SIGNAL = 0.78; EXPRESSED IN HELA, SIGNAL = 0.68; EXPRESSED IN ADULT LIVER, SIGNAL = 0.65; EXPRESSED IN HEART, SIGNAL = 0.87; EXPRESSED IN LUNG, SIGNAL = 0.69; EXPRESSED IN BT474, SIGNAL = 0.6; EXPRESSED IN PLACENTA, SIGNAL = 0.83; NT HIT: AF091216.1, EVALUE 7.60e+00; EST_HUMAN HIT: AI376831.1, EVALUE 1.30e-01; SWISSPROT HIT: P27931, EVALUE 6.30e+00
aggagatctgttccaaattctatctttattattttaatactcaaaacccttttgatgaatttctaccatgtgctgggtaccgtactcaggtccatgaaatacaaaagtcaaataatacagcttctgttctatacaccagagactaaggaagctttgccatgggaacacagaggaaaggtaataaaatcagaccaagtgatgcaggaa

SEQ ID NO: 20785 - DNA, 262 bp, Homo sapiens
  MAP TO AL021917.1; EXPRESSED IN BONE MARROW, SIGNAL = 1.3; EXPRESSED IN LUNG, SIGNAL = 1.5; EXPRESSED IN HELA, SIGNAL = 0.99; EXPRESSED IN HEART, SIGNAL = 0.99; EXPRESSED IN FETAL LIVER, SIGNAL = 2.1; EXPRESSED IN ADULT LIVER, SIGNAL = 1.3; EXPRESSED IN BRAIN, SIGNAL = 1.1; EST_HUMAN HIT: BE729924.1, EVALUE 0.00e+00; NT HIT: gi5901905, EVALUE 0.00e+00; SWISSPROT HIT: Q13410, EVALUE 6.00e-18
ctgcaaccttcagctccaccagggctttttcatagaagtcaccatcttggaaataacacaagtactttccactgtcagaggctgtgacgttgtgtattcggagagcagccttccctgcagtgatgccatcccgcagaatcgaagttctccctcgatacggtgcactctgcctgtcttccacttcctttccatctgcatacacgttcaccacctgccttaggctggaacttacccacttcagctccatggtctctgcactcat

SEQ ID NO: 20786 - DNA, 338 bp, Homo sapiens; identical to SEQ ID NO: 17603
  MAP TO AP000087.1; EXPRESSED IN BT474, SIGNAL = 1.3; EXPRESSED IN HELA, SIGNAL = 1.1; EXPRESSED IN ADULT LIVER, SIGNAL = 0.89; EXPRESSED IN PLACENTA, SIGNAL = 1.3; EXPRESSED IN BONE MARROW, SIGNAL = 1.1; EXPRESSED IN FETAL LIVER, SIGNAL = 1.2; EXPRESSED IN LUNG, SIGNAL =   1; EXPRESSED IN HBL100, SIGNAL =   1; EXPRESSED IN BRAIN, SIGNAL = 1.1; EXPRESSED IN HEART, SIGNAL = 1.2; EST_HUMAN HIT: AU140126.1, EVALUE 1.00e-110; SWISSPROT HIT: Q06546, EVALUE 5.00e-41; NT HIT: D13318.1, EVALUE 0.00e+00

SEQ ID NO: 20787 - DNA, 136 bp, Homo sapiens
  MAP TO AP000056.1; EXPRESSED IN PLACENTA, SIGNAL = 1.2; EXPRESSED IN BT474, SIGNAL = 1.1; EXPRESSED IN LUNG, SIGNAL = 1.6; EXPRESSED IN HELA, SIGNAL = 1.2; EXPRESSED IN ADULT LIVER, SIGNAL = 1.2; EXPRESSED IN BRAIN, SIGNAL = 1.4; EXPRESSED IN BONE MARROW, SIGNAL = 1.1; EXPRESSED IN HBL100, SIGNAL = 0.87; EXPRESSED IN FETAL LIVER, SIGNAL = 1.2; EXPRESSED IN HEART, SIGNAL = 1.4; EST_HUMAN HIT: AW816405.1, EVALUE 5.00e-71; SWISSPROT HIT: Q9Y696, EVALUE 1.00e-15; NT HIT: AB035520.1, EVALUE 1.00e-30
tgaatttccttctgaaatgactggcatctggagatacttgaataatgcttatgctagagatgagttcacaaatacgtgtccagctgatcaagagattgaacacgcatattcagatgttgcaaaaagaatgaaatga

SEQ ID NO: 20788 - DNA, 286 bp, Homo sapiens
  MAP TO AL021939.1; EXPRESSED IN HEART, SIGNAL = 1.3; EXPRESSED IN ADULT LIVER, SIGNAL = 1.7; EXPRESSED IN FETAL LIVER, SIGNAL = 1.7; EXPRESSED IN LUNG, SIGNAL = 1.4; EXPRESSED IN BRAIN, SIGNAL = 1.4; EXPRESSED IN HELA, SIGNAL = 1.5; EXPRESSED IN HBL100, SIGNAL = 1.5; EXPRESSED IN PLACENTA, SIGNAL = 1.4; EXPRESSED IN BT474, SIGNAL = 1.4; EXPRESSED IN BONE MARROW, SIGNAL = 1.5; NT HIT: AF172364.1, EVALUE 2.70e+00; SWISSPROT HIT: P14859, EVALUE 6.30e+00; EST_HUMAN HIT: R92949.1, EVALUE 4.10e+00
aggcttctgccaaacaaatcataggctgcttgctcttcggggaagaatcgtaattctgattgcagctggccattcatcaggtgctgggaatctgcctaatcttgtctgttggcctaggatatgccagctccacgcatctgatgatgactttcccatcccacacctcgtcgcagccctcctccacattcctcagtccagtcttacccttggagcgatcagaacattccaacctcatctcataatggcagttcattccagtgtgactcaacaatttccaacaaagcct

SEQ ID NO: 20789 - DNA, 313 bp, Homo sapiens
  MAP TO AC008179.1; EXPRESSED IN PLACENTA, SIGNAL = 0.91; EXPRESSED IN BT474, SIGNAL = 1.3; EXPRESSED IN BONE MARROW, SIGNAL = 0.8; EXPRESSED IN FETAL LIVER, SIGNAL = 1.4; EXPRESSED IN LUNG, SIGNAL = 0.91; EXPRESSED IN HELA, SIGNAL = 0.68; EXPRESSED IN ADULT LIVER, SIGNAL = 1.2; EXPRESSED IN HBL100, SIGNAL = 1.4; EXPRESSED IN HEART, SIGNAL =   1; NT HIT: gi8922391, EVALUE 0.00e+00; EST_HUMAN HIT: BE868803.1, EVALUE 0.00e+00; SWISSPROT HIT: P46837, EVALUE 1.00e-08
tcataacacccgaatgaggtccagagtaatcctagatcgggggatgtcaatgttgagtacttggacttccactctttctccggggcccagtccaaggcttcttctcttctttgtttttgaaagttttgcttctgttacatttcgtatgggaatcagcccagatttccccactcctatatccacaaaaattccaaagagagtggcattctcaactttgcctgtaagaactgtcccaatctgcagatcttccaggcatactatgcttctcttgaaatcaggtttatcaaaatctgtaagagaaaaaaagtaagtg

SEQ ID NO: 20790 - DNA, 101 bp, Homo sapiens
  MAP TO AC007625.2; EXPRESSED IN PLACENTA, SIGNAL = 0.92; EXPRESSED IN BT474, SIGNAL = 0.99; EXPRESSED IN HBL100, SIGNAL = 0.86; EXPRESSED IN LUNG, SIGNAL = 1.3; EXPRESSED IN HELA, SIGNAL = 1.3; EXPRESSED IN ADULT LIVER, SIGNAL = 1.2; EXPRESSED IN BONE MARROW, SIGNAL = 1.2; EXPRESSED IN FETAL LIVER, SIGNAL = 0.97; EXPRESSED IN HEART, SIGNAL = 1.2; EXPRESSED IN BRAIN, SIGNAL = 1.3; EST_HUMAN HIT: AI690078.1, EVALUE 8.70e-01; NT HIT: AF220365.2, EVALUE 5.50e-02
ttatcttgccaaggcagtcaaataagatcactagtaaagatgatggaatatcagctaatgtcatggtaaataccctcagaaccaagtgtgtgcttgctact

SEQ ID NO: 20791 - DNA, 267 bp, Homo sapiens
  MAP TO AC008174.1; EXPRESSED IN HEART, SIGNAL = 0.81; EXPRESSED IN ADULT LIVER, SIGNAL = 0.72; EXPRESSED IN BRAIN, SIGNAL = 0.71; EXPRESSED IN HELA, SIGNAL = 0.71; EST_HUMAN HIT: AA515512.1, EVALUE 5.00e-82; NT HIT: U20535.1, EVALUE 6.40e-01
tgacgtgtcaactacaaatgcacagggttctgcctgaaatgttttagttgttgcagatgtgtagcttctatatgtaaagtcttcactgcacgtgctacagaaacttgaactatctgaagagaggatggagtcatcagatactgggtatgtattattttgcaatcttttttcatactttgtgatggctgggtacaatatactggtcactgtagccacaacccaggtcattacattctgaattataatattcagttcttcagaagttac

SEQ ID NO: 20792 - DNA, 129 bp, Homo sapiens
  MAP TO AL078476.2; EXPRESSED IN PLACENTA, SIGNAL = 0.92; EXPRESSED IN BT474, SIGNAL = 0.88; EXPRESSED IN LUNG, SIGNAL =   1; EXPRESSED IN HELA, SIGNAL = 0.79; EXPRESSED IN BRAIN, SIGNAL = 0.7; EXPRESSED IN FETAL LIVER, SIGNAL = 0.74; EXPRESSED IN HEART, SIGNAL = 1.3; EXPRESSED IN BONE MARROW, SIGNAL = 0.79; EXPRESSED IN ADULT LIVER, SIGNAL = 1.3; EST_HUMAN HIT: BF370191.1, EVALUE 2.00e-37; NT HIT: AL163201.2, EVALUE 6.00e-67; SWISSPROT HIT: Q64751, EVALUE 2.70e-01
cccaggcaatacaacagctccgattccacttttcagctttgacctgcctcggccacctcgccccgacagtcctgcacctcgaggtctccgctttcttggaaatccagacccatggccctatgtaacaga

SEQ ID NO: 20793 - DNA, 171 bp, Homo sapiens
  MAP TO AL008710.1; EXPRESSED IN BT474, SIGNAL = 5.1; EXPRESSED IN FETAL LIVER, SIGNAL = 5.8; EXPRESSED IN LUNG, SIGNAL = 5.9; EXPRESSED IN BONE MARROW, SIGNAL = 5.5; EXPRESSED IN HEART, SIGNAL = 4.5; EXPRESSED IN PLACENTA, SIGNAL =  16; EXPRESSED IN ADULT LIVER, SIGNAL = 7.4; EXPRESSED IN BRAIN, SIGNAL = 5.1; EXPRESSED IN HELA, SIGNAL =   6; EXPRESSED IN HBL100, SIGNAL = 4.8; EST_HUMAN HIT: AA703338.1, EVALUE 1.00e-10; SWISSPROT HIT: P52191, EVALUE 8.50e+00; NT HIT: AF195953.1, EVALUE 1.00e-10
tgtctttctatcattcatgctttcaacccacaaacaactaccaataacaaagtgatacggtttggatctatgtccccaccaaatctcatgtcgaattataatctccaatgcctggtgggaggtgactggatcatggaggcagatttcccctttgatgctgttctagtgatg

SEQ ID NO: 20794 - DNA, 132 bp, Homo sapiens
  MAP TO AC006344.2; EXPRESSED IN BONE MARROW, SIGNAL = 0.97; EXPRESSED IN BRAIN, SIGNAL = 0.71; EXPRESSED IN PLACENTA, SIGNAL = 0.6; EXPRESSED IN BT474, SIGNAL = 0.66; EXPRESSED IN LUNG, SIGNAL = 0.78; EXPRESSED IN HELA, SIGNAL = 0.69; EXPRESSED IN FETAL LIVER, SIGNAL = 0.69; EXPRESSED IN HEART, SIGNAL = 0.78; EST_HUMAN HIT: AW897597.1, EVALUE 1.00e-68; NT HIT: gi4757867, EVALUE 9.00e-69; SWISSPROT HIT: P34908, EVALUE 1.00e-22
aacacacatcagtggaacttctgtactacaacgctggtgaaatttataaccacatgtttgacagcggaaaccctggaaaagcagctttcgacaaaagtcacaaaatgctaaggtgaaaaacgtttttcgtac

SEQ ID NO: 20795 - DNA, 167 bp, Homo sapiens
  MAP TO AP000326.1; EXPRESSED IN BONE MARROW, SIGNAL = 0.64; EXPRESSED IN ADULT LIVER, SIGNAL = 0.72; EXPRESSED IN PLACENTA, SIGNAL = 0.68; EXPRESSED IN BT474, SIGNAL = 0.6; EXPRESSED IN HBL100, SIGNAL = 0.67; EXPRESSED IN LUNG, SIGNAL = 0.81; EXPRESSED IN HELA, SIGNAL = 0.64; EXPRESSED IN BRAIN, SIGNAL = 0.81; EXPRESSED IN FETAL LIVER, SIGNAL = 0.77; EXPRESSED IN HEART, SIGNAL = 0.89; NT HIT: Z49657.1, EVALUE 2.50e-02; EST_HUMAN HIT: AV704678.1, EVALUE 5.70e-01
atggtggctgccgaggtggtgaataccgaggatcccaaaatgaaaaattacggagggaaacttagaaaagtagtactctctcacagccagagtggtgctggtgaccctccagtccaggctaaaacaggtaagcaaaatatttgccttgtttttaatatacatcaagc

SEQ ID NO: 20796 - DNA, 105 bp, Homo sapiens
  MAP TO AC008157.1; EXPRESSED IN ADULT LIVER, SIGNAL = 0.73; EXPRESSED IN LUNG, SIGNAL = 0.67; EXPRESSED IN HEART, SIGNAL = 0.78; NT HIT: AL163202.2, EVALUE 1.00e-09; EST_HUMAN HIT: AL118596.1, EVALUE 4.00e-15
  unsure 67
atttgtctttctctgactggcttatttcacttagcataattcccccaggttcatccatgttgtcacnatattgcaggatttctttctttgttagggtggctatta

SEQ ID NO: 20797 - DNA, 84 bp, Homo sapiens
  MAP TO AC007879.2; EXPRESSED IN PLACENTA, SIGNAL = 0.9; EXPRESSED IN BRAIN, SIGNAL =   1; EXPRESSED IN HEART, SIGNAL = 0.98; EXPRESSED IN BT474, SIGNAL = 0.9; EXPRESSED IN BONE MARROW, SIGNAL =   1; EXPRESSED IN ADULT LIVER, SIGNAL =   1; EXPRESSED IN HELA, SIGNAL = 0.89; EXPRESSED IN LUNG, SIGNAL =   1; EXPRESSED IN FETAL LIVER, SIGNAL = 0.89; EXPRESSED IN HBL100, SIGNAL = 0.99; EST_HUMAN HIT: AI925949.1, EVALUE 3.00e-40
ctgccagttcagctttaagaagttcattctccacattcagatgcaggcaaatgcgtttgacttgagcatattgatttcaggcag

SEQ ID NO: 20798 - DNA, 291 bp, Homo sapiens
  MAP TO AL021978.1; EXPRESSED IN PLACENTA, SIGNAL = 5.6; EXPRESSED IN BT474, SIGNAL = 4.5; EXPRESSED IN FETAL LIVER, SIGNAL =  18; EXPRESSED IN BONE MARROW, SIGNAL = 4.7; EXPRESSED IN HEART, SIGNAL = 4.6; EXPRESSED IN ADULT LIVER, SIGNAL = 5.7; EXPRESSED IN BRAIN, SIGNAL = 4.9; EXPRESSED IN LUNG, SIGNAL = 6.4; EXPRESSED IN HELA, SIGNAL = 6.1; EXPRESSED IN HBL100, SIGNAL = 6.1; EST_HUMAN HIT: AI982597.1, EVALUE 0.00e+00; NT HIT: gi7019562, EVALUE 1.50e-01; SWISSPROT HIT: P73071, EVALUE 3.80e+00
ggcctgaatccagtacctgtcagaatgagattaccctccaggttccaaatccctcagaattaagagccaagccaccttcttcttcctccacctgcaccgactcggccacccgggacatcagtgagggtggggagtcccccgttgttcagtccgatgaggaggaagttcaggtggacactgccctggccacatcacacactgacagagaggccactccggatggtggtgaggacagcgactcttaaattgggacatgggcgttgtctggccacactggaatccagttttggc

SEQ ID NO: 20799 - DNA, 257 bp, Homo sapiens
  MAP TO AL009172.1; EXPRESSED IN PLACENTA, SIGNAL = 1.8; EXPRESSED IN HBL100, SIGNAL = 2.2; EXPRESSED IN HELA, SIGNAL = 1.9; EXPRESSED IN BT474, SIGNAL = 1.9; EXPRESSED IN FETAL LIVER, SIGNAL = 1.9; EXPRESSED IN LUNG, SIGNAL = 2.2; EXPRESSED IN BONE MARROW, SIGNAL = 2.5; EXPRESSED IN HEART, SIGNAL = 2.3; EXPRESSED IN ADULT LIVER, SIGNAL = 2.1; EXPRESSED IN BRAIN, SIGNAL = 1.9; SWISSPROT HIT: P54371, EVALUE 8.10e-01; EST_HUMAN HIT: BE614635.1, EVALUE 3.00e-10; NT HIT: AB031069.1, EVALUE 1.00e-10
tgaggcgtgccgtggacctggagtgcatgcaggctgttaggtgccatgccgagggggctgagggatggggtaggatcctggactccctctcgcatattcaggtcccacagttgcacaagctggaacagctgtttgagcaggagcagaaggtgcgcacgtctatgatgaaccgggtggggctgctggctctgatgctgcacgggacgatccagcacgacccgttcaccagtgacctgtgctccagggtggacatttaa

SEQ ID NO: 20800 - DNA, 248 bp, Homo sapiens
  MAP TO AC007314.3; EXPRESSED IN BT474, SIGNAL = 1.3; EXPRESSED IN BONE MARROW, SIGNAL = 1.2; EXPRESSED IN HBL100, SIGNAL = 2.2; EXPRESSED IN LUNG, SIGNAL = 0.93; EXPRESSED IN HEART, SIGNAL = 0.88; EXPRESSED IN PLACENTA, SIGNAL =   1; EXPRESSED IN FETAL LIVER, SIGNAL = 1.1; EXPRESSED IN HELA, SIGNAL = 1.2; EXPRESSED IN ADULT LIVER, SIGNAL = 0.95; EXPRESSED IN BRAIN, SIGNAL = 0.82; EST_HUMAN HIT: BE184856.1, EVALUE 0.00e+00; SWISSPROT HIT: P22793, EVALUE 7.30e-01; NT HIT: AP000060.1, EVALUE 2.40e+00
atcagtttctgctttgtggcagaatctttgaagcttctaaattcttctcctgctttgatctcataaaactggggctttaggactgtctgctggtcctccttgagtcgttcctgccgcttcactttttcctcctgctggaggagtctgcgttgcttcctgacctcttcaacccaggctttttcatcatctgaactctccgaactttctgcatcacttggttttccttccggctcttcctcctcttcctg

SEQ ID NO: 20801 - DNA, 87 bp, Homo sapiens
  MAP TO AL022308.1; EXPRESSED IN FETAL LIVER, SIGNAL = 8.5; EXPRESSED IN ADULT LIVER, SIGNAL = 9.6; EXPRESSED IN BONE MARROW, SIGNAL = 8.5; EXPRESSED IN HELA, SIGNAL = 8.4; EXPRESSED IN HBL100, SIGNAL = 8.4; EXPRESSED IN BRAIN, SIGNAL = 7.4; EXPRESSED IN LUNG, SIGNAL = 8.7; EXPRESSED IN PLACENTA, SIGNAL = 9.4; EXPRESSED IN HEART, SIGNAL = 7.2; EXPRESSED IN BT474, SIGNAL = 7.7; NT HIT: U91328.1, EVALUE 1.00e-11; SWISSPROT HIT: P80152, EVALUE 7.10e+00; EST_HUMAN HIT: R09942.1, EVALUE 1.00e-17
agtgtggaggctgtgaaggcccagagctctgggagcccacgctatttattggtgctcaaacaaacaaacaaacaggtggtgaggatg

SEQ ID NO: 20802 - DNA, 258 bp, Homo sapiens
  MAP TO AC007784.7; EXPRESSED IN BRAIN, SIGNAL = 1.3; EXPRESSED IN HEART, SIGNAL = 1.2; EXPRESSED IN PLACENTA, SIGNAL = 0.82; EXPRESSED IN HBL100, SIGNAL = 0.82; EXPRESSED IN FETAL LIVER, SIGNAL = 0.95; EXPRESSED IN HELA, SIGNAL =   1; EXPRESSED IN ADULT LIVER, SIGNAL = 1.1; EXPRESSED IN BT474, SIGNAL =   1; EXPRESSED IN BONE MARROW, SIGNAL = 1.1; EXPRESSED IN LUNG, SIGNAL = 1.1; EST_HUMAN HIT: BE067342.1, EVALUE 1.60e-01; SWISSPROT HIT: P41245, EVALUE 1.80e+00; NT HIT: AJ248286.1, EVALUE 2.50e+00
ggtgtcagactggcaactgcaaaattgaatcctctatttagccttagaatggtgaattataggtatcttacaaatgctgcctgcaccatcaccattatgatcaccatcgtcaacaccaaagccacaaaaagcccaagaggtgctcagacccagaagaagctactgaagaagccaatcaaattcaaaaattatttacctactatgtaaaaggcactcttctaagttgtcttaaatataaacataagacaagccttgccc

SEQ ID NO: 20803 - DNA, 123 bp, Homo sapiens
  MAP TO AC005674.9; EXPRESSED IN HBL100, SIGNAL = 0.96; EXPRESSED IN BRAIN, SIGNAL = 1.3; EXPRESSED IN PLACENTA, SIGNAL = 1.1; EXPRESSED IN BT474, SIGNAL = 0.82; EXPRESSED IN BONE MARROW, SIGNAL = 1.2; EXPRESSED IN FETAL LIVER, SIGNAL = 1.1; EXPRESSED IN LUNG, SIGNAL = 1.2; EXPRESSED IN HELA, SIGNAL =   1; EXPRESSED IN ADULT LIVER, SIGNAL = 1.1; EXPRESSED IN HEART, SIGNAL = 1.1; NT HIT: AF261719.1, EVALUE 4.30e+00; EST_HUMAN HIT: AW792962.1, EVALUE 7.00e-02; SWISSPROT HIT: Q02203, EVALUE 4.00e+00
cgggggatgtgtgtgagatgaatgagaggagggcttgcctcaaaaccttggataagtatcccgagaagctggaggagaaccagggagagtgtgtcatggaaggtaaggggtgggggggtggtg

SEQ ID NO: 20804 - DNA, 435 bp, Homo sapiens
  MAP TO AL024509.1; EXPRESSED IN PLACENTA, SIGNAL = 5.9; EXPRESSED IN HBL100, SIGNAL =  11; EXPRESSED IN HELA, SIGNAL = 5.8; EXPRESSED IN BT474, SIGNAL =   4; EXPRESSED IN LUNG, SIGNAL = 5.6; EXPRESSED IN HEART, SIGNAL =   2; EXPRESSED IN ADULT LIVER, SIGNAL = 2.9; EXPRESSED IN FETAL LIVER, SIGNAL =   4; EXPRESSED IN BRAIN, SIGNAL = 2.3; EXPRESSED IN BONE MARROW, SIGNAL =   4; NT HIT: gi5031692, EVALUE 1.00e-122; EST_HUMAN HIT: BE274217.1, EVALUE 0.00e+00; SWISSPROT HIT: P51991, EVALUE 5.00e-10
aacctgctgctttcctggtaactcctcactttaactcctgctaggaactgaagcccttttttgctgctttttagaaccttctgttattatatccaccacttttaccaccagatccataatcaccaccatagggactgcccgagcttcttccacccagaaagcctcctttcatgggtccataatttgattgctgttgtccactataatttccaaaatcactatacttcccaccaccatcatagttaccactgtcaaaatttcctccttcattgcaaccatcacatcctccaccattgccaccatatccaccaccttggttttcatgtcctggtccaccaccaccatagccccttattttactataaccaagaccaccaccatagttgccaccatcacttccaaatccattatattcaccatcacctcctctgcaac

SEQ ID NO: 20805 - DNA, 109 bp, Homo sapiens
  MAP TO Z85987.13; EXPRESSED IN FETAL LIVER, SIGNAL = 0.86; EXPRESSED IN HELA, SIGNAL = 0.6; EXPRESSED IN ADULT LIVER, SIGNAL = 0.83; EXPRESSED IN LUNG, SIGNAL = 0.91; EXPRESSED IN HEART, SIGNAL = 1.2; NT HIT: gi11426350, EVALUE 9.30e-01; EST_HUMAN HIT: AA160944.1, EVALUE 2.20e-02
agcagcttcttgcttcttcaaggccatcagtttgagttctttgcatgctagcaagatggagccatagctatatctagagagagacagagagagaggtaggggcagggca

SEQ ID NO: 20806 - DNA, 152 bp, Homo sapiens
  MAP TO AL022344.1; EXPRESSED IN BONE MARROW, SIGNAL = 4.7; EXPRESSED IN BRAIN, SIGNAL =   5; EXPRESSED IN HELA, SIGNAL = 5.9; EXPRESSED IN HEART, SIGNAL = 3.5; EXPRESSED IN PLACENTA, SIGNAL = 8.7; EXPRESSED IN HBL100, SIGNAL = 4.8; EXPRESSED IN BT474, SIGNAL = 5.4; EXPRESSED IN FETAL LIVER, SIGNAL = 4.3; EXPRESSED IN ADULT LIVER, SIGNAL = 8.2; EXPRESSED IN LUNG, SIGNAL =   7; SWISSPROT HIT: P49646, EVALUE 5.00e-04; EST_HUMAN HIT: BE083875.1, EVALUE 4.00e-16; NT HIT: AJ131016.1, EVALUE 2.00e-12
gtgtgcacctgctcattgcagtcatcatcatcatcatcatcatcatcatcattatttttgtttgtttgggtttttttgagatgaatcttgctttatggcccaggctggactgcagtggcatgatcaaagctcactgcagcctcagactcctg

SEQ ID NO: 20807 - DNA, 404 bp, Homo sapiens; identical to SEQ ID NO: 4051
  MAP TO AL030998.1; EXPRESSED IN BONE MARROW, SIGNAL = 5.4; EXPRESSED IN LUNG, SIGNAL = 5.8; EXPRESSED IN BRAIN, SIGNAL = 4.9; EXPRESSED IN HELA, SIGNAL = 6.2; EXPRESSED IN HEART, SIGNAL = 4.6; EXPRESSED IN PLACENTA, SIGNAL = 5.5; EXPRESSED IN HBL100, SIGNAL = 5.8; EXPRESSED IN ADULT LIVER, SIGNAL = 7.7; EXPRESSED IN BT474, SIGNAL = 6.9; EXPRESSED IN FETAL LIVER, SIGNAL = 6.3; NT HIT: U01029.1, EVALUE 2.00e-04; SWISSPROT HIT: P16725, EVALUE 5.10e+00

SEQ ID NO: 20808 - DNA, 212 bp, Homo sapiens
  MAP TO AL022324.1; EXPRESSED IN HELA, SIGNAL = 2.5; EXPRESSED IN PLACENTA, SIGNAL = 2.1; EXPRESSED IN HBL100, SIGNAL = 2.2; EXPRESSED IN HEART, SIGNAL = 1.9; EXPRESSED IN BT474, SIGNAL = 1.7; EXPRESSED IN ADULT LIVER, SIGNAL = 2.2; EXPRESSED IN FETAL LIVER, SIGNAL = 2.3; EXPRESSED IN LUNG, SIGNAL = 2.4; EXPRESSED IN BONE MARROW, SIGNAL = 2.3; EXPRESSED IN BRAIN, SIGNAL = 2.2; EST_HUMAN HIT: W58599.1, EVALUE 3.30e-02; SWISSPROT HIT: P22273, EVALUE 2.90e-01; NT HIT: M73432.1, EVALUE 5.00e-41
ccacagccattgctgttatctcctgggttcttgcctgggcctgtgggtgacacactgtgtgatcctgggcaagtgcctttccctccctgggcccagcctttgctctggtcaaggaaaagctgggtcagggaccctgaggaccagccattcaggaaaccagtagcttcctgggtgaaggagttggccagggaggcctggaggggcagcgtggt

SEQ ID NO: 20809 - DNA, 167 bp, Homo sapiens
  MAP TO AC007597.2; EXPRESSED IN HEART, SIGNAL = 1.4; EXPRESSED IN FETAL LIVER, SIGNAL = 1.2; EXPRESSED IN BRAIN, SIGNAL = 1.3; EXPRESSED IN BT474, SIGNAL = 1.5; EXPRESSED IN BONE MARROW, SIGNAL = 1.4; EXPRESSED IN HBL100, SIGNAL = 1.2; EXPRESSED IN HELA, SIGNAL = 1.3; EXPRESSED IN ADULT LIVER, SIGNAL = 1.1; EXPRESSED IN PLACENTA, SIGNAL = 1.2; EXPRESSED IN LUNG, SIGNAL = 1.4; NT HIT: AF089897.1, EVALUE 2.00e-89; SWISSPROT HIT: Q9UTN3, EVALUE 5.00e-05; EST_HUMAN HIT: AU120707.1, EVALUE 3.00e-89
tctcttaatagaattttttgaattatatggacgacacttcaattatttaaagactggcatccggataaaggatggtggttcatatgtggccaaagatgaagtacagaaaaatatgctagatggctacaggccatcaatgctttatatcgaagatcctttacaaccag

SEQ ID NO: 20810 - DNA, 201 bp, Homo sapiens
  MAP TO AL034408.2; EXPRESSED IN HELA, SIGNAL = 4.3; EXPRESSED IN HEART, SIGNAL = 3.7; EXPRESSED IN FETAL LIVER, SIGNAL = 4.4; EXPRESSED IN BT474, SIGNAL = 3.7; EXPRESSED IN BONE MARROW, SIGNAL =   5; EXPRESSED IN PLACENTA, SIGNAL = 4.3; EXPRESSED IN HBL100, SIGNAL = 4.4; EXPRESSED IN ADULT LIVER, SIGNAL = 4.4; EXPRESSED IN BRAIN, SIGNAL = 3.9; EXPRESSED IN LUNG, SIGNAL = 3.8; EST_HUMAN HIT: AI655417.1, EVALUE 1.00e-109; NT HIT: gi11420187, EVALUE 1.00e-109; SWISSPROT HIT: Q9Y217, EVALUE 2.00e-27
cttagatcttcccgatccttctggcagttaccaaggaagtttccaaactggcaggagaaaacatggtcatgaatctccagcaggaagttttcattaaactcaaaggcacagggaaactgttccattaattgccagatacagtctaggaactgggtgaagataggggacacttctttagagtccccatcgaggtggccacac

SEQ ID NO: 20811 - DNA, 408 bp, Homo sapiens
  MAP TO AL031678.2; EXPRESSED IN BONE MARROW, SIGNAL =   1; EXPRESSED IN HBL100, SIGNAL =   1; EXPRESSED IN HEART, SIGNAL = 0.97; EXPRESSED IN BT474, SIGNAL = 0.92; EST_HUMAN HIT: AW265587.1, EVALUE 0.00e+00; NT HIT: gi11421195, EVALUE 0.00e+00; SWISSPROT HIT: Q08188, EVALUE 1.00e-44
cttctgggtacttgtacttgtccgtgacgtccatgcgagcattgctgcccaccgccttggtgctgatgtacctgccaatggtgtgactgttcacggaattcttccactgtttgccagtggtgttgtcgtacagccaggtgatgcggtcggcattaacctccgcgaagataaagggcatgtcgaagttcagctgcacatcaccctctcgaacaccaatgaccgaagcggggccgcactggaacacccctggaggccaagatgcagaggctggatatatgccaaggccacaacctacccagtgcccgattccccagggccttccaggaccactgcaaccccctgcctctgccccgcccaaattccttcacccctgactgtgtgtcccactcatttggcattctgcagaga

SEQ ID NO: 20812 - DNA, 330 bp, Homo sapiens
  MAP TO AL034418.2; EXPRESSED IN BT474, SIGNAL = 3.1; EXPRESSED IN BONE MARROW, SIGNAL = 2.6; EXPRESSED IN LUNG, SIGNAL = 2.4; EXPRESSED IN BRAIN, SIGNAL = 2.2; EXPRESSED IN HELA, SIGNAL = 2.1; EXPRESSED IN HEART, SIGNAL =   2; EXPRESSED IN FETAL LIVER, SIGNAL = 2.5; EXPRESSED IN ADULT LIVER, SIGNAL = 2.5; EXPRESSED IN PLACENTA, SIGNAL = 2.1; EXPRESSED IN HBL100, SIGNAL = 2.3; SWISSPROT HIT: Q58434, EVALUE 4.20e-01; NT HIT: gi5729725, EVALUE 0.00e+00; EST_HUMAN HIT: AW503706.1, EVALUE 0.00e+00
tagagagtgcatcactaggatcatccctgtccagcaggtatctaagaagtgcattattctccttcttcttaggacttagctgctcctgcttgacaacatttccgtccccacaagaagttatactgctggtgtctttcccagtggcttctgcagtaatcttggctacctcagctggtgaattcccattctgcagcaacttgtgcaaaatccggtgcttctcttgtaacagtgacccatgcatattggatgtagaggatactcctccagatgtagaggaggagactccagaggggctggtgacactaacagaagattctttacaacttgaat

SEQ ID NO: 20813 - DNA, 179 bp, Homo sapiens
  MAP TO AC007590.1; EXPRESSED IN PLACENTA, SIGNAL = 1.2; EXPRESSED IN HBL100, SIGNAL = 0.76; EXPRESSED IN FETAL LIVER, SIGNAL = 0.75; EXPRESSED IN HELA, SIGNAL = 0.87; EXPRESSED IN BT474, SIGNAL = 0.69; EXPRESSED IN BONE MARROW, SIGNAL = 0.8; EXPRESSED IN LUNG, SIGNAL = 0.82; EXPRESSED IN ADULT LIVER, SIGNAL = 0.91; EXPRESSED IN BRAIN, SIGNAL = 1.1; EXPRESSED IN HEART, SIGNAL = 1.2; SWISSPROT HIT: P48168, EVALUE 8.50e+00; EST_HUMAN HIT: AW961966.1, EVALUE 6.20e-01
tcatttatgttctttagggtctgcaactcccaatggaatgttggagaccatagcacattccatcatcccagtaccttcgatggttcctttccatttggccatagcattttctccttttccttttcctcttgcatttttcgcttctgccctcttctgcaatcccagcttcctcttcccag

SEQ ID NO: 20814 - DNA, 362 bp, Homo sapiens
  MAP TO AL035662.23; EXPRESSED IN HBL100, SIGNAL =   1; EXPRESSED IN HELA, SIGNAL =   1; EXPRESSED IN HEART, SIGNAL = 1.3; EXPRESSED IN BT474, SIGNAL = 1.2; EXPRESSED IN BONE MARROW, SIGNAL = 1.1; EXPRESSED IN BRAIN, SIGNAL =   1; NT HIT: Z32521.1, EVALUE 3.00e-03; EST_HUMAN HIT: BE876252.1, EVALUE 1.30e+00
caaaccacaggatttctgcaaggatacttaaaataatgaatgtagatgctccacgtgcatgctgtgtgctctgtggtgagggggtggggatggcagtggtgatgacagtgttgttgggggccagggatgtgatggtaatattggtgattatgatgggggtaatagtagtaataggtgggctggtgattgtggttgtggtgactatggaagagatggtggtggtattggtgatggtgatattggtgatggtgatggggttggtggtggtggtgagggtagtgatggtgatggctttagtattatttatggtagagatgatgggggtaccgagctcgaatgtggttctggtggtggtggtgcta

SEQ ID NO: 20815 - DNA, 214 bp, Homo sapiens
  MAP TO AL031769.1; EXPRESSED IN BT474, SIGNAL = 1.2; EXPRESSED IN ADULT LIVER, SIGNAL = 1.6; EXPRESSED IN FETAL LIVER, SIGNAL = 1.2; EXPRESSED IN BONE MARROW, SIGNAL = 1.3; EXPRESSED IN BRAIN, SIGNAL = 1.3; EXPRESSED IN HBL100, SIGNAL = 1.2; EXPRESSED IN HELA, SIGNAL = 1.3; EXPRESSED IN HEART, SIGNAL = 1.1; NT HIT: J00306.1, EVALUE 4.30e-01; SWISSPROT HIT: O33780, EVALUE 1.90e+00
agaaaagatttcaaatgatacaggtcctacagaaacggtcctgattagctttcctaggatataggaaaccatgctgaccatgcttggcagatgtccccacttctctttctctgctacgacatacatcaatctcttcctttctttaatcaccttccacctaggtttaaaggtcccagaacctatagagatcaagagaacatgatgatgctgcctg

SEQ ID NO: 20816 - DNA, 158 bp, Homo sapiens
  MAP TO AL035704.9; EXPRESSED IN PLACENTA, SIGNAL = 3.2; EXPRESSED IN HBL100, SIGNAL =   3; EXPRESSED IN BT474, SIGNAL = 3.2; EXPRESSED IN BONE MARROW, SIGNAL = 3.7; EXPRESSED IN LUNG, SIGNAL = 4.2; EXPRESSED IN HELA, SIGNAL =   4; EXPRESSED IN HEART, SIGNAL = 3.5; EXPRESSED IN ADULT LIVER, SIGNAL = 3.6; EXPRESSED IN FETAL LIVER, SIGNAL = 4.1; EXPRESSED IN BRAIN, SIGNAL = 3.5; NT HIT: U54797.1, EVALUE 3.10e-01; EST_HUMAN HIT: BE391943.1, EVALUE 9.30e-02; SWISSPROT HIT: P20333, EVALUE 6.60e+00
ctgtacatggtgtactcattgggggccccagaagccgggtctgagccattcttcttcccaaagttccctgtccagagcacagtatcattgtggatgacaactgcagacatggcagccacgcctggggcagacattgcctggcgcaggatctggtccac

SEQ ID NO: 20817 - DNA, 171 bp, Homo sapiens
  MAP TO AL049539.19; EXPRESSED IN PLACENTA, SIGNAL = 5.1; EXPRESSED IN HEART, SIGNAL = 6.2; EXPRESSED IN FETAL LIVER, SIGNAL = 5.2; EXPRESSED IN BT474, SIGNAL = 5.1; EXPRESSED IN BRAIN, SIGNAL = 5.2; EXPRESSED IN BONE MARROW, SIGNAL =   5; EXPRESSED IN LUNG, SIGNAL =   5; EXPRESSED IN HELA, SIGNAL = 5.6; EXPRESSED IN HBL100, SIGNAL = 4.8; EXPRESSED IN ADULT LIVER, SIGNAL = 5.1; NT HIT: X58742.1, EVALUE 2.00e-89; SWISSPROT HIT: P50545, EVALUE 4.00e-21; EST_HUMAN HIT: BF224172.1, EVALUE 5.00e-69
gggccaagttccccatcaagtggacagctcctgaagccatcaactttggctccttcaccatcaagtcagacgtctggtcctttggtatcctgctgatggagatcgtcacctacggccggatcccttacccaggtagggaaggggcatcagctcagggctgctaccagggcc

SEQ ID NO: 20818 - DNA, 115 bp, Homo sapiens
  MAP TO AL022241.2; EXPRESSED IN BRAIN, SIGNAL =  17; EXPRESSED IN BONE MARROW, SIGNAL =  18; EXPRESSED IN HBL100, SIGNAL =  18; EXPRESSED IN HEART, SIGNAL =  13; EXPRESSED IN PLACENTA, SIGNAL =  17; EXPRESSED IN FETAL LIVER, SIGNAL =  20; EXPRESSED IN LUNG, SIGNAL =  19; EXPRESSED IN HELA, SIGNAL =  18; EXPRESSED IN ADULT LIVER, SIGNAL =  17; EXPRESSED IN BT474, SIGNAL =  16; NT HIT: J00041.1, EVALUE 8.50e-01; EST_HUMAN HIT: BE080598.1, EVALUE 2.60e-01
tggaaaaggcctggagacttgggagtaaatgctcaaggataacgacatagcattctcccgcaggtcagcagggggtgtcacatcaccagcctttgtgttgtcgtccaataagctc

SEQ ID NO: 20819 - DNA, 234 bp, Homo sapiens
  MAP TO AL035460.13; EXPRESSED IN LUNG, SIGNAL = 0.99; EXPRESSED IN HELA, SIGNAL = 0.96; EXPRESSED IN PLACENTA, SIGNAL = 0.93; EXPRESSED IN HEART, SIGNAL = 1.4; EXPRESSED IN BT474, SIGNAL =   1; EXPRESSED IN FETAL LIVER, SIGNAL =   1; EXPRESSED IN BONE MARROW, SIGNAL = 0.99; SWISSPROT HIT: O08791, EVALUE 5.00e-11; EST_HUMAN HIT: BF673297.1, EVALUE 3.00e-19; NT HIT: AB037863.1, EVALUE 1.00e-38
ctggaagcccctctccgtgggctctggggcaggcctggggtggggagcttggggggcgcagcacgggggcgaaggcgctcctctgtttgacggcggagatcatgttgacaggcgagaaggagaacacgctggtggtgggggcagcggccgggagggacatggaggaggcagccgccagcggggggctagagggcatgactccggggcggggcggggaggggcaggcgcagcagg

SEQ ID NO: 20820 - DNA, 349 bp, Homo sapiens; identical to SEQ ID NO: 4064
  MAP TO AL022313.1; EXPRESSED IN PLACENTA, SIGNAL = 5.8; EXPRESSED IN ADULT LIVER, SIGNAL = 5.2; EXPRESSED IN LUNG, SIGNAL = 5.6; EXPRESSED IN BRAIN, SIGNAL = 5.5; EXPRESSED IN BONE MARROW, SIGNAL = 5.1; EXPRESSED IN HBL100, SIGNAL = 6.8; EXPRESSED IN HELA, SIGNAL = 6.1; EXPRESSED IN HEART, SIGNAL = 6.2; EXPRESSED IN BT474, SIGNAL = 5.4; EXPRESSED IN FETAL LIVER, SIGNAL = 5.9; NT HIT: gi11418045, EVALUE 1.00e-119; SWISSPROT HIT: O75144, EVALUE 3.50e-01; EST_HUMAN HIT: BF348443.1, EVALUE 0.00e+00

SEQ ID NO: 20821 - DNA, 211 bp, Homo sapiens
  MAP TO AL035530.11; EXPRESSED IN FETAL LIVER, SIGNAL = 1.4; EXPRESSED IN BT474, SIGNAL = 1.4; EXPRESSED IN ADULT LIVER, SIGNAL = 1.2; EXPRESSED IN BONE MARROW, SIGNAL = 1.1; EXPRESSED IN LUNG, SIGNAL = 1.3; EXPRESSED IN BRAIN, SIGNAL = 1.1; EXPRESSED IN HBL100, SIGNAL = 1.2; EXPRESSED IN PLACENTA, SIGNAL = 1.6; EXPRESSED IN HELA, SIGNAL = 1.4; EXPRESSED IN HEART, SIGNAL = 1.3; NT HIT: gi7661605, EVALUE 4.20e-01; SWISSPROT HIT: Q07960, EVALUE 1.40e-01; EST_HUMAN HIT: AW664438.1, EVALUE 1.00e-108
ggttgcagataagctcccccggcccaacctcctgctactcaagcacttggtctatgtgctgcacctcatcagcaagaactctgaggtgaacaggatggactccagcaatctggccatctgcattggacccaacatgctcaccctggagaatgaccagagcctgtcatttgaagcccagaaggacctgaacaacaaggtttgttctgcttac

SEQ ID NO: 20822 - DNA, 213 bp, Homo sapiens
  MAP TO AL022316.2; EXPRESSED IN BONE MARROW, SIGNAL = 4.1; EXPRESSED IN HBL100, SIGNAL = 4.2; EXPRESSED IN PLACENTA, SIGNAL = 3.7; EXPRESSED IN LUNG, SIGNAL = 4.1; EXPRESSED IN HEART, SIGNAL = 3.4; EXPRESSED IN HELA, SIGNAL = 3.9; EXPRESSED IN ADULT LIVER, SIGNAL = 4.1; EXPRESSED IN BT474, SIGNAL =   3; EXPRESSED IN FETAL LIVER, SIGNAL =   4; EXPRESSED IN BRAIN, SIGNAL = 4.2; SWISSPROT HIT: P73408, EVALUE 9.00e-01; EST_HUMAN HIT: AW364341.1, EVALUE 1.30e-01
tgtcccatttgcccccccacttcaccagtgatgggagggtcagatggagcaagaagccaggcttggtgccccagcgcctgtgtacctgggagagggggctctgcttggcggtgggtgagctgccatcctcattctcgatgcaggcatagacctcggtctcgcggcgctgcagagcctacaggaaacggggtgccaggatcaggggcaagtgtg

SEQ ID NO: 20823 - DNA, 100 bp, Homo sapiens
  MAP TO AL078623.24; EXPRESSED IN PLACENTA, SIGNAL = 1.9; EXPRESSED IN ADULT LIVER, SIGNAL =   2; EXPRESSED IN HBL100, SIGNAL = 1.8; EXPRESSED IN HELA, SIGNAL = 2.2; EXPRESSED IN HEART, SIGNAL =   2; EXPRESSED IN FETAL LIVER, SIGNAL =   2; EXPRESSED IN BT474, SIGNAL = 1.9; EXPRESSED IN BRAIN, SIGNAL = 2.3; EXPRESSED IN LUNG, SIGNAL = 2.2; EXPRESSED IN BONE MARROW, SIGNAL = 1.7; NT HIT: AF306558.1, EVALUE 3.30e+00; EST_HUMAN HIT: AI208196.1, EVALUE 1.00e-25
gctgtgttcaccccactcctgatcttgttggctgctcaggggctgacagcccagatgtgcagctgtgatgagcagaaacagggaggaatggagcccccag

SEQ ID NO: 20824 - DNA, 153 bp, Homo sapiens
  MAP TO AL035633.15; EXPRESSED IN PLACENTA, SIGNAL = 2.9; EXPRESSED IN ADULT LIVER, SIGNAL = 1.8; EXPRESSED IN BONE MARROW, SIGNAL = 1.9; EXPRESSED IN HELA, SIGNAL = 2.5; EXPRESSED IN HBL100, SIGNAL =   2; EXPRESSED IN HEART, SIGNAL = 2.1; EXPRESSED IN BT474, SIGNAL = 2.2; EXPRESSED IN FETAL LIVER, SIGNAL = 2.4; EXPRESSED IN BRAIN, SIGNAL = 2.3; EXPRESSED IN LUNG, SIGNAL = 2.6; NT HIT: AF263306.1, EVALUE 4.00e-81; EST_HUMAN HIT: AV746139.1, EVALUE 5.20e-01; SWISSPROT HIT: P98160, EVALUE 3.90e+00
tgtacacactggagcataatgacggcagccagtcagacacagctgtgggtacagttggagcaggtggaaagaaacggagatccagccttagtgccaaagtggttgccatagtgtctcgaaggagtagaagcacatcccagcttagtcaaacag

SEQ ID NO: 20825 - DNA, 695 bp, Homo sapiens
  MAP TO AL078638.6; EXPRESSED IN LUNG, SIGNAL = 1.4; EXPRESSED IN HBL100, SIGNAL = 0.95; EXPRESSED IN PLACENTA, SIGNAL = 1.1; EXPRESSED IN ADULT LIVER, SIGNAL = 1.1; EXPRESSED IN BRAIN, SIGNAL = 1.1; EXPRESSED IN BONE MARROW, SIGNAL = 1.1; EXPRESSED IN HELA, SIGNAL = 1.6; EXPRESSED IN HEART, SIGNAL = 1.5; EXPRESSED IN FETAL LIVER, SIGNAL = 1.1; EXPRESSED IN BT474, SIGNAL =   1; EST_HUMAN HIT: AW408788.1, EVALUE 0.00e+00; NT HIT: AL163283.2, EVALUE 3.80e-01; SWISSPROT HIT: P75211, EVALUE 2.00e-10
acaggcacttgacaaacctttggagcgtctctcgcttttgccttgggagatgcttccatgcttgcttcaagggatgtcttgggggatgctttcaccatcgcctcaggagatgcctccatgctctccttgggtgaccctttcacactctccttgggggctacttctgcgctccccttgggaggtgcttccaggctcccctctggggctgcttccacgctcacctctggcagtgcttccagactcacttccgggggtgcttccaggctcgcctccggggatgctactatgctcaccttgggaactgtttccaggtccaccttcgggagtgcttctatgctcaactcgggggatgcgtccatgctcatctcagaatcatatgtgctcaccacaggcgacacgtccacgctcaccacagggaatgagtccgtgctcacctcaggggccatgcccacacctgccttgggggacgcttccatgcttgtgttgcagaatacttccacattcacctgggggggtgcatccacacttgccttgggaggtgtctctactttctccaagggagactcttctacttttgtttgaggaggtattttcattgtcgacatgggaaacataacagccctcaattcgtcgctagtacatttacgcaagggtacagtgacatactgcattacataattggtgacgcctgtaac

SEQ ID NO: 20826 - DNA, 201 bp, Homo sapiens
  MAP TO AP000351.3; EXPRESSED IN BONE MARROW, SIGNAL = 1.3; EXPRESSED IN HBL100, SIGNAL = 0.94; EXPRESSED IN HELA, SIGNAL =   1; EXPRESSED IN HEART, SIGNAL =   1; EXPRESSED IN BRAIN, SIGNAL =   1; EST_HUMAN HIT: AA662274.1, EVALUE 1.00e-109; SWISSPROT HIT: P30712, EVALUE 2.00e-32; NT HIT: AF240786.1, EVALUE 1.00e-109
ctcggctatgaactgtttgagggacggccacgactggcagcatggcgtggacgagtggaggctttcctgggtgctgagctatgccaggaggcccacagcatcatcttgagcatcctggaacaggcggccaagaaaaccctcccaacaccctcaccagaggcctatcaggctatgctgcttcgaatcgccaggatcccctga

SEQ ID NO: 20827 - DNA, 513 bp, Homo sapiens
  MAP TO AL034430.1; EXPRESSED IN HELA, SIGNAL = 1.5; EXPRESSED IN PLACENTA, SIGNAL = 1.5; EXPRESSED IN HBL100, SIGNAL = 1.5; EXPRESSED IN HEART, SIGNAL = 1.3; EXPRESSED IN BT474, SIGNAL = 1.9; EXPRESSED IN ADULT LIVER, SIGNAL =   2; EXPRESSED IN FETAL LIVER, SIGNAL = 1.6; EXPRESSED IN BRAIN, SIGNAL = 1.3; EXPRESSED IN BONE MARROW, SIGNAL = 1.2; EXPRESSED IN LUNG, SIGNAL = 1.7; NT HIT: gi8922466, EVALUE 0.00e+00; SWISSPROT HIT: P53313, EVALUE 8.00e-24; EST_HUMAN HIT: BE883082.1, EVALUE 0.00e+00
atcattttcagcattctcttctttctcaccttccagaacttctgctcctggaatgtaatctttagcatctaattctccatattcttgtactcttgcttctatggaggcctcagtaggcttaccctggaatttcttctgcagcatctgaggattcagtgttcggaagagctgaatcaaagttctagcacacatcattacattcttatccttgtgtgttttatactgagccaggtcttggagaagttcttcagtcatggccagagaacatcgagctgttttctcttttatagcattgattcctactgtcatgacttctccagaattcttgtcggtaaccaaattgtttgccacagtcataagcaatgattgaataatctctgggggtactaggtgatgagatgcttgtgcagcaaacggaggatctttgttacttctctttggtggggctgcagaaacctttgcaaacaaggatggaaattgaagaggaagagctcatgaattcccaccaatctg

SEQ ID NO: 20828 - DNA, 91 bp, Homo sapiens
  MAP TO AL096712.17; EXPRESSED IN HEART, SIGNAL = 0.96; EXPRESSED IN FETAL LIVER, SIGNAL = 0.96; EXPRESSED IN ADULT LIVER, SIGNAL = 1.1; EXPRESSED IN BONE MARROW, SIGNAL = 1.1; EST_HUMAN HIT: BE872365.1, EVALUE 1.00e-37; NT HIT: gi8923313, EVALUE 3.00e-37; SWISSPROT HIT: P77674, EVALUE 3.10e+00
caaagaatggagtgaccaggtcattaattccctggacatacccactggcagggtggcggatggcccaaataaatagaattctttcaaagat

SEQ ID NO: 20829 - DNA, 234 bp, Homo sapiens
  MAP TO AL035703.19; EXPRESSED IN HBL100, SIGNAL =   2; EXPRESSED IN HELA, SIGNAL = 2.1; EXPRESSED IN PLACENTA, SIGNAL = 2.4; EXPRESSED IN HEART, SIGNAL = 2.2; EXPRESSED IN BT474, SIGNAL =   2; EXPRESSED IN FETAL LIVER, SIGNAL = 1.9; EXPRESSED IN ADULT LIVER, SIGNAL = 2.1; EXPRESSED IN BONE MARROW, SIGNAL = 1.9; EXPRESSED IN LUNG, SIGNAL = 2.2; EXPRESSED IN BRAIN, SIGNAL = 1.9; NT HIT: AB040892.1, EVALUE 1.00e-129; SWISSPROT HIT: O09127, EVALUE 2.00e-38; EST_HUMAN HIT: BE256685.1, EVALUE 3.30e+00
ctgcctggttcgtggtgatgttgaccacagcggcccggcggggctcggggctcaggtcggacacgccattgacggcctcgatccagaaggagtagttcatgtgggccagcaggttggccaccagcaggctggcctgcaccaggcttgtctgctggggcacaaagcgggtgccgctcccacatgcctcgcagcggctcagtgcccaggggcagcggcggcacacggcattgtagg

SEQ ID NO: 20830 - DNA, 150 bp, Homo sapiens; identical to SEQ ID NO: 18888
  MAP TO AL049637.33; EXPRESSED IN FETAL LIVER, SIGNAL = 1.2; EXPRESSED IN ADULT LIVER, SIGNAL = 1.4; EXPRESSED IN BONE MARROW, SIGNAL = 1.2; EXPRESSED IN HELA, SIGNAL = 1.2; EXPRESSED IN HBL100, SIGNAL = 1.3; EXPRESSED IN BT474, SIGNAL = 1.3; EXPRESSED IN BRAIN, SIGNAL = 1.1; EXPRESSED IN LUNG, SIGNAL = 1.4; EXPRESSED IN PLACENTA, SIGNAL = 1.2; EXPRESSED IN HEART, SIGNAL = 1.2; NT HIT: gi5901947, EVALUE 2.00e-79; SWISSPROT HIT: P54731, EVALUE 3.00e-22; EST_HUMAN HIT: AA862284.1, EVALUE 3.00e-79

SEQ ID NO: 20831 - DNA, 247 bp, Homo sapiens
  MAP TO AL035088.1; EXPRESSED IN PLACENTA, SIGNAL = 1.8; EXPRESSED IN HEART, SIGNAL = 1.9; EXPRESSED IN HBL100, SIGNAL = 1.8; EXPRESSED IN BT474, SIGNAL =   2; EXPRESSED IN ADULT LIVER, SIGNAL = 2.2; EXPRESSED IN FETAL LIVER, SIGNAL = 2.2; EXPRESSED IN BONE MARROW, SIGNAL = 2.5; EXPRESSED IN LUNG, SIGNAL =   2; EXPRESSED IN BRAIN, SIGNAL =   2; EXPRESSED IN HELA, SIGNAL = 2.2; SWISSPROT HIT: P05842, EVALUE 4.70e+00; EST_HUMAN HIT: BE731028.1, EVALUE 2.20e-01; NT HIT: AF026805.1, EVALUE 1.30e-01
ctggctcccctagcataccctgggtccttggtcacattctcatagttggaggctgctatcagaacacttctcggctcagtgccagccagtttaagagacattagctctttctgaaacaggattgcaaaggtgtccactaatgccttagaatcatccggcttttcaaaaagatgcactttcctgttaatggctctcaagttgtttttgcacgcaggcaggctgctcctggcaaaggaattcagatcgc

SEQ ID NO: 20832 - DNA, 102 bp, Homo sapiens
  MAP TO AL049542.5; EXPRESSED IN PLACENTA, SIGNAL = 1.4; EXPRESSED IN HELA, SIGNAL = 1.3; EXPRESSED IN HEART, SIGNAL = 1.3; EXPRESSED IN BT474, SIGNAL =   1; EXPRESSED IN HBL100, SIGNAL = 1.3; EXPRESSED IN ADULT LIVER, SIGNAL = 1.6; EXPRESSED IN FETAL LIVER, SIGNAL = 2.1; EXPRESSED IN BRAIN, SIGNAL = 1.4; EXPRESSED IN LUNG, SIGNAL = 1.5; EXPRESSED IN BONE MARROW, SIGNAL = 1.4; EST_HUMAN HIT: AL079628.1, EVALUE 7.00e-51; NT HIT: gi11431206, EVALUE 2.00e-48
gggcagatcattaccctcagcatccagggcgccaagagcctcttctccacagccttctccgagtccctggctgcagagatcagctccgtctcccgagatgag

SEQ ID NO: 20833 - DNA, 143 bp, Homo sapiens
  MAP TO D87675.1; EXPRESSED IN BT474, SIGNAL = 1.3; EXPRESSED IN BONE MARROW, SIGNAL =   1; EXPRESSED IN PLACENTA, SIGNAL = 2.9; EXPRESSED IN BRAIN, SIGNAL = 3.3; EXPRESSED IN LUNG, SIGNAL =   2; EXPRESSED IN HEART, SIGNAL = 1.4; EXPRESSED IN HELA, SIGNAL =   3; EXPRESSED IN HBL100, SIGNAL = 1.6; EST_HUMAN HIT: BE077201.1, EVALUE 7.00e-68; NT HIT: M34873.1, EVALUE 3.00e-75; SWISSPROT HIT: P05067, EVALUE 3.00e-20
cctcgtcacgtgttcaatatgctaaagaagtatgtccgcgcagaacagaaggacagacagcacaccctaaagcatttcgagcatgtgcgcatggtggatcccaagaaagccgctcagatccggtcccaggtaagcgtggggta

SEQ ID NO: 20834 - DNA, 425 bp, Homo sapiens; identical to SEQ ID NO: 4078
  MAP TO AL049748.1; EXPRESSED IN BT474, SIGNAL =   1; EXPRESSED IN FETAL LIVER, SIGNAL = 1.1; EXPRESSED IN ADULT LIVER, SIGNAL = 1.1; EXPRESSED IN BONE MARROW, SIGNAL = 0.96; EXPRESSED IN HBL100, SIGNAL =   1; EXPRESSED IN BRAIN, SIGNAL = 1.2; EXPRESSED IN LUNG, SIGNAL = 1.2; EXPRESSED IN PLACENTA, SIGNAL = 1.2; EXPRESSED IN HEART, SIGNAL = 0.98; EXPRESSED IN HELA, SIGNAL = 1.2; SWISSPROT HIT: P77468, EVALUE 1.90e+00; EST_HUMAN HIT: BE786828.1, EVALUE 1.00e-01

SEQ ID NO: 20835 - DNA, 178 bp, Homo sapiens
  MAP TO AC007687.16; EXPRESSED IN FETAL LIVER, SIGNAL = 2.5; EXPRESSED IN ADULT LIVER, SIGNAL = 2.5; EXPRESSED IN HBL100, SIGNAL = 2.4; EXPRESSED IN HELA, SIGNAL = 2.4; EXPRESSED IN PLACENTA, SIGNAL = 2.3; EXPRESSED IN HEART, SIGNAL = 2.1; EXPRESSED IN BT474, SIGNAL =   2; EXPRESSED IN BRAIN, SIGNAL = 1.8; EXPRESSED IN LUNG, SIGNAL = 2.5; EXPRESSED IN BONE MARROW, SIGNAL = 2.6; EST_HUMAN HIT: AA772084.1, EVALUE 1.00e-10; SWISSPROT HIT: Q62010, EVALUE 2.20e+00; NT HIT: Y19215.1, EVALUE 7.00e-09
gctgcataaagatctgggtatggcatgatgacataatggatccaatgcttcatcaagttattcacagaagctactgattgtgaagttacagcattatcctgccaagtgaaagaggtaggcataagtgaagaaaaattaagagagttaagagtctcatcatgatgaggagtcttgttcc

SEQ ID NO: 20836 - DNA, 204 bp, Homo sapiens
  MAP TO AC010092.2; EXPRESSED IN FETAL LIVER, SIGNAL = 1.2; EXPRESSED IN LUNG, SIGNAL = 1.3; EXPRESSED IN BRAIN, SIGNAL = 1.1; EXPRESSED IN HELA, SIGNAL = 1.7; EXPRESSED IN HBL100, SIGNAL = 1.2; EXPRESSED IN PLACENTA, SIGNAL = 1.2; EXPRESSED IN HEART, SIGNAL = 1.1; EXPRESSED IN BT474, SIGNAL = 1.1; NT HIT: gi11430354, EVALUE 1.00e-111; EST_HUMAN HIT: BE407353.1, EVALUE 1.00e-111; SWISSPROT HIT: Q10149, EVALUE 9.00e-04
cagcacatgccaaacattttcatttgccccatcaaagctgcagaaacgaatgctcactcccaataagccctggccgccccacaggttacttggtgtgactgaggtctctcgcagttccaatgttttgctgctatagataagcatctttacaggcttttcaacgtttgctttcagcagatccttaagagtgtcattgtctttatt

SEQ ID NO: 20837 - DNA, 405 bp, Homo sapiens
  MAP TO AL032818.2; EXPRESSED IN BT474, SIGNAL = 2.4; EXPRESSED IN FETAL LIVER, SIGNAL = 2.1; EXPRESSED IN BRAIN, SIGNAL = 2.8; EXPRESSED IN BONE MARROW, SIGNAL = 4.4; EXPRESSED IN LUNG, SIGNAL = 2.5; EXPRESSED IN HBL100, SIGNAL = 2.2; EXPRESSED IN PLACENTA, SIGNAL = 2.4; EXPRESSED IN HELA, SIGNAL = 2.2; EXPRESSED IN HEART, SIGNAL =   2; EXPRESSED IN ADULT LIVER, SIGNAL = 2.2; EST_HUMAN HIT: BE061342.1, EVALUE 2.60e-01; SWISSPROT HIT: P35659, EVALUE 2.00e-01; NT HIT: gi11418311, EVALUE 0.00e+00
ggacgatccggggctttttcttaagctgctggagatccttttgggaagggtgctgttcggaatggacatcctgatcatcttctatgttgttattggaatttgtatttggcccgagggtctccggggtcttgatttgtgctttcctatgcctgtgcttgggtttggaggttgccttaggagaagcctttggaagcctgggctttcctttagatgcaggttttgcaacctccctggggtgcaccttagcagtttcgtaagcatgccactttctcaagtattcttcccagtgctcacttgcttctgacattagaggatgcttttgaggagatacctcctttagatccgcttgaggtttcctctgggaacaggtgaacaaaaaagttattaataattgcacagggattg

SEQ ID NO: 20838 - DNA, 115 bp, Homo sapiens
  MAP TO AC007029.2; EXPRESSED IN BRAIN, SIGNAL = 1.2; EXPRESSED IN HBL100, SIGNAL =   1; EXPRESSED IN PLACENTA, SIGNAL = 1.5; EXPRESSED IN HEART, SIGNAL = 1.1; EXPRESSED IN ADULT LIVER, SIGNAL = 1.2; EXPRESSED IN BT474, SIGNAL = 1.2; EXPRESSED IN FETAL LIVER, SIGNAL = 0.98; EXPRESSED IN BONE MARROW, SIGNAL = 1.5; EXPRESSED IN LUNG, SIGNAL = 1.7; EST_HUMAN HIT: R23884.1, EVALUE 2.60e-01; NT HIT: AL163203.2, EVALUE 1.00e-05
gctgagggaggttttagtagctgccatttttatgagcctctgcaccaacccacagatgcatggtgtgacacagcacctgacaagaataagtacacccattacagctatgagggga

SEQ ID NO: 20839 - DNA, 227 bp, Homo sapiens
  MAP TO AC007247.2; EXPRESSED IN PLACENTA, SIGNAL = 9.4; EXPRESSED IN HBL100, SIGNAL =  11; EXPRESSED IN HEART, SIGNAL = 8.4; EXPRESSED IN LUNG, SIGNAL = 9.9; EXPRESSED IN BRAIN, SIGNAL = 8.7; EXPRESSED IN BT474, SIGNAL = 8.9; EXPRESSED IN ADULT LIVER, SIGNAL =  10; EXPRESSED IN FETAL LIVER, SIGNAL =  10; EXPRESSED IN BONE MARROW, SIGNAL =  11; EXPRESSED IN HELA, SIGNAL =  11; NT HIT: AF027865.1, EVALUE 4.60e-01; EST_HUMAN HIT: AI699094.1, EVALUE 1.40e-01; SWISSPROT HIT: Q10206, EVALUE 6.60e+00
aaatatccatcatagaagaagttcagatcaatgattgctttgcagacgttgaagttacagttggaaaagccgccttaactccaactgcgaggttaagtctaggtcttgttctcagttgtgctgccattgtgtttttgccagcagacgttctggtagaagagagtgaaggctgttatatccaggacaaacacaaaaaccgaacagtgaattccttattccttatttct

SEQ ID NO: 20840 - DNA, 128 bp, Homo sapiens
  MAP TO AC007052.4; EXPRESSED IN HELA, SIGNAL = 1.5; EXPRESSED IN BRAIN, SIGNAL = 2.5; EXPRESSED IN PLACENTA, SIGNAL =   2; EXPRESSED IN HBL100, SIGNAL = 1.8; EXPRESSED IN HEART, SIGNAL = 2.2; EXPRESSED IN ADULT LIVER, SIGNAL = 2.1; EXPRESSED IN BT474, SIGNAL = 2.1; EXPRESSED IN FETAL LIVER, SIGNAL = 1.8; EXPRESSED IN BONE MARROW, SIGNAL = 2.1; EXPRESSED IN LUNG, SIGNAL = 1.7; NT HIT: AF110520.1, EVALUE 1.60e-02; EST_HUMAN HIT: W39342.1, EVALUE 7.30e-02; SWISSPROT HIT: P54223, EVALUE 3.00e+00
gtgggagcatgcagaacttcattgaacagctgggcctgaaggttctggataggagaagcgggtggaggatggttattctaggcaggcagttgtggtgcaaagaagggcctagcaggtttgtgggacag

SEQ ID NO: 20841 - DNA, 75 bp, Homo sapiens
  MAP TO AC010888.2; EXPRESSED IN FETAL LIVER, SIGNAL = 1.3; EXPRESSED IN LUNG, SIGNAL = 1.7; EXPRESSED IN BRAIN, SIGNAL = 1.2; EXPRESSED IN HELA, SIGNAL = 1.7; EXPRESSED IN PLACENTA, SIGNAL = 1.6; EXPRESSED IN BT474, SIGNAL = 1.3; EXPRESSED IN ADULT LIVER, SIGNAL = 1.4; EXPRESSED IN BONE MARROW, SIGNAL = 1.1; EXPRESSED IN HEART, SIGNAL = 1.3; EXPRESSED IN HBL100, SIGNAL = 0.92; NT HIT: X89211.1, EVALUE 2.00e-16; EST_HUMAN HIT: AA327109.1, EVALUE 1.00e-09
gtgccaccatcaaggacttgaaagacgcaggggtggtgatttccataacatccatattcaagtctcctggttcgt

SEQ ID NO: 20842 - DNA, 117 bp, Homo sapiens
  MAP TO AC007249.2; EXPRESSED IN BONE MARROW, SIGNAL = 3.1; EXPRESSED IN LUNG, SIGNAL = 2.5; EXPRESSED IN BRAIN, SIGNAL = 2.6; EXPRESSED IN HELA, SIGNAL = 3.5; EXPRESSED IN HBL100, SIGNAL = 4.3; EXPRESSED IN PLACENTA, SIGNAL = 2.4; EXPRESSED IN HEART, SIGNAL = 2.6; EXPRESSED IN ADULT LIVER, SIGNAL = 2.4; EXPRESSED IN BT474, SIGNAL = 2.5; EXPRESSED IN FETAL LIVER, SIGNAL = 2.7; EST_HUMAN HIT: AW173652.1, EVALUE 1.00e-59; SWISSPROT HIT: P11926, EVALUE 2.00e-17; NT HIT: M20372.1, EVALUE 8.00e-60
gctgctctgtggcgtttcatcccactctcccaggcacaagacacaggcagggtgctggcatcctgttcctctacttcgggtgggaagtcggggttctggaattgctgcatgagttgc

SEQ ID NO: 20843 - DNA, 169 bp, Homo sapiens
  MAP TO AC010896.2; EXPRESSED IN LUNG, SIGNAL = 5.4; EXPRESSED IN HEART, SIGNAL = 4.2; EXPRESSED IN HELA, SIGNAL = 5.7; EXPRESSED IN HBL100, SIGNAL = 4.3; EXPRESSED IN PLACENTA, SIGNAL = 4.4; EXPRESSED IN ADULT LIVER, SIGNAL = 5.2; EXPRESSED IN FETAL LIVER, SIGNAL = 5.2; EXPRESSED IN BT474, SIGNAL =   5; EXPRESSED IN BRAIN, SIGNAL = 4.4; EXPRESSED IN BONE MARROW, SIGNAL = 4.5; NT HIT: AF196779.1, EVALUE 1.00e-03; SWISSPROT HIT: P08547, EVALUE 8.00e-04; EST_HUMAN HIT: BE155860.1, EVALUE 2.50e-02
ctgatgtacaagactattcactgcagcaatttgtacaacagcaaaaactggaactaacccaaatgtctattgatagggggatggttggacacactacggtacatccacacaatgaagtgccaggcagctgtaagaggactgaggaggctccttatagaccactgtggag

SEQ ID NO: 20844 - DNA, 237 bp, Homo sapiens
  MAP TO AC010385.2; EXPRESSED IN BONE MARROW, SIGNAL = 2.2; EXPRESSED IN BRAIN, SIGNAL =   2; EXPRESSED IN PLACENTA, SIGNAL = 2.1; EXPRESSED IN HEART, SIGNAL = 2.2; EXPRESSED IN HELA, SIGNAL = 2.3; EXPRESSED IN HBL100, SIGNAL = 1.9; EXPRESSED IN ADULT LIVER, SIGNAL = 2.8; EXPRESSED IN FETAL LIVER, SIGNAL =   2; EXPRESSED IN BT474, SIGNAL = 1.9; EXPRESSED IN LUNG, SIGNAL = 2.1; NT HIT: Z54255.1, EVALUE 1.20e-01
catcctaggaggcacataaccctatttcacaaaagaggtagtagagaaaaccaacaccagtgctattattgtctccactataaccttacctccagtactaccaccactatcaccctggcctcccactaccctatccactatcattactactatgaccacatccacaactacactgctcaatactactgccatgatgactagcacttccaccctagcccactccaacaccaacaccag

SEQ ID NO: 20845 - DNA, 87 bp, Homo sapiens
  MAP TO AC010904.2; EXPRESSED IN FETAL LIVER, SIGNAL = 9.6; EXPRESSED IN ADULT LIVER, SIGNAL =  12; EXPRESSED IN LUNG, SIGNAL =  11; EXPRESSED IN BONE MARROW, SIGNAL = 9.8; EXPRESSED IN BRAIN, SIGNAL = 8.4; EXPRESSED IN HELA, SIGNAL =  11; EXPRESSED IN PLACENTA, SIGNAL = 9.8; EXPRESSED IN BT474, SIGNAL = 8.5; EXPRESSED IN HEART, SIGNAL = 8.4; EXPRESSED IN HBL100, SIGNAL = 8.8; NT HIT: gi9838361, EVALUE 1.80e-01; EST_HUMAN HIT: R78381.1, EVALUE 1.10e+00
ctcctgcatgttggtgtgttggtgcatgtcagactgccattcaacaaaaggcaagactctgcctccactctgggtattctggaaaat

SEQ ID NO: 20846 - DNA, 87 bp, Homo sapiens
  MAP TO AL031776.6; EXPRESSED IN PLACENTA, SIGNAL = 3.9; EXPRESSED IN HEART, SIGNAL = 3.3; EXPRESSED IN ADULT LIVER, SIGNAL = 4.1; EXPRESSED IN FETAL LIVER, SIGNAL = 3.2; EXPRESSED IN BT474, SIGNAL = 3.1; EXPRESSED IN BRAIN, SIGNAL = 3.8; EXPRESSED IN BONE MARROW, SIGNAL = 3.2; EXPRESSED IN LUNG, SIGNAL = 3.7; EXPRESSED IN HBL100, SIGNAL =   3; EXPRESSED IN HELA, SIGNAL = 3.9; NT HIT: U62556.1, EVALUE 7.00e-04; SWISSPROT HIT: P46970, EVALUE 7.10e+00; EST_HUMAN HIT: AI206322.1, EVALUE 1.00e-03
gcagtgttagcatcaccttcatcatcactattatcacgatcccctttattcagaatcatttctcctccttcactgtcagtcagtaaa

SEQ ID NO: 20847 - DNA, 220 bp, Homo sapiens
  MAP TO AC008844.2; EXPRESSED IN HELA, SIGNAL =  22; EXPRESSED IN PLACENTA, SIGNAL =  22; EXPRESSED IN HBL100, SIGNAL =  18; EXPRESSED IN HEART, SIGNAL =  16; EXPRESSED IN LUNG, SIGNAL =  22; EXPRESSED IN BRAIN, SIGNAL =  19; EXPRESSED IN BT474, SIGNAL =  17; EXPRESSED IN ADULT LIVER, SIGNAL =  27; EXPRESSED IN FETAL LIVER, SIGNAL =  22; EXPRESSED IN BONE MARROW, SIGNAL =  20; SWISSPROT HIT: Q00748, EVALUE 1.60e+00
gtgtatgtgtgtgtgtctaccatgattttctcaacttactgcagccatttttctgtattatcattgtgctttttgatagcaatgaccttgacattctctttcagttgaagatttacagtagctttgacaacagtgatactactgttctactggctagccatttaggactgcaatttgatcagaggtaaagaaaagaacattacctccaagtcaagcatac

SEQ ID NO: 20848 - DNA, 239 bp, Homo sapiens
  MAP TO AC010906.2; EXPRESSED IN HEART, SIGNAL = 2.9; EXPRESSED IN FETAL LIVER, SIGNAL =   3; EXPRESSED IN LUNG, SIGNAL = 3.4; EXPRESSED IN HELA, SIGNAL = 3.4; EXPRESSED IN HBL100, SIGNAL = 2.5; EXPRESSED IN PLACENTA, SIGNAL = 2.9; EXPRESSED IN ADULT LIVER, SIGNAL = 3.9; EXPRESSED IN BT474, SIGNAL = 2.6; EXPRESSED IN BRAIN, SIGNAL = 2.8; EXPRESSED IN BONE MARROW, SIGNAL =   3; SWISSPROT HIT: P96380, EVALUE 5.10e-01
tcactgtgaggaagacaggaccaagagaccacgctccaggccagacagcttccattttctgtgtcccagatcccacagaaagactggcacagttgtctgctggggtggcggtggagttttcagaggcacccctgctacatggcaaagctgcagcaggaaacttcgggcccagggagcaaggtctggttcttgggaagtcaatacactgctgtaagtcatattttgtttcccatgctcat

SEQ ID NO: 20849 - DNA, 178 bp, Homo sapiens
  MAP TO AC007386.3; EXPRESSED IN HELA, SIGNAL = 0.66; EXPRESSED IN BT474, SIGNAL = 0.7; EXPRESSED IN LUNG, SIGNAL = 0.65; EXPRESSED IN ADULT LIVER, SIGNAL = 0.77; EXPRESSED IN HEART, SIGNAL = 0.82; EXPRESSED IN PLACENTA, SIGNAL = 0.67; EXPRESSED IN BRAIN, SIGNAL = 0.83; EXPRESSED IN HBL100, SIGNAL = 0.67; NT HIT: AB011154.1, EVALUE 3.00e-48; SWISSPROT HIT: P97436, EVALUE 7.50e-01; EST_HUMAN HIT: AA464805.1, EVALUE 3.00e-94
ctggggtgttctccaacaggcactgaagaagaatctcccccttctgtaagacactctccgtcagagactgatgttcatctatatctttcttaaattgcttaaggcgtatcagaaaaagaaaaggcagaagcttcgttactattgttttgtaaacgttatttgaaaagcacagcatgta

SEQ ID NO: 20850 - DNA, 417 bp, Homo sapiens
  MAP TO AC010684.2; EXPRESSED IN FETAL LIVER, SIGNAL =   2; EXPRESSED IN ADULT LIVER, SIGNAL = 1.9; EXPRESSED IN LUNG, SIGNAL = 2.1; EXPRESSED IN BONE MARROW, SIGNAL =   2; EXPRESSED IN BRAIN, SIGNAL = 1.8; EXPRESSED IN HELA, SIGNAL = 1.9; EXPRESSED IN PLACENTA, SIGNAL = 1.6; EXPRESSED IN BT474, SIGNAL = 1.6; EXPRESSED IN HEART, SIGNAL = 1.9; EXPRESSED IN HBL100, SIGNAL = 1.7; EST_HUMAN HIT: AI191496.1, EVALUE 4.00e-25; SWISSPROT HIT: P17008, EVALUE 2.00e-25; NT HIT: gi11426146, EVALUE 6.00e-24
ggactcgttggctgcagtctgtgcagatcttcacatacaaggagatggccatagctgtggtgctctgcagatgtggcagtggcttcatcaggatgaacgaggggcccctggagatgatcaggctgctcacactgcaatacaagctactggaattaggtctgcttctggacaaggaacagcttgctggaatggacatccatgttcgtgtgaagggtagtggtcatgtggttcagatttatgctgtccttcagtacatctccaaagccctggtaccctgttacccaaaatatgtagatgaggcttccgaggagatcaaagacaccctcaccagaccttgctggtggttcacccctgttgctatgaatccaagaaatttgcaggccctggtgcctgtgctcactaccagaaatcatagca

SEQ ID NO: 20851 - DNA, 339 bp, Homo sapiens
  MAP TO AL031963.12; EXPRESSED IN ADULT LIVER, SIGNAL = 5.4; EXPRESSED IN BT474, SIGNAL = 8.2; EXPRESSED IN BRAIN, SIGNAL =  12; EXPRESSED IN HELA, SIGNAL =  18; EXPRESSED IN FETAL LIVER, SIGNAL =   8; EXPRESSED IN LUNG, SIGNAL = 8.9; EXPRESSED IN BONE MARROW, SIGNAL = 7.1; EXPRESSED IN PLACENTA, SIGNAL =  16; EXPRESSED IN HEART, SIGNAL = 6.2; EXPRESSED IN HBL100, SIGNAL =  11; EST_HUMAN HIT: H68656.1, EVALUE 3.00e-96; SWISSPROT HIT: P26806, EVALUE 1.30e-02; NT HIT: AF280107.1, EVALUE 3.00e-65
cagcgtttaggctgtttctcatcagaccccactaaacatatacaggaattccgatatctaactctgtcctacaatttaacctggagtgacctaaatgtcatcctgacttctaccctctccccagatgaaagggaaagagttttttctctagtccactctcacgctgataaccaccggcttcatgagccagacctccaggaaggcatcagagcagttccccaagaggatccccaatggaactatcaggcagattccccaggtatagctaggcgagattacatgatttcctgcctagttgaagggcttaaaaaggcagcttacaaagctgttaattatgac

SEQ ID NO: 20852 - DNA, 313 bp, Homo sapiens
  MAP TO AC010958.2; EXPRESSED IN HBL100, SIGNAL = 9.7; EXPRESSED IN HEART, SIGNAL = 7.8; EXPRESSED IN FETAL LIVER, SIGNAL =  10; EXPRESSED IN LUNG, SIGNAL =  11; EXPRESSED IN BRAIN, SIGNAL =   9; EXPRESSED IN HELA, SIGNAL =  11; EXPRESSED IN PLACENTA, SIGNAL =  11; EXPRESSED IN BT474, SIGNAL = 9.4; EXPRESSED IN ADULT LIVER, SIGNAL =  14; EXPRESSED IN BONE MARROW, SIGNAL = 9.8; NT HIT: AL163284.2, EVALUE 3.00e-03; EST_HUMAN HIT: AA401438.1, EVALUE 0.00e+00; SWISSPROT HIT: P10108, EVALUE 4.30e+00
tgtttccatctttctgctgatatcacctatctggtcttgcatgttgtctaatttttctgctaaagccagtttatccaggagtttctgctctgggtgagcagctctcaggtgctgtctctccctggatgtgcctgtctcttcagagcagggtgccagtttgtctggcagccttagttctctgatgggcccatgaaaggctgccctgctattctttgctgtaaggatgggggtggtgactgccaagcacgtcacatgacaccagttgaagttgcggaacttctgagccaggctcctaaagtgagacttccaatcc

SEQ ID NO: 20853 - DNA, 309 bp, Homo sapiens
  MAP TO AC009294.6; EXPRESSED IN BONE MARROW, SIGNAL = 1.6; EXPRESSED IN LUNG, SIGNAL = 1.8; EXPRESSED IN HELA, SIGNAL = 1.6; EXPRESSED IN BRAIN, SIGNAL = 1.8; EXPRESSED IN PLACENTA, SIGNAL = 1.6; EXPRESSED IN HBL100, SIGNAL = 1.8; EXPRESSED IN HEART, SIGNAL = 1.5; EXPRESSED IN BT474, SIGNAL = 1.6; EXPRESSED IN ADULT LIVER, SIGNAL = 1.8; EXPRESSED IN FETAL LIVER, SIGNAL = 1.6; EST_HUMAN HIT: AA422050.1, EVALUE 1.90e-01; SWISSPROT HIT: P09081, EVALUE 1.90e-02
cccaggtgcccacagtggactatgctgggaacaatgggtcattctcatggactgtcttccactgagcctttgcagcccccaaggagagatcagcattgccattttgctccacatccttgggaagccaccaatgaccctctctacctccatccagcgcccgcttcacactcctatccagaatctcgacaccctaatctctttacagtgctcctgagcctgtcttacatacatgactttattttgatttttgatcttcacaacacttctgagaggcagctgggggagtatacaattactcctattgtacag

SEQ ID NO: 20854 - DNA, 95 bp, Homo sapiens
  MAP TO AC010877.2; EXPRESSED IN BONE MARROW, SIGNAL = 1.2; EXPRESSED IN BRAIN, SIGNAL = 1.2; EXPRESSED IN LUNG, SIGNAL = 1.4; EXPRESSED IN HEART, SIGNAL = 1.6; EXPRESSED IN HELA, SIGNAL = 1.8; EXPRESSED IN HBL100, SIGNAL =   2; EXPRESSED IN PLACENTA, SIGNAL = 1.4; EXPRESSED IN ADULT LIVER, SIGNAL = 1.3; EXPRESSED IN FETAL LIVER, SIGNAL = 1.5; EXPRESSED IN BT474, SIGNAL = 1.6; EST_HUMAN HIT: AI610599.1, EVALUE 2.00e-39; NT HIT: X59417.1, EVALUE 4.00e-42
ctgtgtgtttggtaacaacaaacaaatatcatggaggtccctggattgaaaaaagagcctctcccactcctcctaccaccgaagtggttaggact

SEQ ID NO: 20855 - DNA, 412 bp, Homo sapiens
  MAP TO AL033377.2; EXPRESSED IN BT474, SIGNAL = 5.3; EXPRESSED IN BRAIN, SIGNAL =   6; EXPRESSED IN BONE MARROW, SIGNAL = 6.1; EXPRESSED IN HELA, SIGNAL = 5.5; EXPRESSED IN ADULT LIVER, SIGNAL = 7.9; EXPRESSED IN FETAL LIVER, SIGNAL = 6.5; EXPRESSED IN LUNG, SIGNAL =   7; EXPRESSED IN PLACENTA, SIGNAL = 8.3; EXPRESSED IN HEART, SIGNAL = 5.5; EXPRESSED IN HBL100, SIGNAL = 6.7; NT HIT: gi5031732, EVALUE 5.60e-02; EST_HUMAN HIT: D12234.1, EVALUE 8.00e-91; SWISSPROT HIT: Q61549, EVALUE 1.00e-03
aagacatttgagaggaaaatctgcagtagcccaaactaagctgagaaaagtcttaggtaaacaggacatggtaataaatctttttttctttctcatttcttcttttttaagctgttggattcaagatccagtcatattttatgtgacctgtgctgggtattttggagtcatgttttttctgaacattgccatgttcattgtggtaatggtgcagatctgtgggaggaatggcaagagaagcaaccggaccctgagagaagaagtgttaaggaacctgcgcagtgtggttagcttgacctttctgttgggcatgacatggggttttgcattctttgcctggggacccttaaatatccccttcatgtacctcttctccatcttcaattcattacaaggtaagataaattgtaca

SEQ ID NO: 20856 - DNA, 113 bp, Homo sapiens
  MAP TO AC010885.2; EXPRESSED IN FETAL LIVER, SIGNAL = 1.5; EXPRESSED IN ADULT LIVER, SIGNAL = 1.9; EXPRESSED IN LUNG, SIGNAL = 1.3; EXPRESSED IN BONE MARROW, SIGNAL = 1.7; EXPRESSED IN BRAIN, SIGNAL = 1.5; EXPRESSED IN PLACENTA, SIGNAL = 1.5; EXPRESSED IN HELA, SIGNAL = 1.6; EXPRESSED IN BT474, SIGNAL = 1.5; EXPRESSED IN HEART, SIGNAL = 1.7; EXPRESSED IN HBL100, SIGNAL = 1.7
tttcttccttttttccttctttgcttccatccttccttcctttcctctttctttcctttcttcttttttccatctctctctcctccttttctttctctcttctttgtttcttt

SEQ ID NO: 20857 - DNA, 124 bp, Homo sapiens
  MAP TO AC010149.2; EXPRESSED IN PLACENTA, SIGNAL = 2.2; EXPRESSED IN HELA, SIGNAL = 2.3; EXPRESSED IN HBL100, SIGNAL = 2.4; EXPRESSED IN HEART, SIGNAL = 2.2; EXPRESSED IN BT474, SIGNAL = 2.1; EXPRESSED IN ADULT LIVER, SIGNAL =   3; EXPRESSED IN FETAL LIVER, SIGNAL = 2.7; EXPRESSED IN BONE MARROW, SIGNAL = 2.4; EXPRESSED IN LUNG, SIGNAL = 1.8; EXPRESSED IN BRAIN, SIGNAL =   2; EST_HUMAN HIT: AI090868.1, EVALUE 2.80e-01; SWISSPROT HIT: P36252, EVALUE 4.00e+00
aaaccctaagttttgaggtgaatgagattctgtcactcatggggcacttcagccaacagatgatcacccctgctatcactattggtgggagggcatgcctttggctattgagtccaaatggggc

SEQ ID NO: 20858 - DNA, 154 bp, Homo sapiens
  MAP TO AL033384.2; EXPRESSED IN HBL100, SIGNAL = 2.3; EXPRESSED IN HELA, SIGNAL = 1.8; EXPRESSED IN PLACENTA, SIGNAL = 1.7; EXPRESSED IN HEART, SIGNAL = 1.7; EXPRESSED IN ADULT LIVER, SIGNAL = 2.1; EXPRESSED IN FETAL LIVER, SIGNAL = 1.8; EXPRESSED IN BT474, SIGNAL = 1.6; EXPRESSED IN BRAIN, SIGNAL = 1.9; EXPRESSED IN BONE MARROW, SIGNAL =   2; EXPRESSED IN LUNG, SIGNAL = 1.9; EST_HUMAN HIT: AU140563.1, EVALUE 5.20e-01; SWISSPROT HIT: O58728, EVALUE 5.10e+00; NT HIT: AF286055.1, EVALUE 8.90e-02
tttaccaatatggtcggcaaatatggttcaatgaatgtcatcactctgcataggttcagaagtggtatgtcacttacctttccttttaaaatccaaagcaggagccagtacctggcagctggaatcaacaccagagaccaaacaaatctctgga

SEQ ID NO: 20859 - DNA, 118 bp, Homo sapiens
  MAP TO AC007551.1; EXPRESSED IN PLACENTA, SIGNAL =   2; EXPRESSED IN HEART, SIGNAL = 1.8; EXPRESSED IN BRAIN, SIGNAL =   2; EXPRESSED IN HELA, SIGNAL =   2; EXPRESSED IN HBL100, SIGNAL = 1.9; EXPRESSED IN BT474, SIGNAL = 2.3; EXPRESSED IN ADULT LIVER, SIGNAL = 2.2; EXPRESSED IN FETAL LIVER, SIGNAL = 2.5; EXPRESSED IN LUNG, SIGNAL = 1.7; EXPRESSED IN BONE MARROW, SIGNAL =   2; EST_HUMAN HIT: R02506.1, EVALUE 1.70e-02; SWISSPROT HIT: Q59296, EVALUE 9.00e+00; NT HIT: AF111167.2, EVALUE 6.60e-02
ccagccaaggtcatgctcttcttggggcagcctcaggcaataactgaaaaacagctgatgtacatgggcttggccatttccacccaacaggagaacttctaagatgcaatcttggctc

SEQ ID NO: 20860 - DNA, 86 bp, Homo sapiens
  MAP TO AC009492.2; EXPRESSED IN BONE MARROW, SIGNAL = 3.7; EXPRESSED IN HELA, SIGNAL = 4.8; EXPRESSED IN PLACENTA, SIGNAL = 5.5; EXPRESSED IN HEART, SIGNAL = 2.8; EXPRESSED IN BT474, SIGNAL = 3.5; EXPRESSED IN BRAIN, SIGNAL = 3.2; EXPRESSED IN HBL100, SIGNAL = 1.9; EXPRESSED IN ADULT LIVER, SIGNAL = 4.5; EXPRESSED IN FETAL LIVER, SIGNAL = 4.1; EXPRESSED IN LUNG, SIGNAL = 4.4; NT HIT: AF080567.1, EVALUE 5.90e-01; EST_HUMAN HIT: AA376832.1, EVALUE 8.00e-10
caagccctgcaaagacacgctcaaaacaatccagagtacagacagctgctggcgtgaagaagctgtgagtactgacagcacttggg

SEQ ID NO: 20861 - DNA, 178 bp, Homo sapiens
  MAP TO AC010892.2; EXPRESSED IN BRAIN, SIGNAL = 1.9; EXPRESSED IN PLACENTA, SIGNAL = 1.9; EXPRESSED IN HBL100, SIGNAL = 2.1; EXPRESSED IN HELA, SIGNAL = 1.8; EXPRESSED IN HEART, SIGNAL = 2.1; EXPRESSED IN BT474, SIGNAL = 1.9; EXPRESSED IN ADULT LIVER, SIGNAL = 2.1; EXPRESSED IN FETAL LIVER, SIGNAL = 1.9; EXPRESSED IN BONE MARROW, SIGNAL =   2; EXPRESSED IN LUNG, SIGNAL = 1.9; SWISSPROT HIT: Q02926, EVALUE 1.30e+00; EST_HUMAN HIT: N47258.1, EVALUE 2.70e-02
actggccgaaagcagcacaaacagccggaacatgttcacccagtaaacccccaaagagtcgacatttgttttattgctgcttttaaaaacctagccgtaaatagaatcagaagggggaagggcatcgatacttctccatttgccacagacgattggtggggggaggaggaggctcccg

SEQ ID NO: 20862 - DNA, 114 bp, Homo sapiens
  MAP TO AP000124.1; EXPRESSED IN ADULT LIVER, SIGNAL =   1; EXPRESSED IN HEART, SIGNAL = 0.84; EST_HUMAN HIT: BF345092.1, EVALUE 1.50e+00; NT HIT: AF165532.1, EVALUE 9.90e-01
ggatctttccttgttgactgggactggcattttttatgtgagggcaggagaacagcgttagcatctctgcaggtgttgtgctgccccaaaccagcatctttcttcacagggggg

SEQ ID NO: 20863 - DNA, 152 bp, Homo sapiens
  MAP TO AC010899.2; EXPRESSED IN LUNG, SIGNAL =   1; EXPRESSED IN BRAIN, SIGNAL = 1.1; EXPRESSED IN HBL100, SIGNAL = 0.97; EXPRESSED IN HEART, SIGNAL = 1.2; NT HIT: gi11430117, EVALUE 1.00e-56; EST_HUMAN HIT: AW956250.1, EVALUE 3.00e-14; SWISSPROT HIT: P54764, EVALUE 2.30e+00
tgccttcccggatcattggagatggggctaactccacagtccttctggtctctgtctcgggcagtgtggtgctggtggtaattctcattgcagcttttgtcatcagccggaggtaagcactgaagccactcactgtgcagcccccgaccttc

SEQ ID NO: 20864 - DNA, 128 bp, Homo sapiens
  MAP TO AC010491.2; EXPRESSED IN HBL100, SIGNAL = 3.1; EXPRESSED IN HEART, SIGNAL =   2; EXPRESSED IN FETAL LIVER, SIGNAL = 2.4; EXPRESSED IN ADULT LIVER, SIGNAL = 1.6; EXPRESSED IN LUNG, SIGNAL = 2.2; EXPRESSED IN BRAIN, SIGNAL = 2.1; EXPRESSED IN PLACENTA, SIGNAL = 1.7; EXPRESSED IN BT474, SIGNAL = 3.1; EXPRESSED IN BONE MARROW, SIGNAL = 1.7; EXPRESSED IN HELA, SIGNAL = 3.9; EST_HUMAN HIT: BE274430.1, EVALUE 3.00e-54; NT HIT: M94083.1, EVALUE 2.00e-54; SWISSPROT HIT: P80317, EVALUE 6.00e-16
tgattaaatataagcccagtgtaaagggcagggcacagcttggagtccaagcatttgctgatgtgttgctcattattccaaaggttcttgatcagaactctggttttgaccttcaggaaacattagtt

SEQ ID NO: 20865 - DNA, 164 bp, Homo sapiens
  MAP TO AC010906.2; EXPRESSED IN HELA, SIGNAL = 5.7; EXPRESSED IN HBL100, SIGNAL = 5.5; EXPRESSED IN HEART, SIGNAL = 5.1; EXPRESSED IN FETAL LIVER, SIGNAL = 5.3; EXPRESSED IN BONE MARROW, SIGNAL = 6.5; EXPRESSED IN LUNG, SIGNAL = 5.1; EXPRESSED IN BRAIN, SIGNAL = 4.2; EXPRESSED IN PLACENTA, SIGNAL = 4.7; EXPRESSED IN ADULT LIVER, SIGNAL = 6.1; EXPRESSED IN BT474, SIGNAL = 5.1; NT HIT: AJ400878.1, EVALUE 3.20e-01; EST_HUMAN HIT: AW592114.1, EVALUE 2.50e-02; SWISSPROT HIT: O31297, EVALUE 2.90e+00
ctcactgcgttgaaattgagtgttttggtggccagtattgagctcacagagggagtggagctttgctcccctgtggaggagcactcagaaatgctggtgaccacagagacccctggtgttgtccacaaaggtctccagaagagagtaggggagggatgggccac

SEQ ID NO: 20866 - DNA, 155 bp, Homo sapiens
  MAP TO AC012354.2; EXPRESSED IN BONE MARROW, SIGNAL = 2.4; EXPRESSED IN HBL100, SIGNAL = 3.4; EXPRESSED IN HELA, SIGNAL = 4.4; EXPRESSED IN HEART, SIGNAL = 2.4; EXPRESSED IN BRAIN, SIGNAL =   2; EXPRESSED IN LUNG, SIGNAL = 3.1; EXPRESSED IN PLACENTA, SIGNAL = 2.5; EXPRESSED IN BT474, SIGNAL = 2.1; EXPRESSED IN ADULT LIVER, SIGNAL = 2.3; EXPRESSED IN FETAL LIVER, SIGNAL = 2.4; NT HIT: AF167101.1, EVALUE 7.60e-02; EST_HUMAN HIT: BF673758.1, EVALUE 2.00e-65; SWISSPROT HIT: P35663, EVALUE 3.90e+00
ttcgtgctctccctcactgccttcaagattctggagaatcttgtgtttggcaaaggatcccaagcaaagaccttccctgagattctcctgtgcctcctgttggctctctttgcatctggcctcatccaccgagtctgtgtcaccacctgcttcat

SEQ ID NO: 20867 - DNA, 17203 bp, Homo sapiens
  MAP TO AC010680.3; EXPRESSED IN BONE MARROW, SIGNAL =   1; EXPRESSED IN BRAIN, SIGNAL = 0.95; EXPRESSED IN HBL100, SIGNAL = 0.94; EXPRESSED IN HEART, SIGNAL = 3.8; EXPRESSED IN FETAL LIVER, SIGNAL =   1; EXPRESSED IN ADULT LIVER, SIGNAL =   1; NT HIT: gi4507720, EVALUE 0.00e+00; SWISSPROT HIT: P16419, EVALUE 2.00e-73; EST_HUMAN HIT: AW384459.1, EVALUE 0.00e+00
tttcaacaccgttcattccagagtgccaatattttatctaaattacccaaaagccaaactctgaatatatacttttgtgtctttgtttctttctcagatcctccaggaccaccttcaaatccgcatgtcactgatactaccaagaaatctgcttctttggcatggggcaagcctcattatgatggtggacttgaaatcactggctatgtcgtggagcatcaaaaagtaggagacgaggcctggataaaagataccacaggaaccgccctcagaatcactcagttcgttgttcctgatcttcagactaaagaaaaatacaacttcagaatcagtgccatcaacgatgcaggtgttggggagccagcggtgattccagatgttgaaatcgtagaacgggagatggctcctgattttgaactagatgccgagcttcgaagaacacttgttgttagagcaggactcagtattaggatatttgtgccaattaaaggtcgtcctgctcctgaagtgacatggaccaaagataacatcaacctgaaaaaccgagccaacattgaaaatacggaatcatttactcttctgattatcccagaatgtaacagatatgataccggtaaatttgtcatgaccattgaaaacccggctgggaagaaaagtggctttgtgaacgtcagagtcttggacacgccaggcccagtcctcaacctgcggcctacagacatcacaaaggacagtgtcaccctgcactgggacctccctctgatagatggaggctcacgtataacaaactacattgtagagaaacgtgaagcaacacggaaatcttattccacagccaccactaagtgccataaatgcacatataaagttaccggcttgtctgaagggtgtgaatatttcttcagagtgatggcagagaatgaatatggaattggtgagccaacagaaactacagagcccgtaaaagcctctgaagcaccatctccaccagacagccttaacatcatggacataactaagagcaccgtcagcctggcatggcctaagcccaaacacgatggtggcagcaagatcactggctatgtgattgaagcccaaagaaaaggctctgaccagtggacccacatcacaaccgtgaaagggttagaatgtgttgtgaggaatctaactgaaggagaggaatataccttccaagtgatggcagtgaacagcgcggggagaagtgcccctagagaaagcagacccgtcattgtcaaggagcagacaatgcttccagagctggatctccgtggcatctatcagaaactggtcattgccaaagctggtgacaacatcaaagttgaaattccagtgctcggtcgaccgaagcccacagtgacatggaaaaaaggagaccaaattcttaaacagacacagagagttaattttgaaaccacagcgacttcaaccattttaaatatcaatgagtgtgtcagaagtgatagtgggccctatccattaacagcaaggaacattgtaggagaggttggtgatgtcatcaccattcaagtccatgatatcccagggccacctactggaccaatcaaatttgatgaagtttcatctgattttgtaaccttctcttgggacccacctgagaacgatggtggtgtaccaataagcaactatgtagtggaaatgcggcagactgacagtactacctgggttgagttagcaaccaccgttatacgtactacctataaagccacccgccttactactggattagagtatcagttccgtgtaaaagctcagaatagatatggagttggaccaggcatcacatcagcatgcatagttgccaactatccatttaaggttcctggacctcctggtacccctcaggtaactgcagttaccaaggattcaatgacaattagctggcatgagccactttctgatggtggaagccccattttaggatatcatgttgaaagaaaagaacgaaatggtattctctggcagactgtgagcaaagctttagtaccaggcaacattttcaaatcaagtggacttacagatggtattgcttatgagttccgggtgattgcagaaaacatggcaggcaaaagtaagccaagcaagccatcagaacctatgttggctctggatcccattgacccacctggaaaaccagtacctctaaatattacaagacacacagtaacacttaaatgggctaagcctgaatatactgggggctttaaaattaccagttatatcgttgaaaagagagaccttcctaatggacggtggctgaaggccaacttcagcaacattttggagaatgaatttacagtcagtggcctaacagaagatgctgcatatgaattccgtgtgatcgccaaaaatgctgcaggtgccatcagtccaccatctgagccatctgatgctatcacttgcagggatgatgttgaggcaccaaagataaaggtggatgttaaatttaaggacacggttatattaaaagcaggtgaagcattcagactggaagctgatgtttcaggccgcccacctccaacaatggaatggagcaaagatggaaaagagctggaaggcacagcaaagttagaaataaaaattgcagatttctctactaatctggtaaacaaagattcaacaagaagggatagtggtgcctatacccttacagcgactaatcctggtggctttgctaaacacattttcaatgtcaaagttcttgacagaccaggcccacctgaaggacctttggctgtaactgaagtgacatcagaaaagtgtgtactatcatggttccctccactggatgatggaggtgccaaaattgatcattacatagtacagaaacgtgaaaccagcagattggcatggacaaatgtagcctcagaagtccaagtaacaaagctaaaggtcactaaactcttgaaaggcaatgaatacatattccgtgtcatggctgtaaataaatatggagtgggagagccactggaatcagagcctgtgcttgcagtgaatccttatggaccccctgatccgcccaaaaaccctgaagtgacaactattactaaagattcgatggttgtctgctggggacatcctgattctgatggtggaagtgaaatcatcaattatattgtggaacggcgtgataaagctggccaacgctggattaaatgcaacaaaaaaactcttactgatttaagatataaagtgtctggactgacagaaggacatgaatatgagttcaggattatggctgaaaatgctgctggaattagtgcaccaagtcctaccagtccattttacaaggcttgtgacactgtgtttaaacctggaccaccaggtaacccacgtgttctggatacaagcagatcatccatttcaatcgcttggaataaacctatctatgatggtggttcagaaatcactgggtatatggttgagattgccctgccagaggaagatgaatggcagattgtcactccaccagcaggactcaaggcaacttcgtatactatcactggcctcacagagaatcaggaatataagatccgcatctatgccatgaattccgaaggacttggggaacctgcccttgttcctggaactccaaaggctgaagacagaatgctgcctccagaaattgaactggatgctgacctgcgcaaagttgttactataagggcctgctgcaccctgagactttttgttcccatcaaaggaaggcctgcacctgaggtgaagtgggcccgggaccatggagaatctttagataaagctagcatcgaatccacaagctcttacaccctgcttattgttggaaatgtaaacagatttgacagtggcaaatatatactaactgtagaaaatagttcaggcagcaagtctgcatttgtcaatgttagagttctcgatacaccaggccccccacaggatctgaaggtaaaagaggtcactaagacatctgtcacactcacatgggacccacctctccttgatggaggttcaaaaatcaagaactatattgttgaaaagcgggaatcaacaagaaaagcatattcaactgttgcaacaaactgccacaagacttcctggaaggtagaccagcttcaagaaggctgtagctactatttcagggttctcgcagaaaatgaatatggcattgggctgcctgctgaaaccgcagaatctgtgaaagcatcagaacgacctcttcctccaggaaaaataactttgatggatgtcacaagaaatagtgtgtcactctcttgggagaaaccagagcatgatggaggcagccgaattctaggctacattgtggagatgcagaccaaaggcagtgacaaatgggccacgtgtgccacagtcaaggtcactgaagccactatcactggattaattcagggtgaagaatactctttccgtgtttcagctcagaatgaaaagggcatcagtgatcctagacaactgagtgtgccagtgatcgccaaagatcttgtcattccaccagccttcaaactcctgttcaatactttcactgtactggcaggtgaagacctaaaagttgatgttccattcattggccgccctaccccagctgtaacctggcataaagataatgtaccactgaagcagacaactagagtaaatgcagagagcacagaaaataattcactactgacaataaaggacgcctgccgagaagatgttggccattatgtggttaaactgactaactcagctggtgaagctattgaaacccttaatgttatcgttcttgacaaaccagggcctccaactggaccagttaaaatggatgaagtgacagctgatagtattactctttcctggggcccacccaagtatgatggtggaagttctatcaataattacattgttgagaaacgggacacttccacaaccacctggcaaattgtatcagctacagttgcaaggacaacaataaaggcttgcagactgaagactggatgtgaatatcagtttagaattgcagctgaaaacagatatgggaagagtacctacctcaattcagagcctactgtagcccaatatccattcaaagttcctggtcctcctggcactccagttgtcacactgtcctccagggacagcatggaagtacaatggaatgagccaatcagtgatggaggaagtagagtcattggctatcatctagaacgcaaggaaagaaatagcatcctctgggttaagttgaataaaacacctattcctcaaaccaagtttaagacaactggccttgaagaaggtgttgaatatgaatttagagtctctgcagagaacatcgtgggcattggcaagccgagtaaagtatcagaatgttatgtggctcgtgacccatgtgatccaccaggacggccagaggcaatcattgtcacaaggaattctgtgactcttcagtggaagaaacccacctatgacggtggaagcaagatcactggttatattgttgagaagaaagaattacctgagggccgttggatgaaagccagttttacaaatattattgacactcattttgaagtaactggcctagttgaagatcacagatatgagttccgggttatagcccgaaatgccgcaggagtgtttagtgagccttcagaaagcacaggagcaataacagctagagatgaggtagatccaccacgaataagtatggatccaaaatacaaagacacaatcgtggttcatgctggtgaatcattcaaggttgatgcagatatttatggcaaaccaataccaaccattcagtggataaaaggtgatcaggagctttcaaacacagctcgattagaaataaagagcaccgactttgccaccagtctcagtgtaaaagatgcagtacgtgtcgacagtggaaattacatactgaaggccaaaaatgttgcaggagaaagatcagttactgtgaatgtcaaggttcttgacagaccagggccacctgaaggacctgttgttatctcaggagttacagcagaaaaatgcacactagcttggaaacccccacttcaggatggtgggagtgacatcataaattatattgtggaaaggagagaaaccagccgcttagtttggactgtggttgatgccaatgtgcagactctcagctgcaaggttactaagcttcttgaaggcaatgaatatactttccgtataatggcagtaaacaaatatggtgttggtgaacctcttgaatctgagccagtagttgccaagaatccatttgtagtaccagatgcaccaaaagctccagaagtcacaacagtgaccaaggactcaatgattgttgtatgggaaagaccagcatctgatggtggtagtgaaattcttggatatgttcttgagaaacgggataaagaaggcattagatggacaagatgccataagcgtctgattggagagttgcgcctgagagtaactggactcatagaaaatcacgattatgagttcagagtttctgctgagaatgctgctggacttagtgaaccaagccctccttctgcttaccaaaaggcttgtgatcctatttataaaccaggacccccaaacaaccccaaagtcatagacataaccagatcttcagtattcctttcttggagcaaaccaatatatgatggtggctgtgaaattcaaggatacattgttgaaaaatgtgatgtgagtgttggtgaatggacaatgtgcactccaccaacaggaattaataaaacaaacatagaagtagagaagctgttggaaaagcatgaatacaacttccgtatctgtgctattaataaagctggagttggagaacatgctgacgtccctggacctattatagttgaagaaaaattagaagcaccagacattgatcttgacctagaactaaggaaaatcataaatataagggcaggtggctccttaaggttatttgttcctataaaaggtcgtcctacaccagaagttaaatggggaaaggtggatggtgaaatccgagatgcagctataattgatgtcactagcagtttcacctctcttgttcttgacaatgtcaaccgatatgatagtggaaaatatacgcttacattagaaaacagcagtggaacaaagtctgcctttgttactgtgagagttctggacacgccaagtccacctgttaacctgaaagtcacagaaatcaccaaagactcagtatcaattacatgggaacctcctttgttggatgggggatccaaaataaaaaattacattgttgagaaacgtgaagccacaagaaaatcatatgctgctgttgtaactaactgccataagaattcttggaaaatcgatcagctccaagaaggttgcagttattactttagagtcacagctgagaatgagtatggtattggccttcctgcccagactgctgatccaattaaggttgcagaagtgccacaacctcctggaaaaataactgtggatgatgtcaccagaaacagtgtctctctgagttggacaaaacctgaacatgatggtggcagtaaaatcattcagtatattgtggaaatgcaagctaaacacagtgagaaatggtcagagtgtgctcgagtaaagtctcttcaggcagtaattaccaacctaactcaaggggaagaatatctttttagagttgttgctgtaaatgaaaaggggagaagtgatcctcggtcccttgcagttccaatagttgccaaagatctggtaattgagccagatgtaaaacctgcattcagtagttacagtgtacaggttggccaagatttgaaaatagaagtgccaatttctggacgtcctaagccaaccattacctggactaaagatggtctcccactgaagcagaccacaagaatcaatgttaccgattcactggatctcaccacactcagtattaaagaaactcataaggatgatggtggacaatatggaatcacagttgccaatgttgttggtcagaagacagcatccatcgaaattgtaactctagataaacctgatcctccaaaaggacctgttaaatttgatgacgtcagtgctgaaagtattacattatcttggaaccctccattatatacagggggctgccaaatcaccaactacattgttcagaaaagagatacaaccaccacagtatgggatgttgtttctgctactgttgctagaactacactcaaagtgaccaaactgaaaactggtacagaataccaatttagaatatttgccgaaaacagatatggacaaagctttgccttagagtctgatccaattgtagctcaatatccctacaaagaaccaggccctccaggtacaccatttgccacagccatttccaaagactccatggtcatacagtggcatgaaccagtcaacaatggtggaagccccgtcataggttaccacctggagagaaaagaaagaaacagtattttgtggacaaaggtcaacaaaactattattcatgacacccaattcaaagcacagaatcttgaagaaggcattgaatatgaattcagagtgtatgctgaaaatattgttggtgtaggcaaagcaagcaagaattctgaatgctatgtagccagagatccctgtgacccaccaggaaccccagaaccaataatggttaaaagaaatgaaatcactttacagtggaccaaacctgtgtatgatggtggaagtatgattacaggctacattgtagagaaacgtgatttgcctgatggtcgttggatgaaagctagctttacaaatgtcattgaaactcaatttactgtgtcaggtcttactgaagatcaaagatatgaattcagagtcattgcaaagaatgcagctggtgcaataagtaaaccctctgacagtactggaccaataactgccaaggatgaggttgaactcccaagaatttcaatggatccaaaattcagagacacaattgtggtaaatgctggagaaacattcagacttgaggctgatgtccatggaaagcccctacctaccattgagtggttaagaggagataaggaaattgaagaatctgctagatgtgaaataaagaacacagatttcaaggctttacttattgtaaaagatgcaattagaattgatggtgggcagtatattttaagagcttccaatgttgcaggttctaagtcattcccagtaaatgtaaaagtattagatagaccaggacctccagaagggccagtccaggttactggagtcacttctgaaaaatgctctttaacatggtctccaccacttcaagatggtggcagtgacatttctcactatgttgttgaaaagcgagaaaccagtcgacttgcctggactgttgttgcttcagaagttgtgaccaattctctgaaagttaccaaactcttagaaggtaatgaatatgttttccgtataatggctgtcaacaaatatggtgttggagagcctttggaatctgcaccagtactaatgaaaaatccatttgtgcttcctggaccaccaaaaagcttggaagtcacaaatattgccaaagactccatgaccgtctgttggaaccgtccagatagtgatggtggaagtgagattattggttacattgtagagaaaagagacagaagtggcattcgatggataaaatgtaataaacgccgcattacagatttgcgtctaagagtgacaggattaacagaagatcatgagtatgaattcagggtctctgcagaaaatgctgctggagttggggaaccaagtccagctacagtttattataaagcctgtgatcctgtgttcaaacctggcccacctaccaatgcacacattgtagacaccactaaaaattcaatcacacttgcctggggtaaacccatctatgatggcggcagtgagatcttgggatatgtagtagaaatctgtaaagcagatgaagaagaatggcaaatagttactccacagactggcctgagagtcactcgatttgaaatttcaaaactcactgaacaccaagagtataaaatacgagtctgtgccctcaacaaagttggtttaggtgaggctacatcagttcctggtactgtgaaaccagaagataaacttgaagcacctgaacttgaccttgactccgaattaagaaaaggaattgttgtaagagctggtggatctgccagaattcacattccattcaaaggtcgtccaacgcctgagatcacttggtctcgagaggaaggtgaattcacagataaggtccaaattgaaaagggagtaaactatacccaactatcaatagataactgtgatagaaatgatgctggaaaatacattcttaagttggaaaacagcagtggatcaaagtctgcttttgtaactgtgaaagttcttgacactccaggaccaccacagaatttggcagtcaaagaagtgagaaaagattctgccttcctggtatgggagccacccatcattgatggaggggcaaaggtcaagaactatgtgattgacaaacgtgagtcaaccagaaaagcgtatgctaatgtgagtagtaaatgcagcaaaacaagttttaaagtggaaaaccttacagaaggagccatttattacttcagagtcatggctgaaaatgaatttggagttggtgttccagtggaaactgttgatgccgtgaaagctgctgaacctccttccccaccaggaaaggttacactcactgatgtgtcccagaccagtgcatcacttatgtgggagaaacctgaacatgatggcggtagcagagtcctggggtacgttgttgaaatgcagcccaaaggaactgaaaaatggagcattgtggctgaatccaaagtctgtaatgcagttgttactggtttgagttctggacaagaatatcagttccgtgtcaaggcttataatgagaaaggaaaaagcgatccaagagtgttgggtgttcctgtcatagccaaggacttgactatacagcctagtttaaagttaccatttaacacatatagtatccaagctggagaagatcttaaaatagaaattccagttataggccgaccaagacctaacatttcttgggtcaaagatggtgagcctcttaaacagacaacaagagtaaacgttgaagaaacagctacctcaactgttttgcacattaaagaaggtaacaaagatgactttggaaaatacaccgtaacggcaacaaatagtgcaggcacagcaacagaaaatctcagtgttatcgttttagaaaagcctggacctccagttggcccagttcggtttgatgaagttagtgcagactttgtagtcatatcttgggaacctccagcctatactggtggctgccaaataagcaactacattgtagagaagcgagatacaaccaccaccacttggcacatggtatcagcaacagttgcaagaacaacaattaaaataaccaaactgaaaacaggcacggagtaccagtttagaatttttgctgaaaacaggtatggaaaaagtgccccactggattctaaggcagttattgtacaatatccatttaaagaacctggaccacctggaactccttttgtgacatcaatctcaaaagatcagatgcttgtgcaatggcatgagccagtgaatgatggaggcaccaaaattattggctaccatcttgaacagaaagaaaagaacagtattttatgggtcaagttaaataagacccccattcaggacaccaaattcaaaacaactgggcttgatgagggccttgagtatgagttcaaagtttctgctgaaaatattgttggcattggcaagcctagcaaagtgtcagaatgctttgttgctcgtgatccatgtgacccacctggtcgccctgaagccattgttattacaagaaacaatgtcacactgaaatggaagaaacctgcctatgatggtggtagcaaaataacaggttatattgtagaaaagaaagatctacctgatggccgctggatgaaagccagctttaccaacgtattagaaactgaatttacagtgagtggacttgtagaagaccaaagatatgaatttagagtaattgcaagaaatgcagctggaaactttagtgaaccatctgatagtagtggtgccattactgcaagagatgaaattgatgcaccaaatgcctctctggatccaaaatataaagatgtcatcgttgttcatgcaggagagacttttgttcttgaagccgacatccgtggcaaacctatacctgatgttgtttggtcaaaagatggaaaagaacttgaagaaacagctgctagaatggaaattaaatctactattcagaaaacaactcttgttgtcaaagactgtatacggactgatggaggacaatatattctgaaactcagcaatgttggtggtacaaagtctatacccatcactgtaaaggtacttgacaggccagggcctcctgaagggcctctgaaagttactggagttactgcggaaaaatgttacctggcatggaacccacctttgcaagatggtggtgctaatatttcacattacatcattgaaaagagggagacaagccgactctcttggacccaggtttcaactgaggtacaggcccttaactacaaagttactaaacttcttcctggtaatgagtacattttccgtgtcatggctgtgaataaatatggaattggagagcccttggaatctgggcctgttacggcctgtaatccttataagccaccaggtcctccctcaacacctgaagtctcagcaatcaccaaagattctatggtagtaacatgggcacgcccagtagacgacggaggtaccgaaattgagggctacattcttgaaaaacgagataaggaaggcgttagatggaccaagtgcaacaagaaaacattaacggatctgcggctcagggtaactggtcttaccgaaggccattcctatgaattcagagttgctgctgaaaatgcagctggtgtgggagaacctagtgagccatctgttttctaccgtgcgtgtgatgccttgtatccaccaggtcccccaagcaatccaaaagtgacggacacttccagatcttctgtctccctggcatggagtaagccaatttatgatggtggcgcacctgttaaaggctatgttgtagaggtcaaagaagctgctgcggatgaatggacaacctgcactccaccaacaggattacaaggaaagcagttcacagtgaccaagcttaaagaaaacactgaatataacttccgtatttgtgccatcaattctgaaggtgtaggtgaacctgcaactctacctggctcagtggttgctcaggagaggatagagccaccagaaatagaactcgatgctgatctcagaaaggtggtcgttctgcgtgcaagtgctactttacgcttatttgtcactatcaaaggtcgaccagaacccgaagttaaatgggaaaaggcagaaggcattctcactgacagggctcagatagaggtgaccagctcatttacaatgttggtgattgataatgttaccagatttgacagtggtcggtataatctgacattagaaaataatagtggctccaaaacagcttttgttaacgtcagagttcttgactcaccaagtgcccctgtgaatttgaccataagagaagtgaagaaagactcagtgacgttgtcctgggaaccaccacttattgatggtggagctaagattacaaactacattgtcgaaaaacgagaaactacaagaaaagcctatgctaccattacaaataattgcactaaaactactttcagaattgaaaatctacaagaaggatgttcttactacttccgagtcttggcttccaatgaatatgggattggtttgccagctgaaacaacagaacccgttaaagtgtctgaaccacccctcccacctggaagagtaactcttgttgatgtgacccgtaatacagctacaattaagtgggagaaaccagaaagtgatggtggcagcaaaattactggttatgtggttgaaatgcagactaaagggagtgaaaagtggagcacctgcacacaagttaagactctagaagcaactatatctggcttaactgcaggagaagagtatgtcttcagggtagctgcagttaacgaaaagggaagaagtgatccaagacaacttggagtgccagtaattgcaagggatattgaaataaagccttcagttgagcttcctttccatactttcaatgtaaaggctagagaacaacttaagattgatgtgccattcaaaggaagacctcaagctactgtgaactggagaaaagatggtcagactcttaaagagacaactagagtcaatgtttcttcttcaaagactgtaacatcactatctattaaggaagcttcaaaggaagatgttggaacttatgaattatgtgtttcaaacagtgctggatccataacagttcctattactataattgtccttgacagaccaggacctccaggtcctatacgtattgatgaggttagttgtgacagcataaccatttcttggaatcctccagaatatgatggtggctgccaaattagcaattacattgttgaaaagaaagaaaccacctctacaacatggcacatagtttcacaagcagttgcaagaacatccattaaaatagttcgcctgacaacaggaagtgagtatcagttccgtgtttgtgcagaaaaccgctatggaaagagctcctacagtgaatcttcagctgttgttgcagagtatccattcagtcccccaggtcctcctggtactcctaaagttgtgcatgccacaaaatctaccatgcttgtaacctggcaagtgccagttaatgatggaggaagtcgagtaattggctatcatcttgagtataaagaaagaagcagcattctttggtcaaaagcaaataaaatcctcattgctgatactcaaatgaaagtctccggccttgatgaaggactgatgtatgagtatcgtgtatatgctgaaaatattgctggaattggtaaatgcagtaaatcttgtgaaccagtccctgcaagagatccttgtgaccctcctggacaacctgaagtcacaaatatcacaagaaaatcagtgtcacttaaatggtctaaaccacattatgatggtggagctaagatcacaggatacattgttgaacgcagagaactaccagatggccggtggctgaagtgcaattatactaatatacaagaaacatactttgaagtaactgaacttactgaagatcagcgttatgaattccgggtttttgcaaggaatgctgctgactcagttagtgagccatctgaatccactgggcctattatagttaaagatgatgttgagcctccaagagttatgatggatgtcaagttccgagacgttattgttgtcaaagctggagaggtccttaagataaatgcagacattgcagggcgacctctgccagtaatttcctgggccaaggatggtatagaaattgaagaaagagcaagaacagaaatcatctcaacagacaatcatactttgttaacagttaaagactgtataagacgagacactgggcaatatgtactaacactgaagaatgttgccggcactcggtctgtggccgttaattgcaaagtacttgataagcctggtccaccagcaggaccacttgaaataaatggcctcactgctgagaaatgctctctttcctggggacgtccccaagaagatggtggtgcagatatcgactattacatcgtagaaaaacgtgaaacaagccaccttgcatggacaatatgtgaaggagagttacagatgacatcctgtaaagtaaccaagttactcaaaggcaatgaatatatatttagagtaactggtgttaataaatatggtgttggtgagcccctagagagtgtagctataaaggcactagatccatttacagttccaagtccacccacgtctttggaaattacttctgtgaccaaagaatctatgacactttgctggtcaagacccgagagtgatggaggtagtgaaatatctggatatataattgaaaggcgagagaaaaatagcctaagatgggtgcgtgtaaacaaaaaaccagtttatgatctaagagtgaaatcaacaggacttcgggaaggatgtgaatatgaatatcgtgtttatgcagaaaatgctgctggcctaagtcttccaagtgaaacctctcccttaattagggcagaagatccagtgttcctaccatctcctccatccaaacccaaaattgtggactcaggcaagacaactataactattgcctgggttaagccgctgtttgatggtggggccccgataactggatatactgtagaatacaaaaaatctgatgacactgactggaaaacttccattcagagcttacgagggacagaatatacaataagcggactaacaacaggagctgaatatgttttcagagtaaaatctgtcaataaggttggtgctagtgaccccagtgatagctctgaccctcagatagcaaaggaaagagaagaagaacctttatttgatattgacagtgaaatgaggaagaccttgattgtcaaggctggtgcctcatttaccatgactgtgcctttccgaggaagaccagtacccaatgtcttgtggagtaagccagacactgacctccgtactagagcttatgttgataccacagactcccgtacatcactgaccattgaaaatgccaacagaaatgactctggaaagtacacattaacaattcagaatgttttgagtgctgcttcactgaccttagttgtcaaagttttagataccccaggtcctccaaccaacattactgtgcaagatgtaaccaaagagtctgcagtgttatcctgggatgttcctgaaaacgatggtggagcaccagtgaagaattaccacatagaaaaacgtgaggccagcaagaaagcatgggtctctgtgaccaacaactgtaaccgcctctcctacaaagttaccaatttacaagaaggagctatctattacttcagagtctctggagaaaatgagtttggtgttggtataccagctgaaacaaaggaaggagtaaaaataacag

SEQ ID NO: 20868 - DNA, 99 bp, Homo sapiens
  MAP TO AL049633.3; EXPRESSED IN BRAIN, SIGNAL = 3.2; EXPRESSED IN BONE MARROW, SIGNAL = 3.3; EXPRESSED IN LUNG, SIGNAL = 3.6; EXPRESSED IN HBL100, SIGNAL = 3.5; EXPRESSED IN PLACENTA, SIGNAL = 3.1; EXPRESSED IN FETAL LIVER, SIGNAL = 4.1; EXPRESSED IN ADULT LIVER, SIGNAL =   5; EXPRESSED IN HEART, SIGNAL = 2.9; EXPRESSED IN HELA, SIGNAL = 3.5; EXPRESSED IN BT474, SIGNAL = 3.3; NT HIT: M74231.1, EVALUE 8.30e-01; EST_HUMAN HIT: BE885291.1, EVALUE 1.20e+00; SWISSPROT HIT: Q05893, EVALUE 7.00e+00
caaaggttttgggctcctattttgtgccagcttgcatgccagactctggggagacaaaggttttgagctcctatcttgtgccagtgtgcatgccaggct

SEQ ID NO: 20869 - DNA, 426 bp, Homo sapiens
  MAP TO AC010930.2; EXPRESSED IN BT474, SIGNAL = 1.4; EXPRESSED IN ADULT LIVER, SIGNAL = 1.2; EXPRESSED IN BRAIN, SIGNAL = 1.3; EXPRESSED IN BONE MARROW, SIGNAL = 1.6; EXPRESSED IN LUNG, SIGNAL = 1.3; EXPRESSED IN HELA, SIGNAL = 1.3; EXPRESSED IN PLACENTA, SIGNAL = 1.3; EXPRESSED IN HBL100, SIGNAL = 1.5; EXPRESSED IN HEART, SIGNAL = 1.7; EXPRESSED IN FETAL LIVER, SIGNAL = 1.5; EST_HUMAN HIT: BF674130.1, EVALUE 2.00e-03; NT HIT: gi7305348, EVALUE 6.00e-05; SWISSPROT HIT: P23273, EVALUE 3.00e-20
ctttccggctcactggcatccctggcctggaatccctgcacatctggctctccatcccctttggctccatgtacctggtagctgtgctggggaacataaccatcctggcagtggtaaggatggagtacagcctgcatcagcccatgtacttcttcctgtgcatgttggctgtcattgacttggtcctgtcaacctctaccatgcccaaactactggccatcttctggtttggtgcccacaacattggtgttaatgcctgtttggcccagatgttcttcattcattgctttgccactgttgagtcaggcatcttccttgccatggcttttgatcactatgtggccatctgtgacccactgcatcataccttgttgctcacccatgctgtggtgggtcgtttggggctggctgccctcctccgggggg

SEQ ID NO: 20870 - DNA, 185 bp, Homo sapiens
  MAP TO AF002223.1; EXPRESSED IN PLACENTA, SIGNAL = 1.7; EXPRESSED IN HELA, SIGNAL = 1.7; EXPRESSED IN ADULT LIVER, SIGNAL = 1.6; EXPRESSED IN FETAL LIVER, SIGNAL = 1.8; EXPRESSED IN BRAIN, SIGNAL = 1.5; EXPRESSED IN HEART, SIGNAL = 1.5; EXPRESSED IN BT474, SIGNAL = 1.3; EXPRESSED IN LUNG, SIGNAL =   2; EXPRESSED IN BONE MARROW, SIGNAL = 1.5; EXPRESSED IN HBL100, SIGNAL = 1.6; NT HIT: AJ224979.1, EVALUE 1.00e-100; EST_HUMAN HIT: AW503613.1, EVALUE 1.00e-100; SWISSPROT HIT: Q13613, EVALUE 2.00e-30
gaattgctgataaaatagaatctgggaaaacatctgtggtggtgcattgcagcgacggttgggaccgaacagcccagctcacatctctggctatgctaatgttggacagttactacaggaccattaaaggatttgaaactctcgtagaaaaggagtggataagctttggacacaggtttgcactg

SEQ ID NO: 20871 - DNA, 259 bp, Homo sapiens
  MAP TO AL035088.1; EXPRESSED IN BT474, SIGNAL = 1.3; EXPRESSED IN LUNG, SIGNAL = 1.4; EXPRESSED IN BRAIN, SIGNAL = 1.6; EXPRESSED IN BONE MARROW, SIGNAL = 1.3; EXPRESSED IN HBL100, SIGNAL = 1.2; EXPRESSED IN ADULT LIVER, SIGNAL = 2.5; EXPRESSED IN FETAL LIVER, SIGNAL = 1.4; EXPRESSED IN PLACENTA, SIGNAL = 1.2; EXPRESSED IN HEART, SIGNAL = 1.3; EXPRESSED IN HELA, SIGNAL = 1.4; SWISSPROT HIT: Q13516, EVALUE 1.00e+00; NT HIT: AF029308.1, EVALUE 9.70e+00
aggctcttccagtgtaccctggacccaggctgagaccttttgttcttggcagccactttctgagcacaaaagcagaaaatccagtgaggcaggtctcttggggtctggggctcaccctcatgatggctcccagaattctgggctttctcagccctggattttctgcccttgtgctctacccacctgtttggctcagccaccacatcttggatgctcgttttcttcctggcagaatggtgccaactgtctgtctgcatcg

SEQ ID NO: 20872 - DNA, 118 bp, Homo sapiens
  MAP TO AC010683.2; EXPRESSED IN FETAL LIVER, SIGNAL = 1.3; EXPRESSED IN BT474, SIGNAL = 0.92; EXPRESSED IN ADULT LIVER, SIGNAL =   1; EXPRESSED IN LUNG, SIGNAL = 1.3; EXPRESSED IN BONE MARROW, SIGNAL = 1.2; EXPRESSED IN PLACENTA, SIGNAL = 1.1; EXPRESSED IN HELA, SIGNAL =   1; EXPRESSED IN HBL100, SIGNAL = 1.1; EXPRESSED IN HEART, SIGNAL = 1.2; NT HIT: AF119102.1, EVALUE 2.20e-01; SWISSPROT HIT: Q40588, EVALUE 3.50e-01
cagagtcacacccaggcacatcactgagaaatttcagaacactaggggtaaagggaaaaacaaacacagttccagagagaggggggaaaatcgtatgcagaggaaccagaaagtgaaa

SEQ ID NO: 20873 - DNA, 780 bp, Homo sapiens
  MAP TO AC007228.1; EXPRESSED IN HEART, SIGNAL = 1.1; EXPRESSED IN BT474, SIGNAL = 1.3; EXPRESSED IN FETAL LIVER, SIGNAL = 0.98; NT HIT: AB037817.1, EVALUE 2.00e-31; SWISSPROT HIT: Q99676, EVALUE 5.00e-56; EST_HUMAN HIT: BE396279.1, EVALUE 3.00e-61
acttggagtgtgtgtgggtgaccaaatcattatctttaaaccaggatatttatgaagaaaaattacccccggcaatcataatggaaagacttaaaagctatgaccttgaatgttcaacattagggaaaaactggaaatgtgaagacttgtttgagagggagcttgtaaaccagaagacacattttaggcaagagaccatcactcatatagatactcttattgaaaaaagagatcactctaacaaatctgggacagtttttcatctgaatacattatcttatataaaacagatttttcccatggaagagagaatatttaattttcatacagataagaaaagcttaaaaacacattcagttgtgaaaaaacacaagcaagaccgtggagaaaagaaacttttaaaatgtaatgactgtgagaaaatattcagcaaaatctcaacccttactcttcaccaaagaattcatacaggagagaaaccctatgaatgtattgaatgtggaaaggcctttagccagagtgcccaccttgctcaacatcagagaatacacacaggagaaaaaccttttgaatgtactgaatgtgggaaagccttcagccagaatgctcatcttgttcaacaccagagagttcatactggagagaaaccttatcagtgtaagcagtgtaataaagcattcagccagcttgcacaccttgctcaacatcagagggtccacactggagagaaaccctatgaatgtattgaatgtgggaaggcttttagtgattgctcatccc

SEQ ID NO: 20874 - DNA, 80 bp, Homo sapiens
  MAP TO AL049691.17; EXPRESSED IN PLACENTA, SIGNAL = 1.8; EXPRESSED IN HEART, SIGNAL =   2; EXPRESSED IN LUNG, SIGNAL = 1.7; EXPRESSED IN BRAIN, SIGNAL = 1.8; EXPRESSED IN BONE MARROW, SIGNAL =   2; EXPRESSED IN HBL100, SIGNAL = 3.3; EXPRESSED IN HELA, SIGNAL = 1.8; EXPRESSED IN BT474, SIGNAL = 1.8; EXPRESSED IN ADULT LIVER, SIGNAL = 2.4; EXPRESSED IN FETAL LIVER, SIGNAL = 1.9; EST_HUMAN HIT: AI244885.1, EVALUE 2.40e-01; NT HIT: U91629.1, EVALUE 2.50e+00
ggtccactgcaggggaggtggtagagatgaacaagatggaaggattatctggacactccaagagggacaggggtagggag

SEQ ID NO: 20875 - DNA, 144 bp, Homo sapiens
  MAP TO AC010951.3; EXPRESSED IN HBL100, SIGNAL = 1.2; EXPRESSED IN HEART, SIGNAL = 1.3; EXPRESSED IN FETAL LIVER, SIGNAL = 1.3; EXPRESSED IN ADULT LIVER, SIGNAL = 1.2; EXPRESSED IN LUNG, SIGNAL = 1.5; EXPRESSED IN BRAIN, SIGNAL = 1.1; EXPRESSED IN PLACENTA, SIGNAL = 1.2; EXPRESSED IN BT474, SIGNAL = 1.1; EXPRESSED IN BONE MARROW, SIGNAL = 1.3; EXPRESSED IN HELA, SIGNAL =  11; NT HIT: AF077821.1, EVALUE 7.00e-02; EST_HUMAN HIT: AA380607.1, EVALUE 1.30e+00
ctcccaagttctactctgtgcaggatgagagtgcctcttctctgtaaccatattacacaacccaaggttcagtctgattgcaccaatttgagtgacagtcccatccctgaacaaattgctgtgctggggtgtgggagtggggag

SEQ ID NO: 20876 - DNA, 142 bp, Homo sapiens
  MAP TO AC010732.2; EXPRESSED IN HELA, SIGNAL = 7.7; EXPRESSED IN HBL100, SIGNAL = 8.1; EXPRESSED IN HEART, SIGNAL = 5.9; EXPRESSED IN FETAL LIVER, SIGNAL = 7.8; EXPRESSED IN BONE MARROW, SIGNAL = 6.8; EXPRESSED IN LUNG, SIGNAL = 7.6; EXPRESSED IN BRAIN, SIGNAL = 5.7; EXPRESSED IN PLACENTA, SIGNAL = 6.8; EXPRESSED IN ADULT LIVER, SIGNAL = 6.9; EXPRESSED IN BT474, SIGNAL = 5.6; NT HIT: gi5835331, EVALUE 1.10e+00; EST_HUMAN HIT: BE070255.1, EVALUE 1.30e+00; SWISSPROT HIT: P52385, EVALUE 5.10e+00
agggtctgtgttttctcgtctgtaaaggtggggataatgattgcatgtaggttgctgtaaggataaactggcttgttccatataatgcttgtagagtactgcctgacacagagtaaagctcaataaatgtggttactgttaa

SEQ ID NO: 20877 - DNA, 229 bp, Homo sapiens
  MAP TO AC007095.2; EXPRESSED IN BT474, SIGNAL = 5.2; EXPRESSED IN FETAL LIVER, SIGNAL = 7.3; EXPRESSED IN BRAIN, SIGNAL = 7.1; EXPRESSED IN BONE MARROW, SIGNAL = 6.5; EXPRESSED IN LUNG, SIGNAL =   8; EXPRESSED IN HBL100, SIGNAL = 7.1; EXPRESSED IN HELA, SIGNAL = 7.7; EXPRESSED IN PLACENTA, SIGNAL = 7.7; EXPRESSED IN ADULT LIVER, SIGNAL = 8.6; EXPRESSED IN HEART, SIGNAL = 5.9; EST_HUMAN HIT: N89452.1, EVALUE 3.00e-15; SWISSPROT HIT: P43815, EVALUE 1.30e+00; NT HIT: AF109907.1, EVALUE 8.00e-09
agcatgccacaagtggcttccatgtcagacactggcgtctagacaaagggaacatggtggtgcccaaaaactcagagatgccagcaatcatggagacacaaagggtgttacagctcttgcttggggaatcccaaggtctgagtccccaggaaatgtcagagctcttcactcctatagctcagcgagcaggagtgttacagctctttttgctcccactgtttggcaggtt

SEQ ID NO: 20878 - DNA, 76 bp, Homo sapiens
  MAP TO AC010960.2; EXPRESSED IN BRAIN, SIGNAL =  14; EXPRESSED IN BONE MARROW, SIGNAL =  17; EXPRESSED IN LUNG, SIGNAL =  20; EXPRESSED IN HELA, SIGNAL =  18; EXPRESSED IN PLACENTA, SIGNAL =  16; EXPRESSED IN HBL100, SIGNAL =  18; EXPRESSED IN HEART, SIGNAL =  12; EXPRESSED IN FETAL LIVER, SIGNAL =  20; EXPRESSED IN BT474, SIGNAL =  14; EXPRESSED IN ADULT LIVER, SIGNAL =  18; EST_HUMAN HIT: AV723800.1, EVALUE 2.30e-01; NT HIT: X94768.1, EVALUE 3.20e-02
aatccccctagagaggaacctgacactattaatcaaaaatacaacttcacttagcctttcaccgagcaccttattt

SEQ ID NO: 20879 - DNA, 116 bp, Homo sapiens
  MAP TO AC011281.2; EXPRESSED IN BT474, SIGNAL = 5.3; EXPRESSED IN ADULT LIVER, SIGNAL = 6.1; EXPRESSED IN BRAIN, SIGNAL = 6.4; EXPRESSED IN BONE MARROW, SIGNAL = 5.9; EXPRESSED IN LUNG, SIGNAL = 7.8; EXPRESSED IN HELA, SIGNAL = 6.4; EXPRESSED IN PLACENTA, SIGNAL = 6.6; EXPRESSED IN HBL100, SIGNAL = 6.3; EXPRESSED IN HEART, SIGNAL = 5.1; EXPRESSED IN FETAL LIVER, SIGNAL =   7; NT HIT: U64617.1, EVALUE 1.00e+00; EST_HUMAN HIT: BF529597.1, EVALUE 3.80e-01
tgttgaaattcatctctcttattattgctgttttgaaggtaatgcttcttatcttgctcattcaggtagaattttttgttctttgttttctgaagtcttcctatgatatgtctgtg

SEQ ID NO: 20880 - DNA, 406 bp, Homo sapiens
  MAP TO AL035660.11; EXPRESSED IN HEART, SIGNAL = 0.87; SWISSPROT HIT: P04279, EVALUE 3.00e-72; EST_HUMAN HIT: BE973809.1, EVALUE 0.00e+00; NT HIT: gi11420870, EVALUE 0.00e+00
ggatttggtgcctggatttgagacttgcctgctactagcttttcagtttggctataaatactgcgttgggatacatctttctgcacaccattttctccatagtggagtcgtctttcttccgtacttgaagattggtatgatattttatttgccttttggctatgctcttgctcttgactgggaattgttatctgtttttgagacttgccctgtgctttctcttcagtttggctataaatactgctttgggatacatctttctgcacaccattttctccatagtggagtcgtctttcttctgtacttgaagattggtatgatattttatttgcctttcggccatgctgttgatcttgattgagattttttgtctggtgttgattcttgttatatactaggagctcat

SEQ ID NO: 20881 - DNA, 251 bp, Homo sapiens
  MAP TO AC012067.1; EXPRESSED IN HBL100, SIGNAL = 8.7; EXPRESSED IN HEART, SIGNAL = 9.8; EXPRESSED IN FETAL LIVER, SIGNAL =  13; EXPRESSED IN BT474, SIGNAL = 9.1; EXPRESSED IN ADULT LIVER, SIGNAL =  12; EXPRESSED IN LUNG, SIGNAL =  14; EXPRESSED IN BRAIN, SIGNAL =  11; EXPRESSED IN PLACENTA, SIGNAL =  14; EXPRESSED IN HELA, SIGNAL = 9.8; EXPRESSED IN BONE MARROW, SIGNAL = 9.3; NT HIT: U68491.1, EVALUE 2.00e-03; EST_HUMAN HIT: AL119497.1, EVALUE 6.10e-01
gtcaggacattctaggcaatttaaaaacaaagaaagaagtaaaagcagaagaaggaagaggaggaggaggaggaggaaaaggaggaggaggaagaggagggcgaaaaggaaggaaggaagaagaagaggaagaagaagaagaagaggaagaggaagaggaagaagaagaagaggaagaagaaagaggaggaggaggaggtggaaagaaaaaatcagctcatgaatgatatcaagacaggaaacgggcattt

SEQ ID NO: 20882 - DNA, 231 bp, Homo sapiens
  MAP TO AL035534.1; EXPRESSED IN BONE MARROW, SIGNAL = 0.64; EXPRESSED IN FETAL LIVER, SIGNAL = 0.61; EXPRESSED IN ADULT LIVER, SIGNAL = 0.75; EXPRESSED IN HEART, SIGNAL = 0.86; EST_HUMAN HIT: BF061862.1, EVALUE 8.00e-72; NT HIT: AL163247.2, EVALUE 1.00e-127; SWISSPROT HIT: P75575, EVALUE 7.90e-01
ttcagtcaggcctctgttagggttatgaggcatcttccccaagtgacggcatagttgcttcagataatgctcagatgagttctgacggcgtggaacagtggtcttaacactctcatcttctgtaagaatacaaatttctacttttctagaaagatatttagcaccattgtcaagatttcttaaaatgttttttatacccaagcctttcatctttatatctaagcatctatc

SEQ ID NO: 20883 - DNA, 85 bp, Homo sapiens
  MAP TO AC012071.2; EXPRESSED IN HELA, SIGNAL = 3.9; EXPRESSED IN HBL100, SIGNAL =   3; EXPRESSED IN HEART, SIGNAL = 4.1; EXPRESSED IN FETAL LIVER, SIGNAL = 4.3; EXPRESSED IN BRAIN, SIGNAL = 4.2; EXPRESSED IN LUNG, SIGNAL = 4.3; EXPRESSED IN BONE MARROW, SIGNAL = 4.1; EXPRESSED IN PLACENTA, SIGNAL =   4; EXPRESSED IN ADULT LIVER, SIGNAL = 3.5; EXPRESSED IN BT474, SIGNAL =   5; EST_HUMAN HIT: BF370290.1, EVALUE 1.00e+00; NT HIT: gi8393868, EVALUE 6.90e-01
atagctcccaatgtgtcctcttctttactttctggatgcagctccctaattcagcttatcttctctctagcttgaaggcagcagt

SEQ ID NO: 20884 - DNA, 1360 bp, Homo sapiens
  MAP TO AL031058.1; EXPRESSED IN LUNG, SIGNAL = 1.1; EXPRESSED IN HELA, SIGNAL =   5; EXPRESSED IN HBL100, SIGNAL = 1.3; EXPRESSED IN PLACENTA, SIGNAL = 8.1; EXPRESSED IN HEART, SIGNAL = 8.2; EXPRESSED IN ADULT LIVER, SIGNAL = 1.1; EXPRESSED IN BT474, SIGNAL =  14; EXPRESSED IN FETAL LIVER, SIGNAL = 1.6; NT HIT: gi11418893, EVALUE 0.00e+00; EST_HUMAN HIT: AU140155.1, EVALUE 0.00e+00; SWISSPROT HIT: P15924, EVALUE 0.00e+00
gcatctaataggattcaggaatcaaagaatcagtgtactcaggtggtacaggaaagagagagccttctggtgaaaatcaaagtcctggagcaagacaaggcaaggctgcagaggctggaggatgagctgaatcgtgcaaaatcaactctagaggcagaaaccagggtgaaacagcgcctggagtgtgagaaacagcaaattcagaatgacctgaatcagtggaagactcaatattcccgcaaggaggaggctattaggaagatagaatcggaaagagaaaagagtgagagagagaagaacagtcttaggagtgagatcgaaagactccaagcagagatcaagagaattgaagagaggtgcaggcgtaagctggaggattctaccagggagacacagtcacagttagaaacagaacgctcccgatatcagagggagattgataaactcagacagcgcccatatgggtcccatcgagagacccagactgagtgtgagtggaccgttgacacctccaagctggtgtttgatgggctgaggaagaaggtgacagcaatgcagctctatgagtgtcagctgatcgacaaaacaaccttggacaaactattgaaggggaagaagtcagtggaagaagttgcttctgaaatccagccattccttcggggtgcaggatctatcgctggagcatctgcttctcctaaggaaaaatactctttggtagaggccaagagaaagaaattaatcagcccagaatccacagtcatgcttctggaggcccaggcagctacaggtggtataattgatccccatcggaatgagaagctgactgtcgacagtgccatagctcgggacctcattgacttcgatgaccgtcagcagatatatgcagcagaaaaagctatcactggttttgatgatccattttcaggcaagacagtatctgtttcagaagccatcaagaaaaatttgattgatagagaaaccggaatgcgcctgctggaagcccagattgcttcagggggtgtagtagaccctgtgaacagtgtctttttgccaaaagatgtcgccttggcccgggggctgattgatagagatttgtatcgatccctgaatgatccccgagatagtcagaaaaactttgtggatccagtcaccaaaaagaaggtcagttacgtgcagctgaaggaacggtgcagaatcgaaccacatactggtctgctcttgctttcagtacagaagagaagcatgtccttccaaggaatcagacaacctgtgaccgtcactgagctagtagattctggtatattgagaccgtccactgtcaatgaactggaatctggtcagatttcttatgacgaggttg

SEQ ID NO: 20885 - DNA, 195 bp, Homo sapiens
  MAP TO AC011330.4; EXPRESSED IN BT474, SIGNAL = 6.4; EXPRESSED IN ADULT LIVER, SIGNAL = 9.4; EXPRESSED IN BRAIN, SIGNAL = 6.2; EXPRESSED IN BONE MARROW, SIGNAL = 6.9; EXPRESSED IN LUNG, SIGNAL =  13; EXPRESSED IN HELA, SIGNAL = 8.4; EXPRESSED IN PLACENTA, SIGNAL = 9.9; EXPRESSED IN HBL100, SIGNAL = 5.2; EXPRESSED IN HEART, SIGNAL = 6.7; EXPRESSED IN FETAL LIVER, SIGNAL = 8.7; NT HIT: AF257329.1, EVALUE 9.80e-02; EST_HUMAN HIT: BE246772.1, EVALUE 4.70e-01; SWISSPROT HIT: Q91049, EVALUE 1.60e+00
tttcctacggcagagtggtcggcatgtgagccacctggacttcgttcatctgacagcgctgggttatactctctgtggactgcggccagaggagctccagcacatcagcagttgggagttcaggtcatttgtgaaggggctgagggtggtggtgctgaggtaaaggtggacttactggggaaagaaggatcatga

SEQ ID NO: 20886 - DNA, 155 bp, Homo sapiens
  MAP TO AC012073.1; EXPRESSED IN FETAL LIVER, SIGNAL = 4.8; EXPRESSED IN BT474, SIGNAL = 3.4; EXPRESSED IN ADULT LIVER, SIGNAL = 4.6; EXPRESSED IN BRAIN, SIGNAL = 3.7; EXPRESSED IN BONE MARROW, SIGNAL = 4.3; EXPRESSED IN LUNG, SIGNAL = 5.3; EXPRESSED IN HELA, SIGNAL = 4.3; EXPRESSED IN PLACENTA, SIGNAL = 4.3; EXPRESSED IN HBL100, SIGNAL = 3.5; EXPRESSED IN HEART, SIGNAL = 3.9; EST_HUMAN HIT: AA323254.1, EVALUE 1.00e-65; SWISSPROT HIT: P21932, EVALUE 3.00e-20; NT HIT: AF033861.1, EVALUE 8.00e-70
ctgacgttctcgtgacggtacatgtacatggtgttgaactgctgctggtccttctggctctcgtctttcttcatgtctttcagcatctcgtcagccacgtgcttgggcaggatggaaagcatgaggttctcctgtgaggggcaggagagggtcag

SEQ ID NO: 20887 - DNA, 90 bp, Homo sapiens
  MAP TO AC007460.1; EXPRESSED IN BONE MARROW, SIGNAL = 1.3; EXPRESSED IN LUNG, SIGNAL = 1.6; EXPRESSED IN PLACENTA, SIGNAL = 1.4; EXPRESSED IN HBL100, SIGNAL = 1.5; EXPRESSED IN HELA, SIGNAL = 1.5; EXPRESSED IN HEART, SIGNAL = 1.3; EXPRESSED IN ADULT LIVER, SIGNAL = 1.5; EXPRESSED IN BT474, SIGNAL = 1.7; EXPRESSED IN FETAL LIVER, SIGNAL = 1.4; EXPRESSED IN BRAIN, SIGNAL = 1.2; NT HIT: AL163201.2, EVALUE 1.00e-05; SWISSPROT HIT: P08547, EVALUE 3.00e-05; EST_HUMAN HIT: BE674914.1, EVALUE 4.00e-22
tcttgtataccttgttggatttgatttgctaatactttattgaggatatttgcatctgtgttcataagagatatttgtctgcagttttcc

SEQ ID NO: 20888 - DNA, 227 bp, Homo sapiens
  MAP TO AC009721.9; EXPRESSED IN FETAL LIVER, SIGNAL = 8.7; EXPRESSED IN LUNG, SIGNAL = 8.9; EXPRESSED IN BONE MARROW, SIGNAL = 9.8; EXPRESSED IN PLACENTA, SIGNAL =  11; EXPRESSED IN HELA, SIGNAL = 8.7; EXPRESSED IN BT474, SIGNAL = 7.5; EXPRESSED IN ADULT LIVER, SIGNAL = 8.6; EXPRESSED IN BRAIN, SIGNAL = 9.1; EXPRESSED IN HEART, SIGNAL = 7.3; EXPRESSED IN HBL100, SIGNAL = 9.6; EST_HUMAN HIT: BE541441.1, EVALUE 1.00e-89; SWISSPROT HIT: P25167, EVALUE 3.00e-18; NT HIT: gi11436209, EVALUE 7.00e-90
cctgtgatgccggatgtaacatagtctttccccaagtagttataaccatggcgaacgaggtcctcacacacatccttcactttactgcctccaaacgcagtgccgtagtggaatctgccgtccagcacaccggccttgccagccagcagctcaatgagcttccccacctgcaggatgtgaacaaattaagtgagcacctccctgtggcacaagcactctctctgctt

SEQ ID NO: 20889 - DNA, 147 bp, Homo sapiens
  MAP TO AC007163.2; EXPRESSED IN BONE MARROW, SIGNAL = 1.5; EXPRESSED IN ADULT LIVER, SIGNAL =   2; EXPRESSED IN BT474, SIGNAL = 1.3; EXPRESSED IN BRAIN, SIGNAL = 1.4; EXPRESSED IN HEART, SIGNAL = 1.5; EXPRESSED IN HELA, SIGNAL = 1.5; EXPRESSED IN HBL100, SIGNAL = 1.5; EXPRESSED IN FETAL LIVER, SIGNAL =   1; NT HIT: AF000977.1, EVALUE 1.30e+00; SWISSPROT HIT: P48034, EVALUE 5.00e-11; EST_HUMAN HIT: BF238271.1, EVALUE 1.30e-01
cttgatcgtgaagattacaggttccagatcttcataggtgagctttatcttttcagctgctcgttttgcctgtacgtctgtttctgcaaccacagcacagatgatctggcccacacagactacctgtggaaagtacacacatgaagc

SEQ ID NO: 20890 - DNA, 160 bp, Homo sapiens
  MAP TO AC007489.2; EXPRESSED IN PLACENTA, SIGNAL = 9.1; EXPRESSED IN HELA, SIGNAL = 8.6; EXPRESSED IN HBL100, SIGNAL = 7.6; EXPRESSED IN HEART, SIGNAL = 6.6; EXPRESSED IN ADULT LIVER, SIGNAL =  12; EXPRESSED IN BT474, SIGNAL = 6.9; EXPRESSED IN FETAL LIVER, SIGNAL = 9.2; EXPRESSED IN BRAIN, SIGNAL = 7.4; EXPRESSED IN BONE MARROW, SIGNAL = 6.9; EXPRESSED IN LUNG, SIGNAL =  11; EST_HUMAN HIT: AI218707.1, EVALUE 3.70e-01; SWISSPROT HIT: P30320, EVALUE 8.60e+00; NT HIT: X75495.1, EVALUE 1.40e+00
aagtcacatgtcaacacttctactacaaagcctctgagaaccctgattctcactactctgctgccctctagtggaaacctgacaaatcctcgccttcatttcaatttatttatttcaatggaagcatcgaatggaaaactctttgcatcacaccttgatg

SEQ ID NO: 20891 - DNA, 622 bp, Homo sapiens
  MAP TO AP000219.1; EXPRESSED IN LUNG, SIGNAL = 0.82; EXPRESSED IN HELA, SIGNAL = 0.92; EXPRESSED IN BRAIN, SIGNAL =   1; EXPRESSED IN HEART, SIGNAL = 0.88; EXPRESSED IN BONE MARROW, SIGNAL = 0.87; EXPRESSED IN PLACENTA, SIGNAL = 0.86; EXPRESSED IN BT474, SIGNAL = 0.85; EXPRESSED IN ADULT LIVER, SIGNAL = 0.81; EXPRESSED IN FETAL LIVER, SIGNAL = 0.72; EXPRESSED IN HBL100, SIGNAL = 0.71; SWISSPROT HIT: Q99102, EVALUE 7.00e-15; EST_HUMAN HIT: AW875698.1, EVALUE 9.20e+00; NT HIT: AL163303.2, EVALUE 0.00e+00
ggcctttgtcttcattccagaatcagtgggatgccaggcgggcatagcgtccttgctccgcccgggccatgcggagctgggtcccatgcagctccatgaccgggggctccgacacctcttttctgctcctgctgggtctaggtgtaattccagtgctgggggaagaagttaccctcagataaacggtcggtgtaattccagtgctgggggaagaagttaccctcagataaaccgtcggtgtaattccagtgctgggggaagaagttaccctcagataaaccgtcggtgtaattccagtgctgggggaagaagttactctcagataaaccgtcggtgtaattccagtgctggaggaagaagttactctcagataaacggtcggtgtaattccagtgctgggggaagaagttaccctcagataaaccattggtgtaattccagtgctgggggaagaagttaccctcagataaaccgtcggtgtaattccagtgctggaggaagaagttaccctcagataaaccactggtgtaattccagtgctggaggaagaagttactctcagataaactgtcggtgtaattccagtgctggaggaagaagatagtctcagatcatccatcgg

SEQ ID NO: 20892 - DNA, 212 bp, Homo sapiens
  MAP TO AC012111.1; EXPRESSED IN FETAL LIVER, SIGNAL = 1.2; EXPRESSED IN BT474, SIGNAL =   1; EXPRESSED IN ADULT LIVER, SIGNAL = 1.1; EXPRESSED IN BRAIN, SIGNAL = 1.1; EXPRESSED IN BONE MARROW, SIGNAL = 1.2; EXPRESSED IN LUNG, SIGNAL = 1.1; EXPRESSED IN HELA, SIGNAL =   1; EXPRESSED IN PLACENTA, SIGNAL = 0.89; EXPRESSED IN HBL100, SIGNAL =   1; EXPRESSED IN HEART, SIGNAL = 1.1; EST_HUMAN HIT: BE834943.1, EVALUE 1.90e-01; NT HIT: AB028026.1, EVALUE 4.30e-01; SWISSPROT HIT: P27902, EVALUE 2.60e+00
ttgagacacattgaatgtcacacccactcccaaggggattttcttttgcagactttctagaagcattttattaagcaccgccacgtgccaaaggcagtgcgaagccctccagtgcactgagttgacagacaactccacgcccgtgggtggggctttgttctcccacgcccgtgagccagtaaagggcagcctagggcacagtggtgggaagg

SEQ ID NO: 20893 - DNA, 189 bp, Homo sapiens
  MAP TO AF127936.1; EXPRESSED IN PLACENTA, SIGNAL = 1.7; EXPRESSED IN HELA, SIGNAL = 1.8; EXPRESSED IN HEART, SIGNAL = 1.5; EXPRESSED IN ADULT LIVER, SIGNAL = 1.8; EXPRESSED IN FETAL LIVER, SIGNAL = 1.8; EXPRESSED IN HBL100, SIGNAL = 1.6; EXPRESSED IN BT474, SIGNAL = 1.5; EXPRESSED IN BRAIN, SIGNAL = 1.6; EXPRESSED IN LUNG, SIGNAL = 1.8; EXPRESSED IN BONE MARROW, SIGNAL = 1.8; SWISSPROT HIT: P46406, EVALUE 5.00e-11; NT HIT: AL163207.2, EVALUE 1.00e-102
tggcactgttgaggctgagaacaagaagcttgtccacaatgggaaggccatctctattttccagaagccatatgctgcctacatcaaatgggttgatgctgtgctgaatatgttgtggagtccattggtcctggggctcacttaaatggtggagccaaaggggtcatcacatctgtcccttctactgat

SEQ ID NO: 20894 - DNA, 155 bp, Homo sapiens
  MAP TO AP000199.1; EXPRESSED IN HELA, SIGNAL = 0.99; EXPRESSED IN BRAIN, SIGNAL = 1.2; EXPRESSED IN HEART, SIGNAL = 1.1; EXPRESSED IN PLACENTA, SIGNAL = 0.9; EXPRESSED IN BONE MARROW, SIGNAL = 1.1; EXPRESSED IN BT474, SIGNAL = 0.88; EXPRESSED IN ADULT LIVER, SIGNAL = 1.3; EXPRESSED IN LUNG, SIGNAL = 1.3; EXPRESSED IN FETAL LIVER, SIGNAL = 0.66; EXPRESSED IN HBL100, SIGNAL = 0.83; NT HIT: U16125.1, EVALUE 2.00e-82; SWISSPROT HIT: P39086, EVALUE 8.00e-26; EST_HUMAN HIT: W26913.1, EVALUE 4.00e-50
atgacagatttgaaggatattgcctagacctgttgaaagaattgtcaaacatcctgggtttcatttatgatgttaaactagttcccgatggcaaatatggggcccagaatgacaaaggggagtggaacgggatggttaaagaactcatagatcac

SEQ ID NO: 20895 - DNA, 184 bp, Homo sapiens
  MAP TO AC010857.2; EXPRESSED IN HEART, SIGNAL = 1.3; EXPRESSED IN ADULT LIVER, SIGNAL = 1.9; EXPRESSED IN FETAL LIVER, SIGNAL = 1.3; EXPRESSED IN BONE MARROW, SIGNAL = 1.8; EXPRESSED IN LUNG, SIGNAL = 1.4; EXPRESSED IN BRAIN, SIGNAL = 1.9; EXPRESSED IN PLACENTA, SIGNAL = 1.3; EXPRESSED IN HELA, SIGNAL = 1.4; EXPRESSED IN HBL100, SIGNAL = 1.5; EXPRESSED IN BT474, SIGNAL = 1.5; EST_HUMAN HIT: BE378707.1, EVALUE 4.40e-01; SWISSPROT HIT: P32941, EVALUE 3.80e+00; NT HIT: AB037363.1, EVALUE 1.70e+00
tacccctgcatccaatatagaaattccaggggaatcttccatctgtgctttccttttccaaatgatggccacttcctctgtttcaactgtttctctatttgttggtttgttaagaatcaataaatcacactttctatatttgaacactccttccatcattgactacctctgtgacttcggagaa

SEQ ID NO: 20896 - DNA, 329 bp, Homo sapiens
  MAP TO AC010136.2; EXPRESSED IN HEART, SIGNAL = 2.7; EXPRESSED IN FETAL LIVER, SIGNAL = 5.5; EXPRESSED IN ADULT LIVER, SIGNAL = 1.6; EXPRESSED IN LUNG, SIGNAL = 6.3; EXPRESSED IN BONE MARROW, SIGNAL = 1.2; EXPRESSED IN HELA, SIGNAL = 1.4; EXPRESSED IN PLACENTA, SIGNAL = 2.6; EXPRESSED IN BRAIN, SIGNAL = 1.3; NT HIT: AF225896.1, EVALUE 3.00e-93; SWISSPROT HIT: Q04205, EVALUE 1.00e-21; EST_HUMAN HIT: AU133689.1, EVALUE 2.00e-64
aacaaagagaagagggcatgctggcacaggggctggtggcagggataccagtcatgtagaggtggtgagcagatggaagcatagagggcacaggacagtgggcacgaggatccatcctcaccaggtagttgcctccatgtttggacttgagcatctgcgccacctcacggaggttgctccggaagttctcctcattggctgtgctggggaaggagacagcgatgatcctctctgtgacgtacaccaggtccagctcacagctgtcctccatggtccggctcacactcatgtttctagggagacagcaggcagcggagggtccatatcag

SEQ ID NO: 20897 - DNA, 185 bp, Homo sapiens
  MAP TO AC007189.6; EXPRESSED IN PLACENTA, SIGNAL = 2.3; EXPRESSED IN ADULT LIVER, SIGNAL = 2.5; EXPRESSED IN BT474, SIGNAL =   2; EXPRESSED IN FETAL LIVER, SIGNAL = 2.7; EXPRESSED IN BONE MARROW, SIGNAL = 1.9; EXPRESSED IN LUNG, SIGNAL = 2.4; EXPRESSED IN BRAIN, SIGNAL = 2.1; EXPRESSED IN HELA, SIGNAL = 2.1; EXPRESSED IN HBL100, SIGNAL = 2.3; EXPRESSED IN HEART, SIGNAL = 1.9; NT HIT: gi4503792, EVALUE 1.00e-100; SWISSPROT HIT: P23945, EVALUE 1.00e-30
gatatttcaagaacaaggatccattccctgcctagctatggcttagaaaatcttaagaagctgagggccaggtcgacttacaacttaaaaaagctgcctactctggaaaagcttgtcgccctcatggaagccagcctcacctatcccagccattgctgtgcctttgcaaactggagacggcaaat

SEQ ID NO: 20898 - DNA, 271 bp, Homo sapiens; identical to SEQ ID NO: 18472
  MAP TO AC010885.2; EXPRESSED IN HELA, SIGNAL = 3.5; EXPRESSED IN BRAIN, SIGNAL = 3.7; EXPRESSED IN HBL100, SIGNAL = 3.6; EXPRESSED IN HEART, SIGNAL = 3.2; EXPRESSED IN FETAL LIVER, SIGNAL = 3.7; EXPRESSED IN ADULT LIVER, SIGNAL = 4.5; EXPRESSED IN BONE MARROW, SIGNAL =   4; EXPRESSED IN LUNG, SIGNAL = 4.3; EXPRESSED IN PLACENTA, SIGNAL = 4.3; EXPRESSED IN BT474, SIGNAL = 3.2; EST_HUMAN HIT: AI188024.1, EVALUE 1.70e-01; SWISSPROT HIT: P15169, EVALUE 2.50e+00; NT HIT: AE001710.1, EVALUE 1.40e-01

SEQ ID NO: 20899 - DNA, 183 bp, Homo sapiens
  MAP TO AC007502.2; EXPRESSED IN BT474, SIGNAL = 0.94; EXPRESSED IN BRAIN, SIGNAL = 0.99; EXPRESSED IN BONE MARROW, SIGNAL = 1.2; EXPRESSED IN LUNG, SIGNAL = 1.2; EXPRESSED IN FETAL LIVER, SIGNAL = 1.4; EXPRESSED IN ADULT LIVER, SIGNAL = 1.5; EXPRESSED IN PLACENTA, SIGNAL = 1.1; EXPRESSED IN HEART, SIGNAL = 1.3; EXPRESSED IN HELA, SIGNAL = 1.1; EXPRESSED IN HBL100, SIGNAL = 0.98; EST_HUMAN HIT: AA780515.1, EVALUE 4.30e-01
agatactgccaagtgtttgcatctacgcatctgcttacatcatctagttgtgtgcttacatcatctacccatgtgcttacatcatctacccatgtgcttgcatcatctatccatgtgcttacatcatctacccaagtgcttacatcatctacccatgtgcttacatcacctacccatgtgctt

SEQ ID NO: 20900 - DNA, 82 bp, Homo sapiens
  MAP TO AC008069.2; EXPRESSED IN BT474, SIGNAL =   1; EXPRESSED IN BONE MARROW, SIGNAL = 0.77; EXPRESSED IN HBL100, SIGNAL = 2.3; EXPRESSED IN FETAL LIVER, SIGNAL = 0.69; EXPRESSED IN BRAIN, SIGNAL = 0.74; EXPRESSED IN HEART, SIGNAL = 0.83; EXPRESSED IN PLACENTA, SIGNAL = 0.77; NT HIT: D83135.1, EVALUE 5.60e-01
cagacttttgaaaacatctatcctgactgtgttgctgaacagctcattaaaataagaataataataataataaaggacattc

SEQ ID NO: 20901 - DNA, 199 bp, Homo sapiens
  MAP TO AC009225.1; EXPRESSED IN BT474, SIGNAL = 0.66; EXPRESSED IN FETAL LIVER, SIGNAL = 0.64; EXPRESSED IN HELA, SIGNAL = 0.91; EXPRESSED IN BRAIN, SIGNAL = 1.2; EXPRESSED IN HEART, SIGNAL = 1.2; EXPRESSED IN PLACENTA, SIGNAL = 0.81; EXPRESSED IN BONE MARROW, SIGNAL = 0.93; EXPRESSED IN HBL100, SIGNAL = 0.69; EXPRESSED IN LUNG, SIGNAL = 0.88; EXPRESSED IN ADULT LIVER, SIGNAL = 0.93; NT HIT: gi11430579, EVALUE 4.00e-88; EST_HUMAN HIT: BE168853.1, EVALUE 1.20e-01; SWISSPROT HIT: O43184, EVALUE 5.00e-04
tgagtacgtacgagatgaggtgcacagcatcagcatgctgcttaatgcgctgccggtattttgagaactcatggagcatctgcacagggttggtggtgatgtcaatctgatccttctcagtccaggtctctacagccaccaggacaaccctggtgttgagctgctccttgtaaatctgagggtatacaacaggacaggt

SEQ ID NO: 20902 - DNA, 90 bp, Homo sapiens
  MAP TO AP000179.1; EXPRESSED IN LUNG, SIGNAL =   1; EXPRESSED IN HELA, SIGNAL = 1.3; EXPRESSED IN HEART, SIGNAL = 1.2; EXPRESSED IN BT474, SIGNAL = 0.99; EXPRESSED IN FETAL LIVER, SIGNAL = 0.96; EXPRESSED IN ADULT LIVER, SIGNAL =   1; EXPRESSED IN BRAIN, SIGNAL = 1.1; EXPRESSED IN PLACENTA, SIGNAL = 0.85; EXPRESSED IN BONE MARROW, SIGNAL = 1.1; EXPRESSED IN HBL100, SIGNAL = 1.2; EST_HUMAN HIT: BF367309.1, EVALUE 8.00e-11; NT HIT: AF231919.1, EVALUE 7.00e-44
actcaacagaaatctttatatacccttccacaacatcatacacatcttctcgtggtagcttcttggcagcagacacaaacgcttccaagc

SEQ ID NO: 20903 - DNA, 253 bp, Homo sapiens
  MAP TO AF045448.1; EXPRESSED IN BT474, SIGNAL = 4.5; EXPRESSED IN BONE MARROW, SIGNAL = 4.2; EXPRESSED IN LUNG, SIGNAL = 4.5; EXPRESSED IN HBL100, SIGNAL = 3.3; EXPRESSED IN HELA, SIGNAL = 2.7; EXPRESSED IN ADULT LIVER, SIGNAL = 5.3; EXPRESSED IN FETAL LIVER, SIGNAL = 3.9; EXPRESSED IN BRAIN, SIGNAL = 4.7; EXPRESSED IN PLACENTA, SIGNAL = 4.2; EXPRESSED IN HEART, SIGNAL =   3; SWISSPROT HIT: P17974, EVALUE 3.90e+00; NT HIT: AL163279.2, EVALUE 9.00e-09
aacactggcagccagatttatctcccactttccatcacccccacctccactaccatcaccaccaccaacaccaacatcaccaccactaccatcaccaccaccatcacccacctcaccaccactaccaccatcaccaccatcactgtcaccaccaccaccatcaccaccaccatcatctccaccatcaccaccacaatcaccacctctaccactccaccaccaccatcaccaccatgaccattaccactaccac

SEQ ID NO: 20904 - DNA, 154 bp, Homo sapiens
  MAP TO AP000114.1; EXPRESSED IN LUNG, SIGNAL = 1.6; EXPRESSED IN HELA, SIGNAL = 0.76; EXPRESSED IN BRAIN, SIGNAL = 0.9; EXPRESSED IN HEART, SIGNAL = 0.81; EXPRESSED IN PLACENTA, SIGNAL = 0.83; EXPRESSED IN BONE MARROW, SIGNAL = 0.75; EXPRESSED IN BT474, SIGNAL = 0.71; EXPRESSED IN ADULT LIVER, SIGNAL = 0.96; EXPRESSED IN FETAL LIVER, SIGNAL = 0.77; EXPRESSED IN HBL100, SIGNAL = 0.84; NT HIT: gi8923432, EVALUE 8.00e-82; EST_HUMAN HIT: AI678113.1, EVALUE 1.00e-81; SWISSPROT HIT: O87663, EVALUE 1.30e+00
caattacactatcaggaaaatactggctttgtagtttctgcttttgatattccatcacttgttcagcagcacggtctgccctaaattgcctataatgcttctctcgttgagttggagtcccaaaaccaataccttcaaaacttaaataatgtcg

SEQ ID NO: 20905 - DNA, 157 bp, Homo sapiens
  MAP TO AC007111.1; EXPRESSED IN HBL100, SIGNAL = 3.7; EXPRESSED IN HELA, SIGNAL = 3.1; EXPRESSED IN PLACENTA, SIGNAL = 2.2; EXPRESSED IN HEART, SIGNAL = 2.2; EXPRESSED IN ADULT LIVER, SIGNAL = 2.3; EXPRESSED IN BT474, SIGNAL = 2.3; EXPRESSED IN FETAL LIVER, SIGNAL = 2.4; EXPRESSED IN BONE MARROW, SIGNAL = 2.3; EXPRESSED IN BRAIN, SIGNAL =   2; EXPRESSED IN LUNG, SIGNAL = 1.7; NT HIT: Z25822.1, EVALUE 1.00e-83; EST_HUMAN HIT: BE299112.1, EVALUE 3.00e-67; SWISSPROT HIT: P42126, EVALUE 1.00e-17
cgaggtcagaatgacaccgcggaagctcttgtcattctccagcttctccaggctgatgaccagctccgtcagaaactccaggctcaggctgttcactggggggttcttgaatttcatcacagcgacccctaatttaaagaatgagaagagaaagctc

SEQ ID NO: 20906 - DNA, 145 bp, Homo sapiens
  MAP TO AC008038.1; EXPRESSED IN FETAL LIVER, SIGNAL = 0.58; EXPRESSED IN HBL100, SIGNAL =  13; EXPRESSED IN HEART, SIGNAL = 0.82; SWISSPROT HIT: Q37371, EVALUE 6.70e+00; EST_HUMAN HIT: AU119006.1, EVALUE 3.10e-02
aatgtctctcacatattcctggaagaaatccaaagtgacaaaattcaacttgagtactttgagaatgacagtaacaaacaaaaacaggactgtacagaaatgtgcaaaagacacaaggaagttgaataatattaattctatgatt

SEQ ID NO: 20907 - DNA, 88 bp, Homo sapiens
  MAP TO AF121782.1; EXPRESSED IN HEART, SIGNAL = 1.7; EXPRESSED IN BT474, SIGNAL = 1.9; EXPRESSED IN BONE MARROW, SIGNAL = 1.8; EXPRESSED IN PLACENTA, SIGNAL = 3.5; EXPRESSED IN HBL100, SIGNAL = 1.9; EXPRESSED IN HELA, SIGNAL = 2.2; EXPRESSED IN ADULT LIVER, SIGNAL = 2.1; EXPRESSED IN FETAL LIVER, SIGNAL = 1.9; EXPRESSED IN BRAIN, SIGNAL = 1.9; EXPRESSED IN LUNG, SIGNAL = 3.6; SWISSPROT HIT: O08550, EVALUE 9.60e+00; NT HIT: AL163280.2, EVALUE 1.00e-42; EST_HUMAN HIT: BF591249.1, EVALUE 2.00e-20
atcaggagcacagcagatactctgccggatctggaggaatggaagtcagcggcgggtctgcgatggtggcaaacagcagtggtggacg

SEQ ID NO: 20908 - DNA, 99 bp, Homo sapiens
  MAP TO AC009305.1; EXPRESSED IN FETAL LIVER, SIGNAL = 0.78; EXPRESSED IN ADULT LIVER, SIGNAL =   1; EXPRESSED IN HEART, SIGNAL = 0.8; NT HIT: AJ271735.1, EVALUE 1.80e-01; EST_HUMAN HIT: AI444613.1, EVALUE 8.50e-01; SWISSPROT HIT: Q01851, EVALUE 9.20e+00
gaggatgtacgaatgagtagtgatgatgaggtcagagaggtacatgcattggtcgtgggcagggcttgggatcccatgctacggcattcatattgtgaa

SEQ ID NO: 20909 - DNA, 112 bp, Homo sapiens
  MAP TO AP000108.1; EXPRESSED IN PLACENTA, SIGNAL = 1.1; EXPRESSED IN BT474, SIGNAL =   1; EXPRESSED IN BONE MARROW, SIGNAL = 1.3; EXPRESSED IN HBL100, SIGNAL = 0.92; EXPRESSED IN FETAL LIVER, SIGNAL = 1.1; EXPRESSED IN LUNG, SIGNAL = 1.1; EXPRESSED IN HELA, SIGNAL = 1.2; EXPRESSED IN ADULT LIVER, SIGNAL = 1.1; EXPRESSED IN BRAIN, SIGNAL = 0.98; EXPRESSED IN HEART, SIGNAL = 0.99; NT HIT: AL163248.2, EVALUE 6.00e-08; SWISSPROT HIT: Q28113, EVALUE 1.80e+00
ctggtgtgggggacagaccctgtggtggccccacggtccgcacctcctggtattcacacccttgtgtgctgccctccccttgagtgtgggcagaccctgtgacttgcttcat

SEQ ID NO: 20910 - DNA, 87 bp, Homo sapiens
  MAP TO AC009721.9; EXPRESSED IN BT474, SIGNAL = 4.5; EXPRESSED IN FETAL LIVER, SIGNAL = 5.3; EXPRESSED IN BRAIN, SIGNAL = 4.1; EXPRESSED IN BONE MARROW, SIGNAL = 4.3; EXPRESSED IN LUNG, SIGNAL = 5.9; EXPRESSED IN PLACENTA, SIGNAL = 4.7; EXPRESSED IN HBL100, SIGNAL = 4.2; EXPRESSED IN HELA, SIGNAL = 5.5; EXPRESSED IN HEART, SIGNAL = 4.5; EXPRESSED IN ADULT LIVER, SIGNAL = 5.8; NT HIT: gi4506496, EVALUE 4.00e-42; SWISSPROT HIT: P48378, EVALUE 3.00e-04
ttcttctcgcagaaatccaggtaatgcatatagagggcactgcgagggatgcagaccccctctgcaatctcatagttctcctccagc

SEQ ID NO: 20911 - DNA, 129 bp, Homo sapiens
  MAP TO AC008940.2; EXPRESSED IN BRAIN, SIGNAL = 2.8; EXPRESSED IN BONE MARROW, SIGNAL = 2.5; EXPRESSED IN LUNG, SIGNAL = 4.8; EXPRESSED IN PLACENTA, SIGNAL = 4.2; EXPRESSED IN HELA, SIGNAL = 3.5; EXPRESSED IN HBL100, SIGNAL = 3.5; EXPRESSED IN HEART, SIGNAL = 3.4; EXPRESSED IN BT474, SIGNAL = 4.3; EXPRESSED IN ADULT LIVER, SIGNAL =   2; EXPRESSED IN FETAL LIVER, SIGNAL = 3.3; NT HIT: AL161572.2, EVALUE 6.20e-02; SWISSPROT HIT: P41935, EVALUE 1.00e+00; EST_HUMAN HIT: BE774629.1, EVALUE 4.30e-01
atgggtcagtaccctcttggccaccttctaccacttgggcctgctgatctttagccacactgatgctctcgaatggttctcttgcttggtcccctgtaggacaggtctcataaccaagtttatgaaatg

SEQ ID NO: 20912 - DNA, 159 bp, Homo sapiens
  MAP TO AF064860.1; EXPRESSED IN PLACENTA, SIGNAL = 0.92; EXPRESSED IN HEART, SIGNAL = 0.94; EXPRESSED IN FETAL LIVER, SIGNAL = 0.97; EXPRESSED IN ADULT LIVER, SIGNAL = 1.2; EXPRESSED IN BONE MARROW, SIGNAL = 1.1; EXPRESSED IN BRAIN, SIGNAL = 0.96; EXPRESSED IN LUNG, SIGNAL = 1.2; EXPRESSED IN HBL100, SIGNAL = 1.1; EXPRESSED IN HELA, SIGNAL =   1; SWISSPROT HIT: O29712, EVALUE 4.40e-01; EST_HUMAN HIT: BF133399.1, EVALUE 1.40e-01; NT HIT: AL163280.2, EVALUE 9.00e-85
atggaggccggagtacagtgggttgaggttaattacgtgatggatgaagtggtgcgagtggtgagtacaggctgtctgttgcagaagcttgatttggaagggaaagaaaataagaggctgacaaggagacgccacgtaattgaggtagggtctgttgaa

SEQ ID NO: 20913 - DNA, 218 bp, Homo sapiens
  MAP TO AC007198.6; EXPRESSED IN LUNG, SIGNAL =  10; EXPRESSED IN HELA, SIGNAL =  10; EXPRESSED IN PLACENTA, SIGNAL =  11; EXPRESSED IN HEART, SIGNAL = 7.9; EXPRESSED IN ADULT LIVER, SIGNAL =  11; EXPRESSED IN BT474, SIGNAL = 7.7; EXPRESSED IN BONE MARROW, SIGNAL = 9.4; EXPRESSED IN HBL100, SIGNAL =  10; EXPRESSED IN FETAL LIVER, SIGNAL =  12; EXPRESSED IN BRAIN, SIGNAL = 8.8; NT HIT: AF157066.1, EVALUE 1.10e-01; SWISSPROT HIT: Q50543, EVALUE 9.40e-01
gttccctcaataccatgctccaggggatgacaacttcttccttctatcttctcatcccctgtggcctttggttgagattttgtcacacatgcatgccccctggccccagggccttctgtctcttcttcagactttacaatctttacattcatttcaatccccttaccaacacttctggaaaccccagcgttgccactgtgctcaaagctgagggtcct

SEQ ID NO: 20914 - DNA, 230 bp, Homo sapiens
  MAP TO AC007738.2; EXPRESSED IN FETAL LIVER, SIGNAL =  21; EXPRESSED IN ADULT LIVER, SIGNAL =  32; EXPRESSED IN BT474, SIGNAL =  20; EXPRESSED IN BRAIN, SIGNAL =  24; EXPRESSED IN BONE MARROW, SIGNAL =  20; EXPRESSED IN LUNG, SIGNAL =  24; EXPRESSED IN HELA, SIGNAL =  22; EXPRESSED IN PLACENTA, SIGNAL =  25; EXPRESSED IN HBL100, SIGNAL =  22; EXPRESSED IN HEART, SIGNAL =  21; SWISSPROT HIT: Q28689, EVALUE 1.40e+00; NT HIT: gi7706239, EVALUE 1.00e-127; EST_HUMAN HIT: AW500892.1, EVALUE 1.00e-127
ctggctagatccatgcagctatcagtgaggttggtagaagaattgaagtactctctgctggcagccaaaaccaagtcaatactcttttcgtagctgaccctgtagtggggtttccctttatgggctataccagctggaggattttctgaacaagcactgcagtgcatcatctgtccagccaggtggatgttttcaaggcgactagagcacagaaggctttctgtaaatat

SEQ ID NO: 20915 - DNA, 150 bp, Homo sapiens
  MAP TO AC007321.1; EXPRESSED IN PLACENTA, SIGNAL = 6.3; EXPRESSED IN HBL100, SIGNAL = 6.1; EXPRESSED IN HEART, SIGNAL =   5; EXPRESSED IN BT474, SIGNAL = 6.2; EXPRESSED IN BRAIN, SIGNAL = 5.6; EXPRESSED IN ADULT LIVER, SIGNAL = 6.6; EXPRESSED IN FETAL LIVER, SIGNAL = 4.3; EXPRESSED IN LUNG, SIGNAL = 6.2; EXPRESSED IN BONE MARROW, SIGNAL = 5.2; EXPRESSED IN HELA, SIGNAL = 6.6; EST_HUMAN HIT: AA045358.1, EVALUE 6.00e-19; NT HIT: U45983.1, EVALUE 2.00e-11; SWISSPROT HIT: O86132, EVALUE 3.90e+00
gtcaaaatggttccaaatcaaggtaagcatgatagtattgatgaccaagatgatgtcgatactgcaggaaaagtggctatagatgacatggtgaaaatgtatgatgggcttgttgaaggagtagagcatcatgcattcataacagaacaa

SEQ ID NO: 20916 - DNA, 156 bp, Homo sapiens
  MAP TO AF153342.2; EXPRESSED IN FETAL LIVER, SIGNAL = 1.1; EXPRESSED IN LUNG, SIGNAL = 1.1; EXPRESSED IN BONE MARROW, SIGNAL = 1.4; EXPRESSED IN HEART, SIGNAL = 1.1; EXPRESSED IN HELA, SIGNAL = 1.7; EXPRESSED IN PLACENTA, SIGNAL = 1.1; EXPRESSED IN ADULT LIVER, SIGNAL = 1.5; SWISSPROT HIT: Q28611, EVALUE 1.70e+00; NT HIT: AF266218.1, EVALUE 5.60e+00
gttagtagactactggaggacctacgtggtcaagtggatagagagaaatgaggcctgtccgcacagcgagtgccgggccgatctggttcacagccatgacatctctgaccccagggtccacacttttaacaacaggtttgattaaagacgttttaa

SEQ ID NO: 20917 - DNA, 457 bp, Homo sapiens
  MAP TO AF091512.1; EXPRESSED IN ADULT LIVER, SIGNAL = 1.5; EXPRESSED IN FETAL LIVER, SIGNAL = 1.2; EXPRESSED IN BONE MARROW, SIGNAL = 1.3; EXPRESSED IN HEART, SIGNAL = 1.1; EXPRESSED IN HBL100, SIGNAL =   2; NT HIT: AJ003145.1, EVALUE 0.00e+00; EST_HUMAN HIT: AA938905.1, EVALUE 6.00e-21; SWISSPROT HIT: O43749, EVALUE 2.00e-69
catgtacctggccactgtcctggggaacctgctcatcatcctggccataagcatagactcccgcctgcacacccccatgtacttcttcctcagcaacatgtcctttgtggacaactgcttctccaccaccgtccccaagatgctggccaatcacatactcaggactcaaaccatctccttctctggctgtctcatgcagatgtattttatcagtgagcttgctgacatggacaatttcctcctggctgtgatggcctatgaccgctttgtcgccgtgtgccgccccttacattacacagcaaagatgacccatcagctctgtgccctgctggtcactggatcatgggtggttgccaactcgagtgctctgctgcacaccctgctgatggctcgactctcattctgtgcagacaacaccatcccccacatcttctgcgatgtgactcccctcctgaaa

SEQ ID NO: 20918 - DNA, 117 bp, Homo sapiens
  MAP TO AC007335.2; EXPRESSED IN PLACENTA, SIGNAL = 6.9; EXPRESSED IN HBL100, SIGNAL = 6.1; EXPRESSED IN HEART, SIGNAL = 5.9; EXPRESSED IN FETAL LIVER, SIGNAL = 8.4; EXPRESSED IN ADULT LIVER, SIGNAL =  12; EXPRESSED IN BT474, SIGNAL = 6.1; EXPRESSED IN BRAIN, SIGNAL = 6.4; EXPRESSED IN BONE MARROW, SIGNAL = 6.2; EXPRESSED IN LUNG, SIGNAL =   7; EXPRESSED IN HELA, SIGNAL = 7.6
ctcctcctggtcttttccctgctccttctcttcctcctcttcctcctcctccttgtcttcctccttctcctcctcctccatgtcctcatccatctcattctccttctcctctttctc

SEQ ID NO: 20919 - DNA, 176 bp, Homo sapiens
  MAP TO AC009646.2; EXPRESSED IN FETAL LIVER, SIGNAL = 2.3; EXPRESSED IN BONE MARROW, SIGNAL = 2.2; EXPRESSED IN BT474, SIGNAL = 1.8; EXPRESSED IN BRAIN, SIGNAL = 1.7; EXPRESSED IN LUNG, SIGNAL = 2.4; EXPRESSED IN PLACENTA, SIGNAL = 2.6; EXPRESSED IN HEART, SIGNAL = 1.9; EXPRESSED IN HELA, SIGNAL = 2.3; EXPRESSED IN HBL100, SIGNAL = 2.1; EXPRESSED IN ADULT LIVER, SIGNAL = 2.6; EST_HUMAN HIT: AA444120.1, EVALUE 4.20e-01; SWISSPROT HIT: Q01293, EVALUE 1.30e+00
gatattttcccctctctgcctctcagagagctaccccttcaaacttctctacaacctccaaatctccttttcctctagaatttgtttgttcacccaccaaggaaattcctggaatgcaagcatcactgatgtctaaattatcgagtaaagcaacatctttggagattgataggaag

SEQ ID NO: 20920 - DNA, 116 bp, Homo sapiens
  MAP TO AC008015.5; EXPRESSED IN HELA, SIGNAL = 2.8; EXPRESSED IN PLACENTA, SIGNAL = 2.7; EXPRESSED IN HBL100, SIGNAL = 2.2; EXPRESSED IN HEART, SIGNAL =   2; EXPRESSED IN BT474, SIGNAL = 2.8; EXPRESSED IN BRAIN, SIGNAL = 2.1; EXPRESSED IN ADULT LIVER, SIGNAL = 2.9; EXPRESSED IN FETAL LIVER, SIGNAL = 2.6; EXPRESSED IN LUNG, SIGNAL = 2.2; EXPRESSED IN BONE MARROW, SIGNAL = 2.3; NT HIT: AF117340.1, EVALUE 2.20e-01; EST_HUMAN HIT: BE075691.1, EVALUE 2.60e-01; SWISSPROT HIT: Q63475, EVALUE 2.30e+00
acattgctcccgctgacccagggtccaatgggcccagttgtttgggctctcatctgggaagctgggatggcagtggtgttgcccagccacttcaccactccatacatcacagctgc

SEQ ID NO: 20921 - DNA, 162 bp, Homo sapiens
  MAP TO AJ011930.1; EXPRESSED IN BT474, SIGNAL = 4.7; EXPRESSED IN FETAL LIVER, SIGNAL =   6; EXPRESSED IN BONE MARROW, SIGNAL = 5.6; EXPRESSED IN LUNG, SIGNAL = 6.2; EXPRESSED IN HELA, SIGNAL = 6.3; EXPRESSED IN HEART, SIGNAL = 5.8; EXPRESSED IN ADULT LIVER, SIGNAL = 6.6; EXPRESSED IN BRAIN, SIGNAL = 5.2; EXPRESSED IN PLACENTA, SIGNAL = 5.4; EXPRESSED IN HBL100, SIGNAL = 5.4; SWISSPROT HIT: P97594, EVALUE 2.60e-01; EST_HUMAN HIT: BE541908.1, EVALUE 2.20e+00; NT HIT: AL163300.2, EVALUE 1.00e-86
ctgtccagccgtcttaaggacacagtcaagaatatgaacaaagatagtgtttgcaatggttttcatggtagaaaagacctgactgccacagggaagactgatagggcctctgaggtggctctgaagtggggggccactcagacgcctgaatgccaactggag

SEQ ID NO: 20922 - DNA, 122 bp, Homo sapiens
  MAP TO AJ229041.1; EXPRESSED IN PLACENTA, SIGNAL = 4.4; EXPRESSED IN HEART, SIGNAL = 3.4; EXPRESSED IN BT474, SIGNAL = 4.2; EXPRESSED IN BONE MARROW, SIGNAL = 3.8; EXPRESSED IN BRAIN, SIGNAL = 3.3; EXPRESSED IN LUNG, SIGNAL = 3.3; EXPRESSED IN HELA, SIGNAL =   4; EXPRESSED IN HBL100, SIGNAL = 3.3; EXPRESSED IN ADULT LIVER, SIGNAL = 3.8; EXPRESSED IN FETAL LIVER, SIGNAL = 3.6; EST_HUMAN HIT: AA913789.1, EVALUE 1.60e+00; SWISSPROT HIT: Q10607, EVALUE 6.80e+00; NT HIT: AJ229041.1, EVALUE 9.00e-63
cctgtttcaggcccggagtcagccattactctgggatgtcctgttcctttgttttgggaaacgatatttggagcaccaagagaccctgtttccaccatatttatcatcattcttagatttat

SEQ ID NO: 20923 - DNA, 211 bp, Homo sapiens
  MAP TO Z83826.12; EXPRESSED IN LUNG, SIGNAL = 0.68; EXPRESSED IN BT474, SIGNAL = 0.73; EXPRESSED IN BONE MARROW, SIGNAL = 0.86; EXPRESSED IN HBL100, SIGNAL = 0.96; EXPRESSED IN FETAL LIVER, SIGNAL = 1.3; EXPRESSED IN HELA, SIGNAL = 1.3; EXPRESSED IN ADULT LIVER, SIGNAL = 3.1; EXPRESSED IN HEART, SIGNAL = 1.1; NT HIT: gi11422454, EVALUE 1.00e-115; SWISSPROT HIT: O77700, EVALUE 9.50e-01; EST_HUMAN HIT: BE883279.1, EVALUE 1.00e-109
aaacgactgctcaaaaaataaactttcagttaaatgttcctttaatcttttttcctcttcttccttttgttgttcttttgctgatgggagaagagtagcaacaacctcttttcttcccaaagccttcctttggctttgctcggaaacttggagacggaatttgtctattacaccatagtgacaggatcgaacatctcgatgacgaatcaca

SEQ ID NO: 20924 - DNA, 150 bp, Homo sapiens
  MAP TO AC007939.1; EXPRESSED IN FETAL LIVER, SIGNAL = 0.75; EXPRESSED IN LUNG, SIGNAL = 0.68; EXPRESSED IN PLACENTA, SIGNAL = 0.87; EXPRESSED IN BT474, SIGNAL = 0.72; EXPRESSED IN BONE MARROW, SIGNAL = 0.71; EXPRESSED IN HBL100, SIGNAL = 1.1; EXPRESSED IN HEART, SIGNAL = 0.9; NT HIT: gi11968054, EVALUE 1.00e-74; EST_HUMAN HIT: AW955777.1, EVALUE 2.00e-74; SWISSPROT HIT: P81406, EVALUE 3.00e+00
  unsure 113
gataaagcaagtttaggtccaatagaagactttagagaactgattaagtaccttgaagaatatgaacgtgactggtacattggtttggtatctgatgaaaagtggaaggaagncaattttacaagaaaagccatacttgttttctctggg

SEQ ID NO: 20925 - DNA, 102 bp, Homo sapiens
  MAP TO AL049837.3; EXPRESSED IN BONE MARROW, SIGNAL = 1.1; EXPRESSED IN LUNG, SIGNAL =   1; EXPRESSED IN ADULT LIVER, SIGNAL = 0.91; EXPRESSED IN PLACENTA, SIGNAL = 1.1; EXPRESSED IN BT474, SIGNAL = 1.1; EXPRESSED IN HBL100, SIGNAL =   1; EXPRESSED IN FETAL LIVER, SIGNAL = 1.1; EXPRESSED IN HELA, SIGNAL = 1.1; EXPRESSED IN BRAIN, SIGNAL = 1.4; EXPRESSED IN HEART, SIGNAL = 3.1; NT HIT: AL163249.2, EVALUE 6.00e-23; EST_HUMAN HIT: AV729792.1, EVALUE 2.00e-21
aacccctcaaagtcttccatgaggcttagaatcaacttcttccaaactcctgtaattgttgacattttgaccttctcccatgaatcacaaatgttcttaatc

SEQ ID NO: 20926 - DNA, 164 bp, Homo sapiens
  MAP TO AL031005.1; EXPRESSED IN HBL100, SIGNAL =   3; EXPRESSED IN BT474, SIGNAL =   3; EXPRESSED IN BRAIN, SIGNAL = 2.7; EXPRESSED IN HELA, SIGNAL = 3.4; EXPRESSED IN HEART, SIGNAL = 2.6; EXPRESSED IN PLACENTA, SIGNAL =   3; EXPRESSED IN ADULT LIVER, SIGNAL = 3.4; EXPRESSED IN FETAL LIVER, SIGNAL = 3.1; EXPRESSED IN LUNG, SIGNAL = 3.5; EXPRESSED IN BONE MARROW, SIGNAL = 3.3; NT HIT: X91929.1, EVALUE 9.00e-88; EST_HUMAN HIT: AI133414.1, EVALUE 4.00e-78; SWISSPROT HIT: P42892, EVALUE 5.00e-23
catctgtcggtggtgttgatgagagtggagatctgctcaaggtattccttgtcatagaccacaataggctcggattcattgatctccacggggtagaagatggtgttgagaaaaggcaaccagttgatggcgggtgccaaggtctgcaagggaaaaggacagtg

SEQ ID NO: 20927 - DNA, 345 bp, Homo sapiens
  MAP TO AC007347.2; EXPRESSED IN LUNG, SIGNAL = 1.9; EXPRESSED IN HELA, SIGNAL = 2.2; EXPRESSED IN PLACENTA, SIGNAL = 1.9; EXPRESSED IN HBL100, SIGNAL = 1.8; EXPRESSED IN HEART, SIGNAL = 1.6; EXPRESSED IN ADULT LIVER, SIGNAL = 2.5; EXPRESSED IN BT474, SIGNAL =   2; EXPRESSED IN BRAIN, SIGNAL = 1.7; EXPRESSED IN BONE MARROW, SIGNAL =   2; EXPRESSED IN FETAL LIVER, SIGNAL =   2; EST_HUMAN HIT: H19343.1, EVALUE 2.00e-17; NT HIT: AL163283.2, EVALUE 2.00e-07
gagttactttcagcaagtcacttgtttagactctagtctcctcatctataaggcgggaataatattaacacagctgacacttgagcaacacaggtttacactgtgcaggtccacttatacgtggatctttcaaaataaaagctgcaccaagtatgcctgcctctcctgcctccccttccacctcttctgcctctgccacctccaagacagcaagacccacccctccactccctcctcctcctcctcctcctcttcagcctactcaaagtggagacaatgaggatgaagacctttaagatgatccacttccacttaatgaatagtaaatacattttctcttcttcg

SEQ ID NO: 20928 - DNA, 208 bp, Homo sapiens
  MAP TO AC010092.2; EXPRESSED IN HELA, SIGNAL = 1.3; EXPRESSED IN ADULT LIVER, SIGNAL = 1.5; EXPRESSED IN BRAIN, SIGNAL = 1.1; EXPRESSED IN LUNG, SIGNAL = 1.7; EXPRESSED IN BONE MARROW, SIGNAL = 1.1; EXPRESSED IN PLACENTA, SIGNAL = 1.5; EXPRESSED IN HEART, SIGNAL = 1.3; EXPRESSED IN HBL100, SIGNAL = 1.3; EXPRESSED IN BT474, SIGNAL = 1.3; EXPRESSED IN FETAL LIVER, SIGNAL = 1.6; SWISSPROT HIT: P02719, EVALUE 4.80e+00; NT HIT: AJ289880.1, EVALUE 3.00e-11; EST_HUMAN HIT: AI971577.1, EVALUE 4.00e-27
acagaacatcatgaaagtctggaaggattacaccactgaagatgtcatcattgttttagaaaaagccatgaaagccatcaagcctgaaagagtacattgctgcaagagaaaaccgtgtccagttgttgcatatgactttgcaggatttatgacagaggcagtcaaggaaatcatgaaagagactgtggatatggcaaagaaggtgggg

SEQ ID NO: 20929 - DNA, 207 bp, Homo sapiens
  MAP TO AC007353.1; EXPRESSED IN BRAIN, SIGNAL = 3.3; EXPRESSED IN LUNG, SIGNAL = 3.6; EXPRESSED IN HELA, SIGNAL = 3.4; EXPRESSED IN PLACENTA, SIGNAL = 4.6; EXPRESSED IN ADULT LIVER, SIGNAL = 4.8; EXPRESSED IN FETAL LIVER, SIGNAL =   4; EXPRESSED IN BT474, SIGNAL = 2.9; EXPRESSED IN BONE MARROW, SIGNAL =   3; EXPRESSED IN HEART, SIGNAL = 2.5; EXPRESSED IN HBL100, SIGNAL = 2.9; NT HIT: U89918.1, EVALUE 7.00e-09; SWISSPROT HIT: P00931, EVALUE 9.50e-01; EST_HUMAN HIT: BE622434.1, EVALUE 6.00e-20
gttgaaaaagaaactaaaagtcctccactgctttgcaaagcagtgaaatccaggagacctgtgatgcccaccatagaggtcctttcatggcttgcactgggtgcagcaagtggcacaagtctcaggcccctggagttcaatagtcatcactttggaaagcttagtgaacttccgaggtgagtcaaaggccatttatcaaaacccatc

SEQ ID NO: 20930 - DNA, 430 bp, Homo sapiens
  MAP TO AC010872.3; EXPRESSED IN FETAL LIVER, SIGNAL =  18; EXPRESSED IN BT474, SIGNAL =   4; EXPRESSED IN ADULT LIVER, SIGNAL =  12; EXPRESSED IN BRAIN, SIGNAL = 4.1; EXPRESSED IN LUNG, SIGNAL = 4.7; EXPRESSED IN BONE MARROW, SIGNAL = 2.2; EXPRESSED IN PLACENTA, SIGNAL =   5; EXPRESSED IN HEART, SIGNAL = 7.8; EXPRESSED IN HELA, SIGNAL = 2.8; EXPRESSED IN HBL100, SIGNAL = 2.2; EST_HUMAN HIT: AV648601.1, EVALUE 0.00e+00; SWISSPROT HIT: P04114, EVALUE 9.00e-66; NT HIT: M19828.1, EVALUE 0.00e+00
gcagtacagagaacttaatggaggatctcaatggtctgctcaggcacgatgatggtggcaactcaaagtctgcgatcttgttggctactgcatttagatccaaagcagcaatgccatctgaaacactttttggaagcgtgaactgggacacagttaactgagattcaggcacggttatctcaaaaaagggaatcaaggagtcttctggttgagaatattttgttaacacatcaacttcagggaattttacctcggggagtgttggtaggttgagggcaaatgatgaagttctcagcttcttatagatttgtatttctctgaagtcaagtttgcacgatggaacctgaagatctgtaaatgggacatggaacgtaggcatgacaagaactgaatttagatcatttagtttcagcccaggaataatgaattt

SEQ ID NO: 20931 - DNA, 206 bp, Homo sapiens
  MAP TO AC008132.26; EXPRESSED IN HELA, SIGNAL =   3; EXPRESSED IN PLACENTA, SIGNAL = 3.8; EXPRESSED IN HBL100, SIGNAL = 2.8; EXPRESSED IN HEART, SIGNAL = 2.6; EXPRESSED IN FETAL LIVER, SIGNAL = 2.8; EXPRESSED IN ADULT LIVER, SIGNAL = 3.5; EXPRESSED IN BT474, SIGNAL = 3.9; EXPRESSED IN BRAIN, SIGNAL = 2.9; EXPRESSED IN BONE MARROW, SIGNAL = 2.5; EXPRESSED IN LUNG, SIGNAL = 3.1; SWISSPROT HIT: P47810, EVALUE 5.50e-01; NT HIT: AJ249207.1, EVALUE 4.10e-01
atcacaagcttgggtttcactctgggcttgctcttgggaaccccccaggggcatggctctgaccgagatgttttcctccagcctgttgcccagtccccattcctcggaccctcagcttcacctccagtgtcatcggcagggtgagctggacgcctacgggtctgagaaggcgcccgggttcccagcatcggctggccaccctctgc

SEQ ID NO: 20932 - DNA, 137 bp, Homo sapiens
  MAP TO AC006269.8; EXPRESSED IN BT474, SIGNAL = 0.68; EXPRESSED IN BONE MARROW, SIGNAL = 0.73; EXPRESSED IN HBL100, SIGNAL = 1.1; EXPRESSED IN FETAL LIVER, SIGNAL = 0.64; EXPRESSED IN PLACENTA, SIGNAL = 0.72; EXPRESSED IN BRAIN, SIGNAL = 0.79; EXPRESSED IN HEART, SIGNAL = 0.79; NT HIT: AJ001017.2, EVALUE 1.20e+00
tcctcactcagcatactgaaatggaagaatgctatcctctctttaggttctgtggtattcatgcttttctctgtactactgatggtcacaaagttagcctaaagggaagtgcggaatatgggcatatgtctatatat

SEQ ID NO: 20933 - DNA, 181 bp, Homo sapiens
  MAP TO AL021332.1; EXPRESSED IN FETAL LIVER, SIGNAL = 1.5; EXPRESSED IN BONE MARROW, SIGNAL = 1.4; EXPRESSED IN LUNG, SIGNAL = 1.3; EXPRESSED IN HELA, SIGNAL = 1.5; EXPRESSED IN HEART, SIGNAL = 1.5; EXPRESSED IN BT474, SIGNAL = 1.2; EXPRESSED IN ADULT LIVER, SIGNAL = 1.4; EXPRESSED IN BRAIN, SIGNAL =   1; EXPRESSED IN PLACENTA, SIGNAL = 1.3; EXPRESSED IN HBL100, SIGNAL = 1.1; EST_HUMAN HIT: R22756.1, EVALUE 1.00e-05; NT HIT: AF223391.1, EVALUE 4.00e-10; SWISSPROT HIT: O33770, EVALUE 4.90e+00
gtgagttcttgtgagacctggttggttaaaagtgtgtggcacctttcccatttctctcatggtcctgctctcaccatttgatgtgccagctcccgctttgctttctgccatgactgcaaggttcctgaggtcctcaccagaagcacatgctgcagctatgctgatacagcctgcacaagca

SEQ ID NO: 20934 - DNA, 90 bp, Homo sapiens
  MAP TO AL031116.1; EXPRESSED IN BONE MARROW, SIGNAL = 1.8; EXPRESSED IN PLACENTA, SIGNAL = 2.1; EXPRESSED IN HBL100, SIGNAL = 1.8; EXPRESSED IN BT474, SIGNAL = 1.9; EXPRESSED IN LUNG, SIGNAL = 1.9; EXPRESSED IN BRAIN, SIGNAL = 2.5; EXPRESSED IN HEART, SIGNAL =   2; EXPRESSED IN HELA, SIGNAL = 1.6; EXPRESSED IN ADULT LIVER, SIGNAL = 2.2; EXPRESSED IN FETAL LIVER, SIGNAL = 1.9; EST_HUMAN HIT: AA432133.1, EVALUE 2.00e-05
gaaaactagcaggttcaagatcaaagaagagctgatgtatcagtttgagtctacagacagaaacaaaagacctatttcccagctcaaatg

SEQ ID NO: 20935 - DNA, 111 bp, Homo sapiens
  MAP TO AC010136.2; EXPRESSED IN LUNG, SIGNAL =   4; EXPRESSED IN PLACENTA, SIGNAL = 3.3; EXPRESSED IN HELA, SIGNAL =   3; EXPRESSED IN ADULT LIVER, SIGNAL = 3.7; EXPRESSED IN BRAIN, SIGNAL =   3; EXPRESSED IN BONE MARROW, SIGNAL = 3.4; EXPRESSED IN HEART, SIGNAL = 3.3; EXPRESSED IN HBL100, SIGNAL = 3.1; EXPRESSED IN BT474, SIGNAL = 3.6; EXPRESSED IN FETAL LIVER, SIGNAL = 3.6; SWISSPROT HIT: Q09746, EVALUE 2.70e-01; NT HIT: gi11321629, EVALUE 6.10e-02; EST_HUMAN HIT: BE878950.1, EVALUE 9.00e-02
aggatctggaggcccccaagacacaccgcttcaaggtgaagaccttcaagaaggtgaagccctgtgggatctgccgccaggtcatcacccaggaaggctgcacctgcaaag

SEQ ID NO: 20936 - DNA, 128 bp, Homo sapiens
  MAP TO AC010888.2; EXPRESSED IN HELA, SIGNAL = 1.9; EXPRESSED IN ADULT LIVER, SIGNAL = 2.7; EXPRESSED IN BRAIN, SIGNAL = 1.6; EXPRESSED IN LUNG, SIGNAL = 2.6; EXPRESSED IN BONE MARROW, SIGNAL = 2.4; EXPRESSED IN PLACENTA, SIGNAL = 2.5; EXPRESSED IN HEART, SIGNAL =   2; EXPRESSED IN HBL100, SIGNAL = 2.1; EXPRESSED IN BT474, SIGNAL =   2; EXPRESSED IN FETAL LIVER, SIGNAL =   2; NT HIT: AJ229042.1, EVALUE 3.00e-29; EST_HUMAN HIT: BE064630.1, EVALUE 5.00e-19; SWISSPROT HIT: P04196, EVALUE 1.80e+00
ctttctctgaggagaacaaccatgcactgcctgaggcaacagtgatggcctcccctgaggcagttgccatgccagacaatgctgattctcctcaggacccaccacaacagccctgtttgcttctagac

SEQ ID NO: 20937 - DNA, 268 bp, Homo sapiens
  MAP TO AC008496.2; EXPRESSED IN HEART, SIGNAL = 9.7; EXPRESSED IN BT474, SIGNAL = 2.2; EXPRESSED IN BRAIN, SIGNAL = 2.3; EXPRESSED IN LUNG, SIGNAL =   2; EXPRESSED IN HBL100, SIGNAL = 2.2; EXPRESSED IN HELA, SIGNAL = 2.2; EXPRESSED IN PLACENTA, SIGNAL = 2.3; EXPRESSED IN ADULT LIVER, SIGNAL = 2.3; EXPRESSED IN FETAL LIVER, SIGNAL = 2.6; EXPRESSED IN BONE MARROW, SIGNAL = 1.9; EST_HUMAN HIT: AV660719.1, EVALUE 1.00e-129; SWISSPROT HIT: Q02084, EVALUE 3.10e-02; NT HIT: AJ250188.1, EVALUE 7.00e-44
agaatccgggggctctatccccaggtgcaaagtacattttccaggtttctccagggcaaaggcagggtggacaccctcattaaacctgtgcctgatgatgaagagcaactgctcgctctctgcgttgatgaagataagtctctggttgttgtagtccagcaggatgcccactctggctggacgctcagtcacatgaacatcactcacaataccactgtagaaaaatgtgtatctgaaatgaaagcgaatgggaaacataaaactctgg

SEQ ID NO: 20938 - DNA, 128 bp, Homo sapiens
  MAP TO AC007857.1; EXPRESSED IN HELA, SIGNAL = 0.64; EXPRESSED IN BT474, SIGNAL = 0.87; EXPRESSED IN BONE MARROW, SIGNAL = 0.83; EXPRESSED IN FETAL LIVER, SIGNAL = 0.74; EXPRESSED IN LUNG, SIGNAL = 0.85; EXPRESSED IN BRAIN, SIGNAL = 0.97; EXPRESSED IN PLACENTA, SIGNAL = 0.87; EXPRESSED IN HEART, SIGNAL = 0.89
cttgatgatgatgatgaccttgatgattatgacaacaacaatgatgatgatgacaatggtggtgatgacattgatgatgacgacaacgatgatgacgacgatgatgatgacagtgatgatgatgagct

SEQ ID NO: 20939 - DNA, 313 bp, Homo sapiens
  MAP TO AL031132.1; EXPRESSED IN ADULT LIVER, SIGNAL = 4.8; EXPRESSED IN BT474, SIGNAL = 4.7; EXPRESSED IN FETAL LIVER, SIGNAL = 3.3; EXPRESSED IN BONE MARROW, SIGNAL = 4.3; EXPRESSED IN LUNG, SIGNAL = 4.7; EXPRESSED IN BRAIN, SIGNAL = 4.2; EXPRESSED IN HELA, SIGNAL = 4.6; EXPRESSED IN HEART, SIGNAL = 4.2; EXPRESSED IN PLACENTA, SIGNAL = 7.7; EXPRESSED IN HBL100, SIGNAL = 5.2; SWISSPROT HIT: P25805, EVALUE 3.30e+00; EST_HUMAN HIT: AA626681.1, EVALUE 1.10e+00; NT HIT: gi11467755, EVALUE 7.60e-01
tccagaattatgttctggatatttgtatgtctcctgcttttctgatggtggacatatttgaagttcattcttattgattaggctttttccttgactacttaaaaatacaagtctgttcagatatgaggctctcttggatgacatcactgtgttgtccagtttggggcagtctgtctgaataatccccacactttcagtgacaatatgagttgaagactccctggcgattttacctctttcttttttatattgtgaaattgaaatgtgtagagtgagaagagctctttcatgataaatagtttgatcaattgtc

SEQ ID NO: 20940 - DNA, 270 bp, Homo sapiens
  MAP TO AC010175.4; EXPRESSED IN FETAL LIVER, SIGNAL = 2.5; EXPRESSED IN BT474, SIGNAL = 1.9; EXPRESSED IN ADULT LIVER, SIGNAL = 3.4; EXPRESSED IN BRAIN, SIGNAL = 2.2; EXPRESSED IN LUNG, SIGNAL = 2.9; EXPRESSED IN BONE MARROW, SIGNAL = 2.4; EXPRESSED IN PLACENTA, SIGNAL = 3.3; EXPRESSED IN HEART, SIGNAL = 2.3; EXPRESSED IN HELA, SIGNAL = 2.3; EXPRESSED IN HBL100, SIGNAL = 2.1; EST_HUMAN HIT: BF693006.1, EVALUE 2.50e-01; NT HIT: gi6680607, EVALUE 9.00e-06; SWISSPROT HIT: Q61838, EVALUE 7.00e-22
attctttttcatccctgagaatctgtttattcagaatgtagtgtgcttgaatctcctgggtttgtccacaggtcaaagtaccaataataggtttgaggtgaatataactcttgcttggggaaaaaaaatgctttgcagtatgagatgtttgcgtatgaaattcatcaagccaccagttatcagaacaattgttactctctttgtatttgacctaatggaagaataaataagctgttttatatataatatatatatgattgcaaaaatata

SEQ ID NO: 20941 - DNA, 465 bp, Homo sapiens
  MAP TO AC010896.2; EXPRESSED IN PLACENTA, SIGNAL = 6.6; EXPRESSED IN HBL100, SIGNAL = 5.7; EXPRESSED IN HELA, SIGNAL = 6.6; EXPRESSED IN HEART, SIGNAL = 5.4; EXPRESSED IN ADULT LIVER, SIGNAL = 7.9; EXPRESSED IN FETAL LIVER, SIGNAL = 7.8; EXPRESSED IN BONE MARROW, SIGNAL = 5.8; EXPRESSED IN BT474, SIGNAL = 5.8; EXPRESSED IN BRAIN, SIGNAL =   5; EXPRESSED IN LUNG, SIGNAL = 7.5; EST_HUMAN HIT: AI890210.1, EVALUE 3.00e-01; NT HIT: AB024573.1, EVALUE 4.60e+00; SWISSPROT HIT: P48960, EVALUE 8.20e-02
aagatgtaatgagggaccgtggagacttcctctaacagagtggccaggccagccccaggtgaggccaaagatgggtgtaagaatgagcagggctttgatcacccccagcagagcttggcgcttctctgctgggggtccctctgacagcgaaggtctcagcaacttcagcatggccatggctagtaccagcccattcacgcctatgatggccagcactggcccacgaaggtgtataacgcccctcccttcccatccaaccagcattccccctccctcaggtattgcccttgaggtaggtagagccccagggtgacacctgccaaccccagtgggcacaggtagcccaggagcaccatgagggggagaactcggtgctttgccagctggtgaaagacaaagagcagctggtgggccaacaccagggcctgcgccacatccagaaaaaggtggccaggtagaggaaat

SEQ ID NO: 20942 - DNA, 177 bp, Homo sapiens
  MAP TO AC007881.2; EXPRESSED IN BRAIN, SIGNAL = 1.1; EXPRESSED IN BONE MARROW, SIGNAL = 1.1; EXPRESSED IN HELA, SIGNAL = 2.1; EXPRESSED IN HBL100, SIGNAL = 1.3; EXPRESSED IN HEART, SIGNAL = 1.1; EXPRESSED IN BT474, SIGNAL = 1.1; EXPRESSED IN FETAL LIVER, SIGNAL = 0.98; EXPRESSED IN ADULT LIVER, SIGNAL = 1.1; EST_HUMAN HIT: AI656142.1, EVALUE 6.00e-72; NT HIT: AB032981.1, EVALUE 6.00e-80; SWISSPROT HIT: P04724, EVALUE 1.70e+00
ttcactgactgacagtccatttaactgctgttgcaactgtcccatggcctgaggcaggtctcgtgagggaataaaccagtcttggtcttcttcatccagcatctcttggaagcagcggtccaagaagtcttgctcctgcagttcctcctccacctagcaagcaaaggggagcagctc

SEQ ID NO: 20943 - DNA, 179 bp, Homo sapiens
  MAP TO AC006928.13; EXPRESSED IN HELA, SIGNAL = 0.63; EXPRESSED IN BT474, SIGNAL = 0.65; EXPRESSED IN BONE MARROW, SIGNAL = 0.69; EXPRESSED IN FETAL LIVER, SIGNAL = 0.63; EXPRESSED IN LUNG, SIGNAL = 0.72; EXPRESSED IN ADULT LIVER, SIGNAL = 0.69; EXPRESSED IN BRAIN, SIGNAL = 0.77; EXPRESSED IN PLACENTA, SIGNAL = 0.76; EXPRESSED IN HEART, SIGNAL = 0.8; EST_HUMAN HIT: AW802056.1, EVALUE 1.10e-01; SWISSPROT HIT: Q02765, EVALUE 1.30e+00
tgcactgattactgcagctcgtagctgctttatctcattataaagccagcagtagtccacaggtagagccatgttgcatgagatcatgggccagatcagtcttcttggttgtatctgtctccttccattgttaccagtggtgaatctggactggtctgcagcaacttgatccttgtctc

SEQ ID NO: 20944 - DNA, 284 bp, Homo sapiens
  MAP TO AL031297.4; EXPRESSED IN PLACENTA, SIGNAL = 0.81; EXPRESSED IN LUNG, SIGNAL = 0.94; EXPRESSED IN HELA, SIGNAL = 0.84; EXPRESSED IN BT474, SIGNAL = 1.1; EXPRESSED IN BONE MARROW, SIGNAL = 0.87; EXPRESSED IN HBL100, SIGNAL = 0.86; EXPRESSED IN FETAL LIVER, SIGNAL = 0.84; EXPRESSED IN ADULT LIVER, SIGNAL = 0.72; EXPRESSED IN BRAIN, SIGNAL = 0.83; EXPRESSED IN HEART, SIGNAL = 0.95; EST_HUMAN HIT: AW936689.1, EVALUE 0.00e+00; NT HIT: AL163303.2, EVALUE 1.00e-27; SWISSPROT HIT: P34957, EVALUE 2.80e+00
atcaatcaaggaataattgtgactttcaagtcttactgtttaagaaatacgttttataaggctatagctgccatggatagtgattcctctgatgaacctggacaaagtaaattggaaaccttctgggaaggagtcatcatttcagatgccatgaaaaacattcatgattcatttggaggaggtcaaaatatcaacattaacaggaattagaagttgattccatccctcatggatgactttggggggttcaagcctaccgtggaggaagtaactgcagatgtggt

SEQ ID NO: 20945 - DNA, 224 bp, Homo sapiens
  MAP TO AL023280.1; EXPRESSED IN HBL100, SIGNAL = 1.2; EXPRESSED IN HEART, SIGNAL =   1; EXPRESSED IN BT474, SIGNAL = 1.7; EXPRESSED IN FETAL LIVER, SIGNAL = 1.5; EXPRESSED IN BRAIN, SIGNAL = 1.2; EXPRESSED IN HELA, SIGNAL = 1.4; EXPRESSED IN PLACENTA, SIGNAL = 1.2; EXPRESSED IN ADULT LIVER, SIGNAL = 1.3; EXPRESSED IN LUNG, SIGNAL = 1.5; EXPRESSED IN BONE MARROW, SIGNAL = 1.4; NT HIT: M10976.1, EVALUE 2.00e-92; EST_HUMAN HIT: AW299272.1, EVALUE 2.00e-87; SWISSPROT HIT: P10272, EVALUE 1.00e-21
ctgccgtagggtgtcccagaaaaaggtcatcaacgtactggagcaacatgcagcctaggtctctggtgggaaacttctggaggtcttgagccaatgcctccccgaagatggtgggggagttcttgaaccctttgggaagccggatccaagtgtactgagtagtgacacctgactccggatcttcccactgaaaggcaaacagcttctggctctcaggggctaat

SEQ ID NO: 20946 - DNA, 156 bp, Homo sapiens
  MAP TO AC009598.2; EXPRESSED IN HEART, SIGNAL = 0.85; EXPRESSED IN BRAIN, SIGNAL = 0.99; EXPRESSED IN ADULT LIVER, SIGNAL =   1; EXPRESSED IN BT474, SIGNAL = 1.1; EXPRESSED IN HELA, SIGNAL = 0.94; EST_HUMAN HIT: AV752279.1, EVALUE 1.30e-01; SWISSPROT HIT: O77784, EVALUE 2.20e+00
ggaactatgcggtcatcagctattcctccacagaggagctgtccacagtctgggatcaggatggatgtgcttctgctgcagagaagccgcttcccttcaaccgcaccacgtccctgcaaagggaagacaagacagctgcctcacacagagcagtga

SEQ ID NO: 20947 - DNA, 89 bp, Homo sapiens
  MAP TO AC005534.2; EXPRESSED IN PLACENTA, SIGNAL = 0.9; EXPRESSED IN BONE MARROW, SIGNAL =   1; EXPRESSED IN HBL100, SIGNAL = 0.69; EXPRESSED IN LUNG, SIGNAL = 0.94; EXPRESSED IN HELA, SIGNAL = 1.1; EXPRESSED IN ADULT LIVER, SIGNAL = 0.96; EXPRESSED IN BRAIN, SIGNAL =   1; EXPRESSED IN BT474, SIGNAL = 0.77; EXPRESSED IN FETAL LIVER, SIGNAL = 0.9; EXPRESSED IN HEART, SIGNAL = 0.95; EST_HUMAN HIT: AA548154.1, EVALUE 3.00e-43; NT HIT: AB003938.1, EVALUE 1.80e-01
gaagcagaagccttggaaggagagaacaaaacacgctttaatctcgtcgattttcccagtatcataagcaaaacaaactgtggtgacat

SEQ ID NO: 20948 - DNA, 239 bp, Homo sapiens
  MAP TO AC007750.2; EXPRESSED IN PLACENTA, SIGNAL =   1; EXPRESSED IN LUNG, SIGNAL = 0.98; EXPRESSED IN HELA, SIGNAL = 2.2; EXPRESSED IN BT474, SIGNAL = 0.95; EXPRESSED IN BONE MARROW, SIGNAL = 0.96; EXPRESSED IN HBL100, SIGNAL = 0.8; EXPRESSED IN FETAL LIVER, SIGNAL = 0.9; EXPRESSED IN ADULT LIVER, SIGNAL =   1; EXPRESSED IN BRAIN, SIGNAL =   1; EXPRESSED IN HEART, SIGNAL =   1; SWISSPROT HIT: P11369, EVALUE 6.00e-12; EST_HUMAN HIT: W00527.1, EVALUE 6.00e-08; NT HIT: AF003529.1, EVALUE 3.00e-11
aggatttgaagagacatctctccaaagaaaacatacaaatgtccaacaagcacatgaaaagatgctcagcatccttggtcatgaggataataccaatcaaaaccacaatgaggtacaactttatgccaacaaaaatggctataacaattccagaaaaaaacaaaaaataaatattggcaagaatgtggagaaactggaactcttgtgcatcgcaggtgggaatgtaaaatgcttcagcc

SEQ ID NO: 20949 - DNA, 151 bp, Homo sapiens
  MAP TO AL031003.1; EXPRESSED IN HBL100, SIGNAL = 2.9; EXPRESSED IN HEART, SIGNAL = 2.4; EXPRESSED IN BT474, SIGNAL = 2.6; EXPRESSED IN FETAL LIVER, SIGNAL = 2.7; EXPRESSED IN BRAIN, SIGNAL = 2.8; EXPRESSED IN HELA, SIGNAL = 3.2; EXPRESSED IN PLACENTA, SIGNAL = 2.9; EXPRESSED IN ADULT LIVER, SIGNAL =   4; EXPRESSED IN LUNG, SIGNAL =   3; EXPRESSED IN BONE MARROW, SIGNAL =   3; EST_HUMAN HIT: AV718662.1, EVALUE 1.00e-07; NT HIT: AF044206.1, EVALUE 3.00e-07; SWISSPROT HIT: P15325, EVALUE 8.70e+00
taatagggctcctggagataatactcacaaaagcgcgggggccctccgtgaatggcacccctagagtttttaattctcagagcttccagcaattcatcaattacagttcaggttttctgcccccagctggttcctggaggtttctgctcag

SEQ ID NO: 20950 - DNA, 338 bp, Homo sapiens
  MAP TO AC000054.10; EXPRESSED IN HELA, SIGNAL = 0.83; EXPRESSED IN BRAIN, SIGNAL = 0.74; EXPRESSED IN BONE MARROW, SIGNAL = 0.74; EXPRESSED IN FETAL LIVER, SIGNAL = 0.59; EXPRESSED IN LUNG, SIGNAL = 1.1; EXPRESSED IN HEART, SIGNAL = 0.88; NT HIT: gi11432725, EVALUE 0.00e+00; EST_HUMAN HIT: BE259767.1, EVALUE 2.10e-01; SWISSPROT HIT: P05844, EVALUE 2.90e+00
ctcccatccataactggggtctttcaggtttgacctctgctctcccacataaggcccaaacttttcacctacttcgatcttccttttggtccatattcctagtcctgccccaggcatatttgactctcgaagttcaaactcagcaggaatggggatatcatcagggatgtagatgggggctttgtaaggagaaccctcctttggagtgaatgcttcactggatgtggcaggagagcatggctcttgaatattgagggagggagtgctggctactccatctgcatctggcatttcttccaaaggtatttcagggtagttgccatatacacactcattat

SEQ ID NO: 20951 - DNA, 110 bp, Homo sapiens
  MAP TO AJ010597.1; EXPRESSED IN HEART, SIGNAL =   1; EXPRESSED IN ADULT LIVER, SIGNAL = 0.98; EXPRESSED IN PLACENTA, SIGNAL = 1.1; EXPRESSED IN BONE MARROW, SIGNAL = 1.1; EXPRESSED IN LUNG, SIGNAL = 1.3; EXPRESSED IN HELA, SIGNAL = 1.1; EXPRESSED IN BT474, SIGNAL = 1.2; EXPRESSED IN HBL100, SIGNAL = 1.6; EXPRESSED IN FETAL LIVER, SIGNAL = 1.2; EXPRESSED IN BRAIN, SIGNAL = 1.3; SWISSPROT HIT: Q9YB39, EVALUE 4.00e+00; NT HIT: AL163210.2, EVALUE 1.00e-55; EST_HUMAN HIT: R00573.1, EVALUE 7.00e-51
ttttttatctgtctgaagacagggaagaagaggaatctgaattggaaaacccccactatatctgttgggtttttgttgttgctgttcagtctggaaatgggtggtgtgtg

SEQ ID NO: 20952 - DNA, 419 bp, Homo sapiens
  MAP TO AL022395.2; EXPRESSED IN BONE MARROW, SIGNAL = 3.6; EXPRESSED IN LUNG, SIGNAL = 3.7; EXPRESSED IN HBL100, SIGNAL = 4.9; EXPRESSED IN BT474, SIGNAL = 4.8; EXPRESSED IN BRAIN, SIGNAL = 4.7; EXPRESSED IN HEART, SIGNAL = 5.7; EXPRESSED IN HELA, SIGNAL = 3.6; EXPRESSED IN PLACENTA, SIGNAL =   5; EXPRESSED IN ADULT LIVER, SIGNAL = 5.5; EXPRESSED IN FETAL LIVER, SIGNAL = 4.4; NT HIT: gi11418695, EVALUE 0.00e+00; SWISSPROT HIT: P30967, EVALUE 1.10e+00; EST_HUMAN HIT: AW837529.1, EVALUE 0.00e+00
atgaacacccatagagctatagaatcaaacagccagacttcccctctcaatgcagaggtagtccagtatgccaaagaagtagtggatttcagttcccattatggaagtgagaatagtatgtcctatactatgtggaatttggctggtgtaccaaatgtattcccaagttctggtgactttactcagacagctgtgtttcgaacttatgggacatggtgggatcagtgtcctagtgcttccttgccattcaagaggacgccacctaattttcagagccaggactatgtggaacttacttttgaacaacaggtgtatcctacagctgtacatgttctagaaacctatcatcccggagcagtcattagaattctcgcttgttctgcaaatccttattccccaaatccaccagctgaagtaag

SEQ ID NO: 20953 - DNA, 182 bp, Homo sapiens
  MAP TO AC007740.1; EXPRESSED IN PLACENTA, SIGNAL = 0.82; EXPRESSED IN BONE MARROW, SIGNAL = 0.75; EXPRESSED IN FETAL LIVER, SIGNAL = 0.74; EXPRESSED IN LUNG, SIGNAL = 0.83; EXPRESSED IN HELA, SIGNAL = 0.64; EXPRESSED IN BT474, SIGNAL = 0.69; EXPRESSED IN HBL100, SIGNAL = 0.68; EXPRESSED IN BRAIN, SIGNAL = 0.8; EXPRESSED IN HEART, SIGNAL = 0.96; EXPRESSED IN ADULT LIVER, SIGNAL = 0.86; NT HIT: AF032897.1, EVALUE 2.00e-98; SWISSPROT HIT: Q12809, EVALUE 2.00e-22
tggttcatctttatgccaaacctggaaagtctaatgcagatgtaagagccctcacatactgtgacttgcataagattcagcgagaagacttgttagaggttttggatatgtatcctgagttttctgatcactttctaacaaacctagagttgactttcaacctaaggcatgagagcgcaaag

SEQ ID NO: 20954 - DNA, 365 bp, Homo sapiens
  MAP TO AC010684.2; EXPRESSED IN BONE MARROW, SIGNAL = 3.4; EXPRESSED IN LUNG, SIGNAL = 6.5; EXPRESSED IN HELA, SIGNAL = 4.6; EXPRESSED IN FETAL LIVER, SIGNAL = 4.2; EXPRESSED IN ADULT LIVER, SIGNAL =   2; EXPRESSED IN BRAIN, SIGNAL = 2.4; EXPRESSED IN PLACENTA, SIGNAL = 2.5; EXPRESSED IN HEART, SIGNAL = 2.2; EXPRESSED IN HBL100, SIGNAL = 5.8; EXPRESSED IN BT474, SIGNAL = 4.9; SWISSPROT HIT: P07156, EVALUE 4.00e-16; EST_HUMAN HIT: AW575412.1, EVALUE 1.00e-76; NT HIT: gi11434209, EVALUE 6.00e-76
aaggggagacaagaaagaagttcaaggatcccaaggcacccaagaggcctccttcagcctttttttctattctgttctgagtattgcccaaaacatcctggcctgtccattggtgatgctgcgaagagactgggagagatgtggaatgacactgctgcaggtgacaagcagccttaggagaagaaggctgcaaagccgaaggaaaaatgcgaaaagggtcttgctgcatatcgagctaaaggaaagcctgatgcagcaaaaaagggagttgtcaaggctgaaaaaaagcaagaaaaagaggaggaagctgaggaaaatgaagagggtgaggagggggaagataaagagatgaagatgaagaagac

SEQ ID NO: 20955 - DNA, 180 bp, Homo sapiens
  MAP TO AC007395.2; EXPRESSED IN PLACENTA, SIGNAL = 0.6; EXPRESSED IN BT474, SIGNAL = 0.61; EXPRESSED IN LUNG, SIGNAL = 0.61; EXPRESSED IN BONE MARROW, SIGNAL = 0.83; EXPRESSED IN HBL100, SIGNAL = 0.87; EXPRESSED IN FETAL LIVER, SIGNAL = 0.59; EXPRESSED IN HEART, SIGNAL = 0.8; EST_HUMAN HIT: AW855079.1, EVALUE 1.60e-01; NT HIT: S68757.1, EVALUE 9.00e-02; SWISSPROT HIT: P52962, EVALUE 7.40e-01
gatttctttactcaaacccatttctctctgcattttccttgtgtcatcatcccagttgcacaagccaaagattttggagttgtccttggtttctctttccttcactttttcatccagtctatcagcaaattctgctggctcagtcctccaaaacatatcccaaatctttctacttggctc

SEQ ID NO: 20956 - DNA, 112 bp, Homo sapiens
  MAP TO AC010873.2; EXPRESSED IN PLACENTA, SIGNAL =   2; EXPRESSED IN HEART, SIGNAL = 0.94; EXPRESSED IN ADULT LIVER, SIGNAL = 1.1; EXPRESSED IN BT474, SIGNAL =   1; EXPRESSED IN FETAL LIVER, SIGNAL = 1.3; EXPRESSED IN BONE MARROW, SIGNAL = 0.96; EXPRESSED IN BRAIN, SIGNAL = 0.97; EST_HUMAN HIT: AW875407.1, EVALUE 1.60e-02; SWISSPROT HIT: Q91193, EVALUE 6.90e+00
ctctgccatgatgggcagtgagaatattccggtctactggttcagattgctccttgtggacttgaaaggacttggtggcttcatgaagcagacctggtaaaaataatggcat

SEQ ID NO: 20957 - DNA, 316 bp, Homo sapiens
  MAP TO AL031770.12; EXPRESSED IN PLACENTA, SIGNAL = 0.87; EXPRESSED IN BT474, SIGNAL = 1.6; EXPRESSED IN LUNG, SIGNAL = 0.87; EXPRESSED IN HELA, SIGNAL = 0.71; EXPRESSED IN ADULT LIVER, SIGNAL = 0.67; EXPRESSED IN BONE MARROW, SIGNAL = 0.88; EXPRESSED IN HBL100, SIGNAL = 0.79; EXPRESSED IN FETAL LIVER, SIGNAL = 0.76; EXPRESSED IN BRAIN, SIGNAL = 0.85; EXPRESSED IN HEART, SIGNAL = 0.92; SWISSPROT HIT: P10180, EVALUE 1.10e+00; EST_HUMAN HIT: BF036362.1, EVALUE 1.10e+00
aataaatccagtgaggactttgaaattccaagtggtggtaactagctggatgcagaagaaccctaagataaatccagtgaggactttgaaattccaagtggtggtaactagccggatgcagaagaaccctaagataaatccagtgaggactttgaaattccaagtggtggtaactagccggatgcagaagaaccctaagatccccgttagcccggcatcgcctgccttttacccccccccgcgccctggttactgctcactcaagtgctgccacacgattcacagcctcgtgataatggccagcagcccctgcact

SEQ ID NO: 20958 - DNA, 177 bp, Homo sapiens
  MAP TO AC007880.1; EXPRESSED IN FETAL LIVER, SIGNAL = 0.96; EXPRESSED IN BRAIN, SIGNAL = 1.3; EXPRESSED IN HEART, SIGNAL = 1.1; EXPRESSED IN ADULT LIVER, SIGNAL = 0.8; EXPRESSED IN PLACENTA, SIGNAL = 0.75; EXPRESSED IN BT474, SIGNAL = 0.76; EXPRESSED IN BONE MARROW, SIGNAL = 2.3; EXPRESSED IN LUNG, SIGNAL = 0.91; EXPRESSED IN HELA, SIGNAL = 0.65; NT HIT: gi4580423, EVALUE 8.80e-02; SWISSPROT HIT: P14575, EVALUE 3.80e+00
cagactcataaaggaaaagacatgataggtcacagcaatgccatgtctatactcatttccaagaaccacattgtaacccacatgtgtattggttgtgaaactcttaaactctttctccagggccagagtatgacttttgtgggtctccatttttgccttcatcatccctttcttcta

SEQ ID NO: 20959 - DNA, 421 bp, Homo sapiens; identical to SEQ ID NO: 4206
  MAP TO AL022721.1; EXPRESSED IN BT474, SIGNAL = 2.5; EXPRESSED IN FETAL LIVER, SIGNAL = 2.2; EXPRESSED IN ADULT LIVER, SIGNAL = 3.2; EXPRESSED IN LUNG, SIGNAL = 2.7; EXPRESSED IN BONE MARROW, SIGNAL = 2.5; EXPRESSED IN PLACENTA, SIGNAL = 2.3; EXPRESSED IN BRAIN, SIGNAL = 2.5; EXPRESSED IN HEART, SIGNAL = 1.9; EXPRESSED IN HELA, SIGNAL = 2.5; EXPRESSED IN HBL100, SIGNAL = 3.4; NT HIT: AJ251760.1, EVALUE 3.00e-10; EST_HUMAN HIT: BF222989.1, EVALUE 0.00e+00; SWISSPROT HIT: O14254, EVALUE 1.40e+00

SEQ ID NO: 20960 - DNA, 123 bp, Homo sapiens
  MAP TO AC007870.3; EXPRESSED IN BT474, SIGNAL = 0.65; EXPRESSED IN HELA, SIGNAL = 0.64; EXPRESSED IN ADULT LIVER, SIGNAL = 0.84; EXPRESSED IN PLACENTA, SIGNAL = 0.71; EXPRESSED IN BONE MARROW, SIGNAL = 0.69; EXPRESSED IN FETAL LIVER, SIGNAL = 0.88; EXPRESSED IN LUNG, SIGNAL = 0.74; EXPRESSED IN HEART, SIGNAL = 0.93; NT HIT: AB041777.1, EVALUE 1.70e-02; EST_HUMAN HIT: BE734709.1, EVALUE 7.00e-03; SWISSPROT HIT: P24834, EVALUE 4.60e-01
tgaggactcatctgtcatcttcgcatcttctgtcaagcgcatgttgcccttggcaatgggtctgctgttactaattttgtttttgtttagaagcttgcttttcctctttggttctctgagttg

SEQ ID NO: 20961 - DNA, 627 bp, Homo sapiens
  MAP TO AC007304.11; EXPRESSED IN PLACENTA, SIGNAL = 0.99; EXPRESSED IN BT474, SIGNAL = 0.72; EXPRESSED IN LUNG, SIGNAL = 1.1; EXPRESSED IN HELA, SIGNAL = 0.78; EXPRESSED IN BRAIN, SIGNAL = 0.82; EXPRESSED IN HBL100, SIGNAL = 0.74; EXPRESSED IN FETAL LIVER, SIGNAL = 0.76; EXPRESSED IN ADULT LIVER, SIGNAL = 0.69; EXPRESSED IN BONE MARROW, SIGNAL = 0.84; EXPRESSED IN HEART, SIGNAL = 1.1; EST_HUMAN HIT: BF683136.1, EVALUE 5.90e-01; SWISSPROT HIT: P22165, EVALUE 5.40e+00; NT HIT: AF082993.1, EVALUE 6.20e+00
aagtctgttggtccaggaaatgttaggtgggatcctgaaaaagctaaatcagaccctctgtgagtgctcaaatatctttcaaatgctagtggtattacagaagccaatccatcaatatcccatccaaatccatcgtgaatattacagtacacagcataattacctgccacttatatcccatccaaatctatcatcaatgccacagtaagttggggtttgccaccataccacttaccaccagcaatgggatttgcttattgctacttgtcaagcaagtgatgtagctccagactgtatcctaaagatctgcttcctaggattacttctcgtaccaactgtcttagcttgtgttccaccagaagcagatgctgagctaagtttttgcgtgtaagtagtttattgtgtaattgaccccaggaaatatcaataacagtgtgaagaaaggagacagggacagcaaggctgtctataaagggcacattgccaaataagctttggcaactatgggcgactggagctaaatgcactaaggggaactctagaagaccaagtagtgcacattcctgacttatctcttctgaggggtgaggaagctggcgcattcatttatcagctcccatttatcat

SEQ ID NO: 20962 - DNA, 239 bp, Homo sapiens
  MAP TO AL023096.1; EXPRESSED IN HBL100, SIGNAL = 5.1; EXPRESSED IN HEART, SIGNAL = 4.1; EXPRESSED IN ADULT LIVER, SIGNAL =   6; EXPRESSED IN FETAL LIVER, SIGNAL = 4.5; EXPRESSED IN LUNG, SIGNAL = 4.8; EXPRESSED IN HELA, SIGNAL = 4.6; EXPRESSED IN PLACENTA, SIGNAL = 4.6; EXPRESSED IN BT474, SIGNAL = 4.2; EXPRESSED IN BRAIN, SIGNAL = 4.3; EXPRESSED IN BONE MARROW, SIGNAL = 5.6; NT HIT: U14520.1, EVALUE 0.00e+00; EST_HUMAN HIT: AA290877.1, EVALUE 3.00e-70; SWISSPROT HIT: Q03347, EVALUE 2.00e-22
ctcgcccactgcggcccacgaagcgaaggtcgttgaacctggccacctggttcttcatgacggccgaggcattgcgcagctcagcggagtagttctcgtcattgcctgccatcacagtcaccaccgtaccatccggcacgtcccccaatgccaccacctgaagacacggggcggggggatgcagggggacagcttagaaaggaagagggtgaccagggaaaggaggggaggggctgggc

SEQ ID NO: 20963 - DNA, 156 bp, Homo sapiens
  MAP TO AC007745.2; EXPRESSED IN PLACENTA, SIGNAL = 0.88; EXPRESSED IN BT474, SIGNAL = 0.76; EXPRESSED IN LUNG, SIGNAL = 1.4; EXPRESSED IN HELA, SIGNAL = 0.74; EXPRESSED IN ADULT LIVER, SIGNAL = 0.67; EXPRESSED IN BRAIN, SIGNAL = 0.76; EXPRESSED IN HEART, SIGNAL =   1; EXPRESSED IN BONE MARROW, SIGNAL = 0.94; EXPRESSED IN FETAL LIVER, SIGNAL = 0.65; EXPRESSED IN HBL100, SIGNAL = 0.72; NT HIT: U19495.1, EVALUE 3.00e-01; EST_HUMAN HIT: BE299722.1, EVALUE 9.20e-02; SWISSPROT HIT: P14000, EVALUE 8.70e+00
gataaagaaggtgctatgccatacattcttttcctggcctagtaccattgccacagagacctgctggccaaagataaccttagctgtgggtactacagaaatgagaagcagcatcatgaggaatgtaggcattttcactatctccctttgtctttc

SEQ ID NO: 20964 - DNA, 102 bp, Homo sapiens
  MAP TO AC005674.9; EXPRESSED IN HELA, SIGNAL = 0.65; EXPRESSED IN FETAL LIVER, SIGNAL = 1.1; EXPRESSED IN LUNG, SIGNAL = 0.77; EXPRESSED IN HEART, SIGNAL = 0.78; EXPRESSED IN PLACENTA, SIGNAL = 0.66; EXPRESSED IN ADULT LIVER, SIGNAL = 1.1; EXPRESSED IN BONE MARROW, SIGNAL = 0.69; SWISSPROT HIT: P29362, EVALUE 3.10e+00; EST_HUMAN HIT: BF035577.1, EVALUE 2.00e-39; NT HIT: gi9910553, EVALUE 6.00e-51
ggtttggtcattgagcacctgggacggagacccctcctcattggtggctttgggctcatgggcctcttctttgggaccctcaccatcacgctgaccctgcag

SEQ ID NO: 20965 - DNA, 103 bp, Homo sapiens
  MAP TO AL023284.1; EXPRESSED IN BONE MARROW, SIGNAL =   7; EXPRESSED IN HEART, SIGNAL = 4.4; EXPRESSED IN ADULT LIVER, SIGNAL = 4.9; EXPRESSED IN BRAIN, SIGNAL = 4.7; EXPRESSED IN LUNG, SIGNAL = 7.1; EXPRESSED IN HELA, SIGNAL = 6.8; EXPRESSED IN HBL100, SIGNAL = 8.6; EXPRESSED IN PLACENTA, SIGNAL = 8.1; EXPRESSED IN BT474, SIGNAL = 7.3; EXPRESSED IN FETAL LIVER, SIGNAL = 7.7; NT HIT: AL021127.2, EVALUE 8.70e-01
ggcacaatctcttccactgtggcttacttggtcctttgaagaacaaagtgttaccacaatcatactgtagaaggcagcagttcgtgtcctcctgggtgtcaga

SEQ ID NO: 20966 - DNA, 218 bp, Homo sapiens
  MAP TO AC005519.2; EXPRESSED IN BT474, SIGNAL = 0.77; EXPRESSED IN BONE MARROW, SIGNAL = 0.67; EXPRESSED IN PLACENTA, SIGNAL = 0.76; EXPRESSED IN HBL100, SIGNAL = 0.8; EXPRESSED IN FETAL LIVER, SIGNAL = 0.71; EXPRESSED IN LUNG, SIGNAL = 0.66; EXPRESSED IN HEART, SIGNAL = 0.98; NT HIT: AF027735.1, EVALUE 1.30e-01; SWISSPROT HIT: P05790, EVALUE 3.20e-01
ctggagctggtgctagagctggctctagcttctcatctggtgctggagctagtgatggagctggctctagctgtgctgctggtgctggagctggcactagctctggacctagaacttcctttagtgccagcgttggtgctgaacctgcttctggctctggagctggcactaaatctggctatagctcacgagtggatgccagagttggtgctggagta

SEQ ID NO: 20967 - DNA, 93 bp, Homo sapiens
  MAP TO AL023656.8; EXPRESSED IN HELA, SIGNAL = 0.97; EXPRESSED IN LUNG, SIGNAL = 0.9; EXPRESSED IN BRAIN, SIGNAL = 0.78; EXPRESSED IN HEART, SIGNAL = 0.86; NT HIT: AF227979.1, EVALUE 7.70e-01; EST_HUMAN HIT: AW857663.1, EVALUE 1.10e+00; SWISSPROT HIT: P41361, EVALUE 9.50e+00
atgacataggtattatcatacttgttttgctgagtatcagtatgttgataaaactgagtatcagcatgttggtttttcataaatgcacaaata

SEQ ID NO: 20968 - DNA, 81 bp, Homo sapiens
  MAP TO AL031406.1; EXPRESSED IN HBL100, SIGNAL = 4.1; EXPRESSED IN FETAL LIVER, SIGNAL = 4.5; EXPRESSED IN LUNG, SIGNAL =   4; EXPRESSED IN BONE MARROW, SIGNAL = 3.8; EXPRESSED IN HELA, SIGNAL = 3.9; EXPRESSED IN HEART, SIGNAL = 3.8; EXPRESSED IN PLACENTA, SIGNAL = 4.1; EXPRESSED IN BT474, SIGNAL = 3.8; EXPRESSED IN ADULT LIVER, SIGNAL = 5.4; EXPRESSED IN BRAIN, SIGNAL =   5; NT HIT: D67071.1, EVALUE 2.20e+00; EST_HUMAN HIT: AW876083.1, EVALUE 2.60e+00
  unsure 45
  unsure 56
cccattagtgcagagtgcactgtaggcgacgtgctgttagtgtgngcggtgcgtgngcgctgttcacacctgccattgtat

SEQ ID NO: 20969 - DNA, 119 bp, Homo sapiens
  MAP TO AC007776.1; EXPRESSED IN HELA, SIGNAL = 1.3; EXPRESSED IN PLACENTA, SIGNAL = 0.59; EXPRESSED IN LUNG, SIGNAL = 0.73; EXPRESSED IN HEART, SIGNAL = 0.92; NT HIT: gi10946665, EVALUE 5.00e-18; SWISSPROT HIT: Q91837, EVALUE 5.20e+00
  unsure 76
  unsure 91
  unsure 111
agctaagtgaagcccaacagaagctgctggtgaaatccatggagaaaaagatcctacccgtgcagctaaagctggntgagggaaaaacagncagatgctggggagagtctngggagtag

SEQ ID NO: 20970 - DNA, 256 bp, Homo sapiens
  MAP TO AL033504.3; EXPRESSED IN HBL100, SIGNAL = 1.4; EXPRESSED IN ADULT LIVER, SIGNAL = 1.9; EXPRESSED IN FETAL LIVER, SIGNAL = 1.6; EXPRESSED IN LUNG, SIGNAL = 1.3; EXPRESSED IN HEART, SIGNAL = 1.7; EXPRESSED IN HELA, SIGNAL = 1.3; EXPRESSED IN PLACENTA, SIGNAL = 1.2; EXPRESSED IN BT474, SIGNAL = 1.4; EXPRESSED IN BRAIN, SIGNAL =  13; EXPRESSED IN BONE MARROW, SIGNAL = 1.5; SWISSPROT HIT: O05979, EVALUE 2.30e+00; EST_HUMAN HIT: AA731990.1, EVALUE 9.20e-01; NT HIT: AL163280.2, EVALUE 1.30e-01
gcagctacttgtttcaaagtttctgacaataaattttgtcctagggtgggctccgtgtcctgtgctgaggctggcaaaggtcagaatccaacggaacaggaatgcaaagatgtttgtgtgtggatgcagggcctgtggacatctcatgctacatgaaatgctgcttgtgaactctggttttatgacagtggaagtaaatggggttctttttattgccttctcttccattggcaagactcaagtagtgaacctaacc

SEQ ID NO: 20971 - DNA, 160 bp, Homo sapiens
  MAP TO AL109657.7; EXPRESSED IN BRAIN, SIGNAL = 6.5; EXPRESSED IN FETAL LIVER, SIGNAL = 0.93; EXPRESSED IN BT474, SIGNAL =   1; EXPRESSED IN HBL100, SIGNAL = 1.3; EXPRESSED IN HELA, SIGNAL = 1.2; EXPRESSED IN HEART, SIGNAL = 0.94; SWISSPROT HIT: O80543, EVALUE 2.00e-09; EST_HUMAN HIT: BF694104.1, EVALUE 4.00e-85
tgcaatgtttggaggcgacacactctatgaacttcggtgttccttacagttagcggaaacggaaagggaaggaggattttctccacacatttctcctttcactgctgtcaatgacctgggacatctgcttgggagagctggctttaatactctgactgtg

SEQ ID NO: 20972 - DNA, 279 bp, Homo sapiens
  MAP TO AC007746.1; EXPRESSED IN BONE MARROW, SIGNAL = 3.7; EXPRESSED IN ADULT LIVER, SIGNAL = 1.1; EXPRESSED IN PLACENTA, SIGNAL = 1.1; EXPRESSED IN BT474, SIGNAL = 1.1; EXPRESSED IN LUNG, SIGNAL = 1.5; EXPRESSED IN HELA, SIGNAL = 1.3; EXPRESSED IN BRAIN, SIGNAL = 1.3; EXPRESSED IN HBL100, SIGNAL = 1.1; EXPRESSED IN FETAL LIVER, SIGNAL = 1.2; EXPRESSED IN HEART, SIGNAL = 1.4; EST_HUMAN HIT: BE872977.1, EVALUE 1.00e+00; SWISSPROT HIT: P53780, EVALUE 3.50e-02
tatggcttgttgaccttggcatagagaccctctaagtggtctctttctggagacagtggatggccatcccgagggtaaccaaatggtccagctcgagggggagatggagatctaaagacatttgctgatgtgcatggttcccgaaagtggttcactctggcataattggggtccatttcatcatcatccatatcatacactgatccaattgcaccagtagcataatcaagaagacctcttgcctgcttttcccttagctcctgatgttttgctccaatc

SEQ ID NO: 20973 - DNA, 117 bp, Homo sapiens
  MAP TO AL033523.12; EXPRESSED IN BT474, SIGNAL = 3.9; EXPRESSED IN FETAL LIVER, SIGNAL = 4.1; EXPRESSED IN BONE MARROW, SIGNAL = 3.1; EXPRESSED IN HEART, SIGNAL =   3; EXPRESSED IN ADULT LIVER, SIGNAL = 4.9; EXPRESSED IN BRAIN, SIGNAL = 2.9; EXPRESSED IN LUNG, SIGNAL = 4.2; EXPRESSED IN HELA, SIGNAL = 3.2; EXPRESSED IN HBL100, SIGNAL = 3.1; EXPRESSED IN PLACENTA, SIGNAL = 4.1; EST_HUMAN HIT: BF684558.1, EVALUE 5.00e-25; NT HIT: gi11415045, EVALUE 2.00e-11; SWISSPROT HIT: P50176, EVALUE 4.10e+00
atggaggagatgaaatggaagttgtgtgaggatgtgatctcctccatatggaacttcctcatctacatggccctgctgcaaatcattccttttatcttaaagaaattacacagcata

SEQ ID NO: 20974 - DNA, 199 bp, Homo sapiens
  MAP TO AC009306.1; EXPRESSED IN HBL100, SIGNAL = 0.91; EXPRESSED IN BT474, SIGNAL = 0.79; EXPRESSED IN BONE MARROW, SIGNAL = 0.99; EXPRESSED IN HELA, SIGNAL = 0.85; EXPRESSED IN ADULT LIVER, SIGNAL = 0.91; EXPRESSED IN BRAIN, SIGNAL = 0.97; EXPRESSED IN PLACENTA, SIGNAL = 0.88; EXPRESSED IN FETAL LIVER, SIGNAL = 0.9; EXPRESSED IN LUNG, SIGNAL = 0.87; EXPRESSED IN HEART, SIGNAL = 1.2; SWISSPROT HIT: Q03314, EVALUE 2.50e-01; NT HIT: gi6978426, EVALUE 4.70e-01; EST_HUMAN HIT: AW583066.1, EVALUE 4.80e-01
ccaacatgaagactcctggaaactttttgctttacatctatctcctttctagtatcctgagcagccgcttcaacctgaagttctggtttgtgctcgcccatatcagtgagtctgccaaacactgcttgggctccaactccctgctctgtttctggaaagtgcgcagaaacctgaggtgaatatggagctcatttttctc

SEQ ID NO: 20975 - DNA, 82 bp, Homo sapiens
  MAP TO AC007537.3; EXPRESSED IN HBL100, SIGNAL = 0.72; EXPRESSED IN HELA, SIGNAL = 0.67; EXPRESSED IN PLACENTA, SIGNAL = 0.6; EXPRESSED IN FETAL LIVER, SIGNAL = 0.61; EXPRESSED IN LUNG, SIGNAL = 0.7; EXPRESSED IN HEART, SIGNAL = 0.83; NT HIT: gi11435801, EVALUE 2.00e-38; EST_HUMAN HIT: W39106.1, EVALUE 2.00e-38; SWISSPROT HIT: P98164, EVALUE 2.00e-04
acactgataaaaaggcttgactggagacatcaaacacaaatgggaacaacccccattgtcaattccacatggatttgtggct

SEQ ID NO: 20976 - DNA, 440 bp, Homo sapiens
  MAP TO AL031664.1; EXPRESSED IN BONE MARROW, SIGNAL = 0.92; EXPRESSED IN HEART, SIGNAL = 0.98; EXPRESSED IN BT474, SIGNAL = 0.91; EXPRESSED IN ADULT LIVER, SIGNAL = 1.2; EXPRESSED IN BRAIN, SIGNAL = 1.3; NT HIT: gi4505646, EVALUE 0.00e+00; EST_HUMAN HIT: D53087.1, EVALUE 0.00e+00; SWISSPROT HIT: P16519, EVALUE 6.00e-76
ctcacaaccgacgcctgtgaggggaaggaaaattttgtccgctacctggagcatgtccaggctgtcatcacggtcaacgcaaccagaagaggagacctgaacatcaacatgacttcccctatgggcaccaagtccattttgctgagccggcgtccaagggatgacgactccaaggtgggctttgacaagtggcctttcatgaccactcacacgtggggggaagacgcccgaggcacctggaccctggagctgggatttgtcggcagcgccccgcagaagggggtgctgaaggagtggaccctgatgctgcatggcactcagagtgccccgtacatcgaccaggtggtgcgggattaccagtccaagttggccatgtccaagaaagaggagctggaggaagagctggacgaagccgtggagagaagcctgaaaagcatcct

SEQ ID NO: 20977 - DNA, 160 bp, Homo sapiens
  MAP TO AL034399.6; EXPRESSED IN BONE MARROW, SIGNAL = 1.6; EXPRESSED IN BRAIN, SIGNAL = 1.3; EXPRESSED IN HBL100, SIGNAL = 1.6; EXPRESSED IN ADULT LIVER, SIGNAL = 1.6; EXPRESSED IN FETAL LIVER, SIGNAL = 1.2; EXPRESSED IN LUNG, SIGNAL = 1.3; EXPRESSED IN HEART, SIGNAL = 1.5; EXPRESSED IN HELA, SIGNAL = 1.2; EXPRESSED IN PLACENTA, SIGNAL = 1.3; EXPRESSED IN BT474, SIGNAL = 1.3; SWISSPROT HIT: P09615, EVALUE 7.60e-01; EST_HUMAN HIT: AW878037.1, EVALUE 3.70e-01
acctggggcagcctggccttgggtgtgcgctttgcccacaggcaggggcagttacaaaaccgcagggtgcagtggctgcaaggctttgccaaactgcacagatcagctgcgctggtcttggcctcaaacctgacggaactcaaggaacagcaggagatgg

SEQ ID NO: 20978 - DNA, 132 bp, Homo sapiens
  MAP TO AC006367.3; EXPRESSED IN BT474, SIGNAL = 0.69; EXPRESSED IN FETAL LIVER, SIGNAL = 0.74; EXPRESSED IN LUNG, SIGNAL = 0.74; EXPRESSED IN HELA, SIGNAL = 0.93; EXPRESSED IN BRAIN, SIGNAL = 8.2; EXPRESSED IN HEART, SIGNAL = 0.99; EXPRESSED IN PLACENTA, SIGNAL = 0.87; EXPRESSED IN BONE MARROW, SIGNAL = 0.96; EXPRESSED IN HBL100, SIGNAL = 0.7; EXPRESSED IN ADULT LIVER, SIGNAL = 0.79; EST_HUMAN HIT: BE872017.1, EVALUE 6.80e+00
gcttcctaatgcaagcattgtctttgcctcttcatcctctttttttttgtacccttcatcctcctcttctttttccttctcctctttctgtctcttttcctcttcctcctcgtccttctttattagcatgat

SEQ ID NO: 20979 - DNA, 200 bp, Homo sapiens
  MAP TO AL034410.8; EXPRESSED IN PLACENTA, SIGNAL = 6.2; EXPRESSED IN BT474, SIGNAL = 1.5; EXPRESSED IN FETAL LIVER, SIGNAL = 1.2; EXPRESSED IN BONE MARROW, SIGNAL = 1.5; EXPRESSED IN HEART, SIGNAL = 1.4; EXPRESSED IN ADULT LIVER, SIGNAL = 2.2; EXPRESSED IN BRAIN, SIGNAL = 1.7; EXPRESSED IN LUNG, SIGNAL = 1.7; EXPRESSED IN HELA, SIGNAL = 1.6; EXPRESSED IN HBL100, SIGNAL = 1.9; NT HIT: gi11419444, EVALUE 5.00e-78; EST_HUMAN HIT: N76991.1, EVALUE 1.00e-63; SWISSPROT HIT: P03360, EVALUE 2.00e-06
tcacggttgtcgcttgaagagcaggcgcagatcctctagaggttcacaggaatagctagtgttgtctcctggattttcagtttcgtttggtagtatccagggtttgacttgagtgtgatgtatccaagactccactccagccactttaaccacggttggggtagataaaatgactgggtagggtccttcccaggatgtat

SEQ ID NO: 20980 - DNA, 179 bp, Homo sapiens
  MAP TO AL031679.1; EXPRESSED IN HBL100, SIGNAL = 2.8; EXPRESSED IN HELA, SIGNAL = 3.3; EXPRESSED IN BT474, SIGNAL = 3.1; EXPRESSED IN FETAL LIVER, SIGNAL = 3.2; EXPRESSED IN LUNG, SIGNAL = 3.4; EXPRESSED IN BONE MARROW, SIGNAL = 3.2; EXPRESSED IN HEART, SIGNAL = 2.8; EXPRESSED IN ADULT LIVER, SIGNAL =   4; EXPRESSED IN BRAIN, SIGNAL = 3.2; EXPRESSED IN PLACENTA, SIGNAL = 3.2; EST_HUMAN HIT: AA576331.1, EVALUE 4.00e-04; SWISSPROT HIT: O84007, EVALUE 9.80e-01; NT HIT: AJ298105.1, EVALUE 2.70e-02
ctctaccatcgacccagttaccaaagccagaagcctgagagtcattcttgacttctccctttccgtcatcccccacatccaattcatcagcaggccctgtcaattctctctccaaaatatacctcatgctcatctatttttctcaatcttgagaactccctgtctatataaaccatcat

SEQ ID NO: 20981 - DNA, 81 bp, Homo sapiens
  MAP TO AL049911.2; EXPRESSED IN BONE MARROW, SIGNAL =  10; EXPRESSED IN LUNG, SIGNAL = 2.8; EXPRESSED IN PLACENTA, SIGNAL = 2.2; EXPRESSED IN BT474, SIGNAL = 1.4; EXPRESSED IN BRAIN, SIGNAL = 1.2; EXPRESSED IN HEART, SIGNAL = 1.3; EXPRESSED IN HELA, SIGNAL = 1.6; EXPRESSED IN HBL100, SIGNAL = 1.3; EXPRESSED IN ADULT LIVER, SIGNAL =   3; EXPRESSED IN FETAL LIVER, SIGNAL = 1.5; EST_HUMAN HIT: AA055018.1, EVALUE 3.00e-10; NT HIT: AL163203.2, EVALUE 1.00e-38
agacagagctgaaattgtggaaaaacagatacaagctcttatcatgcgagtggcagaactgtgatgaaagtgcatgcgcag

SEQ ID NO: 20982 - DNA, 277 bp, Homo sapiens
  MAP TO AC007390.2; EXPRESSED IN BONE MARROW, SIGNAL = 0.77; EXPRESSED IN HBL100, SIGNAL = 1.2; EXPRESSED IN ADULT LIVER, SIGNAL = 0.67; EXPRESSED IN PLACENTA, SIGNAL = 0.72; EXPRESSED IN BT474, SIGNAL =   1; EXPRESSED IN FETAL LIVER, SIGNAL = 0.9; EXPRESSED IN LUNG, SIGNAL = 1.1; EXPRESSED IN HELA, SIGNAL = 1.4; EXPRESSED IN BRAIN, SIGNAL = 0.76; EXPRESSED IN HEART, SIGNAL = 0.87; SWISSPROT HIT: Q15139, EVALUE 2.00e-16; NT HIT: gi11430539, EVALUE 0.00e+00; EST_HUMAN HIT: AW402940.1, EVALUE 0.00e+00
tgtgatctttcccttgccctggagaagtgcaaacacttgcttgaggagtaacaggcatgagggcttggcgaattgctttttcccagctctgtgctacatcaagtccaactccagtggcagcaagaacaggattatgagagctgtccccattgttctcaccaacgaagtataccatagtatcagtaatgatttcaaaacagtgtggattgctgccttgtgaaatgtttgtgaaatctcgtggtgaagatatgcggagaatttctgaaagtggaatttc

SEQ ID NO: 20983 - DNA, 160 bp, Homo sapiens
  MAP TO AC009683.2; EXPRESSED IN FETAL LIVER, SIGNAL = 1.1; EXPRESSED IN ADULT LIVER, SIGNAL = 0.92; EXPRESSED IN HBL100, SIGNAL = 1.3; EXPRESSED IN HELA, SIGNAL = 0.95; EXPRESSED IN HEART, SIGNAL = 0.87; EXPRESSED IN LUNG, SIGNAL =   4; NT HIT: U66059.1, EVALUE 2.00e-02; SWISSPROT HIT: P31695, EVALUE 1.00e+00; EST_HUMAN HIT: BF337087.1, EVALUE 8.50e+00
  unsure 9
  unsure 149
aatacttangaatttctgcgaaaagataaataacactgagcagagggaaaggaagaaggagagagaagggaattggtctaacacaatgagaagctgtggcactggtgcgctccgtggtgctgtccacggtgctgacacgtttcttaatncttggggaagt

SEQ ID NO: 20984 - DNA, 206 bp, Homo sapiens
  MAP TO AL033543.6; EXPRESSED IN BT474, SIGNAL =   2; EXPRESSED IN BRAIN, SIGNAL =   2; EXPRESSED IN PLACENTA, SIGNAL = 1.9; EXPRESSED IN HELA, SIGNAL =   2; EXPRESSED IN HBL100, SIGNAL =   2; EXPRESSED IN FETAL LIVER, SIGNAL =   2; EXPRESSED IN ADULT LIVER, SIGNAL = 2.7; EXPRESSED IN LUNG, SIGNAL = 1.9; EXPRESSED IN BONE MARROW, SIGNAL = 2.2; EXPRESSED IN HEART, SIGNAL = 2.1; NT HIT: AL159142.1, EVALUE 3.00e-51; EST_HUMAN HIT: AA181053.1, EVALUE 4.00e-51; SWISSPROT HIT: P26725, EVALUE 4.20e-01
gtcctcctcgactggattaatgacgtgctggtggaggagaggatcattgtgaagcagctggaggaagacctgtatgacggccaggtgctgcagaagctcttgggtgagttcacagcagggacagctctgtcccacccccatctccctgcagcggccctgggctgggccaggattctctgcatagtgacatcggccacaggtcctag

SEQ ID NO: 20985 - DNA, 164 bp, Homo sapiens
  MAP TO AL050343.17; EXPRESSED IN PLACENTA, SIGNAL = 1.7; EXPRESSED IN HBL100, SIGNAL = 1.8; EXPRESSED IN HEART, SIGNAL = 1.6; EXPRESSED IN BT474, SIGNAL = 1.7; EXPRESSED IN FETAL LIVER, SIGNAL = 2.2; EXPRESSED IN ADULT LIVER, SIGNAL = 2.2; EXPRESSED IN LUNG, SIGNAL =   2; EXPRESSED IN BONE MARROW, SIGNAL = 1.9; EXPRESSED IN HELA, SIGNAL =   2; EXPRESSED IN BRAIN, SIGNAL = 2.6; NT HIT: U64898.1, EVALUE 2.00e-61; EST_HUMAN HIT: AW411087.1, EVALUE 3.00e-61; SWISSPROT HIT: P47245, EVALUE 2.00e-18
ctgagcatctttctttttggtgggaacaggtcacagctctcatcaagctgaaggagtgtgaggatacccaccttggggaggaggtggataggaactggaatgaagtggttacacagcagtacctctttgaccgccttgcccacgaggtaacatggttttcagag

SEQ ID NO: 20986 - DNA, 89 bp, Homo sapiens
  MAP TO AC011198.2; EXPRESSED IN FETAL LIVER, SIGNAL =  11; EXPRESSED IN LUNG, SIGNAL =  11; EXPRESSED IN BONE MARROW, SIGNAL =  10; EXPRESSED IN HELA, SIGNAL =  11; EXPRESSED IN HEART, SIGNAL = 7.9; EXPRESSED IN PLACENTA, SIGNAL =  11; EXPRESSED IN BT474, SIGNAL =  11; EXPRESSED IN ADULT LIVER, SIGNAL =  15; EXPRESSED IN BRAIN, SIGNAL = 9.4; EXPRESSED IN HBL100, SIGNAL =  11; EST_HUMAN HIT: AW875040.1, EVALUE 1.90e-01; NT HIT: U13217.1, EVALUE 1.80e-01
aagagatatgcctgcatattcagctacaatggcctgcaccctgaggctgtcaccttggcagaggcctgcagatatggaccttttacaag

SEQ ID NO: 20987 - DNA, 204 bp, Homo sapiens
  MAP TO AL034562.2; EXPRESSED IN FETAL LIVER, SIGNAL = 4.8; EXPRESSED IN BONE MARROW, SIGNAL = 4.6; EXPRESSED IN HEART, SIGNAL = 4.5; EXPRESSED IN PLACENTA, SIGNAL = 4.6; EXPRESSED IN BT474, SIGNAL = 4.6; EXPRESSED IN ADULT LIVER, SIGNAL = 5.6; EXPRESSED IN BRAIN, SIGNAL = 4.4; EXPRESSED IN LUNG, SIGNAL = 5.9; EXPRESSED IN HELA, SIGNAL = 4.5; EXPRESSED IN HBL100, SIGNAL = 4.6; NT HIT: K02268.1, EVALUE 1.00e-111; SWISSPROT HIT: P01213, EVALUE 1.00e-35; EST_HUMAN HIT: AA442566.1, EVALUE 4.00e-48
ttatgcatcaaaaagctctccagagtaagcattcggatcttcctgagaccgagtcaccaccttgaactggcgccggagaaaaccgccatagcgcttctggttgtcccacttgagcttgggacgaatgcgccgcaagaagcccccatagcgtttgtacaggtcctcatggcccatgctatccccgtccccctccccagccacctc

SEQ ID NO: 20988 - DNA, 220 bp, Homo sapiens
  MAP TO AC011232.3; EXPRESSED IN ADULT LIVER, SIGNAL =   2; EXPRESSED IN FETAL LIVER, SIGNAL = 1.4; EXPRESSED IN LUNG, SIGNAL = 1.2; EXPRESSED IN BRAIN, SIGNAL =   2; EXPRESSED IN HEART, SIGNAL = 1.2; EXPRESSED IN HELA, SIGNAL =  16; EXPRESSED IN HBL100, SIGNAL = 1.3; EXPRESSED IN PLACENTA, SIGNAL = 1.8; EXPRESSED IN BT474, SIGNAL = 1.5; EXPRESSED IN BONE MARROW, SIGNAL = 1.4; NT HIT: U75273.1, EVALUE 8.20e+00; EST_HUMAN HIT: AI263294.1, EVALUE 1.00e-121; SWISSPROT HIT: P24583, EVALUE 1.60e+00
ttggcgggaaatcgtgtgagcagtgatggatggcttgccttcatgggtgtatttgagaatcttaagcaattagtgttttttgactttagtactaaagaatttctacctgatccagcattagtcagaaaacttagccaagtgttatccaagttaacttttctgcaagaagctaggcttgttgggtggcaatttgatgatgatgatctcagtgttattacag

SEQ ID NO: 20989 - DNA, 282 bp, Homo sapiens
  MAP TO AL049629.14; EXPRESSED IN FETAL LIVER, SIGNAL = 1.2; EXPRESSED IN LUNG, SIGNAL = 0.97; EXPRESSED IN BONE MARROW, SIGNAL = 1.2; EXPRESSED IN HEART, SIGNAL = 1.2; EXPRESSED IN BT474, SIGNAL = 1.1; EXPRESSED IN ADULT LIVER, SIGNAL = 1.1; EXPRESSED IN BRAIN, SIGNAL = 1.6; EXPRESSED IN PLACENTA, SIGNAL = 1.1; EXPRESSED IN HELA, SIGNAL = 1.2; EXPRESSED IN HBL100, SIGNAL = 1.3; NT HIT: U10991.1, EVALUE 0.00e+00; SWISSPROT HIT: P98088, EVALUE 3.60e+00
ttagacctggaactcaaacatgtctgtctgttttttggccagcttggccacctcctcccggatggccttcacaagggccgcagtggagatgttggtcaggggagcgtcagacgggtcgttttctgccaggctctgctgcgaggccgctgtggagggcgccggggcctgctccaggctggggtgcaggttggctggctggctgtactgacgaggaagcctggagggagagctctgggggtaccgtgatcgggggtaggcctcgatgtaccctgggaggggcac

SEQ ID NO: 20990 - DNA, 235 bp, Homo sapiens
  MAP TO AC007552.4; EXPRESSED IN HEART, SIGNAL = 1.1; EXPRESSED IN FETAL LIVER, SIGNAL = 0.62; EXPRESSED IN HELA, SIGNAL = 0.69; EXPRESSED IN ADULT LIVER, SIGNAL = 0.72; EXPRESSED IN BRAIN, SIGNAL = 0.77; EXPRESSED IN PLACENTA, SIGNAL = 0.59; EXPRESSED IN LUNG, SIGNAL = 0.71; NT HIT: U22028.1, EVALUE 5.60e-01
gttgttttcaaacattattgtattccctcagctgtcatttactctgttgaccaccttccccctcttaaaaccctatctgctcttggattctgtgaacgcacattctatggacattgttcttgccttgtacctctttgacagcttcttagtcttttgcaggttcatcatcttctacttggccatcgaatgctcgttgtctcaaggcttagtcccaggctctcttgtaggctcgatt

SEQ ID NO: 20991 - DNA, 346 bp, Homo sapiens
  MAP TO AC005921.3; EXPRESSED IN PLACENTA, SIGNAL = 0.92; EXPRESSED IN BT474, SIGNAL = 0.89; EXPRESSED IN HELA, SIGNAL = 1.2; EXPRESSED IN HEART, SIGNAL = 1.1; EXPRESSED IN BONE MARROW, SIGNAL = 0.75; EXPRESSED IN HBL100, SIGNAL = 1.2; EXPRESSED IN FETAL LIVER, SIGNAL = 4.1; EXPRESSED IN LUNG, SIGNAL = 1.1; EXPRESSED IN ADULT LIVER, SIGNAL = 0.99; EXPRESSED IN BRAIN, SIGNAL = 1.4; EST_HUMAN HIT: BF335202.1, EVALUE 1.30e+00
gggaggtggcctccgtgagtgcagcgtgaaggaggtcgaagccagcgggcttgccacaggctgacaggcagctggaaacttgttccttgtgcacagcagttatgaaggctggggagcagccttcttagaggaggaggaggaagaggaggaagaggagaaggaggaagaggaggaggaggaggagggggaagagctgctcctgatcaagttcccttgggcattgctggctgagcaggagcttcagcttgcagctgctttgggaccattcaccctggatggaagcctgagtgaatcattacccccagggtctaaggtgctgcattgtagcagcaaagagcccccatta

SEQ ID NO: 20992 - DNA, 160 bp, Homo sapiens
  MAP TO AL109933.8; EXPRESSED IN BT474, SIGNAL = 4.6; EXPRESSED IN FETAL LIVER, SIGNAL =   8; EXPRESSED IN BONE MARROW, SIGNAL = 4.8; EXPRESSED IN LUNG, SIGNAL = 6.3; EXPRESSED IN BRAIN, SIGNAL = 4.5; EXPRESSED IN HEART, SIGNAL = 5.4; EXPRESSED IN ADULT LIVER, SIGNAL = 5.9; EXPRESSED IN PLACENTA, SIGNAL = 4.7; EXPRESSED IN HELA, SIGNAL = 6.5; EXPRESSED IN HBL100, SIGNAL = 5.8; EST_HUMAN HIT: T89505.1, EVALUE 4.00e-85; SWISSPROT HIT: P00747, EVALUE 2.00e-21; NT HIT: M74220.1, EVALUE 3.00e-85
gcatttgggtagttttctggggtcttctggtgccggtgtggtgtcatagatgaccaagactgacacttctttcctgtggtggtggtggaggatgtgcctcggtagctctgtccatcaccatggtagcagtcctggaccacaggggttagctcaggtggtg

SEQ ID NO: 20993 - DNA, 155 bp, Homo sapiens
  MAP TO AL121572.6; EXPRESSED IN BT474, SIGNAL = 2.5; EXPRESSED IN FETAL LIVER, SIGNAL = 2.7; EXPRESSED IN BONE MARROW, SIGNAL = 2.6; EXPRESSED IN LUNG, SIGNAL = 2.9; EXPRESSED IN HBL100, SIGNAL =   3; EXPRESSED IN HEART, SIGNAL = 3.1; EXPRESSED IN ADULT LIVER, SIGNAL = 2.6; EXPRESSED IN BRAIN, SIGNAL = 2.4; EXPRESSED IN PLACENTA, SIGNAL =   4; EXPRESSED IN HELA, SIGNAL = 3.7; EST_HUMAN HIT: AU121481.1, EVALUE 9.00e-40; NT HIT: AB026898.1, EVALUE 3.00e-41
gtgcagttgagatttcctcggaagccgtgccttcaatgtcatcaacatcagagcatgggctagcaggccggtccaggggtccgtggtagatcttagccatggactgcatctggggctctattttaagaagcatttgtagttttacagcttcgatt

SEQ ID NO: 20994 - DNA, 209 bp, Homo sapiens
  MAP TO AL035091.2; EXPRESSED IN BONE MARROW, SIGNAL = 9.8; EXPRESSED IN PLACENTA, SIGNAL =   5; EXPRESSED IN BT474, SIGNAL = 4.1; EXPRESSED IN ADULT LIVER, SIGNAL = 5.7; EXPRESSED IN FETAL LIVER, SIGNAL =   4; EXPRESSED IN BRAIN, SIGNAL = 4.1; EXPRESSED IN LUNG, SIGNAL = 8.4; EXPRESSED IN HEART, SIGNAL = 4.5; EXPRESSED IN HELA, SIGNAL = 4.3; EXPRESSED IN HBL100, SIGNAL = 4.2; NT HIT: S53910.1, EVALUE 2.00e-83; EST_HUMAN HIT: C18678.1, EVALUE 5.00e-81; SWISSPROT HIT: P28906, EVALUE 3.00e-24
ctgttctgttggccaagaccagcagtagacactgaggcctcacctcagactgggcaaggagcagggagcatacctgggccccagcatcagcatcagcctgctcctccccacacagcactcgggccaggccctctcccctgtccttcttaaactccgcctgggaagacagagaaacatggagagcaagagatgaaattactgctctgccc

SEQ ID NO: 20995 - DNA, 107 bp, Homo sapiens
  MAP TO AC011257.2; EXPRESSED IN HBL100, SIGNAL = 1.3; EXPRESSED IN ADULT LIVER, SIGNAL = 1.6; EXPRESSED IN FETAL LIVER, SIGNAL = 1.3; EXPRESSED IN HELA, SIGNAL = 1.3; EXPRESSED IN HEART, SIGNAL =   1; EXPRESSED IN PLACENTA, SIGNAL = 1.7; EXPRESSED IN BT474, SIGNAL = 1.2; EXPRESSED IN BRAIN, SIGNAL = 1.1; EXPRESSED IN BONE MARROW, SIGNAL =   1
  unsure 5
  unsure 10
  unsure 11
  unsure 23
  unsure 30
  unsure 40
  unsure 46
  unsure 55
  unsure 77
  unsure 91
gaagntgggnncattcctgtcantatcctngatgttaganggaaanggctttcangttttgacccatttagtataantactagctttgctnctgtcatatatggctt

SEQ ID NO: 20996 - DNA, 129 bp, Homo sapiens
  MAP TO AL109942.4; EXPRESSED IN LUNG, SIGNAL = 1.1; EXPRESSED IN BRAIN, SIGNAL =   1; EXPRESSED IN HELA, SIGNAL = 1.3; EXPRESSED IN HEART, SIGNAL = 1.1; EXPRESSED IN FETAL LIVER, SIGNAL =   1; EXPRESSED IN BONE MARROW, SIGNAL = 1.1; EXPRESSED IN PLACENTA, SIGNAL =   1; EXPRESSED IN HBL100, SIGNAL =   1; EXPRESSED IN BT474, SIGNAL = 1.7; EXPRESSED IN ADULT LIVER, SIGNAL =   1; EST_HUMAN HIT: BE817248.1, EVALUE 1.70e+00; NT HIT: AF271235.1, EVALUE 6.20e-02; SWISSPROT HIT: Q00402, EVALUE 5.20e+00
gatctgtttcaacttggtgttttgatattttgtgatcttccagtgggaagttgtatactgcttttccccctgaaagtgcgattgcttcttgctttaaaactaggtatttatctagttgatgttccatgg

SEQ ID NO: 20997 - DNA, 190 bp, Homo sapiens
  MAP TO AL118496.10; EXPRESSED IN PLACENTA, SIGNAL = 4.2; EXPRESSED IN HEART, SIGNAL = 4.9; EXPRESSED IN FETAL LIVER, SIGNAL = 4.7; EXPRESSED IN BT474, SIGNAL = 3.1; EXPRESSED IN BONE MARROW, SIGNAL = 2.9; EXPRESSED IN BRAIN, SIGNAL = 3.2; EXPRESSED IN LUNG, SIGNAL =   4; EXPRESSED IN HELA, SIGNAL = 3.9; EXPRESSED IN HBL100, SIGNAL = 3.3; EXPRESSED IN ADULT LIVER, SIGNAL = 4.1; SWISSPROT HIT: O60488, EVALUE 2.00e-33; NT HIT: gi11419691, EVALUE 2.00e-98; EST_HUMAN HIT: AW402273.1, EVALUE 2.00e-98
aacatccatcgggatggaattctccaatatcaccagtgcaaaaccacctttgtccattttcatccacagaataatcttctgctgttttctcttcatttttaaaatatcccatggagatgttctgtccaccaattacgatttcacctctggggtttggcttgtcattaattgtataaccgcctggaaatca

SEQ ID NO: 20998 - DNA, 310 bp, Homo sapiens
  MAP TO AL118508.9; EXPRESSED IN BT474, SIGNAL = 8.6; EXPRESSED IN ADULT LIVER, SIGNAL =  11; EXPRESSED IN BONE MARROW, SIGNAL = 9.5; EXPRESSED IN BRAIN, SIGNAL = 8.3; EXPRESSED IN LUNG, SIGNAL =  14; EXPRESSED IN HELA, SIGNAL =   9; EXPRESSED IN PLACENTA, SIGNAL =  10; EXPRESSED IN HBL100, SIGNAL =  10; EXPRESSED IN HEART, SIGNAL =  10; EXPRESSED IN FETAL LIVER, SIGNAL =  11; EST_HUMAN HIT: BF343597.1, EVALUE 4.40e+00; SWISSPROT HIT: Q63537, EVALUE 2.00e-05; NT HIT: gi11421355, EVALUE 0.00e+00
ctctgggaccaccatctgggccccccgatgaggaggacaaaggagagaaagaagggagcaccgtgccccgtgctgcaacagccagtcccacaaggggccccgagggcacccccaaggctacacccaccacaagtagaccttcgctgtcatctgacgcccccatcacatctgccccactcaagatgctggcccccagtgggtccccaggcgtctggagggagcccagcatccatcacgccacagctgcctctggcccccaggagcctgcaggtggggactcctccgtggccacacaaaacaacgatggcac

SEQ ID NO: 20999 - DNA, 238 bp, Homo sapiens
  MAP TO AL050342.36; EXPRESSED IN PLACENTA, SIGNAL = 3.3; EXPRESSED IN HBL100, SIGNAL = 3.3; EXPRESSED IN HELA, SIGNAL = 2.9; EXPRESSED IN FETAL LIVER, SIGNAL = 3.5; EXPRESSED IN LUNG, SIGNAL = 2.5; EXPRESSED IN BONE MARROW, SIGNAL = 3.4; EXPRESSED IN HEART, SIGNAL = 2.9; EXPRESSED IN BT474, SIGNAL = 2.8; EXPRESSED IN ADULT LIVER, SIGNAL = 3.6; EXPRESSED IN BRAIN, SIGNAL = 2.9; NT HIT: U02477.1, EVALUE 2.20e+00; EST_HUMAN HIT: F08485.1, EVALUE 1.00e-63; SWISSPROT HIT: P50537, EVALUE 4.30e+00
atgggggctgtccttcttctgggcttcctgcctgcatcttgtcagtgtcctggggaaaggggtgaccagggccggttgagcactcacgtgtggctatctctgtgctctgtggcaggtgacggatggtggcaccatcaagcaaaagatcttcaccttcgacgccatgttctccaccaactactcacacatggagaactaccgcaagcgagaggacctggtgtaccagtccactgtgagg

SEQ ID NO: 21000 - DNA, 213 bp, Homo sapiens
  MAP TO AL035425.11; EXPRESSED IN BRAIN, SIGNAL =   2; EXPRESSED IN PLACENTA, SIGNAL = 2.2; EXPRESSED IN HBL100, SIGNAL = 2.6; EXPRESSED IN BT474, SIGNAL = 1.8; EXPRESSED IN FETAL LIVER, SIGNAL = 2.3; EXPRESSED IN LUNG, SIGNAL = 2.6; EXPRESSED IN BONE MARROW, SIGNAL = 2.1; EXPRESSED IN HEART, SIGNAL = 1.9; EXPRESSED IN HELA, SIGNAL = 3.1; EXPRESSED IN ADULT LIVER, SIGNAL =   2; EST_HUMAN HIT: W07655.1, EVALUE 1.00e-109; NT HIT: M63468.1, EVALUE 1.00e-117; SWISSPROT HIT: P29400, EVALUE 1.00e-23
gtacccgtggtttggatggtccccctggtccagatggattgcaaggtcccccaggtccccctggaacctcctctgttgcacatggatttcttattacacgccacagccagacaacggatgcaccacaatgcccacagggaacacttcaggtctatgaaggcttttctctcctgtatgtacaaggaaataaaagagcccacggtcaagacttgg

SEQ ID NO: 21001 - DNA, 191 bp, Homo sapiens
  MAP TO AC011174.2; EXPRESSED IN BT474, SIGNAL = 3.4; EXPRESSED IN FETAL LIVER, SIGNAL = 7.5; EXPRESSED IN LUNG, SIGNAL = 6.9; EXPRESSED IN BONE MARROW, SIGNAL = 6.7; EXPRESSED IN HEART, SIGNAL =   6; EXPRESSED IN ADULT LIVER, SIGNAL = 8.8; EXPRESSED IN BRAIN, SIGNAL = 5.8; EXPRESSED IN PLACENTA, SIGNAL = 6.7; EXPRESSED IN HELA, SIGNAL = 7.9; EXPRESSED IN HBL100, SIGNAL = 5.5; NT HIT: Z32686.2, EVALUE 9.60e-02; EST_HUMAN HIT: BF695403.1, EVALUE 1.70e-01; SWISSPROT HIT: P46506, EVALUE 7.40e-01
tgagattgcagaagagactgaacacggcgctaggctctgaagagaaagatgaaaaagaagaaaggtgtgatttaccttgataaagaatggtgacaattgtatagggtttttgttaaaaattaaatggcagaatacacgtacagcactaacatcatgtctaccaaataccaggcagttgataatgacaggag

SEQ ID NO: 21002 - DNA, 92 bp, Homo sapiens
  MAP TO AL050344.11; EXPRESSED IN FETAL LIVER, SIGNAL = 3.6; EXPRESSED IN LUNG, SIGNAL = 3.9; EXPRESSED IN BONE MARROW, SIGNAL = 4.6; EXPRESSED IN BRAIN, SIGNAL = 4.7; EXPRESSED IN HELA, SIGNAL = 4.2; EXPRESSED IN HEART, SIGNAL =   4; EXPRESSED IN PLACENTA, SIGNAL = 3.1; EXPRESSED IN HBL100, SIGNAL = 5.2; EXPRESSED IN BT474, SIGNAL = 5.2; EXPRESSED IN ADULT LIVER, SIGNAL = 3.4; NT HIT: U22376.1, EVALUE 1.90e-01; EST_HUMAN HIT: BF572307.1, EVALUE 7.20e-02
atagtgatggtggtgatggtagtggtggtggtcatgatggtggtgctgatgcttgtaatggtgttgattgtggtagtgatggtagtgctggt

SEQ ID NO: 21003 - DNA, 83 bp, Homo sapiens
  MAP TO AC007653.1; EXPRESSED IN PLACENTA, SIGNAL = 5.6; EXPRESSED IN ADULT LIVER, SIGNAL = 0.72; EXPRESSED IN HBL100, SIGNAL = 0.88; EXPRESSED IN HELA, SIGNAL = 0.6; EXPRESSED IN BONE MARROW, SIGNAL = 0.78; EXPRESSED IN HEART, SIGNAL = 0.82; NT HIT: gi4507848, EVALUE 9.00e-40; SWISSPROT HIT: Q92995, EVALUE 9.00e-11; EST_HUMAN HIT: BE550614.1, EVALUE 4.00e-37
atgtcgcaaggctgtgtacttcactggaaatatgggcgccgaggtggccttcaactggatcattgttcacatggaagagccag

SEQ ID NO: 21004 - DNA, 96 bp, Homo sapiens
  MAP TO AL096712.17; EXPRESSED IN BONE MARROW, SIGNAL = 1.8; EXPRESSED IN PLACENTA, SIGNAL = 1.6; EXPRESSED IN BT474, SIGNAL = 1.8; EXPRESSED IN ADULT LIVER, SIGNAL = 2.1; EXPRESSED IN FETAL LIVER, SIGNAL = 1.9; EXPRESSED IN BRAIN, SIGNAL =   2; EXPRESSED IN LUNG, SIGNAL = 2.2; EXPRESSED IN HEART, SIGNAL = 1.7; EXPRESSED IN HELA, SIGNAL = 2.1; EXPRESSED IN HBL100, SIGNAL = 1.6; SWISSPROT HIT: P13908, EVALUE 7.00e+00; EST_HUMAN HIT: F07729.1, EVALUE 2.00e-45; NT HIT: gi11418597, EVALUE 2.00e-47
tacattcaggcttttgtttgtgatcagggcaataatgacagatataattacttagagatgaagaaaccaaaaccaagacacaaggaggctgagtaa

SEQ ID NO: 21005 - DNA, 148 bp, Homo sapiens
  MAP TO AC011208.2; EXPRESSED IN PLACENTA, SIGNAL = 9.2; EXPRESSED IN HBL100, SIGNAL = 9.9; EXPRESSED IN ADULT LIVER, SIGNAL =  11; EXPRESSED IN FETAL LIVER, SIGNAL =  10; EXPRESSED IN BONE MARROW, SIGNAL = 9.3; EXPRESSED IN LUNG, SIGNAL =  10; EXPRESSED IN HEART, SIGNAL = 7.9; EXPRESSED IN HELA, SIGNAL = 9.7; EXPRESSED IN BT474, SIGNAL =   9; EXPRESSED IN BRAIN, SIGNAL = 8.5; EST_HUMAN HIT: AI499506.1, EVALUE 2.00e-09; NT HIT: AL163278.2, EVALUE 3.00e-07; SWISSPROT HIT: Q14934, EVALUE 5.10e+00
ttatggaggctgtgaagtccaaggttgagggcctgcatctggtgagggccttagaactctgcagagggcatcacgtggcaaggaggctgagaatgctagctcaggttcatcttcttcttcttataaagccaccagtcatactcctttg

SEQ ID NO: 21006 - DNA, 103 bp, Homo sapiens
  MAP TO AP000134.1; EXPRESSED IN PLACENTA, SIGNAL = 0.86; EXPRESSED IN FETAL LIVER, SIGNAL = 0.83; EXPRESSED IN LUNG, SIGNAL = 1.1; EXPRESSED IN BRAIN, SIGNAL = 1.1; EXPRESSED IN BT474, SIGNAL = 0.7; EXPRESSED IN HEART, SIGNAL = 0.85; EXPRESSED IN ADULT LIVER, SIGNAL = 0.91; EXPRESSED IN HELA, SIGNAL = 1.1; EXPRESSED IN HBL100, SIGNAL = 6.4; EXPRESSED IN BONE MARROW, SIGNAL = 0.94; EST_HUMAN HIT: R39480.1, EVALUE 3.30e-01; SWISSPROT HIT: Q14994, EVALUE 9.10e+00
catattaataccccatataacccattttgcaaaatgcttgaagtcgatggtcttgaggtccctggagctagaaaaggcattagcagtcacccacagcagcccc

SEQ ID NO: 21007 - DNA, 370 bp, Homo sapiens
  MAP TO AL118524.7; EXPRESSED IN PLACENTA, SIGNAL = 1.4; EXPRESSED IN HBL100, SIGNAL = 2.5; EXPRESSED IN BT474, SIGNAL = 1.3; EXPRESSED IN BONE MARROW, SIGNAL = 1.5; EXPRESSED IN LUNG, SIGNAL = 2.7; EXPRESSED IN HELA, SIGNAL = 2.7; EXPRESSED IN HEART, SIGNAL = 2.4; EXPRESSED IN ADULT LIVER, SIGNAL = 1.2; EXPRESSED IN FETAL LIVER, SIGNAL = 1.7; EXPRESSED IN BRAIN, SIGNAL = 2.7; EST_HUMAN HIT: BF513934.1, EVALUE 1.00e-50; SWISSPROT HIT: P09031, EVALUE 4.40e+00; NT HIT: Y10752.1, EVALUE 2.00e-44
agacaaccatgggaaccactgtgacgggagaaaccgctcccgcctcgcgcatgcgcattggctgagccgactcgcgctccgctcctggcagtatggctgcgtcccctttaaataccgccaccgccgcgcggcggcagcgaggttcctcctgccgccacggcggcggctggatccggggtccagtttggggcggcgtgggagagggggccgcgggtgtcttgtccgttcccagggccaaacccctaggagtcctgtcctcaggacctccttgagccgacttccacggagggaggtggagcttcaggatgcctgctgtgttctccagactcccgttcagatccgattttggacccctccgagtgagatagga

SEQ ID NO: 21008 - DNA, 204 bp, Homo sapiens
  MAP TO AL121580.6; EXPRESSED IN PLACENTA, SIGNAL = 1.3; EXPRESSED IN HEART, SIGNAL = 1.4; EXPRESSED IN FETAL LIVER, SIGNAL = 1.1; EXPRESSED IN BT474, SIGNAL = 1.5; EXPRESSED IN BRAIN, SIGNAL = 1.9; EXPRESSED IN BONE MARROW, SIGNAL = 1.3; EXPRESSED IN LUNG, SIGNAL = 1.6; EXPRESSED IN HELA, SIGNAL = 1.9; EXPRESSED IN HBL100, SIGNAL = 1.7; EXPRESSED IN ADULT LIVER, SIGNAL = 0.97; NT HIT: AF155827.1, EVALUE 1.60e+00; EST_HUMAN HIT: BE889896.1, EVALUE 2.80e+00
cttggaggcctcaacatgcacagcttcaacttcaacatcttcattttcatcttcttcttcttcatctttatcttcatcttcattttcatctttattttcatcttcttcatcttcatcttaatcatcttcttcttcttcatcttcatcttcattttcatcaccttcatcatcttcatggtccacatccagccacctggtttacca

SEQ ID NO: 21009 - DNA, 147 bp, Homo sapiens
  MAP TO AC011242.2; EXPRESSED IN HEART, SIGNAL =   3; EXPRESSED IN PLACENTA, SIGNAL = 4.2; EXPRESSED IN HBL100, SIGNAL = 4.1; EXPRESSED IN BT474, SIGNAL = 3.2; EXPRESSED IN FETAL LIVER, SIGNAL =   4; EXPRESSED IN ADULT LIVER, SIGNAL = 4.1; EXPRESSED IN LUNG, SIGNAL = 3.8; EXPRESSED IN BONE MARROW, SIGNAL = 3.9; EXPRESSED IN BRAIN, SIGNAL = 3.4; EXPRESSED IN HELA, SIGNAL = 3.8; EST_HUMAN HIT: BF031024.1, EVALUE 2.00e-77; NT HIT: gi7706299, EVALUE 1.00e-77; SWISSPROT HIT: Q38854, EVALUE 3.90e+00
atttcagaaactgctttagcatttgtctttcccagtttcattatcactttgtctacatggctttttgtggcttgcaagagattttccatggtgggccagagatcattaggttttgaaagatccagaacgagaacaagagaaaacgtc

SEQ ID NO: 21010 - DNA, 105 bp, Homo sapiens
  MAP TO AC012002.2; EXPRESSED IN BRAIN, SIGNAL = 4.9; EXPRESSED IN HELA, SIGNAL = 5.3; EXPRESSED IN HEART, SIGNAL = 4.4; EXPRESSED IN PLACENTA, SIGNAL = 6.8; EXPRESSED IN HBL100, SIGNAL = 5.5; EXPRESSED IN ADULT LIVER, SIGNAL = 7.9; EXPRESSED IN BT474, SIGNAL = 4.1; EXPRESSED IN FETAL LIVER, SIGNAL = 5.3; EXPRESSED IN BONE MARROW, SIGNAL = 5.3; EXPRESSED IN LUNG, SIGNAL = 4.5; NT HIT: AL022022.1, EVALUE 7.60e-01; EST_HUMAN HIT: AW051927.1, EVALUE 5.80e-02; SWISSPROT HIT: P57072, EVALUE 7.20e+00
tttggggtcttcgcctgttgtgccccctctgggaccctcacagatcagggaccagaccctgggcacaggtccaacgtgacagtgagagccctgcgctggccaaca

SEQ ID NO: 21011 - DNA, 119 bp, Homo sapiens
  MAP TO AL121590.7; EXPRESSED IN HEART, SIGNAL = 1.2; EXPRESSED IN FETAL LIVER, SIGNAL = 1.4; EXPRESSED IN BT474, SIGNAL =   1; EXPRESSED IN ADULT LIVER, SIGNAL = 1.2; EXPRESSED IN BONE MARROW, SIGNAL = 1.2; EXPRESSED IN BRAIN, SIGNAL = 1.2; EXPRESSED IN LUNG, SIGNAL =   1; EXPRESSED IN HELA, SIGNAL = 1.2; EXPRESSED IN PLACENTA, SIGNAL = 1.1; EXPRESSED IN HBL100, SIGNAL = 1.2; NT HIT: AF287742.1, EVALUE 4.10e+00; EST_HUMAN HIT: AA002030.1, EVALUE 1.50e+00
cgatgagggacagctggatgctgacgagcctcggcccgctttcctgacctggctcccaggatgctgcagtcagtcttcaccttccagtcaggagacctggagagtgttctctcgggagt

SEQ ID NO: 21012 - DNA, 137 bp, Homo sapiens
  MAP TO AC011259.2; EXPRESSED IN BRAIN, SIGNAL = 1.2; EXPRESSED IN HELA, SIGNAL = 1.1; EXPRESSED IN PLACENTA, SIGNAL = 1.7; EXPRESSED IN ADULT LIVER, SIGNAL = 1.4; EXPRESSED IN LUNG, SIGNAL = 1.1; EXPRESSED IN BONE MARROW, SIGNAL = 1.4; EXPRESSED IN HEART, SIGNAL = 0.95; EXPRESSED IN HBL100, SIGNAL = 1.2; EXPRESSED IN FETAL LIVER, SIGNAL = 1.6; EXPRESSED IN BT474, SIGNAL = 1.1; SWISSPROT HIT: P54923, EVALUE 7.80e-01
agcagctaagcttaataaatcctttagttgtaagtactctgtccagcccatgtcaaaatattttgaaatactgaagatgaaattaatgagattcttctgcatctcatatccaccctgagctgtggtcttcttgatac

SEQ ID NO: 21013 - DNA, 218 bp, Homo sapiens
  MAP TO AC012064.1; EXPRESSED IN BT474, SIGNAL = 1.7; EXPRESSED IN BRAIN, SIGNAL =   2; EXPRESSED IN HELA, SIGNAL = 1.8; EXPRESSED IN HEART, SIGNAL = 1.2; EXPRESSED IN PLACENTA, SIGNAL =   2; EXPRESSED IN ADULT LIVER, SIGNAL = 2.4; EXPRESSED IN FETAL LIVER, SIGNAL = 1.7; EXPRESSED IN LUNG, SIGNAL = 1.6; EXPRESSED IN BONE MARROW, SIGNAL = 1.8; EXPRESSED IN HBL100, SIGNAL = 1.4; NT HIT: AF056490.1, EVALUE 1.00e-120; EST_HUMAN HIT: AW807812.1, EVALUE 1.00e-120; SWISSPROT HIT: O60658, EVALUE 4.00e-37
gaaactttagatccaattgatgaggtcgctgcactcatcgcagccaccattcatgatgtggatcaccctgggagaaccaactccttcctgtgtaatgctggaagtgagctggccattttgtacaatgacactgctgtgctggagagccaccatgcggccttggccttccagctgaccactggagatgataaatgcaatatatttaaaaacatggagag

SEQ ID NO: 21014 - DNA, 212 bp, Homo sapiens
  MAP TO AL121675.8; EXPRESSED IN PLACENTA, SIGNAL = 1.1; EXPRESSED IN BT474, SIGNAL = 0.99; EXPRESSED IN BONE MARROW, SIGNAL = 1.2; EXPRESSED IN BRAIN, SIGNAL = 1.7; EXPRESSED IN LUNG, SIGNAL = 0.94; EXPRESSED IN HELA, SIGNAL = 1.5; EXPRESSED IN HBL100, SIGNAL = 1.7; EXPRESSED IN HEART, SIGNAL = 1.1; EXPRESSED IN FETAL LIVER, SIGNAL = 1.1; EST_HUMAN HIT: BF341188.1, EVALUE 2.00e-94; NT HIT: gi9506692, EVALUE 1.00e-94; SWISSPROT HIT: Q10270, EVALUE 8.70e-01
gtctataacttgacccaggagttcttccggcacgataaaccagtcaatgctgaaagtcaaaatagcgtgggggtgttcacccgagaggaggtgcgtaaccgcatcaggaatgaccctgacgacccagaggctaccaagcgcctgaagctcgccatgatccagcagtacctgaaggtatcttgaggaagacggattctgggggcgtctgggtc

SEQ ID NO: 21015 - DNA, 128 bp, Homo sapiens
  MAP TO AC006482.2; EXPRESSED IN PLACENTA, SIGNAL = 0.61; EXPRESSED IN HBL100, SIGNAL = 0.99; EXPRESSED IN LUNG, SIGNAL = 1.2; EXPRESSED IN HELA, SIGNAL = 0.89; EXPRESSED IN HEART, SIGNAL = 0.8; EXPRESSED IN BT474, SIGNAL = 0.6; NT HIT: AJ271735.1, EVALUE 5.00e-06; EST_HUMAN HIT: BE182696.1, EVALUE 1.00e-15; SWISSPROT HIT: Q28756, EVALUE 1.00e+00
caccactgctgctggcaatgaaggaggagaggcactggcgatccaaggcttttttctacctcttcaatgcctctttcagtgacatgaagttaaaaccagatactgtgagtgctcacttgatttttgat

SEQ ID NO: 21016 - DNA, 410 bp, Homo sapiens
  MAP TO AC012271.1; EXPRESSED IN BT474, SIGNAL = 1.1; EXPRESSED IN BRAIN, SIGNAL = 1.2; EXPRESSED IN HELA, SIGNAL = 1.3; EXPRESSED IN HEART, SIGNAL = 1.2; EXPRESSED IN PLACENTA, SIGNAL = 1.1; EXPRESSED IN ADULT LIVER, SIGNAL = 1.4; EXPRESSED IN FETAL LIVER, SIGNAL = 1.1; EXPRESSED IN LUNG, SIGNAL =   1; EXPRESSED IN BONE MARROW, SIGNAL = 1.1; EXPRESSED IN HBL100, SIGNAL =   1; NT HIT: AF153047.2, EVALUE 0.00e+00; SWISSPROT HIT: Q9UKL4, EVALUE 2.00e-59; EST_HUMAN HIT: AV683928.1, EVALUE 9.60e-02
agcattttgcaacttcttatcttctcgtttgcccccaccactgcccccacccccagttcctccaggacctcctatggactcaggggggtctctgtccagggctaggaagacagtagagtagcggcgttctcgctgcttggcggactggtgcacagagtaggtgatgaagcaaagactgggggtacacaccattatgatctggaagacccagtaacgtatgtgggagatggggaaggcgcggtcatagcaggcctggttacagccgggctgcagggtgttgcacacaaacatggtctgctcatcatcgtacaccgtctcccccacaatggccacaatgaggatccggaagatcaccaccacagtcaacaggatcctgaacggaggaagagggagggagagaggttctcacg

SEQ ID NO: 21017 - DNA, 177 bp, Homo sapiens; identical to SEQ ID NO: 19148
  MAP TO AP000351.3; EXPRESSED IN ADULT LIVER, SIGNAL = 1.2; EXPRESSED IN BONE MARROW, SIGNAL = 1.7; EXPRESSED IN BRAIN, SIGNAL = 1.3; EXPRESSED IN HBL100, SIGNAL = 1.6; EXPRESSED IN LUNG, SIGNAL = 1.5; EXPRESSED IN HELA, SIGNAL = 1.8; EXPRESSED IN PLACENTA, SIGNAL = 1.4; EXPRESSED IN HEART, SIGNAL = 2.3; EXPRESSED IN BT474, SIGNAL = 1.6; EXPRESSED IN FETAL LIVER, SIGNAL = 1.4; EST_HUMAN HIT: H55341.1, EVALUE 5.00e-93; NT HIT: AF240786.1, EVALUE 2.00e-95; SWISSPROT HIT: P20135, EVALUE 1.00e-12

SEQ ID NO: 21018 - DNA, 136 bp, Homo sapiens
  MAP TO AE000659.1; EXPRESSED IN BONE MARROW, SIGNAL = 0.98; EXPRESSED IN BRAIN, SIGNAL = 1.3; EXPRESSED IN HELA, SIGNAL = 1.7; EXPRESSED IN HEART, SIGNAL = 0.97; EXPRESSED IN PLACENTA, SIGNAL = 1.1; EXPRESSED IN HBL100, SIGNAL = 1.3; EXPRESSED IN BT474, SIGNAL = 1.3; EST_HUMAN HIT: AA311102.1, EVALUE 3.00e-47; NT HIT: M12959.1, EVALUE 3.00e-47; SWISSPROT HIT: P01737, EVALUE 6.90e-02
gcttctgtccgctctgctcagggccctccagcgtggccactgctcagccatgctcctgctgctcgtcccagtgctcgaggtgatttttaccctgggttagtaacattccattacctttcttccttttgtaaatgtg

SEQ ID NO: 21019 - DNA, 76 bp, Homo sapiens
  MAP TO AC012299.1; EXPRESSED IN BT474, SIGNAL =   3; EXPRESSED IN FETAL LIVER, SIGNAL = 3.1; EXPRESSED IN BRAIN, SIGNAL = 2.9; EXPRESSED IN HELA, SIGNAL = 3.5; EXPRESSED IN PLACENTA, SIGNAL = 3.2; EXPRESSED IN ADULT LIVER, SIGNAL = 3.7; EXPRESSED IN LUNG, SIGNAL = 2.9; EXPRESSED IN BONE MARROW, SIGNAL = 3.2; EXPRESSED IN HEART, SIGNAL = 2.7; EXPRESSED IN HBL100, SIGNAL = 3.3; NT HIT: AJ271735.1, EVALUE 4.00e-11; EST_HUMAN HIT: BE968839.1, EVALUE 5.00e-21
ttcatttggtgagatcatgttttcctggatgatcttgatgcttgtggatgttggtcagtgtctgggcattgaagag

SEQ ID NO: 21020 - DNA, 154 bp, Homo sapiens
  MAP TO AE000661.1; EXPRESSED IN HBL100, SIGNAL = 1.3; EXPRESSED IN BT474, SIGNAL =   2; EXPRESSED IN BRAIN, SIGNAL = 1.8; EXPRESSED IN HELA, SIGNAL = 1.9; EXPRESSED IN HEART, SIGNAL = 1.4; EXPRESSED IN PLACENTA, SIGNAL = 1.5; EXPRESSED IN ADULT LIVER, SIGNAL = 2.1; EXPRESSED IN FETAL LIVER, SIGNAL = 1.6; EXPRESSED IN LUNG, SIGNAL = 1.6; EXPRESSED IN BONE MARROW, SIGNAL = 1.8; EST_HUMAN HIT: AA286935.1, EVALUE 8.00e-03; SWISSPROT HIT: Q61292, EVALUE 3.90e+00
atatatactacctcataatttggggatcttcatgccagtcctggaggccaagaaaggagttactactgtcatggacaagttgatcctgattatcatgaagctaaaccccatagcggaactggggatatatgtctacaactcagggaattcactg

SEQ ID NO: 21021 - DNA, 358 bp, Homo sapiens
  MAP TO D87009.1; EXPRESSED IN LUNG, SIGNAL =  12; EXPRESSED IN BONE MARROW, SIGNAL =  11; EXPRESSED IN BT474, SIGNAL = 1.3; EXPRESSED IN HEART, SIGNAL = 1.6; NT HIT: U03901.1, EVALUE 0.00e+00; EST_HUMAN HIT: AW405449.1, EVALUE 0.00e+00; SWISSPROT HIT: P04208, EVALUE 2.00e-32
ccagtctgtgctgactcagccaccctcggtgtctgaagcccccaggcagagggtcaccatctcctgttctggaagcagctccaacatcggaaataatgctgtaaactggtaccagcagctcccaggaaaggctcccaaactcctcatctattatgatgatctgctgccctcaggggtctctgaccgattctctggctccaagtctggcacctcagcctccctggccatcagtgggctccagtctgaggatgaggctgattattactgtgcagcatgggatgacagcctgaatggtcccacagtgctccaggcccagggggaacagagacaagaacccccttccttttctgccaggagg

SEQ ID NO: 21022 - DNA, 256 bp, Homo sapiens
  MAP TO AL049553.15; EXPRESSED IN PLACENTA, SIGNAL = 1.2; EXPRESSED IN ADULT LIVER, SIGNAL = 1.4; EXPRESSED IN LUNG, SIGNAL =   1; EXPRESSED IN BRAIN, SIGNAL = 1.2; EXPRESSED IN BONE MARROW, SIGNAL =   1; EXPRESSED IN HEART, SIGNAL = 1.2; EXPRESSED IN HELA, SIGNAL = 1.1; EXPRESSED IN HBL100, SIGNAL =   1; EXPRESSED IN BT474, SIGNAL = 1.2; EXPRESSED IN FETAL LIVER, SIGNAL = 1.1; EST_HUMAN HIT: AI924653.1, EVALUE 6.00e-66; SWISSPROT HIT: P25033, EVALUE 6.00e-05; NT HIT: AB032958.1, EVALUE 2.00e-03
cccacattgttggtggctgtgcagttgtagtagccagagtcccgggcctgcactgaagggatgctgagggtgccaccctgggccagagcacccaggggcagtgggccaggcccatgggaccactgcagctgggggaggggatcaccgcctgtcagcagacactgcaccgtcacattctccccagggttcaccaccagagtttcgttcacagacagcttcagggctggtggtgctaagaggacaaggaggggggtct

SEQ ID NO: 21023 - DNA, 176 bp, Homo sapiens
  MAP TO AL049629.14; EXPRESSED IN BT474, SIGNAL = 4.6; EXPRESSED IN FETAL LIVER, SIGNAL = 5.6; EXPRESSED IN BRAIN, SIGNAL = 5.2; EXPRESSED IN BONE MARROW, SIGNAL = 4.6; EXPRESSED IN HBL100, SIGNAL = 5.7; EXPRESSED IN PLACENTA, SIGNAL =  16; EXPRESSED IN LUNG, SIGNAL = 6.6; EXPRESSED IN HEART, SIGNAL = 5.9; EXPRESSED IN HELA, SIGNAL = 7.9; EXPRESSED IN ADULT LIVER, SIGNAL = 5.6; NT HIT: gi11438376, EVALUE 8.00e-95; SWISSPROT HIT: P13987, EVALUE 6.00e-30; EST_HUMAN HIT: BE747816.1, EVALUE 1.00e-94
gcaatttcaacgacgtcacaacccgcttgagggaaaatgagctaacgtactactgctgcaagaaggacctgtgtaactttaacgaacagcttgaaaatggtgggacatccttatcagagaaaacagttcttctgctggtgactccatttctggcagcagcctggagccttcatccc

SEQ ID NO: 21024 - DNA, 170 bp, Homo sapiens
  MAP TO AL132642.1; EXPRESSED IN PLACENTA, SIGNAL = 2.4; EXPRESSED IN BT474, SIGNAL = 3.2; EXPRESSED IN HEART, SIGNAL = 2.7; EXPRESSED IN HELA, SIGNAL = 2.4; EXPRESSED IN HBL100, SIGNAL = 1.7; EXPRESSED IN ADULT LIVER, SIGNAL = 1.8; EXPRESSED IN FETAL LIVER, SIGNAL = 1.4; EXPRESSED IN LUNG, SIGNAL = 2.5; EXPRESSED IN BRAIN, SIGNAL = 1.6; EXPRESSED IN BONE MARROW, SIGNAL = 1.5; NT HIT: Z17425.1, EVALUE 3.90e-01; EST_HUMAN HIT: AF150228.1, EVALUE 5.80e-01; SWISSPROT HIT: P05627, EVALUE 9.80e-01
gcctgaggtgatggggcccttgaggggtgattgggccaagcctaggaggttcataaataacactcccagctgctccgtgggctggcgcatctgtgtagggctggcccctaggaagagacagatgtgaagtgtcacggagctccctgagctcagatgggcgtggattctga

SEQ ID NO: 21025 - DNA, 188 bp, Homo sapiens
  MAP TO AF001549.1; EXPRESSED IN BT474, SIGNAL = 1.6; EXPRESSED IN FETAL LIVER, SIGNAL = 1.9; EXPRESSED IN BRAIN, SIGNAL = 1.6; EXPRESSED IN HELA, SIGNAL = 1.7; EXPRESSED IN PLACENTA, SIGNAL = 1.7; EXPRESSED IN ADULT LIVER, SIGNAL = 2.5; EXPRESSED IN LUNG, SIGNAL = 1.1; EXPRESSED IN BONE MARROW, SIGNAL = 1.4; EXPRESSED IN HEART, SIGNAL = 1.4; EXPRESSED IN HBL100, SIGNAL = 1.5; EST_HUMAN HIT: BF338393.1, EVALUE 6.50e-01; SWISSPROT HIT: Q14157, EVALUE 2.50e-01; NT HIT: J05109.1, EVALUE 2.80e-02
ctgtattgctttctccttcagggtcatcagctgaggccggctgaaaccctggacagctcccagcagttccacggtcctgatgaatgtgtcttcctccatgcaccgcaggtcctccagggcccagcaggcgttggcttcggccaacttgaagatgtcatcagaagagggggccacgactccatggcaac

SEQ ID NO: 21026 - DNA, 135 bp, Homo sapiens
  MAP TO AL035072.13; EXPRESSED IN ADULT LIVER, SIGNAL =  16; EXPRESSED IN BT474, SIGNAL =  12; EXPRESSED IN BRAIN, SIGNAL =  13; EXPRESSED IN BONE MARROW, SIGNAL =  13; EXPRESSED IN HBL100, SIGNAL =  14; EXPRESSED IN HEART, SIGNAL =  11; EXPRESSED IN PLACENTA, SIGNAL =  16; EXPRESSED IN FETAL LIVER, SIGNAL =  15; EXPRESSED IN LUNG, SIGNAL =  15; EXPRESSED IN HELA, SIGNAL =  13; NT HIT: M26434.1, EVALUE 1.00e-03; EST_HUMAN HIT: AA442445.1, EVALUE 5.00e-06; SWISSPROT HIT: P10227, EVALUE 4.50e-01
aaggccaaacagcacagtaggtaagatcctggcctctggattcagatgagcctgggttcaaatcctgactctgcctttcactagctgtgtgatcctgggcaaggtcccttactctgtctgccttaatttcttcgt

SEQ ID NO: 21027 - DNA, 255 bp, Homo sapiens
  MAP TO L14561.1; EXPRESSED IN BRAIN, SIGNAL = 4.2; EXPRESSED IN PLACENTA, SIGNAL = 3.6; EXPRESSED IN BT474, SIGNAL = 4.6; EXPRESSED IN ADULT LIVER, SIGNAL = 5.3; EXPRESSED IN BONE MARROW, SIGNAL = 4.5; EXPRESSED IN HEART, SIGNAL = 5.2; EXPRESSED IN HELA, SIGNAL = 4.8; EXPRESSED IN HBL100, SIGNAL = 5.1; EXPRESSED IN FETAL LIVER, SIGNAL = 4.6; EXPRESSED IN LUNG, SIGNAL = 4.7; SWISSPROT HIT: P11505, EVALUE 5.00e-30; NT HIT: L14561.1, EVALUE 0.00e+00; EST_HUMAN HIT: AW611841.1, EVALUE 0.00e+00
tttgtggagaagtttctgttggggaggaagaaggtgaaggtgaaactggttggattgaaggagctgcaatcctcttgtctgtagtgtgtgtggtgttagtaacagctttcaatgactggagtaaggaaaaacagtttagaggtttgcagagccgaattgaacaagaacagaagttcactgtcatcaggggtggtcaggtcattcagatacctgtagctgacattactgttggagatattgctcaagtgaaatatg

SEQ ID NO: 21028 - DNA, 144 bp, Homo sapiens
  MAP TO AC012366.2; EXPRESSED IN HBL100, SIGNAL =   5; EXPRESSED IN BT474, SIGNAL = 4.7; EXPRESSED IN BRAIN, SIGNAL = 4.7; EXPRESSED IN HEART, SIGNAL = 4.3; EXPRESSED IN HELA, SIGNAL = 6.5; EXPRESSED IN PLACENTA, SIGNAL = 5.5; EXPRESSED IN ADULT LIVER, SIGNAL = 6.2; EXPRESSED IN FETAL LIVER, SIGNAL = 6.3; EXPRESSED IN LUNG, SIGNAL = 3.8; EXPRESSED IN BONE MARROW, SIGNAL = 4.5; SWISSPROT HIT: P35270, EVALUE 2.00e-20; EST_HUMAN HIT: BE395859.1, EVALUE 8.00e-76; NT HIT: AB017548.1, EVALUE 8.00e-76
tttccagtaagctcagcagtttctgggctgacaccttgcaatccaccagcttcccctttgccttcagctcctgcagcccttttcgcatgtctgggtccacggaggtctcccgggccaactgctgcatgtctgtgtccagaggac

SEQ ID NO: 21029 - DNA, 139 bp, Homo sapiens
  MAP TO AF001905.1; EXPRESSED IN BONE MARROW, SIGNAL = 1.5; EXPRESSED IN PLACENTA, SIGNAL = 1.9; EXPRESSED IN HBL100, SIGNAL = 1.6; EXPRESSED IN BT474, SIGNAL = 1.6; EXPRESSED IN LUNG, SIGNAL = 1.2; EXPRESSED IN BRAIN, SIGNAL = 1.7; EXPRESSED IN HEART, SIGNAL = 1.3; EXPRESSED IN HELA, SIGNAL = 1.5; EXPRESSED IN ADULT LIVER, SIGNAL = 2.1; EXPRESSED IN FETAL LIVER, SIGNAL = 1.7; SWISSPROT HIT: P57249, EVALUE 9.10e+00; NT HIT: AJ271735.1, EVALUE 3.10e-01; EST_HUMAN HIT: M78474.1, EVALUE 5.00e-04
caatgctgtgctggtttcagatcttatgagaggcagttctactggtggtgaaaacaaaagtgcttgggttaaccaccctcagatccaggtggctcagcacagagagaggggatttatttgtttgggagaaagtaaggga

SEQ ID NO: 21030 - DNA, 181 bp, Homo sapiens
  MAP TO L77570.1; EXPRESSED IN LUNG, SIGNAL = 1.9; EXPRESSED IN HBL100, SIGNAL =   2; EXPRESSED IN HEART, SIGNAL = 2.2; EXPRESSED IN PLACENTA, SIGNAL = 1.6; EXPRESSED IN ADULT LIVER, SIGNAL = 1.9; EXPRESSED IN FETAL LIVER, SIGNAL = 1.8; EXPRESSED IN BT474, SIGNAL = 1.7; EXPRESSED IN BRAIN, SIGNAL = 1.9; EXPRESSED IN BONE MARROW, SIGNAL = 2.1; EXPRESSED IN HELA, SIGNAL =   2; NT HIT: L77570.1, EVALUE 1.00e-69; EST_HUMAN HIT: R23410.1, EVALUE 1.00e-69; SWISSPROT HIT: P34420, EVALUE 3.00e-08
aaactcttcctcagcctggtagagccaagcgtggcgtgcccggcttctctccttggccacctccatgatctcctggaaggaggcattgtcctcactcgtgtagcggctcaggaagacatctaggctgggcagcggctccttctcctcctcctctccagcctctcctgcttaggggttgcgg

SEQ ID NO: 21031 - DNA, 425 bp, Homo sapiens
  MAP TO AC012140.1; EXPRESSED IN BONE MARROW, SIGNAL = 6.8; EXPRESSED IN HELA, SIGNAL = 6.5; EXPRESSED IN PLACENTA, SIGNAL = 6.3; EXPRESSED IN HBL100, SIGNAL = 4.7; EXPRESSED IN BT474, SIGNAL = 4.8; EXPRESSED IN BRAIN, SIGNAL = 2.9; EXPRESSED IN LUNG, SIGNAL = 4.3; EXPRESSED IN HEART, SIGNAL = 2.8; EXPRESSED IN ADULT LIVER, SIGNAL = 3.6; EXPRESSED IN FETAL LIVER, SIGNAL = 5.8; NT HIT: gi11036645, EVALUE 0.00e+00; SWISSPROT HIT: P57053, EVALUE 3.00e-47; EST_HUMAN HIT: BF344622.1, EVALUE 0.00e+00
aagtttacttagcgctggtgtacttggtgacggccttggtgccctcggacacggcgtgcttggccaactccccgggcagcagcaggcgcacggccgtctggatctccctggaggtgatggtcgagcgcttgttgtaatgcggcaggcgggaagcctcacctgcgatgcgttcgaagatgtcgttgacgaaggagttcatgattcccatggccttagaggagatgccggtgtcggggtggacctgcttcagcaccttgtacacgtatacggagtagctctccttgcggctgcgcttgcgcttcctgccgtccttcttctgcgccttagtcacggctttcttcgagcccttcttgggcgcgggagcggacttcgctggctccggcatgttgaaggtgaactacgagcctgagacgagcagcagatcg

SEQ ID NO: 21032 - DNA, 390 bp, Homo sapiens; identical to SEQ ID NO: 4279
  MAP TO AL035252.5; EXPRESSED IN BT474, SIGNAL = 1.7; EXPRESSED IN FETAL LIVER, SIGNAL = 1.5; EXPRESSED IN BRAIN, SIGNAL = 1.8; EXPRESSED IN BONE MARROW, SIGNAL = 1.6; EXPRESSED IN HBL100, SIGNAL = 1.3; EXPRESSED IN PLACENTA, SIGNAL = 1.6; EXPRESSED IN LUNG, SIGNAL = 1.8; EXPRESSED IN HEART, SIGNAL = 1.3; EXPRESSED IN HELA, SIGNAL = 1.5; EXPRESSED IN ADULT LIVER, SIGNAL = 1.7; NT HIT: AB033041.1, EVALUE 2.10e-01; SWISSPROT HIT: P27571, EVALUE 2.80e+00

SEQ ID NO: 21033 - DNA, 192 bp, Homo sapiens
  MAP TO AC012668.1; EXPRESSED IN BT474, SIGNAL = 3.8; EXPRESSED IN ADULT LIVER, SIGNAL =   9; EXPRESSED IN FETAL LIVER, SIGNAL = 6.7; EXPRESSED IN BONE MARROW, SIGNAL = 4.1; EXPRESSED IN LUNG, SIGNAL = 8.3; EXPRESSED IN BRAIN, SIGNAL = 3.9; EXPRESSED IN HELA, SIGNAL = 4.3; EXPRESSED IN HEART, SIGNAL = 4.3; EXPRESSED IN PLACENTA, SIGNAL =  34; EXPRESSED IN HBL100, SIGNAL =   5; EST_HUMAN HIT: AU140998.1, EVALUE 1.00e-104; SWISSPROT HIT: P02751, EVALUE 2.00e-30; NT HIT: X02761.1, EVALUE 1.00e-104
agcgtggggtgccagtggtttcttgttgaatgacaacaggtgtactttcttgattttcttccacagcatagatagtgatgttatactgaacaccaggttgcaagtcactgagggtgacggagtttgcagtttcaggaaggttgagttctgtgctgctaccttctactgatggcgaatagactattctgtacc

SEQ ID NO: 21034 - DNA, 212 bp, Homo sapiens
  MAP TO AC012145.1; EXPRESSED IN HEART, SIGNAL =   2; EXPRESSED IN FETAL LIVER, SIGNAL = 2.1; EXPRESSED IN BRAIN, SIGNAL = 2.4; EXPRESSED IN HBL100, SIGNAL = 2.1; EXPRESSED IN HELA, SIGNAL = 2.2; EXPRESSED IN PLACENTA, SIGNAL = 2.1; EXPRESSED IN ADULT LIVER, SIGNAL = 2.5; EXPRESSED IN BT474, SIGNAL = 2.2; EXPRESSED IN LUNG, SIGNAL = 2.3; EXPRESSED IN BONE MARROW, SIGNAL = 2.4; EST_HUMAN HIT: BF325951.1, EVALUE 1.90e-01; NT HIT: gi5031954, EVALUE 1.00e-116; SWISSPROT HIT: O00624, EVALUE 4.00e-34
ctttgtatcaaattccttgatggatatgctggagttattgaaggcatctgcaacaggcccctcagtggaggcattagatagaccttgctgctgagtggtgttcaccatggcgatgatcgcaatgctcagactcacacgctgcgttatcatggtgaagtttgagaagtgcatgataagagccagcccatagcgtaatgaacagaaatctggac

SEQ ID NO: 21035 - DNA, 121 bp, Homo sapiens
  MAP TO AC012132.1; EXPRESSED IN PLACENTA, SIGNAL = 1.4; EXPRESSED IN HEART, SIGNAL = 2.4; EXPRESSED IN FETAL LIVER, SIGNAL = 1.4; EXPRESSED IN ADULT LIVER, SIGNAL = 1.3; EXPRESSED IN BRAIN, SIGNAL = 2.1; EXPRESSED IN HELA, SIGNAL =   2; EXPRESSED IN HBL100, SIGNAL =   1; EXPRESSED IN BT474, SIGNAL = 1.8; EXPRESSED IN LUNG, SIGNAL = 1.8; EXPRESSED IN BONE MARROW, SIGNAL = 1.8; EST_HUMAN HIT: BF542136.1, EVALUE 1.60e+00; NT HIT: AF099810.1, EVALUE 9.00e-01
gtcaccagcaaaggcgaaataactgggatcaactagtagaggatgccctgctgtacaacagttgttgttgatgttggtggtggtggtggtgatggtgctgctggtggtggcgggaagtgat

SEQ ID NO: 21036 - DNA, 184 bp, Homo sapiens
  MAP TO AL122001.5; EXPRESSED IN LUNG, SIGNAL = 2.6; EXPRESSED IN BRAIN, SIGNAL = 2.8; EXPRESSED IN PLACENTA, SIGNAL = 2.6; EXPRESSED IN BT474, SIGNAL = 2.2; EXPRESSED IN ADULT LIVER, SIGNAL = 2.8; EXPRESSED IN BONE MARROW, SIGNAL = 2.3; EXPRESSED IN HEART, SIGNAL = 2.7; EXPRESSED IN HELA, SIGNAL = 2.5; EXPRESSED IN HBL100, SIGNAL = 2.5; EXPRESSED IN FETAL LIVER, SIGNAL =   3; SWISSPROT HIT: O00519, EVALUE 2.00e-19; NT HIT: AF098018.1, EVALUE 1.00e-99; EST_HUMAN HIT: AW381232.1, EVALUE 1.00e-78
cttctgcagcatcttgtcccagatatccccaaagtagcccctgtaatgttccatctgggcctcgtcctcagcagtcaccgtggtgacaggcaccacccctgcagggaagtccaggcagttgtacagcatagtgtagctgacggcccctggaacacattacaggcagctgcagcaggccctgaga

SEQ ID NO: 21037 - DNA, 416 bp, Homo sapiens
  MAP TO AL049822.19; EXPRESSED IN ADULT LIVER, SIGNAL = 0.95; EXPRESSED IN BRAIN, SIGNAL = 1.4; EXPRESSED IN LUNG, SIGNAL = 1.1; EXPRESSED IN BONE MARROW, SIGNAL = 1.3; EXPRESSED IN PLACENTA, SIGNAL = 1.6; EXPRESSED IN HEART, SIGNAL = 1.6; EXPRESSED IN HELA, SIGNAL = 1.5; EXPRESSED IN HBL100, SIGNAL = 2.1; EXPRESSED IN BT474, SIGNAL = 1.5; EXPRESSED IN FETAL LIVER, SIGNAL =   2; NT HIT: X60483.1, EVALUE 0.00e+00; EST_HUMAN HIT: AI494175.1, EVALUE 0.00e+00; SWISSPROT HIT: P02304, EVALUE 1.00e-40
tcagttcggtccgccaactgtcgtataaaggcgctgcctcaggccagaggcctcacaaagcgttgggtgagactcctcttgctcgtcatgtctggccgcggcaaaggcgggaagggtcttggcaaaggcggcgctaagcgccaccgtaaagtactgcgcgacaatatccagggcatcaccaagccggccatccggcgccttgctcgccgcggcggcgtgaagcgcatctccggcctcatctacgaggagactcgcggggtgctgaaggtgttcctggagaacgtgatccgggacgccgtgacctatacagagcacgccaagcgcaagacggtcaccgccatggatgtggtctacgcgctcaagcgccagggccgcaccctctacggtttcggtggttgagcgtccctttctatcaa

SEQ ID NO: 21038 - DNA, 166 bp, Homo sapiens
  MAP TO AL050320.17; EXPRESSED IN ADULT LIVER, SIGNAL = 9.2; EXPRESSED IN BT474, SIGNAL =   6; EXPRESSED IN FETAL LIVER, SIGNAL = 7.2; EXPRESSED IN BRAIN, SIGNAL =   8; EXPRESSED IN BONE MARROW, SIGNAL = 8.2; EXPRESSED IN LUNG, SIGNAL = 7.6; EXPRESSED IN HBL100, SIGNAL = 9.4; EXPRESSED IN PLACENTA, SIGNAL = 7.9; EXPRESSED IN HELA, SIGNAL = 5.2; EXPRESSED IN HEART, SIGNAL = 6.9; EST_HUMAN HIT: AI242822.1, EVALUE 2.00e-03; SWISSPROT HIT: Q09735, EVALUE 2.20e+00; NT HIT: AJ277546.2, EVALUE 1.00e-04
tggaggaatggttaaaacagctgattcagaaatgctttgttgcagttctaacaagccccaggtaacattgctgctggtggtccagggaccactctttgagaaccactgctgtatgatgaccttgtaatcactctctcccttctgtctggcactcccatcatcatga

SEQ ID NO: 21039 - DNA, 142 bp, Homo sapiens
  MAP TO AL122020.1; EXPRESSED IN BONE MARROW, SIGNAL = 5.3; EXPRESSED IN BRAIN, SIGNAL = 4.9; EXPRESSED IN PLACENTA, SIGNAL = 5.7; EXPRESSED IN BT474, SIGNAL = 4.2; EXPRESSED IN HEART, SIGNAL = 5.1; EXPRESSED IN HELA, SIGNAL = 6.1; EXPRESSED IN HBL100, SIGNAL =   6; EXPRESSED IN ADULT LIVER, SIGNAL = 5.7; EXPRESSED IN FETAL LIVER, SIGNAL = 6.4; EXPRESSED IN LUNG, SIGNAL = 5.2; EST_HUMAN HIT: BF363327.1, EVALUE 8.00e-03; SWISSPROT HIT: P32957, EVALUE 2.40e+00; NT HIT: gi6680855, EVALUE 2.70e-01
tcactggatgcctacagcaagcggggacagaatggaggtaactgctgtccctaagcaccagcagcttcccacgcttccttgtgaggtacttgctcccagttgtctcactccttttgctcttctgcagttttcttctgtgtat

SEQ ID NO: 21040 - DNA, 96 bp, Homo sapiens
  MAP TO AC011422.2; EXPRESSED IN PLACENTA, SIGNAL = 1.7; EXPRESSED IN FETAL LIVER, SIGNAL = 1.9; EXPRESSED IN LUNG, SIGNAL = 1.7; EXPRESSED IN BRAIN, SIGNAL = 1.5; EXPRESSED IN HEART, SIGNAL = 1.8; EXPRESSED IN HELA, SIGNAL =   2; EXPRESSED IN HBL100, SIGNAL = 1.8; EXPRESSED IN BT474, SIGNAL = 1.6; EXPRESSED IN ADULT LIVER, SIGNAL =   2; EXPRESSED IN BONE MARROW, SIGNAL = 1.5; EST_HUMAN HIT: AA569592.1, EVALUE 2.00e-47; NT HIT: X06212.1, EVALUE 2.00e-01
ctgtctgatgttgcttcttttgcaactaaacttaaaaacactctcatccagtaccatagcattgaagaagataagtggcgagttgctaagaaaacg

SEQ ID NO: 21041 - DNA, 447 bp, Homo sapiens
  MAP TO AC011504.2; EXPRESSED IN PLACENTA, SIGNAL =  10; EXPRESSED IN HEART, SIGNAL =   9; EXPRESSED IN LUNG, SIGNAL =  10; EXPRESSED IN BRAIN, SIGNAL = 8.6; EXPRESSED IN HELA, SIGNAL = 9.1; EXPRESSED IN HBL100, SIGNAL =  11; EXPRESSED IN BT474, SIGNAL = 8.9; EXPRESSED IN ADULT LIVER, SIGNAL =  10; EXPRESSED IN FETAL LIVER, SIGNAL =  10; EXPRESSED IN BONE MARROW, SIGNAL = 9.5; EST_HUMAN HIT: AW236481.1, EVALUE 1.10e-01; SWISSPROT HIT: P35125, EVALUE 8.80e-01; NT HIT: gi11425376, EVALUE 0.00e+00
tgatacatccagaatttgctgtgctacttgcaagtccgttaaaggctgctaagccatcagaactgtaggccctgaggaccgacagcatgttcatcggcttgtccaggctctggggcccccgctccggctttggcaggcccgccaaggggtcctgggcttggagaagaccctggctgtgccactgcttctccggtgcttgggataaaggtgagaccagtccctggacgggctgggaggtgcctgtgggctgcaggctgtccccgccatcgctgctgctgtctttgctgagggcagacagtggcttggtcatcatttccggttcggtttcaacatcctcttcatcgttgttctcccccttggaggagtccatgtcctctgaggaggcaatgtcagagaggtcatcagtagtgttcttactcgtggtttcggggatcaggatggggacat

SEQ ID NO: 21042 - DNA, 213 bp, Homo sapiens
  MAP TO AC012122.1; EXPRESSED IN ADULT LIVER, SIGNAL = 3.7; EXPRESSED IN LUNG, SIGNAL = 4.9; EXPRESSED IN BONE MARROW, SIGNAL =   5; EXPRESSED IN HELA, SIGNAL = 5.1; EXPRESSED IN BT474, SIGNAL = 5.1; EXPRESSED IN FETAL LIVER, SIGNAL = 4.9; EXPRESSED IN BRAIN, SIGNAL = 5.3; EXPRESSED IN PLACENTA, SIGNAL = 3.7; EXPRESSED IN HEART, SIGNAL = 4.8; EXPRESSED IN HBL100, SIGNAL = 6.6; EST_HUMAN HIT: BE783949.1, EVALUE 8.00e-81; SWISSPROT HIT: P30658, EVALUE 2.00e-03
acgaaggacagcatttgtgcagcgatgggcccctcggggtcactctcggacgaggaggcctgctcacccttccctggctcaatctcagcagggggcctggtgctgctgcacttctccagacctgtgtgaacagaggcaccacctggccagggggatgctgcggccgtcatgggagctgtccccctctgtggcttcgaagctggtatggaggac

SEQ ID NO: 21043 - DNA, 120 bp, Homo sapiens
  MAP TO AL096829.12; EXPRESSED IN ADULT LIVER, SIGNAL =  13; EXPRESSED IN BT474, SIGNAL = 8.7; EXPRESSED IN BRAIN, SIGNAL = 9.1; EXPRESSED IN HELA, SIGNAL = 9.1; EXPRESSED IN FETAL LIVER, SIGNAL = 9.3; EXPRESSED IN LUNG, SIGNAL = 9.7; EXPRESSED IN BONE MARROW, SIGNAL = 8.6; EXPRESSED IN PLACENTA, SIGNAL = 7.2; EXPRESSED IN HEART, SIGNAL = 7.8; EXPRESSED IN HBL100, SIGNAL = 8.9; NT HIT: gi11417118, EVALUE 4.00e-40; EST_HUMAN HIT: AW067956.1, EVALUE 4.00e-40; SWISSPROT HIT: O46655, EVALUE 2.30e+00
tccagaatgaaagggggaaacctagacctgaatgggcttgaccatctcacagctgctcacgtgatgaccatattcgtggcaggtaaaaagattgctgtatcaactcaagaaagcagtagc

SEQ ID NO: 21044 - DNA, 186 bp, Homo sapiens
  MAP TO AC012130.1; EXPRESSED IN PLACENTA, SIGNAL = 2.9; EXPRESSED IN HEART, SIGNAL = 3.3; EXPRESSED IN LUNG, SIGNAL = 3.2; EXPRESSED IN BRAIN, SIGNAL = 2.5; EXPRESSED IN HELA, SIGNAL = 2.8; EXPRESSED IN HBL100, SIGNAL = 3.4; EXPRESSED IN BT474, SIGNAL = 3.1; EXPRESSED IN ADULT LIVER, SIGNAL = 2.6; EXPRESSED IN FETAL LIVER, SIGNAL = 3.1; EXPRESSED IN BONE MARROW, SIGNAL =   3; NT HIT: D63706.1, EVALUE 6.80e+00; SWISSPROT HIT: P39768, EVALUE 4.90e+00
ctctgaggactcctcggatcccgcctcgccctcgccctggtcctcatctccgtccgagtccagctcctgatagcggtgcatgagctgctggagcaggtaggaggaggctatgttagagctgcctttcgtcttctgccccatgggaaaagaccagcaaggctgacgctctttttctgcgcgaaactg

SEQ ID NO: 21045 - DNA, 105 bp, Homo sapiens
  MAP TO AL096865.7; EXPRESSED IN BONE MARROW, SIGNAL = 0.91; EXPRESSED IN LUNG, SIGNAL =   1; EXPRESSED IN PLACENTA, SIGNAL = 3.3; EXPRESSED IN ADULT LIVER, SIGNAL = 1.6; EXPRESSED IN BT474, SIGNAL = 0.93; EXPRESSED IN HEART, SIGNAL =   1; EXPRESSED IN HBL100, SIGNAL = 1.2; EXPRESSED IN BRAIN, SIGNAL =   2; NT HIT: gi11417565, EVALUE 1.00e-52; SWISSPROT HIT: Q03347, EVALUE 6.00e-14; EST_HUMAN HIT: AI806473.1, EVALUE 2.00e-52
ttctgggttcccgaggtccatctactgtaactttaattgctctgtgataggtagctacttggggaggatttgtgaagacggttatggtcaaggtgaaactcttgc

SEQ ID NO: 21046 - DNA, 94 bp, Homo sapiens
  MAP TO AC007684.2; EXPRESSED IN PLACENTA, SIGNAL = 1.2; EXPRESSED IN HBL100, SIGNAL = 0.72; EXPRESSED IN BRAIN, SIGNAL = 0.79; EXPRESSED IN BT474, SIGNAL = 0.81; EXPRESSED IN BONE MARROW, SIGNAL = 1.2; EXPRESSED IN FETAL LIVER, SIGNAL = 0.81; EXPRESSED IN HEART, SIGNAL = 0.8; EST_HUMAN HIT: AL044050.1, EVALUE 4.00e-46; SWISSPROT HIT: O78437, EVALUE 9.20e+00; NT HIT: gi11430481, EVALUE 3.00e-46
ttgtgtgctggaatagcaacaggtaacttttgcatttgtcttgcataatcaaaaagccctggtaaattatgggaataaagctgagaagctttac

SEQ ID NO: 21047 - DNA, 164 bp, Homo sapiens
  MAP TO AC012134.1; EXPRESSED IN BT474, SIGNAL = 1.4; EXPRESSED IN ADULT LIVER, SIGNAL = 1.8; EXPRESSED IN LUNG, SIGNAL = 1.5; EXPRESSED IN BONE MARROW, SIGNAL = 1.6; EXPRESSED IN FETAL LIVER, SIGNAL = 1.6; EXPRESSED IN BRAIN, SIGNAL = 1.5; EXPRESSED IN PLACENTA, SIGNAL = 1.4; EXPRESSED IN HEART, SIGNAL = 1.4; EXPRESSED IN HELA, SIGNAL = 1.4; EXPRESSED IN HBL100, SIGNAL = 1.7; SWISSPROT HIT: P00584, EVALUE 8.60e+00; EST_HUMAN HIT: AW576138.1, EVALUE 5.60e-01
ctccccagccatgtggcatgggagctcatgtttgattggcagcaggacatcctgaacctgtggaagatttttagggaagagaaggcagatgggaggagggagggacctgagtctgtgctcatgtttctccatatcccgctcttgtggacgtcagacaggacagt

SEQ ID NO: 21048 - DNA, 100 bp, Homo sapiens
  MAP TO AL109614.15; EXPRESSED IN BT474, SIGNAL =  13; EXPRESSED IN BRAIN, SIGNAL = 5.6; EXPRESSED IN BONE MARROW, SIGNAL = 3.8; EXPRESSED IN HELA, SIGNAL =   3; EXPRESSED IN ADULT LIVER, SIGNAL =  10; EXPRESSED IN FETAL LIVER, SIGNAL = 6.2; EXPRESSED IN LUNG, SIGNAL = 4.2; EXPRESSED IN PLACENTA, SIGNAL = 5.5; EXPRESSED IN HEART, SIGNAL =  12; EXPRESSED IN HBL100, SIGNAL = 4.3; NT HIT: AJ011432.1, EVALUE 3.00e-03
atggacccagaccctctattgtgccctgtggagataatggtaaccaagaaagatgtgatctctgccctaaaaagatcacagcctggcgcctcccattccg

SEQ ID NO: 21049 - DNA, 106 bp, Homo sapiens
  MAP TO AC012441.1; EXPRESSED IN ADULT LIVER, SIGNAL = 2.5; EXPRESSED IN LUNG, SIGNAL = 3.4; EXPRESSED IN BONE MARROW, SIGNAL =   3; EXPRESSED IN HELA, SIGNAL = 3.2; EXPRESSED IN BT474, SIGNAL = 3.1; EXPRESSED IN FETAL LIVER, SIGNAL = 3.2; EXPRESSED IN BRAIN, SIGNAL = 3.4; EXPRESSED IN PLACENTA, SIGNAL = 3.4; EXPRESSED IN HEART, SIGNAL = 2.9; EXPRESSED IN HBL100, SIGNAL = 3.9; SWISSPROT HIT: Q61087, EVALUE 1.80e+00; NT HIT: gi7949011, EVALUE 3.60e+00
cattttacccacgagtacaatgagccccagaccgcgttcctgcgtcacttgggcagtggtgacaggatgcagacccaggcctgtaggagcaggcagctccttctga

SEQ ID NO: 21050 - DNA, 157 bp, Homo sapiens
  MAP TO AL109653.13; EXPRESSED IN HBL100, SIGNAL =   1; EXPRESSED IN HEART, SIGNAL = 1.4; NT HIT: M21139.1, EVALUE 1.40e+00; SWISSPROT HIT: Q03427, EVALUE 3.90e+00
ttctgccagccataaagctcccctccccaacagctcccaaatcactctcaagcctgaagagtgctgccctgtcttcaacaccacaactacacccgggctgccggaactaaggtgtattccccagcaagatttaaagtccactcgggaaagtaataca

SEQ ID NO: 21051 - DNA, 273 bp, Homo sapiens
  MAP TO AF003530.1; EXPRESSED IN BONE MARROW, SIGNAL =  15; EXPRESSED IN PLACENTA, SIGNAL =  14; EXPRESSED IN FETAL LIVER, SIGNAL =  16; EXPRESSED IN BRAIN, SIGNAL =  13; EXPRESSED IN LUNG, SIGNAL =  16; EXPRESSED IN HEART, SIGNAL =  11; EXPRESSED IN HELA, SIGNAL =  16; EXPRESSED IN HBL100, SIGNAL =  12; EXPRESSED IN BT474, SIGNAL =  15; EXPRESSED IN ADULT LIVER, SIGNAL =  14; NT HIT: gi11422886, EVALUE 0.00e+00; SWISSPROT HIT: O14627, EVALUE 3.00e-50; EST_HUMAN HIT: BF183058.1, EVALUE 9.80e-01
ctgcaccgtcttgcgcatccatgcataggggctgtggcggctcctgctgggggaactggccttggcggcgcctgcgtccgtcgggacaagcgacccgccagcctggcctggtaggctgctgccgctagttccaccgcccacagggcccaagttgctgtagtcggtcgagcagaaagcggcggggctagaggtcacgtcgttcaccggcactgtgcccattgtactagacggcccaggatacacgctccagtcttctcgcgggggactgtaggg

SEQ ID NO: 21052 - DNA, 122 bp, Homo sapiens
  MAP TO AC012448.1; EXPRESSED IN BT474, SIGNAL = 1.3; EXPRESSED IN ADULT LIVER, SIGNAL = 2.1; EXPRESSED IN LUNG, SIGNAL = 2.3; EXPRESSED IN BONE MARROW, SIGNAL = 2.2; EXPRESSED IN PLACENTA, SIGNAL = 1.9; EXPRESSED IN FETAL LIVER, SIGNAL = 2.4; EXPRESSED IN BRAIN, SIGNAL =   2; EXPRESSED IN HEART, SIGNAL = 3.3; EXPRESSED IN HELA, SIGNAL =   2; EXPRESSED IN HBL100, SIGNAL = 1.9; SWISSPROT HIT: P15623, EVALUE 4.00e+00; EST_HUMAN HIT: H42135.1, EVALUE 1.60e+00; NT HIT: Z71627.1, EVALUE 2.70e-01
tagctaaggggctctctgttgtaacggttcccgcagccatcagtacattagctccaactgctgctgtagccattgccatttacatttctcccaggagaattcagatgaaaaaaggaaactgt

SEQ ID NO: 21053 - DNA, 260 bp, Homo sapiens
  MAP TO AF015416.1; EXPRESSED IN BONE MARROW, SIGNAL = 3.9; EXPRESSED IN LUNG, SIGNAL = 2.9; EXPRESSED IN BRAIN, SIGNAL = 3.3; EXPRESSED IN PLACENTA, SIGNAL = 2.5; EXPRESSED IN HBL100, SIGNAL = 1.5; EXPRESSED IN HELA, SIGNAL = 3.4; EXPRESSED IN HEART, SIGNAL = 3.4; EXPRESSED IN BT474, SIGNAL = 3.4; EXPRESSED IN FETAL LIVER, SIGNAL =   3; EXPRESSED IN ADULT LIVER, SIGNAL = 3.1; EST_HUMAN HIT: AA279231.1, EVALUE 1.00e-110; NT HIT: gi6912659, EVALUE 1.00e-115; SWISSPROT HIT: P53686, EVALUE 4.00e-04
gagcagtgagaagggcagccccttggatggtcctcctcagcagtctgtaccttcccagtttcccgctgcacaaggtcccgcatctcttctgtccagcccagaagctccactaggctttccacgccgtgaaccacgtcccccagctgggccacgtccctgctgcgaggatgccaagccaagggccccaccaagtcccggttgatgagcagtcggggaactgagctccgcacggcctcggtcaagctggcaaaaggctccac

SEQ ID NO: 21054 - DNA, 511 bp, Homo sapiens
  MAP TO AC007256.1; EXPRESSED IN HEART, SIGNAL = 0.98; EXPRESSED IN PLACENTA, SIGNAL = 1.2; EXPRESSED IN HELA, SIGNAL = 4.8; EXPRESSED IN ADULT LIVER, SIGNAL = 1.2; EXPRESSED IN BT474, SIGNAL = 1.1; EXPRESSED IN FETAL LIVER, SIGNAL = 1.1; EXPRESSED IN LUNG, SIGNAL = 1.1; EXPRESSED IN BONE MARROW, SIGNAL =   1; EST_HUMAN HIT: AU130771.1, EVALUE 0.00e+00; NT HIT: AB037781.1, EVALUE 0.00e+00; SWISSPROT HIT: P54697, EVALUE 1.90e-02
acttggataagtggttggtacttgatggtatcctacccttcttacaacaaattccatccaaagagtctgcagtcctcatgggtattttaggcatttacaaatgtacttttactcataagttgggaatcaccaaagagcagctgactggaaaagtattgcctcatcttattcccctgagtattgaaaacaatcttaatcagttcaattctttcatttccatcataaaagagatgctgaataggttggagtctgaacataagactaagctggagcaacttcatataatgcaagaacaacagaaatctttggacataggaaatcaaatgaatgtttctgaggagacaaaagttacaaatattgggaatcagcaaattgacaaggtttttagccacattggagcagaccttctgactggcagtgattccgaaaataaagaggatgggtttcagaataaacataaaagagcatcacttacacttgaagaaaaacaaaaattagcaagagaacaaga

SEQ ID NO: 21055 - DNA, 83 bp, Homo sapiens
  MAP TO AL096774.8; EXPRESSED IN BRAIN, SIGNAL = 1.5; EXPRESSED IN BONE MARROW, SIGNAL = 1.6; EXPRESSED IN LUNG, SIGNAL = 1.6; EXPRESSED IN PLACENTA, SIGNAL = 1.7; EXPRESSED IN FETAL LIVER, SIGNAL = 1.7; EXPRESSED IN ADULT LIVER, SIGNAL = 1.8; EXPRESSED IN BT474, SIGNAL =   2; EXPRESSED IN HEART, SIGNAL = 1.4; EXPRESSED IN HELA, SIGNAL = 1.6; EXPRESSED IN HBL100, SIGNAL = 1.8; SWISSPROT HIT: Q92558, EVALUE 1.90e-02; NT HIT: gi11386182, EVALUE 2.00e-25; EST_HUMAN HIT: BF370207.1, EVALUE 2.00e-39
ctaggcaacgtctgacggcacaggtgccttggctcgatgttcctcgttactaacggcatggtggacctgcttcaggcaatgtt

SEQ ID NO: 21056 - DNA, 201 bp, Homo sapiens; identical to SEQ ID NO: 19307
  MAP TO AL096814.11; EXPRESSED IN PLACENTA, SIGNAL = 2.6; EXPRESSED IN HBL100, SIGNAL = 2.9; EXPRESSED IN HEART, SIGNAL = 2.2; EXPRESSED IN BRAIN, SIGNAL = 2.5; EXPRESSED IN BONE MARROW, SIGNAL = 2.4; EXPRESSED IN HELA, SIGNAL = 2.6; EXPRESSED IN BT474, SIGNAL = 2.8; EXPRESSED IN ADULT LIVER, SIGNAL = 2.6; EXPRESSED IN FETAL LIVER, SIGNAL = 2.7; EXPRESSED IN LUNG, SIGNAL = 2.3; NT HIT: gi11417666, EVALUE 1.00e-109; EST_HUMAN HIT: BE937608.1, EVALUE 1.00e-108; SWISSPROT HIT: P43080, EVALUE 1.00e-35

SEQ ID NO: 21057 - DNA, 151 bp, Homo sapiens
  MAP TO AL096862.15; EXPRESSED IN BONE MARROW, SIGNAL = 1.2; EXPRESSED IN LUNG, SIGNAL = 1.6; EXPRESSED IN HBL100, SIGNAL = 1.3; EXPRESSED IN HELA, SIGNAL = 1.5; EXPRESSED IN PLACENTA, SIGNAL = 1.5; EXPRESSED IN HEART, SIGNAL = 3.4; EXPRESSED IN ADULT LIVER, SIGNAL = 2.1; EXPRESSED IN BT474, SIGNAL = 2.5; EXPRESSED IN FETAL LIVER, SIGNAL = 1.7; EXPRESSED IN BRAIN, SIGNAL = 2.5; SWISSPROT HIT: P28955, EVALUE 1.30e+00; NT HIT: X61658.1, EVALUE 5.40e+00; EST_HUMAN HIT: AA459040.1, EVALUE 2.00e-08
aaggagaaatattttcctagatatgcaagaactgaaggaattcatcatcactagattggttctacaggaaatgctcaagagattattaaacctggaacaaaaggataaaatctaccaccatgaaaacacactggagtatataactcactgg

SEQ ID NO: 21058 - DNA, 204 bp, Homo sapiens
  MAP TO AC007251.1; EXPRESSED IN FETAL LIVER, SIGNAL = 1.6; EXPRESSED IN ADULT LIVER, SIGNAL = 1.1; EXPRESSED IN LUNG, SIGNAL = 1.3; EXPRESSED IN HELA, SIGNAL =   2; EXPRESSED IN PLACENTA, SIGNAL = 1.4; EXPRESSED IN HBL100, SIGNAL = 1.9; EXPRESSED IN HEART, SIGNAL = 1.5; EST_HUMAN HIT: BE537479.1, EVALUE 7.20e-01; NT HIT: AE001659.1, EVALUE 1.20e-01; SWISSPROT HIT: P13529, EVALUE 3.70e+00
aatgtgtccaccttgtcttctgagtttaagtgctatgacctggcctctgataatctggaaatcttttcctcatataatcagagagcttatcttaaaggtggtatcctctatggctatacctggcctacaaaagagagcaatcgcaaatcttttcaaaactgcaagtgcatctctcactaatacattcctcagtgccttagtgca

SEQ ID NO: 21059 - DNA, 112 bp, Homo sapiens
  MAP TO AL008632.1; EXPRESSED IN BONE MARROW, SIGNAL = 1.1; EXPRESSED IN LUNG, SIGNAL = 1.2; EXPRESSED IN BRAIN, SIGNAL = 1.3; EXPRESSED IN HBL100, SIGNAL = 0.98; EXPRESSED IN PLACENTA, SIGNAL = 1.2; EXPRESSED IN HELA, SIGNAL =   1; EXPRESSED IN HEART, SIGNAL = 1.2; EXPRESSED IN BT474, SIGNAL = 1.1; EXPRESSED IN FETAL LIVER, SIGNAL =   2; EXPRESSED IN ADULT LIVER, SIGNAL = 1.2; EST_HUMAN HIT: BE707883.1, EVALUE 3.60e-01
cggtgactctcttacgaatccacagtgtgcagactgtgctcctctgtgaatcctctgctttagagtatacttggccagtttgggaaattaggtttacacattttgggtatgt

SEQ ID NO: 21060 - DNA, 103 bp, Homo sapiens
  MAP TO AF088219.1; EXPRESSED IN FETAL LIVER, SIGNAL =   1; EXPRESSED IN ADULT LIVER, SIGNAL = 1.8; EXPRESSED IN BONE MARROW, SIGNAL = 0.99; EXPRESSED IN LUNG, SIGNAL =   1; EXPRESSED IN HEART, SIGNAL = 0.96; EST_HUMAN HIT: AI720438.1, EVALUE 2.00e-51; NT HIT: gi4759071, EVALUE 1.00e-51; SWISSPROT HIT: Q16627, EVALUE 2.00e-15
acccctcagagtgctgcttcacctacactacctacaagatcccgcgtcagcggattatggattactatgagaccaacagccagtgctccaagcccggaattgt

SEQ ID NO: 21061 - DNA, 122 bp, Homo sapiens
  MAP TO AL049697.8; EXPRESSED IN HEART, SIGNAL = 0.86; EST_HUMAN HIT: AA742265.1, EVALUE 6.20e+00; NT HIT: Z23162.1, EVALUE 1.10e+00
gacatttctaactctttctaagaaggacaaagaacgccagctgaaagaactcaccatgattgttactggaattcgtttatttaacagagactgtggaaaaggaggagaaggcattgatgatt

SEQ ID NO: 21062 - DNA, 75 bp, Homo sapiens
  MAP TO AF023268.1; EXPRESSED IN BT474, SIGNAL = 1.9; EXPRESSED IN ADULT LIVER, SIGNAL = 1.6; EXPRESSED IN BRAIN, SIGNAL = 1.7; EXPRESSED IN BONE MARROW, SIGNAL =   2; EXPRESSED IN LUNG, SIGNAL = 1.9; EXPRESSED IN HELA, SIGNAL = 1.7; EXPRESSED IN PLACENTA, SIGNAL = 1.7; EXPRESSED IN HBL100, SIGNAL = 1.3; EXPRESSED IN HEART, SIGNAL = 2.2; EXPRESSED IN FETAL LIVER, SIGNAL = 1.8; EST_HUMAN HIT: BF337987.1, EVALUE 4.00e-03; NT HIT: AF023268.1, EVALUE 5.00e-35
tacctcatctggcagctctctagtaagggccaaatactccaaatcagggaggcaaaaacctcgtgcccaggacaa

SEQ ID NO: 21063 - DNA, 87 bp, Homo sapiens
  MAP TO AC012593.1; EXPRESSED IN HBL100, SIGNAL = 1.1; EXPRESSED IN HEART, SIGNAL = 2.5; EXPRESSED IN FETAL LIVER, SIGNAL = 2.8; EXPRESSED IN BT474, SIGNAL = 2.2; EXPRESSED IN ADULT LIVER, SIGNAL = 1.9; EXPRESSED IN LUNG, SIGNAL =   3; EXPRESSED IN BRAIN, SIGNAL = 5.6; EXPRESSED IN PLACENTA, SIGNAL = 2.4; EXPRESSED IN HELA, SIGNAL = 6.1; EXPRESSED IN BONE MARROW, SIGNAL =   2; EST_HUMAN HIT: AI702438.1, EVALUE 9.00e-22; NT HIT: U88896.1, EVALUE 3.00e-21
cggctgaagactgacgctgccagttcgcctcagaagccccctaaaccatcacggacgccaagcttcgggtatctctcacagcagaag

SEQ ID NO: 21064 - DNA, 223 bp, Homo sapiens
  MAP TO AL049649.4; EXPRESSED IN PLACENTA, SIGNAL = 0.7; EXPRESSED IN FETAL LIVER, SIGNAL = 0.61; EXPRESSED IN HEART, SIGNAL = 0.8; EXPRESSED IN BONE MARROW, SIGNAL = 0.71; EXPRESSED IN LUNG, SIGNAL = 0.65; EXPRESSED IN ADULT LIVER, SIGNAL = 0.96; NT HIT: D64082.1, EVALUE 4.50e-01; EST_HUMAN HIT: T96511.1, EVALUE 2.00e-01; SWISSPROT HIT: P22678, EVALUE 4.70e+00
aaacaccagaggcctcctcattaaaatcaggaacagcagagaatggctgctgctcagttatttttccattaactatggatgttccagaactttcttggtcaaattcttctgtataggcctgaaacttcttgaagctctacatatatttactcatctttttaatcttttattgaagatacttgtaggaataaaaaatgtttttctggtaagtgttatttgcaag

SEQ ID NO: 21065 - DNA, 192 bp, Homo sapiens
  MAP TO AC007327.1; EXPRESSED IN ADULT LIVER, SIGNAL = 3.3; EXPRESSED IN BT474, SIGNAL = 1.9; EXPRESSED IN BRAIN, SIGNAL = 2.2; EXPRESSED IN HEART, SIGNAL = 2.1; EXPRESSED IN HELA, SIGNAL =   2; EXPRESSED IN HBL100, SIGNAL = 2.1; EXPRESSED IN PLACENTA, SIGNAL = 2.6; EXPRESSED IN FETAL LIVER, SIGNAL = 2.6; EXPRESSED IN LUNG, SIGNAL = 2.6; EXPRESSED IN BONE MARROW, SIGNAL =   2; NT HIT: X81637.1, EVALUE 3.80e-01; SWISSPROT HIT: O10687, EVALUE 5.60e-01; EST_HUMAN HIT: AI694131.1, EVALUE 1.00e-102
gctgtggtgagagaaggcctcacgaacccttggattccggataactggtcttggggcggggtggcttctgaacactgcccagtgctagccgagttctacactgaaaaggactggagcaagaaggatgcccctcggaacggcagcggggtggccttggagcgaagtgaagccaacatcaagcacgagcgatga

SEQ ID NO: 21066 - DNA, 225 bp, Homo sapiens
  MAP TO AC007722.1; EXPRESSED IN BONE MARROW, SIGNAL = 0.68; EXPRESSED IN HBL100, SIGNAL = 0.82; EXPRESSED IN FETAL LIVER, SIGNAL = 0.85; EXPRESSED IN PLACENTA, SIGNAL = 0.67; EXPRESSED IN BT474, SIGNAL = 0.8; EXPRESSED IN LUNG, SIGNAL = 0.71; EXPRESSED IN BRAIN, SIGNAL = 0.74; EXPRESSED IN HEART, SIGNAL = 0.89; EST_HUMAN HIT: AI613519.1, EVALUE 2.00e-77; SWISSPROT HIT: P39959, EVALUE 2.50e-01
ccaagttcattttttgtttctttgtatttcatgggtcttgaaggattatgttgacaaagagaaggcaattgccaaagccttggaagacctcagagccaacttttattgtgaactgtgtgataagcaatatcagaaacatcaggaatttgataaccatatcaactcctatgatcatgcacacaagcaggtgagttgtagttacttgctaacagaagaaggtaccta

SEQ ID NO: 21067 - DNA, 176 bp, Homo sapiens
  MAP TO AJ006995.1; EXPRESSED IN BONE MARROW, SIGNAL = 1.3; EXPRESSED IN HBL100, SIGNAL = 1.4; EXPRESSED IN FETAL LIVER, SIGNAL = 1.3; EXPRESSED IN ADULT LIVER, SIGNAL = 0.83; EXPRESSED IN BRAIN, SIGNAL = 1.3; EXPRESSED IN PLACENTA, SIGNAL = 1.1; EXPRESSED IN BT474, SIGNAL = 1.3; EXPRESSED IN LUNG, SIGNAL = 1.4; EXPRESSED IN HELA, SIGNAL = 1.3; EXPRESSED IN HEART, SIGNAL = 1.4; EST_HUMAN HIT: AI373647.1, EVALUE 4.00e-63; SWISSPROT HIT: P41997, EVALUE 9.00e-06; NT HIT: AL163246.2, EVALUE 7.00e-95
catttttgccaacaagaaataagtttgcttattcctgtagcataaaaatatgtgcttcgggattcgacaaactcttggaaagcattttctgcatcctgctggttgtggaagcattttccctgcaaaaagttgtcgagatgcttgaagaagtggtagttggttggagggaggtaagg

SEQ ID NO: 21068 - DNA, 187 bp, Homo sapiens
  MAP TO AL020997.1; EXPRESSED IN BT474, SIGNAL = 1.3; EXPRESSED IN FETAL LIVER, SIGNAL = 1.6; EXPRESSED IN BONE MARROW, SIGNAL = 1.6; EXPRESSED IN LUNG, SIGNAL = 1.6; EXPRESSED IN BRAIN, SIGNAL = 1.4; EXPRESSED IN HBL100, SIGNAL = 1.3; EXPRESSED IN PLACENTA, SIGNAL = 1.3; EXPRESSED IN HELA, SIGNAL = 1.7; EXPRESSED IN HEART, SIGNAL = 1.5; EXPRESSED IN ADULT LIVER, SIGNAL = 1.8; NT HIT: Y19215.1, EVALUE 2.00e-28; EST_HUMAN HIT: AA402280.1, EVALUE 8.00e-15
agtctgtaaaagagtgtgtctctgacctaactcggccagaaggcgcctctcaggtttgttttctctaaaataaatctgtcttgactggaaagccacctttttgtgtttctttcctctttctttaattcttacagctacctggatgacaacatggaccacagccaccagcagacctggaacgttagcc

SEQ ID NO: 21069 - DNA, 118 bp, Homo sapiens
  MAP TO AL049588.11; EXPRESSED IN LUNG, SIGNAL =   1; EXPRESSED IN HELA, SIGNAL = 0.91; EXPRESSED IN BRAIN, SIGNAL =   1; EXPRESSED IN HEART, SIGNAL =   1; EXPRESSED IN PLACENTA, SIGNAL = 0.75; EXPRESSED IN BT474, SIGNAL = 0.61; EXPRESSED IN BONE MARROW, SIGNAL = 0.93; EXPRESSED IN HBL100, SIGNAL = 0.87; EXPRESSED IN ADULT LIVER, SIGNAL = 0.98; EXPRESSED IN FETAL LIVER, SIGNAL = 0.85; NT HIT: M81409.1, EVALUE 3.00e-07; SWISSPROT HIT: P08547, EVALUE 5.00e-04; EST_HUMAN HIT: T95406.1, EVALUE 1.00e-18
agtgctacaacgagatatcctgtcactctagttaaaatggcttttatcacaaaggcaataacagatgctggtgaggatggggagaaaagggaaacctcgtacactattggtgggaatg

SEQ ID NO: 21070 - DNA, 253 bp, Homo sapiens
  MAP TO AL021069.1; EXPRESSED IN PLACENTA, SIGNAL = 5.9; EXPRESSED IN HEART, SIGNAL = 5.6; EXPRESSED IN ADULT LIVER, SIGNAL = 6.7; EXPRESSED IN FETAL LIVER, SIGNAL = 6.1; EXPRESSED IN BONE MARROW, SIGNAL = 3.9; EXPRESSED IN HELA, SIGNAL = 5.6; EXPRESSED IN HBL100, SIGNAL = 4.3; EXPRESSED IN BT474, SIGNAL = 4.5; EXPRESSED IN BRAIN, SIGNAL =   5; EXPRESSED IN LUNG, SIGNAL =   8; NT HIT: AL163207.2, EVALUE 2.00e-71; EST_HUMAN HIT: BE276970.1, EVALUE 2.00e-74
attgaatcatgggggatggtctttcccgtgctattcttgtatagtgaataagtctcacaagatctgctgggtttatcaggggtttctgcttttgcttctttctcattttctcttgctgctgccatataagaagtgcctttcgtctcccaccatgattctgaggcctcctcagccatgtcgaactgtaagtccaattaaacctctttttcttcccagtcttgggtatgtctttatcagcagcatgaaaacagac

SEQ ID NO: 21071 - DNA, 129 bp, Homo sapiens
  MAP TO AC012447.2; EXPRESSED IN ADULT LIVER, SIGNAL = 1.2; EXPRESSED IN BRAIN, SIGNAL =   1; EXPRESSED IN BONE MARROW, SIGNAL = 0.95; EXPRESSED IN LUNG, SIGNAL = 0.95; EXPRESSED IN HBL100, SIGNAL = 0.97; EXPRESSED IN HEART, SIGNAL = 1.1; NT HIT: AB014522.1, EVALUE 4.00e-46; EST_HUMAN HIT: H49239.1, EVALUE 5.00e-37; SWISSPROT HIT: P36418, EVALUE 4.00e+00
atgaaccaagccggcgggtggttcccattccaacgtttctccgagaacttggtggagccttggatgatgtagaactagcagaggaaggtctgttaccatccacagaatcttcatcgtcgaaatttttat

SEQ ID NO: 21072 - DNA, 297 bp, Homo sapiens
  MAP TO AF003627.1; EXPRESSED IN HBL100, SIGNAL = 0.91; EXPRESSED IN HEART, SIGNAL = 1.2; EXPRESSED IN BT474, SIGNAL = 0.97; EXPRESSED IN BONE MARROW, SIGNAL = 1.2; EST_HUMAN HIT: BE618790.1, EVALUE 2.70e-01; SWISSPROT HIT: P55268, EVALUE 9.00e-02
gacagtggcttccctgggcaaaagctctgattccagtgtgggagggtgcacaggtgtgtctgcctcgttagttccctggtccactgtctcatgctggaggacagcaagctggtcgcttcccgtgacggaagctctgattccagcaaaagagggcgcgctgatccacccatggtgcctgctgcgttcccagctctggtgtctggtgctggtggacacggttgccgcatgggttgggcactggtgccgctgtccgccgtggcttccctgggtaaaagctccagttccagaggcaggggc

SEQ ID NO: 21073 - DNA, 168 bp, Homo sapiens
  MAP TO AL021155.1; EXPRESSED IN LUNG, SIGNAL =   5; EXPRESSED IN HBL100, SIGNAL = 5.1; EXPRESSED IN PLACENTA, SIGNAL = 4.5; EXPRESSED IN ADULT LIVER, SIGNAL = 3.8; EXPRESSED IN BRAIN, SIGNAL = 5.4; EXPRESSED IN BONE MARROW, SIGNAL = 4.2; EXPRESSED IN HEART, SIGNAL = 4.3; EXPRESSED IN HELA, SIGNAL = 4.4; EXPRESSED IN FETAL LIVER, SIGNAL = 4.4; EXPRESSED IN BT474, SIGNAL = 3.9; NT HIT: U93181.1, EVALUE 7.00e-27; SWISSPROT HIT: P14335, EVALUE 5.00e+00; EST_HUMAN HIT: H38322.1, EVALUE 2.00e-31
ggtctgacggaggtgctccccagtgcaggcaccgcgtggcgtggccctgctacgacagctgcccctgaccccagcctgatgctatctcacttctgctggaggagctgcagaggctggagacagagctgggctaatgccctcagtgatggaaggacacctgggaccagg

SEQ ID NO: 21074 - DNA, 156 bp, Homo sapiens
  MAP TO AC007001.2; EXPRESSED IN HBL100, SIGNAL = 1.1; EXPRESSED IN LUNG, SIGNAL =   1; EXPRESSED IN PLACENTA, SIGNAL = 1.1; EXPRESSED IN BT474, SIGNAL =   1; EXPRESSED IN BONE MARROW, SIGNAL = 1.5; EXPRESSED IN FETAL LIVER, SIGNAL = 1.2; EXPRESSED IN HELA, SIGNAL = 1.2; EXPRESSED IN ADULT LIVER, SIGNAL = 1.1; EXPRESSED IN BRAIN, SIGNAL = 0.93; EXPRESSED IN HEART, SIGNAL = 1.3; EST_HUMAN HIT: AW899107.1, EVALUE 2.30e-02; SWISSPROT HIT: P48872, EVALUE 3.90e+00; NT HIT: AF167304.1, EVALUE 5.60e+00
tgaatgagtattgctttcccaccactgtgaagtcaaaaaaatcgtaggtcgaactcgtaaataaattgaggactgtctgttcatacttgtagataatttcccttgggttttcattgctgccagtataggatttaagtgctgcagaaaaggaatact

SEQ ID NO: 21075 - DNA, 528 bp, Homo sapiens
  MAP TO AC008127.10; EXPRESSED IN ADULT LIVER, SIGNAL = 2.5; EXPRESSED IN BT474, SIGNAL = 2.1; EXPRESSED IN BRAIN, SIGNAL =   2; EXPRESSED IN HEART, SIGNAL = 1.8; EXPRESSED IN HELA, SIGNAL = 2.3; EXPRESSED IN HBL100, SIGNAL = 2.3; EXPRESSED IN PLACENTA, SIGNAL =   2; EXPRESSED IN FETAL LIVER, SIGNAL = 2.6; EXPRESSED IN LUNG, SIGNAL = 2.1; EXPRESSED IN BONE MARROW, SIGNAL =   2; EST_HUMAN HIT: AI287878.1, EVALUE 2.00e-03; NT HIT: AE000892.1, EVALUE 2.80e-01; SWISSPROT HIT: P80187, EVALUE 5.00e-01
atttcatcctctcccccccaccccggatattaggaagaatatcacaggagggtgtactacccctgcgatattgggagtaatatcatcctctttccccctggatattatgaaaaacatcaccggggggtttacaccatctgcgatgttgggagtaatatcatcctttcggtccctggatattaccaacaatatcacagtgtggtgtacaacccttgcgatattaggaataatataatcctctcttccttcggatattacgaacaatatcgcaggggcgtgtacaccccctttgatgtttggagtaatatcatcgtttctgtcactggtattatgaacaatatcacagaaggatatacacctcctgtgatattgggagtaatatcctctcccccactgaatattatgaacagtatctcggtggcggggggggttacacttcctgggaaaatggaagtaatatcatcctctcccaccctgggtattacgaatactctcacagggaggtgtacacccctgcgatattgggag

SEQ ID NO: 21076 - DNA, 80 bp, Homo sapiens
  MAP TO AC007361.1; EXPRESSED IN BONE MARROW, SIGNAL =   4; EXPRESSED IN PLACENTA, SIGNAL = 4.8; EXPRESSED IN ADULT LIVER, SIGNAL = 5.7; EXPRESSED IN BT474, SIGNAL = 3.8; EXPRESSED IN BRAIN, SIGNAL = 3.9; EXPRESSED IN LUNG, SIGNAL =   5; EXPRESSED IN HEART, SIGNAL = 4.7; EXPRESSED IN HELA, SIGNAL = 4.8; EXPRESSED IN HBL100, SIGNAL = 4.7; EXPRESSED IN FETAL LIVER, SIGNAL = 5.2; NT HIT: gi6912461, EVALUE 2.00e-35; EST_HUMAN HIT: AW163674.1, EVALUE 8.00e-19; SWISSPROT HIT: P46934, EVALUE 8.20e-01
ccataacacaaagacaacatcatggctggatccacgacttgcgaaaaaggctaaacctccagaagagtgcaaagaaaatg

SEQ ID NO: 21077 - DNA, 169 bp, Homo sapiens
  MAP TO AC008249.14; EXPRESSED IN BT474, SIGNAL = 1.3; EXPRESSED IN FETAL LIVER, SIGNAL = 1.6; EXPRESSED IN BONE MARROW, SIGNAL = 1.2; EXPRESSED IN HELA, SIGNAL = 1.8; EXPRESSED IN PLACENTA, SIGNAL = 1.7; EXPRESSED IN ADULT LIVER, SIGNAL = 1.4; EXPRESSED IN BRAIN, SIGNAL = 1.3; EXPRESSED IN LUNG, SIGNAL = 1.2; EXPRESSED IN HEART, SIGNAL =   1; EXPRESSED IN HBL100, SIGNAL = 1.6; EST_HUMAN HIT: AV657306.1, EVALUE 4.00e-88; NT HIT: AF167340.1, EVALUE 1.00e-90; SWISSPROT HIT: Q03469, EVALUE 2.90e+00
tataagtcatagtagaacagaagatgaaacaagaactcagattttgagcatcaagaaagttacctctgaggatctcaagcgcagctatgtctgtcatgctagaagtgccaaaggcgaagttgccaaagcagccaaggtgaagcagaaaggtaatagatgcggtcagtga

SEQ ID NO: 21078 - DNA, 111 bp, Homo sapiens
  MAP TO AJ229042.1; EXPRESSED IN ADULT LIVER, SIGNAL = 5.4; EXPRESSED IN BT474, SIGNAL =   4; EXPRESSED IN FETAL LIVER, SIGNAL = 5.2; EXPRESSED IN BONE MARROW, SIGNAL = 4.8; EXPRESSED IN LUNG, SIGNAL = 4.7; EXPRESSED IN BRAIN, SIGNAL = 4.3; EXPRESSED IN HBL100, SIGNAL = 4.8; EXPRESSED IN PLACENTA, SIGNAL = 4.4; EXPRESSED IN HELA, SIGNAL = 5.1; EXPRESSED IN HEART, SIGNAL =   4; SWISSPROT HIT: O08875, EVALUE 4.60e-01; NT HIT: AL163268.2, EVALUE 3.00e-56; EST_HUMAN HIT: D55375.1, EVALUE 6.20e-02
cttttgtggtacttccagtatctctgggtgaggggctgggagccctcggtggctgccccatgctgagtacagagcagggggatgcagacactgcaaaggtttccaccattt

SEQ ID NO: 21079 - DNA, 165 bp, Homo sapiens
  MAP TO AL008583.1; EXPRESSED IN PLACENTA, SIGNAL = 1.9; EXPRESSED IN HEART, SIGNAL = 1.9; EXPRESSED IN ADULT LIVER, SIGNAL = 2.1; EXPRESSED IN FETAL LIVER, SIGNAL = 2.1; EXPRESSED IN BONE MARROW, SIGNAL = 1.9; EXPRESSED IN HELA, SIGNAL = 2.1; EXPRESSED IN HBL100, SIGNAL = 2.4; EXPRESSED IN BT474, SIGNAL =   2; EXPRESSED IN BRAIN, SIGNAL = 2.1; EXPRESSED IN LUNG, SIGNAL = 2.8; EST_HUMAN HIT: BE276956.1, EVALUE 4.00e-88; SWISSPROT HIT: O02414, EVALUE 4.00e-07; NT HIT: gi11418132, EVALUE 3.00e-88
tcaggagcacttccagacgcacacagccagggtgcccccgaagtacaggtagaggaggttcttcacctcgtgggtgatctcaaacccaaagccctcgccgatcaccacgtgccaggaggagccgaacttcttgtccattgtctctttgatcatcttggcggcgct

SEQ ID NO: 21080 - DNA, 102 bp, Homo sapiens
  MAP TO AC010130.3; EXPRESSED IN BONE MARROW, SIGNAL = 3.8; EXPRESSED IN LUNG, SIGNAL = 4.1; EXPRESSED IN PLACENTA, SIGNAL = 3.5; EXPRESSED IN HBL100, SIGNAL = 4.4; EXPRESSED IN HELA, SIGNAL =  11; EXPRESSED IN HEART, SIGNAL = 3.2; EXPRESSED IN ADULT LIVER, SIGNAL =   4; EXPRESSED IN BT474, SIGNAL = 3.7; EXPRESSED IN FETAL LIVER, SIGNAL = 5.2; EXPRESSED IN BRAIN, SIGNAL = 3.4; NT HIT: AF175325.1, EVALUE 3.00e-09; EST_HUMAN HIT: H77749.1, EVALUE 6.00e-08; SWISSPROT HIT: Q01842, EVALUE 6.10e-01
gtatcctttatcatatccttttttaataaactggtaaaagtatttccctgagttctgtgagctgatcccaagaaggtgctggtgggcacctccaatttgtag

SEQ ID NO: 21081 - DNA, 147 bp, Homo sapiens
  MAP TO AC010149.2; EXPRESSED IN BT474, SIGNAL = 5.2; EXPRESSED IN BRAIN, SIGNAL = 3.4; EXPRESSED IN BONE MARROW, SIGNAL = 4.8; EXPRESSED IN PLACENTA, SIGNAL =   2; EXPRESSED IN ADULT LIVER, SIGNAL = 2.8; EXPRESSED IN FETAL LIVER, SIGNAL = 5.2; EXPRESSED IN LUNG, SIGNAL = 7.3; EXPRESSED IN HEART, SIGNAL = 3.3; EXPRESSED IN HELA, SIGNAL = 5.6; EXPRESSED IN HBL100, SIGNAL =   8; NT HIT: AF056322.1, EVALUE 4.00e-71; SWISSPROT HIT: P07155, EVALUE 3.00e-17; EST_HUMAN HIT: BF374131.1, EVALUE 3.00e-64
ctcttcataatggccttgtccgcctttgccatatcttcaaattttcctttctctttagcaaaaatggtcttccatgtctctgagcacttctttaaaaactctgagaacttgactgaagcatctgggttcttcttcttatgctcctcc

SEQ ID NO: 21082 - DNA, 218 bp, Homo sapiens
  MAP TO AC007450.1; EXPRESSED IN BONE MARROW, SIGNAL =   2; EXPRESSED IN LUNG, SIGNAL = 1.7; EXPRESSED IN ADULT LIVER, SIGNAL = 1.9; EXPRESSED IN BT474, SIGNAL =   2; EXPRESSED IN BRAIN, SIGNAL = 2.6; EXPRESSED IN HEART, SIGNAL = 1.4; EXPRESSED IN HELA, SIGNAL = 3.5; EXPRESSED IN HBL100, SIGNAL = 2.4; EXPRESSED IN PLACENTA, SIGNAL = 3.3; EXPRESSED IN FETAL LIVER, SIGNAL = 1.8; NT HIT: AL163284.2, EVALUE 1.00e-93; EST_HUMAN HIT: N66951.1, EVALUE 4.00e-91; SWISSPROT HIT: O13433, EVALUE 4.80e-02
acccatctgacctcttcccttctccccaggctgctcctcaccaggctgagctaggtcccaattcttgctcagcctctgctcctccaccctataatccttttatcacctcccctcctcacacccggtccggcttacagtttcgttccatgactagccctccccctcctgcccagcaatttactcttaaaaaggtggctggagctaaaggcatagtcaag

SEQ ID NO: 21083 - DNA, 123 bp, Homo sapiens
  MAP TO AC010892.2; EXPRESSED IN HBL100, SIGNAL = 1.6; EXPRESSED IN HEART, SIGNAL = 1.4; EXPRESSED IN BRAIN, SIGNAL = 1.2; EXPRESSED IN BONE MARROW, SIGNAL = 1.5; EXPRESSED IN PLACENTA, SIGNAL = 1.5; EXPRESSED IN HELA, SIGNAL = 1.4; EXPRESSED IN BT474, SIGNAL = 1.2; EXPRESSED IN ADULT LIVER, SIGNAL = 1.5; EXPRESSED IN FETAL LIVER, SIGNAL = 1.7; EXPRESSED IN LUNG, SIGNAL = 1.7; NT HIT: AF207550.1, EVALUE 5.90e-02; EST_HUMAN HIT: AW812546.1, EVALUE 2.60e-02
atgaggaaattgggctcaaagaagttcaggaacttgctctaggtcatacagttagtaatcacaggatcaagatttcaacccaggtaagtgtaattccaaagtctgcactctttcccctacacc

SEQ ID NO: 21084 - DNA, 448 bp, Homo sapiens
  MAP TO AL021407.1; EXPRESSED IN LUNG, SIGNAL = 3.4; EXPRESSED IN BRAIN, SIGNAL = 0.98; EXPRESSED IN PLACENTA, SIGNAL = 1.9; EXPRESSED IN HEART, SIGNAL = 1.1; EXPRESSED IN FETAL LIVER, SIGNAL = 1.4; EXPRESSED IN BONE MARROW, SIGNAL = 1.2; EXPRESSED IN HELA, SIGNAL = 1.2; EXPRESSED IN HBL100, SIGNAL = 1.1; EXPRESSED IN BT474, SIGNAL = 1.2; NT HIT: gi11419152, EVALUE 0.00e+00; EST_HUMAN HIT: AW371349.1, EVALUE 0.00e+00; SWISSPROT HIT: O08863, EVALUE 2.00e-07
ctgtagctgggcggcgcagctctcacagcacacagtgtggccacagggacagaaggtggagttgatctcctcctcgcagcacaccatgcacagcatggcttccttcagcttgcgtagcttctcctgcagcacccgggtctgctggcagctgaggccctcgcagctgctgcagttcatgctgctttctgaggacttcagaggcgagtgtgaagggctctggttgtttcttgaaacgaggtccacaacgccagcattgtacagagccctcctggcatggtcatacacctcctttgatgttcttttaatatcaaagacatatttcttgccaaggttaatgttttcattcagaaacagagatgccaagtggcccttcaagtcacggctatactgcatcatcacggcgctggtcactgtgtcacacctgcaaggcaagattgaacatctactt

SEQ ID NO: 21085 - DNA, 82 bp, Homo sapiens
  MAP TO AF030453.1; EXPRESSED IN ADULT LIVER, SIGNAL = 1.5; EXPRESSED IN HELA, SIGNAL = 3.5; EXPRESSED IN HBL100, SIGNAL = 5.3; EXPRESSED IN HEART, SIGNAL = 3.5; EXPRESSED IN FETAL LIVER, SIGNAL = 4.3; EXPRESSED IN BT474, SIGNAL = 2.5; EXPRESSED IN BRAIN, SIGNAL = 1.3; EXPRESSED IN LUNG, SIGNAL = 2.7; EXPRESSED IN BONE MARROW, SIGNAL = 2.3; EXPRESSED IN PLACENTA, SIGNAL = 2.3; EST_HUMAN HIT: BE939162.1, EVALUE 1.00e-03; NT HIT: gi11419893, EVALUE 1.70e-01
agctgcttctcagccaccacgtgggatcgatttcttccacattgaacttggtcaaggcccgctgctttgtgctgtggatctt

SEQ ID NO: 21086 - DNA, 294 bp, Homo sapiens
  MAP TO AC010899.2; EXPRESSED IN BRAIN, SIGNAL = 3.6; EXPRESSED IN BONE MARROW, SIGNAL = 3.7; EXPRESSED IN LUNG, SIGNAL = 4.5; EXPRESSED IN PLACENTA, SIGNAL = 4.3; EXPRESSED IN HBL100, SIGNAL = 3.8; EXPRESSED IN HELA, SIGNAL = 4.3; EXPRESSED IN HEART, SIGNAL = 3.8; EXPRESSED IN ADULT LIVER, SIGNAL = 3.2; EXPRESSED IN BT474, SIGNAL = 3.2; EXPRESSED IN FETAL LIVER, SIGNAL = 4.4; SWISSPROT HIT: Q91694, EVALUE 2.00e-35; NT HIT: gi4758279, EVALUE 1.00e-115; EST_HUMAN HIT: AW965297.1, EVALUE 2.00e-26
aaaaatgatggcagatttacagtcattcagctggtgggcatgcttcgtggcattgggtctgggatgaagtatttatctgatatgagctatgtgcatcgtgatctggccgcacggaacatcctggtgaacagcaacttggtctgcaaagtgtctgattttggcatgtcccgagtgcttgaggatgatccggaagcagcttacaccaccagggtaagaaagatcggtgacatctgggctttcactctggtgaaactgttcctctcttctcactttgagattgaagccctttgtaat

SEQ ID NO: 21087 - DNA, 143 bp, Homo sapiens
  MAP TO AC008269.1; EXPRESSED IN FETAL LIVER, SIGNAL = 0.67; EXPRESSED IN BONE MARROW, SIGNAL = 0.71; EXPRESSED IN HBL100, SIGNAL = 0.82; EXPRESSED IN ADULT LIVER, SIGNAL = 0.74; EXPRESSED IN BRAIN, SIGNAL = 0.73; EXPRESSED IN BT474, SIGNAL = 1.2; EXPRESSED IN HELA, SIGNAL = 0.77; EXPRESSED IN HEART, SIGNAL = 0.96; NT HIT: gi11428892, EVALUE 3.00e-75; EST_HUMAN HIT: AW955658.1, EVALUE 5.00e-75; SWISSPROT HIT: Q08662, EVALUE 2.30e+00
tgctctgactggttatcttcacactatttcttctgaaaacttattggatgcagtatattcattttgcttgatgaattactttcccctggctccttttaatcagcttctgcaaaaagacatcatcagtgagctgctgacatcag

SEQ ID NO: 21088 - DNA, 128 bp, Homo sapiens
  MAP TO AL049642.5; EXPRESSED IN HBL100, SIGNAL = 0.68; EXPRESSED IN HELA, SIGNAL =   1; EXPRESSED IN BT474, SIGNAL = 0.66; EXPRESSED IN FETAL LIVER, SIGNAL = 0.58; EXPRESSED IN LUNG, SIGNAL = 0.63; EXPRESSED IN ADULT LIVER, SIGNAL = 0.71; EXPRESSED IN PLACENTA, SIGNAL = 0.74; EXPRESSED IN HEART, SIGNAL = 6.8; NT HIT: AF182946.1, EVALUE 1.10e+00; SWISSPROT HIT: P04387, EVALUE 4.00e+00; EST_HUMAN HIT: BE812468.1, EVALUE 1.70e+00
ccactcttaccccagataagaaacaatgcatttggctggcctctcaagcccataccaatatacttcaccagcaagatgtagtccataatcctgttgcagccaatgctgttcccggagcagacccctaa

SEQ ID NO: 21089 - DNA, 184 bp, Homo sapiens
  MAP TO AC009930.2; EXPRESSED IN FETAL LIVER, SIGNAL = 1.2; EXPRESSED IN BONE MARROW, SIGNAL =   1; EXPRESSED IN ADULT LIVER, SIGNAL = 1.8; EXPRESSED IN BT474, SIGNAL = 0.94; EXPRESSED IN BRAIN, SIGNAL =   1; EXPRESSED IN LUNG, SIGNAL = 1.2; EXPRESSED IN PLACENTA, SIGNAL =   1; EXPRESSED IN HEART, SIGNAL =   1; EXPRESSED IN HELA, SIGNAL = 1.2; EXPRESSED IN HBL100, SIGNAL = 1.1; NT HIT: AL163284.2, EVALUE 7.00e-18; EST_HUMAN HIT: BF115158.1, EVALUE 1.00e-20; SWISSPROT HIT: Q09901, EVALUE 7.40e-01
atcttggtttctgttttttgttttgttttgtttttaatccattcagcccctctgttttcttgtgtgttttgtggtctttctttcttcctttcttgtaagaaaagtctagtgtcggtgatatccctcagcttgtgtttgtctggggaagtctttatttctccttcatgtttgaaggatattttag

SEQ ID NO: 21090 - DNA, 120 bp, Homo sapiens
  MAP TO AC009313.1; EXPRESSED IN BT474, SIGNAL = 0.88; EXPRESSED IN BRAIN, SIGNAL = 0.81; EXPRESSED IN HEART, SIGNAL = 0.95; EXPRESSED IN PLACENTA, SIGNAL = 0.95; EXPRESSED IN BONE MARROW, SIGNAL =   1; EXPRESSED IN HBL100, SIGNAL = 0.75; EXPRESSED IN FETAL LIVER, SIGNAL = 1.5; EXPRESSED IN LUNG, SIGNAL = 0.83; EXPRESSED IN HELA, SIGNAL = 0.74; EXPRESSED IN ADULT LIVER, SIGNAL = 0.87; SWISSPROT HIT: P20888, EVALUE 9.00e+00; NT HIT: gi11429976, EVALUE 1.00e-61; EST_HUMAN HIT: AV750729.1, EVALUE 2.00e-61
gtgatgctacaggacgaagaggaatggataaaaacattggcgagcaactcaataaagcgtatgaagccttccggcaggcatgcatggatagagattctgcagtaaaagaattacagcaaa

SEQ ID NO: 21091 - DNA, 144 bp, Homo sapiens
  MAP TO AC009650.2; EXPRESSED IN BONE MARROW, SIGNAL = 1.6; EXPRESSED IN PLACENTA, SIGNAL = 2.3; EXPRESSED IN HEART, SIGNAL = 2.1; EXPRESSED IN HELA, SIGNAL = 1.9; EXPRESSED IN HBL100, SIGNAL = 2.8; EXPRESSED IN FETAL LIVER, SIGNAL = 1.8; EXPRESSED IN BT474, SIGNAL = 1.7; EXPRESSED IN LUNG, SIGNAL = 2.3; NT HIT: Z78898.1, EVALUE 5.00e-52; EST_HUMAN HIT: BE279821.1, EVALUE 6.00e-15; SWISSPROT HIT: Q08200, EVALUE 2.00e-04
  unsure 40
  unsure 48
  unsure 74
  unsure 88
atggaacactccactaggtattactgatattgtaaaaacnaaaacatnacccaaagtctggcttctgcagaggntgtccctgatgccnaagatttgcatttttgacctgggacagaagaaagcaaaaatggatgagtatccact

SEQ ID NO: 21092 - DNA, 388 bp, Homo sapiens
  MAP TO AL022162.1; EXPRESSED IN LUNG, SIGNAL = 7.2; EXPRESSED IN BRAIN, SIGNAL = 6.5; EXPRESSED IN HEART, SIGNAL = 5.8; EXPRESSED IN ADULT LIVER, SIGNAL = 6.9; EXPRESSED IN FETAL LIVER, SIGNAL = 7.3; EXPRESSED IN PLACENTA, SIGNAL = 6.6; EXPRESSED IN HELA, SIGNAL = 8.4; EXPRESSED IN HBL100, SIGNAL = 6.3; EXPRESSED IN BT474, SIGNAL = 6.6; EXPRESSED IN BONE MARROW, SIGNAL = 5.7; SWISSPROT HIT: P14728, EVALUE 1.10e-01; NT HIT: AF195953.1, EVALUE 0.00e+00
agacaggggagggcaggacaagagccaagagaacgctgaagtcagcagagtgtgctctggtgcctcgcagcttctcttccagcactgcccactcccactgcagggcctgggtctcaatggcagtccctctcagggcctattctccatggacaagaatcagcagggctcttactccaccctatttttccccgatcatgacttcctgtaccgtggcccactcttagcatccatctgtctgctggtaaatgaggatattcactctgtcctgggccaccttctcctctcattgcacactgtcttcctagacagtcccacccacacccatggcctcagttaccacttacatgccataaactccacatttatttctccagccccttctcccctc

SEQ ID NO: 21093 - DNA, 167 bp, Homo sapiens
  MAP TO AC010681.3; EXPRESSED IN BT474, SIGNAL = 1.8; EXPRESSED IN FETAL LIVER, SIGNAL = 1.6; EXPRESSED IN BRAIN, SIGNAL = 1.5; EXPRESSED IN BONE MARROW, SIGNAL = 2.1; EXPRESSED IN LUNG, SIGNAL = 1.8; EXPRESSED IN PLACENTA, SIGNAL = 2.1; EXPRESSED IN HBL100, SIGNAL = 1.9; EXPRESSED IN HELA, SIGNAL = 1.8; EXPRESSED IN HEART, SIGNAL = 1.6; EXPRESSED IN ADULT LIVER, SIGNAL =   2; NT HIT: U44914.1, EVALUE 2.10e-02; EST_HUMAN HIT: BE179031.1, EVALUE 3.90e-01
taagcaaactcagctcttcattcctgatctacaatgcaaatggtatacaaaataaggtttcattaaagagtgactgtcacatcaacagggaagagaatgaagacctgctatgcagtattattagatatattgaatttgttgtcactaagatcaacaaaatactgctt

SEQ ID NO: 21094 - DNA, 140 bp, Homo sapiens
  MAP TO AC007708.13; EXPRESSED IN FETAL LIVER, SIGNAL = 3.1; EXPRESSED IN HELA, SIGNAL = 1.3; EXPRESSED IN HEART, SIGNAL = 1.1; NT HIT: AL163201.2, EVALUE 2.00e-54; SWISSPROT HIT: P08970, EVALUE 3.90e+00; EST_HUMAN HIT: AA130165.1, EVALUE 3.00e-08
aagaaagccttgttatcatagagaatgacagctgcatgtatgttattgccactgaagaccctgaagacctttcacttggacaagatttcgagatggaagacagtgatattgattatcctgacccttacaggactaagcta

SEQ ID NO: 21095 - DNA, 146 bp, Homo sapiens
  MAP TO AC008008.2; EXPRESSED IN FETAL LIVER, SIGNAL = 0.58; EXPRESSED IN HELA, SIGNAL = 0.61; EXPRESSED IN BRAIN, SIGNAL = 0.95; EXPRESSED IN ADULT LIVER, SIGNAL = 0.66; EXPRESSED IN HEART, SIGNAL = 0.82; NT HIT: gi11496534, EVALUE 1.30e+00; SWISSPROT HIT: Q04521, EVALUE 6.70e+00; EST_HUMAN HIT: AW069315.1, EVALUE 5.00e-03
ttctcttcagaatgtcttttttccctaaattcatttccatctccacaataagaaatatcaaagcagtaagcatgatatattttttaaaattaaaaatatttatgcgccagatacgtgaagtcatggacctcaaaaagatcacaatc

SEQ ID NO: 21096 - DNA, 274 bp, Homo sapiens
  MAP TO AC010960.2; EXPRESSED IN LUNG, SIGNAL = 1.4; EXPRESSED IN HBL100, SIGNAL = 1.2; EXPRESSED IN HEART, SIGNAL = 1.2; EXPRESSED IN BRAIN, SIGNAL = 1.1; EXPRESSED IN BONE MARROW, SIGNAL = 1.8; EXPRESSED IN PLACENTA, SIGNAL = 1.4; EXPRESSED IN HELA, SIGNAL = 1.4; EXPRESSED IN BT474, SIGNAL = 1.1; EXPRESSED IN ADULT LIVER, SIGNAL = 1.5; EXPRESSED IN FETAL LIVER, SIGNAL = 1.3; NT HIT: AF222689.1, EVALUE 1.40e-01; SWISSPROT HIT: P10272, EVALUE 1.00e-16; EST_HUMAN HIT: AV708136.1, EVALUE 3.00e-19
gtatgtagcagagaggaagggcatagctgtgagagtgctaaccgagaaaataggatcagaacccagaccaactgcctacgtttcaaagaagttgggcggagtagcctcaggatggctgagttgcctgcaaacatttgcagccactgctattttagtaaaggaagccactaaaatcaccctggctcaactattggaagttcaaaccccacatcaggtgaagtcagtcttagaaataaaaggacacatctgcatgatgggggaaaggttaaccaaa

SEQ ID NO: 21097 - DNA, 240 bp, Homo sapiens
  MAP TO AC010807.2; EXPRESSED IN ADULT LIVER, SIGNAL = 1.2; EXPRESSED IN FETAL LIVER, SIGNAL = 1.3; EXPRESSED IN BT474, SIGNAL = 2.3; EXPRESSED IN BRAIN, SIGNAL = 1.2; EXPRESSED IN LUNG, SIGNAL = 1.5; EXPRESSED IN BONE MARROW, SIGNAL = 1.5; EXPRESSED IN PLACENTA, SIGNAL = 2.8; EXPRESSED IN HEART, SIGNAL = 8.1; EXPRESSED IN HELA, SIGNAL =  27; EXPRESSED IN HBL100, SIGNAL =   3; NT HIT: AJ249765.1, EVALUE 0.00e+00; EST_HUMAN HIT: AL040376.1, EVALUE 1.00e-129; SWISSPROT HIT: P20111, EVALUE 2.00e-41
gcagcttttggaatggattcgtcgcacgatcccctggctggagaaccggactcccgagaagaccatgcaagccatgcagaagaagctggaggacttccgggattaccgccggaagcacaagccacccaaggtgcaggagaaatgccagctggagatcaacttcaacacgctgcagaccaagctgcggatcagcaaccgtcctgccttcatgccctccgagggcaagatggtgtcggtgag

SEQ ID NO: 21098 - DNA, 111 bp, Homo sapiens
  MAP TO AC008278.1; EXPRESSED IN LUNG, SIGNAL = 0.76; EXPRESSED IN BRAIN, SIGNAL = 0.88; EXPRESSED IN HEART, SIGNAL = 0.81; EXPRESSED IN PLACENTA, SIGNAL = 0.6; EXPRESSED IN HELA, SIGNAL = 1.2; EXPRESSED IN ADULT LIVER, SIGNAL = 1.1; EXPRESSED IN FETAL LIVER, SIGNAL = 0.91; EXPRESSED IN HBL100, SIGNAL = 0.85; EXPRESSED IN BONE MARROW, SIGNAL = 0.78; EXPRESSED IN BT474, SIGNAL = 0.9; NT HIT: AB016531.1, EVALUE 3.80e+00; EST_HUMAN HIT: BE935225.1, EVALUE 2.30e-02; SWISSPROT HIT: P34410, EVALUE 4.00e+00
ttatggcctgtagaaaacttgggaaggctctggagttttagcagcttggggatacccacttcctgcagccccttggctcctgctgctctggtgtgcatggaaggagtagaa

SEQ ID NO: 21099 - DNA, 121 bp, Homo sapiens
  MAP TO AC007465.2; EXPRESSED IN FETAL LIVER, SIGNAL = 0.87; EXPRESSED IN ADULT LIVER, SIGNAL =   1; EXPRESSED IN PLACENTA, SIGNAL = 1.1; EXPRESSED IN BONE MARROW, SIGNAL = 1.1; EXPRESSED IN HBL100, SIGNAL = 0.87; EXPRESSED IN LUNG, SIGNAL = 1.1; EXPRESSED IN HELA, SIGNAL = 1.2; EXPRESSED IN BRAIN, SIGNAL =   1; EXPRESSED IN BT474, SIGNAL = 0.7; EXPRESSED IN HEART, SIGNAL =   1; EST_HUMAN HIT: AW860918.1, EVALUE 2.70e-01; SWISSPROT HIT: P39702, EVALUE 3.10e+00; NT HIT: D90899.1, EVALUE 2.30e-01
caagtggtggcacaggctggacacagtaacgagttaaagacatctgtagataaattcccaaaggatgttagtctagacaaatccttattagattgtttagagaaaacctattgctttgagg

SEQ ID NO: 21100 - DNA, 95 bp, Homo sapiens
  MAP TO AC007949.1; EXPRESSED IN BT474, SIGNAL = 0.64; EXPRESSED IN FETAL LIVER, SIGNAL = 0.64; EXPRESSED IN HELA, SIGNAL = 0.8; EXPRESSED IN ADULT LIVER, SIGNAL = 0.67; EXPRESSED IN PLACENTA, SIGNAL = 0.62; EXPRESSED IN BONE MARROW, SIGNAL = 0.78; EXPRESSED IN HBL100, SIGNAL = 0.7; EXPRESSED IN LUNG, SIGNAL = 0.64; EXPRESSED IN BRAIN, SIGNAL = 0.79; EXPRESSED IN HEART, SIGNAL = 0.96; NT HIT: X74421.1, EVALUE 6.70e-01
ttcatctgtacagtgagaatcattctgatacttgtcccagctacattattcgttgttgtgaagatgaagaggttgtacctaaaaaaaaatttggt

SEQ ID NO: 21101 - DNA, 142 bp, Homo sapiens
  MAP TO AC010825.2; EXPRESSED IN BRAIN, SIGNAL = 1.5; EXPRESSED IN HELA, SIGNAL = 1.7; EXPRESSED IN PLACENTA, SIGNAL = 1.6; EXPRESSED IN FETAL LIVER, SIGNAL = 1.3; EXPRESSED IN ADULT LIVER, SIGNAL = 1.6; EXPRESSED IN BT474, SIGNAL = 1.3; EXPRESSED IN BONE MARROW, SIGNAL = 1.1; EXPRESSED IN HEART, SIGNAL =   1; EXPRESSED IN HBL100, SIGNAL = 1.3; NT HIT: X56010.1, EVALUE 5.00e+00; EST_HUMAN HIT: AI768127.1, EVALUE 2.10e-02; SWISSPROT HIT: P39005, EVALUE 6.70e+00
tttgtattgtctccaggattctcatattccttgagctcaggtgcagcattttgtttttattcatgtaaaccttggcaaaatcgtctatggcatactgcactatgatttgtgaagttgtatatgtattaggcttatcaaacag

SEQ ID NO: 21102 - DNA, 143 bp, Homo sapiens
  MAP TO AC011330.4; EXPRESSED IN BRAIN, SIGNAL = 0.99; EXPRESSED IN LUNG, SIGNAL =   1; EXPRESSED IN HEART, SIGNAL = 0.98; EXPRESSED IN BT474, SIGNAL = 0.94; EXPRESSED IN FETAL LIVER, SIGNAL = 1.3; EXPRESSED IN ADULT LIVER, SIGNAL = 1.2; SWISSPROT HIT: P16356, EVALUE 6.70e+00; NT HIT: AF162853.1, EVALUE 1.30e+00
atgacctcctattcgcaggcgtacctgcatatgcccccagaaaacctccagcagctggtgctttcagcagagagggaggctgcacagggcttcctgacactcatgctgcaggggaagctgcaggggaagctgcaggtgagcac

SEQ ID NO: 21103 - DNA, 259 bp, Homo sapiens
  MAP TO AL022323.7; EXPRESSED IN BT474, SIGNAL = 2.9; EXPRESSED IN FETAL LIVER, SIGNAL = 3.4; EXPRESSED IN BONE MARROW, SIGNAL = 3.1; EXPRESSED IN LUNG, SIGNAL = 3.4; EXPRESSED IN HELA, SIGNAL = 3.4; EXPRESSED IN HEART, SIGNAL = 2.4; EXPRESSED IN ADULT LIVER, SIGNAL = 3.6; EXPRESSED IN BRAIN, SIGNAL = 3.1; EXPRESSED IN PLACENTA, SIGNAL = 2.5; EXPRESSED IN HBL100, SIGNAL = 2.6; EST_HUMAN HIT: AW968601.1, EVALUE 1.60e-01; SWISSPROT HIT: P53094, EVALUE 3.50e-01
aaatggctgaggctgggccactggaacccagagctaccgccctacatgttacctctgatcattaaagtgggggatttctgggggtttaattttcttctttgccctttttggtacagaatggactcttggcataatatattttttcctgtaaatgagaaggctcccagtaaagtccttttcttgtgctctgtgtttcaggtgctgccacgggacctggagaaggaggatgccccccaggagaaggagcgaccgctccagc

SEQ ID NO: 21104 - DNA, 204 bp, Homo sapiens
  MAP TO AC011440.4; EXPRESSED IN HEART, SIGNAL = 2.1; EXPRESSED IN BT474, SIGNAL = 1.9; EXPRESSED IN ADULT LIVER, SIGNAL = 3.1; EXPRESSED IN FETAL LIVER, SIGNAL = 1.9; EXPRESSED IN BRAIN, SIGNAL = 1.9; EXPRESSED IN BONE MARROW, SIGNAL = 2.3; EXPRESSED IN LUNG, SIGNAL = 2.4; EXPRESSED IN HBL100, SIGNAL = 1.7; EXPRESSED IN PLACENTA, SIGNAL = 2.7; EXPRESSED IN HELA, SIGNAL = 1.7; SWISSPROT HIT: P35201, EVALUE 1.60e+00; NT HIT: AL163246.2, EVALUE 6.00e-53; EST_HUMAN HIT: BE276179.1, EVALUE 2.00e-59
cagtttggagggctcagaagaagagaggaagatggggaaagtttggaacttcctggatacttgttgaatggctttgaccaaaatgctgatactgacatggacaatgaagtccaaactgaggtggtctcagatggagatgaggaacttgttgggaactggagtaaaggtgactcttgctatgctctaaaaaagagactggtggca

SEQ ID NO: 21105 - DNA, 110 bp, Homo sapiens
  MAP TO AC012079.2; EXPRESSED IN HBL100, SIGNAL = 1.3; EXPRESSED IN PLACENTA, SIGNAL = 1.3; EXPRESSED IN HELA, SIGNAL = 1.5; EXPRESSED IN HEART, SIGNAL = 1.3; EXPRESSED IN BT474, SIGNAL = 1.5; EXPRESSED IN FETAL LIVER, SIGNAL = 1.7; EXPRESSED IN ADULT LIVER, SIGNAL = 1.7; EXPRESSED IN BRAIN, SIGNAL = 1.5; EXPRESSED IN BONE MARROW, SIGNAL = 1.7; EXPRESSED IN LUNG, SIGNAL = 1.6; NT HIT: gi6996914, EVALUE 3.70e+00
gcttctgaggatgaattcagagccaccagttctagaacaaatgtatctaacacctcaggcaattcagaagtggatgagtattttcaggcagttcttgcagtccaaatgtg

SEQ ID NO: 21106 - DNA, 226 bp, Homo sapiens; identical to SEQ ID NO: 17862
  MAP TO AC007404.2; EXPRESSED IN BT474, SIGNAL = 0.76; EXPRESSED IN FETAL LIVER, SIGNAL = 0.74; EXPRESSED IN ADULT LIVER, SIGNAL = 1.9; EXPRESSED IN PLACENTA, SIGNAL = 0.98; EXPRESSED IN BONE MARROW, SIGNAL = 0.9; EXPRESSED IN LUNG, SIGNAL = 0.79; EXPRESSED IN BRAIN, SIGNAL = 0.81; EXPRESSED IN HEART, SIGNAL = 0.84; NT HIT: AF061282.1, EVALUE 2.10e+00; SWISSPROT HIT: Q46941, EVALUE 1.70e+00

SEQ ID NO: 21107 - DNA, 235 bp, Homo sapiens
  MAP TO AC011456.2; EXPRESSED IN HELA, SIGNAL = 2.8; EXPRESSED IN HEART, SIGNAL = 2.2; EXPRESSED IN LUNG, SIGNAL = 2.2; EXPRESSED IN BRAIN, SIGNAL = 2.3; EXPRESSED IN BONE MARROW, SIGNAL = 2.6; EXPRESSED IN PLACENTA, SIGNAL =   2; EXPRESSED IN HBL100, SIGNAL = 2.1; EXPRESSED IN BT474, SIGNAL = 2.8; EXPRESSED IN ADULT LIVER, SIGNAL =   3; EXPRESSED IN FETAL LIVER, SIGNAL = 2.5; SWISSPROT HIT: P13615, EVALUE 2.80e-01; NT HIT: gi4503022, EVALUE 5.60e-01; EST_HUMAN HIT: BF344674.1, EVALUE 8.40e-01
tgagctccacaccctccatccagaaggggatcaccgggatggcagggaaggagtgctgccaggaagttttccaactccagtttctaggtctgtatttaattccggatctatcagctaagcatttagggtgctgccactgaagctctgtgtttacacagctaaatgcctctgctcctattgacacaatgtcgatgaagagggatgcgtcaggctccgccaccaccaagcacgtcat

SEQ ID NO: 21108 - DNA, 152 bp, Homo sapiens
  MAP TO AC007721.10; EXPRESSED IN BT474, SIGNAL =   1; EXPRESSED IN PLACENTA, SIGNAL = 0.95; EXPRESSED IN HELA, SIGNAL = 1.4; EXPRESSED IN HEART, SIGNAL = 0.96; EST_HUMAN HIT: BE142985.1, EVALUE 2.00e-80; NT HIT: AB012193.1, EVALUE 1.00e-80; SWISSPROT HIT: Q13619, EVALUE 3.00e-23
cgctgcagtccctggcctgtggcaaagcacgtgtgctgattaaaagtcccaaaggaaaggaagtggaagatggagacaagttcatttttaatggagagttcaagcacaagttgtttagaataaagatcaatcaaattcagatgaaggaaact

SEQ ID NO: 21109 - DNA, 204 bp, Homo sapiens
  MAP TO AC005105.2; EXPRESSED IN BONE MARROW, SIGNAL = 0.78; EXPRESSED IN FETAL LIVER, SIGNAL = 0.88; EXPRESSED IN PLACENTA, SIGNAL = 1.1; EXPRESSED IN BT474, SIGNAL = 1.1; EXPRESSED IN LUNG, SIGNAL = 0.95; EXPRESSED IN HELA, SIGNAL = 0.75; EXPRESSED IN ADULT LIVER, SIGNAL =   1; EXPRESSED IN BRAIN, SIGNAL = 0.86; EXPRESSED IN HEART, SIGNAL = 1.2; EST_HUMAN HIT: AV754746.1, EVALUE 6.00e-54; NT HIT: X86780.1, EVALUE 7.50e+00
tgccttctgtttttgagccttcgtcctcctcctcctcctcttcattttctcccccttctccctttctgcccgtctttgtttctcctcttcttccttctcctctttccccagcccctccgctcctcttcttgcccgaagaggcatttcttttcacttcgatcagagtttttgttctagcacagagacctgaatgagttgaacaga

SEQ ID NO: 21110 - DNA, 369 bp, Homo sapiens
  MAP TO AC010766.2; EXPRESSED IN LUNG, SIGNAL = 1.6; EXPRESSED IN HELA, SIGNAL = 1.5; EXPRESSED IN PLACENTA, SIGNAL = 1.6; EXPRESSED IN HBL100, SIGNAL = 1.4; EXPRESSED IN HEART, SIGNAL = 1.4; EXPRESSED IN ADULT LIVER, SIGNAL = 1.4; EXPRESSED IN BT474, SIGNAL = 1.4; EXPRESSED IN BRAIN, SIGNAL = 1.4; EXPRESSED IN BONE MARROW, SIGNAL = 1.4; EXPRESSED IN FETAL LIVER, SIGNAL = 1.4; NT HIT: AF101769.1, EVALUE 5.00e-02; EST_HUMAN HIT: AI909504.1, EVALUE 1.50e-02; SWISSPROT HIT: P34986, EVALUE 6.00e-19
aagcagaggggatgctcaggactgccagcacaatgaggccgtaggacacagcagtgatcagcaaggaagatacaatgacgagggaggccaggacaaagtcagtctcctccagcttcttggtgttggtgcaagccaggcggagcagtgggccactgtcgcagaagaagtgctgtaccacagcaccctgcttacagaaaggaagcaaggccacagccactgtgggaccaagcacagggacgagtccccccacccagcaggccaaggccacacgaaagcacacagccccactcatgagcaaggggtagcgcagaggatgacagatggccaggtagcgatccgcagacatgacagccaacagtaagaactcgg

SEQ ID NO: 21111 - DNA, 91 bp, Homo sapiens
  MAP TO AC011589.2; EXPRESSED IN PLACENTA, SIGNAL = 4.4; EXPRESSED IN HELA, SIGNAL = 4.7; EXPRESSED IN ADULT LIVER, SIGNAL = 5.2; EXPRESSED IN BRAIN, SIGNAL = 4.3; EXPRESSED IN BONE MARROW, SIGNAL = 4.6; EXPRESSED IN HEART, SIGNAL =   4; EXPRESSED IN HBL100, SIGNAL = 3.9; EXPRESSED IN BT474, SIGNAL = 4.4; EXPRESSED IN FETAL LIVER, SIGNAL = 4.7; EXPRESSED IN LUNG, SIGNAL = 4.8; EST_HUMAN HIT: AW888738.1, EVALUE 1.10e+00; NT HIT: gi6912435, EVALUE 7.50e-01
aattgagttggcaaatgcaagaagaagggtgatgacaatcgtgagtgggcaggtcagggacacagtgccctacagagaaggtagaacttgg

SEQ ID NO: 21112 - DNA, 169 bp, Homo sapiens
  MAP TO AC010896.1; EXPRESSED IN ADULT LIVER, SIGNAL =   1; EXPRESSED IN HELA, SIGNAL = 1.1; EXPRESSED IN HEART, SIGNAL = 0.85; NT HIT: AF196779.1, EVALUE 1.00e-03; EST_HUMAN HIT: BE155860.1, EVALUE 2.50e-02; SWISSPROT HIT: P08547, EVALUE 1.00e-04
aaaaaatatgaaaagactgatgtacaagactattcactgcagcaatttgtacaacagcaaaaactggaactaacccaaatgtctattgatagggggatggttggacacactacggtacatccacacaatgaagtgccaggcagctgtaagaggactgaggaggctcctt

SEQ ID NO: 21113 - DNA, 147 bp, Homo sapiens
  MAP TO AC010787.2; EXPRESSED IN BRAIN, SIGNAL = 1.2; EXPRESSED IN LUNG, SIGNAL = 1.3; EXPRESSED IN HELA, SIGNAL = 1.8; EXPRESSED IN PLACENTA, SIGNAL = 1.7; EXPRESSED IN ADULT LIVER, SIGNAL = 1.5; EXPRESSED IN FETAL LIVER, SIGNAL = 1.2; EXPRESSED IN BT474, SIGNAL = 1.4; EXPRESSED IN BONE MARROW, SIGNAL = 1.6; EXPRESSED IN HEART, SIGNAL = 1.1; EXPRESSED IN HBL100, SIGNAL = 1.4; NT HIT: gi6677982, EVALUE 2.00e-11; EST_HUMAN HIT: BF315418.1, EVALUE 1.00e-54; SWISSPROT HIT: Q60649, EVALUE 3.00e-12
acttcaacaacaggctgaacaaccgcgccagtttcaagggctgcacggccttgcactatgctgttcttgctgatgactaccgcactgtcaaggagctgcttgatggaggtgagagcagaggtggaggaggggtggggtgggggaagt

SEQ ID NO: 21114 - DNA, 173 bp, Homo sapiens
  MAP TO AC009189.1; EXPRESSED IN BRAIN, SIGNAL = 0.91; EXPRESSED IN LUNG, SIGNAL = 1.5; EXPRESSED IN HEART, SIGNAL = 0.94; SWISSPROT HIT: Q10364, EVALUE 3.00e-07; NT HIT: gi10946599, EVALUE 3.00e-08; EST_HUMAN HIT: BE567816.1, EVALUE 6.00e-41
tggacctcctgctgggtggagacctgcgttatcacctgcaacagaacgtccacttcaaggaagaaacagtgaagctcttcatctgtgagctggtcatggccctggactacctgcagaaccagcgcatcattcacaggtcagtcaagtccaaggagatggccatgaacgtaacg

SEQ ID NO: 21115 - DNA, 215 bp, Homo sapiens
  MAP TO AC004985.2; EXPRESSED IN BONE MARROW, SIGNAL = 2.4; EXPRESSED IN LUNG, SIGNAL = 1.1; EXPRESSED IN PLACENTA, SIGNAL = 1.1; EXPRESSED IN BT474, SIGNAL = 1.1; EXPRESSED IN HBL100, SIGNAL = 0.94; EXPRESSED IN FETAL LIVER, SIGNAL = 1.1; EXPRESSED IN HELA, SIGNAL = 0.9; EXPRESSED IN ADULT LIVER, SIGNAL = 0.86; EXPRESSED IN BRAIN, SIGNAL = 0.94; EXPRESSED IN HEART, SIGNAL = 1.2; EST_HUMAN HIT: AW849933.1, EVALUE 1.20e-02; SWISSPROT HIT: P10614, EVALUE 2.00e+00; NT HIT: AF128847.1, EVALUE 1.00e-04
gattctcatttgtccaggctctgtcctggagggagcagaagggaaggagcaagggaaaacctgcccaggccactagccccgctgggcctacgaaggcagtgtgggtgtcagtgtgtaacaactggctctccaggatgggggcagggaagccatctgccaatttctgtggtgtaaatgctcctgacatggctgatttccagacaccagtgatgttc

SEQ ID NO: 21116 - DNA, 255 bp, Homo sapiens
  MAP TO AC009966.3; EXPRESSED IN HELA, SIGNAL = 2.1; EXPRESSED IN PLACENTA, SIGNAL = 2.2; EXPRESSED IN HBL100, SIGNAL = 2.1; EXPRESSED IN HEART, SIGNAL = 1.9; EXPRESSED IN FETAL LIVER, SIGNAL = 2.1; EXPRESSED IN ADULT LIVER, SIGNAL = 2.7; EXPRESSED IN BT474, SIGNAL = 2.2; EXPRESSED IN BRAIN, SIGNAL = 1.8; EXPRESSED IN BONE MARROW, SIGNAL = 1.8; EXPRESSED IN LUNG, SIGNAL =   2; SWISSPROT HIT: P06744, EVALUE 1.30e+00; EST_HUMAN HIT: BF304391.1, EVALUE 3.60e+00; NT HIT: gi6755862, EVALUE 3.30e-02
cgggaaactgaacgggagccaaaccatcatgtggtgaacaaatgctgtgatcgctcaactgcagagctgctgctgcaccgtattaaaaaggtgacagcctctcctctgacccttgaaccatggaaatgggcagccaccagcccacccactcagaaagccccaatgctctgtcaccagcagaggcccaacacccactccgacgtcagaaaaagaaggtggcatggtgtagttgtcagaacatggactttaaattca

SEQ ID NO: 21117 - DNA, 110 bp, Homo sapiens
  MAP TO AC006333.3; EXPRESSED IN HEART, SIGNAL = 0.91; EXPRESSED IN PLACENTA, SIGNAL = 0.72; SWISSPROT HIT: P78363, EVALUE 6.90e+00; EST_HUMAN HIT: AW361620.1, EVALUE 1.40e+00; NT HIT: AF260225.1, EVALUE 1.50e-02
tcatctatgggattctctgtgtagctccacatcctcggcttctctgagccaaattagatccaagaagacttgtaccaccaccttgctctctttagttcctgcacggaatg

SEQ ID NO: 21118 - DNA, 604 bp, Homo sapiens
  MAP TO AL022313.1; EXPRESSED IN PLACENTA, SIGNAL = 2.3; EXPRESSED IN HEART, SIGNAL = 1.9; EXPRESSED IN BT474, SIGNAL = 2.1; EXPRESSED IN BONE MARROW, SIGNAL = 2.5; EXPRESSED IN BRAIN, SIGNAL = 1.8; EXPRESSED IN LUNG, SIGNAL = 2.3; EXPRESSED IN HELA, SIGNAL = 2.3; EXPRESSED IN HBL100, SIGNAL =   2; EXPRESSED IN ADULT LIVER, SIGNAL =   2; EXPRESSED IN FETAL LIVER, SIGNAL = 2.3; NT HIT: AF200629.1, EVALUE 0.00e+00; EST_HUMAN HIT: AA625544.1, EVALUE 1.00e-118; SWISSPROT HIT: Q92902, EVALUE 4.00e-45
agaaggcaggcagctgagcaaatcacctcactcttcaatctctgtcacacaaacacatgtcatataaacccagctagagagagccagggtggtgcttaagcttctcacacagaggccactgaacacagaaaggtctggtctatcatcagggccctacacagggttgcagccatctcggatgctggcaaggtctgcactggccaatgtggttcatgtaacaggcatctaccacctgcagcatttgccactgaaaccatgacctatctgggctaaaatggctcatgaaacaatgtttgtgcatttgagaaatgcctcgagcatgtacagcttccgctgcaggtccccctcgctcttggtgtggtcgccattgatggcaatgaacaggcattctccaaacaggtgaaggacatacagggagttgctgttttccatggagaagcaggtgtaggtgtccgagagcttctccagcatcgtcatggaggagatgatgaccggggctaggagggggctgagctggtcctgtagggcagggagctcttcttcctcattctctgactgcccgaacttcagctggagactctcttcaaactcctcatccgtccag

SEQ ID NO: 21119 - DNA, 105 bp, Homo sapiens
  MAP TO AC004909.2; EXPRESSED IN BT474, SIGNAL = 0.99; EXPRESSED IN BONE MARROW, SIGNAL = 0.83; EXPRESSED IN FETAL LIVER, SIGNAL = 0.69; EXPRESSED IN LUNG, SIGNAL = 0.87; EXPRESSED IN HELA, SIGNAL = 0.59; EXPRESSED IN PLACENTA, SIGNAL = 0.8; EXPRESSED IN ADULT LIVER, SIGNAL = 0.76; EXPRESSED IN HEART, SIGNAL = 0.89; SWISSPROT HIT: P16311, EVALUE 4.10e+00; EST_HUMAN HIT: BE617452.1, EVALUE 1.30e+00; NT HIT: AL161493.2, EVALUE 1.90e-01
gaaccacccgatgttaaattaaataaagaattaaaagcaacacactttctagtacatgttgttcatatcatcatggatgtaaaagaaatacaacattttataaag

SEQ ID NO: 21120 - DNA, 137 bp, Homo sapiens
  MAP TO AC009973.3; EXPRESSED IN LUNG, SIGNAL = 1.8; EXPRESSED IN HELA, SIGNAL = 2.6; EXPRESSED IN PLACENTA, SIGNAL = 2.1; EXPRESSED IN HBL100, SIGNAL =   2; EXPRESSED IN HEART, SIGNAL = 1.9; EXPRESSED IN ADULT LIVER, SIGNAL = 2.7; EXPRESSED IN BT474, SIGNAL = 1.8; EXPRESSED IN BRAIN, SIGNAL = 1.9; EXPRESSED IN BONE MARROW, SIGNAL = 2.2; EXPRESSED IN FETAL LIVER, SIGNAL = 2.2; EST_HUMAN HIT: AL044724.1, EVALUE 1.00e-71; SWISSPROT HIT: Q14669, EVALUE 3.00e-19; NT HIT: gi10863902, EVALUE 1.00e-71
ctgcagctccttggggagcttcatctgtccgagcagctgaagaatttactgcctcctggttgctttcagggtctgccattttctcctgtcgacgagcttcagctgctcctcttttgcccaggccagagcctcgccga

SEQ ID NO: 21121 - DNA, 155 bp, Homo sapiens
  MAP TO AC011308.2; EXPRESSED IN HELA, SIGNAL =   2; EXPRESSED IN ADULT LIVER, SIGNAL = 2.2; EXPRESSED IN BRAIN, SIGNAL = 1.6; EXPRESSED IN LUNG, SIGNAL = 2.3; EXPRESSED IN BONE MARROW, SIGNAL = 2.1; EXPRESSED IN PLACENTA, SIGNAL = 1.9; EXPRESSED IN HEART, SIGNAL = 1.6; EXPRESSED IN HBL100, SIGNAL = 2.1; EXPRESSED IN BT474, SIGNAL = 1.8; EXPRESSED IN FETAL LIVER, SIGNAL = 2.1; NT HIT: AB014558.1, EVALUE 5.50e+00; SWISSPROT HIT: Q9Z321, EVALUE 6.60e+00
tttctaggggcagcagcaatagagatgtcagcagtggtggcacagcaagacgtgacgtgatgagcaatcaagtcttcggtgcactggttgtgggtcaggattttgcctgtggctgtggttgctacaaatcatatttagtcccttatttttcaagc

SEQ ID NO: 21122 - DNA, 262 bp, Homo sapiens
  MAP TO AC011421.2; EXPRESSED IN PLACENTA, SIGNAL = 8.4; EXPRESSED IN HBL100, SIGNAL =   8; EXPRESSED IN HELA, SIGNAL = 9.3; EXPRESSED IN HEART, SIGNAL = 7.4; EXPRESSED IN ADULT LIVER, SIGNAL = 9.4; EXPRESSED IN FETAL LIVER, SIGNAL = 8.9; EXPRESSED IN BONE MARROW, SIGNAL = 7.8; EXPRESSED IN BT474, SIGNAL = 7.4; EXPRESSED IN BRAIN, SIGNAL = 7.5; EXPRESSED IN LUNG, SIGNAL = 9.9; NT HIT: AL163227.2, EVALUE 5.40e-01; EST_HUMAN HIT: AW893484.1, EVALUE 4.10e-02; SWISSPROT HIT: Q13797, EVALUE 7.00e+00
ggccccttagctaggatcaattacggtataaatgattcacagcctaacactagcctcagagctcatattatccttaaataaattatgacggactatatggcacgagccatgaggacagagatggtcatcaatgctctgaccactaaccaaattcaaggtgtttgagtcttgttgaaagctgagattggacagtgtagctcctcaagtatctcaaataatcagatgtatcatggatttagcagaacataaactactgttttgt

SEQ ID NO: 21123 - DNA, 173 bp, Homo sapiens
  MAP TO AC006052.5; EXPRESSED IN HEART, SIGNAL = 0.83; EST_HUMAN HIT: AA447020.1, EVALUE 9.30e+00; SWISSPROT HIT: P18099, EVALUE 5.00e+00
gatgttggtgaacctcaccattgcactgctgaccggagtcagcctggcttcatcttccctctcaacttcagagtgagtgacagagctggagggaatggcattgagagtctggctgctcttccactaactggaaggaaacagtatgcagatctgagtacttcagaccagcctag

SEQ ID NO: 21124 - DNA, 252 bp, Homo sapiens
  MAP TO AL022326.1; EXPRESSED IN HBL100, SIGNAL =   2; EXPRESSED IN PLACENTA, SIGNAL =   2; EXPRESSED IN FETAL LIVER, SIGNAL = 1.7; EXPRESSED IN BONE MARROW, SIGNAL = 2.1; EXPRESSED IN BRAIN, SIGNAL = 1.9; EXPRESSED IN LUNG, SIGNAL = 1.9; EXPRESSED IN HELA, SIGNAL =   2; EXPRESSED IN HEART, SIGNAL = 1.7; EXPRESSED IN ADULT LIVER, SIGNAL = 1.8; EXPRESSED IN BT474, SIGNAL = 1.8; NT HIT: AF195953.1, EVALUE 3.00e-09; EST_HUMAN HIT: AA502672.1, EVALUE 2.00e-14; SWISSPROT HIT: P22118, EVALUE 1.70e+00
gacagaaagcagaggagcgttccaggggctggaggaggggaacagggagtggctgctgatgggtgttgcgtttctttgcgggatgatgtaaatgttctagaattagattgtggtcatggttgtacaactctgtaaatatactcaaaaccactgactcatatactttaagtgggtaaattttagggtatgtaaattatctcccaagaaagtgctgtaaaaaatgggctcgtccaagtccaggctggacagcct

SEQ ID NO: 21125 - DNA, 163 bp, Homo sapiens
  MAP TO AC007437.16; EXPRESSED IN LUNG, SIGNAL = 0.72; EXPRESSED IN ADULT LIVER, SIGNAL = 0.74; EXPRESSED IN HEART, SIGNAL = 0.81; SWISSPROT HIT: Q9T1R3, EVALUE 8.90e+00; NT HIT: AF111167.2, EVALUE 3.20e-01
gtatctatcttccatgaagataactttgttgcctcatggtggaaagttctatctgtgtctccaaaaacattatcagcagtttaagctaaatattcaggaccattctctcgtcctcaaaaataatgagcagtaatttgatattgtagaaaaattactggacttg

SEQ ID NO: 21126 - DNA, 91 bp, Homo sapiens
  MAP TO AC006374.2; EXPRESSED IN BT474, SIGNAL = 0.86; EXPRESSED IN BONE MARROW, SIGNAL = 0.67; EXPRESSED IN FETAL LIVER, SIGNAL = 0.68; EXPRESSED IN LUNG, SIGNAL = 0.69; EXPRESSED IN PLACENTA, SIGNAL = 0.8; EXPRESSED IN ADULT LIVER, SIGNAL = 0.71; EXPRESSED IN HEART, SIGNAL = 0.9; NT HIT: X58286.1, EVALUE 7.50e-01; EST_HUMAN HIT: T50266.1, EVALUE 3.00e-06
ggtcttaataaatgaagatgagataaagacttttccaggcaaaccaaaactgagggagtttattaccaccaacctgattgaaatgaaattc

SEQ ID NO: 21127 - DNA, 122 bp, Homo sapiens
  MAP TO AC011451.2; EXPRESSED IN LUNG, SIGNAL = 5.3; EXPRESSED IN PLACENTA, SIGNAL = 4.9; EXPRESSED IN HELA, SIGNAL = 5.3; EXPRESSED IN ADULT LIVER, SIGNAL = 5.9; EXPRESSED IN BRAIN, SIGNAL =   4; EXPRESSED IN BONE MARROW, SIGNAL = 4.4; EXPRESSED IN HEART, SIGNAL = 3.8; EXPRESSED IN HBL100, SIGNAL = 4.9; EXPRESSED IN BT474, SIGNAL = 3.9; EXPRESSED IN FETAL LIVER, SIGNAL = 5.8; EST_HUMAN HIT: BE245652.1, EVALUE 2.00e-03; SWISSPROT HIT: P92964, EVALUE 3.50e-01; NT HIT: AJ001362.1, EVALUE 2.30e-01
ctggcgagtccagctcgtcgcggtgagtactggggtgaaagttggtttcgggggcttcttcctcctgttttatctgagaatttgtttttctctttgcgcatcctgtatttacttttgacact

SEQ ID NO: 21128 - DNA, 93 bp, Homo sapiens
  MAP TO AC010970.2; EXPRESSED IN FETAL LIVER, SIGNAL = 5.7; EXPRESSED IN BRAIN, SIGNAL =   5; EXPRESSED IN LUNG, SIGNAL = 5.9; EXPRESSED IN HBL100, SIGNAL = 4.5; EXPRESSED IN HELA, SIGNAL =   6; EXPRESSED IN PLACENTA, SIGNAL = 6.4; EXPRESSED IN HEART, SIGNAL = 4.1; EXPRESSED IN BT474, SIGNAL = 4.7; EXPRESSED IN ADULT LIVER, SIGNAL = 7.6; EXPRESSED IN BONE MARROW, SIGNAL = 4.1; EST_HUMAN HIT: AW300589.1, EVALUE 2.00e-45; NT HIT: gi5454081, EVALUE 3.00e-15
tggagtgtccacaatttgccggtcatctgaggagccacctcgcttcaggtcaatgactggggcgaggactgtactttgtttcgtcctttggct

SEQ ID NO: 21129 - DNA, 150 bp, Homo sapiens
  MAP TO AC007430.11; EXPRESSED IN LUNG, SIGNAL = 0.75; EXPRESSED IN BRAIN, SIGNAL = 0.94; EXPRESSED IN HEART, SIGNAL = 1.3; SWISSPROT HIT: Q13698, EVALUE 1.70e+00; NT HIT: AL161509.2, EVALUE 5.30e+00; EST_HUMAN HIT: BE146585.1, EVALUE 3.50e-01
agtattacggaggaactgaagctgctccggtcttttaaacacatccccgtagactagctgggtggtggagcaggcatttggctgtagatacacatggtttggtatgcggaagtaagacctcctggctggacccacttcagaagtcttcat

SEQ ID NO: 21130 - DNA, 165 bp, Homo sapiens
  MAP TO AC011739.2; EXPRESSED IN HEART, SIGNAL = 3.2; EXPRESSED IN BRAIN, SIGNAL = 4.1; EXPRESSED IN LUNG, SIGNAL = 3.9; EXPRESSED IN HELA, SIGNAL = 4.2; EXPRESSED IN HBL100, SIGNAL = 3.6; EXPRESSED IN PLACENTA, SIGNAL = 4.8; EXPRESSED IN BT474, SIGNAL =   4; EXPRESSED IN ADULT LIVER, SIGNAL = 4.9; EXPRESSED IN FETAL LIVER, SIGNAL = 4.3; EXPRESSED IN BONE MARROW, SIGNAL = 3.6; EST_HUMAN HIT: AA476650.1, EVALUE 2.00e-83; SWISSPROT HIT: P92969, EVALUE 2.90e+00; NT HIT: gi11429300, EVALUE 3.00e-88
aggtgacctatgtgacgccgttctttgaggaaaaggaaatcgaagaccggaagacagatttcgaaatgcaccacaacatcaaccgctttgtcttcgagacacccttcacgctgtcgggcaagaagcacggtggggtggcggagcagtgcaagcggcggacgatcc

SEQ ID NO: 21131 - DNA, 401 bp, Homo sapiens
  MAP TO AC011493.2; EXPRESSED IN FETAL LIVER, SIGNAL = 8.2; EXPRESSED IN BT474, SIGNAL = 2.1; EXPRESSED IN ADULT LIVER, SIGNAL = 7.1; EXPRESSED IN BRAIN, SIGNAL = 3.4; EXPRESSED IN LUNG, SIGNAL =   7; EXPRESSED IN BONE MARROW, SIGNAL = 6.1; EXPRESSED IN PLACENTA, SIGNAL = 8.3; EXPRESSED IN HEART, SIGNAL =   4; EXPRESSED IN HELA, SIGNAL = 5.6; EXPRESSED IN HBL100, SIGNAL = 4.5; SWISSPROT HIT: P52354, EVALUE 3.00e+00; NT HIT: Y09788.2, EVALUE 5.40e-02; EST_HUMAN HIT: BE071414.1, EVALUE 1.00e-34
tttctgttccctgggatgaaaactcatcttcagtgctgtctacaacaaaagagaaacatcatgttactaaaacctcaggaacagagattgcagattgggctaagattgtacactttcttaaggatgatctgcatggaaaagcagcaaacaatttcagaaagatacaagaaaaattgcctctaatgggtacttatactgtagttcaactcgatttgttctgtaagtggtagggaaaataggataaaatacttcatgttcaagcatttttgctgctcagtcagaatgaaaccctgcagcaggcatggacatgtttcctgagagaagtagaagaaaaaaatttagacagacaagctgatcctttattgcaagcccccccccacccccggccacttggttcagtg

SEQ ID NO: 21132 - DNA, 80 bp, Homo sapiens
  MAP TO AC012122.1; EXPRESSED IN LUNG, SIGNAL = 2.1; EXPRESSED IN PLACENTA, SIGNAL = 2.4; EXPRESSED IN HELA, SIGNAL = 1.6; EXPRESSED IN ADULT LIVER, SIGNAL = 1.8; EXPRESSED IN BRAIN, SIGNAL = 2.1; EXPRESSED IN BONE MARROW, SIGNAL = 1.6; EXPRESSED IN HEART, SIGNAL = 1.6; EXPRESSED IN HBL100, SIGNAL = 1.5; EXPRESSED IN BT474, SIGNAL = 1.7; EXPRESSED IN FETAL LIVER, SIGNAL = 1.4; NT HIT: gi4758563, EVALUE 3.00e-06; EST_HUMAN HIT: AW293349.1, EVALUE 4.00e-33; SWISSPROT HIT: P35820, EVALUE 5.40e+00
cctcctcctgtatctgccagaggaagacaccttctgggcactggatcagctgatggctgaggagaggcactccctgcagg

SEQ ID NO: 21133 - DNA, 182 bp, Homo sapiens
  MAP TO AC011592.2; EXPRESSED IN BT474, SIGNAL = 1.3; EXPRESSED IN FETAL LIVER, SIGNAL = 1.6; EXPRESSED IN PLACENTA, SIGNAL = 1.8; EXPRESSED IN HELA, SIGNAL = 1.8; EXPRESSED IN ADULT LIVER, SIGNAL = 2.1; EXPRESSED IN BRAIN, SIGNAL = 1.3; EXPRESSED IN LUNG, SIGNAL = 1.8; EXPRESSED IN BONE MARROW, SIGNAL = 1.5; EXPRESSED IN HEART, SIGNAL = 1.8; EXPRESSED IN HBL100, SIGNAL = 1.8; EST_HUMAN HIT: BF663038.1, EVALUE 6.30e-01; NT HIT: AL161554.2, EVALUE 9.10e-02; SWISSPROT HIT: Q09575, EVALUE 9.70e-01
atagatgaccctggaattatgagagcactagcatgtgcagtttatgaatgccaatggcactgcatccgagctgcctgccggcccctatttcttgtggatgcctcagcagatccagtgcaggtactgaggggcggactgccagcagtagtgagtcagctggctgggtgtgcgattgcacttag

SEQ ID NO: 21134 - DNA, 128 bp, Homo sapiens
  MAP TO AC011700.3; EXPRESSED IN HBL100, SIGNAL =   1; EXPRESSED IN HELA, SIGNAL = 1.2; EXPRESSED IN HEART, SIGNAL =   1; EXPRESSED IN ADULT LIVER, SIGNAL = 1.2; EXPRESSED IN FETAL LIVER, SIGNAL = 1.2; EXPRESSED IN PLACENTA, SIGNAL = 0.98; EXPRESSED IN BT474, SIGNAL = 0.94; EXPRESSED IN BONE MARROW, SIGNAL = 1.2; EXPRESSED IN BRAIN, SIGNAL = 1.1; EXPRESSED IN LUNG, SIGNAL = 0.99; EST_HUMAN HIT: AA284468.1, EVALUE 2.90e-01; SWISSPROT HIT: P19422, EVALUE 7.80e-01; NT HIT: AF309650.1, EVALUE 4.40e+00
atcaggacacaatcactctgctcactccatggaatggcgtcagcgtacaggtgacaggagatacctatgtattcgacaaggatgatgatgtaatggaggtgctagagagggctagtcaagaagagtgt

SEQ ID NO: 21135 - DNA, 172 bp, Homo sapiens
  MAP TO AC007603.1; EXPRESSED IN BONE MARROW, SIGNAL = 0.67; EXPRESSED IN FETAL LIVER, SIGNAL = 0.59; EXPRESSED IN PLACENTA, SIGNAL = 0.66; EXPRESSED IN HEART, SIGNAL = 0.87; EST_HUMAN HIT: BF687947.1, EVALUE 1.50e-01; SWISSPROT HIT: Q10127, EVALUE 5.10e+00; NT HIT: U68179.1, EVALUE 8.60e-02
ggattgcacgtcttgcagctcgaagcatcccaggtgatacaatcctgtgtcagccagccagttccaccaaaattgaatttctgacctgactgcttgctcttcctctttccagaagaccctgcaggtttctctgcaccgctccctgccaagaggagctccaactatcagagat

SEQ ID NO: 21136 - DNA, 121 bp, Homo sapiens
  MAP TO AF002992.1; EXPRESSED IN BT474, SIGNAL = 2.1; EXPRESSED IN BONE MARROW, SIGNAL = 1.9; EXPRESSED IN PLACENTA, SIGNAL = 2.8; EXPRESSED IN HELA, SIGNAL = 2.2; EXPRESSED IN ADULT LIVER, SIGNAL =   2; EXPRESSED IN FETAL LIVER, SIGNAL = 2.2; EXPRESSED IN BRAIN, SIGNAL = 2.5; EXPRESSED IN LUNG, SIGNAL = 2.6; EXPRESSED IN HEART, SIGNAL = 2.1; EXPRESSED IN HBL100, SIGNAL = 2.1; EST_HUMAN HIT: AW009406.1, EVALUE 3.90e-01; NT HIT: AF092535.1, EVALUE 2.30e-01; SWISSPROT HIT: P49641, EVALUE 6.00e-01
tctttcccattgtgccccactgtggtccctttgaaggccctcagaggttcctgggtgtcaaggccaatgcccagtacaagtttcttcatgctaggtacccagactctgctggagactgggg

SEQ ID NO: 21137 - DNA, 101 bp, Homo sapiens
  MAP TO AC012444.1; EXPRESSED IN HBL100, SIGNAL = 7.1; EXPRESSED IN HEART, SIGNAL = 7.3; EXPRESSED IN BONE MARROW, SIGNAL = 6.1; EXPRESSED IN PLACENTA, SIGNAL =  10; EXPRESSED IN BT474, SIGNAL = 6.9; EXPRESSED IN ADULT LIVER, SIGNAL =  11; EXPRESSED IN FETAL LIVER, SIGNAL = 8.9; EXPRESSED IN BRAIN, SIGNAL = 7.8; EXPRESSED IN LUNG, SIGNAL = 9.9; EXPRESSED IN HELA, SIGNAL =   9; SWISSPROT HIT: Q12815, EVALUE 9.10e+00; EST_HUMAN HIT: AW962688.1, EVALUE 1.40e-02
tgtctgccctgctcaaggttgagatggaacacagtaggaagggctcagaggcgctgaacatgtcctctcctgcctcctgctctgtcccagtgccgggctga

SEQ ID NO: 21138 - DNA, 152 bp, Homo sapiens
  MAP TO AC007462.2; EXPRESSED IN HEART, SIGNAL = 0.78; EXPRESSED IN ADULT LIVER, SIGNAL = 0.79; NT HIT: AF134119.1, EVALUE 2.90e-01; EST_HUMAN HIT: BF374341.1, EVALUE 5.10e-01
aaaaaggtccgataggcagacacgtaattcgagtagaggcagcgctgcttcttgaagttggcttgattcattattaatgcataaatcctatgactcatctgcaggactgtaaatccaaagacaagtaaacaatattgagtatatgacgccat

SEQ ID NO: 21139 - DNA, 307 bp, Homo sapiens
  MAP TO AC007952.1; EXPRESSED IN ADULT LIVER, SIGNAL = 0.75; EXPRESSED IN HEART, SIGNAL = 0.84; EXPRESSED IN PLACENTA, SIGNAL = 0.74; EXPRESSED IN BONE MARROW, SIGNAL = 0.89; EXPRESSED IN HBL100, SIGNAL = 0.74; EXPRESSED IN FETAL LIVER, SIGNAL = 0.66; EXPRESSED IN LUNG, SIGNAL = 0.77; EXPRESSED IN HELA, SIGNAL = 0.73; SWISSPROT HIT: P07645, EVALUE 1.10e+00; NT HIT: Y12488.1, EVALUE 6.40e-01
  unsure 13
  unsure 38
  unsure 40
  unsure 57
  unsure 58
  unsure 59
  unsure 118
  unsure 160
  unsure 169
  unsure 260
gagccgaagagcnagccaatgacaggcctggggatcgntnctggcacagcccacttnnngacaaggccttggaaacttggtctctgcagcagcaaccggatttcagcctgggcctcgngacacctcggcctgggtacggatgcgacttggatgcagtccnttccctggncagtggaggggatgcccaggctggcacaggagtctcgggtcctctccggctctaccccaatctgctgtgtgattttgggcccaggcagggnacccctctgggctctgttactggagaaaaggcaaatggctggtacgg

SEQ ID NO: 21140 - DNA, 107 bp, Homo sapiens
  MAP TO AC011299.1; EXPRESSED IN ADULT LIVER, SIGNAL = 0.92; EXPRESSED IN HBL100, SIGNAL = 0.92; EXPRESSED IN HEART, SIGNAL = 1.1; EXPRESSED IN BONE MARROW, SIGNAL = 1.2; SWISSPROT HIT: Q9ZD92, EVALUE 2.40e+00; EST_HUMAN HIT: BE879561.1, EVALUE 4.00e-53; NT HIT: AF072166.1, EVALUE 3.00e-53
atgttgaaacatttgtagcagatatactgaaaggagaaaatttatccaagaaagcaaaggaaaagagagaatcccttattaagaagataaaagatgtaaagtctatg

SEQ ID NO: 21141 - DNA, 150 bp, Homo sapiens
  MAP TO AC009973.2; EXPRESSED IN ADULT LIVER, SIGNAL = 0.97; EXPRESSED IN BT474, SIGNAL = 1.4; EXPRESSED IN HELA, SIGNAL = 1.4; EXPRESSED IN HBL100, SIGNAL = 1.6; EXPRESSED IN HEART, SIGNAL = 0.94; EXPRESSED IN LUNG, SIGNAL = 5.6; SWISSPROT HIT: Q14669, EVALUE 4.00e-21; NT HIT: gi10863902, EVALUE 9.00e-79
gttctaaggcccagcagctactacaaggattgcaagccagtgatgaaagtcaacagcttcaggcagttattgagatgtgtcagttactggtcatgggaaatgaggagacactgggagggtttcctgtcaagagtgttgttccagctttgg

SEQ ID NO: 21142 - DNA, 103 bp, Homo sapiens
  MAP TO AP000275.1; EXPRESSED IN BRAIN, SIGNAL = 0.76; EXPRESSED IN PLACENTA, SIGNAL = 1.2; EXPRESSED IN BT474, SIGNAL = 0.67; EXPRESSED IN BONE MARROW, SIGNAL = 0.69; EXPRESSED IN LUNG, SIGNAL = 0.85; EXPRESSED IN HELA, SIGNAL = 0.62; EXPRESSED IN ADULT LIVER, SIGNAL = 0.74; EXPRESSED IN FETAL LIVER, SIGNAL = 1.7; EXPRESSED IN HEART, SIGNAL =   1; SWISSPROT HIT: P36295, EVALUE 1.80e+00; EST_HUMAN HIT: AW137826.1, EVALUE 2.00e-51
gaagcctgttcctgagctgattggggttctggtccaggggtcccaaggagcgaggcccaagctcaggaggacaaagaacgaccacctggaaagtggcaaaaat

SEQ ID NO: 21143 - DNA, 134 bp, Homo sapiens
  MAP TO AC004887.2; EXPRESSED IN BT474, SIGNAL = 0.67; EXPRESSED IN BONE MARROW, SIGNAL = 0.82; EXPRESSED IN HELA, SIGNAL = 0.83; EXPRESSED IN ADULT LIVER, SIGNAL = 0.72; EXPRESSED IN BRAIN, SIGNAL = 0.8; EXPRESSED IN PLACENTA, SIGNAL = 0.69; EXPRESSED IN FETAL LIVER, SIGNAL = 0.76; EXPRESSED IN LUNG, SIGNAL =   1; EXPRESSED IN HEART, SIGNAL = 0.84; SWISSPROT HIT: Q10096, EVALUE 6.80e+00; NT HIT: J02714.1, EVALUE 3.00e-01; EST_HUMAN HIT: BE743847.1, EVALUE 4.50e-01
attcaagagcaaggtgagagaaagtggctgagcaggaggtactgtaaagacactcttcatctctcatcttcacactgggctaagcttcaagtcagtgttagggatgacacagaaattgaaagcacagttgatga

SEQ ID NO: 21144 - DNA, 172 bp, Homo sapiens
  MAP TO AC008163.1; EXPRESSED IN HEART, SIGNAL = 0.78; EXPRESSED IN BRAIN, SIGNAL = 0.82; EXPRESSED IN FETAL LIVER, SIGNAL = 0.7; EXPRESSED IN HELA, SIGNAL = 0.68; EXPRESSED IN ADULT LIVER, SIGNAL = 1.1; NT HIT: AF166341.1, EVALUE 3.40e-01; SWISSPROT HIT: Q14517, EVALUE 4.40e-01
aaaaacttggatcacaggaaataggatcatctacattctccacaaaaactgtaaacgtatagctgctggtattattcccattatctgttgcctcagtttccaaagagtagattttggagttacttgggttgtcaagattcaaaggctgaagaagagtgattgttcctgtgac

SEQ ID NO: 21145 - DNA, 406 bp, Homo sapiens
  MAP TO AC007002.2; EXPRESSED IN BT474, SIGNAL = 0.73; EXPRESSED IN ADULT LIVER, SIGNAL = 0.94; EXPRESSED IN BRAIN, SIGNAL = 0.94; EXPRESSED IN HEART, SIGNAL = 0.92; EXPRESSED IN PLACENTA, SIGNAL = 0.83; EXPRESSED IN FETAL LIVER, SIGNAL = 0.68; EXPRESSED IN LUNG, SIGNAL = 0.83; EXPRESSED IN HELA, SIGNAL = 0.82; EXPRESSED IN BONE MARROW, SIGNAL = 1.4; NT HIT: gi11429090, EVALUE 1.00e-127; SWISSPROT HIT: P79739, EVALUE 2.00e-19
ctacttcgcagttcttgtgcacgctatgaaaaataaaacctgcgtgctcgtctgtgtgagtgtgtttggtggggagagggggcaggtgactgtaccccgggttggggtccgccgcccctccctcgcgggccctctgcagaagtgcaccctgagagagacccgggtgtggctcccgcagggttctggcttccagtcgtcgcggagggagaagtatggcaacgtgttcaagacgcatttgttggggcggccgctgatacgcgtgaccggcgcggagaacgtgcgcaagatcctcatgggcgagcaccacctcgtgagcaccgagtggcctcgcagcacccgcatgttgctgggccccaacacggtgtccaattccattggcgacatccaccgcaacaagcgcaaggta

SEQ ID NO: 21146 - DNA, 189 bp, Homo sapiens
  MAP TO AC012330.5; EXPRESSED IN FETAL LIVER, SIGNAL = 1.5; EXPRESSED IN LUNG, SIGNAL = 0.98; EXPRESSED IN BONE MARROW, SIGNAL = 1.1; EXPRESSED IN HELA, SIGNAL = 1.1; EXPRESSED IN HEART, SIGNAL = 1.1; EXPRESSED IN PLACENTA, SIGNAL =   1; EXPRESSED IN BT474, SIGNAL = 1.2; EXPRESSED IN ADULT LIVER, SIGNAL = 1.3; EXPRESSED IN BRAIN, SIGNAL = 1.1; EXPRESSED IN HBL100, SIGNAL =   1; EST_HUMAN HIT: H72018.1, EVALUE 5.00e-53; SWISSPROT HIT: P19440, EVALUE 1.00e-20; NT HIT: AJ007378.1, EVALUE 2.00e-89
cagccgcctggatgtccttcacaatctgggccatgaggctgccgttgtagaaggcctgggcaccctcgatggccagcatctcgtaggtgtcagccagccgcggcagggtcagtctctccccctcccaaagcacctttctatcccggcagaacacctcaccggggcagagggggctcatgtgaggcagca

SEQ ID NO: 21147 - DNA, 248 bp, Homo sapiens
  MAP TO AL132708.1; EXPRESSED IN BT474, SIGNAL = 1.3; EXPRESSED IN ADULT LIVER, SIGNAL = 1.7; EXPRESSED IN FETAL LIVER, SIGNAL = 1.6; EXPRESSED IN BONE MARROW, SIGNAL = 1.3; EXPRESSED IN LUNG, SIGNAL = 1.1; EXPRESSED IN BRAIN, SIGNAL = 1.2; EXPRESSED IN PLACENTA, SIGNAL = 1.3; EXPRESSED IN HBL100, SIGNAL = 1.4; EXPRESSED IN HELA, SIGNAL = 1.3; EXPRESSED IN HEART, SIGNAL = 1.3; SWISSPROT HIT: Q10268, EVALUE 3.20e-01; NT HIT: M94081.1, EVALUE 9.30e+00
gatagaggctggatccatcaactcactggttcatggagaaagtgaggcgaagcagcctgttcaatgcatttctgcagaattgccttcaccactgatgcacactgcaaccacaatctcttcctttgtccactctgggcctcatttccctctttatggcacagatagtcctgaagtcaatgatctctcagcctttccaacccacatacccctcctcctagaatgcagtcacggaaggggaggaggaccag

SEQ ID NO: 21148 - DNA, 118 bp, Homo sapiens
  MAP TO AL121759.5; EXPRESSED IN HEART, SIGNAL = 1.1; EXPRESSED IN BT474, SIGNAL = 0.95; NT HIT: U45996.1, EVALUE 2.60e-01
ctctccagcagcccctaccacatcttgcctagtgatctgtcgacttgtatctgcagatccaggctccgcagttgctaacgctgtacttctctcagcctcattttccacatttctaaaa

SEQ ID NO: 21149 - DNA, 133 bp, Homo sapiens
  MAP TO AC007632.4; EXPRESSED IN PLACENTA, SIGNAL = 0.8; EXPRESSED IN BONE MARROW, SIGNAL = 0.72; EXPRESSED IN LUNG, SIGNAL =   1; EXPRESSED IN HEART, SIGNAL = 1.1; EXPRESSED IN HBL100, SIGNAL = 0.69; EXPRESSED IN FETAL LIVER, SIGNAL = 0.69; EXPRESSED IN HELA, SIGNAL = 0.94; EXPRESSED IN ADULT LIVER, SIGNAL = 0.99; EXPRESSED IN BRAIN, SIGNAL =   1; EST_HUMAN HIT: H06616.1, EVALUE 1.00e-10; NT HIT: AB038490.1, EVALUE 2.00e-08
gggcactgctccctgcatcccagctgctccagctccagccacagctcaaaaggccccaggtacagctgagaccaccactccagagggcacaagccataatccttggcaactttcatgtggaattaaatctgca

SEQ ID NO: 21150 - DNA, 774 bp, Homo sapiens
  MAP TO AC004230.1; EXPRESSED IN BT474, SIGNAL =  31; EXPRESSED IN FETAL LIVER, SIGNAL = 6.5; EXPRESSED IN ADULT LIVER, SIGNAL = 3.2; EXPRESSED IN BONE MARROW, SIGNAL = 3.5; EXPRESSED IN LUNG, SIGNAL = 1.2e+02; EXPRESSED IN BRAIN, SIGNAL = 5.7; EXPRESSED IN HELA, SIGNAL =  13; EXPRESSED IN PLACENTA, SIGNAL =  27; EXPRESSED IN HBL100, SIGNAL = 2.6; EXPRESSED IN HEART, SIGNAL =  40; NT HIT: M80902.1, EVALUE 1.00e-125; EST_HUMAN HIT: AW084964.1, EVALUE 0.00e+00; SWISSPROT HIT: gi1351901, EVALUE 1.00e-114
cttccactttgggcagagaaatatccacatcgcccttcaccttgggacctttcagatgcaaatcaaagtcaggcatggggatcttgggggctttgatattcatctctggcatcttgaacttgggccctttcaactttccctctggtccttcaatgttaacatcagggccttcaacgtccactttggggcctgagacatcaacgtcagccttgggcaggttcacatccacttcagggccctctgctttgaagccaggcatgctgaacttgggcattttcatcttgggcatcttcaggtgccagtctggaccctgaacattaacatctgggacatcaatgtccactttggggcctttgaggtcaacttcaggacctttcagatctccctctaccttagggcctgtaacatccacatctccttttatttttggacctgtgagattcaggtcaatatctggcatggatatctttggagtcttaaaatgcatctctggcatcttaaactttggacttttccactttccttcaggtccttcgatattcacatcgggacattcaacatccactttcggtcctgagacatcaatgtcagccttgggcaggttcacgtccacatctggaccttctcctttgaagccaggcatgctgatcttgggcatttttatcttgggcatctttaggtgccagtctgggccatgaacatcaacatcaggtgcgtcaatgtccacttttgggcccttgatgtcaacttctgggcccttgaggtcaccttcca

SEQ ID NO: 21151 - DNA, 182 bp, Homo sapiens
  MAP TO AF110324.1; EXPRESSED IN BT474, SIGNAL = 7.2; EXPRESSED IN FETAL LIVER, SIGNAL = 7.4; EXPRESSED IN LUNG, SIGNAL = 8.6; EXPRESSED IN BONE MARROW, SIGNAL = 6.8; EXPRESSED IN HEART, SIGNAL = 5.1; EXPRESSED IN PLACENTA, SIGNAL = 7.5; EXPRESSED IN ADULT LIVER, SIGNAL = 8.3; EXPRESSED IN BRAIN, SIGNAL = 5.9; EXPRESSED IN HELA, SIGNAL =   8; EXPRESSED IN HBL100, SIGNAL = 6.4; EST_HUMAN HIT: AA471268.1, EVALUE 4.30e-01; SWISSPROT HIT: P11799, EVALUE 2.90e+00; NT HIT: gi10181139, EVALUE 3.00e-36
acaaggggtcacctatgctgactcgtccttttgtgccccgtgtaggactgcacatgccagagcgaaggccgatgccgccgaccaggccgcgctggccgctcgccaggagtgcgacatcgcgagagctgtggccagggagctgtcacctgatttctaccaaccaggtaaaacagtgctccttt

SEQ ID NO: 21152 - DNA, 101 bp, Homo sapiens
  MAP TO AF047825.1; EXPRESSED IN BONE MARROW, SIGNAL = 1.1; EXPRESSED IN ADULT LIVER, SIGNAL = 1.3; EXPRESSED IN FETAL LIVER, SIGNAL = 1.1; EXPRESSED IN BRAIN, SIGNAL = 0.98; EXPRESSED IN LUNG, SIGNAL =   1; EXPRESSED IN HEART, SIGNAL =   1; EXPRESSED IN HELA, SIGNAL = 1.2; EXPRESSED IN PLACENTA, SIGNAL = 0.93; EXPRESSED IN BT474, SIGNAL =   1; EST_HUMAN HIT: BF347603.1, EVALUE 2.00e-15; NT HIT: gi4503168, EVALUE 9.00e-16
tggaaactcttcagcagcggcgctacctgcttgcgcaaatcctggagcaggaggcggaggtcaggaagcagccatttgagaaggagaaagaagggaaacat

SEQ ID NO: 21153 - DNA, 241 bp, Homo sapiens
  MAP TO AL121748.2; EXPRESSED IN LUNG, SIGNAL = 1.5; EXPRESSED IN PLACENTA, SIGNAL = 1.5; EXPRESSED IN HEART, SIGNAL = 1.4; EXPRESSED IN HBL100, SIGNAL = 0.91; EXPRESSED IN BT474, SIGNAL = 0.91; EXPRESSED IN ADULT LIVER, SIGNAL = 1.1; EST_HUMAN HIT: AW840437.1, EVALUE 0.00e+00; SWISSPROT HIT: O14786, EVALUE 2.00e-23; NT HIT: gi11430876, EVALUE 0.00e+00
aagaacatctccaggaagccaggcaatgtgttgaagaccttagaccccatcctcatcaccatcatagccatgagtgccctgggggtcctcctgggggctgtctgtggggtcgtgctgtactgtgcctgttggcataatgggatgtcagaaagaaacttgtctgccctggagaactataactttgaacttgtggatggtgtgaagttgaaaaaagacaaactgaatacacagagtacttatt

SEQ ID NO: 21154 - DNA, 96 bp, Homo sapiens
  MAP TO AF053356.1; EXPRESSED IN BRAIN, SIGNAL = 1.7; EXPRESSED IN PLACENTA, SIGNAL = 2.1; EXPRESSED IN HBL100, SIGNAL = 2.2; EXPRESSED IN ADULT LIVER, SIGNAL = 3.4; EXPRESSED IN FETAL LIVER, SIGNAL = 2.9; EXPRESSED IN BONE MARROW, SIGNAL = 1.7; EXPRESSED IN LUNG, SIGNAL = 2.4; EXPRESSED IN HEART, SIGNAL = 2.1; EXPRESSED IN HELA, SIGNAL = 2.3; EXPRESSED IN BT474, SIGNAL = 1.7; NT HIT: gi11422382, EVALUE 2.00e-47; EST_HUMAN HIT: BE743609.1, EVALUE 3.00e-47; SWISSPROT HIT: Q10647, EVALUE 2.40e+00
ccccaaaggcagggaatgcagcaaaagctggtgccatctggggtgcagcaaaggggtctccaccgatgtcagccagcaggtcagtactggcttttt

SEQ ID NO: 21155 - DNA, 153 bp, Homo sapiens
  MAP TO AC009269.1; EXPRESSED IN PLACENTA, SIGNAL = 0.74; EXPRESSED IN FETAL LIVER, SIGNAL = 0.57; EXPRESSED IN LUNG, SIGNAL = 0.7; EXPRESSED IN HELA, SIGNAL = 0.73; EXPRESSED IN BRAIN, SIGNAL = 1.2; EXPRESSED IN BONE MARROW, SIGNAL = 0.63; EXPRESSED IN HBL100, SIGNAL = 0.92; EXPRESSED IN ADULT LIVER, SIGNAL = 0.84; EXPRESSED IN HEART, SIGNAL = 0.84; NT HIT: gi9625875, EVALUE 3.50e-01
  unsure 3
gcntgcaggtcagcaccgaaagagccccgcacggatcccgccccacaggtgcgatttacacaacccacatcaccaccacccctcccaacttcaccacctctagggtcaccaccctgtggggttttgtctttacgactaagccgattccctctg

SEQ ID NO: 21156 - DNA, 355 bp, Homo sapiens; identical to SEQ ID NO: 4408
  MAP TO AF127936.1; EXPRESSED IN PLACENTA, SIGNAL = 8.5; EXPRESSED IN HBL100, SIGNAL = 7.6; EXPRESSED IN HELA, SIGNAL = 8.7; EXPRESSED IN BT474, SIGNAL = 8.2; EXPRESSED IN LUNG, SIGNAL = 5.7; EXPRESSED IN HEART, SIGNAL = 7.5; EXPRESSED IN ADULT LIVER, SIGNAL =  11; EXPRESSED IN FETAL LIVER, SIGNAL = 8.6; EXPRESSED IN BRAIN, SIGNAL = 8.8; EXPRESSED IN BONE MARROW, SIGNAL = 8.6; EST_HUMAN HIT: BF526059.1, EVALUE 5.10e+00; NT HIT: AL163207.2, EVALUE 0.00e+00; SWISSPROT HIT: P57600, EVALUE 2.40e+00

SEQ ID NO: 21157 - DNA, 113 bp, Homo sapiens
  MAP TO AF043945.1; EXPRESSED IN BONE MARROW, SIGNAL = 6.7; EXPRESSED IN LUNG, SIGNAL = 6.9; EXPRESSED IN BRAIN, SIGNAL = 6.7; EXPRESSED IN HELA, SIGNAL = 6.5; EXPRESSED IN HEART, SIGNAL = 6.9; EXPRESSED IN PLACENTA, SIGNAL = 7.4; EXPRESSED IN HBL100, SIGNAL = 8.1; EXPRESSED IN ADULT LIVER, SIGNAL =  11; EXPRESSED IN BT474, SIGNAL =   6; EXPRESSED IN FETAL LIVER, SIGNAL =   8; SWISSPROT HIT: P11101, EVALUE 9.00e+00; NT HIT: AL163283.2, EVALUE 2.00e-57; EST_HUMAN HIT: BE146648.1, EVALUE 1.60e-02
ctgtgacacaacagatcacacttcccttcctgaaacaccttcacctggaccgtgcacacctcactctctgggtttccctctgcctcactggcttctccttctcagtgtctttg

SEQ ID NO: 21158 - DNA, 1003 bp, Homo sapiens
  MAP TO AC004702.1; EXPRESSED IN HBL100, SIGNAL = 1.2; EXPRESSED IN PLACENTA, SIGNAL = 0.97; EXPRESSED IN FETAL LIVER, SIGNAL = 2.4; EXPRESSED IN BRAIN, SIGNAL = 3.2; EXPRESSED IN LUNG, SIGNAL = 1.5; EXPRESSED IN BONE MARROW, SIGNAL =   2; EXPRESSED IN HEART, SIGNAL = 1.3; EXPRESSED IN HELA, SIGNAL = 3.7; NT HIT: AB041533.1, EVALUE 0.00e+00; SWISSPROT HIT: P30622, EVALUE 1.00e-10; EST_HUMAN HIT: AW381570.1, EVALUE 0.00e+00
cttggccagcagactggaaacatgtttaatttcaccgtttgcctttagtaattcttgtctgagctcattgcaagacagttccagtagatctttctctgctcgggctactttcaacatttcttgaacttcgcagctctctgccgtctgctccacagcactggcctctgtggctttctgcttctcaccctgcaaatgagacttcaaagatccattctccatttttagcccttccaaggtaactctacactcttccaaagttttggccatcatgttattattatgccgttccagttctagaaactcattcagtttttcattttcttccttcagacgtttaatcatttctaaagctccttggttttcttcctcaaccttccgcaagctacaggtcaactgctgctgaatgttgagtagcttctctctttcaaagcggccctgttcaagaatacctgtgcacttctgctccagttcaataatttttccttcctgagtggtgggctcttcattctttactcgctcttgtaaaagattcatcagcttctcattttcttgacttagctgctctgccctctctcgatgctgatgaaaggatgtctctaaaatcgtcttttcatccaccagcttctcattttcagctgtcaattcctgtaccatttgttgctggtctgataattcttgtagagtagcctgtagttcttctgcagtgctatggtggttttcttccatcttttgtatcttctctgtgagggaagccagggacaattcacttacgctgtttggggaactcccagcagtagaacactttgaactcttaaaggggttactggtggaggacaggggccttgagggtgtctctgctgtaatgtgctcaaagtcggaagcatctggcgacaaagaagctttggtaacatcgctacttgaggagcctgatgtccgtaatgcatttccatgtatgttttttttatactcatcaatgtcactggacatctgatttccagttggg

SEQ ID NO: 21159 - DNA, 323 bp, Homo sapiens
  MAP TO AL121716.2; EXPRESSED IN BT474, SIGNAL = 1.5; EXPRESSED IN FETAL LIVER, SIGNAL = 1.5; EXPRESSED IN BRAIN, SIGNAL = 1.7; EXPRESSED IN BONE MARROW, SIGNAL = 3.4; EXPRESSED IN HBL100, SIGNAL = 1.6; EXPRESSED IN PLACENTA, SIGNAL = 1.2; EXPRESSED IN LUNG, SIGNAL = 2.7; EXPRESSED IN HEART, SIGNAL = 1.5; EXPRESSED IN HELA, SIGNAL = 1.5; EXPRESSED IN ADULT LIVER, SIGNAL = 2.4; NT HIT: Y18930.1, EVALUE 3.10e+00; EST_HUMAN HIT: BE223014.1, EVALUE 8.00e-01; SWISSPROT HIT: Q9Y3R5, EVALUE 3.00e-09
actgtgagcatgtgcagcctccacagtggctccagactctgatgaatgcttgcagccaagcaagtgatttcagtgttcagagtgttgctatttcactagttatggacctggtgggactgacacagtctgtggccatggtcactggggaaaacatcaacagtgtagagcctgcacaacccttaagtccaaaccagggaagagtagctgtggttattagacctcccctcactcagggcaatctgaggtacatagctgagaagactgaatttttcaaggtaaattctaagaaatgcatatatgactatgatgattacagccatgta

SEQ ID NO: 21160 - DNA, 155 bp, Homo sapiens; identical to SEQ ID NO: 18250
  MAP TO AL121749.7; EXPRESSED IN PLACENTA, SIGNAL = 1.8; EXPRESSED IN HELA, SIGNAL = 1.9; EXPRESSED IN ADULT LIVER, SIGNAL = 2.9; EXPRESSED IN BT474, SIGNAL = 1.8; EXPRESSED IN LUNG, SIGNAL = 2.2; EXPRESSED IN BRAIN, SIGNAL =   2; EXPRESSED IN BONE MARROW, SIGNAL = 2.2; EXPRESSED IN HEART, SIGNAL = 1.9; EXPRESSED IN HBL100, SIGNAL = 2.3; EXPRESSED IN FETAL LIVER, SIGNAL = 1.8; EST_HUMAN HIT: AA846457.1, EVALUE 5.30e-01; NT HIT: AJ006755.1, EVALUE 3.00e-01; SWISSPROT HIT: Q99186, EVALUE 1.70e+00

SEQ ID NO: 21161 - DNA, 84 bp, Homo sapiens
  MAP TO AL132778.2; EXPRESSED IN BT474, SIGNAL = 4.5; EXPRESSED IN FETAL LIVER, SIGNAL = 3.7; EXPRESSED IN BRAIN, SIGNAL = 4.4; EXPRESSED IN BONE MARROW, SIGNAL = 4.2; EXPRESSED IN HBL100, SIGNAL = 4.1; EXPRESSED IN PLACENTA, SIGNAL = 3.6; EXPRESSED IN LUNG, SIGNAL = 3.5; EXPRESSED IN HEART, SIGNAL = 2.8; EXPRESSED IN HELA, SIGNAL = 2.8; EXPRESSED IN ADULT LIVER, SIGNAL = 5.3; NT HIT: U31467.1, EVALUE 6.80e-01; EST_HUMAN HIT: AU121619.1, EVALUE 1.00e+00; SWISSPROT HIT: Q14511, EVALUE 9.60e+00
cttggttttctttttttgatctgtgtttttcctgatctcaaagatctctttgtccatcttcccataacagcaccagatgaactg

SEQ ID NO: 21162 - DNA, 174 bp, Homo sapiens
  MAP TO AL121755.4; EXPRESSED IN HELA, SIGNAL = 2.9; EXPRESSED IN ADULT LIVER, SIGNAL =   3; EXPRESSED IN BT474, SIGNAL = 3.1; EXPRESSED IN BRAIN, SIGNAL = 3.6; EXPRESSED IN BONE MARROW, SIGNAL = 3.1; EXPRESSED IN HBL100, SIGNAL = 2.1; EXPRESSED IN HEART, SIGNAL = 3.1; EXPRESSED IN PLACENTA, SIGNAL = 2.9; EXPRESSED IN FETAL LIVER, SIGNAL = 1.8; EXPRESSED IN LUNG, SIGNAL = 3.7; SWISSPROT HIT: O95674, EVALUE 2.00e-26; NT HIT: AF069532.1, EVALUE 4.00e-81; EST_HUMAN HIT: AA040370.1, EVALUE 1.00e-81
ctgtcctatgtgatgtccgggtacagatgctttgtctgccctgtggagtacaacaatgacaccaacagcttcactgtggactgtgagccctcggacctgtttcgcctgcaggagtacaacattcctggggtgatccagtcagtcattggctgggtatgtgccactcacaggggg

SEQ ID NO: 21163 - DNA, 174 bp, Homo sapiens
  MAP TO AP000008.1; EXPRESSED IN PLACENTA, SIGNAL = 1.1; EXPRESSED IN ADULT LIVER, SIGNAL = 1.1; EXPRESSED IN BT474, SIGNAL = 1.1; EXPRESSED IN LUNG, SIGNAL = 1.1; EXPRESSED IN BRAIN, SIGNAL =  12; EXPRESSED IN BONE MARROW, SIGNAL = 1.1; EXPRESSED IN HEART, SIGNAL =   1; EXPRESSED IN HBL100, SIGNAL = 1.2; EXPRESSED IN FETAL LIVER, SIGNAL = 1.2; EST_HUMAN HIT: AU143539.1, EVALUE 5.00e-91; SWISSPROT HIT: Q14807, EVALUE 2.20e+00
gacgcggccgccacggctcaggcacacgcgggcgcccgggggctccgcggccgcgccgcagaaggtgaaggaacagcgcgaggcacgcagccgccgcaccgtggcgcgcacgagctcagccggccggcgaccccagcgcgcccacaggtacaggtagcacagcgtgatgagcat

SEQ ID NO: 21164 - DNA, 1206 bp, Homo sapiens
  MAP TO AC005828.1; EXPRESSED IN FETAL LIVER, SIGNAL = 1.4; EXPRESSED IN LUNG, SIGNAL = 2.4; EXPRESSED IN HBL100, SIGNAL = 1.2; EXPRESSED IN PLACENTA, SIGNAL = 1.3; EXPRESSED IN BT474, SIGNAL = 1.3; EXPRESSED IN BRAIN, SIGNAL =   2; EXPRESSED IN BONE MARROW, SIGNAL = 1.2; EXPRESSED IN HEART, SIGNAL = 1.8; EXPRESSED IN HELA, SIGNAL = 1.9; EST_HUMAN HIT: BF355618.1, EVALUE 0.00e+00; NT HIT: AJ278120.1, EVALUE 0.00e+00; SWISSPROT HIT: P18616, EVALUE 9.10e-02
cagatgcctcagctccctgtggcagttccccagcaagggctcaggctacagcctgccaaggcccagattgtgagaagtaaccagcccagcccagccgtccattcaagcaccgtcatccccacaggagcctatggccaagtagcccattcaatggccagtaaataccagtcttcacaaggagacataggagtcagccagagccggttggtttatcaagggtcaattgggggaatcgtaggggatggaaggccggtgcagcatgtccaagccagcctgagtgcaggcgccatctgtcagcatggaggattgaccaaagaggatcttccacagcgaccttcctcagcataccgaggtggcgtgagatacagccagacaccacagatcggacgcagccagtcagcatcctattacccagtctgtcactcaaaactagatctggagcgctcctccagccaactaggttcccctgatgtgtcgcatttaatcagaagacctatcagtgtcaaccctaacgaaatcaaaccgcacccgccaactcccaggccgttgctgcattcccaaagtgtaggccttcgcttctctccatctagcaatagtatctcctccacctccaacctaactccgaccttccggccatcttcttccatccagcaaatggagatcccactgaaacctgcatatgagaggtcatgtgacgagctgtcgccagtgtctccaactcaaggaggttaccccagtgagcccacccgatccaggaccacaccattcatggggatcatagataaaacagcacggactcagcagtacccccacctccaccagcagaatcggacctgggcagtgtcatctgtggacaccgtcctcagtcccacgtctccaggcaacctgcctcagcctgagtccttcagtccaccatcatccatcagcaacattgccttttataacaaaaccaacaatgcacagaatggccatttgctggaggacgattattacagcccccatgggatgctggctaacgggtctcgtggagacctcttggagcgagtcagccaggcctcctcctatcccgacgtgaaggtagctcggactctacctgtggctcaggcataccaggacaacctgtacaggcagctgtcccgagactctcggcaagggcagacatcccctatcaaaccaaagagaccgttcgtggagtctaatgtttaa

SEQ ID NO: 21165 - DNA, 93 bp, Homo sapiens
  MAP TO AL121758.5; EXPRESSED IN PLACENTA, SIGNAL = 4.6; EXPRESSED IN ADULT LIVER, SIGNAL = 6.2; EXPRESSED IN BRAIN, SIGNAL =   5; EXPRESSED IN LUNG, SIGNAL = 5.5; EXPRESSED IN BONE MARROW, SIGNAL = 5.6; EXPRESSED IN HEART, SIGNAL = 4.4; EXPRESSED IN HELA, SIGNAL = 3.3; EXPRESSED IN HBL100, SIGNAL = 5.1; EXPRESSED IN BT474, SIGNAL =   5; EXPRESSED IN FETAL LIVER, SIGNAL = 5.7; NT HIT: U64028.1, EVALUE 3.00e+00; EST_HUMAN HIT: AI536141.1, EVALUE 3.00e-03
gaccatttcttatgtactgatatagaaagctccctaagatgttttgacaaataagaaaaggaatgtgaaggatagtttctgtaaaagaggaga

SEQ ID NO: 21166 - DNA, 1667 bp, Homo sapiens
  MAP TO AF003625.1; EXPRESSED IN HELA, SIGNAL = 1.2; EXPRESSED IN HBL100, SIGNAL = 1.2; EXPRESSED IN HEART, SIGNAL = 3.9; EXPRESSED IN PLACENTA, SIGNAL = 1.1; EXPRESSED IN ADULT LIVER, SIGNAL = 0.97; EXPRESSED IN FETAL LIVER, SIGNAL =   2; EXPRESSED IN BT474, SIGNAL = 1.2; EXPRESSED IN BRAIN, SIGNAL = 1.3; EXPRESSED IN BONE MARROW, SIGNAL = 1.7; SWISSPROT HIT: Q13585, EVALUE 0.00e+00; NT HIT: gi11420117, EVALUE 0.00e+00
gcaacatcttcgtggtcagtctctctgtggccgatatgctggtggccatctacccataccctttgatgctgcatgccatgtccattgggggctgggatctgagccagttacagtgccagatggtcgggttcatcacagggctgagtgtggtcggctccatcttcaacatcgtggcaatcgctatcaaccgttactgctacatctgccacagcctccagtacgaacggatcttcagtgtgcgcaatacctgcatctacctggtcatcacctggatcatgaccgtcctggctgtcctgcccaacatgtacattggcaccatcgagtacgatcctcgcacctacacctgcatcttcaactatctgaacaaccctgtcttcactgttaccatcgtctgcatccacttcgtcctccctctcctcatcgtgggtttctgctacgtgaggatctggaccaaagtgctggcggcccgtgaccctgcagggcagaatcctgacaaccaacttgctgaggttcgcaattttctaaccatgtttgtgatcttcctcctctttgcagtgtgctggtgccctatcaacgtgctcactgtcttggtggctgtcagtccgaaggagatggcaggcaagatccccaactggctttatcttgcagcctacttcatagcctacttcaacagctgcctcaacgctgtgatctacgggctcctcaatgagaatttccgaagagaatactggaccatcttccatgctatgcggcaccctatcatattcttctctggcctcatcagtgatattcgtgagatgcaggaggcccgtaccctggcccgcgcccgtgcccatgctcgcgaccaagctcgtgaacaagaccgtgcccatgcctgtcctgctgtggaggaaaccccgatgaatgtccggaatgttccattacctggtgatgctgcagctggccaccccgaccgtgcctctggccaccctaagccccattccagatcctcctctgcctatcgcaaatctgcctctacccaccacaagtctgtctttagccactccaaggctgcctctggtcacctcaagcctgtctctggccactccaagcctgcctctggtcaccccaagtctgccactgtctaccctaagcctgcctctgtccatttcaaggctgactctgtccatttcaagggtgactctgtccatttcaagcctgactctgttcatttcaagcctgcttccagcaaccccaagcccatcactggccaccatgtctctgctggcagccactccaagtctgccttcagtgctgccaccagccaccctaaacccaccactggccacatcaagccagctaccagccatgctgagcccaccactgctgactatcccaagcctgccactaccagccaccctaagcccactgctgctgacaaccctgagctctctgcctcccattgccccgagatccctgccattgcccaccctgtgtctgacgacagtgacctccctgagtcggcctctagccctgccgctgggcccaccaagcctgctgccagccagctggagtctgacaccatcgctgaccttcctgaccctactgtagtcactaccagtaccaatgattaccatgatgtcgtggttattgatgttgaagatgatcctgatgaaatggctgtgtga

SEQ ID NO: 21167 - DNA, 266 bp, Homo sapiens
  MAP TO AP000012.2; EXPRESSED IN BT474, SIGNAL = 2.9; EXPRESSED IN FETAL LIVER, SIGNAL = 3.3; EXPRESSED IN BONE MARROW, SIGNAL = 2.8; EXPRESSED IN PLACENTA, SIGNAL = 2.1; EXPRESSED IN BRAIN, SIGNAL = 2.9; EXPRESSED IN LUNG, SIGNAL = 2.7; EXPRESSED IN HEART, SIGNAL = 2.3; EXPRESSED IN HELA, SIGNAL = 1.7; EXPRESSED IN HBL100, SIGNAL = 3.1; EXPRESSED IN ADULT LIVER, SIGNAL = 2.8; EST_HUMAN HIT: AW368167.1, EVALUE 1.00e-120; SWISSPROT HIT: Q63470, EVALUE 5.00e-47; NT HIT: U52373.1, EVALUE 0.00e+00
tgtttcgaaaccatctctgtttagtttttgaaatgctgtcctacaacctctatgacttgctgagaaacaccaatttccgaggggtctctttgaacctaacacgaaagtttgcgcaacagatgtgcactgcactgcttttccttgcgactccagaacttagtatcattcactgtgatctaaaacctgaaaatatccttctttgtaaccccaaacgcagtgcaatcaagatagttgactttggcagttcttgtcagttggggcagagg

SEQ ID NO: 21168 - DNA, 303 bp, Homo sapiens
  MAP TO AL121760.4; EXPRESSED IN ADULT LIVER, SIGNAL = 1.5; EXPRESSED IN BT474, SIGNAL = 1.3; EXPRESSED IN FETAL LIVER, SIGNAL = 1.6; EXPRESSED IN BRAIN, SIGNAL = 1.6; EXPRESSED IN BONE MARROW, SIGNAL = 1.4; EXPRESSED IN HBL100, SIGNAL = 1.6; EXPRESSED IN LUNG, SIGNAL =   1; EXPRESSED IN HEART, SIGNAL = 1.4; EXPRESSED IN HELA, SIGNAL = 1.2; NT HIT: Z35761.1, EVALUE 4.70e-02; SWISSPROT HIT: P14433, EVALUE 2.50e-02; EST_HUMAN HIT: BE885466.1, EVALUE 1.10e+00
acccatgtacatgtgcaagacagagtgaatctcacctgccacgtcctccacttctatcccgcccacctgcgactcacctggatggagaacaggagcatgatccagaccctggtgtcccctcgtcccctcaggccaccagaaatccagatgggacatactctctggagcacacgtggcaggcagaggccacgctggaggagcgtgagtttgcttgctgggtggtccacgatgagcagcccccactcaaggccaacgtcaccctgcaagcccaggtgcgcaggcaggggaaaggtgggtacagcc

SEQ ID NO: 21169 - DNA, 146 bp, Homo sapiens
  MAP TO AL021154.1; EXPRESSED IN FETAL LIVER, SIGNAL = 1.3; EXPRESSED IN ADULT LIVER, SIGNAL = 1.7; EXPRESSED IN LUNG, SIGNAL = 1.2; EXPRESSED IN BONE MARROW, SIGNAL = 1.2; EXPRESSED IN HELA, SIGNAL = 1.3; EXPRESSED IN PLACENTA, SIGNAL = 1.4; EXPRESSED IN BT474, SIGNAL = 1.3; EXPRESSED IN BRAIN, SIGNAL = 1.1; EXPRESSED IN HEART, SIGNAL = 1.6; EXPRESSED IN HBL100, SIGNAL = 1.2; SWISSPROT HIT: O50533, EVALUE 3.00e+00; EST_HUMAN HIT: BF205181.1, EVALUE 8.00e-77; NT HIT: Z48053.1, EVALUE 5.20e+00
caggttcttgaagagcgcagcaacctcgcgggtgaacacggccaagtttaggaagcctgtggacagctcatggctgttctgggacaggtggctgttgcctaaggattccacggcctctcggtactgctcttcattctccacatggc

SEQ ID NO: 21170 - DNA, 157 bp, Homo sapiens
  MAP TO AF067844.1; EXPRESSED IN HEART, SIGNAL = 1.3; EXPRESSED IN BT474, SIGNAL =   1; EXPRESSED IN FETAL LIVER, SIGNAL = 1.1; EXPRESSED IN LUNG, SIGNAL =   1; EXPRESSED IN BONE MARROW, SIGNAL = 1.3; EXPRESSED IN BRAIN, SIGNAL = 0.96; EXPRESSED IN PLACENTA, SIGNAL = 0.94; EXPRESSED IN HBL100, SIGNAL = 0.99; NT HIT: AL161509.2, EVALUE 1.20e+00; SWISSPROT HIT: O13993, EVALUE 2.90e+00
tagaattggagtgtgaatttcttggtgcaggatgggaatgcccagagcttgaggatttagggtttactggcagggctgagatctcttcacactcctactcaagaggcatgactatcttccatcacctcaagaaggttttaactaatgctttcaagat

SEQ ID NO: 21171 - DNA, 147 bp, Homo sapiens
  MAP TO AJ229041.1; EXPRESSED IN HBL100, SIGNAL =  17; EXPRESSED IN HEART, SIGNAL =  15; EXPRESSED IN ADULT LIVER, SIGNAL =  25; EXPRESSED IN FETAL LIVER, SIGNAL =  20; EXPRESSED IN LUNG, SIGNAL =  19; EXPRESSED IN HELA, SIGNAL =  21; EXPRESSED IN PLACENTA, SIGNAL =  22; EXPRESSED IN BT474, SIGNAL =  18; EXPRESSED IN BRAIN, SIGNAL =  16; EXPRESSED IN BONE MARROW, SIGNAL =  17; EST_HUMAN HIT: BE880233.1, EVALUE 1.00e-04; NT HIT: AJ229041.1, EVALUE 1.00e-77
catcttgaaatttaaatgtggtagccagcctccaagatggtcctcagtgatcctcaccttctcatgatattcatgtcctgtgtagcccctatccacgtcgaagcagctggcctgggtgaccactagaacatagagaacatggtggta

SEQ ID NO: 21172 - DNA, 983 bp, Homo sapiens
  MAP TO AC006184.1; EXPRESSED IN BONE MARROW, SIGNAL = 0.94; EXPRESSED IN HELA, SIGNAL = 1.4; EXPRESSED IN HEART, SIGNAL = 1.5; EST_HUMAN HIT: AW378515.1, EVALUE 0.00e+00; SWISSPROT HIT: P50391, EVALUE 0.00e+00; NT HIT: Z66526.1, EVALUE 0.00e+00
  unsure 308
  unsure 309
  unsure 312
  unsure 313
  unsure 314
  unsure 318
  unsure 322
  unsure 659
  unsure 675
  unsure 696
  unsure 720
  unsure 726
  unsure 747
  unsure 867
ttagttcaagagtcctggaatcttttcacatccactatgaacacctctcacctcctggccttgctgctcccaaaatctccacaaggtgaaaacagaagcaaacccctgggcaccccatacaacttctctgaacattgccaggattccgtggacgtgatggtcttcatcgtcacttcctacagcattgagactgtcgtgggggtcctgggtaacctctgcctgatgtgtgtgactgtgaggcagaaggagaaagccaacgtgaccaacctgcttatcgccaacctggccttctctgacttcctcatgtnnctnnnttgncagncggtgaccgccgtctacaccatcatggactactggatctttggagagaccctctgcaagatgtcggccttcatccagtgcatgtcggtgacggtctccatcctctcgctcgtcctcgtggccctggagaggcatcagctcatcatcaacccaacaggctggaagcccagcatctcacaggcctacctggggattgtgctcatctgggtcattgcctgtgtcctctccctgcccttcctggccaacagcatcctggagaatgtcttccacaagaaccactccaaggctctggagttcctggcggataaggtggtctgtaccgagtcctggccactggntcaccaccgcaccatntacaccaccttcctgctcctnttccagtactgcctcccactgggnttcatnttggtctgttatgcacgcatntaccggtgcctgcagaggcaggggcgcgtgtttcacaagggcacctacagcttgcgagctgggcacatgaagcaggtcaatgtggtgctggtggtgatggtggtggcctttgccgtgctntggctgcctctgcatgtgttcaacagcctggaagactggcaccatgaggccatccccatctgccatgggaacctcatcttcttagtgtgccacttgcttgccatggcctccacctg

SEQ ID NO: 21173 - DNA, 428 bp, Homo sapiens
  MAP TO AC007671.5; EXPRESSED IN BRAIN, SIGNAL =   1; EXPRESSED IN FETAL LIVER, SIGNAL = 1.2; EXPRESSED IN BT474, SIGNAL =   1; EXPRESSED IN LUNG, SIGNAL =   1; EXPRESSED IN HEART, SIGNAL = 1.1; EXPRESSED IN BONE MARROW, SIGNAL = 0.96; EST_HUMAN HIT: AU132392.1, EVALUE 0.00e+00; SWISSPROT HIT: Q92185, EVALUE 1.00e-81; NT HIT: L43494.1, EVALUE 0.00e+00
agttacatctacatgcctgccttttctatgaagacaggaacagagccatctttgagggtttattatacactgtcagatgttggtgccaatcaaacagtgctgtttgccaaccccaactttctgcgtagcattggaaagttctggaaaagtagaggaatccatgccaagcgcctgtccacaggactttttctggtgagcgcagctctgggtctctgtgaagaggtggccatctatggcttctggcccttctctgtgaatatgcatgagcagcccatcagccaccactactatgacaacgtcttacccttttctggcttccatgccatgcccgaggaatttctccaactctggtatcttcataaaatcggtgcactgagaatgcagctggacccatgtgaagatacctcactccagcccacttcctagga

SEQ ID NO: 21174 - DNA, 199 bp, Homo sapiens
  MAP TO AL132772.1; EXPRESSED IN HELA, SIGNAL = 6.7; EXPRESSED IN FETAL LIVER, SIGNAL = 1.9; EXPRESSED IN BT474, SIGNAL = 5.1; EXPRESSED IN BRAIN, SIGNAL = 2.2; EXPRESSED IN LUNG, SIGNAL = 2.5; EXPRESSED IN BONE MARROW, SIGNAL = 1.7; EXPRESSED IN PLACENTA, SIGNAL = 2.6; EXPRESSED IN HEART, SIGNAL =   2; EXPRESSED IN HBL100, SIGNAL =   3; EST_HUMAN HIT: BE273328.1, EVALUE 1.80e-01; NT HIT: U72961.1, EVALUE 1.00e-108; SWISSPROT HIT: P41235, EVALUE 2.00e-31
ctgcaggagtacatgtggttcttccgcacgctcctccggaagaagcccttgcagccgtcacagctcgaggcaccgtagtgtttgcccgtggcccggtccccgcagatggcacacagggcgctgacacccaggctgttgggcgcgttgaggttggtgccttctgatggggacgtgtctgcgccaggagagaagggagtga

SEQ ID NO: 21175 - DNA, 158 bp, Homo sapiens
  MAP TO AL121754.8; EXPRESSED IN PLACENTA, SIGNAL = 1.8; EXPRESSED IN HEART, SIGNAL = 1.3; EXPRESSED IN ADULT LIVER, SIGNAL = 1.5; EXPRESSED IN BT474, SIGNAL = 1.7; EXPRESSED IN BONE MARROW, SIGNAL = 1.4; EXPRESSED IN HBL100, SIGNAL = 1.6; EXPRESSED IN FETAL LIVER, SIGNAL = 1.5; EXPRESSED IN BRAIN, SIGNAL = 1.6; EXPRESSED IN LUNG, SIGNAL = 1.7; EXPRESSED IN HELA, SIGNAL = 1.3; NT HIT: gi11421700, EVALUE 1.00e-62; EST_HUMAN HIT: AV750391.1, EVALUE 1.00e-60; SWISSPROT HIT: P37595, EVALUE 5.00e-05
ctgcccaactctccccggatgtttcaaggccaagcctccactggagacagcagcagcaacattcccttcgtggtccacaaccacagcgcctaccgtgtccaaagtgcctgagtcattttcctgcagagcaaaagtggcacaagtattcactaggcatg

SEQ ID NO: 21176 - DNA, 117 bp, Homo sapiens
  MAP TO AL121757.7; EXPRESSED IN BT474, SIGNAL = 1.7; EXPRESSED IN BRAIN, SIGNAL = 1.8; EXPRESSED IN BONE MARROW, SIGNAL = 1.5; EXPRESSED IN LUNG, SIGNAL = 1.3; EXPRESSED IN PLACENTA, SIGNAL = 1.3; EXPRESSED IN HBL100, SIGNAL = 1.5; EXPRESSED IN HEART, SIGNAL = 1.2; EXPRESSED IN FETAL LIVER, SIGNAL = 1.4; EXPRESSED IN ADULT LIVER, SIGNAL = 1.6; EST_HUMAN HIT: AW573183.1, EVALUE 1.70e-02; NT HIT: AF100956.1, EVALUE 4.00e+00
tgtgctgggaggctggctgggatggggagttggtggcagagaatagtgtctgttttcttcctggtagctggagagctctgcgacagaggactgaggtcattaggaacaagcgggcag

SEQ ID NO: 21177 - DNA, 92 bp, Homo sapiens
  MAP TO AF096876.1; EXPRESSED IN BT474, SIGNAL = 1.7; EXPRESSED IN LUNG, SIGNAL = 1.7; EXPRESSED IN BONE MARROW, SIGNAL = 1.4; EXPRESSED IN FETAL LIVER, SIGNAL = 1.7; EXPRESSED IN BRAIN, SIGNAL = 1.1; EXPRESSED IN PLACENTA, SIGNAL = 1.6; EXPRESSED IN HEART, SIGNAL = 1.6; EXPRESSED IN HELA, SIGNAL = 1.7; EXPRESSED IN HBL100, SIGNAL = 1.2; EST_HUMAN HIT: BE614283.1, EVALUE 7.20e-02; NT HIT: AL163252.2, EVALUE 1.00e-23
gtcagagaaagagagagagggagagagagagagagaaggaagagcaagaaaaagaggaagcaagccaggtagagcggtgaatgctgtaatgc

SEQ ID NO: 21178 - DNA, 238 bp, Homo sapiens
  MAP TO AP000014.2; EXPRESSED IN HBL100, SIGNAL = 1.1; EXPRESSED IN PLACENTA, SIGNAL =   1; EXPRESSED IN HEART, SIGNAL = 1.1; EXPRESSED IN BT474, SIGNAL = 1.1; EXPRESSED IN BRAIN, SIGNAL = 1.3; EXPRESSED IN BONE MARROW, SIGNAL = 0.93; SWISSPROT HIT: P48051, EVALUE 1.00e-37; NT HIT: S78684.1, EVALUE 0.00e+00; EST_HUMAN HIT: C18616.1, EVALUE 5.80e-01
aagatatcggtcaggtagcgataggtctccctcacgttgccgtgatgaacattgcactttccgtctttcctcacgtacctctggattttccttttggtccgatctcggctgatgtgtcttggcaggtcatccctggcctgcttaggcaactttggctggtgaatggccactgggctttcgacgtcctgatccatggagtcgccctccaggacgttagctggtggtttggagaaaagaa

SEQ ID NO: 21179 - DNA, 394 bp, Homo sapiens
  MAP TO AJ003147.1; EXPRESSED IN BONE MARROW, SIGNAL = 1.9; EXPRESSED IN PLACENTA, SIGNAL = 1.2; EXPRESSED IN HEART, SIGNAL = 1.9; EXPRESSED IN LUNG, SIGNAL = 1.2; EXPRESSED IN BRAIN, SIGNAL = 1.1; EXPRESSED IN HELA, SIGNAL = 1.1; EXPRESSED IN HBL100, SIGNAL = 1.1; EXPRESSED IN BT474, SIGNAL = 1.4; EXPRESSED IN ADULT LIVER, SIGNAL =   1; EXPRESSED IN FETAL LIVER, SIGNAL = 1.2; NT HIT: AF111163.1, EVALUE 0.00e+00; SWISSPROT HIT: O15553, EVALUE 3.00e-46
cctgaatggctgccctgtggagctcctcggccagcaggcgctggttgatggcccgcaggacctgcagggtgagctgcacggcgtactcttccccatagtaggtgaccagcagagtggccatcttcaccggcctggctctctggatctggctccgggggatcctggagtgctccttctgcacactggtgttctgcagcttgaacttgaacttctcgaagtcatagggcaccagctcctccagggtggacagcagatggtcactaggggtcttagccatggtgctgagcaggagaggctcgagccagctgtctggcttctggtaggaaaagaagcctctgtccttggtgagcaagaaaaggcaggttgtgaaatagcggaaaaggcacaggaaatg

SEQ ID NO: 21180 - DNA, 150 bp, Homo sapiens
  MAP TO AC008169.1; EXPRESSED IN ADULT LIVER, SIGNAL = 1.3; EXPRESSED IN LUNG, SIGNAL = 1.2; EXPRESSED IN HELA, SIGNAL = 1.2; EXPRESSED IN HEART, SIGNAL = 1.4; EXPRESSED IN PLACENTA, SIGNAL = 0.99; EXPRESSED IN BONE MARROW, SIGNAL = 0.92; EXPRESSED IN FETAL LIVER, SIGNAL = 0.93; EXPRESSED IN BRAIN, SIGNAL = 1.4; EXPRESSED IN BT474, SIGNAL = 1.1; EXPRESSED IN HBL100, SIGNAL = 0.95; SWISSPROT HIT: P23501, EVALUE 8.70e+00; EST_HUMAN HIT: N24942.1, EVALUE 4.00e-48; NT HIT: AJ225782.1, EVALUE 8.00e-36
gatgagcaaagaaagtggtctctggagatggaatctactcctggggaagatgctgtgaacattgctgaaattacaacaaaggatttagaacattccataaacttaactgataaagcagtagaagggtttgagaggattgactccaatttt

SEQ ID NO: 21181 - DNA, 381 bp, Homo sapiens
  MAP TO AP000018.2; EXPRESSED IN BT474, SIGNAL = 6.6; EXPRESSED IN BRAIN, SIGNAL = 6.1; EXPRESSED IN BONE MARROW, SIGNAL = 6.5; EXPRESSED IN LUNG, SIGNAL = 5.6; EXPRESSED IN HELA, SIGNAL = 5.6; EXPRESSED IN PLACENTA, SIGNAL = 6.8; EXPRESSED IN HBL100, SIGNAL =   7; EXPRESSED IN HEART, SIGNAL = 5.6; EXPRESSED IN FETAL LIVER, SIGNAL = 5.6; EXPRESSED IN ADULT LIVER, SIGNAL = 7.4; EST_HUMAN HIT: H59044.1, EVALUE 1.40e+00; NT HIT: gi11431015, EVALUE 9.40e-01
ggtagagatggtatgatggcagtatggtggtggcaggaagatgctcatggaggtgacagtaaccatgatggtggaaatggagcaggaggtaaaagttgtgatggaggtaggggtgggggctgtgatggtaatggtaatagtgatggtgatggtggtggtgatggttggtggtggtgatggtggtgatattggtgatggtgttgcctgtgatgctgtggtagtgatgatcatggtggtggtggtggtggtgctaatggtgatggtggtgatggaggtaatgggagtggcagcattggaggtgttgaggaggctggtggtgggaggggaatggttgtgacacagcctctggacaaggcacatagtaaggagggattcatccct

SEQ ID NO: 21182 - DNA, 211 bp, Homo sapiens
  MAP TO AP000022.2; EXPRESSED IN PLACENTA, SIGNAL = 2.5; EXPRESSED IN HBL100, SIGNAL = 2.8; EXPRESSED IN HEART, SIGNAL = 2.2; EXPRESSED IN ADULT LIVER, SIGNAL = 2.2; EXPRESSED IN BT474, SIGNAL = 2.3; EXPRESSED IN BONE MARROW, SIGNAL = 2.7; EXPRESSED IN BRAIN, SIGNAL = 2.7; EXPRESSED IN FETAL LIVER, SIGNAL = 2.3; EXPRESSED IN LUNG, SIGNAL = 2.6; EXPRESSED IN HELA, SIGNAL = 2.2; NT HIT: Y15964.1, EVALUE 1.70e+00; EST_HUMAN HIT: BE272339.1, EVALUE 1.30e-01; SWISSPROT HIT: P32448, EVALUE 9.50e-01
gcaaatatgtcatgatgacatctatgaaatctctgaaattaaagagaagcctgacgtttcacaggaattaaatgaagttgctgcatcacaggtgctccctgccacagggctccgtgtggcagcagcaaacagaactcctcgctgcttaggtgtagtccttaggaatgaaaatctgaacgtagtacgttaaaaaaaaaaatcttcaaaagca

SEQ ID NO: 21183 - DNA, 190 bp, Homo sapiens
  MAP TO AF130417.2; EXPRESSED IN HELA, SIGNAL =   1; EXPRESSED IN HBL100, SIGNAL = 1.1; EXPRESSED IN HEART, SIGNAL = 1.2; EXPRESSED IN LUNG, SIGNAL = 1.1; EXPRESSED IN BONE MARROW, SIGNAL =   1; EST_HUMAN HIT: AW366308.1, EVALUE 2.60e+00; NT HIT: AL161584.2, EVALUE 6.90e+00
ctccacaatttcgtggtggtggtggcaatgatgatgatgaagatgaatgcaaaagtaggcatcagcaaagatattgccatctgagagatcgagattttgaatgtgatactcaactatgcaagtttaaacttgacacaacttgggataaaggtgattctgttttattggttctcagcagctgtgtaagtga

SEQ ID NO: 21184 - DNA, 157 bp, Homo sapiens
  MAP TO AL121879.4; EXPRESSED IN PLACENTA, SIGNAL = 0.94; EXPRESSED IN HEART, SIGNAL = 1.1; EXPRESSED IN ADULT LIVER, SIGNAL = 1.1; EXPRESSED IN FETAL LIVER, SIGNAL = 1.1; EXPRESSED IN BRAIN, SIGNAL =   1; EXPRESSED IN BONE MARROW, SIGNAL =   1; SWISSPROT HIT: P51432, EVALUE 1.30e+00; NT HIT: AL163203.2, EVALUE 3.00e-10; EST_HUMAN HIT: BE071018.1, EVALUE 5.30e-01
ctgaagctgaaaattcccattggcagtggccctgtatttctctggggtggagttccaagagacaactgacagcccatctgccactgcaactgcggcagtgccattcttgttgcctttgggctggcaaaaaacaaacaaacaaaaaaccacaaaggca

SEQ ID NO: 21185 - DNA, 176 bp, Homo sapiens
  MAP TO AC007324.38; EXPRESSED IN BT474, SIGNAL = 1.8; EXPRESSED IN BRAIN, SIGNAL = 3.2; EXPRESSED IN BONE MARROW, SIGNAL = 1.8; EXPRESSED IN LUNG, SIGNAL =   1; EXPRESSED IN HELA, SIGNAL = 1.9; EXPRESSED IN HBL100, SIGNAL = 3.4; EXPRESSED IN PLACENTA, SIGNAL = 1.7; EXPRESSED IN HEART, SIGNAL = 1.6; EXPRESSED IN FETAL LIVER, SIGNAL = 1.9; NT HIT: gi11526303, EVALUE 8.00e-89; SWISSPROT HIT: P09642, EVALUE 9.00e-27; EST_HUMAN HIT: AI700998.1, EVALUE 8.00e-95
caatgcacaaaggcccgcttggcgtacatgaggtcgaacttgtggtcgaggcgggcccaggcctccgcaatggccgtggtgttgctgagcatgcagacggcccgctgcaccttggccaggtctcccccggggaccacggtcgggggctggtagttgatgcccacctgagggacaca

SEQ ID NO: 21186 - DNA, 168 bp, Homo sapiens
  MAP TO AP000070.1; EXPRESSED IN BRAIN, SIGNAL = 1.8; EXPRESSED IN LUNG, SIGNAL = 1.7; EXPRESSED IN HELA, SIGNAL = 2.3; EXPRESSED IN PLACENTA, SIGNAL = 2.3; EXPRESSED IN FETAL LIVER, SIGNAL = 1.9; EXPRESSED IN ADULT LIVER, SIGNAL = 1.1; EXPRESSED IN BT474, SIGNAL = 2.1; EXPRESSED IN BONE MARROW, SIGNAL = 1.4; EXPRESSED IN HEART, SIGNAL = 1.3; EXPRESSED IN HBL100, SIGNAL = 2.4; NT HIT: AF020621.1, EVALUE 2.10e-02; EST_HUMAN HIT: AA086324.1, EVALUE 4.00e-04; SWISSPROT HIT: P39695, EVALUE 1.70e+00
ttaatgagataaatgcctaatttgctgctggtgtaggagtgggggtggtgctgtgaaaactgtggctttcctgatatcagggataatgaaggctggagctgtcttttctcctctgttttccccttgaacatggatacggtgtctggagctgcagcagccatcttgtga

SEQ ID NO: 21187 - DNA, 296 bp, Homo sapiens
  MAP TO AF134726.1; EXPRESSED IN BT474, SIGNAL = 6.9; EXPRESSED IN ADULT LIVER, SIGNAL =  11; EXPRESSED IN BONE MARROW, SIGNAL = 8.2; EXPRESSED IN PLACENTA, SIGNAL = 9.8; EXPRESSED IN FETAL LIVER, SIGNAL =   9; EXPRESSED IN BRAIN, SIGNAL = 6.8; EXPRESSED IN LUNG, SIGNAL = 9.6; EXPRESSED IN HEART, SIGNAL = 7.5; EXPRESSED IN HELA, SIGNAL = 8.1; EXPRESSED IN HBL100, SIGNAL = 9.2; NT HIT: AF109906.1, EVALUE 9.00e-34; EST_HUMAN HIT: AW843993.1, EVALUE 1.00e-130; SWISSPROT HIT: Q03347, EVALUE 3.00e+00
tgccctgggggtggctctggtcttgagcctactgtttatcttgcttctgcgcctggtggctgggcccctggtgctggtgctgatcctgggagtgctgggcgtgctggcatatggcatctactactgctgggaggagtaccgagtgctgcgggacaagggcgcctccatctcccagctgggtttcaccaccaacctcagtgcctaccagagcgtgcaggagacctggctggccgcccgtgagtgtcctgcccacccccaagccaccagctgcccaaggactgccctgggccatgccc

SEQ ID NO: 21188 - DNA, 204 bp, Homo sapiens
  MAP TO AC010175.4; EXPRESSED IN HELA, SIGNAL = 2.5; EXPRESSED IN HEART, SIGNAL = 3.1; EXPRESSED IN FETAL LIVER, SIGNAL =  10; EXPRESSED IN ADULT LIVER, SIGNAL = 2.3; EXPRESSED IN BRAIN, SIGNAL =   2; EXPRESSED IN LUNG, SIGNAL =  12; EXPRESSED IN BONE MARROW, SIGNAL = 1.3; EXPRESSED IN PLACENTA, SIGNAL = 4.5; EXPRESSED IN BT474, SIGNAL = 0.96; EST_HUMAN HIT: AV650913.1, EVALUE 3.00e-65; NT HIT: gi4506354, EVALUE 5.00e-90; SWISSPROT HIT: P20742, EVALUE 4.00e-27
tagttgcagaggtcaggtcccctgaggtgggggctggctgggccgtgagataagcgaggagcacataggatgtcatctccacctcagcagagggagcctgggtttggtaaagatgccccactggtgccttgggtctctgagggcgctcccaatggacgaggttgtcttaagggtgagaaaaaggagataattgtaactcatcaa

SEQ ID NO: 21189 - DNA, 130 bp, Homo sapiens
  MAP TO AC010892.2; EXPRESSED IN BT474, SIGNAL = 2.9; EXPRESSED IN BRAIN, SIGNAL = 3.2; EXPRESSED IN BONE MARROW, SIGNAL = 3.6; EXPRESSED IN LUNG, SIGNAL = 2.8; EXPRESSED IN HELA, SIGNAL = 3.1; EXPRESSED IN PLACENTA, SIGNAL = 2.8; EXPRESSED IN HBL100, SIGNAL = 2.8; EXPRESSED IN HEART, SIGNAL = 2.5; EXPRESSED IN FETAL LIVER, SIGNAL = 3.2; EXPRESSED IN ADULT LIVER, SIGNAL = 3.6; NT HIT: AF280107.1, EVALUE 4.50e+00; EST_HUMAN HIT: AI452999.1, EVALUE 1.90e-02; SWISSPROT HIT: P47837, EVALUE 3.10e+00
tgtcttcacagtattattcccctttttcaaaaaatcttcagtgactaacttcccattcctgatgggagtgaagtccaaacctttgtacatgatgtattgatgaggaaaacagtagctactataaaaaata

SEQ ID NO: 21190 - DNA, 539 bp, Homo sapiens
  MAP TO AC002064.1; EXPRESSED IN BRAIN, SIGNAL = 3.8; EXPRESSED IN LUNG, SIGNAL = 3.2; EXPRESSED IN HELA, SIGNAL = 1.9; EXPRESSED IN PLACENTA, SIGNAL = 2.1; EXPRESSED IN FETAL LIVER, SIGNAL = 2.1; EXPRESSED IN ADULT LIVER, SIGNAL = 2.4; EXPRESSED IN BT474, SIGNAL = 1.7; EXPRESSED IN BONE MARROW, SIGNAL = 1.6; EXPRESSED IN HEART, SIGNAL = 3.3; EXPRESSED IN HBL100, SIGNAL = 2.2; EST_HUMAN HIT: BF672000.1, EVALUE 2.00e+00; NT HIT: U88324.1, EVALUE 1.10e+00; SWISSPROT HIT: P23523, EVALUE 9.10e-01
gatattcttggtgatcttggaagtgtccgtatcatggaatcaatctctatgatgggaagccctaagagccttagtgaaacttttttacctaatggcataaatggtatcaaagatgcaaggaaggtcactgtaggtgtgattggaagtggagattttgccaaatccttgaccattcgacttattagatgcggctatcatgtggtcataggaagtagaaatcctaagtttgcttctgaattttttcctcatgtggtagatgtcactcatcatgaagatgctctcacaaaaacaaatataatatttgttgctatacacagagaacattatacctccctgtgggacctgagacatctgcttgtgggtaaaatcctgattgatgtgagcaataacatgaggataaaccagtacccagaatccaatgctgaatatttggcttcattattcccagattctttgattgtcaaaggatttaatgttgtctcagcttgggcacttcagttaggacctaaggatgccagccggcaggtatgtattttaca

SEQ ID NO: 21191 - DNA, 231 bp, Homo sapiens
  MAP TO AF095703.1; EXPRESSED IN BT474, SIGNAL =   1; EXPRESSED IN ADULT LIVER, SIGNAL =   1; EXPRESSED IN BONE MARROW, SIGNAL = 1.9; EXPRESSED IN LUNG, SIGNAL = 3.2; EXPRESSED IN BRAIN, SIGNAL =   1; EXPRESSED IN PLACENTA, SIGNAL = 1.8; EXPRESSED IN HBL100, SIGNAL = 2.7; EXPRESSED IN HELA, SIGNAL = 2.2; EXPRESSED IN HEART, SIGNAL = 3.2; EXPRESSED IN FETAL LIVER, SIGNAL = 1.7; NT HIT: AF095703.1, EVALUE 2.00e-99; EST_HUMAN HIT: BE883877.1, EVALUE 9.00e-84; SWISSPROT HIT: Q16836, EVALUE 2.00e-23
  unsure 220
  unsure 222
  unsure 224
  unsure 225
gccggcgatgaatttgtggagaagaccctgagcaccatagcgaccagcacggatgcagcctccgttgtccacagcacagacttggtggtggaagccatcgtggagaatctgaaggtgaaaaacgagctcttcaaaaggctggacaagtttgctgctgagtatgtaacctctggacaatcttctcttttttttttttttaacccttatttttgtttttatntntnnttttta

SEQ ID NO: 21192 - DNA, 792 bp, Homo sapiens
  MAP TO AC002346.1; EXPRESSED IN PLACENTA, SIGNAL =  20; EXPRESSED IN HBL100, SIGNAL =   6; EXPRESSED IN HEART, SIGNAL = 5.4; EXPRESSED IN BT474, SIGNAL = 5.9; EXPRESSED IN FETAL LIVER, SIGNAL =   4; EXPRESSED IN ADULT LIVER, SIGNAL = 6.7; EXPRESSED IN BRAIN, SIGNAL = 6.2; EXPRESSED IN BONE MARROW, SIGNAL = 6.3; EXPRESSED IN LUNG, SIGNAL = 3.9; EXPRESSED IN HELA, SIGNAL = 7.2; NT HIT: AF208161.1, EVALUE 0.00e+00; EST_HUMAN HIT: AU138405.1, EVALUE 0.00e+00; SWISSPROT HIT: P10269, EVALUE 2.00e-16
agaaaaacacataaaggaagtaatctcccaactgacctgggtacatagcacccctggcccctacaaaggactagatctctcaaaactacatgaaaccctccatacccatactggcctggtaagcctatttaataccaccctgactgggctccatgaggtctcggcccaaaaccctactaactgttggatgtgcctccccctgcactttaggccatacatttcaatccctatacctgaacaatggaacaacttcagcacagaaataaacaccacttctgttttagtaggtcctctttccaatctggaaataacccatacctcaaacctcacctgtgtaaaatttagcaatactatagacacagccaactcccaatgcatcaggtgggtaactcctcccacacgaatagtctgcctaccctcaggaatattttttgtctgtggtacctcagcctatcattgtttgaatggctcttcagaatctgtgtgcttcctctcattcttagtggcccctatgcccatctacactgaacaagatttatacaatcatgtcatacctaagccccgcaacaaaagagtacccattcttccttttgttattggagcaggagtgctaggcggagtagctactggcattggcggtatcacaacctctactcagttctactacaaactgtctcaagaactaaatggtgacatggaatgggtcgctgataccctggtcaccttgcaagatcaacttaactccctagcagcagtagtccttcaaaatcgaagagctttagacttgctaac

SEQ ID NO: 21193 - DNA, 138 bp, Homo sapiens
  MAP TO AC010491.2; EXPRESSED IN HELA, SIGNAL = 3.5; EXPRESSED IN HBL100, SIGNAL = 3.6; EXPRESSED IN HEART, SIGNAL = 3.2; EXPRESSED IN FETAL LIVER, SIGNAL = 2.9; EXPRESSED IN ADULT LIVER, SIGNAL = 3.3; EXPRESSED IN BONE MARROW, SIGNAL = 3.8; EXPRESSED IN LUNG, SIGNAL = 3.5; EXPRESSED IN PLACENTA, SIGNAL = 3.2; EXPRESSED IN BT474, SIGNAL = 2.8; EXPRESSED IN BRAIN, SIGNAL = 3.1; SWISSPROT HIT: P41163, EVALUE 6.70e+00; EST_HUMAN HIT: AW954734.1, EVALUE 3.00e-63; NT HIT: gi11416196, EVALUE 3.00e-72
ggtcagcagggagatctccggccagtccctgagaggctcctctgggtagcagacttcaaagtctctggagttaaacttgaacagtctgaacacttttatctttacttcaagggagtatccaagtataaacatatcaat

SEQ ID NO: 21194 - DNA, 213 bp, Homo sapiens
  MAP TO AC010906.2; EXPRESSED IN BONE MARROW, SIGNAL =   2; EXPRESSED IN LUNG, SIGNAL = 1.9; EXPRESSED IN HELA, SIGNAL = 2.1; EXPRESSED IN PLACENTA, SIGNAL = 2.1; EXPRESSED IN HBL100, SIGNAL = 2.2; EXPRESSED IN HEART, SIGNAL = 1.9; EXPRESSED IN FETAL LIVER, SIGNAL = 1.8; EXPRESSED IN ADULT LIVER, SIGNAL = 1.9; EXPRESSED IN BT474, SIGNAL = 2.1; EXPRESSED IN BRAIN, SIGNAL = 2.2; NT HIT: L42512.1, EVALUE 2.00e-03; SWISSPROT HIT: P06729, EVALUE 4.40e+00
ttagaagctacagaaatgaaaatggacccatgaccaagagagcacagagcagagataagaagctccctccagcttcctccccgacaattcaacaccctcctccaccacagggagctgagctgtgttcttcaccagcacagcatcatcagccacatcatcaccatcatagtatggagcaagggacccttcctgaaacttggtgggctcagaaat

SEQ ID NO: 21195 - DNA, 105 bp, Homo sapiens
  MAP TO AC010937.2; EXPRESSED IN HBL100, SIGNAL = 4.7; EXPRESSED IN HEART, SIGNAL = 4.2; EXPRESSED IN FETAL LIVER, SIGNAL =   5; EXPRESSED IN BT474, SIGNAL = 5.1; EXPRESSED IN LUNG, SIGNAL = 5.1; EXPRESSED IN PLACENTA, SIGNAL = 4.6; EXPRESSED IN HELA, SIGNAL = 5.2; EXPRESSED IN ADULT LIVER, SIGNAL = 5.6; EXPRESSED IN BRAIN, SIGNAL = 4.9; EXPRESSED IN BONE MARROW, SIGNAL = 4.7; NT HIT: AF134133.1, EVALUE 7.60e-01; EST_HUMAN HIT: AI247505.1, EVALUE 5.80e-02
agtaagaggccccacaaagaaacacaaaaaggcaactgtggtgaacaccaccaggttaccagatgaataccctgtctccccagtcttctagccattttcttaccc

SEQ ID NO: 21196 - DNA, 117 bp, Homo sapiens
  MAP TO AC007859.1; EXPRESSED IN LUNG, SIGNAL = 1.3; EXPRESSED IN HELA, SIGNAL = 1.5; EXPRESSED IN ADULT LIVER, SIGNAL = 1.5; EXPRESSED IN BRAIN, SIGNAL = 1.5; EXPRESSED IN PLACENTA, SIGNAL = 1.1; EXPRESSED IN BT474, SIGNAL = 1.4; EXPRESSED IN BONE MARROW, SIGNAL = 1.5; EXPRESSED IN HEART, SIGNAL = 1.2; EXPRESSED IN HBL100, SIGNAL = 1.2; EXPRESSED IN FETAL LIVER, SIGNAL = 1.3; EST_HUMAN HIT: AA431058.1, EVALUE 3.80e-01
gaaacaccatttctgttcttgcagctggccaacactttggtcccttcagtcttgattatatctattcctttcacatacttgaacttgcccatcatcagttattgttgctatatatat

SEQ ID NO: 21197 - DNA, 2004 bp, Homo sapiens
  MAP TO AC005366.1; EXPRESSED IN BT474, SIGNAL = 1.2; EXPRESSED IN BRAIN, SIGNAL = 4.3; EXPRESSED IN LUNG, SIGNAL = 3.5; EXPRESSED IN HBL100, SIGNAL = 1.8; EXPRESSED IN HELA, SIGNAL = 1.2; EXPRESSED IN PLACENTA, SIGNAL = 2.2; EXPRESSED IN ADULT LIVER, SIGNAL = 1.4; EXPRESSED IN FETAL LIVER, SIGNAL = 1.7; EXPRESSED IN HEART, SIGNAL = 1.9; EST_HUMAN HIT: BF206078.1, EVALUE 0.00e+00; SWISSPROT HIT: P33450, EVALUE 4.00e-61; NT HIT: gi11416576, EVALUE 0.00e+00
cggggctcggtataggtctctagactgcttccacttgtaaactttgaatatgattactccgaacactgtgaccacaaaccccacagaaaccaggattagagaaagaagtagataaaaggtgagattttttttctgctcccggggggcagagccagaggggaactcggctcgggcttcaggagagtcctcggttactgacacagtgagggtagcagtggtggagagcgaaggctccccattgtctttgatcaagaccgtgagagtctgcctgggtgaatctgtgtcttggactggacgggcagtactgatttgaccagtgtgcagccctatggcaaaaaggctctggttaggggatcccaagagactgtaggagagccaggcattgtgccctgcatccgcgtcccagcctaccacccgtgacactaggtggccagctgaggtacctcgaggcagcatctccaccgagctcccacctggccgaggatataggacctggggggcattgtcattgcgatcagtgacaaatatgttcacgctgatgttggtggctaggaccggggtgcccccatcgctgatatgagctgttaattcaaattcccgccgatcctcatagtctaggggcactaaggatgacactatgccattgtcacgatttattgtgaaatagcgacccactagcccggtttcagctccttgctccaagagaaagaaagaaagccgagcattctgcggggcgtcggggtcccagacacttaggtttagtattggagccccggggaggttgttttcttcaatgtaaacgtcgtaggaagattgagaagattgtggagggttgtcattgatgtcggacacttgaacacgcactattgtaagggctgagagggaaggggttccggcgtctcgggcggtgatgctgaggttgtattctggcacagtctcccgatccaggtctgcactggttttcaaagtgaagtaattcttgagggaagaagtaaggctgaaagggagacccggtggaacttcgcaggtcaccagcccgttctcgccagcatccaggtcagtcacactgagcaaagcgatgacagtccccagaggggcatcctcgggtactgggctgtacacggaggtgactgtgatctccggggcgttgtcattcacatccacaacctccaccaacactttgcaatgtgctccttcgggattggcgcccttgtctttggcctggatgtaaatctcatggagtttggtgtcctcgaagtccagccgacccttgattgtcagcatcccggttacaaggtctaaggcgaatagttgccgcacgccggcgcggttgtggctgccgaaggagtaaataatttcaccgttggggccttcatccagatccgttgcaaggacttgtaccacgcgcgtgccggagggtgcatcctccaggacgcgcgcccggtacaaggactggttgaagacaggcgcattgtcattcgcgtccagcaccttgatgtgaataggcaggctggcggagagagctggggtccctccgtccaacgccgtcagcactaactggagactaggctcccgttctcggtccagggcgcgctccaacaccagctccgcgtacttggtgctgtcctcccgcgtctgcacgcgaagcgcaaagtattcatttcggctcagctcataggtttgtaaagagttgcttcccacatcgggatcgtgcgcgctctcgagcggaaagcgcgtccccggagccacggcctcgctaatctccaatttcatttcctgggtagggaaagcaggattgttgtcgttgatgtcctggatcaccacttccacgctgaacagctccagcgggttctccactaccaactccagagttacagtgcaagagggcagtgtcccacacagctcctctcgatccagacggtcgttcacaaacatctctccggtctcccggttcacctcaaagaatcttcggctagctccagacaccacccggaacctgcgggc

SEQ ID NO: 21198 - DNA, 228 bp, Homo sapiens
  MAP TO AJ009612.1; EXPRESSED IN FETAL LIVER, SIGNAL = 2.8; EXPRESSED IN BT474, SIGNAL = 1.9; EXPRESSED IN ADULT LIVER, SIGNAL = 2.3; EXPRESSED IN BRAIN, SIGNAL = 2.1; EXPRESSED IN BONE MARROW, SIGNAL = 1.9; EXPRESSED IN LUNG, SIGNAL = 2.7; EXPRESSED IN HELA, SIGNAL = 2.2; EXPRESSED IN PLACENTA, SIGNAL = 1.8; EXPRESSED IN HBL100, SIGNAL = 2.4; EXPRESSED IN HEART, SIGNAL =   2; SWISSPROT HIT: P49910, EVALUE 5.00e-27; NT HIT: gi11425114, EVALUE 1.00e-125; EST_HUMAN HIT: AW404800.1, EVALUE 7.00e-96
ctgcttcctcgctgctctctggatactgggactttacccaagtcctaacctcaccaggcaggatggtcaggaattgctccagcaccagcagctccaaaatttgttcctttgagtgaatctcaggtctcagccacttaaggcagagctctcggagttgactcaatgcctttcgaggaccagccaggtctgggtatggaaaattcctaaaattctgtcgacaggtctcag

SEQ ID NO: 21199 - DNA, 250 bp, Homo sapiens
  MAP TO AC007275.3; EXPRESSED IN BT474, SIGNAL = 1.6; EXPRESSED IN BONE MARROW, SIGNAL =   1; EXPRESSED IN LUNG, SIGNAL = 0.96; EXPRESSED IN BRAIN, SIGNAL = 1.1; EXPRESSED IN PLACENTA, SIGNAL = 0.85; EXPRESSED IN FETAL LIVER, SIGNAL =   1; EXPRESSED IN HBL100, SIGNAL = 0.92; EXPRESSED IN HELA, SIGNAL = 1.6; EXPRESSED IN ADULT LIVER, SIGNAL = 1.2; EXPRESSED IN HEART, SIGNAL = 0.79; NT HIT: M32788.1, EVALUE 1.00e-41; EST_HUMAN HIT: AA830420.1, EVALUE 8.00e-62; SWISSPROT HIT: P10272, EVALUE 5.00e-27
agctatggatgaggtgaaagcaggtccattatcagaccctatggcagcaggcagcccatattgggggatgatttcattgactaagaacttaactactgtgttagcagtctcattcttggtagcgaatgcctcagtccatccagagaaggtgtctattaatactaaaaggtatttgtactcagccccgtgtggatttacttcagtaaagtcaatttcccacttttctcctggtgagtttccttggagatgg

SEQ ID NO: 21200 - DNA, 610 bp, Homo sapiens
  MAP TO AC003682.1; EXPRESSED IN BONE MARROW, SIGNAL = 1.3; EXPRESSED IN LUNG, SIGNAL = 1.3; EXPRESSED IN BRAIN, SIGNAL = 1.3; EXPRESSED IN HELA, SIGNAL = 1.3; EXPRESSED IN HBL100, SIGNAL = 1.1; EXPRESSED IN PLACENTA, SIGNAL = 2.2; EXPRESSED IN HEART, SIGNAL = 1.4; EXPRESSED IN BT474, SIGNAL =   2; EXPRESSED IN FETAL LIVER, SIGNAL = 1.5; EST_HUMAN HIT: T12762.1, EVALUE 1.00e-90; NT HIT: gi11426542, EVALUE 0.00e+00; SWISSPROT HIT: Q13398, EVALUE 2.00e-43
gttgttggtgtggagtggaacatgaggaaacaccttctgaacagagaatttctggagaaagagtgccacagttcaggacttccaaagaaggttcatcttcccagaatgccgactcctgtgaaatatgttgcctggtcttgagagatattttgcacttggctgaacaccaaggaacaaactgcgggcagaaactacacacatgtggaaaacaattctacatcagtgcaaatcttcaacagcaccagaggcagcacattacagaggcacctttcagaagttatgtggacactgcctcgtttacacagagttgcatagtccatgtgtcggagaaaccctttacctgcagggagatcaggaaagacttcctggccaacatgaggtttctccatcaagacgccactcaaacaggggagaagccaaataacagtaacaagtgtgcggtggccttttacagtggaaaaagtcatcacaactggggaaaatgcagtaaagcctttagccacatagacacacttgttcaggaccagagaatcctcactagagaaggactttttgagtgcagtaaatgtgggaaagcatgtacgcgaagatgtaacctcattcagcacca

SEQ ID NO: 21201 - DNA, 120 bp, Homo sapiens
  MAP TO AC007859.1; EXPRESSED IN PLACENTA, SIGNAL = 0.64; EXPRESSED IN BT474, SIGNAL = 0.62; EXPRESSED IN LUNG, SIGNAL = 0.72; EXPRESSED IN HELA, SIGNAL = 0.72; EXPRESSED IN FETAL LIVER, SIGNAL = 0.66; EXPRESSED IN BONE MARROW, SIGNAL = 0.71; EXPRESSED IN ADULT LIVER, SIGNAL = 0.76; EXPRESSED IN BRAIN, SIGNAL = 0.86; EXPRESSED IN HEART, SIGNAL = 0.92; SWISSPROT HIT: P39123, EVALUE 9.00e+00; EST_HUMAN HIT: AW177201.1, EVALUE 9.90e-02; NT HIT: U60902.1, EVALUE 2.30e-01
aaggcataacttttaagtttattatcttccaagtttatcatcttctgttcgtcttcaacccaatgatcacctattccttcgagaatttttcagaggtgagcaactattcacagttctttg

SEQ ID NO: 21202 - DNA, 124 bp, Homo sapiens
  MAP TO AC010683.2; EXPRESSED IN HELA, SIGNAL = 5.7; EXPRESSED IN HBL100, SIGNAL = 5.8; EXPRESSED IN HEART, SIGNAL = 5.1; EXPRESSED IN FETAL LIVER, SIGNAL = 6.1; EXPRESSED IN LUNG, SIGNAL = 5.3; EXPRESSED IN PLACENTA, SIGNAL = 5.7; EXPRESSED IN BT474, SIGNAL = 6.4; EXPRESSED IN ADULT LIVER, SIGNAL = 8.6; EXPRESSED IN BRAIN, SIGNAL = 6.2; EXPRESSED IN BONE MARROW, SIGNAL = 7.4; SWISSPROT HIT: P54132, EVALUE 2.40e+00; NT HIT: gi5031984, EVALUE 2.30e-01; EST_HUMAN HIT: BE302554.1, EVALUE 4.10e-01
gtcagatacacactgagtccccagtcagagcacacgaaagtctttttcagcttcttcggcatgtagattcttttggaattggacctattaaagaacatcaaccacagtgtctgcaaccaatatg

SEQ ID NO: 21203 - DNA, 175 bp, Homo sapiens
  MAP TO AC007304.11; EXPRESSED IN FETAL LIVER, SIGNAL = 0.97; EXPRESSED IN BT474, SIGNAL = 0.61; EXPRESSED IN BONE MARROW, SIGNAL = 0.86; EXPRESSED IN HBL100, SIGNAL = 1.8; EXPRESSED IN HELA, SIGNAL = 0.99; EXPRESSED IN ADULT LIVER, SIGNAL = 0.76; EXPRESSED IN BRAIN, SIGNAL = 0.95; EXPRESSED IN HEART, SIGNAL = 1.2; EXPRESSED IN PLACENTA, SIGNAL = 0.76; EXPRESSED IN LUNG, SIGNAL = 0.88; NT HIT: X01610.1, EVALUE 1.60e+00; SWISSPROT HIT: Q16676, EVALUE 3.90e+00; EST_HUMAN HIT: AI792349.1, EVALUE 1.00e-01
gacttggaaggctggacacagctccaacaccattccagtaagaacagcttggaggtcaggacctgctgaaagcaaggcaggaagagagcctctgtatcttgaaagcggtgcactgtccttcccatgttctgccgagatggcaagctcacagctaacacgtgcagctgcaacatct

SEQ ID NO: 21204 - DNA, 99 bp, Homo sapiens
  MAP TO AC010099.3; EXPRESSED IN BT474, SIGNAL = 5.5; EXPRESSED IN BRAIN, SIGNAL = 5.9; EXPRESSED IN BONE MARROW, SIGNAL = 6.4; EXPRESSED IN LUNG, SIGNAL = 6.1; EXPRESSED IN HELA, SIGNAL = 5.7; EXPRESSED IN PLACENTA, SIGNAL = 5.6; EXPRESSED IN HBL100, SIGNAL = 5.3; EXPRESSED IN HEART, SIGNAL = 5.1; EXPRESSED IN FETAL LIVER, SIGNAL = 6.6; EXPRESSED IN ADULT LIVER, SIGNAL = 6.6; NT HIT: AF130876.1, EVALUE 8.30e-01; EST_HUMAN HIT: AW814982.1, EVALUE 2.10e-01
cttgttttctagatggaggaactgtgtttaatggtaccaactgttttgtggtgtttttgttgaagaagaggccattcttctcccgatgattattttgga

SEQ ID NO: 21205 - DNA, 141 bp, Homo sapiens
  MAP TO AC010130.3; EXPRESSED IN HBL100, SIGNAL =   2; EXPRESSED IN HEART, SIGNAL = 1.6; EXPRESSED IN FETAL LIVER, SIGNAL = 1.7; EXPRESSED IN BT474, SIGNAL = 1.7; EXPRESSED IN LUNG, SIGNAL = 1.7; EXPRESSED IN PLACENTA, SIGNAL = 1.9; EXPRESSED IN HELA, SIGNAL =   2; EXPRESSED IN ADULT LIVER, SIGNAL = 1.7; EXPRESSED IN BRAIN, SIGNAL = 2.2; EXPRESSED IN BONE MARROW, SIGNAL = 2.1; NT HIT: gi7662183, EVALUE 4.00e-74; SWISSPROT HIT: P37275, EVALUE 8.00e-16; EST_HUMAN HIT: AW384974.1, EVALUE 7.00e-74
tagatgatatgacagactccgactcctgtctgtctcgcaaaaagatcaagaagacagagagtggcatgtatgcatgtgacttatgtgacaagacattccagaaaagcagttcccttctgcgacataaatacgaacacacag

SEQ ID NO: 21206 - DNA, 155 bp, Homo sapiens
  MAP TO AL021579.1; EXPRESSED IN FETAL LIVER, SIGNAL = 1.4; EXPRESSED IN BT474, SIGNAL = 1.1; EXPRESSED IN ADULT LIVER, SIGNAL = 1.2; EXPRESSED IN BRAIN, SIGNAL =   1; EXPRESSED IN BONE MARROW, SIGNAL = 1.1; EXPRESSED IN LUNG, SIGNAL = 1.3; EXPRESSED IN HELA, SIGNAL = 1.6; EXPRESSED IN PLACENTA, SIGNAL = 1.5; EXPRESSED IN HBL100, SIGNAL = 1.1; EXPRESSED IN HEART, SIGNAL = 0.98; NT HIT: AB029019.1, EVALUE 2.00e-82; EST_HUMAN HIT: BE819509.1, EVALUE 4.00e-82; SWISSPROT HIT: Q99445, EVALUE 3.90e+00
caactgtccaacaccaagaacttgccaaggcacaatccggtcttgcctttcagcaaacatcaaatactcagcccattcctatattgtatgaacatcaactggggcaggcatcaggactaggaggttcccagctgattgacacacatcttctccag

SEQ ID NO: 21207 - DNA, 96 bp, Homo sapiens
  MAP TO AL021918.1; EXPRESSED IN BT474, SIGNAL = 1.8; EXPRESSED IN ADULT LIVER, SIGNAL = 1.9; EXPRESSED IN HELA, SIGNAL = 1.9; EXPRESSED IN HBL100, SIGNAL = 1.9; EXPRESSED IN HEART, SIGNAL = 1.9; EXPRESSED IN FETAL LIVER, SIGNAL = 1.6; EXPRESSED IN BRAIN, SIGNAL = 1.7; EXPRESSED IN LUNG, SIGNAL = 1.7; EXPRESSED IN BONE MARROW, SIGNAL = 1.9; EXPRESSED IN PLACENTA, SIGNAL = 2.5; NT HIT: X52936.1, EVALUE 1.70e-01; EST_HUMAN HIT: AV704062.1, EVALUE 3.00e-01
ctttgtctttagaagaaatgatatgtagtaaaaacctgatgggagtggatagcatatcaagctttagtgttaccagttcccagacatggtgggagt

SEQ ID NO: 21208 - DNA, 162 bp, Homo sapiens
  MAP TO AC010149.2; EXPRESSED IN BRAIN, SIGNAL = 1.9; EXPRESSED IN HELA, SIGNAL = 1.8; EXPRESSED IN HBL100, SIGNAL = 1.9; EXPRESSED IN HEART, SIGNAL = 1.8; EXPRESSED IN FETAL LIVER, SIGNAL = 1.5; EXPRESSED IN ADULT LIVER, SIGNAL = 1.9; EXPRESSED IN LUNG, SIGNAL = 1.5; EXPRESSED IN BONE MARROW, SIGNAL = 2.1; EXPRESSED IN PLACENTA, SIGNAL =   2; EXPRESSED IN BT474, SIGNAL = 1.8; SWISSPROT HIT: P09300, EVALUE 8.60e+00; NT HIT: gi4557528, EVALUE 1.50e+00
caagggtgccagagggctgagctgggagccagcaggggaataatgaagaagcacgattcccatggtctggtgcagaccttgtggatgggagctgtactgggtgtttttaagagatactctcactgagggaacagcagtgggttgtgtatcttctagaaggac

SEQ ID NO: 21209 - DNA, 89 bp, Homo sapiens
  MAP TO AL009029.1; EXPRESSED IN BONE MARROW, SIGNAL =   4; EXPRESSED IN HBL100, SIGNAL = 2.5; EXPRESSED IN HEART, SIGNAL = 4.3; EXPRESSED IN FETAL LIVER, SIGNAL = 4.8; EXPRESSED IN BT474, SIGNAL = 3.8; EXPRESSED IN ADULT LIVER, SIGNAL = 4.4; EXPRESSED IN LUNG, SIGNAL = 4.6; EXPRESSED IN BRAIN, SIGNAL = 3.7; EXPRESSED IN PLACENTA, SIGNAL = 5.5; EXPRESSED IN HELA, SIGNAL = 3.9; NT HIT: X54816.1, EVALUE 3.00e-06; SWISSPROT HIT: P19532, EVALUE 2.40e+00; EST_HUMAN HIT: AI650948.1, EVALUE 3.00e-06
tgcagtactcctattccaggagcagccagcaaggagctggcgcctgtgccagcacctggagctgcccaccccaccgcagccaaggtgcc

SEQ ID NO: 21210 - DNA, 518 bp, Homo sapiens
  MAP TO AC010491.2; EXPRESSED IN BONE MARROW, SIGNAL =  31; EXPRESSED IN HELA, SIGNAL =  34; EXPRESSED IN HBL100, SIGNAL =  51; EXPRESSED IN HEART, SIGNAL =  15; EXPRESSED IN BT474, SIGNAL =  44; EXPRESSED IN FETAL LIVER, SIGNAL =  33; EXPRESSED IN LUNG, SIGNAL =  45; EXPRESSED IN PLACENTA, SIGNAL =  60; EXPRESSED IN ADULT LIVER, SIGNAL =   5; EXPRESSED IN BRAIN, SIGNAL =  15; NT HIT: gi11418792, EVALUE 0.00e+00; SWISSPROT HIT: Q90835, EVALUE 2.00e-89; EST_HUMAN HIT: BF183119.1, EVALUE 0.00e+00
attgtcgtcattggacacgtagattcgggcaagtccaccactactggccatctgatctataaatgcagtagcatcgacaaaagaaccattgaaaaatttgagaaggagactgctgagatgggaaagggctctttcaagtatggctgggtcttggataaactgaaagctgagcgtgaacgtggtatcaccattgatatctccttgtggaaatttgagaccagcaagtactatgtgactatcactgatgctccaggacacagagacttcatcaaaaacatgattacagggacatctcaggctgactgtgctgtcccgattgttgctgctggtgttggtgaatttgaagctggtatctctaagaatgggcagacccgagagcatgcccttctggcttacacactgggtgtgaaacaactaattgttggtgttaacaaaatggattccactgagccaccctacagccagaagagatatgaggaaatgtggttaagggaagtcagcacttacattaagaaaat

SEQ ID NO: 21211 - DNA, 183 bp, Homo sapiens
  MAP TO AF009660.1; EXPRESSED IN BT474, SIGNAL =   2; EXPRESSED IN BONE MARROW, SIGNAL = 1.5; EXPRESSED IN BRAIN, SIGNAL = 1.6; EXPRESSED IN LUNG, SIGNAL =   2; EXPRESSED IN HELA, SIGNAL = 1.4; EXPRESSED IN ADULT LIVER, SIGNAL = 1.7; EXPRESSED IN FETAL LIVER, SIGNAL = 1.4; EXPRESSED IN PLACENTA, SIGNAL = 1.8; EXPRESSED IN HEART, SIGNAL = 1.4; EXPRESSED IN HBL100, SIGNAL = 1.2; NT HIT: U47743.1, EVALUE 6.00e-99; SWISSPROT HIT: P01735, EVALUE 3.00e-20; EST_HUMAN HIT: AA917779.1, EVALUE 4.00e-75
tacgcagacaccaagacacctggtcatgggaatgacaaataagaagtctttgaaatgtgaacaacatctggggcataacgctatgtattggtacaagcaaagtgctaagaagccactggagctcatgtttgtctacaactttaaagaacagactgaaaacaacagtgtgccaagtcgcttctc

SEQ ID NO: 21212 - DNA, 220 bp, Homo sapiens
  MAP TO AC010904.2; EXPRESSED IN BRAIN, SIGNAL = 8.5; EXPRESSED IN HELA, SIGNAL =   9; EXPRESSED IN HBL100, SIGNAL = 9.7; EXPRESSED IN HEART, SIGNAL = 8.5; EXPRESSED IN BT474, SIGNAL = 7.8; EXPRESSED IN FETAL LIVER, SIGNAL = 8.4; EXPRESSED IN ADULT LIVER, SIGNAL =   8; EXPRESSED IN LUNG, SIGNAL = 8.6; EXPRESSED IN BONE MARROW, SIGNAL =  10; EXPRESSED IN PLACENTA, SIGNAL = 8.7; EST_HUMAN HIT: BE826165.1, EVALUE 2.00e-01; NT HIT: AL115324.1, EVALUE 4.40e-01; SWISSPROT HIT: P77839, EVALUE 9.40e-01
atgttcgaggcagacacactggactgcccagagactgggctgttgacatgtcgaaagctacttgcatgtctgatggcaagaggagggctgttgcttctcatgtccacaggcccctggacgtgatcatgggtcattctccagagctctcaatgcccaagtgcagtcatgaagagggagccggtgagatgtatccgggttcaatattttccaggagtgcggg

SEQ ID NO: 21213 - DNA, 186 bp, Homo sapiens
  MAP TO AC012458.2; EXPRESSED IN HBL100, SIGNAL =  15; EXPRESSED IN HEART, SIGNAL = 4.6; EXPRESSED IN BT474, SIGNAL =  12; EXPRESSED IN BONE MARROW, SIGNAL = 7.8; EXPRESSED IN BRAIN, SIGNAL =  14; EXPRESSED IN PLACENTA, SIGNAL = 9.5; EXPRESSED IN HELA, SIGNAL =  11; EXPRESSED IN ADULT LIVER, SIGNAL = 2.8; EXPRESSED IN FETAL LIVER, SIGNAL =  11; EXPRESSED IN LUNG, SIGNAL =  11; EST_HUMAN HIT: BF663471.1, EVALUE 2.00e-41; NT HIT: gi6678468, EVALUE 1.00e-41; SWISSPROT HIT: P08070, EVALUE 3.00e-23
gacatcatctgccatagaaatctcaatattgagcacccaacctacactaaccttaactgctttattagccagattgtgccttccatcactgcttccttcagatttgatggagccctgaatattgatctgacggaacctcagaccaatctggtaccctatccccacattcacttccctctgctcaca

SEQ ID NO: 21214 - DNA, 221 bp, Homo sapiens
  MAP TO AC007402.3; EXPRESSED IN ADULT LIVER, SIGNAL = 0.8; EXPRESSED IN HEART, SIGNAL = 0.91; EST_HUMAN HIT: AA326428.1, EVALUE 3.10e+00; NT HIT: AF064564.2, EVALUE 1.10e-01; SWISSPROT HIT: P54452, EVALUE 9.30e-01
tgaacaatcacagtcttttggaccccttgcctcatttattgaccagggagtggcagtgacagttcctgacagttctgctccaggaattctcacactttgtaatgtggacctgaaggagaagattgtgcaaattagccccagaaaaggggaagtatattgggagctgctggaaagggttacctgtggacctcatcaaaatgaagaaaaaaaaaaaagcctac

SEQ ID NO: 21215 - DNA, 125 bp, Homo sapiens
  MAP TO AL022097.1; EXPRESSED IN PLACENTA, SIGNAL = 5.4; EXPRESSED IN HBL100, SIGNAL =  12; EXPRESSED IN HEART, SIGNAL = 4.9; EXPRESSED IN FETAL LIVER, SIGNAL =  13; EXPRESSED IN BT474, SIGNAL = 6.3; EXPRESSED IN ADULT LIVER, SIGNAL = 1.9; EXPRESSED IN BRAIN, SIGNAL = 8.4; EXPRESSED IN BONE MARROW, SIGNAL = 6.5; EXPRESSED IN LUNG, SIGNAL = 8.3; EXPRESSED IN HELA, SIGNAL =  19; NT HIT: gi4504444, EVALUE 4.00e-43; SWISSPROT HIT: P09651, EVALUE 2.40e+00; EST_HUMAN HIT: AA610842.1, EVALUE 8.00e-51
ctactgctgctactggaactgccctagccaccttggtttcatggtttggcaaagtattggcctctaccaccatagggaccagagcttctgcctccaaagtttcctcccttcatgggtccaaaatt

SEQ ID NO: 21216 - DNA, 91 bp, Homo sapiens
  MAP TO AF017104.1; EXPRESSED IN BT474, SIGNAL = 1.4; EXPRESSED IN FETAL LIVER, SIGNAL = 1.9; EXPRESSED IN BONE MARROW, SIGNAL = 1.6; EXPRESSED IN BRAIN, SIGNAL = 1.5; EXPRESSED IN LUNG, SIGNAL = 2.7; EXPRESSED IN HELA, SIGNAL = 1.9; EXPRESSED IN PLACENTA, SIGNAL = 1.7; EXPRESSED IN HBL100, SIGNAL = 1.6; EXPRESSED IN HEART, SIGNAL = 1.8; EXPRESSED IN ADULT LIVER, SIGNAL = 1.8; EST_HUMAN HIT: AW864379.1, EVALUE 2.00e-44; NT HIT: AF146793.2, EVALUE 3.00e+00
ggaaacacagcacattcacaaacatctgaagccaactgcaaggcacccgtcactcagcgagaaaagcagaaaggtgccaattcagatggct

SEQ ID NO: 21217 - DNA, 96 bp, Homo sapiens
  MAP TO AC010941.2; EXPRESSED IN LUNG, SIGNAL = 1.2; EXPRESSED IN BRAIN, SIGNAL = 1.5; EXPRESSED IN BONE MARROW, SIGNAL = 1.8; EXPRESSED IN HELA, SIGNAL = 1.3; EXPRESSED IN HEART, SIGNAL = 1.3; EXPRESSED IN BT474, SIGNAL = 1.3; EXPRESSED IN FETAL LIVER, SIGNAL = 1.5; EXPRESSED IN PLACENTA, SIGNAL = 1.3; EXPRESSED IN HBL100, SIGNAL = 1.4; EXPRESSED IN ADULT LIVER, SIGNAL = 1.6; EST_HUMAN HIT: AV700520.1, EVALUE 4.70e+00; NT HIT: J00762.1, EVALUE 6.80e-01
cagtgcaaagttaaaaggaagaatggtcacacggtgacttcagcgaatatgaacagagagaaagagagagagagagataaaggggataaaaactag

SEQ ID NO: 21218 - DNA, 111 bp, Homo sapiens
  MAP TO AF019413.1; EXPRESSED IN HBL100, SIGNAL = 2.2; EXPRESSED IN HEART, SIGNAL = 2.1; EXPRESSED IN BT474, SIGNAL = 2.3; EXPRESSED IN BONE MARROW, SIGNAL = 2.3; EXPRESSED IN BRAIN, SIGNAL = 2.3; EXPRESSED IN PLACENTA, SIGNAL = 2.4; EXPRESSED IN HELA, SIGNAL = 2.9; EXPRESSED IN ADULT LIVER, SIGNAL = 2.3; EXPRESSED IN FETAL LIVER, SIGNAL = 2.6; EXPRESSED IN LUNG, SIGNAL = 2.8; NT HIT: AF059675.1, EVALUE 3.00e-56; EST_HUMAN HIT: BE618069.1, EVALUE 1.00e-53; SWISSPROT HIT: Q15477, EVALUE 7.00e-06
ctctactcgctgatggtactcaggaagcagcagcaatgactgatccgacagtaggaagcgcagccgctccatctccttctgtatctgcattcgctcccgcagcttcaggta

SEQ ID NO: 21219 - DNA, 121 bp, Homo sapiens
  MAP TO AC011278.3; EXPRESSED IN PLACENTA, SIGNAL = 2.1; EXPRESSED IN FETAL LIVER, SIGNAL =   2; EXPRESSED IN ADULT LIVER, SIGNAL = 2.9; EXPRESSED IN LUNG, SIGNAL = 1.9; EXPRESSED IN HEART, SIGNAL =   2; EXPRESSED IN HELA, SIGNAL = 2.4; EXPRESSED IN HBL100, SIGNAL = 2.3; EXPRESSED IN BT474, SIGNAL = 2.3; EXPRESSED IN BRAIN, SIGNAL = 2.6; EXPRESSED IN BONE MARROW, SIGNAL = 2.9; NT HIT: AF096264.1, EVALUE 5.80e-02; EST_HUMAN HIT: AI525775.1, EVALUE 1.10e+00
atggagtggtaggcatcgtatagtgggtaccatgaagatgagctgctcaatacctgaactttcaaagaagtcaatatccagcatttcctcatactccattagtaagtatggttatatagac

SEQ ID NO: 21220 - DNA, 155 bp, Homo sapiens
  MAP TO AC009941.2; EXPRESSED IN LUNG, SIGNAL = 0.99; EXPRESSED IN HEART, SIGNAL = 1.8; EST_HUMAN HIT: AL047988.1, EVALUE 5.30e-01; NT HIT: U26031.1, EVALUE 7.60e-02
  unsure 4
  unsure 8
  unsure 24
tgangctngaatataagattttantctctttttccttccaagaaaccattaaaatcatagcacaaatttttcataaggcatacatttacaataacaaagaaaataaagaggagaaagctaccaataaaaaaagagtttttaacagatttctagag
